United States Patent Application Publication US 2005/0255487 A1 - sequence listing, part 71

SEQ ID NO: 1949340 - RNA, 19 nt, Homo sapiens
  misc_RNA (1)...(19): siRNA sense strand
ccuuaucacugaagacaga

SEQ ID NO: 1949341 - RNA, 19 nt, Homo sapiens
  misc_RNA (1)...(19): siRNA sense strand
uggcugaaaugccugagaa

SEQ ID NO: 1949342 - RNA, 19 nt, Homo sapiens
  misc_RNA (1)...(19): siRNA sense strand
caacaucagagaauucaca

SEQ ID NO: 1949343 - RNA, 19 nt, Homo sapiens
  misc_RNA (1)...(19): siRNA sense strand
agucagagcacacaucuug

SEQ ID NO: 1949344 - RNA, 19 nt, Homo sapiens
  misc_RNA (1)...(19): siRNA sense strand
caucagagaguucauacug

SEQ ID NO: 1949345 - RNA, 19 nt, Homo sapiens
  misc_RNA (1)...(19): siRNA sense strand
gaacucauacuagaauucu

SEQ ID NO: 1949346 - RNA, 19 nt, Homo sapiens
  misc_RNA (1)...(19): siRNA sense strand
caaugaaugugggaaaucu

SEQ ID NO: 1949347 - RNA, 19 nt, Homo sapiens
  misc_RNA (1)...(19): siRNA sense strand
gaaacccuauaccugcaau

SEQ ID NO: 1949348 - RNA, 19 nt, Homo sapiens
  misc_RNA (1)...(19): siRNA sense strand
gaaaauugguuagagaauc

SEQ ID NO: 1949349 - RNA, 19 nt, Homo sapiens
  misc_RNA (1)...(19): siRNA sense strand
gcuacaacuuggagaaugg

SEQ ID NO: 1949350 - RNA, 19 nt, Homo sapiens
  misc_RNA (1)...(19): siRNA sense strand
agaaacccuuuagauguaa

SEQ ID NO: 1949351 - RNA, 19 nt, Homo sapiens
  misc_RNA (1)...(19): siRNA sense strand
gacagacugacacggaaua

SEQ ID NO: 1949352 - RNA, 19 nt, Homo sapiens
  misc_RNA (1)...(19): siRNA sense strand
gaaacccuaugaguguaau

SEQ ID NO: 1949353 - RNA, 19 nt, Homo sapiens
  misc_RNA (1)...(19): siRNA sense strand
ggauguggccauggacuuu

SEQ ID NO: 1949354 - RNA, 19 nt, Homo sapiens
  misc_RNA (1)...(19): siRNA sense strand
gcacucauuaaacaucaaa

SEQ ID NO: 1949355 - RNA, 19 nt, Homo sapiens
  misc_RNA (1)...(19): siRNA sense strand
agccauugcucaucccuaa

SEQ ID NO: 1949356 - RNA, 19 nt, Homo sapiens
  misc_RNA (1)...(19): siRNA sense strand
ggaaccuagucucacuuug

SEQ ID NO: 1949357 - RNA, 19 nt, Homo sapiens
  misc_RNA (1)...(19): siRNA sense strand
gauguggccauggacuuua

SEQ ID NO: 1949358 - RNA, 19 nt, Homo sapiens
  misc_RNA (1)...(19): siRNA sense strand
caucuuccuucucaacuua

SEQ ID NO: 1949359 - RNA, 19 nt, Homo sapiens
  misc_RNA (1)...(19): siRNA sense strand
caacagaaauacacaaucg

SEQ ID NO: 1949360 - RNA, 19 nt, Homo sapiens
  misc_RNA (1)...(19): siRNA sense strand
cagcugaagucacacauga

SEQ ID NO: 1949361 - RNA, 19 nt, Homo sapiens
  misc_RNA (1)...(19): siRNA sense strand
gagggcagcugaagucaca

SEQ ID NO: 1949362 - RNA, 19 nt, Homo sapiens
  misc_RNA (1)...(19): siRNA sense strand
gaaagaagccaugaucaag

SEQ ID NO: 1949363 - RNA, 19 nt, Homo sapiens
  misc_RNA (1)...(19): siRNA sense strand
ucggucuacuucauaauua

SEQ ID NO: 1949364 - RNA, 19 nt, Homo sapiens
  misc_RNA (1)...(19): siRNA sense strand
aguaugaucuuagcuuuga

SEQ ID NO: 1949365 - RNA, 19 nt, Homo sapiens
  misc_RNA (1)...(19): siRNA sense strand
uuaaacaaguggguaauuc

SEQ ID NO: 1949366 - RNA, 19 nt, Homo sapiens
  misc_RNA (1)...(19): siRNA sense strand
ugaaagaagccaugaucaa

SEQ ID NO: 1949367 - RNA, 19 nt, Homo sapiens
  misc_RNA (1)...(19): siRNA sense strand
gcugaagucacacaugaaa

SEQ ID NO: 1949368 - RNA, 19 nt, Homo sapiens
  misc_RNA (1)...(19): siRNA sense strand
ugaagucacacaugaaaga

SEQ ID NO: 1949369 - RNA, 19 nt, Homo sapiens
  misc_RNA (1)...(19): siRNA sense strand
uauuacugcucaugucauu

SEQ ID NO: 1949370 - RNA, 19 nt, Homo sapiens
  misc_RNA (1)...(19): siRNA sense strand
gaagucacacaugaaagaa

SEQ ID NO: 1949371 - RNA, 19 nt, Homo sapiens
  misc_RNA (1)...(19): siRNA sense strand
cauuaaugcuagaucaugu

SEQ ID NO: 1949372 - RNA, 19 nt, Homo sapiens
  misc_RNA (1)...(19): siRNA sense strand
gccauaccauugucacugu

SEQ ID NO: 1949373 - RNA, 19 nt, Homo sapiens
  misc_RNA (1)...(19): siRNA sense strand
ugucugauuuagaauguga

SEQ ID NO: 1949374 - RNA, 19 nt, Homo sapiens
  misc_RNA (1)...(19): siRNA sense strand
gcuucuucauguaucuuua

SEQ ID NO: 1949375 - RNA, 19 nt, Homo sapiens
  misc_RNA (1)...(19): siRNA sense strand
cauugucacuguauuacug

SEQ ID NO: 1949376 - RNA, 19 nt, Homo sapiens
  misc_RNA (1)...(19): siRNA sense strand
cgucuucucucuccucgau

SEQ ID NO: 1949377 - RNA, 19 nt, Homo sapiens
  misc_RNA (1)...(19): siRNA sense strand
uaccauugucacuguauua

SEQ ID NO: 1949378 - RNA, 19 nt, Homo sapiens
  misc_RNA (1)...(19): siRNA sense strand
ccauaccauugucacugua

SEQ ID NO: 1949379 - RNA, 19 nt, Homo sapiens
  misc_RNA (1)...(19): siRNA sense strand
ucauugcacugguucaucu

SEQ ID NO: 1949380 - RNA, 19 nt, Homo sapiens
  misc_RNA (1)...(19): siRNA sense strand
gcuagaucauguugcucaa

SEQ ID NO: 1949381 - RNA, 19 nt, Homo sapiens
  misc_RNA (1)...(19): siRNA sense strand
gcucugcuucuucauguau

SEQ ID NO: 1949382 - RNA, 19 nt, Homo sapiens
  misc_RNA (1)...(19): siRNA sense strand
ccacuuggaauauauaucg

SEQ ID NO: 1949383 - RNA, 19 nt, Homo sapiens
  misc_RNA (1)...(19): siRNA sense strand
gcucaaaauuaaacaagug

SEQ ID NO: 1949384 - RNA, 19 nt, Homo sapiens
  misc_RNA (1)...(19): siRNA sense strand
cagaauugauuggccauac

SEQ ID NO: 1949385 - RNA, 19 nt, Homo sapiens
  misc_RNA (1)...(19): siRNA sense strand
guugccacuuggaauauau

SEQ ID NO: 1949386 - RNA, 19 nt, Homo sapiens
  misc_RNA (1)...(19): siRNA sense strand
ccuguugccacuuggaaua

SEQ ID NO: 1949387 - RNA, 19 nt, Homo sapiens
  misc_RNA (1)...(19): siRNA sense strand
ucucucuccucgauuguug

SEQ ID NO: 1949388 - RNA, 19 nt, Homo sapiens
  misc_RNA (1)...(19): siRNA sense strand
ccucucggucuacuucaua

SEQ ID NO: 1949389 - RNA, 19 nt, Homo sapiens
  misc_RNA (1)...(19): siRNA sense strand
gccaugaucaagcuugguu

SEQ ID NO: 1949390 - RNA, 19 nt, Homo sapiens
  misc_RNA (1)...(19): siRNA sense strand
ugguucaucuuccuucuca

SEQ ID NO: 1949391 - RNA, 19 nt, Homo sapiens
  misc_RNA (1)...(19): siRNA sense strand
gcacugguucaucuuccuu

SEQ ID NO: 1949392 - RNA, 19 nt, Homo sapiens
  misc_RNA (1)...(19): siRNA sense strand
uagaucauguugcucaaaa

SEQ ID NO: 1949393 - RNA, 19 nt, Homo sapiens
  misc_RNA (1)...(19): siRNA sense strand
ccacuugcucugcuucuuc

SEQ ID NO: 1949394 - RNA, 19 nt, Homo sapiens
  misc_RNA (1)...(19): siRNA sense strand
aagaagccaugaucaagcu

SEQ ID NO: 1949395 - RNA, 19 nt, Homo sapiens
  misc_RNA (1)...(19): siRNA sense strand
ucaucuuccuucucaacuu

SEQ ID NO: 1949396 - RNA, 19 nt, Homo sapiens
  misc_RNA (1)...(19): siRNA sense strand
ucaugucauugcacugguu

SEQ ID NO: 1949397 - RNA, 19 nt, Homo sapiens
  misc_RNA (1)...(19): siRNA sense strand
gaucauguugcucaaaauu

SEQ ID NO: 1949398 - RNA, 19 nt, Homo sapiens
  misc_RNA (1)...(19): siRNA sense strand
gaauugauuggccauacca

SEQ ID NO: 1949399 - RNA, 19 nt, Homo sapiens
  misc_RNA (1)...(19): siRNA sense strand
gcagcugaagucacacaug

SEQ ID NO: 1949400 - RNA, 19 nt, Homo sapiens
  misc_RNA (1)...(19): siRNA sense strand
caaguggguaauuccagaa

SEQ ID NO: 1949401 - RNA, 19 nt, Homo sapiens
  misc_RNA (1)...(19): siRNA sense strand
gauccaacagaaauacaca

SEQ ID NO: 1949402 - RNA, 19 nt, Homo sapiens
  misc_RNA (1)...(19): siRNA sense strand
uguugccacuuggaauaua

SEQ ID NO: 1949403 - RNA, 19 nt, Homo sapiens
  misc_RNA (1)...(19): siRNA sense strand
uugauuggccauaccauug

SEQ ID NO: 1949404 - RNA, 19 nt, Homo sapiens
  misc_RNA (1)...(19): siRNA sense strand
cacuugcucugcuucuuca

SEQ ID NO: 1949405 - RNA, 19 nt, Homo sapiens
  misc_RNA (1)...(19): siRNA sense strand
ucuucucucuccucgauug

SEQ ID NO: 1949406 - RNA, 19 nt, Homo sapiens
  misc_RNA (1)...(19): siRNA sense strand
gaaguucucuacauuauag

SEQ ID NO: 1949407 - RNA, 19 nt, Homo sapiens
  misc_RNA (1)...(19): siRNA sense strand
gaagauuacagucaacaua

SEQ ID NO: 1949408 - RNA, 19 nt, Homo sapiens
  misc_RNA (1)...(19): siRNA sense strand
uagcagagaccaugaauaa

SEQ ID NO: 1949409 - RNA, 19 nt, Homo sapiens
  misc_RNA (1)...(19): siRNA sense strand
gaugaucccuugccugcua

SEQ ID NO: 1949410 - RNA, 19 nt, Homo sapiens
  misc_RNA (1)...(19): siRNA sense strand
uaacagagaacuacagaaa

SEQ ID NO: 1949411 - RNA, 19 nt, Homo sapiens
  misc_RNA (1)...(19): siRNA sense strand
acaaugaguuugaugauga

SEQ ID NO: 1949412 - RNA, 19 nt, Homo sapiens
  misc_RNA (1)...(19): siRNA sense strand
acagagaacuacagaaaga

SEQ ID NO: 1949413 - RNA, 19 nt, Homo sapiens
  misc_RNA (1)...(19): siRNA sense strand
ccaggagacuuuccauuug

SEQ ID NO: 1949414 - RNA, 19 nt, Homo sapiens
  misc_RNA (1)...(19): siRNA sense strand
gcagagaccaugaauaaca

SEQ ID NO: 1949415 - RNA, 19 nt, Homo sapiens
  misc_RNA (1)...(19): siRNA sense strand
gaacgaaggacuauuaaac

SEQ ID NO: 1949416 - RNA, 19 nt, Homo sapiens
  misc_RNA (1)...(19): siRNA sense strand
gcccagcacuagaagauuu

SEQ ID NO: 1949417 - RNA, 19 nt, Homo sapiens
  misc_RNA (1)...(19): siRNA sense strand
gacgaacgaaggacuauua

SEQ ID NO: 1949418 - RNA, 19 nt, Homo sapiens
  misc_RNA (1)...(19): siRNA sense strand
agauguaacucuagagaaa

SEQ ID NO: 1949419 - RNA, 19 nt, Homo sapiens
  misc_RNA (1)...(19): siRNA sense strand
ugagaagaauccacaaaug

SEQ ID NO: 1949420 - RNA, 19 nt, Homo sapiens
  misc_RNA (1)...(19): siRNA sense strand
gugaaguucucuacauuau

SEQ ID NO: 1949421 - RNA, 19 nt, Homo sapiens
  misc_RNA (1)...(19): siRNA sense strand
agacauagcagugacauaa

SEQ ID NO: 1949422 - RNA, 19 nt, Homo sapiens
  misc_RNA (1)...(19): siRNA sense strand
caaaguuauucccaucauu

SEQ ID NO: 1949423 - RNA, 19 nt, Homo sapiens
  misc_RNA (1)...(19): siRNA sense strand
ggaguuugcagccuaaauu

SEQ ID NO: 1949424 - RNA, 19 nt, Homo sapiens
  misc_RNA (1)...(19): siRNA sense strand
caggagacuuuccauuuga

SEQ ID NO: 1949425 - RNA, 19 nt, Homo sapiens
  misc_RNA (1)...(19): siRNA sense strand
gcagugacauaaaucaucu

SEQ ID NO: 1949426 - RNA, 19 nt, Homo sapiens
  misc_RNA (1)...(19): siRNA sense strand
gaagguacucuagcaauga

SEQ ID NO: 1949427 - RNA, 19 nt, Homo sapiens
  misc_RNA (1)...(19): siRNA sense strand
gcaaaguuauucccaucau

SEQ ID NO: 1949428 - RNA, 19 nt, Homo sapiens
  misc_RNA (1)...(19): siRNA sense strand
ggugaaguucucuacauua

SEQ ID NO: 1949429 - RNA, 19 nt, Homo sapiens
  misc_RNA (1)...(19): siRNA sense strand
gaacuuaacagagaacuac

SEQ ID NO: 1949430 - RNA, 19 nt, Homo sapiens
  misc_RNA (1)...(19): siRNA sense strand
gagggaaguuacacugaug

SEQ ID NO: 1949431 - RNA, 19 nt, Homo sapiens
  misc_RNA (1)...(19): siRNA sense strand
ggugguagacuccuucaaa

SEQ ID NO: 1949432 - RNA, 19 nt, Homo sapiens
  misc_RNA (1)...(19): siRNA sense strand
gaaugaggcuuggcucucu

SEQ ID NO: 1949433 - RNA, 19 nt, Homo sapiens
  misc_RNA (1)...(19): siRNA sense strand
gaguuugcagccuaaauua

SEQ ID NO: 1949434 - RNA, 19 nt, Homo sapiens
  misc_RNA (1)...(19): siRNA sense strand
uugaugaacuuaacagaga

SEQ ID NO: 1949435 - RNA, 19 nt, Homo sapiens
  misc_RNA (1)...(19): siRNA sense strand
ugaagguacucuagcaaug

SEQ ID NO: 1949436 - RNA, 19 nt, Homo sapiens
  misc_RNA (1)...(19): siRNA sense strand
gagaagaauccacaaaugg

SEQ ID NO: 1949437 - RNA, 19 nt, Homo sapiens
  misc_RNA (1)...(19): siRNA sense strand
gaaaggccaagggcaaauu

SEQ ID NO: 1949438 - RNA, 19 nt, Homo sapiens
  misc_RNA (1)...(19): siRNA sense strand
cagaaagaaucagaccaaa

SEQ ID NO: 1949439 - RNA, 19 nt, Homo sapiens
  misc_RNA (1)...(19): siRNA sense strand
cagaggauuugcugacuca

SEQ ID NO: 1949440 - RNA, 19 nt, Homo sapiens
  misc_RNA (1)...(19): siRNA sense strand
uaaugaagguacucuagca

SEQ ID NO: 1949441 - RNA, 19 nt, Homo sapiens
  misc_RNA (1)...(19): siRNA sense strand
caaugaguuugaugaugaa

SEQ ID NO: 1949442 - RNA, 19 nt, Homo sapiens
  misc_RNA (1)...(19): siRNA sense strand
gacuaucagugcauccaaa

SEQ ID NO: 1949443 - RNA, 19 nt, Homo sapiens
  misc_RNA (1)...(19): siRNA sense strand
gugguagacuccuucaaau

SEQ ID NO: 1949444 - RNA, 19 nt, Homo sapiens
  misc_RNA (1)...(19): siRNA sense strand
acauagcagugacauaaau

SEQ ID NO: 1949445 - RNA, 19 nt, Homo sapiens
  misc_RNA (1)...(19): siRNA sense strand
ggagacagaagacauagca

SEQ ID NO: 1949446 - RNA, 19 nt, Homo sapiens
  misc_RNA (1)...(19): siRNA sense strand
ggaaauccauaagaaugag

SEQ ID NO: 1949447 - RNA, 19 nt, Homo sapiens
  misc_RNA (1)...(19): siRNA sense strand
gcagcgcauugaugaacuu

SEQ ID NO: 1949448 - RNA, 19 nt, Homo sapiens
  misc_RNA (1)...(19): siRNA sense strand
gcgcauugaugaacuuaac

SEQ ID NO: 1949449 - RNA, 19 nt, Homo sapiens
  misc_RNA (1)...(19): siRNA sense strand
gguagacuccuucaaaucu

SEQ ID NO: 1949450 - RNA, 19 nt, Homo sapiens
  misc_RNA (1)...(19): siRNA sense strand
aauuguggcucuuuggaaa

SEQ ID NO: 1949451 - RNA, 19 nt, Homo sapiens
  misc_RNA (1)...(19): siRNA sense strand
cagagaccaugaauaacau

SEQ ID NO: 1949452 - RNA, 19 nt, Homo sapiens
  misc_RNA (1)...(19): siRNA sense strand
ccaaagggcccagcacuag

SEQ ID NO: 1949453 - RNA, 19 nt, Homo sapiens
  misc_RNA (1)...(19): siRNA sense strand
gagacagaacggugaagaa

SEQ ID NO: 1949454 - RNA, 19 nt, Homo sapiens
  misc_RNA (1)...(19): siRNA sense strand
aaugaaagaaggugaaguu

SEQ ID NO: 1949455 - RNA, 19 nt, Homo sapiens
  misc_RNA (1)...(19): siRNA sense strand
ugacucagaacgcaaaguu

SEQ ID NO: 1949456 - RNA, 19 nt, Homo sapiens
  misc_RNA (1)...(19): siRNA sense strand
gaaagauguauaugagaag

SEQ ID NO: 1949457 - RNA, 19 nt, Homo sapiens
  misc_RNA (1)...(19): siRNA sense strand
guagacuccuucaaaucug

SEQ ID NO: 1949458 - RNA, 19 nt, Homo sapiens
  misc_RNA (1)...(19): siRNA sense strand
agaggagacagaagacaua

SEQ ID NO: 1949459 - RNA, 19 nt, Homo sapiens
  misc_RNA (1)...(19): siRNA sense strand
uccaggagacuuuccauuu

SEQ ID NO: 1949460 - RNA, 19 nt, Homo sapiens
  misc_RNA (1)...(19): siRNA sense strand
ugagggaaguuacacugau

SEQ ID NO: 1949461 - RNA, 19 nt, Homo sapiens
  misc_RNA (1)...(19): siRNA sense strand
uaacauugaccgccuacga

SEQ ID NO: 1949462 - RNA, 19 nt, Homo sapiens
  misc_RNA (1)...(19): siRNA sense strand
gccaaagggcccagcacua

SEQ ID NO: 1949463 - RNA, 19 nt, Homo sapiens
  misc_RNA (1)...(19): siRNA sense strand
ggagacagaacggugaaga

SEQ ID NO: 1949464 - RNA, 19 nt, Homo sapiens
  misc_RNA (1)...(19): siRNA sense strand
ggugacggauggacaagag

SEQ ID NO: 1949465 - RNA, 19 nt, Homo sapiens
  misc_RNA (1)...(19): siRNA sense strand
cacaaugaguuugaugaug

SEQ ID NO: 1949466 - RNA, 19 nt, Homo sapiens
  misc_RNA (1)...(19): siRNA sense strand
gacauagcagugacauaaa

SEQ ID NO: 1949467 - RNA, 19 nt, Homo sapiens
  misc_RNA (1)...(19): siRNA sense strand
ggacuauuaaacucaguga

SEQ ID NO: 1949468 - RNA, 19 nt, Homo sapiens
  misc_RNA (1)...(19): siRNA sense strand
cuagaagauuucagucauc

SEQ ID NO: 1949469 - RNA, 19 nt, Homo sapiens
  misc_RNA (1)...(19): siRNA sense strand
gggcaaauuguggcucuuu

SEQ ID NO: 1949470 - RNA, 19 nt, Homo sapiens
  misc_RNA (1)...(19): siRNA sense strand
gacuuuccauuugaagauu

SEQ ID NO: 1949471 - RNA, 19 nt, Homo sapiens
  misc_RNA (1)...(19): siRNA sense strand
gagaggagacagaagacau

SEQ ID NO: 1949472 - RNA, 19 nt, Homo sapiens
  misc_RNA (1)...(19): siRNA sense strand
cgaaggacuauuaaacuca

SEQ ID NO: 1949473 - RNA, 19 nt, Homo sapiens
  misc_RNA (1)...(19): siRNA sense strand
cagggaguuugcagccuaa

SEQ ID NO: 1949474 - RNA, 19 nt, Homo sapiens
  misc_RNA (1)...(19): siRNA sense strand
acagaaagaaucagaccaa

SEQ ID NO: 1949475 - RNA, 19 nt, Homo sapiens
  misc_RNA (1)...(19): siRNA sense strand
caaagggcccagcacuaga

SEQ ID NO: 1949476 - RNA, 19 nt, Homo sapiens
  misc_RNA (1)...(19): siRNA sense strand
gaagauggaugccaaaacc

SEQ ID NO: 1949477 - RNA, 19 nt, Homo sapiens
  misc_RNA (1)...(19): siRNA sense strand
caagagcucggagacagaa

SEQ ID NO: 1949478 - RNA, 19 nt, Homo sapiens
  misc_RNA (1)...(19): siRNA sense strand
ggacaagagcucggagaca

SEQ ID NO: 1949479 - RNA, 19 nt, Homo sapiens
  misc_RNA (1)...(19): siRNA sense strand
gaaggugaaguucucuaca

SEQ ID NO: 1949480 - RNA, 19 nt, Homo sapiens
  misc_RNA (1)...(19): siRNA sense strand
aagguacucuagcaaugaa

SEQ ID NO: 1949481 - RNA, 19 nt, Homo sapiens
  misc_RNA (1)...(19): siRNA sense strand
augaugaauuugaggauga

SEQ ID NO: 1949482 - RNA, 19 nt, Homo sapiens
  misc_RNA (1)...(19): siRNA sense strand
aggcuuggcucucugaagu

SEQ ID NO: 1949483 - RNA, 19 nt, Homo sapiens
  misc_RNA (1)...(19): siRNA sense strand
ugaugaacuuaacagagaa

SEQ ID NO: 1949484 - RNA, 19 nt, Homo sapiens
  misc_RNA (1)...(19): siRNA sense strand
ggaaaggccaagggcaaau

SEQ ID NO: 1949485 - RNA, 19 nt, Homo sapiens
  misc_RNA (1)...(19): siRNA sense strand
ggaaguuacacugaugaug

SEQ ID NO: 1949486 - RNA, 19 nt, Homo sapiens
  misc_RNA (1)...(19): siRNA sense strand
gacucagaacgcaaaguua

SEQ ID NO: 1949487 - RNA, 19 nt, Homo sapiens
  misc_RNA (1)...(19): siRNA sense strand
gaccaugaauaacauugac

SEQ ID NO: 1949488 - RNA, 19 nt, Homo sapiens
  misc_RNA (1)...(19): siRNA sense strand
cgaacgaaggacuauuaaa

SEQ ID NO: 1949489 - RNA, 19 nt, Homo sapiens
  misc_RNA (1)...(19): siRNA sense strand
cuacagcagcgcauugaug

SEQ ID NO: 1949490 - RNA, 19 nt, Homo sapiens
  misc_RNA (1)...(19): siRNA sense strand
caccagaacagagacguaa

SEQ ID NO: 1949491 - RNA, 19 nt, Homo sapiens
  misc_RNA (1)...(19): siRNA sense strand
aaagggcccagcacuagaa

SEQ ID NO: 1949492 - RNA, 19 nt, Homo sapiens
  misc_RNA (1)...(19): siRNA sense strand
aaggugaaguucucuacau

SEQ ID NO: 1949493 - RNA, 19 nt, Homo sapiens
  misc_RNA (1)...(19): siRNA sense strand
cauaaugaagguacucuag

SEQ ID NO: 1949494 - RNA, 19 nt, Homo sapiens
  misc_RNA (1)...(19): siRNA sense strand
guaacacagggacgagaaa

SEQ ID NO: 1949495 - RNA, 19 nt, Homo sapiens
  misc_RNA (1)...(19): siRNA sense strand
uacagcagcgcauugauga

SEQ ID NO: 1949496 - RNA, 19 nt, Homo sapiens
  misc_RNA (1)...(19): siRNA sense strand
acuagaagauuucagucau

SEQ ID NO: 1949497 - RNA, 19 nt, Homo sapiens
  misc_RNA (1)...(19): siRNA sense strand
guucccacgucauacauag

SEQ ID NO: 1949498 - RNA, 19 nt, Homo sapiens
  misc_RNA (1)...(19): siRNA sense strand
aggugaaguucucuacauu

SEQ ID NO: 1949499 - RNA, 19 nt, Homo sapiens
  misc_RNA (1)...(19): siRNA sense strand
acucagaacgcaaaguuau

SEQ ID NO: 1949500 - RNA, 19 nt, Homo sapiens
  misc_RNA (1)...(19): siRNA sense strand
ccacaaugaguuugaugau

SEQ ID NO: 1949501 - RNA, 19 nt, Homo sapiens
  misc_RNA (1)...(19): siRNA sense strand
ucagaacgcaaaguuauuc

SEQ ID NO: 1949502 - RNA, 19 nt, Homo sapiens
  misc_RNA (1)...(19): siRNA sense strand
gagaacuacagaaagaauc

SEQ ID NO: 1949503 - RNA, 19 nt, Homo sapiens
  misc_RNA (1)...(19): siRNA sense strand
aaacuacagcagcgcauug

SEQ ID NO: 1949504 - RNA, 19 nt, Homo sapiens
  misc_RNA (1)...(19): siRNA sense strand
ggacgaacgaaggacuauu

SEQ ID NO: 1949505 - RNA, 19 nt, Homo sapiens
  misc_RNA (1)...(19): siRNA sense strand
gagacuuuccauuugaaga

SEQ ID NO: 1949506 - RNA, 19 nt, Homo sapiens
  misc_RNA (1)...(19): siRNA sense strand
gaucacaccuuacacagaa

SEQ ID NO: 1949507 - RNA, 19 nt, Homo sapiens
  misc_RNA (1)...(19): siRNA sense strand
gggauggacuuaccagaua

SEQ ID NO: 1949508 - RNA, 19 nt, Homo sapiens
  misc_RNA (1)...(19): siRNA sense strand
agaaauaucucaugugugu

SEQ ID NO: 1949509 - RNA, 19 nt, Homo sapiens
  misc_RNA (1)...(19): siRNA sense strand
ccacacagcuccagucuca

SEQ ID NO: 1949510 - RNA, 19 nt, Homo sapiens
  misc_RNA (1)...(19): siRNA sense strand
gguaaauucuucagccaua

SEQ ID NO: 1949511 - RNA, 19 nt, Homo sapiens
  misc_RNA (1)...(19): siRNA sense strand
ggagaaaucagcucuuauu

SEQ ID NO: 1949512 - RNA, 19 nt, Homo sapiens
  misc_RNA (1)...(19): siRNA sense strand
gaaauguguucaaggagaa

SEQ ID NO: 1949513 - RNA, 19 nt, Homo sapiens
  misc_RNA (1)...(19): siRNA sense strand
gagaaaggccuuauaagug

SEQ ID NO: 1949514 - RNA, 19 nt, Homo sapiens
  misc_RNA (1)...(19): siRNA sense strand
agccauagcuccaaccuua

SEQ ID NO: 1949515 - RNA, 19 nt, Homo sapiens
  misc_RNA (1)...(19): siRNA sense strand
ggagaaaggccuuauaagu

SEQ ID NO: 1949516 - RNA, 19 nt, Homo sapiens
  misc_RNA (1)...(19): siRNA sense strand
gagaaaucagcucuuauua

SEQ ID NO: 1949517 - RNA, 19 nt, Homo sapiens
  misc_RNA (1)...(19): siRNA sense strand
caccagggaucacaccuua

SEQ ID NO: 1949518 - RNA, 19 nt, Homo sapiens
  misc_RNA (1)...(19): siRNA sense strand
ggaaaauucuuuagccaua

SEQ ID NO: 1949519 - RNA, 19 nt, Homo sapiens
  misc_RNA (1)...(19): siRNA sense strand
agccaaagcucccaccuua

SEQ ID NO: 1949520 - RNA, 19 nt, Homo sapiens
  misc_RNA (1)...(19): siRNA sense strand
gggaaagccuauagcagaa

SEQ ID NO: 1949521 - RNA, 19 nt, Homo sapiens
  misc_RNA (1)...(19): siRNA sense strand
agaaaggccuuaugagugu

SEQ ID NO: 1949522 - RNA, 19 nt, Homo sapiens
  misc_RNA (1)...(19): siRNA sense strand
gggaaggcuuacauuagua

SEQ ID NO: 1949523 - RNA, 19 nt, Homo sapiens
  misc_RNA (1)...(19): siRNA sense strand
ggagaaaggccuuaugagu

SEQ ID NO: 1949524 - RNA, 19 nt, Homo sapiens
  misc_RNA (1)...(19): siRNA sense strand
ggagaaaggccuuaugagu

SEQ ID NO: 1949525 - RNA, 19 nt, Homo sapiens
  misc_RNA (1)...(19): siRNA sense strand
ccaaagcucccaccuuauu

SEQ ID NO: 1949526 - RNA, 19 nt, Homo sapiens
  misc_RNA (1)...(19): siRNA sense strand
aaggagaaaucagcucuua

SEQ ID NO: 1949527 - RNA, 19 nt, Homo sapiens
  misc_RNA (1)...(19): siRNA sense strand
caccagagauuucauacug

SEQ ID NO: 1949528 - RNA, 19 nt, Homo sapiens
  misc_RNA (1)...(19): siRNA sense strand
ggaaaauucuuuagccaaa

SEQ ID NO: 1949529 - RNA, 19 nt, Homo sapiens
  misc_RNA (1)...(19): siRNA sense strand
caccagaccacuuacaaua

SEQ ID NO: 1949530 - RNA, 19 nt, Homo sapiens
  misc_RNA (1)...(19): siRNA sense strand
ccgcaacucuggccucauu

SEQ ID NO: 1949531 - RNA, 19 nt, Homo sapiens
  misc_RNA (1)...(19): siRNA sense strand
guggaaauguguucaagga

SEQ ID NO: 1949532 - RNA, 19 nt, Homo sapiens
  misc_RNA (1)...(19): siRNA sense strand
ccauaacucuagccucauu

SEQ ID NO: 1949533 - RNA, 19 nt, Homo sapiens
  misc_RNA (1)...(19): siRNA sense strand
ggagaacuuugcacuugug

SEQ ID NO: 1949534 - RNA, 19 nt, Homo sapiens
  misc_RNA (1)...(19): siRNA sense strand
gaaugugggaaaugcuuua

SEQ ID NO: 1949535 - RNA, 19 nt, Homo sapiens
  misc_RNA (1)...(19): siRNA sense strand
gcaaagacacacuuguuca

SEQ ID NO: 1949536 - RNA, 19 nt, Homo sapiens
  misc_RNA (1)...(19): siRNA sense strand
ggagaaagaccuuaugacu

SEQ ID NO: 1949537 - RNA, 19 nt, Homo sapiens
  misc_RNA (1)...(19): siRNA sense strand
ggaaaugcuuuagccacaa

SEQ ID NO: 1949538 - RNA, 19 nt, Homo sapiens
  misc_RNA (1)...(19): siRNA sense strand
ccagaaagcacacccaugu

SEQ ID NO: 1949539 - RNA, 19 nt, Homo sapiens
  misc_RNA (1)...(19): siRNA sense strand
gcuccaaccuuauuguaca

SEQ ID NO: 1949540 - RNA, 19 nt, Homo sapiens
  misc_RNA (1)...(19): siRNA sense strand
caggagaaaggccuuauaa

SEQ ID NO: 1949541 - RNA, 19 nt, Homo sapiens
  misc_RNA (1)...(19): siRNA sense strand
ggaggaagggauggacuua

SEQ ID NO: 1949542 - RNA, 19 nt, Homo sapiens
  misc_RNA (1)...(19): siRNA sense strand
gcaacauaauggagagaau

SEQ ID NO: 1949543 - RNA, 19 nt, Homo sapiens
  misc_RNA (1)...(19): siRNA sense strand
ggaaaagccuacagcagaa

SEQ ID NO: 1949544 - RNA, 19 nt, Homo sapiens
  misc_RNA (1)...(19): siRNA sense strand
cugaaugcauggagucuuu

SEQ ID NO: 1949545 - RNA, 19 nt, Homo sapiens
  misc_RNA (1)...(19): siRNA sense strand
ccaaggagacuaugaugga

SEQ ID NO: 1949546 - RNA, 19 nt, Homo sapiens
  misc_RNA (1)...(19): siRNA sense strand
ccacaacuccagccucauu

SEQ ID NO: 1949547 - RNA, 19 nt, Homo sapiens
  misc_RNA (1)...(19): siRNA sense strand
agcagaagcucccaucuug

SEQ ID NO: 1949548 - RNA, 19 nt, Homo sapiens
  misc_RNA (1)...(19): siRNA sense strand
gagcacuggagaauucaua

SEQ ID NO: 1949549 - RNA, 19 nt, Homo sapiens
  misc_RNA (1)...(19): siRNA sense strand
gcucacgagugcaacaguu

SEQ ID NO: 1949550 - RNA, 19 nt, Homo sapiens
  misc_RNA (1)...(19): siRNA sense strand
caacauaauggagagaauu

SEQ ID NO: 1949551 - RNA, 19 nt, Homo sapiens
  misc_RNA (1)...(19): siRNA sense strand
ggagcaaggccuuaugugu

SEQ ID NO: 1949552 - RNA, 19 nt, Homo sapiens
  misc_RNA (1)...(19): siRNA sense strand
guaaagacacacuuguuca

SEQ ID NO: 1949553 - RNA, 19 nt, Homo sapiens
  misc_RNA (1)...(19): siRNA sense strand
gaaaagccuucauucacuu

SEQ ID NO: 1949554 - RNA, 19 nt, Homo sapiens
  misc_RNA (1)...(19): siRNA sense strand
gagauuucauacuggagaa

SEQ ID NO: 1949555 - RNA, 19 nt, Homo sapiens
  misc_RNA (1)...(19): siRNA sense strand
gagaaaagccuuacguaug

SEQ ID NO: 1949556 - RNA, 19 nt, Homo sapiens
  misc_RNA (1)...(19): siRNA sense strand
gaaaugcuuuagccacaac

SEQ ID NO: 1949557 - RNA, 19 nt, Homo sapiens
  misc_RNA (1)...(19): siRNA sense strand
ggacaccuuuacucuucuu

SEQ ID NO: 1949558 - RNA, 19 nt, Homo sapiens
  misc_RNA (1)...(19): siRNA sense strand
cagaagcucccaucuuguu

SEQ ID NO: 1949559 - RNA, 19 nt, Homo sapiens
  misc_RNA (1)...(19): siRNA sense strand
ucgaggauguguucgugua

SEQ ID NO: 1949560 - RNA, 19 nt, Homo sapiens
  misc_RNA (1)...(19): siRNA sense strand
gcuguacaguccacauguu

SEQ ID NO: 1949561 - RNA, 19 nt, Homo sapiens
  misc_RNA (1)...(19): siRNA sense strand
ggccuuaugugugcaguga

SEQ ID NO: 1949562 - RNA, 19 nt, Homo sapiens
  misc_RNA (1)...(19): siRNA sense strand
ggaaaagccuucauucacu

SEQ ID NO: 1949563 - RNA, 19 nt, Homo sapiens
  misc_RNA (1)...(19): siRNA sense strand
gcagaaggacugaaugcau

SEQ ID NO: 1949564 - RNA, 19 nt, Homo sapiens
  misc_RNA (1)...(19): siRNA sense strand
gaacaugaggcaccuucug

SEQ ID NO: 1949565 - RNA, 19 nt, Homo sapiens
  misc_RNA (1)...(19): siRNA sense strand
ggagcaagaccuuaugagu

SEQ ID NO: 1949566 - RNA, 19 nt, Homo sapiens
  misc_RNA (1)...(19): siRNA sense strand
ugggaaggcuuacauuagu

SEQ ID NO: 1949567 - RNA, 19 nt, Homo sapiens
  misc_RNA (1)...(19): siRNA sense strand
ggacagaugcuuuucaguu

SEQ ID NO: 1949568 - RNA, 19 nt, Homo sapiens
  misc_RNA (1)...(19): siRNA sense strand
agacuaugauggacagaug

SEQ ID NO: 1949569 - RNA, 19 nt, Homo sapiens
  misc_RNA (1)...(19): siRNA sense strand
cagaagcucccaccuuguu

SEQ ID NO: 1949570 - RNA, 19 nt, Homo sapiens
  misc_RNA (1)...(19): siRNA sense strand
cugcaucucuuaaacuugu

SEQ ID NO: 1949571 - RNA, 19 nt, Homo sapiens
  misc_RNA (1)...(19): siRNA sense strand
ggauggacuuaccagauag

SEQ ID NO: 1949572 - RNA, 19 nt, Homo sapiens
  misc_RNA (1)...(19): siRNA sense strand
cuggagaacuuugcacuug

SEQ ID NO: 1949573 - RNA, 19 nt, Homo sapiens
  misc_RNA (1)...(19): siRNA sense strand
gugaaugugggaaggcuua

SEQ ID NO: 1949574 - RNA, 19 nt, Homo sapiens
  misc_RNA (1)...(19): siRNA sense strand
guucagcaccagauaauuc

SEQ ID NO: 1949575 - RNA, 19 nt, Homo sapiens
  misc_RNA (1)...(19): siRNA sense strand
ccagaccacuuacaauagg

SEQ ID NO: 1949576 - RNA, 19 nt, Homo sapiens
  misc_RNA (1)...(19): siRNA sense strand
gcaaugaaugugggaaaug

SEQ ID NO: 1949577 - RNA, 19 nt, Homo sapiens
  misc_RNA (1)...(19): siRNA sense strand
ggagcaaggccuuaugagu

SEQ ID NO: 1949578 - RNA, 19 nt, Homo sapiens
  misc_RNA (1)...(19): siRNA sense strand
acucuagccucauuaaaca

SEQ ID NO: 1949579 - RNA, 19 nt, Homo sapiens
  misc_RNA (1)...(19): siRNA sense strand
gcaaggcccuaugaaugca

SEQ ID NO: 1949580 - RNA, 19 nt, Homo sapiens
  misc_RNA (1)...(19): siRNA sense strand
gaggugagacccuucagau

SEQ ID NO: 1949581 - RNA, 19 nt, Homo sapiens
  misc_RNA (1)...(19): siRNA sense strand
gugaugugaugcuggagaa

SEQ ID NO: 1949582 - RNA, 19 nt, Homo sapiens
  misc_RNA (1)...(19): siRNA sense strand
gugaguccaugcagaagga

SEQ ID NO: 1949583 - RNA, 19 nt, Homo sapiens
  misc_RNA (1)...(19): siRNA sense strand
gcaccagaccacuuacaau

SEQ ID NO: 1949584 - RNA, 19 nt, Homo sapiens
  misc_RNA (1)...(19): siRNA sense strand
gacagaugcuuuucaguug

SEQ ID NO: 1949585 - RNA, 19 nt, Homo sapiens
  misc_RNA (1)...(19): siRNA sense strand
cuggacaccuuuacucuuc

SEQ ID NO: 1949586 - RNA, 19 nt, Homo sapiens
  misc_RNA (1)...(19): siRNA sense strand
gcagugaaugugggaaauu

SEQ ID NO: 1949587 - RNA, 19 nt, Homo sapiens
  misc_RNA (1)...(19): siRNA sense strand
guucagcaccagagaauuc

SEQ ID NO: 1949588 - RNA, 19 nt, Homo sapiens
  misc_RNA (1)...(19): siRNA sense strand
ccuuaugacugcagugaau

SEQ ID NO: 1949589 - RNA, 19 nt, Homo sapiens
  misc_RNA (1)...(19): siRNA sense strand
gcacuuguggcuacacuag

SEQ ID NO: 1949590 - RNA, 19 nt, Homo sapiens
  misc_RNA (1)...(19): siRNA sense strand
caaagcucccaccuuauug

SEQ ID NO: 1949591 - RNA, 19 nt, Homo sapiens
  misc_RNA (1)...(19): siRNA sense strand
ggaucacaccuuacacaga

SEQ ID NO: 1949592 - RNA, 19 nt, Homo sapiens
  misc_RNA (1)...(19): siRNA sense strand
ccauagcuccaaccuuauu

SEQ ID NO: 1949593 - RNA, 19 nt, Homo sapiens
  misc_RNA (1)...(19): siRNA sense strand
guaaauucuucagccauag

SEQ ID NO: 1949594 - RNA, 19 nt, Homo sapiens
  misc_RNA (1)...(19): siRNA sense strand
ggaaggccuuuggcugcaa

SEQ ID NO: 1949595 - RNA, 19 nt, Homo sapiens
  misc_RNA (1)...(19): siRNA sense strand
cagcaccagagauuucaua

SEQ ID NO: 1949596 - RNA, 19 nt, Homo sapiens
  misc_RNA (1)...(19): siRNA sense strand
gcaacaccaaggagacuau

SEQ ID NO: 1949597 - RNA, 19 nt, Homo sapiens
  misc_RNA (1)...(19): siRNA sense strand
uggagagaauugcuucaga

SEQ ID NO: 1949598 - RNA, 19 nt, Homo sapiens
  misc_RNA (1)...(19): siRNA sense strand
caaugaaugugggaaaugc

SEQ ID NO: 1949599 - RNA, 19 nt, Homo sapiens
  misc_RNA (1)...(19): siRNA sense strand
gaugugugacccacucuug

SEQ ID NO: 1949600 - RNA, 19 nt, Homo sapiens
  misc_RNA (1)...(19): siRNA sense strand
uuagggagauccuuuacgu

SEQ ID NO: 1949601 - RNA, 19 nt, Homo sapiens
  misc_RNA (1)...(19): siRNA sense strand
caccagaagcaacauaaug

SEQ ID NO: 1949602 - RNA, 19 nt, Homo sapiens
  misc_RNA (1)...(19): siRNA sense strand
ggaaggcuuacauuaguag

SEQ ID NO: 1949603 - RNA, 19 nt, Homo sapiens
  misc_RNA (1)...(19): siRNA sense strand
ggagcaaagccuuaugagu

SEQ ID NO: 1949604 - RNA, 19 nt, Homo sapiens
  misc_RNA (1)...(19): siRNA sense strand
auugagcacuggagaauuc

SEQ ID NO: 1949605 - RNA, 19 nt, Homo sapiens
  misc_RNA (1)...(19): siRNA sense strand
ggugugaagcagaacauga

SEQ ID NO: 1949606 - RNA, 19 nt, Homo sapiens
  misc_RNA (1)...(19): siRNA sense strand
gacaacaggucaucucuug

SEQ ID NO: 1949607 - RNA, 19 nt, Homo sapiens
  misc_RNA (1)...(19): siRNA sense strand
gcaagcagcagauagcuaa

SEQ ID NO: 1949608 - RNA, 19 nt, Homo sapiens
  misc_RNA (1)...(19): siRNA sense strand
guaccagacugaucucuug

SEQ ID NO: 1949609 - RNA, 19 nt, Homo sapiens
  misc_RNA (1)...(19): siRNA sense strand
caaaggacgugacacuuca

SEQ ID NO: 1949610 - RNA, 19 nt, Homo sapiens
  misc_RNA (1)...(19): siRNA sense strand
gcaaaggacgugacacuuc

SEQ ID NO: 1949611 - RNA, 19 nt, Homo sapiens
  misc_RNA (1)...(19): siRNA sense strand
gagccugggugacuuugaa

SEQ ID NO: 1949612 - RNA, 19 nt, Homo sapiens
  misc_RNA (1)...(19): siRNA sense strand
ucacgauccuaacaucuuu

SEQ ID NO: 1949613 - RNA, 19 nt, Homo sapiens
  misc_RNA (1)...(19): siRNA sense strand
agacugaucucuugcuuac

SEQ ID NO: 1949614 - RNA, 19 nt, Homo sapiens
  misc_RNA (1)...(19): siRNA sense strand
cagcagauagcuaaggaaa

SEQ ID NO: 1949615 - RNA, 19 nt, Homo sapiens
  misc_RNA (1)...(19): siRNA sense strand
gcagauagcuaaggaaaac

SEQ ID NO: 1949616 - RNA, 19 nt, Homo sapiens
  misc_RNA (1)...(19): siRNA sense strand
ugaccagucugacccuuca

SEQ ID NO: 1949617 - RNA, 19 nt, Homo sapiens
  misc_RNA (1)...(19): siRNA sense strand
ggcuagggcuguccaugug

SEQ ID NO: 1949618 - RNA, 19 nt, Homo sapiens
  misc_RNA (1)...(19): siRNA sense strand
ccagacugaucucuugcuu

SEQ ID NO: 1949619 - RNA, 19 nt, Homo sapiens
  misc_RNA (1)...(19): siRNA sense strand
gguaccacuuugaggaugu

SEQ ID NO: 1949620 - RNA, 19 nt, Homo sapiens
  misc_RNA (1)...(19): siRNA sense strand
gggcuagggcuguccaugu

SEQ ID NO: 1949621 - RNA, 19 nt, Homo sapiens
  misc_RNA (1)...(19): siRNA sense strand
guaccacuuugaggauguu

SEQ ID NO: 1949622 - RNA, 19 nt, Homo sapiens
  misc_RNA (1)...(19): siRNA sense strand
cagacugaucucuugcuua

SEQ ID NO: 1949623 - RNA, 19 nt, Homo sapiens
  misc_RNA (1)...(19): siRNA sense strand
ggacgugacacuucaucag

SEQ ID NO: 1949624 - RNA, 19 nt, Homo sapiens
  misc_RNA (1)...(19): siRNA sense strand
caucuuugguccccaguaa

SEQ ID NO: 1949625 - RNA, 19 nt, Homo sapiens
  misc_RNA (1)...(19): siRNA sense strand
cccggacaaucaagaaguu

SEQ ID NO: 1949626 - RNA, 19 nt, Homo sapiens
  misc_RNA (1)...(19): siRNA sense strand
gcugcgcgguaccacuuug

SEQ ID NO: 1949627 - RNA, 19 nt, Homo sapiens
  misc_RNA (1)...(19): siRNA sense strand
cuguucagccucucaguuu

SEQ ID NO: 1949628 - RNA, 19 nt, Homo sapiens
  misc_RNA (1)...(19): siRNA sense strand
ggcaagcagcagauagcua

SEQ ID NO: 1949629 - RNA, 19 nt, Homo sapiens
  misc_RNA (1)...(19): siRNA sense strand
ggaccagagccugauagug

SEQ ID NO: 1949630 - RNA, 19 nt, Homo sapiens
  misc_RNA (1)...(19): siRNA sense strand
gacaacaggucaucucuug

SEQ ID NO: 1949631 - RNA, 19 nt, Homo sapiens
  misc_RNA (1)...(19): siRNA sense strand
gcaagcagcagauagcuaa

SEQ ID NO: 1949632 - RNA, 19 nt, Homo sapiens
  misc_RNA (1)...(19): siRNA sense strand
guaccagacugaucucuug

SEQ ID NO: 1949633 - RNA, 19 nt, Homo sapiens
  misc_RNA (1)...(19): siRNA sense strand
caaaggacgugacacuuca

SEQ ID NO: 1949634 - RNA, 19 nt, Homo sapiens
  misc_RNA (1)...(19): siRNA sense strand
gcaaaggacgugacacuuc

SEQ ID NO: 1949635 - RNA, 19 nt, Homo sapiens
  misc_RNA (1)...(19): siRNA sense strand
gagccugggugacuuugaa

SEQ ID NO: 1949636 - RNA, 19 nt, Homo sapiens
  misc_RNA (1)...(19): siRNA sense strand
ucacgauccuaacaucuuu

SEQ ID NO: 1949637 - RNA, 19 nt, Homo sapiens
  misc_RNA (1)...(19): siRNA sense strand
agacugaucucuugcuuac

SEQ ID NO: 1949638 - RNA, 19 nt, Homo sapiens
  misc_RNA (1)...(19): siRNA sense strand
cagcagauagcuaaggaaa

SEQ ID NO: 1949639 - RNA, 19 nt, Homo sapiens
  misc_RNA (1)...(19): siRNA sense strand
gcagauagcuaaggaaaac

SEQ ID NO: 1949640 - RNA, 19 nt, Homo sapiens
  misc_RNA (1)...(19): siRNA sense strand
ugaccagucugacccuuca

SEQ ID NO: 1949641 - RNA, 19 nt, Homo sapiens
  misc_RNA (1)...(19): siRNA sense strand
ggcuagggcuguccaugug

SEQ ID NO: 1949642 - RNA, 19 nt, Homo sapiens
  misc_RNA (1)...(19): siRNA sense strand
ccagacugaucucuugcuu

SEQ ID NO: 1949643 - RNA, 19 nt, Homo sapiens
  misc_RNA (1)...(19): siRNA sense strand
gguaccacuuugaggaugu

SEQ ID NO: 1949644 - RNA, 19 nt, Homo sapiens
  misc_RNA (1)...(19): siRNA sense strand
gggcuagggcuguccaugu

SEQ ID NO: 1949645 - RNA, 19 nt, Homo sapiens
  misc_RNA (1)...(19): siRNA sense strand
guaccacuuugaggauguu

SEQ ID NO: 1949646 - RNA, 19 nt, Homo sapiens
  misc_RNA (1)...(19): siRNA sense strand
cagacugaucucuugcuua

SEQ ID NO: 1949647 - RNA, 19 nt, Homo sapiens
  misc_RNA (1)...(19): siRNA sense strand
ggacgugacacuucaucag

SEQ ID NO: 1949648 - RNA, 19 nt, Homo sapiens
  misc_RNA (1)...(19): siRNA sense strand
caucuuugguccccaguaa

SEQ ID NO: 1949649 - RNA, 19 nt, Homo sapiens
  misc_RNA (1)...(19): siRNA sense strand
cccggacaaucaagaaguu

SEQ ID NO: 1949650 - RNA, 19 nt, Homo sapiens
  misc_RNA (1)...(19): siRNA sense strand
gcugcgcgguaccacuuug

SEQ ID NO: 1949651 - RNA, 19 nt, Homo sapiens
  misc_RNA (1)...(19): siRNA sense strand
cuguucagccucucaguuu

SEQ ID NO: 1949652 - RNA, 19 nt, Homo sapiens
  misc_RNA (1)...(19): siRNA sense strand
ggcaagcagcagauagcua

SEQ ID NO: 1949653 - RNA, 19 nt, Homo sapiens
  misc_RNA (1)...(19): siRNA sense strand
ggaccagagccugauagug

SEQ ID NO: 1949654 - RNA, 19 nt, Homo sapiens
  misc_RNA (1)...(19): siRNA sense strand
ggaaugaacuggcauauuu

SEQ ID NO: 1949655 - RNA, 19 nt, Homo sapiens
  misc_RNA (1)...(19): siRNA sense strand
gcacagaccucucaaacuu

SEQ ID NO: 1949656 - RNA, 19 nt, Homo sapiens
  misc_RNA (1)...(19): siRNA sense strand
ucacacagcugaaaguaua

SEQ ID NO: 1949657 - RNA, 19 nt, Homo sapiens
  misc_RNA (1)...(19): siRNA sense strand
gaacagauguaucagaaau

SEQ ID NO: 1949658 - RNA, 19 nt, Homo sapiens
  misc_RNA (1)...(19): siRNA sense strand
gaacagcucuuuagaucug

SEQ ID NO: 1949659 - RNA, 19 nt, Homo sapiens
  misc_RNA (1)...(19): siRNA sense strand
gaaagaaagugauccaaca

SEQ ID NO: 1949660 - RNA, 19 nt, Homo sapiens
  misc_RNA (1)...(19): siRNA sense strand
caucaaaugugaagacuuu

SEQ ID NO: 1949661 - RNA, 19 nt, Homo sapiens
  misc_RNA (1)...(19): siRNA sense strand
gcaagaaaaugcuaaguua

SEQ ID NO: 1949662 - RNA, 19 nt, Homo sapiens
  misc_RNA (1)...(19): siRNA sense strand
gcuaagagaugcccaugaa

SEQ ID NO: 1949663 - RNA, 19 nt, Homo sapiens
  misc_RNA (1)...(19): siRNA sense strand
aaacagaacaguacacaua

SEQ ID NO: 1949664 - RNA, 19 nt, Homo sapiens
  misc_RNA (1)...(19): siRNA sense strand
caucugaaaucacaaguuu

SEQ ID NO: 1949665 - RNA, 19 nt, Homo sapiens
  misc_RNA (1)...(19): siRNA sense strand
gaucaacgauuucagacaa

SEQ ID NO: 1949666 - RNA, 19 nt, Homo sapiens
  misc_RNA (1)...(19): siRNA sense strand
aaauauaacugcccagaaa

SEQ ID NO: 1949667 - RNA, 19 nt, Homo sapiens
  misc_RNA (1)...(19): siRNA sense strand
gggagcaccucuuccuuua

SEQ ID NO: 1949668 - RNA, 19 nt, Homo sapiens
  misc_RNA (1)...(19): siRNA sense strand
gaaaauaaguccuacagaa

SEQ ID NO: 1949669 - RNA, 19 nt, Homo sapiens
  misc_RNA (1)...(19): siRNA sense strand
guaaagacauuaacugaag

SEQ ID NO: 1949670 - RNA, 19 nt, Homo sapiens
  misc_RNA (1)...(19): siRNA sense strand
aaacauaucugccaacaag

SEQ ID NO: 1949671 - RNA, 19 nt, Homo sapiens
  misc_RNA (1)...(19): siRNA sense strand
ggaaaugcaugaaaagaua

SEQ ID NO: 1949672 - RNA, 19 nt, Homo sapiens
  misc_RNA (1)...(19): siRNA sense strand
cuaaugaacucacuaaaca

SEQ ID NO: 1949673 - RNA, 19 nt, Homo sapiens
  misc_RNA (1)...(19): siRNA sense strand
gaaagagcaucaugacaag

SEQ ID NO: 1949674 - RNA, 19 nt, Homo sapiens
  misc_RNA (1)...(19): siRNA sense strand
gaagaacacauaaaggaaa

SEQ ID NO: 1949675 - RNA, 19 nt, Homo sapiens
  misc_RNA (1)...(19): siRNA sense strand
gaaaaggucgagaaaauua

SEQ ID NO: 1949676 - RNA, 19 nt, Homo sapiens
  misc_RNA (1)...(19): siRNA sense strand
gaaaagauaucucgaaugg

SEQ ID NO: 1949677 - RNA, 19 nt, Homo sapiens
  misc_RNA (1)...(19): siRNA sense strand
ggcagaagcuaaugcauug

SEQ ID NO: 1949678 - RNA, 19 nt, Homo sapiens
  misc_RNA (1)...(19): siRNA sense strand
ucagugagcuggagacaga

SEQ ID NO: 1949679 - RNA, 19 nt, Homo sapiens
  misc_RNA (1)...(19): siRNA sense strand
uagaagaguucaccacauu

SEQ ID NO: 1949680 - RNA, 19 nt, Homo sapiens
  misc_RNA (1)...(19): siRNA sense strand
ugaagcaauugcaguauaa

SEQ ID NO: 1949681 - RNA, 19 nt, Homo sapiens
  misc_RNA (1)...(19): siRNA sense strand
acaagaagguaucaauuga

SEQ ID NO: 1949682 - RNA, 19 nt, Homo sapiens
  misc_RNA (1)...(19): siRNA sense strand
uuacuaaucuucaggauca

SEQ ID NO: 1949683 - RNA, 19 nt, Homo sapiens
  misc_RNA (1)...(19): siRNA sense strand
gaauuagcauugcaaagug

SEQ ID NO: 1949684 - RNA, 19 nt, Homo sapiens
  misc_RNA (1)...(19): siRNA sense strand
gcaaguauccgaucaacga

SEQ ID NO: 1949685 - RNA, 19 nt, Homo sapiens
  misc_RNA (1)...(19): siRNA sense strand
gagaaggcacuacaacuaa

SEQ ID NO: 1949686 - RNA, 19 nt, Homo sapiens
  misc_RNA (1)...(19): siRNA sense strand
gagaaaaggucgagaaaau

SEQ ID NO: 1949687 - RNA, 19 nt, Homo sapiens
  misc_RNA (1)...(19): siRNA sense strand
ggagagggauauaacuaug

SEQ ID NO: 1949688 - RNA, 19 nt, Homo sapiens
  misc_RNA (1)...(19): siRNA sense strand
gugaagacuuugaaauuug

SEQ ID NO: 1949689 - RNA, 19 nt, Homo sapiens
  misc_RNA (1)...(19): siRNA sense strand
gguaacauuuccacggaua

SEQ ID NO: 1949690 - RNA, 19 nt, Homo sapiens
  misc_RNA (1)...(19): siRNA sense strand
gagaaaagcugaaagaaag

SEQ ID NO: 1949691 - RNA, 19 nt, Homo sapiens
  misc_RNA (1)...(19): siRNA sense strand
gauagaggacuugaaauuu

SEQ ID NO: 1949692 - RNA, 19 nt, Homo sapiens
  misc_RNA (1)...(19): siRNA sense strand
gaagaaaauucccagguaa

SEQ ID NO: 1949693 - RNA, 19 nt, Homo sapiens
  misc_RNA (1)...(19): siRNA sense strand
ccaaagaguugcaaaauga

SEQ ID NO: 1949694 - RNA, 19 nt, Homo sapiens
  misc_RNA (1)...(19): siRNA sense strand
aaacagucaucaaauguga

SEQ ID NO: 1949695 - RNA, 19 nt, Homo sapiens
  misc_RNA (1)...(19): siRNA sense strand
cgaaagagcaucaugacaa

SEQ ID NO: 1949696 - RNA, 19 nt, Homo sapiens
  misc_RNA (1)...(19): siRNA sense strand
ucacuaaagcaaagacuua

SEQ ID NO: 1949697 - RNA, 19 nt, Homo sapiens
  misc_RNA (1)...(19): siRNA sense strand
gcaauugcaguauaaacua

SEQ ID NO: 1949698 - RNA, 19 nt, Homo sapiens
  misc_RNA (1)...(19): siRNA sense strand
ggagaaaucacaccaguca

SEQ ID NO: 1949699 - RNA, 19 nt, Homo sapiens
  misc_RNA (1)...(19): siRNA sense strand
gaagaaggcaguggcauga

SEQ ID NO: 1949700 - RNA, 19 nt, Homo sapiens
  misc_RNA (1)...(19): siRNA sense strand
ggaaauauuagacacagaa

SEQ ID NO: 1949701 - RNA, 19 nt, Homo sapiens
  misc_RNA (1)...(19): siRNA sense strand
gagcuagaacagauaauaa

SEQ ID NO: 1949702 - RNA, 19 nt, Homo sapiens
  misc_RNA (1)...(19): siRNA sense strand
gaagugcaauggcgcaauc

SEQ ID NO: 1949703 - RNA, 19 nt, Homo sapiens
  misc_RNA (1)...(19): siRNA sense strand
gcugaaaucuuuugagaaa

SEQ ID NO: 1949704 - RNA, 19 nt, Homo sapiens
  misc_RNA (1)...(19): siRNA sense strand
caacaagaagguaucaauu

SEQ ID NO: 1949705 - RNA, 19 nt, Homo sapiens
  misc_RNA (1)...(19): siRNA sense strand
aaagaagaauugcaagaug

SEQ ID NO: 1949706 - RNA, 19 nt, Homo sapiens
  misc_RNA (1)...(19): siRNA sense strand
gaagacagccaaacacaag

SEQ ID NO: 1949707 - RNA, 19 nt, Homo sapiens
  misc_RNA (1)...(19): siRNA sense strand
caacuaaagagccaagaaa

SEQ ID NO: 1949708 - RNA, 19 nt, Homo sapiens
  misc_RNA (1)...(19): siRNA sense strand
cacagaagaucaaguggaa

SEQ ID NO: 1949709 - RNA, 19 nt, Homo sapiens
  misc_RNA (1)...(19): siRNA sense strand
gaagaguucaccacauuug

SEQ ID NO: 1949710 - RNA, 19 nt, Homo sapiens
  misc_RNA (1)...(19): siRNA sense strand
gcaaaguguuacuaaucuu

SEQ ID NO: 1949711 - RNA, 19 nt, Homo sapiens
  misc_RNA (1)...(19): siRNA sense strand
ucacuaaacagucaucaaa

SEQ ID NO: 1949712 - RNA, 19 nt, Homo sapiens
  misc_RNA (1)...(19): siRNA sense strand
ccaacaacuucgacaagaa

SEQ ID NO: 1949713 - RNA, 19 nt, Homo sapiens
  misc_RNA (1)...(19): siRNA sense strand
gaagaucaaguggaaauug

SEQ ID NO: 1949714 - RNA, 19 nt, Homo sapiens
  misc_RNA (1)...(19): siRNA sense strand
gugguaaggcgacaaauaa

SEQ ID NO: 1949715 - RNA, 19 nt, Homo sapiens
  misc_RNA (1)...(19): siRNA sense strand
cagaagacauugcuguuag

SEQ ID NO: 1949716 - RNA, 19 nt, Homo sapiens
  misc_RNA (1)...(19): siRNA sense strand
gaagaagaauuagaugaac

SEQ ID NO: 1949717 - RNA, 19 nt, Homo sapiens
  misc_RNA (1)...(19): siRNA sense strand
gaacuggcauauuucaaaa

SEQ ID NO: 1949718 - RNA, 19 nt, Homo sapiens
  misc_RNA (1)...(19): siRNA sense strand
cagcugaaaguauaucaua

SEQ ID NO: 1949719 - RNA, 19 nt, Homo sapiens
  misc_RNA (1)...(19): siRNA sense strand
agaaagugauccaacagaa

SEQ ID NO: 1949720 - RNA, 19 nt, Homo sapiens
  misc_RNA (1)...(19): siRNA sense strand
caacuaugaccaagguuaa

SEQ ID NO: 1949721 - RNA, 19 nt, Homo sapiens
  misc_RNA (1)...(19): siRNA sense strand
ucaggaagauguucacaca

SEQ ID NO: 1949722 - RNA, 19 nt, Homo sapiens
  misc_RNA (1)...(19): siRNA sense strand
uacagaaggucauugaguu

SEQ ID NO: 1949723 - RNA, 19 nt, Homo sapiens
  misc_RNA (1)...(19): siRNA sense strand
gacagaaaguaaauuugga

SEQ ID NO: 1949724 - RNA, 19 nt, Homo sapiens
  misc_RNA (1)...(19): siRNA sense strand
aaaaucggcugaaaucuuu

SEQ ID NO: 1949725 - RNA, 19 nt, Homo sapiens
  misc_RNA (1)...(19): siRNA sense strand
gcaggcagacaauaaagaa

SEQ ID NO: 1949726 - RNA, 19 nt, Homo sapiens
  misc_RNA (1)...(19): siRNA sense strand
gcccagaaaucaaguagca

SEQ ID NO: 1949727 - RNA, 19 nt, Homo sapiens
  misc_RNA (1)...(19): siRNA sense strand
guagaaacaucccagaaaa

SEQ ID NO: 1949728 - RNA, 19 nt, Homo sapiens
  misc_RNA (1)...(19): siRNA sense strand
uaaggaaccaccugugaaa

SEQ ID NO: 1949729 - RNA, 19 nt, Homo sapiens
  misc_RNA (1)...(19): siRNA sense strand
gaaaagacauuugauagag

SEQ ID NO: 1949730 - RNA, 19 nt, Homo sapiens
  misc_RNA (1)...(19): siRNA sense strand
ucacaaguuuggcagaaga

SEQ ID NO: 1949731 - RNA, 19 nt, Homo sapiens
  misc_RNA (1)...(19): siRNA sense strand
gaaauuggaguccucaucu

SEQ ID NO: 1949732 - RNA, 19 nt, Homo sapiens
  misc_RNA (1)...(19): siRNA sense strand
agugagaucuggacgauau

SEQ ID NO: 1949733 - RNA, 19 nt, Homo sapiens
  misc_RNA (1)...(19): siRNA sense strand
gaaggucauugaguuggaa

SEQ ID NO: 1949734 - RNA, 19 nt, Homo sapiens
  misc_RNA (1)...(19): siRNA sense strand
gcaaggaacggcuacagau

SEQ ID NO: 1949735 - RNA, 19 nt, Homo sapiens
  misc_RNA (1)...(19): siRNA sense strand
ggcaaaguguuacuaaucu

SEQ ID NO: 1949736 - RNA, 19 nt, Homo sapiens
  misc_RNA (1)...(19): siRNA sense strand
uaacguugcuguaaaagaa

SEQ ID NO: 1949737 - RNA, 19 nt, Homo sapiens
  misc_RNA (1)...(19): siRNA sense strand
auagaggacuugaaauuuc

SEQ ID NO: 1949738 - RNA, 19 nt, Homo sapiens
  misc_RNA (1)...(19): siRNA sense strand
ugauagaggacuugaaauu

SEQ ID NO: 1949739 - RNA, 19 nt, Homo sapiens
  misc_RNA (1)...(19): siRNA sense strand
gcugaaagaaagauugaaa

SEQ ID NO: 1949740 - RNA, 19 nt, Homo sapiens
  misc_RNA (1)...(19): siRNA sense strand
gaagcuaugcuccggcaaa

SEQ ID NO: 1949741 - RNA, 19 nt, Homo sapiens
  misc_RNA (1)...(19): siRNA sense strand
gacuugaaauuucgacaga

SEQ ID NO: 1949742 - RNA, 19 nt, Homo sapiens
  misc_RNA (1)...(19): siRNA sense strand
caaggagcauggauuugga

SEQ ID NO: 1949743 - RNA, 19 nt, Homo sapiens
  misc_RNA (1)...(19): siRNA sense strand
agaaggcacuacaacuaaa

SEQ ID NO: 1949744 - RNA, 19 nt, Homo sapiens
  misc_RNA (1)...(19): siRNA sense strand
ugcagaaucuuuacaaaca

SEQ ID NO: 1949745 - RNA, 19 nt, Homo sapiens
  misc_RNA (1)...(19): siRNA sense strand
gacuuaacguugcuguaaa

SEQ ID NO: 1949746 - RNA, 19 nt, Homo sapiens
  misc_RNA (1)...(19): siRNA sense strand
cuacuagagucaacagaga

SEQ ID NO: 1949747 - RNA, 19 nt, Homo sapiens
  misc_RNA (1)...(19): siRNA sense strand
ucaccacacuguucucaau

SEQ ID NO: 1949748 - RNA, 19 nt, Homo sapiens
  misc_RNA (1)...(19): siRNA sense strand
ugagcaauguguuugagaa

SEQ ID NO: 1949749 - RNA, 19 nt, Homo sapiens
  misc_RNA (1)...(19): siRNA sense strand
gaaaucaggaagauguuca

SEQ ID NO: 1949750 - RNA, 19 nt, Homo sapiens
  misc_RNA (1)...(19): siRNA sense strand
gaaaucuaaagaggaguua

SEQ ID NO: 1949751 - RNA, 19 nt, Homo sapiens
  misc_RNA (1)...(19): siRNA sense strand
acuaaacagucaucaaaug

SEQ ID NO: 1949752 - RNA, 19 nt, Homo sapiens
  misc_RNA (1)...(19): siRNA sense strand
ggauacaaguuacaucacu

SEQ ID NO: 1949753 - RNA, 19 nt, Homo sapiens
  misc_RNA (1)...(19): siRNA sense strand
gauuauauccuugcaacaa

SEQ ID NO: 1949754 - RNA, 19 nt, Homo sapiens
  misc_RNA (1)...(19): siRNA sense strand
gcuauuaucuccucugcaa

SEQ ID NO: 1949755 - RNA, 19 nt, Homo sapiens
  misc_RNA (1)...(19): siRNA sense strand
gagaagcugugccucaguu

SEQ ID NO: 1949756 - RNA, 19 nt, Homo sapiens
  misc_RNA (1)...(19): siRNA sense strand
gcaaguggcuggugaucgu

SEQ ID NO: 1949757 - RNA, 19 nt, Homo sapiens
  misc_RNA (1)...(19): siRNA sense strand
cagacauccugagcuauua

SEQ ID NO: 1949758 - RNA, 19 nt, Homo sapiens
  misc_RNA (1)...(19): siRNA sense strand
agacagggcucagcucaga

SEQ ID NO: 1949759 - RNA, 19 nt, Homo sapiens
  misc_RNA (1)...(19): siRNA sense strand
gaggagacucugaauguga

SEQ ID NO: 1949760 - RNA, 19 nt, Homo sapiens
  misc_RNA (1)...(19): siRNA sense strand
gcuccaauccagacccuua

SEQ ID NO: 1949761 - RNA, 19 nt, Homo sapiens
  misc_RNA (1)...(19): siRNA sense strand
ggaggagacucugaaugug

SEQ ID NO: 1949762 - RNA, 19 nt, Homo sapiens
  misc_RNA (1)...(19): siRNA sense strand
gaaugugacagaaggaaau

SEQ ID NO: 1949763 - RNA, 19 nt, Homo sapiens
  misc_RNA (1)...(19): siRNA sense strand
gcagguggcugaaaaugug

SEQ ID NO: 1949764 - RNA, 19 nt, Homo sapiens
  misc_RNA (1)...(19): siRNA sense strand
gcauuggcaucgguuucua

SEQ ID NO: 1949765 - RNA, 19 nt, Homo sapiens
  misc_RNA (1)...(19): siRNA sense strand
gcaacagugagaccaguga

SEQ ID NO: 1949766 - RNA, 19 nt, Homo sapiens
  misc_RNA (1)...(19): siRNA sense strand
ccagugacgacuacgauga

SEQ ID NO: 1949767 - RNA, 19 nt, Homo sapiens
  misc_RNA (1)...(19): siRNA sense strand
agaagccucugcuguccuu

SEQ ID NO: 1949768 - RNA, 19 nt, Homo sapiens
  misc_RNA (1)...(19): siRNA sense strand
gugcgaagacgcccuggaa

SEQ ID NO: 1949769 - RNA, 19 nt, Homo sapiens
  misc_RNA (1)...(19): siRNA sense strand
uggaggagacucugaaugu

SEQ ID NO: 1949770 - RNA, 19 nt, Homo sapiens
  misc_RNA (1)...(19): siRNA sense strand
agucaugagucuccugguu

SEQ ID NO: 1949771 - RNA, 19 nt, Homo sapiens
  misc_RNA (1)...(19): siRNA sense strand
acagguggcuggccuacgu

SEQ ID NO: 1949772 - RNA, 19 nt, Homo sapiens
  misc_RNA (1)...(19): siRNA sense strand
caauccagacccuuauguu

SEQ ID NO: 1949773 - RNA, 19 nt, Homo sapiens
  misc_RNA (1)...(19): siRNA sense strand
ucaggaauccaagcgcuuu

SEQ ID NO: 1949774 - RNA, 19 nt, Homo sapiens
  misc_RNA (1)...(19): siRNA sense strand
cugcuggucugccucuuca

SEQ ID NO: 1949775 - RNA, 19 nt, Homo sapiens
  misc_RNA (1)...(19): siRNA sense strand
ggaauccaagcgcuuugug

SEQ ID NO: 1949776 - RNA, 19 nt, Homo sapiens
  misc_RNA (1)...(19): siRNA sense strand
ugaaugugacagaaggaaa

SEQ ID NO: 1949777 - RNA, 19 nt, Homo sapiens
  misc_RNA (1)...(19): siRNA sense strand
ccacacacucagcaccauu

SEQ ID NO: 1949778 - RNA, 19 nt, Homo sapiens
  misc_RNA (1)...(19): siRNA sense strand
gcccucagcuugggugcau

SEQ ID NO: 1949779 - RNA, 19 nt, Homo sapiens
  misc_RNA (1)...(19): siRNA sense strand
ucaugagucuccugguucu

SEQ ID NO: 1949780 - RNA, 19 nt, Homo sapiens
  misc_RNA (1)...(19): siRNA sense strand
ucagugacuucugcuccaa

SEQ ID NO: 1949781 - RNA, 19 nt, Homo sapiens
  misc_RNA (1)...(19): siRNA sense strand
cagacgaugacgacccuuu

SEQ ID NO: 1949782 - RNA, 19 nt, Homo sapiens
  misc_RNA (1)...(19): siRNA sense strand
ugacgacuacgaugacaca

SEQ ID NO: 1949783 - RNA, 19 nt, Homo sapiens
  misc_RNA (1)...(19): siRNA sense strand
ccaauccagacccuuaugu

SEQ ID NO: 1949784 - RNA, 19 nt, Homo sapiens
  misc_RNA (1)...(19): siRNA sense strand
cccaagagcaggaauacca

SEQ ID NO: 1949785 - RNA, 19 nt, Homo sapiens
  misc_RNA (1)...(19): siRNA sense strand
gacgaugacgacccuuuca

SEQ ID NO: 1949786 - RNA, 19 nt, Homo sapiens
  misc_RNA (1)...(19): siRNA sense strand
gaaccgaccuccaaacuuu

SEQ ID NO: 1949787 - RNA, 19 nt, Homo sapiens
  misc_RNA (1)...(19): siRNA sense strand
gaaaggacauggugaagau

SEQ ID NO: 1949788 - RNA, 19 nt, Homo sapiens
  misc_RNA (1)...(19): siRNA sense strand
gaggauggcucacaacuug

SEQ ID NO: 1949789 - RNA, 19 nt, Homo sapiens
  misc_RNA (1)...(19): siRNA sense strand
caagauaccgggaagauua

SEQ ID NO: 1949790 - RNA, 19 nt, Homo sapiens
  misc_RNA (1)...(19): siRNA sense strand
ucaagaggcuggagaguuu

SEQ ID NO: 1949791 - RNA, 19 nt, Homo sapiens
  misc_RNA (1)...(19): siRNA sense strand
gcacaagauuccuaauuug

SEQ ID NO: 1949792 - RNA, 19 nt, Homo sapiens
  misc_RNA (1)...(19): siRNA sense strand
uaagagagaugauguauac

SEQ ID NO: 1949793 - RNA, 19 nt, Homo sapiens
  misc_RNA (1)...(19): siRNA sense strand
ggucuuaccuucccagauu

SEQ ID NO: 1949794 - RNA, 19 nt, Homo sapiens
  misc_RNA (1)...(19): siRNA sense strand
gaaaugugcuucacuucga

SEQ ID NO: 1949795 - RNA, 19 nt, Homo sapiens
  misc_RNA (1)...(19): siRNA sense strand
agaaagagguuaagcaaga

SEQ ID NO: 1949796 - RNA, 19 nt, Homo sapiens
  misc_RNA (1)...(19): siRNA sense strand
ggcacaagauuccuaauuu

SEQ ID NO: 1949797 - RNA, 19 nt, Homo sapiens
  misc_RNA (1)...(19): siRNA sense strand
gagaaggaauucaaugaga

SEQ ID NO: 1949798 - RNA, 19 nt, Homo sapiens
  misc_RNA (1)...(19): siRNA sense strand
gaggaggacugcuguuuau

SEQ ID NO: 1949799 - RNA, 19 nt, Homo sapiens
  misc_RNA (1)...(19): siRNA sense strand
gacaugcgcuucaaugaga

SEQ ID NO: 1949800 - RNA, 19 nt, Homo sapiens
  misc_RNA (1)...(19): siRNA sense strand
gagaguuuaugaucacuuu

SEQ ID NO: 1949801 - RNA, 19 nt, Homo sapiens
  misc_RNA (1)...(19): siRNA sense strand
gcacggacaucaaccuuuc

SEQ ID NO: 1949802 - RNA, 19 nt, Homo sapiens
  misc_RNA (1)...(19): siRNA sense strand
gcaccgaguuugucuugaa

SEQ ID NO: 1949803 - RNA, 19 nt, Homo sapiens
  misc_RNA (1)...(19): siRNA sense strand
gaacaauccuggacuuggu

SEQ ID NO: 1949804 - RNA, 19 nt, Homo sapiens
  misc_RNA (1)...(19): siRNA sense strand
gauucuaucucuucugauu

SEQ ID NO: 1949805 - RNA, 19 nt, Homo sapiens
  misc_RNA (1)...(19): siRNA sense strand
cguuaaugcugaagaaaua

SEQ ID NO: 1949806 - RNA, 19 nt, Homo sapiens
  misc_RNA (1)...(19): siRNA sense strand
gaaagagguuaagcaagaa

SEQ ID NO: 1949807 - RNA, 19 nt, Homo sapiens
  misc_RNA (1)...(19): siRNA sense strand
gggauucuaucucuucuga

SEQ ID NO: 1949808 - RNA, 19 nt, Homo sapiens
  misc_RNA (1)...(19): siRNA sense strand
uggcagagguugcagauga

SEQ ID NO: 1949809 - RNA, 19 nt, Homo sapiens
  misc_RNA (1)...(19): siRNA sense strand
ggaagaggcugaggagaca

SEQ ID NO: 1949810 - RNA, 19 nt, Homo sapiens
  misc_RNA (1)...(19): siRNA sense strand
gaagaaagccaugacuguu

SEQ ID NO: 1949811 - RNA, 19 nt, Homo sapiens
  misc_RNA (1)...(19): siRNA sense strand
ccaacugccuuccauguga

SEQ ID NO: 1949812 - RNA, 19 nt, Homo sapiens
  misc_RNA (1)...(19): siRNA sense strand
ccagaaaugugcuucacuu

SEQ ID NO: 1949813 - RNA, 19 nt, Homo sapiens
  misc_RNA (1)...(19): siRNA sense strand
guugaugaguggaauauug

SEQ ID NO: 1949814 - RNA, 19 nt, Homo sapiens
  misc_RNA (1)...(19): siRNA sense strand
gaagcaagguuugucaaca

SEQ ID NO: 1949815 - RNA, 19 nt, Homo sapiens
  misc_RNA (1)...(19): siRNA sense strand
cagcugaguuucuuaagga

SEQ ID NO: 1949816 - RNA, 19 nt, Homo sapiens
  misc_RNA (1)...(19): siRNA sense strand
aaucagaacuguggaaaug

SEQ ID NO: 1949817 - RNA, 19 nt, Homo sapiens
  misc_RNA (1)...(19): siRNA sense strand
gcagcugccuuggaucuuu

SEQ ID NO: 1949818 - RNA, 19 nt, Homo sapiens
  misc_RNA (1)...(19): siRNA sense strand
ucaaagcugugaggcauuu

SEQ ID NO: 1949819 - RNA, 19 nt, Homo sapiens
  misc_RNA (1)...(19): siRNA sense strand
ucacugcgcugucuguaug

SEQ ID NO: 1949820 - RNA, 19 nt, Homo sapiens
  misc_RNA (1)...(19): siRNA sense strand
gggaaggacaacacaguua

SEQ ID NO: 1949821 - RNA, 19 nt, Homo sapiens
  misc_RNA (1)...(19): siRNA sense strand
gaaggagaccugaagacaa

SEQ ID NO: 1949822 - RNA, 19 nt, Homo sapiens
  misc_RNA (1)...(19): siRNA sense strand
ccaccgagaccuucuauga

SEQ ID NO: 1949823 - RNA, 19 nt, Homo sapiens
  misc_RNA (1)...(19): siRNA sense strand
gagagaugauguauacaca

SEQ ID NO: 1949824 - RNA, 19 nt, Homo sapiens
  misc_RNA (1)...(19): siRNA sense strand
ccaagagagucaaaucuag

SEQ ID NO: 1949825 - RNA, 19 nt, Homo sapiens
  misc_RNA (1)...(19): siRNA sense strand
uaugaucacuuucccuuau

SEQ ID NO: 1949826 - RNA, 19 nt, Homo sapiens
  misc_RNA (1)...(19): siRNA sense strand
ccgaguuugucuugaaaua

SEQ ID NO: 1949827 - RNA, 19 nt, Homo sapiens
  misc_RNA (1)...(19): siRNA sense strand
gccagaagcagcugaguuu

SEQ ID NO: 1949828 - RNA, 19 nt, Homo sapiens
  misc_RNA (1)...(19): siRNA sense strand
gaaauauggaauucccuuu

SEQ ID NO: 1949829 - RNA, 19 nt, Homo sapiens
  misc_RNA (1)...(19): siRNA sense strand
acaaagaggcaccgaguuu

SEQ ID NO: 1949830 - RNA, 19 nt, Homo sapiens
  misc_RNA (1)...(19): siRNA sense strand
gugcugugcuccuguagaa

SEQ ID NO: 1949831 - RNA, 19 nt, Homo sapiens
  misc_RNA (1)...(19): siRNA sense strand
ucacuuucccuuaugguua

SEQ ID NO: 1949832 - RNA, 19 nt, Homo sapiens
  misc_RNA (1)...(19): siRNA sense strand
gaaggacaacacaguuauu

SEQ ID NO: 1949833 - RNA, 19 nt, Homo sapiens
  misc_RNA (1)...(19): siRNA sense strand
gugcggagucuaccaauuu

SEQ ID NO: 1949834 - RNA, 19 nt, Homo sapiens
  misc_RNA (1)...(19): siRNA sense strand
ggaaggacaacacaguuau

SEQ ID NO: 1949835 - RNA, 19 nt, Homo sapiens
  misc_RNA (1)...(19): siRNA sense strand
agagugggaucaccauuga

SEQ ID NO: 1949836 - RNA, 19 nt, Homo sapiens
  misc_RNA (1)...(19): siRNA sense strand
ucacagagaaagagguuaa

SEQ ID NO: 1949837 - RNA, 19 nt, Homo sapiens
  misc_RNA (1)...(19): siRNA sense strand
guaugaucuuccagacuua

SEQ ID NO: 1949838 - RNA, 19 nt, Homo sapiens
  misc_RNA (1)...(19): siRNA sense strand
uguaugaucuuccagacuu

SEQ ID NO: 1949839 - RNA, 19 nt, Homo sapiens
  misc_RNA (1)...(19): siRNA sense strand
caacacaguuauugaccau

SEQ ID NO: 1949840 - RNA, 19 nt, Homo sapiens
  misc_RNA (1)...(19): siRNA sense strand
ucaacuaccugcacuuugg

SEQ ID NO: 1949841 - RNA, 19 nt, Homo sapiens
  misc_RNA (1)...(19): siRNA sense strand
ggaagugguccaagugaga

SEQ ID NO: 1949842 - RNA, 19 nt, Homo sapiens
  misc_RNA (1)...(19): siRNA sense strand
gccagaaagucauuagcaa

SEQ ID NO: 1949843 - RNA, 19 nt, Homo sapiens
  misc_RNA (1)...(19): siRNA sense strand
agaagcagcugccuuggau

SEQ ID NO: 1949844 - RNA, 19 nt, Homo sapiens
  misc_RNA (1)...(19): siRNA sense strand
aauauggaauucccuuuga

SEQ ID NO: 1949845 - RNA, 19 nt, Homo sapiens
  misc_RNA (1)...(19): siRNA sense strand
gaaagucauuagcaagcau

SEQ ID NO: 1949846 - RNA, 19 nt, Homo sapiens
  misc_RNA (1)...(19): siRNA sense strand
gguggaggauggagaggaa

SEQ ID NO: 1949847 - RNA, 19 nt, Homo sapiens
  misc_RNA (1)...(19): siRNA sense strand
guagaaaggacauggugaa

SEQ ID NO: 1949848 - RNA, 19 nt, Homo sapiens
  misc_RNA (1)...(19): siRNA sense strand
aagaaacggcaacgaguua

SEQ ID NO: 1949849 - RNA, 19 nt, Homo sapiens
  misc_RNA (1)...(19): siRNA sense strand
ucaaugagauuuucacaga

SEQ ID NO: 1949850 - RNA, 19 nt, Homo sapiens
  misc_RNA (1)...(19): siRNA sense strand
gagaugauguauacacacu

SEQ ID NO: 1949851 - RNA, 19 nt, Homo sapiens
  misc_RNA (1)...(19): siRNA sense strand
caacauugcagaaagaagu

SEQ ID NO: 1949852 - RNA, 19 nt, Homo sapiens
  misc_RNA (1)...(19): siRNA sense strand
gaauuuggaggcuuuaauc

SEQ ID NO: 1949853 - RNA, 19 nt, Homo sapiens
  misc_RNA (1)...(19): siRNA sense strand
aaacgggaguucucacugu

SEQ ID NO: 1949854 - RNA, 19 nt, Homo sapiens
  misc_RNA (1)...(19): siRNA sense strand
agacaagccuggccaagca

SEQ ID NO: 1949855 - RNA, 19 nt, Homo sapiens
  misc_RNA (1)...(19): siRNA sense strand
ugaaugguacccucuauga

SEQ ID NO: 1949856 - RNA, 19 nt, Homo sapiens
  misc_RNA (1)...(19): siRNA sense strand
uauacacacuggaugaaga

SEQ ID NO: 1949857 - RNA, 19 nt, Homo sapiens
  misc_RNA (1)...(19): siRNA sense strand
gguugcagaugaauacaug

SEQ ID NO: 1949858 - RNA, 19 nt, Homo sapiens
  misc_RNA (1)...(19): siRNA sense strand
gcuggagaguuuaugauca

SEQ ID NO: 1949859 - RNA, 19 nt, Homo sapiens
  misc_RNA (1)...(19): siRNA sense strand
gaagagcucgagcggaaau

SEQ ID NO: 1949860 - RNA, 19 nt, Homo sapiens
  misc_RNA (1)...(19): siRNA sense strand
gguugaauuuggaggcuuu

SEQ ID NO: 1949861 - RNA, 19 nt, Homo sapiens
  misc_RNA (1)...(19): siRNA sense strand
gcagaugaauacauguuuu

SEQ ID NO: 1949862 - RNA, 19 nt, Homo sapiens
  misc_RNA (1)...(19): siRNA sense strand
ggaggaagaacaagaagca

SEQ ID NO: 1949863 - RNA, 19 nt, Homo sapiens
  misc_RNA (1)...(19): siRNA sense strand
ggaaggagaccugaagaca

SEQ ID NO: 1949864 - RNA, 19 nt, Homo sapiens
  misc_RNA (1)...(19): siRNA sense strand
gagagugggaucaccauug

SEQ ID NO: 1949865 - RNA, 19 nt, Homo sapiens
  misc_RNA (1)...(19): siRNA sense strand
ugagaacaauccuggacuu

SEQ ID NO: 1949866 - RNA, 19 nt, Homo sapiens
  misc_RNA (1)...(19): siRNA sense strand
caagagagucaaaucuaga

SEQ ID NO: 1949867 - RNA, 19 nt, Homo sapiens
  misc_RNA (1)...(19): siRNA sense strand
uagauacauugccuacauu

SEQ ID NO: 1949868 - RNA, 19 nt, Homo sapiens
  misc_RNA (1)...(19): siRNA sense strand
caaccuuucuacuccuuau

SEQ ID NO: 1949869 - RNA, 19 nt, Homo sapiens
  misc_RNA (1)...(19): siRNA sense strand
ccaagguuguuccuccaaa

SEQ ID NO: 1949870 - RNA, 19 nt, Homo sapiens
  misc_RNA (1)...(19): siRNA sense strand
uggaagacauccuuugcuu

SEQ ID NO: 1949871 - RNA, 19 nt, Homo sapiens
  misc_RNA (1)...(19): siRNA sense strand
gaaugguacccucuaugaa

SEQ ID NO: 1949872 - RNA, 19 nt, Homo sapiens
  misc_RNA (1)...(19): siRNA sense strand
ggucuucauuaccugcuuu

SEQ ID NO: 1949873 - RNA, 19 nt, Homo sapiens
  misc_RNA (1)...(19): siRNA sense strand
ccaaggaggaucugaguuc

SEQ ID NO: 1949874 - RNA, 19 nt, Homo sapiens
  misc_RNA (1)...(19): siRNA sense strand
aaggagaccugaagacaag

SEQ ID NO: 1949875 - RNA, 19 nt, Homo sapiens
  misc_RNA (1)...(19): siRNA sense strand
gcauuucuccgccacaaga

SEQ ID NO: 1949876 - RNA, 19 nt, Homo sapiens
  misc_RNA (1)...(19): siRNA sense strand
ugucaacauugcagaaaga

SEQ ID NO: 1949877 - RNA, 19 nt, Homo sapiens
  misc_RNA (1)...(19): siRNA sense strand
agacuuaucaucagguuga

SEQ ID NO: 1949878 - RNA, 19 nt, Homo sapiens
  misc_RNA (1)...(19): siRNA sense strand
gcaggagugugucagugau

SEQ ID NO: 1949879 - RNA, 19 nt, Homo sapiens
  misc_RNA (1)...(19): siRNA sense strand
gcagcugaguuucuuaagg

SEQ ID NO: 1949880 - RNA, 19 nt, Homo sapiens
  misc_RNA (1)...(19): siRNA sense strand
ggaaagcugggaaggacaa

SEQ ID NO: 1949881 - RNA, 19 nt, Homo sapiens
  misc_RNA (1)...(19): siRNA sense strand
gcugugcugugcuccugua

SEQ ID NO: 1949882 - RNA, 19 nt, Homo sapiens
  misc_RNA (1)...(19): siRNA sense strand
cugaagacauggaccucua

SEQ ID NO: 1949883 - RNA, 19 nt, Homo sapiens
  misc_RNA (1)...(19): siRNA sense strand
agaggaggacugcuguuua

SEQ ID NO: 1949884 - RNA, 19 nt, Homo sapiens
  misc_RNA (1)...(19): siRNA sense strand
gaagcagcugaguuucuua

SEQ ID NO: 1949885 - RNA, 19 nt, Homo sapiens
  misc_RNA (1)...(19): siRNA sense strand
cacaagaugacccugauuu

SEQ ID NO: 1949886 - RNA, 19 nt, Homo sapiens
  misc_RNA (1)...(19): siRNA sense strand
gcaauugacuaugggauua

SEQ ID NO: 1949887 - RNA, 19 nt, Homo sapiens
  misc_RNA (1)...(19): siRNA sense strand
gggagaagcuagcaauuga

SEQ ID NO: 1949888 - RNA, 19 nt, Homo sapiens
  misc_RNA (1)...(19): siRNA sense strand
gaucaaagaagaccaguuu

SEQ ID NO: 1949889 - RNA, 19 nt, Homo sapiens
  misc_RNA (1)...(19): siRNA sense strand
gguaacaaaugugauauga

SEQ ID NO: 1949890 - RNA, 19 nt, Homo sapiens
  misc_RNA (1)...(19): siRNA sense strand
agaacuagauggaaagaaa

SEQ ID NO: 1949891 - RNA, 19 nt, Homo sapiens
  misc_RNA (1)...(19): siRNA sense strand
cgauagaacuagauggaaa

SEQ ID NO: 1949892 - RNA, 19 nt, Homo sapiens
  misc_RNA (1)...(19): siRNA sense strand
ugacaaaacucaacagaaa

SEQ ID NO: 1949893 - RNA, 19 nt, Homo sapiens
  misc_RNA (1)...(19): siRNA sense strand
ucuaugacaucacaaauga

SEQ ID NO: 1949894 - RNA, 19 nt, Homo sapiens
  misc_RNA (1)...(19): siRNA sense strand
ggacacagcgggucaggaa

SEQ ID NO: 1949895 - RNA, 19 nt, Homo sapiens
  misc_RNA (1)...(19): siRNA sense strand
gaaaaccgaucaaagaaga

SEQ ID NO: 1949896 - RNA, 19 nt, Homo sapiens
  misc_RNA (1)...(19): siRNA sense strand
aaagaaugauccuggguaa

SEQ ID NO: 1949897 - RNA, 19 nt, Homo sapiens
  misc_RNA (1)...(19): siRNA sense strand
gaagcuagcaauugacuau

SEQ ID NO: 1949898 - RNA, 19 nt, Homo sapiens
  misc_RNA (1)...(19): siRNA sense strand
gauccuggguaacaaaugu

SEQ ID NO: 1949899 - RNA, 19 nt, Homo sapiens
  misc_RNA (1)...(19): siRNA sense strand
gacguacgauuaucucuuc

SEQ ID NO: 1949900 - RNA, 19 nt, Homo sapiens
  misc_RNA (1)...(19): siRNA sense strand
cacgagauauaaugacaaa

SEQ ID NO: 1949901 - RNA, 19 nt, Homo sapiens
  misc_RNA (1)...(19): siRNA sense strand
gaaugauccuggguaacaa

SEQ ID NO: 1949902 - RNA, 19 nt, Homo sapiens
  misc_RNA (1)...(19): siRNA sense strand
gaggagccaugggcauuau

SEQ ID NO: 1949903 - RNA, 19 nt, Homo sapiens
  misc_RNA (1)...(19): siRNA sense strand
gaucagaaacauugaagag

SEQ ID NO: 1949904 - RNA, 19 nt, Homo sapiens
  misc_RNA (1)...(19): siRNA sense strand
guacgauuaucucuucaag

SEQ ID NO: 1949905 - RNA, 19 nt, Homo sapiens
  misc_RNA (1)...(19): siRNA sense strand
uuucguugcucgcuacuuu

SEQ ID NO: 1949906 - RNA, 19 nt, Homo sapiens
  misc_RNA (1)...(19): siRNA sense strand
uuagaacgauagaacuaga

SEQ ID NO: 1949907 - RNA, 19 nt, Homo sapiens
  misc_RNA (1)...(19): siRNA sense strand
gcgaagacguacgauuauc

SEQ ID NO: 1949908 - RNA, 19 nt, Homo sapiens
  misc_RNA (1)...(19): siRNA sense strand
gcuggucuaugacaucaca

SEQ ID NO: 1949909 - RNA, 19 nt, Homo sapiens
  misc_RNA (1)...(19): siRNA sense strand
acacuugcacgagauauaa

SEQ ID NO: 1949910 - RNA, 19 nt, Homo sapiens
  misc_RNA (1)...(19): siRNA sense strand
cagaaacauugaagagcau

SEQ ID NO: 1949911 - RNA, 19 nt, Homo sapiens
  misc_RNA (1)...(19): siRNA sense strand
gcacgagauauaaugacaa

SEQ ID NO: 1949912 - RNA, 19 nt, Homo sapiens
  misc_RNA (1)...(19): siRNA sense strand
gcaugccucuuccgauguc

SEQ ID NO: 1949913 - RNA, 19 nt, Homo sapiens
  misc_RNA (1)...(19): siRNA sense strand
acgauuaucucuucaagcu

SEQ ID NO: 1949914 - RNA, 19 nt, Homo sapiens
  misc_RNA (1)...(19): siRNA sense strand
cagcgggucaggaaagauu

SEQ ID NO: 1949915 - RNA, 19 nt, Homo sapiens
  misc_RNA (1)...(19): siRNA sense strand
gaagacguacgauuaucuc

SEQ ID NO: 1949916 - RNA, 19 nt, Homo sapiens
  misc_RNA (1)...(19): siRNA sense strand
agaaugauccuggguaaca

SEQ ID NO: 1949917 - RNA, 19 nt, Homo sapiens
  misc_RNA (1)...(19): siRNA sense strand
gauagaacuagauggaaag

SEQ ID NO: 1949918 - RNA, 19 nt, Homo sapiens
  misc_RNA (1)...(19): siRNA sense strand
aaaauccagugcaaaugua

SEQ ID NO: 1949919 - RNA, 19 nt, Homo sapiens
  misc_RNA (1)...(19): siRNA sense strand
gaacuagauggaaagaaaa

SEQ ID NO: 1949920 - RNA, 19 nt, Homo sapiens
  misc_RNA (1)...(19): siRNA sense strand
caagaccugccuccuguuc

SEQ ID NO: 1949921 - RNA, 19 nt, Homo sapiens
  misc_RNA (1)...(19): siRNA sense strand
ggcgaagacguacgauuau

SEQ ID NO: 1949922 - RNA, 19 nt, Homo sapiens
  misc_RNA (1)...(19): siRNA sense strand
acagaaaaccgaucaaaga

SEQ ID NO: 1949923 - RNA, 19 nt, Homo sapiens
  misc_RNA (1)...(19): siRNA sense strand
cacgacagcguacuacaga

SEQ ID NO: 1949924 - RNA, 19 nt, Homo sapiens
  misc_RNA (1)...(19): siRNA sense strand
caauugacuaugggauuaa

SEQ ID NO: 1949925 - RNA, 19 nt, Homo sapiens
  misc_RNA (1)...(19): siRNA sense strand
cagaggagccaugggcauu

SEQ ID NO: 1949926 - RNA, 19 nt, Homo sapiens
  misc_RNA (1)...(19): siRNA sense strand
caaucacgacagcguacua

SEQ ID NO: 1949927 - RNA, 19 nt, Homo sapiens
  misc_RNA (1)...(19): siRNA sense strand
gagaagcuagcaauugacu

SEQ ID NO: 1949928 - RNA, 19 nt, Homo sapiens
  misc_RNA (1)...(19): siRNA sense strand
cuuccgaugucgaaagaau

SEQ ID NO: 1949929 - RNA, 19 nt, Homo sapiens
  misc_RNA (1)...(19): siRNA sense strand
agaggagccaugggcauua

SEQ ID NO: 1949930 - RNA, 19 nt, Homo sapiens
  misc_RNA (1)...(19): siRNA sense strand
cgaagacguacgauuaucu

SEQ ID NO: 1949931 - RNA, 19 nt, Homo sapiens
  misc_RNA (1)...(19): siRNA sense strand
ggagcagguggaccaguga

SEQ ID NO: 1949932 - RNA, 19 nt, Homo sapiens
  misc_RNA (1)...(19): siRNA sense strand
cuggguaacaaaugugaua

SEQ ID NO: 1949933 - RNA, 19 nt, Homo sapiens
  misc_RNA (1)...(19): siRNA sense strand
aauuggaucagaaacauug

SEQ ID NO: 1949934 - RNA, 19 nt, Homo sapiens
  misc_RNA (1)...(19): siRNA sense strand
ccagugcaaauguagaaga

SEQ ID NO: 1949935 - RNA, 19 nt, Homo sapiens
  misc_RNA (1)...(19): siRNA sense strand
caaaauccagugcaaaugu

SEQ ID NO: 1949936 - RNA, 19 nt, Homo sapiens
  misc_RNA (1)...(19): siRNA sense strand
caucuccaccaucggaauu

SEQ ID NO: 1949937 - RNA, 19 nt, Homo sapiens
  misc_RNA (1)...(19): siRNA sense strand
cuaugggauuaaauucuug

SEQ ID NO: 1949938 - RNA, 19 nt, Homo sapiens
  misc_RNA (1)...(19): siRNA sense strand
ugacuaugggauuaaauuc

SEQ ID NO: 1949939 - RNA, 19 nt, Homo sapiens
  misc_RNA (1)...(19): siRNA sense strand
ggucuaugacaucacaaau

SEQ ID NO: 1949940 - RNA, 19 nt, Homo sapiens
  misc_RNA (1)...(19): siRNA sense strand
cacagcgggucaggaaaga

SEQ ID NO: 1949941 - RNA, 19 nt, Homo sapiens
  misc_RNA (1)...(19): siRNA sense strand
caaaugugauaugaaugac

SEQ ID NO: 1949942 - RNA, 19 nt, Homo sapiens
  misc_RNA (1)...(19): siRNA sense strand
ggaucagaaacauugaaga

SEQ ID NO: 1949943 - RNA, 19 nt, Homo sapiens
  misc_RNA (1)...(19): siRNA sense strand
gcaagaccugccuccuguu

SEQ ID NO: 1949944 - RNA, 19 nt, Homo sapiens
  misc_RNA (1)...(19): siRNA sense strand
ucagaggacgccuucaaca

SEQ ID NO: 1949945 - RNA, 19 nt, Homo sapiens
  misc_RNA (1)...(19): siRNA sense strand
cagugcaaauguagaagag

SEQ ID NO: 1949946 - RNA, 19 nt, Homo sapiens
  misc_RNA (1)...(19): siRNA sense strand
cagaaaaccgaucaaagaa

SEQ ID NO: 1949947 - RNA, 19 nt, Homo sapiens
  misc_RNA (1)...(19): siRNA sense strand
uacacuugcacgagauaua

SEQ ID NO: 1949948 - RNA, 19 nt, Homo sapiens
  misc_RNA (1)...(19): siRNA sense strand
ggguaacaaaugugauaug

SEQ ID NO: 1949949 - RNA, 19 nt, Homo sapiens
  misc_RNA (1)...(19): siRNA sense strand
gagcagguggaccagugaa

SEQ ID NO: 1949950 - RNA, 19 nt, Homo sapiens
  misc_RNA (1)...(19): siRNA sense strand
gauuaaauucuuggagaca

SEQ ID NO: 1949951 - RNA, 19 nt, Homo sapiens
  misc_RNA (1)...(19): siRNA sense strand
ccaucggaauugauuuuaa

SEQ ID NO: 1949952 - RNA, 19 nt, Homo sapiens
  misc_RNA (1)...(19): siRNA sense strand
ucucagaggacgccuucaa

SEQ ID NO: 1949953 - RNA, 19 nt, Homo sapiens
  misc_RNA (1)...(19): siRNA sense strand
gacagaagcugcaguuuga

SEQ ID NO: 1949954 - RNA, 19 nt, Homo sapiens
  misc_RNA (1)...(19): siRNA sense strand
ggacggagcugacaucuac

SEQ ID NO: 1949955 - RNA, 19 nt, Homo sapiens
  misc_RNA (1)...(19): siRNA sense strand
ucacugcccuggacaauga

SEQ ID NO: 1949956 - RNA, 19 nt, Homo sapiens
  misc_RNA (1)...(19): siRNA sense strand
aaacuaagcugggcaugaa

SEQ ID NO: 1949957 - RNA, 19 nt, Homo sapiens
  misc_RNA (1)...(19): siRNA sense strand
gaccaugugugagaugaua

SEQ ID NO: 1949958 - RNA, 19 nt, Homo sapiens
  misc_RNA (1)...(19): siRNA sense strand
caugaacucucccuucuga

SEQ ID NO: 1949959 - RNA, 19 nt, Homo sapiens
  misc_RNA (1)...(19): siRNA sense strand
uaaagaucaugcaagagua

SEQ ID NO: 1949960 - RNA, 19 nt, Homo sapiens
  misc_RNA (1)...(19): siRNA sense strand
ggaaggagguguggagaag

SEQ ID NO: 1949961 - RNA, 19 nt, Homo sapiens
  misc_RNA (1)...(19): siRNA sense strand
gcuaaguucucagaggaua

SEQ ID NO: 1949962 - RNA, 19 nt, Homo sapiens
  misc_RNA (1)...(19): siRNA sense strand
gaagaagagcccagcaaga

SEQ ID NO: 1949963 - RNA, 19 nt, Homo sapiens
  misc_RNA (1)...(19): siRNA sense strand
ccaagaagacccagcacua

SEQ ID NO: 1949964 - RNA, 19 nt, Homo sapiens
  misc_RNA (1)...(19): siRNA sense strand
aaggagacaucauagcuuu

SEQ ID NO: 1949965 - RNA, 19 nt, Homo sapiens
  misc_RNA (1)...(19): siRNA sense strand
ccaaugagaucgugaagcu

SEQ ID NO: 1949966 - RNA, 19 nt, Homo sapiens
  misc_RNA (1)...(19): siRNA sense strand
agaagugucugacguggaa

SEQ ID NO: 1949967 - RNA, 19 nt, Homo sapiens
  misc_RNA (1)...(19): siRNA sense strand
cagaggacuuuguguguga

SEQ ID NO: 1949968 - RNA, 19 nt, Homo sapiens
  misc_RNA (1)...(19): siRNA sense strand
gaacaacacccugcaccuu

SEQ ID NO: 1949969 - RNA, 19 nt, Homo sapiens
  misc_RNA (1)...(19): siRNA sense strand
gcaccucaccucccucaaa

SEQ ID NO: 1949970 - RNA, 19 nt, Homo sapiens
  misc_RNA (1)...(19): siRNA sense strand
gaaacuaagcugggcauga

SEQ ID NO: 1949971 - RNA, 19 nt, Homo sapiens
  misc_RNA (1)...(19): siRNA sense strand
gaccaccugugcaacauug

SEQ ID NO: 1949972 - RNA, 19 nt, Homo sapiens
  misc_RNA (1)...(19): siRNA sense strand
gggaggugcuggagaagga

SEQ ID NO: 1949973 - RNA, 19 nt, Homo sapiens
  misc_RNA (1)...(19): siRNA sense strand
gaucagccucuucauuaaa

SEQ ID NO: 1949974 - RNA, 19 nt, Homo sapiens
  misc_RNA (1)...(19): siRNA sense strand
ggacaucgugcgccucauu

SEQ ID NO: 1949975 - RNA, 19 nt, Homo sapiens
  misc_RNA (1)...(19): siRNA sense strand
cgacagaagcugcaguuug

SEQ ID NO: 1949976 - RNA, 19 nt, Homo sapiens
  misc_RNA (1)...(19): siRNA sense strand
ugaucagccucuucauuaa

SEQ ID NO: 1949977 - RNA, 19 nt, Homo sapiens
  misc_RNA (1)...(19): siRNA sense strand
gaaggagacaucauagcuu

SEQ ID NO: 1949978 - RNA, 19 nt, Homo sapiens
  misc_RNA (1)...(19): siRNA sense strand
caacugcuccuccgucaug

SEQ ID NO: 1949979 - RNA, 19 nt, Homo sapiens
  misc_RNA (1)...(19): siRNA sense strand
gaggagaccaucagcauca

SEQ ID NO: 1949980 - RNA, 19 nt, Homo sapiens
  misc_RNA (1)...(19): siRNA sense strand
ggagacaucauagcuuuga

SEQ ID NO: 1949981 - RNA, 19 nt, Homo sapiens
  misc_RNA (1)...(19): siRNA sense strand
gcccugcgcuucaucuuca

SEQ ID NO: 1949982 - RNA, 19 nt, Homo sapiens
  misc_RNA (1)...(19): siRNA sense strand
ggacugcugucggcucaga

SEQ ID NO: 1949983 - RNA, 19 nt, Homo sapiens
  misc_RNA (1)...(19): siRNA sense strand
gaucauugaccaaauccaa

SEQ ID NO: 1949984 - RNA, 19 nt, Homo sapiens
  misc_RNA (1)...(19): siRNA sense strand
ugugugagaugauaaagau

SEQ ID NO: 1949985 - RNA, 19 nt, Homo sapiens
  misc_RNA (1)...(19): siRNA sense strand
ccagagaccaugugugaga

SEQ ID NO: 1949986 - RNA, 19 nt, Homo sapiens
  misc_RNA (1)...(19): siRNA sense strand
gauacucucagcagcuaua

SEQ ID NO: 1949987 - RNA, 19 nt, Homo sapiens
  misc_RNA (1)...(19): siRNA sense strand
gguugaaggagacaucaua

SEQ ID NO: 1949988 - RNA, 19 nt, Homo sapiens
  misc_RNA (1)...(19): siRNA sense strand
cuacgaagcagaggacuuu

SEQ ID NO: 1949989 - RNA, 19 nt, Homo sapiens
  misc_RNA (1)...(19): siRNA sense strand
agaaccaucuggcgcugua

SEQ ID NO: 1949990 - RNA, 19 nt, Homo sapiens
  misc_RNA (1)...(19): siRNA sense strand
gagaccaugugugagauga

SEQ ID NO: 1949991 - RNA, 19 nt, Homo sapiens
  misc_RNA (1)...(19): siRNA sense strand
ccgcugauguggucuuaga

SEQ ID NO: 1949992 - RNA, 19 nt, Homo sapiens
  misc_RNA (1)...(19): siRNA sense strand
cagaagggcuccuccucau

SEQ ID NO: 1949993 - RNA, 19 nt, Homo sapiens
  misc_RNA (1)...(19): siRNA sense strand
ccaaaucccagcccagaga

SEQ ID NO: 1949994 - RNA, 19 nt, Homo sapiens
  misc_RNA (1)...(19): siRNA sense strand
ggcaugaacucucccuucu

SEQ ID NO: 1949995 - RNA, 19 nt, Homo sapiens
  misc_RNA (1)...(19): siRNA sense strand
ggccaaagcagcaucuuca

SEQ ID NO: 1949996 - RNA, 19 nt, Homo sapiens
  misc_RNA (1)...(19): siRNA sense strand
gcugaagcgucgggaggua

SEQ ID NO: 1949997 - RNA, 19 nt, Homo sapiens
  misc_RNA (1)...(19): siRNA sense strand
gcuccugccucaucugcuu

SEQ ID NO: 1949998 - RNA, 19 nt, Homo sapiens
  misc_RNA (1)...(19): siRNA sense strand
gcccagagacuguacuguu

SEQ ID NO: 1949999 - RNA, 19 nt, Homo sapiens
  misc_RNA (1)...(19): siRNA sense strand
gcucccugcuggcuaaguu

SEQ ID NO: 1950000 - RNA, 19 nt, Homo sapiens
  misc_RNA (1)...(19): siRNA sense strand
ggccaggaaucguuugcuu

SEQ ID NO: 1950001 - RNA, 19 nt, Homo sapiens
  misc_RNA (1)...(19): siRNA sense strand
gagggaucauugaccaaau

SEQ ID NO: 1950002 - RNA, 19 nt, Homo sapiens
  misc_RNA (1)...(19): siRNA sense strand
gcugacaucuacccucucu

SEQ ID NO: 1950003 - RNA, 19 nt, Homo sapiens
  misc_RNA (1)...(19): siRNA sense strand
gucccgagaugaugcagaa

SEQ ID NO: 1950004 - RNA, 19 nt, Homo sapiens
  misc_RNA (1)...(19): siRNA sense strand
gagcggaagaagugucuga

SEQ ID NO: 1950005 - RNA, 19 nt, Homo sapiens
  misc_RNA (1)...(19): siRNA sense strand
ucagggagcggaagaagug

SEQ ID NO: 1950006 - RNA, 19 nt, Homo sapiens
  misc_RNA (1)...(19): siRNA sense strand
aaucaggugucccgagaug

SEQ ID NO: 1950007 - RNA, 19 nt, Homo sapiens
  misc_RNA (1)...(19): siRNA sense strand
gcucugccuucgccuacaa

SEQ ID NO: 1950008 - RNA, 19 nt, Homo sapiens
  misc_RNA (1)...(19): siRNA sense strand
ccugcacacugucuucauu

SEQ ID NO: 1950009 - RNA, 19 nt, Homo sapiens
  misc_RNA (1)...(19): siRNA sense strand
acaaugagcgguucacagu

SEQ ID NO: 1950010 - RNA, 19 nt, Homo sapiens
  misc_RNA (1)...(19): siRNA sense strand
acucggaccucaucagcuu

SEQ ID NO: 1950011 - RNA, 19 nt, Homo sapiens
  misc_RNA (1)...(19): siRNA sense strand
cccagagacuguacuguuc

SEQ ID NO: 1950012 - RNA, 19 nt, Homo sapiens
  misc_RNA (1)...(19): siRNA sense strand
cuacuucucuuuggaggau

SEQ ID NO: 1950013 - RNA, 19 nt, Homo sapiens
  misc_RNA (1)...(19): siRNA sense strand
cagaagcugcaguuugaaa

SEQ ID NO: 1950014 - RNA, 19 nt, Homo sapiens
  misc_RNA (1)...(19): siRNA sense strand
acaacacccugcaccuuuc

SEQ ID NO: 1950015 - RNA, 19 nt, Homo sapiens
  misc_RNA (1)...(19): siRNA sense strand
ccaccuauggcauccguaa

SEQ ID NO: 1950016 - RNA, 19 nt, Homo sapiens
  misc_RNA (1)...(19): siRNA sense strand
ccagagcgacaucagcauu

SEQ ID NO: 1950017 - RNA, 19 nt, Homo sapiens
  misc_RNA (1)...(19): siRNA sense strand
caucagcuccugccucauc

SEQ ID NO: 1950018 - RNA, 19 nt, Homo sapiens
  misc_RNA (1)...(19): siRNA sense strand
cccugcaccuuuccaauga

SEQ ID NO: 1950019 - RNA, 19 nt, Homo sapiens
  misc_RNA (1)...(19): siRNA sense strand
gaaagagccccuugaccaa

SEQ ID NO: 1950020 - RNA, 19 nt, Homo sapiens
  misc_RNA (1)...(19): siRNA sense strand
caucagcauugcccuggau

SEQ ID NO: 1950021 - RNA, 19 nt, Homo sapiens
  misc_RNA (1)...(19): siRNA sense strand
auaaagaucaugcaagagu

SEQ ID NO: 1950022 - RNA, 19 nt, Homo sapiens
  misc_RNA (1)...(19): siRNA sense strand
ccuccugcauccaguuuga

SEQ ID NO: 1950023 - RNA, 19 nt, Homo sapiens
  misc_RNA (1)...(19): siRNA sense strand
cagagacuguacuguucuu

SEQ ID NO: 1950024 - RNA, 19 nt, Homo sapiens
  misc_RNA (1)...(19): siRNA sense strand
ucauuuccaucacccaugu

SEQ ID NO: 1950025 - RNA, 19 nt, Homo sapiens
  misc_RNA (1)...(19): siRNA sense strand
ucauccaguuccuuucuug

SEQ ID NO: 1950026 - RNA, 19 nt, Homo sapiens
  misc_RNA (1)...(19): siRNA sense strand
gugaaugccucggccuugu

SEQ ID NO: 1950027 - RNA, 19 nt, Homo sapiens
  misc_RNA (1)...(19): siRNA sense strand
ucaaugugcugcugaaccu

SEQ ID NO: 1950028 - RNA, 19 nt, Homo sapiens
  misc_RNA (1)...(19): siRNA sense strand
aacaacacccugcaccuuu

SEQ ID NO: 1950029 - RNA, 19 nt, Homo sapiens
  misc_RNA (1)...(19): siRNA sense strand
ccccauagcuccaucaugu

SEQ ID NO: 1950030 - RNA, 19 nt, Homo sapiens
  misc_RNA (1)...(19): siRNA sense strand
caccgcugauguggucuua

SEQ ID NO: 1950031 - RNA, 19 nt, Homo sapiens
  misc_RNA (1)...(19): siRNA sense strand
ccaaugcccugcgcuucau

SEQ ID NO: 1950032 - RNA, 19 nt, Homo sapiens
  misc_RNA (1)...(19): siRNA sense strand
caucugcuuuggcuucaca

SEQ ID NO: 1950033 - RNA, 19 nt, Homo sapiens
  misc_RNA (1)...(19): siRNA sense strand
caagaagacccagcacuac

SEQ ID NO: 1950034 - RNA, 19 nt, Homo sapiens
  misc_RNA (1)...(19): siRNA sense strand
ccuacaagcccaugaacug

SEQ ID NO: 1950035 - RNA, 19 nt, Homo sapiens
  misc_RNA (1)...(19): siRNA sense strand
gagcgccugugccgauucu

SEQ ID NO: 1950036 - RNA, 19 nt, Homo sapiens
  misc_RNA (1)...(19): siRNA sense strand
cgaggguggugaagaagag

SEQ ID NO: 1950037 - RNA, 19 nt, Homo sapiens
  misc_RNA (1)...(19): siRNA sense strand
gaaugccucggccuuguuc

SEQ ID NO: 1950038 - RNA, 19 nt, Homo sapiens
  misc_RNA (1)...(19): siRNA sense strand
cgaagcagaggacuuugug

SEQ ID NO: 1950039 - RNA, 19 nt, Homo sapiens
  misc_RNA (1)...(19): siRNA sense strand
uccaguccauucccaagaa

SEQ ID NO: 1950040 - RNA, 19 nt, Homo sapiens
  misc_RNA (1)...(19): siRNA sense strand
caucauccggcuuaucgaa

SEQ ID NO: 1950041 - RNA, 19 nt, Homo sapiens
  misc_RNA (1)...(19): siRNA sense strand
ggcuggaacugccacaucu

SEQ ID NO: 1950042 - RNA, 19 nt, Homo sapiens
  misc_RNA (1)...(19): siRNA sense strand
cgagggaucauugaccaaa

SEQ ID NO: 1950043 - RNA, 19 nt, Homo sapiens
  misc_RNA (1)...(19): siRNA sense strand
gagacuguacuguucuuca

SEQ ID NO: 1950044 - RNA, 19 nt, Homo sapiens
  misc_RNA (1)...(19): siRNA sense strand
ugauuguccugcacacugu

SEQ ID NO: 1950045 - RNA, 19 nt, Homo sapiens
  misc_RNA (1)...(19): siRNA sense strand
cauccgcuuugucuacuuc

SEQ ID NO: 1950046 - RNA, 19 nt, Homo sapiens
  misc_RNA (1)...(19): siRNA sense strand
gcaugguguccucccagua

SEQ ID NO: 1950047 - RNA, 19 nt, Homo sapiens
  misc_RNA (1)...(19): siRNA sense strand
uuagaggccugcacagacu

SEQ ID NO: 1950048 - RNA, 19 nt, Homo sapiens
  misc_RNA (1)...(19): siRNA sense strand
caacgccugcauccgcuuu

SEQ ID NO: 1950049 - RNA, 19 nt, Homo sapiens
  misc_RNA (1)...(19): siRNA sense strand
ucgugaagcuacaugagau

SEQ ID NO: 1950050 - RNA, 19 nt, Homo sapiens
  misc_RNA (1)...(19): siRNA sense strand
ugaggacuuugccaaugga

SEQ ID NO: 1950051 - RNA, 19 nt, Homo sapiens
  misc_RNA (1)...(19): siRNA sense strand
cagccugguuugaggacuu

SEQ ID NO: 1950052 - RNA, 19 nt, Homo sapiens
  misc_RNA (1)...(19): siRNA sense strand
gcuucacacugcagagcuu

SEQ ID NO: 1950053 - RNA, 19 nt, Homo sapiens
  misc_RNA (1)...(19): siRNA sense strand
gggcuuaccuguugcuuua

SEQ ID NO: 1950054 - RNA, 19 nt, Homo sapiens
  misc_RNA (1)...(19): siRNA sense strand
uaaugaagcugcucaaauu

SEQ ID NO: 1950055 - RNA, 19 nt, Homo sapiens
  misc_RNA (1)...(19): siRNA sense strand
gagaugcaguucuuaauga

SEQ ID NO: 1950056 - RNA, 19 nt, Homo sapiens
  misc_RNA (1)...(19): siRNA sense strand
gaagacagagggaauuuaa

SEQ ID NO: 1950057 - RNA, 19 nt, Homo sapiens
  misc_RNA (1)...(19): siRNA sense strand
ucagagagcuacagacaaa

SEQ ID NO: 1950058 - RNA, 19 nt, Homo sapiens
  misc_RNA (1)...(19): siRNA sense strand
gauguuaacuguccuuuca

SEQ ID NO: 1950059 - RNA, 19 nt, Homo sapiens
  misc_RNA (1)...(19): siRNA sense strand
aaagagggcuuaccuguug

SEQ ID NO: 1950060 - RNA, 19 nt, Homo sapiens
  misc_RNA (1)...(19): siRNA sense strand
uaacuguccuuucaagauu

SEQ ID NO: 1950061 - RNA, 19 nt, Homo sapiens
  misc_RNA (1)...(19): siRNA sense strand
gcuauugacuggcuucuug

SEQ ID NO: 1950062 - RNA, 19 nt, Homo sapiens
  misc_RNA (1)...(19): siRNA sense strand
gcaaagaugaaacagaauu

SEQ ID NO: 1950063 - RNA, 19 nt, Homo sapiens
  misc_RNA (1)...(19): siRNA sense strand
gauucaagaucgacaagaa

SEQ ID NO: 1950064 - RNA, 19 nt, Homo sapiens
  misc_RNA (1)...(19): siRNA sense strand
cugcaaagaugaaacagaa

SEQ ID NO: 1950065 - RNA, 19 nt, Homo sapiens
  misc_RNA (1)...(19): siRNA sense strand
ugacuggcuucuugguuua

SEQ ID NO: 1950066 - RNA, 19 nt, Homo sapiens
  misc_RNA (1)...(19): siRNA sense strand
gcacauagaggagcucaga

SEQ ID NO: 1950067 - RNA, 19 nt, Homo sapiens
  misc_RNA (1)...(19): siRNA sense strand
ggagaugcaguucuuaaug

SEQ ID NO: 1950068 - RNA, 19 nt, Homo sapiens
  misc_RNA (1)...(19): siRNA sense strand
gggaaaaguuggaagauga

SEQ ID NO: 1950069 - RNA, 19 nt, Homo sapiens
  misc_RNA (1)...(19): siRNA sense strand
cuacaagauugaagacaga

SEQ ID NO: 1950070 - RNA, 19 nt, Homo sapiens
  misc_RNA (1)...(19): siRNA sense strand
cacaggagaugcaguucuu

SEQ ID NO: 1950071 - RNA, 19 nt, Homo sapiens
  misc_RNA (1)...(19): siRNA sense strand
agacagagggaauuuaaga

SEQ ID NO: 1950072 - RNA, 19 nt, Homo sapiens
  misc_RNA (1)...(19): siRNA sense strand
caacgaagccauaguagcu

SEQ ID NO: 1950073 - RNA, 19 nt, Homo sapiens
  misc_RNA (1)...(19): siRNA sense strand
agacuugaauauggagaua

SEQ ID NO: 1950074 - RNA, 19 nt, Homo sapiens
  misc_RNA (1)...(19): siRNA sense strand
aaucaacgaagccauagua

SEQ ID NO: 1950075 - RNA, 19 nt, Homo sapiens
  misc_RNA (1)...(19): siRNA sense strand
agagggaauuuaagaaaca

SEQ ID NO: 1950076 - RNA, 19 nt, Homo sapiens
  misc_RNA (1)...(19): siRNA sense strand
agacaaacauauucuuggu

SEQ ID NO: 1950077 - RNA, 19 nt, Homo sapiens
  misc_RNA (1)...(19): siRNA sense strand
cuucuugguuuagcuguua

SEQ ID NO: 1950078 - RNA, 19 nt, Homo sapiens
  misc_RNA (1)...(19): siRNA sense strand
ugguuuagcuguuagacuu

SEQ ID NO: 1950079 - RNA, 19 nt, Homo sapiens
  misc_RNA (1)...(19): siRNA sense strand
uggcuaaccugcuucagau

SEQ ID NO: 1950080 - RNA, 19 nt, Homo sapiens
  misc_RNA (1)...(19): siRNA sense strand
acagagggaauuuaagaaa

SEQ ID NO: 1950081 - RNA, 19 nt, Homo sapiens
  misc_RNA (1)...(19): siRNA sense strand
caacugcaaagaugaaaca

SEQ ID NO: 1950082 - RNA, 19 nt, Homo sapiens
  misc_RNA (1)...(19): siRNA sense strand
gguaaugcuuaaggcaauu

SEQ ID NO: 1950083 - RNA, 19 nt, Homo sapiens
  misc_RNA (1)...(19): siRNA sense strand
uugacuggcuucuugguuu

SEQ ID NO: 1950084 - RNA, 19 nt, Homo sapiens
  misc_RNA (1)...(19): siRNA sense strand
ggauuuaguaccugauaau

SEQ ID NO: 1950085 - RNA, 19 nt, Homo sapiens
  misc_RNA (1)...(19): siRNA sense strand
ugacggcucucgacuacca

SEQ ID NO: 1950086 - RNA, 19 nt, Homo sapiens
  misc_RNA (1)...(19): siRNA sense strand
ugacacaggagaugcaguu

SEQ ID NO: 1950087 - RNA, 19 nt, Homo sapiens
  misc_RNA (1)...(19): siRNA sense strand
caagaucgacaagaagcua

SEQ ID NO: 1950088 - RNA, 19 nt, Homo sapiens
  misc_RNA (1)...(19): siRNA sense strand
caggagaugcaguucuuaa

SEQ ID NO: 1950089 - RNA, 19 nt, Homo sapiens
  misc_RNA (1)...(19): siRNA sense strand
ugaagacagagggaauuua

SEQ ID NO: 1950090 - RNA, 19 nt, Homo sapiens
  misc_RNA (1)...(19): siRNA sense strand
ugaagcugcucaaauucug

SEQ ID NO: 1950091 - RNA, 19 nt, Homo sapiens
  misc_RNA (1)...(19): siRNA sense strand
guugacggcucucgacuac

SEQ ID NO: 1950092 - RNA, 19 nt, Homo sapiens
  misc_RNA (1)...(19): siRNA sense strand
gcuuaccuguugcuuuaga

SEQ ID NO: 1950093 - RNA, 19 nt, Homo sapiens
  misc_RNA (1)...(19): siRNA sense strand
gcuguuagacuugaauaug

SEQ ID NO: 1950094 - RNA, 19 nt, Homo sapiens
  misc_RNA (1)...(19): siRNA sense strand
ggcuucaacugcaaagaug

SEQ ID NO: 1950095 - RNA, 19 nt, Homo sapiens
  misc_RNA (1)...(19): siRNA sense strand
gacagagggaauuuaagaa

SEQ ID NO: 1950096 - RNA, 19 nt, Homo sapiens
  misc_RNA (1)...(19): siRNA sense strand
cagagggaauuuaagaaac

SEQ ID NO: 1950097 - RNA, 19 nt, Homo sapiens
  misc_RNA (1)...(19): siRNA sense strand
cgacuggcccaaguucuuu

SEQ ID NO: 1950098 - RNA, 19 nt, Homo sapiens
  misc_RNA (1)...(19): siRNA sense strand
uuaaugaagcugcucaaau

SEQ ID NO: 1950099 - RNA, 19 nt, Homo sapiens
  misc_RNA (1)...(19): siRNA sense strand
agaugcaguucuuaaugaa

SEQ ID NO: 1950100 - RNA, 19 nt, Homo sapiens
  misc_RNA (1)...(19): siRNA sense strand
cuaaccugcuucagauuca

SEQ ID NO: 1950101 - RNA, 19 nt, Homo sapiens
  misc_RNA (1)...(19): siRNA sense strand
cuaaggcaaaucaaacaaa

SEQ ID NO: 1950102 - RNA, 19 nt, Homo sapiens
  misc_RNA (1)...(19): siRNA sense strand
auacaaggauuuaguaccu

SEQ ID NO: 1950103 - RNA, 19 nt, Homo sapiens
  misc_RNA (1)...(19): siRNA sense strand
gcuaaccugcuucagauuc

SEQ ID NO: 1950104 - RNA, 19 nt, Homo sapiens
  misc_RNA (1)...(19): siRNA sense strand
uggcccaaguucuuugaaa

SEQ ID NO: 1950105 - RNA, 19 nt, Homo sapiens
  misc_RNA (1)...(19): siRNA sense strand
gacaaacauauucuugguu

SEQ ID NO: 1950106 - RNA, 19 nt, Homo sapiens
  misc_RNA (1)...(19): siRNA sense strand
gcgacuggcccaaguucuu

SEQ ID NO: 1950107 - RNA, 19 nt, Homo sapiens
  misc_RNA (1)...(19): siRNA sense strand
aauuauugcugauccaaag

SEQ ID NO: 1950108 - RNA, 19 nt, Homo sapiens
  misc_RNA (1)...(19): siRNA sense strand
cugcucaaauucugcgauu

SEQ ID NO: 1950109 - RNA, 19 nt, Homo sapiens
  misc_RNA (1)...(19): siRNA sense strand
aggcuggugugauggcuuu

SEQ ID NO: 1950110 - RNA, 19 nt, Homo sapiens
  misc_RNA (1)...(19): siRNA sense strand
ugcgauugcugcacauaga

SEQ ID NO: 1950111 - RNA, 19 nt, Homo sapiens
  misc_RNA (1)...(19): siRNA sense strand
gcuaaggcaaaucaaacaa

SEQ ID NO: 1950112 - RNA, 19 nt, Homo sapiens
  misc_RNA (1)...(19): siRNA sense strand
gcuuaaggcaauucggauu

SEQ ID NO: 1950113 - RNA, 19 nt, Homo sapiens
  misc_RNA (1)...(19): siRNA sense strand
gagggaauuuaagaaacau

SEQ ID NO: 1950114 - RNA, 19 nt, Homo sapiens
  misc_RNA (1)...(19): siRNA sense strand
cagauucagcgucaugaug

SEQ ID NO: 1950115 - RNA, 19 nt, Homo sapiens
  misc_RNA (1)...(19): siRNA sense strand
gaucgacaagaagcuauug

SEQ ID NO: 1950116 - RNA, 19 nt, Homo sapiens
  misc_RNA (1)...(19): siRNA sense strand
gcucaaauucugcgauugc

SEQ ID NO: 1950117 - RNA, 19 nt, Homo sapiens
  misc_RNA (1)...(19): siRNA sense strand
gauugaagacagagggaau

SEQ ID NO: 1950118 - RNA, 19 nt, Homo sapiens
  misc_RNA (1)...(19): siRNA sense strand
cuuaaggcaauucggauuu

SEQ ID NO: 1950119 - RNA, 19 nt, Homo sapiens
  misc_RNA (1)...(19): siRNA sense strand
cugcugacaaugcaacuaa

SEQ ID NO: 1950120 - RNA, 19 nt, Homo sapiens
  misc_RNA (1)...(19): siRNA sense strand
aggauuuaguaccugauaa

SEQ ID NO: 1950121 - RNA, 19 nt, Homo sapiens
  misc_RNA (1)...(19): siRNA sense strand
auauggagauaaugcugaa

SEQ ID NO: 1950122 - RNA, 19 nt, Homo sapiens
  misc_RNA (1)...(19): siRNA sense strand
uuaacuguccuuucaagau

SEQ ID NO: 1950123 - RNA, 19 nt, Homo sapiens
  misc_RNA (1)...(19): siRNA sense strand
acauagaggagcucagaga

SEQ ID NO: 1950124 - RNA, 19 nt, Homo sapiens
  misc_RNA (1)...(19): siRNA sense strand
cacaggaugcaguugcuaa

SEQ ID NO: 1950125 - RNA, 19 nt, Homo sapiens
  misc_RNA (1)...(19): siRNA sense strand
ugguaaugcuuaaggcaau

SEQ ID NO: 1950126 - RNA, 19 nt, Homo sapiens
  misc_RNA (1)...(19): siRNA sense strand
ggcuuuggcuaaccugcuu

SEQ ID NO: 1950127 - RNA, 19 nt, Homo sapiens
  misc_RNA (1)...(19): siRNA sense strand
uguuagacuugaauaugga

SEQ ID NO: 1950128 - RNA, 19 nt, Homo sapiens
  misc_RNA (1)...(19): siRNA sense strand
guuuagcuguuagacuuga

SEQ ID NO: 1950129 - RNA, 19 nt, Homo sapiens
  misc_RNA (1)...(19): siRNA sense strand
caagauucaagaucgacaa

SEQ ID NO: 1950130 - RNA, 19 nt, Homo sapiens
  misc_RNA (1)...(19): siRNA sense strand
gcagcgacuggcccaaguu

SEQ ID NO: 1950131 - RNA, 19 nt, Homo sapiens
  misc_RNA (1)...(19): siRNA sense strand
cuguuagacuugaauaugg

SEQ ID NO: 1950132 - RNA, 19 nt, Homo sapiens
  misc_RNA (1)...(19): siRNA sense strand
guagcuguucaggcaauua

SEQ ID NO: 1950133 - RNA, 19 nt, Homo sapiens
  misc_RNA (1)...(19): siRNA sense strand
gaaaaucaggcacuacaag

SEQ ID NO: 1950134 - RNA, 19 nt, Homo sapiens
  misc_RNA (1)...(19): siRNA sense strand
gcuuuagacaaacauauuc

SEQ ID NO: 1950135 - RNA, 19 nt, Homo sapiens
  misc_RNA (1)...(19): siRNA sense strand
ggcccaaguucuuugaaaa

SEQ ID NO: 1950136 - RNA, 19 nt, Homo sapiens
  misc_RNA (1)...(19): siRNA sense strand
uaguagcuguucaggcaau

SEQ ID NO: 1950137 - RNA, 19 nt, Homo sapiens
  misc_RNA (1)...(19): siRNA sense strand
cgacaagaagcuauugacu

SEQ ID NO: 1950138 - RNA, 19 nt, Homo sapiens
  misc_RNA (1)...(19): siRNA sense strand
gacacaggaugcaguugcu

SEQ ID NO: 1950139 - RNA, 19 nt, Homo sapiens
  misc_RNA (1)...(19): siRNA sense strand
gagauguuaacuguccuuu

SEQ ID NO: 1950140 - RNA, 19 nt, Homo sapiens
  misc_RNA (1)...(19): siRNA sense strand
gaagccauaguagcuguuc

SEQ ID NO: 1950141 - RNA, 19 nt, Homo sapiens
  misc_RNA (1)...(19): siRNA sense strand
aaggauuuaguaccugaua

SEQ ID NO: 1950142 - RNA, 19 nt, Homo sapiens
  misc_RNA (1)...(19): siRNA sense strand
gcacuacaagauugaagac

SEQ ID NO: 1950143 - RNA, 19 nt, Homo sapiens
  misc_RNA (1)...(19): siRNA sense strand
ucaaugagaugguccacuu

SEQ ID NO: 1950144 - RNA, 19 nt, Homo sapiens
  misc_RNA (1)...(19): siRNA sense strand
caacaaggaacaccaagaa

SEQ ID NO: 1950145 - RNA, 19 nt, Homo sapiens
  misc_RNA (1)...(19): siRNA sense strand
ucaaugaccgcaucaauga

SEQ ID NO: 1950146 - RNA, 19 nt, Homo sapiens
  misc_RNA (1)...(19): siRNA sense strand
aguccaagcucaaagagua

SEQ ID NO: 1950147 - RNA, 19 nt, Homo sapiens
  misc_RNA (1)...(19): siRNA sense strand
caaggaacaccaagaagaa

SEQ ID NO: 1950148 - RNA, 19 nt, Homo sapiens
  misc_RNA (1)...(19): siRNA sense strand
ugacaaguauguucuuaag

SEQ ID NO: 1950149 - RNA, 19 nt, Homo sapiens
  misc_RNA (1)...(19): siRNA sense strand
ggacaaauggagcaacuuc

SEQ ID NO: 1950150 - RNA, 19 nt, Homo sapiens
  misc_RNA (1)...(19): siRNA sense strand
ggacuacgccaucaugaca

SEQ ID NO: 1950151 - RNA, 19 nt, Homo sapiens
  misc_RNA (1)...(19): siRNA sense strand
gaaacucgcccugcacuca

SEQ ID NO: 1950152 - RNA, 19 nt, Homo sapiens
  misc_RNA (1)...(19): siRNA sense strand
gaaagcagcgccugaagcu

SEQ ID NO: 1950153 - RNA, 19 nt, Homo sapiens
  misc_RNA (1)...(19): siRNA sense strand
ggagaaugcagacaucauc

SEQ ID NO: 1950154 - RNA, 19 nt, Homo sapiens
  misc_RNA (1)...(19): siRNA sense strand
cgacaucgccauagcaaca

SEQ ID NO: 1950155 - RNA, 19 nt, Homo sapiens
  misc_RNA (1)...(19): siRNA sense strand
agcagcaacuucucaauga

SEQ ID NO: 1950156 - RNA, 19 nt, Homo sapiens
  misc_RNA (1)...(19): siRNA sense strand
gaagcgagccaccgagaag

SEQ ID NO: 1950157 - RNA, 19 nt, Homo sapiens
  misc_RNA (1)...(19): siRNA sense strand
gcaacaaggaacaccaaga

SEQ ID NO: 1950158 - RNA, 19 nt, Homo sapiens
  misc_RNA (1)...(19): siRNA sense strand
gggagcgccuggugagaau

SEQ ID NO: 1950159 - RNA, 19 nt, Homo sapiens
  misc_RNA (1)...(19): siRNA sense strand
acaaggaacaccaagaaga

SEQ ID NO: 1950160 - RNA, 19 nt, Homo sapiens
  misc_RNA (1)...(19): siRNA sense strand
gcaaccaaccagagcaguu

SEQ ID NO: 1950161 - RNA, 19 nt, Homo sapiens
  misc_RNA (1)...(19): siRNA sense strand
gagaauguauuuugacaag

SEQ ID NO: 1950162 - RNA, 19 nt, Homo sapiens
  misc_RNA (1)...(19): siRNA sense strand
gcaacaguccaagcucaaa

SEQ ID NO: 1950163 - RNA, 19 nt, Homo sapiens
  misc_RNA (1)...(19): siRNA sense strand
gcacagcaacaaguucaug

SEQ ID NO: 1950164 - RNA, 19 nt, Homo sapiens
  misc_RNA (1)...(19): siRNA sense strand
cagcagcaacuucucaaug

SEQ ID NO: 1950165 - RNA, 19 nt, Homo sapiens
  misc_RNA (1)...(19): siRNA sense strand
gagcugcggcacaagaaug

SEQ ID NO: 1950166 - RNA, 19 nt, Homo sapiens
  misc_RNA (1)...(19): siRNA sense strand
ccaaggacgcccugaaucu

SEQ ID NO: 1950167 - RNA, 19 nt, Homo sapiens
  misc_RNA (1)...(19): siRNA sense strand
ggacggcuggcaccuuguu

SEQ ID NO: 1950168 - RNA, 19 nt, Homo sapiens
  misc_RNA (1)...(19): siRNA sense strand
ggaagcgagccaccgagaa

SEQ ID NO: 1950169 - RNA, 19 nt, Homo sapiens
  misc_RNA (1)...(19): siRNA sense strand
gaagaaccgcagccuguac

SEQ ID NO: 1950170 - RNA, 19 nt, Homo sapiens
  misc_RNA (1)...(19): siRNA sense strand
gcgagcagauccgccugaa

SEQ ID NO: 1950171 - RNA, 19 nt, Homo sapiens
  misc_RNA (1)...(19): siRNA sense strand
gaagaugugcuggcugaag

SEQ ID NO: 1950172 - RNA, 19 nt, Homo sapiens
  misc_RNA (1)...(19): siRNA sense strand
gcgggagaaugcagacauc

SEQ ID NO: 1950173 - RNA, 19 nt, Homo sapiens
  misc_RNA (1)...(19): siRNA sense strand
gcgagccaccgagaagaua

SEQ ID NO: 1950174 - RNA, 19 nt, Homo sapiens
  misc_RNA (1)...(19): siRNA sense strand
ggucuacucagccaagaau

SEQ ID NO: 1950175 - RNA, 19 nt, Homo sapiens
  misc_RNA (1)...(19): siRNA sense strand
ucguggcucuucggcauua

SEQ ID NO: 1950176 - RNA, 19 nt, Homo sapiens
  misc_RNA (1)...(19): siRNA sense strand
cagcagcaccagcagaaga

SEQ ID NO: 1950177 - RNA, 19 nt, Homo sapiens
  misc_RNA (1)...(19): siRNA sense strand
cuggagcacucgcguuaug

SEQ ID NO: 1950178 - RNA, 19 nt, Homo sapiens
  misc_RNA (1)...(19): siRNA sense strand
caucaaugaccgcaucaau

SEQ ID NO: 1950179 - RNA, 19 nt, Homo sapiens
  misc_RNA (1)...(19): siRNA sense strand
gacgcuguuugccaagaaa

SEQ ID NO: 1950180 - RNA, 19 nt, Homo sapiens
  misc_RNA (1)...(19): siRNA sense strand
caaccaaccagagcaguuc

SEQ ID NO: 1950181 - RNA, 19 nt, Homo sapiens
  misc_RNA (1)...(19): siRNA sense strand
gauggacacccgcgugcaa

SEQ ID NO: 1950182 - RNA, 19 nt, Homo sapiens
  misc_RNA (1)...(19): siRNA sense strand
agauggagcugcggcacaa

SEQ ID NO: 1950183 - RNA, 19 nt, Homo sapiens
  misc_RNA (1)...(19): siRNA sense strand
agacgcuguuugccaagaa

SEQ ID NO: 1950184 - RNA, 19 nt, Homo sapiens
  misc_RNA (1)...(19): siRNA sense strand
cagcacagcaacaaguuca

SEQ ID NO: 1950185 - RNA, 19 nt, Homo sapiens
  misc_RNA (1)...(19): siRNA sense strand
gcaccgggaagacgcuguu

SEQ ID NO: 1950186 - RNA, 19 nt, Homo sapiens
  misc_RNA (1)...(19): siRNA sense strand
ccagggcccaguaucaaga

SEQ ID NO: 1950187 - RNA, 19 nt, Homo sapiens
  misc_RNA (1)...(19): siRNA sense strand
gcuacgaggaccaacugaa

SEQ ID NO: 1950188 - RNA, 19 nt, Homo sapiens
  misc_RNA (1)...(19): siRNA sense strand
agaagaaccgcagccugua

SEQ ID NO: 1950189 - RNA, 19 nt, Homo sapiens
  misc_RNA (1)...(19): siRNA sense strand
caaggacgcccugaaucug

SEQ ID NO: 1950190 - RNA, 19 nt, Homo sapiens
  misc_RNA (1)...(19): siRNA sense strand
ggacacccgcgugcaagau

SEQ ID NO: 1950191 - RNA, 19 nt, Homo sapiens
  misc_RNA (1)...(19): siRNA sense strand
cgagccaccgagaagauaa

SEQ ID NO: 1950192 - RNA, 19 nt, Homo sapiens
  misc_RNA (1)...(19): siRNA sense strand
acaaauggagcaacuucga

SEQ ID NO: 1950193 - RNA, 19 nt, Homo sapiens
  misc_RNA (1)...(19): siRNA sense strand
caacaguccaagcucaaag

SEQ ID NO: 1950194 - RNA, 19 nt, Homo sapiens
  misc_RNA (1)...(19): siRNA sense strand
gcucuucggcauuaacaag

SEQ ID NO: 1950195 - RNA, 19 nt, Homo sapiens
  misc_RNA (1)...(19): siRNA sense strand
ggaggaguccgugcagaag

SEQ ID NO: 1950196 - RNA, 19 nt, Homo sapiens
  misc_RNA (1)...(19): siRNA sense strand
ucgacugggccaucaauga

SEQ ID NO: 1950197 - RNA, 19 nt, Homo sapiens
  misc_RNA (1)...(19): siRNA sense strand
cuacgaggaccaacugaag

SEQ ID NO: 1950198 - RNA, 19 nt, Homo sapiens
  misc_RNA (1)...(19): siRNA sense strand
ggauuccgugccuuuguga

SEQ ID NO: 1950199 - RNA, 19 nt, Homo sapiens
  misc_RNA (1)...(19): siRNA sense strand
gagcgccuggugagaaugu

SEQ ID NO: 1950200 - RNA, 19 nt, Homo sapiens
  misc_RNA (1)...(19): siRNA sense strand
gcacucaggcauggacuac

SEQ ID NO: 1950201 - RNA, 19 nt, Homo sapiens
  misc_RNA (1)...(19): siRNA sense strand
gcagcagcaacuucucaau

SEQ ID NO: 1950202 - RNA, 19 nt, Homo sapiens
  misc_RNA (1)...(19): siRNA sense strand
ggaggguguugugcucagu

SEQ ID NO: 1950203 - RNA, 19 nt, Homo sapiens
  misc_RNA (1)...(19): siRNA sense strand
ucaaugaggagaauuuacg

SEQ ID NO: 1950204 - RNA, 19 nt, Homo sapiens
  misc_RNA (1)...(19): siRNA sense strand
ggcccaguaucaagacaag

SEQ ID NO: 1950205 - RNA, 19 nt, Homo sapiens
  misc_RNA (1)...(19): siRNA sense strand
gcugaggagaggaggaaga

SEQ ID NO: 1950206 - RNA, 19 nt, Homo sapiens
  misc_RNA (1)...(19): siRNA sense strand
gaacaugugucuacuugga

SEQ ID NO: 1950207 - RNA, 19 nt, Homo sapiens
  misc_RNA (1)...(19): siRNA sense strand
ugacaaagaucauccuaga

SEQ ID NO: 1950208 - RNA, 19 nt, Homo sapiens
  misc_RNA (1)...(19): siRNA sense strand
ucacuaggcugguggcauu

SEQ ID NO: 1950209 - RNA, 19 nt, Homo sapiens
  misc_RNA (1)...(19): siRNA sense strand
gcucaaggccuccucgaaa

SEQ ID NO: 1950210 - RNA, 19 nt, Homo sapiens
  misc_RNA (1)...(19): siRNA sense strand
gaaccgaagcccaggcaaa

SEQ ID NO: 1950211 - RNA, 19 nt, Homo sapiens
  misc_RNA (1)...(19): siRNA sense strand
agacaaacccuccaucuca

SEQ ID NO: 1950212 - RNA, 19 nt, Homo sapiens
  misc_RNA (1)...(19): siRNA sense strand
agaugaagauccaagaaga

SEQ ID NO: 1950213 - RNA, 19 nt, Homo sapiens
  misc_RNA (1)...(19): siRNA sense strand
caaagaucauccuagaaca

SEQ ID NO: 1950214 - RNA, 19 nt, Homo sapiens
  misc_RNA (1)...(19): siRNA sense strand
cucgaaagauguugucaga

SEQ ID NO: 1950215 - RNA, 19 nt, Homo sapiens
  misc_RNA (1)...(19): siRNA sense strand
gcucugcaccgccucacua

SEQ ID NO: 1950216 - RNA, 19 nt, Homo sapiens
  misc_RNA (1)...(19): siRNA sense strand
ucucugccguggccaguaa

SEQ ID NO: 1950217 - RNA, 19 nt, Homo sapiens
  misc_RNA (1)...(19): siRNA sense strand
ccaccugccugcuccagau

SEQ ID NO: 1950218 - RNA, 19 nt, Homo sapiens
  misc_RNA (1)...(19): siRNA sense strand
aagaaacacuggacaccau

SEQ ID NO: 1950219 - RNA, 19 nt, Homo sapiens
  misc_RNA (1)...(19): siRNA sense strand
gcaauucuggcucucuuuc

SEQ ID NO: 1950220 - RNA, 19 nt, Homo sapiens
  misc_RNA (1)...(19): siRNA sense strand
ccguggagcugagcaaaga

SEQ ID NO: 1950221 - RNA, 19 nt, Homo sapiens
  misc_RNA (1)...(19): siRNA sense strand
gaugaagauccaagaagau

SEQ ID NO: 1950222 - RNA, 19 nt, Homo sapiens
  misc_RNA (1)...(19): siRNA sense strand
gacaaagaucauccuagaa

SEQ ID NO: 1950223 - RNA, 19 nt, Homo sapiens
  misc_RNA (1)...(19): siRNA sense strand
acaaagaucauccuagaac

SEQ ID NO: 1950224 - RNA, 19 nt, Homo sapiens
  misc_RNA (1)...(19): siRNA sense strand
caagaagaucccagccuau

SEQ ID NO: 1950225 - RNA, 19 nt, Homo sapiens
  misc_RNA (1)...(19): siRNA sense strand
uguuccagcuugucuguga

SEQ ID NO: 1950226 - RNA, 19 nt, Homo sapiens
  misc_RNA (1)...(19): siRNA sense strand
cagccuaugccgagacaaa

SEQ ID NO: 1950227 - RNA, 19 nt, Homo sapiens
  misc_RNA (1)...(19): siRNA sense strand
ccagaugaagauccaagaa

SEQ ID NO: 1950228 - RNA, 19 nt, Homo sapiens
  misc_RNA (1)...(19): siRNA sense strand
gaaacacuggacaccaugu

SEQ ID NO: 1950229 - RNA, 19 nt, Homo sapiens
  misc_RNA (1)...(19): siRNA sense strand
gaucauccuagaacaugug

SEQ ID NO: 1950230 - RNA, 19 nt, Homo sapiens
  misc_RNA (1)...(19): siRNA sense strand
ccgaagcccaggcaaauca

SEQ ID NO: 1950231 - RNA, 19 nt, Homo sapiens
  misc_RNA (1)...(19): siRNA sense strand
ggaggaggcagaggaacug

SEQ ID NO: 1950232 - RNA, 19 nt, Homo sapiens
  misc_RNA (1)...(19): siRNA sense strand
ucaaggccuccucgaaaga

SEQ ID NO: 1950233 - RNA, 19 nt, Homo sapiens
  misc_RNA (1)...(19): siRNA sense strand
gcugacaaagaucauccua

SEQ ID NO: 1950234 - RNA, 19 nt, Homo sapiens
  misc_RNA (1)...(19): siRNA sense strand
ugccguggccaguaaauga

SEQ ID NO: 1950235 - RNA, 19 nt, Homo sapiens
  misc_RNA (1)...(19): siRNA sense strand
gaagcccaggcaaaucaga

SEQ ID NO: 1950236 - RNA, 19 nt, Homo sapiens
  misc_RNA (1)...(19): siRNA sense strand
ggagcugagcaaagaaaca

SEQ ID NO: 1950237 - RNA, 19 nt, Homo sapiens
  misc_RNA (1)...(19): siRNA sense strand
ccaggaggaggcagaggaa

SEQ ID NO: 1950238 - RNA, 19 nt, Homo sapiens
  misc_RNA (1)...(19): siRNA sense strand
cgagacaaacccuccaucu

SEQ ID NO: 1950239 - RNA, 19 nt, Homo sapiens
  misc_RNA (1)...(19): siRNA sense strand
aagaagaucccagccuaug

SEQ ID NO: 1950240 - RNA, 19 nt, Homo sapiens
  misc_RNA (1)...(19): siRNA sense strand
ccaggcaaaucagaucucu

SEQ ID NO: 1950241 - RNA, 19 nt, Homo sapiens
  misc_RNA (1)...(19): siRNA sense strand
aaagaucauccuagaacau

SEQ ID NO: 1950242 - RNA, 19 nt, Homo sapiens
  misc_RNA (1)...(19): siRNA sense strand
guggagcugagcaaagaaa

SEQ ID NO: 1950243 - RNA, 19 nt, Homo sapiens
  misc_RNA (1)...(19): siRNA sense strand
cagaugaagauccaagaag

SEQ ID NO: 1950244 - RNA, 19 nt, Homo sapiens
  misc_RNA (1)...(19): siRNA sense strand
cuggagaguggauaucaaa

SEQ ID NO: 1950245 - RNA, 19 nt, Homo sapiens
  misc_RNA (1)...(19): siRNA sense strand
cucaaggccuccucgaaag

SEQ ID NO: 1950246 - RNA, 19 nt, Homo sapiens
  misc_RNA (1)...(19): siRNA sense strand
ggaaacaacucguacugaa

SEQ ID NO: 1950247 - RNA, 19 nt, Homo sapiens
  misc_RNA (1)...(19): siRNA sense strand
ccauauacuucgagagaua

SEQ ID NO: 1950248 - RNA, 19 nt, Homo sapiens
  misc_RNA (1)...(19): siRNA sense strand
ggaaaccuuuaaauccuaa

SEQ ID NO: 1950249 - RNA, 19 nt, Homo sapiens
  misc_RNA (1)...(19): siRNA sense strand
cagcuaagccgaacauuga

SEQ ID NO: 1950250 - RNA, 19 nt, Homo sapiens
  misc_RNA (1)...(19): siRNA sense strand
gaucaugccacucuaaaug

SEQ ID NO: 1950251 - RNA, 19 nt, Homo sapiens
  misc_RNA (1)...(19): siRNA sense strand
uaaaacagaucccuaauuc

SEQ ID NO: 1950252 - RNA, 19 nt, Homo sapiens
  misc_RNA (1)...(19): siRNA sense strand
cuaagacucucccauuguu

SEQ ID NO: 1950253 - RNA, 19 nt, Homo sapiens
  misc_RNA (1)...(19): siRNA sense strand
ucccauaccugaauaccua

SEQ ID NO: 1950254 - RNA, 19 nt, Homo sapiens
  misc_RNA (1)...(19): siRNA sense strand
ccacucccauaccugaaua

SEQ ID NO: 1950255 - RNA, 19 nt, Homo sapiens
  misc_RNA (1)...(19): siRNA sense strand
caacacuacuuauucuuac

SEQ ID NO: 1950256 - RNA, 19 nt, Homo sapiens
  misc_RNA (1)...(19): siRNA sense strand
aaacagaucccuaauucau

SEQ ID NO: 1950257 - RNA, 19 nt, Homo sapiens
  misc_RNA (1)...(19): siRNA sense strand
caucaacacuacuuauucu

SEQ ID NO: 1950258 - RNA, 19 nt, Homo sapiens
  misc_RNA (1)...(19): siRNA sense strand
caacuuggaaaccuuuaaa

SEQ ID NO: 1950259 - RNA, 19 nt, Homo sapiens
  misc_RNA (1)...(19): siRNA sense strand
gcacaccaguccauauacu

SEQ ID NO: 1950260 - RNA, 19 nt, Homo sapiens
  misc_RNA (1)...(19): siRNA sense strand
acagaucccuaauucaugu

SEQ ID NO: 1950261 - RNA, 19 nt, Homo sapiens
  misc_RNA (1)...(19): siRNA sense strand
gagaucaugccacucuaaa

SEQ ID NO: 1950262 - RNA, 19 nt, Homo sapiens
  misc_RNA (1)...(19): siRNA sense strand
gaacccaucaacacuacuu

SEQ ID NO: 1950263 - RNA, 19 nt, Homo sapiens
  misc_RNA (1)...(19): siRNA sense strand
cuacuuauucuuacacuga

SEQ ID NO: 1950264 - RNA, 19 nt, Homo sapiens
  misc_RNA (1)...(19): siRNA sense strand
uggaaaccuuuaaauccua

SEQ ID NO: 1950265 - RNA, 19 nt, Homo sapiens
  misc_RNA (1)...(19): siRNA sense strand
ccacuugucagaaucagaa

SEQ ID NO: 1950266 - RNA, 19 nt, Homo sapiens
  misc_RNA (1)...(19): siRNA sense strand
aagcacaccaguccauaua

SEQ ID NO: 1950267 - RNA, 19 nt, Homo sapiens
  misc_RNA (1)...(19): siRNA sense strand
guaucaugcuaaacuguug

SEQ ID NO: 1950268 - RNA, 19 nt, Homo sapiens
  misc_RNA (1)...(19): siRNA sense strand
caacuuaucgccucuugag

SEQ ID NO: 1950269 - RNA, 19 nt, Homo sapiens
  misc_RNA (1)...(19): siRNA sense strand
gaaagugaggaagaagaaa

SEQ ID NO: 1950270 - RNA, 19 nt, Homo sapiens
  misc_RNA (1)...(19): siRNA sense strand
uaaauggagcacugcaauu

SEQ ID NO: 1950271 - RNA, 19 nt, Homo sapiens
  misc_RNA (1)...(19): siRNA sense strand
guuaaggaaacaacucgua

SEQ ID NO: 1950272 - RNA, 19 nt, Homo sapiens
  misc_RNA (1)...(19): siRNA sense strand
ccaaaaggcaguuaacaaa

SEQ ID NO: 1950273 - RNA, 19 nt, Homo sapiens
  misc_RNA (1)...(19): siRNA sense strand
ccacaacuuggaaaccuuu

SEQ ID NO: 1950274 - RNA, 19 nt, Homo sapiens
  misc_RNA (1)...(19): siRNA sense strand
guacugaacccaucaacac

SEQ ID NO: 1950275 - RNA, 19 nt, Homo sapiens
  misc_RNA (1)...(19): siRNA sense strand
gaaacaacucguacugaac

SEQ ID NO: 1950276 - RNA, 19 nt, Homo sapiens
  misc_RNA (1)...(19): siRNA sense strand
guccauauacuucgagaga

SEQ ID NO: 1950277 - RNA, 19 nt, Homo sapiens
  misc_RNA (1)...(19): siRNA sense strand
ccuaauuccugguuguauc

SEQ ID NO: 1950278 - RNA, 19 nt, Homo sapiens
  misc_RNA (1)...(19): siRNA sense strand
agaaagugaggaagaagaa

SEQ ID NO: 1950279 - RNA, 19 nt, Homo sapiens
  misc_RNA (1)...(19): siRNA sense strand
ucaaaagccucuuacaagu

SEQ ID NO: 1950280 - RNA, 19 nt, Homo sapiens
  misc_RNA (1)...(19): siRNA sense strand
ccuaacugcaucacuguaa

SEQ ID NO: 1950281 - RNA, 19 nt, Homo sapiens
  misc_RNA (1)...(19): siRNA sense strand
ccaagcacaccaguccaua

SEQ ID NO: 1950282 - RNA, 19 nt, Homo sapiens
  misc_RNA (1)...(19): siRNA sense strand
ccaucaacacuacuuauuc

SEQ ID NO: 1950283 - RNA, 19 nt, Homo sapiens
  misc_RNA (1)...(19): siRNA sense strand
aaucagaaagugaggaaga

SEQ ID NO: 1950284 - RNA, 19 nt, Homo sapiens
  misc_RNA (1)...(19): siRNA sense strand
caagcacaccaguccauau

SEQ ID NO: 1950285 - RNA, 19 nt, Homo sapiens
  misc_RNA (1)...(19): siRNA sense strand
cuaagccgaacauugagua

SEQ ID NO: 1950286 - RNA, 19 nt, Homo sapiens
  misc_RNA (1)...(19): siRNA sense strand
cagaaagugaggaagaaga

SEQ ID NO: 1950287 - RNA, 19 nt, Homo sapiens
  misc_RNA (1)...(19): siRNA sense strand
ucaugccacucuaaaugga

SEQ ID NO: 1950288 - RNA, 19 nt, Homo sapiens
  misc_RNA (1)...(19): siRNA sense strand
uaaauccuaauuccugguu

SEQ ID NO: 1950289 - RNA, 19 nt, Homo sapiens
  misc_RNA (1)...(19): siRNA sense strand
gaucccuaauucauguguu

SEQ ID NO: 1950290 - RNA, 19 nt, Homo sapiens
  misc_RNA (1)...(19): siRNA sense strand
cuaaauggagcacugcaau

SEQ ID NO: 1950291 - RNA, 19 nt, Homo sapiens
  misc_RNA (1)...(19): siRNA sense strand
gggauuccucugaagaaga

SEQ ID NO: 1950292 - RNA, 19 nt, Homo sapiens
  misc_RNA (1)...(19): siRNA sense strand
cugguuguaucaugcuaaa

SEQ ID NO: 1950293 - RNA, 19 nt, Homo sapiens
  misc_RNA (1)...(19): siRNA sense strand
ugucagaaucagaaaguga

SEQ ID NO: 1950294 - RNA, 19 nt, Homo sapiens
  misc_RNA (1)...(19): siRNA sense strand
aaacagcuaagccgaacau

SEQ ID NO: 1950295 - RNA, 19 nt, Homo sapiens
  misc_RNA (1)...(19): siRNA sense strand
acagcuaagccgaacauug

SEQ ID NO: 1950296 - RNA, 19 nt, Homo sapiens
  misc_RNA (1)...(19): siRNA sense strand
cccaucaacacuacuuauu

SEQ ID NO: 1950297 - RNA, 19 nt, Homo sapiens
  misc_RNA (1)...(19): siRNA sense strand
gagugggauuccucugaag

SEQ ID NO: 1950298 - RNA, 19 nt, Homo sapiens
  misc_RNA (1)...(19): siRNA sense strand
acucuauggugcccaacuu

SEQ ID NO: 1950299 - RNA, 19 nt, Homo sapiens
  misc_RNA (1)...(19): siRNA sense strand
gugggauuccucugaagaa

SEQ ID NO: 1950300 - RNA, 19 nt, Homo sapiens
  misc_RNA (1)...(19): siRNA sense strand
ugcuguggcuggcugacua

SEQ ID NO: 1950301 - RNA, 19 nt, Homo sapiens
  misc_RNA (1)...(19): siRNA sense strand
guuguaucaugcuaaacug

SEQ ID NO: 1950302 - RNA, 19 nt, Homo sapiens
  misc_RNA (1)...(19): siRNA sense strand
agaaucagaaagugaggaa

SEQ ID NO: 1950303 - RNA, 19 nt, Homo sapiens
  misc_RNA (1)...(19): siRNA sense strand
gguuguaucaugcuaaacu

SEQ ID NO: 1950304 - RNA, 19 nt, Homo sapiens
  misc_RNA (1)...(19): siRNA sense strand
aauccuaauuccugguugu

SEQ ID NO: 1950305 - RNA, 19 nt, Homo sapiens
  misc_RNA (1)...(19): siRNA sense strand
gcagguuaagugccuuuua

SEQ ID NO: 1950306 - RNA, 19 nt, Homo sapiens
  misc_RNA (1)...(19): siRNA sense strand
ucuaagacucucccauugu

SEQ ID NO: 1950307 - RNA, 19 nt, Homo sapiens
  misc_RNA (1)...(19): siRNA sense strand
cuaauuccugguuguauca

SEQ ID NO: 1950308 - RNA, 19 nt, Homo sapiens
  misc_RNA (1)...(19): siRNA sense strand
ucaaggagguggaauguua

SEQ ID NO: 1950309 - RNA, 19 nt, Homo sapiens
  misc_RNA (1)...(19): siRNA sense strand
gaaaugcccuggaaauugg

SEQ ID NO: 1950310 - RNA, 19 nt, Homo sapiens
  misc_RNA (1)...(19): siRNA sense strand
cagcagcacuccacuauga

SEQ ID NO: 1950311 - RNA, 19 nt, Homo sapiens
  misc_RNA (1)...(19): siRNA sense strand
agacagagccagauuguuu

SEQ ID NO: 1950312 - RNA, 19 nt, Homo sapiens
  misc_RNA (1)...(19): siRNA sense strand
gaaggauccuguugacugu

SEQ ID NO: 1950313 - RNA, 19 nt, Homo sapiens
  misc_RNA (1)...(19): siRNA sense strand
gggagacgguguacgauga

SEQ ID NO: 1950314 - RNA, 19 nt, Homo sapiens
  misc_RNA (1)...(19): siRNA sense strand
gauaagaaguugcaaaaug

SEQ ID NO: 1950315 - RNA, 19 nt, Homo sapiens
  misc_RNA (1)...(19): siRNA sense strand
caagugguguuccgaaaug

SEQ ID NO: 1950316 - RNA, 19 nt, Homo sapiens
  misc_RNA (1)...(19): siRNA sense strand
gaagauaagaaguugcaaa

SEQ ID NO: 1950317 - RNA, 19 nt, Homo sapiens
  misc_RNA (1)...(19): siRNA sense strand
gagcagaccauguuugugu

SEQ ID NO: 1950318 - RNA, 19 nt, Homo sapiens
  misc_RNA (1)...(19): siRNA sense strand
caagagaaagucaaucuau

SEQ ID NO: 1950319 - RNA, 19 nt, Homo sapiens
  misc_RNA (1)...(19): siRNA sense strand
guaaguggcaucuguguug

SEQ ID NO: 1950320 - RNA, 19 nt, Homo sapiens
  misc_RNA (1)...(19): siRNA sense strand
acacagagaacaccaguaa

SEQ ID NO: 1950321 - RNA, 19 nt, Homo sapiens
  misc_RNA (1)...(19): siRNA sense strand
gaacgccgcuacucuacag

SEQ ID NO: 1950322 - RNA, 19 nt, Homo sapiens
  misc_RNA (1)...(19): siRNA sense strand
cgaaaugcccuggaaauug

SEQ ID NO: 1950323 - RNA, 19 nt, Homo sapiens
  misc_RNA (1)...(19): siRNA sense strand
gacagagccagauuguuua

SEQ ID NO: 1950324 - RNA, 19 nt, Homo sapiens
  misc_RNA (1)...(19): siRNA sense strand
caaccuggcugaacucaac

SEQ ID NO: 1950325 - RNA, 19 nt, Homo sapiens
  misc_RNA (1)...(19): siRNA sense strand
ccagauuguuuagagguua

SEQ ID NO: 1950326 - RNA, 19 nt, Homo sapiens
  misc_RNA (1)...(19): siRNA sense strand
gagguggaauguuaugugu

SEQ ID NO: 1950327 - RNA, 19 nt, Homo sapiens
  misc_RNA (1)...(19): siRNA sense strand
gcaaaaugcuauugugaau

SEQ ID NO: 1950328 - RNA, 19 nt, Homo sapiens
  misc_RNA (1)...(19): siRNA sense strand
cgagaacgccgcuacucua

SEQ ID NO: 1950329 - RNA, 19 nt, Homo sapiens
  misc_RNA (1)...(19): siRNA sense strand
agagaaagucaaucuauga

SEQ ID NO: 1950330 - RNA, 19 nt, Homo sapiens
  misc_RNA (1)...(19): siRNA sense strand
ggagacagagccagauugu

SEQ ID NO: 1950331 - RNA, 19 nt, Homo sapiens
  misc_RNA (1)...(19): siRNA sense strand
gaacaccaguaaggagaca

SEQ ID NO: 1950332 - RNA, 19 nt, Homo sapiens
  misc_RNA (1)...(19): siRNA sense strand
ucuaugagauucguaacaa

SEQ ID NO: 1950333 - RNA, 19 nt, Homo sapiens
  misc_RNA (1)...(19): siRNA sense strand
aagagaaagucaaucuaug

SEQ ID NO: 1950334 - RNA, 19 nt, Homo sapiens
  misc_RNA (1)...(19): siRNA sense strand
gcaaacgagaagauaagaa

SEQ ID NO: 1950335 - RNA, 19 nt, Homo sapiens
  misc_RNA (1)...(19): siRNA sense strand
gggucaguguucccaauuu

SEQ ID NO: 1950336 - RNA, 19 nt, Homo sapiens
  misc_RNA (1)...(19): siRNA sense strand
gggcucaggccaagagaaa

SEQ ID NO: 1950337 - RNA, 19 nt, Homo sapiens
  misc_RNA (1)...(19): siRNA sense strand
cagauuguuuagagguuaa

SEQ ID NO: 1950338 - RNA, 19 nt, Homo sapiens
  misc_RNA (1)...(19): siRNA sense strand
guucauguuugcuguaagu

SEQ ID NO: 1950339 - RNA, 19 nt, Homo sapiens
  misc_RNA (1)...(19): siRNA sense strand
gagaagauaagaaguugca

SEQ ID NO: 1950340 - RNA, 19 nt, Homo sapiens
  misc_RNA (1)...(19): siRNA sense strand
caaacgagaagauaagaag

SEQ ID NO: 1950341 - RNA, 19 nt, Homo sapiens
  misc_RNA (1)...(19): siRNA sense strand
guuccugguuggccaauau

SEQ ID NO: 1950342 - RNA, 19 nt, Homo sapiens
  misc_RNA (1)...(19): siRNA sense strand
ugacugugguggugaucuu

SEQ ID NO: 1950343 - RNA, 19 nt, Homo sapiens
  misc_RNA (1)...(19): siRNA sense strand
guaaccaggccugcuauga

SEQ ID NO: 1950344 - RNA, 19 nt, Homo sapiens
  misc_RNA (1)...(19): siRNA sense strand
ccaagagaaagucaaucua

SEQ ID NO: 1950345 - RNA, 19 nt, Homo sapiens
  misc_RNA (1)...(19): siRNA sense strand
caccugggauggcgcaaga

SEQ ID NO: 1950346 - RNA, 19 nt, Homo sapiens
  misc_RNA (1)...(19): siRNA sense strand
ggagguggaauguuaugug

SEQ ID NO: 1950347 - RNA, 19 nt, Homo sapiens
  misc_RNA (1)...(19): siRNA sense strand
gcuguaaccaggccugcua

SEQ ID NO: 1950348 - RNA, 19 nt, Homo sapiens
  misc_RNA (1)...(19): siRNA sense strand
ugacucugccuauguguga

SEQ ID NO: 1950349 - RNA, 19 nt, Homo sapiens
  misc_RNA (1)...(19): siRNA sense strand
ccgcuacucuacagucuuc

SEQ ID NO: 1950350 - RNA, 19 nt, Homo sapiens
  misc_RNA (1)...(19): siRNA sense strand
gccagauuguuuagagguu

SEQ ID NO: 1950351 - RNA, 19 nt, Homo sapiens
  misc_RNA (1)...(19): siRNA sense strand
ggucaguguucccaauuuu

SEQ ID NO: 1950352 - RNA, 19 nt, Homo sapiens
  misc_RNA (1)...(19): siRNA sense strand
acgagaagauaagaaguug

SEQ ID NO: 1950353 - RNA, 19 nt, Homo sapiens
  misc_RNA (1)...(19): siRNA sense strand
gaugagcagaccauguuug

SEQ ID NO: 1950354 - RNA, 19 nt, Homo sapiens
  misc_RNA (1)...(19): siRNA sense strand
ccgaaaugcccuggaaauu

SEQ ID NO: 1950355 - RNA, 19 nt, Homo sapiens
  misc_RNA (1)...(19): siRNA sense strand
gggcaaacgagaagauaag

SEQ ID NO: 1950356 - RNA, 19 nt, Homo sapiens
  misc_RNA (1)...(19): siRNA sense strand
gcuucuacauuauccaagu

SEQ ID NO: 1950357 - RNA, 19 nt, Homo sapiens
  misc_RNA (1)...(19): siRNA sense strand
gagaaagucaaucuaugag

SEQ ID NO: 1950358 - RNA, 19 nt, Homo sapiens
  misc_RNA (1)...(19): siRNA sense strand
gcaucaaggagguggaaug

SEQ ID NO: 1950359 - RNA, 19 nt, Homo sapiens
  misc_RNA (1)...(19): siRNA sense strand
guguucauguuugcuguaa

SEQ ID NO: 1950360 - RNA, 19 nt, Homo sapiens
  misc_RNA (1)...(19): siRNA sense strand
ccagugacucugccuaugu

SEQ ID NO: 1950361 - RNA, 19 nt, Homo sapiens
  misc_RNA (1)...(19): siRNA sense strand
gcaucuguguugugcucaa

SEQ ID NO: 1950362 - RNA, 19 nt, Homo sapiens
  misc_RNA (1)...(19): siRNA sense strand
gaugaugagcagaccaugu

SEQ ID NO: 1950363 - RNA, 19 nt, Homo sapiens
  misc_RNA (1)...(19): siRNA sense strand
cagugacucugccuaugug

SEQ ID NO: 1950364 - RNA, 19 nt, Homo sapiens
  misc_RNA (1)...(19): siRNA sense strand
gccaagagaaagucaaucu

SEQ ID NO: 1950365 - RNA, 19 nt, Homo sapiens
  misc_RNA (1)...(19): siRNA sense strand
ccaucucccacauacguua

SEQ ID NO: 1950366 - RNA, 19 nt, Homo sapiens
  misc_RNA (1)...(19): siRNA sense strand
ccacuaugaucggaaggau

SEQ ID NO: 1950367 - RNA, 19 nt, Homo sapiens
  misc_RNA (1)...(19): siRNA sense strand
uuucuaguguucauguuug

SEQ ID NO: 1950368 - RNA, 19 nt, Homo sapiens
  misc_RNA (1)...(19): siRNA sense strand
caaggagguggaauguuau

SEQ ID NO: 1950369 - RNA, 19 nt, Homo sapiens
  misc_RNA (1)...(19): siRNA sense strand
gauccucauuguggccauu

SEQ ID NO: 1950370 - RNA, 19 nt, Homo sapiens
  misc_RNA (1)...(19): siRNA sense strand
uaaguggcaucuguguugu

SEQ ID NO: 1950371 - RNA, 19 nt, Homo sapiens
  misc_RNA (1)...(19): siRNA sense strand
gagaacgccgcuacucuac

SEQ ID NO: 1950372 - RNA, 19 nt, Homo sapiens
  misc_RNA (1)...(19): siRNA sense strand
gcucaggccaagagaaagu

SEQ ID NO: 1950373 - RNA, 19 nt, Homo sapiens
  misc_RNA (1)...(19): siRNA sense strand
gacugucuuucuaguguuc

SEQ ID NO: 1950374 - RNA, 19 nt, Homo sapiens
  misc_RNA (1)...(19): siRNA sense strand
uccaagugguguuccgaaa

SEQ ID NO: 1950375 - RNA, 19 nt, Homo sapiens
  misc_RNA (1)...(19): siRNA sense strand
agagccagauuguuuagag

SEQ ID NO: 1950376 - RNA, 19 nt, Homo sapiens
  misc_RNA (1)...(19): siRNA sense strand
aaaaugcuauugugaaugg

SEQ ID NO: 1950377 - RNA, 19 nt, Homo sapiens
  misc_RNA (1)...(19): siRNA sense strand
ugaauggggugcugcagaa

SEQ ID NO: 1950378 - RNA, 19 nt, Homo sapiens
  misc_RNA (1)...(19): siRNA sense strand
acagagaacaccaguaagg

SEQ ID NO: 1950379 - RNA, 19 nt, Homo sapiens
  misc_RNA (1)...(19): siRNA sense strand
gcagcacuccacuaugauc

SEQ ID NO: 1950380 - RNA, 19 nt, Homo sapiens
  misc_RNA (1)...(19): siRNA sense strand
ggucuuccagaucauaaug

SEQ ID NO: 1950381 - RNA, 19 nt, Homo sapiens
  misc_RNA (1)...(19): siRNA sense strand
caucaaggagguggaaugu

SEQ ID NO: 1950382 - RNA, 19 nt, Homo sapiens
  misc_RNA (1)...(19): siRNA sense strand
gccaauauuuucucuaugg

SEQ ID NO: 1950383 - RNA, 19 nt, Homo sapiens
  misc_RNA (1)...(19): siRNA sense strand
ccaagugguguuccgaaau

SEQ ID NO: 1950384 - RNA, 19 nt, Homo sapiens
  misc_RNA (1)...(19): siRNA sense strand
cagagaacaccaguaagga

SEQ ID NO: 1950385 - RNA, 19 nt, Homo sapiens
  misc_RNA (1)...(19): siRNA sense strand
gagacgguguacgaugaug

SEQ ID NO: 1950386 - RNA, 19 nt, Homo sapiens
  misc_RNA (1)...(19): siRNA sense strand
ccacacccaucaggucuac

SEQ ID NO: 1950387 - RNA, 19 nt, Homo sapiens
  misc_RNA (1)...(19): siRNA sense strand
gcgagaacgccgcuacucu

SEQ ID NO: 1950388 - RNA, 19 nt, Homo sapiens
  misc_RNA (1)...(19): siRNA sense strand
gcagcagcacuccacuaug

SEQ ID NO: 1950389 - RNA, 19 nt, Homo sapiens
  misc_RNA (1)...(19): siRNA sense strand
agaaagucaaucuaugaga

SEQ ID NO: 1950390 - RNA, 19 nt, Homo sapiens
  misc_RNA (1)...(19): siRNA sense strand
uaaccaggccugcuaugac

SEQ ID NO: 1950391 - RNA, 19 nt, Homo sapiens
  misc_RNA (1)...(19): siRNA sense strand
ggucuacgcacugcaucaa

SEQ ID NO: 1950392 - RNA, 19 nt, Homo sapiens
  misc_RNA (1)...(19): siRNA sense strand
ggagacgguguacgaugau

SEQ ID NO: 1950393 - RNA, 19 nt, Homo sapiens
  misc_RNA (1)...(19): siRNA sense strand
aacgagaagauaagaaguu

SEQ ID NO: 1950394 - RNA, 19 nt, Homo sapiens
  misc_RNA (1)...(19): siRNA sense strand
ggaagaagcagauauuuga

SEQ ID NO: 1950395 - RNA, 19 nt, Homo sapiens
  misc_RNA (1)...(19): siRNA sense strand
gcacggaccucaacaugga

SEQ ID NO: 1950396 - RNA, 19 nt, Homo sapiens
  misc_RNA (1)...(19): siRNA sense strand
uuacucaucugccucauuu

SEQ ID NO: 1950397 - RNA, 19 nt, Homo sapiens
  misc_RNA (1)...(19): siRNA sense strand
gcagauauuugaagagaac

SEQ ID NO: 1950398 - RNA, 19 nt, Homo sapiens
  misc_RNA (1)...(19): siRNA sense strand
gagggaagaagcagauauu

SEQ ID NO: 1950399 - RNA, 19 nt, Homo sapiens
  misc_RNA (1)...(19): siRNA sense strand
agaagcagauauuugaaga

SEQ ID NO: 1950400 - RNA, 19 nt, Homo sapiens
  misc_RNA (1)...(19): siRNA sense strand
gggaagaagcagauauuug

SEQ ID NO: 1950401 - RNA, 19 nt, Homo sapiens
  misc_RNA (1)...(19): siRNA sense strand
gaagaagcagauauuugaa

SEQ ID NO: 1950402 - RNA, 19 nt, Homo sapiens
  misc_RNA (1)...(19): siRNA sense strand
gccauuuacugccuuguga

SEQ ID NO: 1950403 - RNA, 19 nt, Homo sapiens
  misc_RNA (1)...(19): siRNA sense strand
gcuuuagucuggcagugua

SEQ ID NO: 1950404 - RNA, 19 nt, Homo sapiens
  misc_RNA (1)...(19): siRNA sense strand
aagcagauauuugaagaga

SEQ ID NO: 1950405 - RNA, 19 nt, Homo sapiens
  misc_RNA (1)...(19): siRNA sense strand
ugacguuggucuucuuuua

SEQ ID NO: 1950406 - RNA, 19 nt, Homo sapiens
  misc_RNA (1)...(19): siRNA sense strand
cccagcaccuuaaggaugu

SEQ ID NO: 1950407 - RNA, 19 nt, Homo sapiens
  misc_RNA (1)...(19): siRNA sense strand
gcacgagagggaagaagca

SEQ ID NO: 1950408 - RNA, 19 nt, Homo sapiens
  misc_RNA (1)...(19): siRNA sense strand
gagagggaagaagcagaua

SEQ ID NO: 1950409 - RNA, 19 nt, Homo sapiens
  misc_RNA (1)...(19): siRNA sense strand
gauauuugaagagaacaga

SEQ ID NO: 1950410 - RNA, 19 nt, Homo sapiens
  misc_RNA (1)...(19): siRNA sense strand
cgagagggaagaagcagau

SEQ ID NO: 1950411 - RNA, 19 nt, Homo sapiens
  misc_RNA (1)...(19): siRNA sense strand
cugcuucucucucuauguc

SEQ ID NO: 1950412 - RNA, 19 nt, Homo sapiens
  misc_RNA (1)...(19): siRNA sense strand
uuuacugccuugugacguu

SEQ ID NO: 1950413 - RNA, 19 nt, Homo sapiens
  misc_RNA (1)...(19): siRNA sense strand
cagcccagcaccuuaagga

SEQ ID NO: 1950414 - RNA, 19 nt, Homo sapiens
  misc_RNA (1)...(19): siRNA sense strand
cagcugcuucucucucuau

SEQ ID NO: 1950415 - RNA, 19 nt, Homo sapiens
  misc_RNA (1)...(19): siRNA sense strand
gaagcagauauuugaagag

SEQ ID NO: 1950416 - RNA, 19 nt, Homo sapiens
  misc_RNA (1)...(19): siRNA sense strand
guagaaaugucauguagac

SEQ ID NO: 1950417 - RNA, 19 nt, Homo sapiens
  misc_RNA (1)...(19): siRNA sense strand
ggguagaaaugucauguag

SEQ ID NO: 1950418 - RNA, 19 nt, Homo sapiens
  misc_RNA (1)...(19): siRNA sense strand
gguauggcucccuuucuuu

SEQ ID NO: 1950419 - RNA, 19 nt, Homo sapiens
  misc_RNA (1)...(19): siRNA sense strand
ugguauggcucccuuucuu

SEQ ID NO: 1950420 - RNA, 19 nt, Homo sapiens
  misc_RNA (1)...(19): siRNA sense strand
ccuguaaucccagcacuuu

SEQ ID NO: 1950421 - RNA, 19 nt, Homo sapiens
  misc_RNA (1)...(19): siRNA sense strand
guauggcucccuuucuuuc

SEQ ID NO: 1950422 - RNA, 19 nt, Homo sapiens
  misc_RNA (1)...(19): siRNA sense strand
gguagaaaugucauguaga

SEQ ID NO: 1950423 - RNA, 19 nt, Homo sapiens
  misc_RNA (1)...(19): siRNA sense strand
gaacuucuacaucaacuau

SEQ ID NO: 1950424 - RNA, 19 nt, Homo sapiens
  misc_RNA (1)...(19): siRNA sense strand
cagcaggucuucaaugauc

SEQ ID NO: 1950425 - RNA, 19 nt, Homo sapiens
  misc_RNA (1)...(19): siRNA sense strand
ccaauaaggaucucauuuc

SEQ ID NO: 1950426 - RNA, 19 nt, Homo sapiens
  misc_RNA (1)...(19): siRNA sense strand
aagaagacauggugacugu

SEQ ID NO: 1950427 - RNA, 19 nt, Homo sapiens
  misc_RNA (1)...(19): siRNA sense strand
gccaauaaggaucucauuu

SEQ ID NO: 1950428 - RNA, 19 nt, Homo sapiens
  misc_RNA (1)...(19): siRNA sense strand
caauaaggaucucauuucc

SEQ ID NO: 1950429 - RNA, 19 nt, Homo sapiens
  misc_RNA (1)...(19): siRNA sense strand
cucaugagcucccgaguca

SEQ ID NO: 1950430 - RNA, 19 nt, Homo sapiens
  misc_RNA (1)...(19): siRNA sense strand
ccgcaggauugaaggaguu

SEQ ID NO: 1950431 - RNA, 19 nt, Homo sapiens
  misc_RNA (1)...(19): siRNA sense strand
caaugauccucucgucucu

SEQ ID NO: 1950432 - RNA, 19 nt, Homo sapiens
  misc_RNA (1)...(19): siRNA sense strand
ugcaggagcuucggcaaga

SEQ ID NO: 1950433 - RNA, 19 nt, Homo sapiens
  misc_RNA (1)...(19): siRNA sense strand
aucagcaggucuucaauga

SEQ ID NO: 1950434 - RNA, 19 nt, Homo sapiens
  misc_RNA (1)...(19): siRNA sense strand
gaucucauuuccgcaggau

SEQ ID NO: 1950435 - RNA, 19 nt, Homo sapiens
  misc_RNA (1)...(19): siRNA sense strand
acccuuuccuggccaagua

SEQ ID NO: 1950436 - RNA, 19 nt, Homo sapiens
  misc_RNA (1)...(19): siRNA sense strand
ucucauuuccgcaggauug

SEQ ID NO: 1950437 - RNA, 19 nt, Homo sapiens
  misc_RNA (1)...(19): siRNA sense strand
gaaucagcaggucuucaau

SEQ ID NO: 1950438 - RNA, 19 nt, Homo sapiens
  misc_RNA (1)...(19): siRNA sense strand
augauccucucgucucuga

SEQ ID NO: 1950439 - RNA, 19 nt, Homo sapiens
  misc_RNA (1)...(19): siRNA sense strand
gauccucucgucucugaag

SEQ ID NO: 1950440 - RNA, 19 nt, Homo sapiens
  misc_RNA (1)...(19): siRNA sense strand
ggccaauaaggaucucauu

SEQ ID NO: 1950441 - RNA, 19 nt, Homo sapiens
  misc_RNA (1)...(19): siRNA sense strand
gcaggagcuucggcaagag

SEQ ID NO: 1950442 - RNA, 19 nt, Homo sapiens
  misc_RNA (1)...(19): siRNA sense strand
gaacacaugcaguggauua

SEQ ID NO: 1950443 - RNA, 19 nt, Homo sapiens
  misc_RNA (1)...(19): siRNA sense strand
ggaugauucugaucuauuu

SEQ ID NO: 1950444 - RNA, 19 nt, Homo sapiens
  misc_RNA (1)...(19): siRNA sense strand
gcacgaggccuucuucauu

SEQ ID NO: 1950445 - RNA, 19 nt, Homo sapiens
  misc_RNA (1)...(19): siRNA sense strand
gugcagaguuggugucuuu

SEQ ID NO: 1950446 - RNA, 19 nt, Homo sapiens
  misc_RNA (1)...(19): siRNA sense strand
gaucaacaaacuccauuua

SEQ ID NO: 1950447 - RNA, 19 nt, Homo sapiens
  misc_RNA (1)...(19): siRNA sense strand
ucaacaaacuccauuuaug

SEQ ID NO: 1950448 - RNA, 19 nt, Homo sapiens
  misc_RNA (1)...(19): siRNA sense strand
gaaaguguauuuguuacug

SEQ ID NO: 1950449 - RNA, 19 nt, Homo sapiens
  misc_RNA (1)...(19): siRNA sense strand
caacaaacuccauuuaugu

SEQ ID NO: 1950450 - RNA, 19 nt, Homo sapiens
  misc_RNA (1)...(19): siRNA sense strand
gcacagagaguaacauaca

SEQ ID NO: 1950451 - RNA, 19 nt, Homo sapiens
  misc_RNA (1)...(19): siRNA sense strand
ggagaagugucaacaaguc

SEQ ID NO: 1950452 - RNA, 19 nt, Homo sapiens
  misc_RNA (1)...(19): siRNA sense strand
gcucauuucugcaguuaga

SEQ ID NO: 1950453 - RNA, 19 nt, Homo sapiens
  misc_RNA (1)...(19): siRNA sense strand
gaaaggaaugacaguguuu

SEQ ID NO: 1950454 - RNA, 19 nt, Homo sapiens
  misc_RNA (1)...(19): siRNA sense strand
gaggagaagugucaacaag

SEQ ID NO: 1950455 - RNA, 19 nt, Homo sapiens
  misc_RNA (1)...(19): siRNA sense strand
gcagcagaguuacugauga

SEQ ID NO: 1950456 - RNA, 19 nt, Homo sapiens
  misc_RNA (1)...(19): siRNA sense strand
gagaguaacauacaaauac

SEQ ID NO: 1950457 - RNA, 19 nt, Homo sapiens
  misc_RNA (1)...(19): siRNA sense strand
cgacacccgugcugguaua

SEQ ID NO: 1950458 - RNA, 19 nt, Homo sapiens
  misc_RNA (1)...(19): siRNA sense strand
gaaguaaccagagcuguga

SEQ ID NO: 1950459 - RNA, 19 nt, Homo sapiens
  misc_RNA (1)...(19): siRNA sense strand
uuacagcacugcacagaga

SEQ ID NO: 1950460 - RNA, 19 nt, Homo sapiens
  misc_RNA (1)...(19): siRNA sense strand
gcaaacccacgacuucaaa

SEQ ID NO: 1950461 - RNA, 19 nt, Homo sapiens
  misc_RNA (1)...(19): siRNA sense strand
aaaggaugauucugaucua

SEQ ID NO: 1950462 - RNA, 19 nt, Homo sapiens
  misc_RNA (1)...(19): siRNA sense strand
agaaaggaaugacaguguu

SEQ ID NO: 1950463 - RNA, 19 nt, Homo sapiens
  misc_RNA (1)...(19): siRNA sense strand
ugacgaaguucaguguauu

SEQ ID NO: 1950464 - RNA, 19 nt, Homo sapiens
  misc_RNA (1)...(19): siRNA sense strand
ggacguggacauugacgaa

SEQ ID NO: 1950465 - RNA, 19 nt, Homo sapiens
  misc_RNA (1)...(19): siRNA sense strand
ucuauuugcuuccaguaaa

SEQ ID NO: 1950466 - RNA, 19 nt, Homo sapiens
  misc_RNA (1)...(19): siRNA sense strand
gaggaguaccugucauuug

SEQ ID NO: 1950467 - RNA, 19 nt, Homo sapiens
  misc_RNA (1)...(19): siRNA sense strand
uauucuggcuaacuugaua

SEQ ID NO: 1950468 - RNA, 19 nt, Homo sapiens
  misc_RNA (1)...(19): siRNA sense strand
gcagcugucccgcauagaa

SEQ ID NO: 1950469 - RNA, 19 nt, Homo sapiens
  misc_RNA (1)...(19): siRNA sense strand
uggagaagcugaagaucau

SEQ ID NO: 1950470 - RNA, 19 nt, Homo sapiens
  misc_RNA (1)...(19): siRNA sense strand
acauuaccauuaaccagua

SEQ ID NO: 1950471 - RNA, 19 nt, Homo sapiens
  misc_RNA (1)...(19): siRNA sense strand
uggaggacguggacauuga

SEQ ID NO: 1950472 - RNA, 19 nt, Homo sapiens
  misc_RNA (1)...(19): siRNA sense strand
uaagcaagcugaggaguac

SEQ ID NO: 1950473 - RNA, 19 nt, Homo sapiens
  misc_RNA (1)...(19): siRNA sense strand
cacgaggccuucuucauuc

SEQ ID NO: 1950474 - RNA, 19 nt, Homo sapiens
  misc_RNA (1)...(19): siRNA sense strand
caauauccuuugucguuca

SEQ ID NO: 1950475 - RNA, 19 nt, Homo sapiens
  misc_RNA (1)...(19): siRNA sense strand
guaccugucauuugccuuu

SEQ ID NO: 1950476 - RNA, 19 nt, Homo sapiens
  misc_RNA (1)...(19): siRNA sense strand
ggacgcaaggcuauguuug

SEQ ID NO: 1950477 - RNA, 19 nt, Homo sapiens
  misc_RNA (1)...(19): siRNA sense strand
agaccgugauaguccaaua

SEQ ID NO: 1950478 - RNA, 19 nt, Homo sapiens
  misc_RNA (1)...(19): siRNA sense strand
gacgcaaggcuauguuuga

SEQ ID NO: 1950479 - RNA, 19 nt, Homo sapiens
  misc_RNA (1)...(19): siRNA sense strand
ugacagcucaaaccugaaa

SEQ ID NO: 1950480 - RNA, 19 nt, Homo sapiens
  misc_RNA (1)...(19): siRNA sense strand
ugaaccagcuguuuaaaau

SEQ ID NO: 1950481 - RNA, 19 nt, Homo sapiens
  misc_RNA (1)...(19): siRNA sense strand
gaacagaagcucguuucag

SEQ ID NO: 1950482 - RNA, 19 nt, Homo sapiens
  misc_RNA (1)...(19): siRNA sense strand
uagaacacaugcaguggau

SEQ ID NO: 1950483 - RNA, 19 nt, Homo sapiens
  misc_RNA (1)...(19): siRNA sense strand
gcuugaccuucgaguguuu

SEQ ID NO: 1950484 - RNA, 19 nt, Homo sapiens
  misc_RNA (1)...(19): siRNA sense strand
cacaugcaguggauuacuu

SEQ ID NO: 1950485 - RNA, 19 nt, Homo sapiens
  misc_RNA (1)...(19): siRNA sense strand
gaaugacaguguuuuggaa

SEQ ID NO: 1950486 - RNA, 19 nt, Homo sapiens
  misc_RNA (1)...(19): siRNA sense strand
guuugcagcucauuuaagg

SEQ ID NO: 1950487 - RNA, 19 nt, Homo sapiens
  misc_RNA (1)...(19): siRNA sense strand
gaugcaguuugcggaagua

SEQ ID NO: 1950488 - RNA, 19 nt, Homo sapiens
  misc_RNA (1)...(19): siRNA sense strand
cagcagaguuacugaugag

SEQ ID NO: 1950489 - RNA, 19 nt, Homo sapiens
  misc_RNA (1)...(19): siRNA sense strand
uccaauauccuuugucguu

SEQ ID NO: 1950490 - RNA, 19 nt, Homo sapiens
  misc_RNA (1)...(19): siRNA sense strand
cguuucagcucuuucacuu

SEQ ID NO: 1950491 - RNA, 19 nt, Homo sapiens
  misc_RNA (1)...(19): siRNA sense strand
ugacagcgauuuuaagcaa

SEQ ID NO: 1950492 - RNA, 19 nt, Homo sapiens
  misc_RNA (1)...(19): siRNA sense strand
gcgcuugaccuucgagugu

SEQ ID NO: 1950493 - RNA, 19 nt, Homo sapiens
  misc_RNA (1)...(19): siRNA sense strand
gggcucugccugucaugua

SEQ ID NO: 1950494 - RNA, 19 nt, Homo sapiens
  misc_RNA (1)...(19): siRNA sense strand
ucagcucuuucacuuggua

SEQ ID NO: 1950495 - RNA, 19 nt, Homo sapiens
  misc_RNA (1)...(19): siRNA sense strand
ccaauaaugcagaucaaca

SEQ ID NO: 1950496 - RNA, 19 nt, Homo sapiens
  misc_RNA (1)...(19): siRNA sense strand
acacgucaaaggcuacaua

SEQ ID NO: 1950497 - RNA, 19 nt, Homo sapiens
  misc_RNA (1)...(19): siRNA sense strand
guggauuacuugggacuug

SEQ ID NO: 1950498 - RNA, 19 nt, Homo sapiens
  misc_RNA (1)...(19): siRNA sense strand
cgucaaaggcuacauaucg

SEQ ID NO: 1950499 - RNA, 19 nt, Homo sapiens
  misc_RNA (1)...(19): siRNA sense strand
ucauuugccuuugagcauu

SEQ ID NO: 1950500 - RNA, 19 nt, Homo sapiens
  misc_RNA (1)...(19): siRNA sense strand
auacaaauacuacguugga

SEQ ID NO: 1950501 - RNA, 19 nt, Homo sapiens
  misc_RNA (1)...(19): siRNA sense strand
caagugccagaccgugaua

SEQ ID NO: 1950502 - RNA, 19 nt, Homo sapiens
  misc_RNA (1)...(19): siRNA sense strand
ucagcaagcagaacccauu

SEQ ID NO: 1950503 - RNA, 19 nt, Homo sapiens
  misc_RNA (1)...(19): siRNA sense strand
cuacauaucgcaucagcau

SEQ ID NO: 1950504 - RNA, 19 nt, Homo sapiens
  misc_RNA (1)...(19): siRNA sense strand
ggacauugacgaaguucag

SEQ ID NO: 1950505 - RNA, 19 nt, Homo sapiens
  misc_RNA (1)...(19): siRNA sense strand
gagaagcugaagaucauca

SEQ ID NO: 1950506 - RNA, 19 nt, Homo sapiens
  misc_RNA (1)...(19): siRNA sense strand
uuaagcaagcugaggagua

SEQ ID NO: 1950507 - RNA, 19 nt, Homo sapiens
  misc_RNA (1)...(19): siRNA sense strand
caaaccugaaagacgauua

SEQ ID NO: 1950508 - RNA, 19 nt, Homo sapiens
  misc_RNA (1)...(19): siRNA sense strand
cuucgaguguuugccaaua

SEQ ID NO: 1950509 - RNA, 19 nt, Homo sapiens
  misc_RNA (1)...(19): siRNA sense strand
gagcaucuugugcagaguu

SEQ ID NO: 1950510 - RNA, 19 nt, Homo sapiens
  misc_RNA (1)...(19): siRNA sense strand
ucauagaggcauacaagug

SEQ ID NO: 1950511 - RNA, 19 nt, Homo sapiens
  misc_RNA (1)...(19): siRNA sense strand
cagaguuggugucuuuuaa

SEQ ID NO: 1950512 - RNA, 19 nt, Homo sapiens
  misc_RNA (1)...(19): siRNA sense strand
cacagagaguaacauacaa

SEQ ID NO: 1950513 - RNA, 19 nt, Homo sapiens
  misc_RNA (1)...(19): siRNA sense strand
ggaacagaagcucguuuca

SEQ ID NO: 1950514 - RNA, 19 nt, Homo sapiens
  misc_RNA (1)...(19): siRNA sense strand
uagaaaggaaugacagugu

SEQ ID NO: 1950515 - RNA, 19 nt, Homo sapiens
  misc_RNA (1)...(19): siRNA sense strand
auacaugggacacgucaaa

SEQ ID NO: 1950516 - RNA, 19 nt, Homo sapiens
  misc_RNA (1)...(19): siRNA sense strand
gagcauugucaccguucua

SEQ ID NO: 1950517 - RNA, 19 nt, Homo sapiens
  misc_RNA (1)...(19): siRNA sense strand
acagagaguaacauacaaa

SEQ ID NO: 1950518 - RNA, 19 nt, Homo sapiens
  misc_RNA (1)...(19): siRNA sense strand
ugaaauguuugcagcucau

SEQ ID NO: 1950519 - RNA, 19 nt, Homo sapiens
  misc_RNA (1)...(19): siRNA sense strand
cagcaagcagaacccauuu

SEQ ID NO: 1950520 - RNA, 19 nt, Homo sapiens
  misc_RNA (1)...(19): siRNA sense strand
uggcuaacuugauauacau

SEQ ID NO: 1950521 - RNA, 19 nt, Homo sapiens
  misc_RNA (1)...(19): siRNA sense strand
aaacacaccagcugucucu

SEQ ID NO: 1950522 - RNA, 19 nt, Homo sapiens
  misc_RNA (1)...(19): siRNA sense strand
gaucuauuugcuuccagua

SEQ ID NO: 1950523 - RNA, 19 nt, Homo sapiens
  misc_RNA (1)...(19): siRNA sense strand
ugucaccguucuagucaga

SEQ ID NO: 1950524 - RNA, 19 nt, Homo sapiens
  misc_RNA (1)...(19): siRNA sense strand
gauuacagcacugcacaga

SEQ ID NO: 1950525 - RNA, 19 nt, Homo sapiens
  misc_RNA (1)...(19): siRNA sense strand
aggaguaccugucauuugc

SEQ ID NO: 1950526 - RNA, 19 nt, Homo sapiens
  misc_RNA (1)...(19): siRNA sense strand
cccuuaugaugaaauguuu

SEQ ID NO: 1950527 - RNA, 19 nt, Homo sapiens
  misc_RNA (1)...(19): siRNA sense strand
uugacgaaguucaguguau

SEQ ID NO: 1950528 - RNA, 19 nt, Homo sapiens
  misc_RNA (1)...(19): siRNA sense strand
cauuugccuuugagcauug

SEQ ID NO: 1950529 - RNA, 19 nt, Homo sapiens
  misc_RNA (1)...(19): siRNA sense strand
gagcauuccaggcccacaa

SEQ ID NO: 1950530 - RNA, 19 nt, Homo sapiens
  misc_RNA (1)...(19): siRNA sense strand
gcagaguuggugucuuuua

SEQ ID NO: 1950531 - RNA, 19 nt, Homo sapiens
  misc_RNA (1)...(19): siRNA sense strand
uugcucauuucugcaguua

SEQ ID NO: 1950532 - RNA, 19 nt, Homo sapiens
  misc_RNA (1)...(19): siRNA sense strand
acauaucgcaucagcauca

SEQ ID NO: 1950533 - RNA, 19 nt, Homo sapiens
  misc_RNA (1)...(19): siRNA sense strand
cuggcuaacuugauauaca

SEQ ID NO: 1950534 - RNA, 19 nt, Homo sapiens
  misc_RNA (1)...(19): siRNA sense strand
cguggacauugacgaaguu

SEQ ID NO: 1950535 - RNA, 19 nt, Homo sapiens
  misc_RNA (1)...(19): siRNA sense strand
cugcacagagaguaacaua

SEQ ID NO: 1950536 - RNA, 19 nt, Homo sapiens
  misc_RNA (1)...(19): siRNA sense strand
uggcagcugucccgcauag

SEQ ID NO: 1950537 - RNA, 19 nt, Homo sapiens
  misc_RNA (1)...(19): siRNA sense strand
ggcucugccugucauguau

SEQ ID NO: 1950538 - RNA, 19 nt, Homo sapiens
  misc_RNA (1)...(19): siRNA sense strand
uaucgcaucagcaucagaa

SEQ ID NO: 1950539 - RNA, 19 nt, Homo sapiens
  misc_RNA (1)...(19): siRNA sense strand
cuacaggaaccucuuuaag

SEQ ID NO: 1950540 - RNA, 19 nt, Homo sapiens
  misc_RNA (1)...(19): siRNA sense strand
gaccgugauaguccaauau

SEQ ID NO: 1950541 - RNA, 19 nt, Homo sapiens
  misc_RNA (1)...(19): siRNA sense strand
ccuacaggaaccucuuuaa

SEQ ID NO: 1950542 - RNA, 19 nt, Homo sapiens
  misc_RNA (1)...(19): siRNA sense strand
ggaaagacaccucgaggaa

SEQ ID NO: 1950543 - RNA, 19 nt, Homo sapiens
  misc_RNA (1)...(19): siRNA sense strand
ggaggaagaagaagaagaa

SEQ ID NO: 1950544 - RNA, 19 nt, Homo sapiens
  misc_RNA (1)...(19): siRNA sense strand
gaaagaagaagagcaggaa

SEQ ID NO: 1950545 - RNA, 19 nt, Homo sapiens
  misc_RNA (1)...(19): siRNA sense strand
gggcgcaccaggcuuauua

SEQ ID NO: 1950546 - RNA, 19 nt, Homo sapiens
  misc_RNA (1)...(19): siRNA sense strand
ggaagaagaagaagaagag

SEQ ID NO: 1950547 - RNA, 19 nt, Homo sapiens
  misc_RNA (1)...(19): siRNA sense strand
ggaaaucguaaccaaagaa

SEQ ID NO: 1950548 - RNA, 19 nt, Homo sapiens
  misc_RNA (1)...(19): siRNA sense strand
gacaagaggaggaagaaga

SEQ ID NO: 1950549 - RNA, 19 nt, Homo sapiens
  misc_RNA (1)...(19): siRNA sense strand
uagaggaaaucguaaccaa

SEQ ID NO: 1950550 - RNA, 19 nt, Homo sapiens
  misc_RNA (1)...(19): siRNA sense strand
gaaaagagaaagaagaaga

SEQ ID NO: 1950551 - RNA, 19 nt, Homo sapiens
  misc_RNA (1)...(19): siRNA sense strand
gaggaaaucguaaccaaag

SEQ ID NO: 1950552 - RNA, 19 nt, Homo sapiens
  misc_RNA (1)...(19): siRNA sense strand
aaagacaccucgaggaacu

SEQ ID NO: 1950553 - RNA, 19 nt, Homo sapiens
  misc_RNA (1)...(19): siRNA sense strand
ggaaguacaaggacaagag

SEQ ID NO: 1950554 - RNA, 19 nt, Homo sapiens
  misc_RNA (1)...(19): siRNA sense strand
agaagaagaagaagaggaa

SEQ ID NO: 1950555 - RNA, 19 nt, Homo sapiens
  misc_RNA (1)...(19): siRNA sense strand
aagaagagcaggaaagaca

SEQ ID NO: 1950556 - RNA, 19 nt, Homo sapiens
  misc_RNA (1)...(19): siRNA sense strand
agaagaagggcaaggagaa

SEQ ID NO: 1950557 - RNA, 19 nt, Homo sapiens
  misc_RNA (1)...(19): siRNA sense strand
acaagaggaggaagaagaa

SEQ ID NO: 1950558 - RNA, 19 nt, Homo sapiens
  misc_RNA (1)...(19): siRNA sense strand
agaagaagaagaggaagaa

SEQ ID NO: 1950559 - RNA, 19 nt, Homo sapiens
  misc_RNA (1)...(19): siRNA sense strand
gaagaagggcaaggagaag

SEQ ID NO: 1950560 - RNA, 19 nt, Homo sapiens
  misc_RNA (1)...(19): siRNA sense strand
agaagaagagcaggaaaga

SEQ ID NO: 1950561 - RNA, 19 nt, Homo sapiens
  misc_RNA (1)...(19): siRNA sense strand
gaaaucguaaccaaagaac

SEQ ID NO: 1950562 - RNA, 19 nt, Homo sapiens
  misc_RNA (1)...(19): siRNA sense strand
ucuucuagcuccucuucuu

SEQ ID NO: 1950563 - RNA, 19 nt, Homo sapiens
  misc_RNA (1)...(19): siRNA sense strand
ugaagaagaagggcaagga

SEQ ID NO: 1950564 - RNA, 19 nt, Homo sapiens
  misc_RNA (1)...(19): siRNA sense strand
agaggaggaagaagaagaa

SEQ ID NO: 1950565 - RNA, 19 nt, Homo sapiens
  misc_RNA (1)...(19): siRNA sense strand
agaggaaaucguaaccaaa

SEQ ID NO: 1950566 - RNA, 19 nt, Homo sapiens
  misc_RNA (1)...(19): siRNA sense strand
aggaaaucguaaccaaaga

SEQ ID NO: 1950567 - RNA, 19 nt, Homo sapiens
  misc_RNA (1)...(19): siRNA sense strand
aaagaagaagagcaggaaa

SEQ ID NO: 1950568 - RNA, 19 nt, Homo sapiens
  misc_RNA (1)...(19): siRNA sense strand
gagauggcgagguccuaga

SEQ ID NO: 1950569 - RNA, 19 nt, Homo sapiens
  misc_RNA (1)...(19): siRNA sense strand
aagaagaagaagaggaaga

SEQ ID NO: 1950570 - RNA, 19 nt, Homo sapiens
  misc_RNA (1)...(19): siRNA sense strand
ggaaagacaccucgaggaa

SEQ ID NO: 1950571 - RNA, 19 nt, Homo sapiens
  misc_RNA (1)...(19): siRNA sense strand
ggaggaagaagaagaagaa

SEQ ID NO: 1950572 - RNA, 19 nt, Homo sapiens
  misc_RNA (1)...(19): siRNA sense strand
gaaagaagaagagcaggaa

SEQ ID NO: 1950573 - RNA, 19 nt, Homo sapiens
  misc_RNA (1)...(19): siRNA sense strand
gggcgcaccaggcuuauua

SEQ ID NO: 1950574 - RNA, 19 nt, Homo sapiens
  misc_RNA (1)...(19): siRNA sense strand
ggaagaagaagaagaagag

SEQ ID NO: 1950575 - RNA, 19 nt, Homo sapiens
  misc_RNA (1)...(19): siRNA sense strand
gacaagaggaggaagaaga

SEQ ID NO: 1950576 - RNA, 19 nt, Homo sapiens
  misc_RNA (1)...(19): siRNA sense strand
gaaaagagaaagaagaaga

SEQ ID NO: 1950577 - RNA, 19 nt, Homo sapiens
  misc_RNA (1)...(19): siRNA sense strand
aaagacaccucgaggaacu

SEQ ID NO: 1950578 - RNA, 19 nt, Homo sapiens
  misc_RNA (1)...(19): siRNA sense strand
ggaaguacaaggacaagag

SEQ ID NO: 1950579 - RNA, 19 nt, Homo sapiens
  misc_RNA (1)...(19): siRNA sense strand
agaagaagaagaagaggaa

SEQ ID NO: 1950580 - RNA, 19 nt, Homo sapiens
  misc_RNA (1)...(19): siRNA sense strand
aagaagagcaggaaagaca

SEQ ID NO: 1950581 - RNA, 19 nt, Homo sapiens
  misc_RNA (1)...(19): siRNA sense strand
agaagaagggcaaggagaa

SEQ ID NO: 1950582 - RNA, 19 nt, Homo sapiens
  misc_RNA (1)...(19): siRNA sense strand
acaagaggaggaagaagaa

SEQ ID NO: 1950583 - RNA, 19 nt, Homo sapiens
  misc_RNA (1)...(19): siRNA sense strand
agaagaagaagaggaagaa

SEQ ID NO: 1950584 - RNA, 19 nt, Homo sapiens
  misc_RNA (1)...(19): siRNA sense strand
gaagaagggcaaggagaag

SEQ ID NO: 1950585 - RNA, 19 nt, Homo sapiens
  misc_RNA (1)...(19): siRNA sense strand
agaagaagagcaggaaaga

SEQ ID NO: 1950586 - RNA, 19 nt, Homo sapiens
  misc_RNA (1)...(19): siRNA sense strand
ucuucuagcuccucuucuu

SEQ ID NO: 1950587 - RNA, 19 nt, Homo sapiens
  misc_RNA (1)...(19): siRNA sense strand
ugaagaagaagggcaagga

SEQ ID NO: 1950588 - RNA, 19 nt, Homo sapiens
  misc_RNA (1)...(19): siRNA sense strand
agaggaggaagaagaagaa

SEQ ID NO: 1950589 - RNA, 19 nt, Homo sapiens
  misc_RNA (1)...(19): siRNA sense strand
aaagaagaagagcaggaaa

SEQ ID NO: 1950590 - RNA, 19 nt, Homo sapiens
  misc_RNA (1)...(19): siRNA sense strand
aagaagaagaagaggaaga

SEQ ID NO: 1950591 - RNA, 19 nt, Homo sapiens
  misc_RNA (1)...(19): siRNA sense strand
gaacuuggcuuaaauauag

SEQ ID NO: 1950592 - RNA, 19 nt, Homo sapiens
  misc_RNA (1)...(19): siRNA sense strand
ggaccucucucucauuauu

SEQ ID NO: 1950593 - RNA, 19 nt, Homo sapiens
  misc_RNA (1)...(19): siRNA sense strand
ggaaugaaaugggaacuga

SEQ ID NO: 1950594 - RNA, 19 nt, Homo sapiens
  misc_RNA (1)...(19): siRNA sense strand
gaccugagauuaaacuuga

SEQ ID NO: 1950595 - RNA, 19 nt, Homo sapiens
  misc_RNA (1)...(19): siRNA sense strand
ccacuucgcauaucauuua

SEQ ID NO: 1950596 - RNA, 19 nt, Homo sapiens
  misc_RNA (1)...(19): siRNA sense strand
caaaugguguuaucccuuu

SEQ ID NO: 1950597 - RNA, 19 nt, Homo sapiens
  misc_RNA (1)...(19): siRNA sense strand
gaggaugucuuguauuaug

SEQ ID NO: 1950598 - RNA, 19 nt, Homo sapiens
  misc_RNA (1)...(19): siRNA sense strand
ggauacaacucucuggaaa

SEQ ID NO: 1950599 - RNA, 19 nt, Homo sapiens
  misc_RNA (1)...(19): siRNA sense strand
agacaucccugaauugaaa

SEQ ID NO: 1950600 - RNA, 19 nt, Homo sapiens
  misc_RNA (1)...(19): siRNA sense strand
ccaugaaccuuccaaauug

SEQ ID NO: 1950601 - RNA, 19 nt, Homo sapiens
  misc_RNA (1)...(19): siRNA sense strand
gaaccagauuuaagccuuu

SEQ ID NO: 1950602 - RNA, 19 nt, Homo sapiens
  misc_RNA (1)...(19): siRNA sense strand
cugaggaugucuuguauua

SEQ ID NO: 1950603 - RNA, 19 nt, Homo sapiens
  misc_RNA (1)...(19): siRNA sense strand
gaacugaugaaccagauuu

SEQ ID NO: 1950604 - RNA, 19 nt, Homo sapiens
  misc_RNA (1)...(19): siRNA sense strand
ggaacuuggcuuaaauaua

SEQ ID NO: 1950605 - RNA, 19 nt, Homo sapiens
  misc_RNA (1)...(19): siRNA sense strand
agaaugcuguuuauaguga

SEQ ID NO: 1950606 - RNA, 19 nt, Homo sapiens
  misc_RNA (1)...(19): siRNA sense strand
uugcugaccuuucuacuuu

SEQ ID NO: 1950607 - RNA, 19 nt, Homo sapiens
  misc_RNA (1)...(19): siRNA sense strand
gaugugaaguugacagcaa

SEQ ID NO: 1950608 - RNA, 19 nt, Homo sapiens
  misc_RNA (1)...(19): siRNA sense strand
uaaaagacaucccugaauu

SEQ ID NO: 1950609 - RNA, 19 nt, Homo sapiens
  misc_RNA (1)...(19): siRNA sense strand
uaaauaguaugugcacuga

SEQ ID NO: 1950610 - RNA, 19 nt, Homo sapiens
  misc_RNA (1)...(19): siRNA sense strand
gaacugaguguguuuccuu

SEQ ID NO: 1950611 - RNA, 19 nt, Homo sapiens
  misc_RNA (1)...(19): siRNA sense strand
auacaacucucuggaaauu

SEQ ID NO: 1950612 - RNA, 19 nt, Homo sapiens
  misc_RNA (1)...(19): siRNA sense strand
gaucagcucuugcuuuuau

SEQ ID NO: 1950613 - RNA, 19 nt, Homo sapiens
  misc_RNA (1)...(19): siRNA sense strand
gcacagggaaguugggaaa

SEQ ID NO: 1950614 - RNA, 19 nt, Homo sapiens
  misc_RNA (1)...(19): siRNA sense strand
caaguuccacugaaaguaa

SEQ ID NO: 1950615 - RNA, 19 nt, Homo sapiens
  misc_RNA (1)...(19): siRNA sense strand
cuauaaagaugugaaguug

SEQ ID NO: 1950616 - RNA, 19 nt, Homo sapiens
  misc_RNA (1)...(19): siRNA sense strand
gauauuccgugagauguau

SEQ ID NO: 1950617 - RNA, 19 nt, Homo sapiens
  misc_RNA (1)...(19): siRNA sense strand
ucggaccucucucucauua

SEQ ID NO: 1950618 - RNA, 19 nt, Homo sapiens
  misc_RNA (1)...(19): siRNA sense strand
cagcaagcaaugaugauua

SEQ ID NO: 1950619 - RNA, 19 nt, Homo sapiens
  misc_RNA (1)...(19): siRNA sense strand
ucagaaugcuguuuauagu

SEQ ID NO: 1950620 - RNA, 19 nt, Homo sapiens
  misc_RNA (1)...(19): siRNA sense strand
gcacgaaagaggccaguug

SEQ ID NO: 1950621 - RNA, 19 nt, Homo sapiens
  misc_RNA (1)...(19): siRNA sense strand
gcucaagggcuccaauuug

SEQ ID NO: 1950622 - RNA, 19 nt, Homo sapiens
  misc_RNA (1)...(19): siRNA sense strand
gcugaccuuucuacuuuaa

SEQ ID NO: 1950623 - RNA, 19 nt, Homo sapiens
  misc_RNA (1)...(19): siRNA sense strand
ggaaagcacagggaaguug

SEQ ID NO: 1950624 - RNA, 19 nt, Homo sapiens
  misc_RNA (1)...(19): siRNA sense strand
ggacaacuggguauagaug

SEQ ID NO: 1950625 - RNA, 19 nt, Homo sapiens
  misc_RNA (1)...(19): siRNA sense strand
gguggacagucuaaucuau

SEQ ID NO: 1950626 - RNA, 19 nt, Homo sapiens
  misc_RNA (1)...(19): siRNA sense strand
gcauaucauuuaaguggau

SEQ ID NO: 1950627 - RNA, 19 nt, Homo sapiens
  misc_RNA (1)...(19): siRNA sense strand
ggauacaucuguguugagu

SEQ ID NO: 1950628 - RNA, 19 nt, Homo sapiens
  misc_RNA (1)...(19): siRNA sense strand
uggacagucuaaucuauaa

SEQ ID NO: 1950629 - RNA, 19 nt, Homo sapiens
  misc_RNA (1)...(19): siRNA sense strand
aaacuugaaucacugaaag

SEQ ID NO: 1950630 - RNA, 19 nt, Homo sapiens
  misc_RNA (1)...(19): siRNA sense strand
cagcugccguguuugcuuu

SEQ ID NO: 1950631 - RNA, 19 nt, Homo sapiens
  misc_RNA (1)...(19): siRNA sense strand
uugaaucacugaaagaaga

SEQ ID NO: 1950632 - RNA, 19 nt, Homo sapiens
  misc_RNA (1)...(19): siRNA sense strand
gaaacucuucuucaaacuu

SEQ ID NO: 1950633 - RNA, 19 nt, Homo sapiens
  misc_RNA (1)...(19): siRNA sense strand
ccaccaaaaucauacauaa

SEQ ID NO: 1950634 - RNA, 19 nt, Homo sapiens
  misc_RNA (1)...(19): siRNA sense strand
ggacucauuuggguuuaau

SEQ ID NO: 1950635 - RNA, 19 nt, Homo sapiens
  misc_RNA (1)...(19): siRNA sense strand
gcuuaagaccaaugugaua

SEQ ID NO: 1950636 - RNA, 19 nt, Homo sapiens
  misc_RNA (1)...(19): siRNA sense strand
gaauugugggcucucauuu

SEQ ID NO: 1950637 - RNA, 19 nt, Homo sapiens
  misc_RNA (1)...(19): siRNA sense strand
aacuaggacuggaagaaua

SEQ ID NO: 1950638 - RNA, 19 nt, Homo sapiens
  misc_RNA (1)...(19): siRNA sense strand
gaaguugacagcaagcaau

SEQ ID NO: 1950639 - RNA, 19 nt, Homo sapiens
  misc_RNA (1)...(19): siRNA sense strand
gcuccaauuuguacucuca

SEQ ID NO: 1950640 - RNA, 19 nt, Homo sapiens
  misc_RNA (1)...(19): siRNA sense strand
gcacugagagcugaauugu

SEQ ID NO: 1950641 - RNA, 19 nt, Homo sapiens
  misc_RNA (1)...(19): siRNA sense strand
cagaucagcucuugcuuuu

SEQ ID NO: 1950642 - RNA, 19 nt, Homo sapiens
  misc_RNA (1)...(19): siRNA sense strand
gcucaaccacuucgcauau

SEQ ID NO: 1950643 - RNA, 19 nt, Homo sapiens
  misc_RNA (1)...(19): siRNA sense strand
auacaucuguguugaguca

SEQ ID NO: 1950644 - RNA, 19 nt, Homo sapiens
  misc_RNA (1)...(19): siRNA sense strand
gaaccuuugguauacauga

SEQ ID NO: 1950645 - RNA, 19 nt, Homo sapiens
  misc_RNA (1)...(19): siRNA sense strand
gauacaacaugaccuuuug

SEQ ID NO: 1950646 - RNA, 19 nt, Homo sapiens
  misc_RNA (1)...(19): siRNA sense strand
gaaugcuguuuauagugaa

SEQ ID NO: 1950647 - RNA, 19 nt, Homo sapiens
  misc_RNA (1)...(19): siRNA sense strand
uaagaccaaugugauacaa

SEQ ID NO: 1950648 - RNA, 19 nt, Homo sapiens
  misc_RNA (1)...(19): siRNA sense strand
aaagacaucccugaauuga

SEQ ID NO: 1950649 - RNA, 19 nt, Homo sapiens
  misc_RNA (1)...(19): siRNA sense strand
aaaugagcauguacguauu

SEQ ID NO: 1950650 - RNA, 19 nt, Homo sapiens
  misc_RNA (1)...(19): siRNA sense strand
ugacagcaagcaaugauga

SEQ ID NO: 1950651 - RNA, 19 nt, Homo sapiens
  misc_RNA (1)...(19): siRNA sense strand
cucaagggcuccaauuugu

SEQ ID NO: 1950652 - RNA, 19 nt, Homo sapiens
  misc_RNA (1)...(19): siRNA sense strand
agaccaaugugauacaaca

SEQ ID NO: 1950653 - RNA, 19 nt, Homo sapiens
  misc_RNA (1)...(19): siRNA sense strand
ucucauuauugcccagaua

SEQ ID NO: 1950654 - RNA, 19 nt, Homo sapiens
  misc_RNA (1)...(19): siRNA sense strand
uuucagaccuguuuaugca

SEQ ID NO: 1950655 - RNA, 19 nt, Homo sapiens
  misc_RNA (1)...(19): siRNA sense strand
aaaguuaugccucuucuuc

SEQ ID NO: 1950656 - RNA, 19 nt, Homo sapiens
  misc_RNA (1)...(19): siRNA sense strand
gcaccuccugaacaucuua

SEQ ID NO: 1950657 - RNA, 19 nt, Homo sapiens
  misc_RNA (1)...(19): siRNA sense strand
caugaaccuuccaaauugu

SEQ ID NO: 1950658 - RNA, 19 nt, Homo sapiens
  misc_RNA (1)...(19): siRNA sense strand
guggacagucuaaucuaua

SEQ ID NO: 1950659 - RNA, 19 nt, Homo sapiens
  misc_RNA (1)...(19): siRNA sense strand
cagcuuaagaccaauguga

SEQ ID NO: 1950660 - RNA, 19 nt, Homo sapiens
  misc_RNA (1)...(19): siRNA sense strand
ggaagucccacggcacuga

SEQ ID NO: 1950661 - RNA, 19 nt, Homo sapiens
  misc_RNA (1)...(19): siRNA sense strand
uaggacaacuggguauaga

SEQ ID NO: 1950662 - RNA, 19 nt, Homo sapiens
  misc_RNA (1)...(19): siRNA sense strand
gggaacugaugaaccagau

SEQ ID NO: 1950663 - RNA, 19 nt, Homo sapiens
  misc_RNA (1)...(19): siRNA sense strand
agcuuucucuggauacuua

SEQ ID NO: 1950664 - RNA, 19 nt, Homo sapiens
  misc_RNA (1)...(19): siRNA sense strand
ucaaccacuucgcauauca

SEQ ID NO: 1950665 - RNA, 19 nt, Homo sapiens
  misc_RNA (1)...(19): siRNA sense strand
acaacucucuggaaauucu

SEQ ID NO: 1950666 - RNA, 19 nt, Homo sapiens
  misc_RNA (1)...(19): siRNA sense strand
gaggaaagcacagggaagu

SEQ ID NO: 1950667 - RNA, 19 nt, Homo sapiens
  misc_RNA (1)...(19): siRNA sense strand
uaucaucuacgagaaauug

SEQ ID NO: 1950668 - RNA, 19 nt, Homo sapiens
  misc_RNA (1)...(19): siRNA sense strand
caacaguacaucagacaag

SEQ ID NO: 1950669 - RNA, 19 nt, Homo sapiens
  misc_RNA (1)...(19): siRNA sense strand
uaugugcacugaacugagu

SEQ ID NO: 1950670 - RNA, 19 nt, Homo sapiens
  misc_RNA (1)...(19): siRNA sense strand
gauacaacucucuggaaau

SEQ ID NO: 1950671 - RNA, 19 nt, Homo sapiens
  misc_RNA (1)...(19): siRNA sense strand
accaugaaccuuccaaauu

SEQ ID NO: 1950672 - RNA, 19 nt, Homo sapiens
  misc_RNA (1)...(19): siRNA sense strand
cgggauacaucuguguuga

SEQ ID NO: 1950673 - RNA, 19 nt, Homo sapiens
  misc_RNA (1)...(19): siRNA sense strand
auaaagaugugaaguugac

SEQ ID NO: 1950674 - RNA, 19 nt, Homo sapiens
  misc_RNA (1)...(19): siRNA sense strand
ggacagucuaaucuauaaa

SEQ ID NO: 1950675 - RNA, 19 nt, Homo sapiens
  misc_RNA (1)...(19): siRNA sense strand
guggaacuuggcuuaaaua

SEQ ID NO: 1950676 - RNA, 19 nt, Homo sapiens
  misc_RNA (1)...(19): siRNA sense strand
aaagaggccaguuggagaa

SEQ ID NO: 1950677 - RNA, 19 nt, Homo sapiens
  misc_RNA (1)...(19): siRNA sense strand
ugaaaugggaacugaugaa

SEQ ID NO: 1950678 - RNA, 19 nt, Homo sapiens
  misc_RNA (1)...(19): siRNA sense strand
ucaagggcuccaauuugua

SEQ ID NO: 1950679 - RNA, 19 nt, Homo sapiens
  misc_RNA (1)...(19): siRNA sense strand
acagaucagcucuugcuuu

SEQ ID NO: 1950680 - RNA, 19 nt, Homo sapiens
  misc_RNA (1)...(19): siRNA sense strand
auacuuagcuacagaucag

SEQ ID NO: 1950681 - RNA, 19 nt, Homo sapiens
  misc_RNA (1)...(19): siRNA sense strand
ucagauauuccgugagaug

SEQ ID NO: 1950682 - RNA, 19 nt, Homo sapiens
  misc_RNA (1)...(19): siRNA sense strand
agcaagcaaugaugauuau

SEQ ID NO: 1950683 - RNA, 19 nt, Homo sapiens
  misc_RNA (1)...(19): siRNA sense strand
caacuggguauagaugauu

SEQ ID NO: 1950684 - RNA, 19 nt, Homo sapiens
  misc_RNA (1)...(19): siRNA sense strand
uggcuuaaauauaggacaa

SEQ ID NO: 1950685 - RNA, 19 nt, Homo sapiens
  misc_RNA (1)...(19): siRNA sense strand
ucaggacucauuuggguuu

SEQ ID NO: 1950686 - RNA, 19 nt, Homo sapiens
  misc_RNA (1)...(19): siRNA sense strand
aaacggugauucuccuagu

SEQ ID NO: 1950687 - RNA, 19 nt, Homo sapiens
  misc_RNA (1)...(19): siRNA sense strand
uuuaugcaccuaaggauuu

SEQ ID NO: 1950688 - RNA, 19 nt, Homo sapiens
  misc_RNA (1)...(19): siRNA sense strand
aaugggaacugaugaacca

SEQ ID NO: 1950689 - RNA, 19 nt, Homo sapiens
  misc_RNA (1)...(19): siRNA sense strand
aaucuucgcaacccaaauu

SEQ ID NO: 1950690 - RNA, 19 nt, Homo sapiens
  misc_RNA (1)...(19): siRNA sense strand
guacaucagacaaggaagu

SEQ ID NO: 1950691 - RNA, 19 nt, Homo sapiens
  misc_RNA (1)...(19): siRNA sense strand
caaaugagcuuacaacuga

SEQ ID NO: 1950692 - RNA, 19 nt, Homo sapiens
  misc_RNA (1)...(19): siRNA sense strand
guucaaagguuucgagaua

SEQ ID NO: 1950693 - RNA, 19 nt, Homo sapiens
  misc_RNA (1)...(19): siRNA sense strand
gaacaaggcgugauccuaa

SEQ ID NO: 1950694 - RNA, 19 nt, Homo sapiens
  misc_RNA (1)...(19): siRNA sense strand
ccacagggcugaauauuuc

SEQ ID NO: 1950695 - RNA, 19 nt, Homo sapiens
  misc_RNA (1)...(19): siRNA sense strand
ccaaauugcucaacccuuu

SEQ ID NO: 1950696 - RNA, 19 nt, Homo sapiens
  misc_RNA (1)...(19): siRNA sense strand
ggacaaaacugguggcaua

SEQ ID NO: 1950697 - RNA, 19 nt, Homo sapiens
  misc_RNA (1)...(19): siRNA sense strand
ggagucacauucaacaauu

SEQ ID NO: 1950698 - RNA, 19 nt, Homo sapiens
  misc_RNA (1)...(19): siRNA sense strand
ccauguaccucaaauugua

SEQ ID NO: 1950699 - RNA, 19 nt, Homo sapiens
  misc_RNA (1)...(19): siRNA sense strand
gaagaaaggcauacgaaga

SEQ ID NO: 1950700 - RNA, 19 nt, Homo sapiens
  misc_RNA (1)...(19): siRNA sense strand
ucagagaauuugugaauga

SEQ ID NO: 1950701 - RNA, 19 nt, Homo sapiens
  misc_RNA (1)...(19): siRNA sense strand
gaaagaaucagaggugaaa

SEQ ID NO: 1950702 - RNA, 19 nt, Homo sapiens
  misc_RNA (1)...(19): siRNA sense strand
ccaagaagacagagaauuu

SEQ ID NO: 1950703 - RNA, 19 nt, Homo sapiens
  misc_RNA (1)...(19): siRNA sense strand
cauauugauuccucaguua

SEQ ID NO: 1950704 - RNA, 19 nt, Homo sapiens
  misc_RNA (1)...(19): siRNA sense strand
ccuacaagcuggaauuaaa

SEQ ID NO: 1950705 - RNA, 19 nt, Homo sapiens
  misc_RNA (1)...(19): siRNA sense strand
gaacggauuugaaacacau

SEQ ID NO: 1950706 - RNA, 19 nt, Homo sapiens
  misc_RNA (1)...(19): siRNA sense strand
aaagagaaccuacccagua

SEQ ID NO: 1950707 - RNA, 19 nt, Homo sapiens
  misc_RNA (1)...(19): siRNA sense strand
ugagagaauuugucagaaa

SEQ ID NO: 1950708 - RNA, 19 nt, Homo sapiens
  misc_RNA (1)...(19): siRNA sense strand
gaauacaacauccucguaa

SEQ ID NO: 1950709 - RNA, 19 nt, Homo sapiens
  misc_RNA (1)...(19): siRNA sense strand
ggaagaggcaagaaauaaa

SEQ ID NO: 1950710 - RNA, 19 nt, Homo sapiens
  misc_RNA (1)...(19): siRNA sense strand
gaaggaagucugucuuaga

SEQ ID NO: 1950711 - RNA, 19 nt, Homo sapiens
  misc_RNA (1)...(19): siRNA sense strand
aaacaucacuguauuuguc

SEQ ID NO: 1950712 - RNA, 19 nt, Homo sapiens
  misc_RNA (1)...(19): siRNA sense strand
caauagaacagaaacauga

SEQ ID NO: 1950713 - RNA, 19 nt, Homo sapiens
  misc_RNA (1)...(19): siRNA sense strand
ggaagucugucuuagagau

SEQ ID NO: 1950714 - RNA, 19 nt, Homo sapiens
  misc_RNA (1)...(19): siRNA sense strand
guaguucuccucauucuaa

SEQ ID NO: 1950715 - RNA, 19 nt, Homo sapiens
  misc_RNA (1)...(19): siRNA sense strand
caacauccucguaaacuuu

SEQ ID NO: 1950716 - RNA, 19 nt, Homo sapiens
  misc_RNA (1)...(19): siRNA sense strand
gaugacagguuucuacuac

SEQ ID NO: 1950717 - RNA, 19 nt, Homo sapiens
  misc_RNA (1)...(19): siRNA sense strand
gcacagcgccaaggaauau

SEQ ID NO: 1950718 - RNA, 19 nt, Homo sapiens
  misc_RNA (1)...(19): siRNA sense strand
aagaggcacuuuccaauga

SEQ ID NO: 1950719 - RNA, 19 nt, Homo sapiens
  misc_RNA (1)...(19): siRNA sense strand
acacagacccugaaacuga

SEQ ID NO: 1950720 - RNA, 19 nt, Homo sapiens
  misc_RNA (1)...(19): siRNA sense strand
gaacagugccaauagaaca

SEQ ID NO: 1950721 - RNA, 19 nt, Homo sapiens
  misc_RNA (1)...(19): siRNA sense strand
gaagaggcacuuuccaaug

SEQ ID NO: 1950722 - RNA, 19 nt, Homo sapiens
  misc_RNA (1)...(19): siRNA sense strand
uaugaaaucugccugugaa

SEQ ID NO: 1950723 - RNA, 19 nt, Homo sapiens
  misc_RNA (1)...(19): siRNA sense strand
ggaaauggaauacaacauc

SEQ ID NO: 1950724 - RNA, 19 nt, Homo sapiens
  misc_RNA (1)...(19): siRNA sense strand
gcuaagacauuggcuggaa

SEQ ID NO: 1950725 - RNA, 19 nt, Homo sapiens
  misc_RNA (1)...(19): siRNA sense strand
ccagaacccuugcuuccaa

SEQ ID NO: 1950726 - RNA, 19 nt, Homo sapiens
  misc_RNA (1)...(19): siRNA sense strand
gggcuacucccaagaaauu

SEQ ID NO: 1950727 - RNA, 19 nt, Homo sapiens
  misc_RNA (1)...(19): siRNA sense strand
gcaauuacccauggucuga

SEQ ID NO: 1950728 - RNA, 19 nt, Homo sapiens
  misc_RNA (1)...(19): siRNA sense strand
gcaggaccuucugaucaua

SEQ ID NO: 1950729 - RNA, 19 nt, Homo sapiens
  misc_RNA (1)...(19): siRNA sense strand
gagaugaugagguuauuga

SEQ ID NO: 1950730 - RNA, 19 nt, Homo sapiens
  misc_RNA (1)...(19): siRNA sense strand
gaaaauagaccagaucuug

SEQ ID NO: 1950731 - RNA, 19 nt, Homo sapiens
  misc_RNA (1)...(19): siRNA sense strand
ggaauacaacauccucgua

SEQ ID NO: 1950732 - RNA, 19 nt, Homo sapiens
  misc_RNA (1)...(19): siRNA sense strand
gaacccuugcuuccaaaua

SEQ ID NO: 1950733 - RNA, 19 nt, Homo sapiens
  misc_RNA (1)...(19): siRNA sense strand
gaagaggcaagaaauaaag

SEQ ID NO: 1950734 - RNA, 19 nt, Homo sapiens
  misc_RNA (1)...(19): siRNA sense strand
gaagucugucuuagagaua

SEQ ID NO: 1950735 - RNA, 19 nt, Homo sapiens
  misc_RNA (1)...(19): siRNA sense strand
ggagaacggauuugaaaca

SEQ ID NO: 1950736 - RNA, 19 nt, Homo sapiens
  misc_RNA (1)...(19): siRNA sense strand
gaaccauuauugcucuuag

SEQ ID NO: 1950737 - RNA, 19 nt, Homo sapiens
  misc_RNA (1)...(19): siRNA sense strand
uagcugaccuaucugauuc

SEQ ID NO: 1950738 - RNA, 19 nt, Homo sapiens
  misc_RNA (1)...(19): siRNA sense strand
gagucacauucaacaauuu

SEQ ID NO: 1950739 - RNA, 19 nt, Homo sapiens
  misc_RNA (1)...(19): siRNA sense strand
ucagugcccugccaaaugu

SEQ ID NO: 1950740 - RNA, 19 nt, Homo sapiens
  misc_RNA (1)...(19): siRNA sense strand
gcucggaauauuaucuuua

SEQ ID NO: 1950741 - RNA, 19 nt, Homo sapiens
  misc_RNA (1)...(19): siRNA sense strand
ucagaacagugccaauaga

SEQ ID NO: 1950742 - RNA, 19 nt, Homo sapiens
  misc_RNA (1)...(19): siRNA sense strand
gcagacaauuacacaaugg

SEQ ID NO: 1950743 - RNA, 19 nt, Homo sapiens
  misc_RNA (1)...(19): siRNA sense strand
gcaggaagaggcaagaaau

SEQ ID NO: 1950744 - RNA, 19 nt, Homo sapiens
  misc_RNA (1)...(19): siRNA sense strand
gcuaaaccauguaccucaa

SEQ ID NO: 1950745 - RNA, 19 nt, Homo sapiens
  misc_RNA (1)...(19): siRNA sense strand
gaugaugagguuauugaaa

SEQ ID NO: 1950746 - RNA, 19 nt, Homo sapiens
  misc_RNA (1)...(19): siRNA sense strand
ccaggagcucggaauauua

SEQ ID NO: 1950747 - RNA, 19 nt, Homo sapiens
  misc_RNA (1)...(19): siRNA sense strand
caacugauuccacuccaaa

SEQ ID NO: 1950748 - RNA, 19 nt, Homo sapiens
  misc_RNA (1)...(19): siRNA sense strand
gaaccugaacuagaagaaa

SEQ ID NO: 1950749 - RNA, 19 nt, Homo sapiens
  misc_RNA (1)...(19): siRNA sense strand
gaaguggaccucgauuaga

SEQ ID NO: 1950750 - RNA, 19 nt, Homo sapiens
  misc_RNA (1)...(19): siRNA sense strand
cuacugaggaaauggaaua

SEQ ID NO: 1950751 - RNA, 19 nt, Homo sapiens
  misc_RNA (1)...(19): siRNA sense strand
gagagaauuugucagaaaa

SEQ ID NO: 1950752 - RNA, 19 nt, Homo sapiens
  misc_RNA (1)...(19): siRNA sense strand
gagcaaagacugaaaauag

SEQ ID NO: 1950753 - RNA, 19 nt, Homo sapiens
  misc_RNA (1)...(19): siRNA sense strand
gaacagaaacaugaagucu

SEQ ID NO: 1950754 - RNA, 19 nt, Homo sapiens
  misc_RNA (1)...(19): siRNA sense strand
gaaaagggaauucaaacaa

SEQ ID NO: 1950755 - RNA, 19 nt, Homo sapiens
  misc_RNA (1)...(19): siRNA sense strand
caaaacugguggcauaauu

SEQ ID NO: 1950756 - RNA, 19 nt, Homo sapiens
  misc_RNA (1)...(19): siRNA sense strand
gaaccagggagaacggauu

SEQ ID NO: 1950757 - RNA, 19 nt, Homo sapiens
  misc_RNA (1)...(19): siRNA sense strand
aacccuugcuuccaaauaa

SEQ ID NO: 1950758 - RNA, 19 nt, Homo sapiens
  misc_RNA (1)...(19): siRNA sense strand
gcacaaaugagcuuacaac

SEQ ID NO: 1950759 - RNA, 19 nt, Homo sapiens
  misc_RNA (1)...(19): siRNA sense strand
ugaccuaucugauucuucu

SEQ ID NO: 1950760 - RNA, 19 nt, Homo sapiens
  misc_RNA (1)...(19): siRNA sense strand
gaacuagaagaaagagaau

SEQ ID NO: 1950761 - RNA, 19 nt, Homo sapiens
  misc_RNA (1)...(19): siRNA sense strand
gagcacagcgccaaggaau

SEQ ID NO: 1950762 - RNA, 19 nt, Homo sapiens
  misc_RNA (1)...(19): siRNA sense strand
guuuauagcagcacaaaug

SEQ ID NO: 1950763 - RNA, 19 nt, Homo sapiens
  misc_RNA (1)...(19): siRNA sense strand
aagaaaggcauacgaagaa

SEQ ID NO: 1950764 - RNA, 19 nt, Homo sapiens
  misc_RNA (1)...(19): siRNA sense strand
gccaaggaauauauuaaag

SEQ ID NO: 1950765 - RNA, 19 nt, Homo sapiens
  misc_RNA (1)...(19): siRNA sense strand
aacaggagaugaugagguu

SEQ ID NO: 1950766 - RNA, 19 nt, Homo sapiens
  misc_RNA (1)...(19): siRNA sense strand
uuagaggaguuucuucaga

SEQ ID NO: 1950767 - RNA, 19 nt, Homo sapiens
  misc_RNA (1)...(19): siRNA sense strand
ucauauugauuccucaguu

SEQ ID NO: 1950768 - RNA, 19 nt, Homo sapiens
  misc_RNA (1)...(19): siRNA sense strand
uaacacagacccugaaacu

SEQ ID NO: 1950769 - RNA, 19 nt, Homo sapiens
  misc_RNA (1)...(19): siRNA sense strand
ugauuccacuccaaagaaa

SEQ ID NO: 1950770 - RNA, 19 nt, Homo sapiens
  misc_RNA (1)...(19): siRNA sense strand
caggaagaggcaagaaaua

SEQ ID NO: 1950771 - RNA, 19 nt, Homo sapiens
  misc_RNA (1)...(19): siRNA sense strand
cugaauauuucuagagaug

SEQ ID NO: 1950772 - RNA, 19 nt, Homo sapiens
  misc_RNA (1)...(19): siRNA sense strand
gcaauugcaguugaauauu

SEQ ID NO: 1950773 - RNA, 19 nt, Homo sapiens
  misc_RNA (1)...(19): siRNA sense strand
cagaaacaucacuguauuu

SEQ ID NO: 1950774 - RNA, 19 nt, Homo sapiens
  misc_RNA (1)...(19): siRNA sense strand
ccaaugagagaauuuguca

SEQ ID NO: 1950775 - RNA, 19 nt, Homo sapiens
  misc_RNA (1)...(19): siRNA sense strand
gcgccaaggaauauauuaa

SEQ ID NO: 1950776 - RNA, 19 nt, Homo sapiens
  misc_RNA (1)...(19): siRNA sense strand
gaaacaucacuguauuugu

SEQ ID NO: 1950777 - RNA, 19 nt, Homo sapiens
  misc_RNA (1)...(19): siRNA sense strand
ggcaggaccuucugaucau

SEQ ID NO: 1950778 - RNA, 19 nt, Homo sapiens
  misc_RNA (1)...(19): siRNA sense strand
gaccaucuacugaaccauu

SEQ ID NO: 1950779 - RNA, 19 nt, Homo sapiens
  misc_RNA (1)...(19): siRNA sense strand
cugaggaaauggaauacaa

SEQ ID NO: 1950780 - RNA, 19 nt, Homo sapiens
  misc_RNA (1)...(19): siRNA sense strand
gccacagggcugaauauuu

SEQ ID NO: 1950781 - RNA, 19 nt, Homo sapiens
  misc_RNA (1)...(19): siRNA sense strand
gaagaaguggaccucgauu

SEQ ID NO: 1950782 - RNA, 19 nt, Homo sapiens
  misc_RNA (1)...(19): siRNA sense strand
cggauggucuuuggagaaa

SEQ ID NO: 1950783 - RNA, 19 nt, Homo sapiens
  misc_RNA (1)...(19): siRNA sense strand
uccaggagcucggaauauu

SEQ ID NO: 1950784 - RNA, 19 nt, Homo sapiens
  misc_RNA (1)...(19): siRNA sense strand
uaaaccauguaccucaaau

SEQ ID NO: 1950785 - RNA, 19 nt, Homo sapiens
  misc_RNA (1)...(19): siRNA sense strand
cauucaaaguggaagcuaa

SEQ ID NO: 1950786 - RNA, 19 nt, Homo sapiens
  misc_RNA (1)...(19): siRNA sense strand
aauacaacauccucguaaa

SEQ ID NO: 1950787 - RNA, 19 nt, Homo sapiens
  misc_RNA (1)...(19): siRNA sense strand
aaaagaaacuacugaggaa

SEQ ID NO: 1950788 - RNA, 19 nt, Homo sapiens
  misc_RNA (1)...(19): siRNA sense strand
ggcugaauauuucuagaga

SEQ ID NO: 1950789 - RNA, 19 nt, Homo sapiens
  misc_RNA (1)...(19): siRNA sense strand
cguuuaggauguuguaguu

SEQ ID NO: 1950790 - RNA, 19 nt, Homo sapiens
  misc_RNA (1)...(19): siRNA sense strand
ggaagaaguggaccucgau

SEQ ID NO: 1950791 - RNA, 19 nt, Homo sapiens
  misc_RNA (1)...(19): siRNA sense strand
gcacugaccuugggaauuu

SEQ ID NO: 1950792 - RNA, 19 nt, Homo sapiens
  misc_RNA (1)...(19): siRNA sense strand
gaacaggucucauggugaa

SEQ ID NO: 1950793 - RNA, 19 nt, Homo sapiens
  misc_RNA (1)...(19): siRNA sense strand
ucaaagagauuguagaaga

SEQ ID NO: 1950794 - RNA, 19 nt, Homo sapiens
  misc_RNA (1)...(19): siRNA sense strand
caucaaaccuuaaugaaga

SEQ ID NO: 1950795 - RNA, 19 nt, Homo sapiens
  misc_RNA (1)...(19): siRNA sense strand
gaaaagaacugguacauca

SEQ ID NO: 1950796 - RNA, 19 nt, Homo sapiens
  misc_RNA (1)...(19): siRNA sense strand
gaaauggcaugucuauugu

SEQ ID NO: 1950797 - RNA, 19 nt, Homo sapiens
  misc_RNA (1)...(19): siRNA sense strand
guacacagcuuagaaauac

SEQ ID NO: 1950798 - RNA, 19 nt, Homo sapiens
  misc_RNA (1)...(19): siRNA sense strand
ggacacagauauguauuau

SEQ ID NO: 1950799 - RNA, 19 nt, Homo sapiens
  misc_RNA (1)...(19): siRNA sense strand
gccaggacaucaaaccuua

SEQ ID NO: 1950800 - RNA, 19 nt, Homo sapiens
  misc_RNA (1)...(19): siRNA sense strand
ggacaucaaaccuuaauga

SEQ ID NO: 1950801 - RNA, 19 nt, Homo sapiens
  misc_RNA (1)...(19): siRNA sense strand
ugacuucacuggaaacuug

SEQ ID NO: 1950802 - RNA, 19 nt, Homo sapiens
  misc_RNA (1)...(19): siRNA sense strand
ugaaauggcaugucuauug

SEQ ID NO: 1950803 - RNA, 19 nt, Homo sapiens
  misc_RNA (1)...(19): siRNA sense strand
gcaaacacgugaaguucug

SEQ ID NO: 1950804 - RNA, 19 nt, Homo sapiens
  misc_RNA (1)...(19): siRNA sense strand
gaccacagcuuggacuaaa

SEQ ID NO: 1950805 - RNA, 19 nt, Homo sapiens
  misc_RNA (1)...(19): siRNA sense strand
gauacaaccuacugacguu

SEQ ID NO: 1950806 - RNA, 19 nt, Homo sapiens
  misc_RNA (1)...(19): siRNA sense strand
gcuaaugccuucuuucucu

SEQ ID NO: 1950807 - RNA, 19 nt, Homo sapiens
  misc_RNA (1)...(19): siRNA sense strand
ugaaacagcuaaucuggau

SEQ ID NO: 1950808 - RNA, 19 nt, Homo sapiens
  misc_RNA (1)...(19): siRNA sense strand
ugacguucaucaucuuaua

SEQ ID NO: 1950809 - RNA, 19 nt, Homo sapiens
  misc_RNA (1)...(19): siRNA sense strand
ucucuucauugccuuauua

SEQ ID NO: 1950810 - RNA, 19 nt, Homo sapiens
  misc_RNA (1)...(19): siRNA sense strand
gugaaguucugaugaaguu

SEQ ID NO: 1950811 - RNA, 19 nt, Homo sapiens
  misc_RNA (1)...(19): siRNA sense strand
caaagagauuguagaagau

SEQ ID NO: 1950812 - RNA, 19 nt, Homo sapiens
  misc_RNA (1)...(19): siRNA sense strand
acaccaaacucaugcagaa

SEQ ID NO: 1950813 - RNA, 19 nt, Homo sapiens
  misc_RNA (1)...(19): siRNA sense strand
ggcaauguguuauguugaa

SEQ ID NO: 1950814 - RNA, 19 nt, Homo sapiens
  misc_RNA (1)...(19): siRNA sense strand
cucaagagaucaaauguug

SEQ ID NO: 1950815 - RNA, 19 nt, Homo sapiens
  misc_RNA (1)...(19): siRNA sense strand
ggacaccaccucagauaau

SEQ ID NO: 1950816 - RNA, 19 nt, Homo sapiens
  misc_RNA (1)...(19): siRNA sense strand
agaaauccaggaagaaaua

SEQ ID NO: 1950817 - RNA, 19 nt, Homo sapiens
  misc_RNA (1)...(19): siRNA sense strand
gaagaagucauccgugcuu

SEQ ID NO: 1950818 - RNA, 19 nt, Homo sapiens
  misc_RNA (1)...(19): siRNA sense strand
gcaggugaaauaucucuuu

SEQ ID NO: 1950819 - RNA, 19 nt, Homo sapiens
  misc_RNA (1)...(19): siRNA sense strand
gauacuguguugacaagug

SEQ ID NO: 1950820 - RNA, 19 nt, Homo sapiens
  misc_RNA (1)...(19): siRNA sense strand
gcaucggccuguacaaugu

SEQ ID NO: 1950821 - RNA, 19 nt, Homo sapiens
  misc_RNA (1)...(19): siRNA sense strand
gaacgugguccuguauauu

SEQ ID NO: 1950822 - RNA, 19 nt, Homo sapiens
  misc_RNA (1)...(19): siRNA sense strand
gguacacagcuuagaaaua

SEQ ID NO: 1950823 - RNA, 19 nt, Homo sapiens
  misc_RNA (1)...(19): siRNA sense strand
acacauauguuguuguuac

SEQ ID NO: 1950824 - RNA, 19 nt, Homo sapiens
  misc_RNA (1)...(19): siRNA sense strand
gaagauugugugugugaaa

SEQ ID NO: 1950825 - RNA, 19 nt, Homo sapiens
  misc_RNA (1)...(19): siRNA sense strand
gacaccaccucagauaauu

SEQ ID NO: 1950826 - RNA, 19 nt, Homo sapiens
  misc_RNA (1)...(19): siRNA sense strand
ugacauuucuaccucgauu

SEQ ID NO: 1950827 - RNA, 19 nt, Homo sapiens
  misc_RNA (1)...(19): siRNA sense strand
ccaccaacaacucggauua

SEQ ID NO: 1950828 - RNA, 19 nt, Homo sapiens
  misc_RNA (1)...(19): siRNA sense strand
aaccgcaucucaacaaauu

SEQ ID NO: 1950829 - RNA, 19 nt, Homo sapiens
  misc_RNA (1)...(19): siRNA sense strand
caucaaagagauuguagaa

SEQ ID NO: 1950830 - RNA, 19 nt, Homo sapiens
  misc_RNA (1)...(19): siRNA sense strand
gcaauguguuauguugaaa

SEQ ID NO: 1950831 - RNA, 19 nt, Homo sapiens
  misc_RNA (1)...(19): siRNA sense strand
uggcaugucuauuguaaau

SEQ ID NO: 1950832 - RNA, 19 nt, Homo sapiens
  misc_RNA (1)...(19): siRNA sense strand
uuuaagaagugcagcauug

SEQ ID NO: 1950833 - RNA, 19 nt, Homo sapiens
  misc_RNA (1)...(19): siRNA sense strand
gacaagacuggaacgcuua

SEQ ID NO: 1950834 - RNA, 19 nt, Homo sapiens
  misc_RNA (1)...(19): siRNA sense strand
gggacacagauauguauua

SEQ ID NO: 1950835 - RNA, 19 nt, Homo sapiens
  misc_RNA (1)...(19): siRNA sense strand
ccaaacucaugcagaauuc

SEQ ID NO: 1950836 - RNA, 19 nt, Homo sapiens
  misc_RNA (1)...(19): siRNA sense strand
ucacacugcugacaugcaa

SEQ ID NO: 1950837 - RNA, 19 nt, Homo sapiens
  misc_RNA (1)...(19): siRNA sense strand
auaagaacgugguccugua

SEQ ID NO: 1950838 - RNA, 19 nt, Homo sapiens
  misc_RNA (1)...(19): siRNA sense strand
caggcaauguguuauguug

SEQ ID NO: 1950839 - RNA, 19 nt, Homo sapiens
  misc_RNA (1)...(19): siRNA sense strand
gaagucauccgugcuuaug

SEQ ID NO: 1950840 - RNA, 19 nt, Homo sapiens
  misc_RNA (1)...(19): siRNA sense strand
aauggcaugucuauuguaa

SEQ ID NO: 1950841 - RNA, 19 nt, Homo sapiens
  misc_RNA (1)...(19): siRNA sense strand
ggacacgacaccaaacuca

SEQ ID NO: 1950842 - RNA, 19 nt, Homo sapiens
  misc_RNA (1)...(19): siRNA sense strand
gaaguucugaugaaguuau

SEQ ID NO: 1950843 - RNA, 19 nt, Homo sapiens
  misc_RNA (1)...(19): siRNA sense strand
agacaaugcaguuaacaaa

SEQ ID NO: 1950844 - RNA, 19 nt, Homo sapiens
  misc_RNA (1)...(19): siRNA sense strand
gaaauccaggaagaaauaa

SEQ ID NO: 1950845 - RNA, 19 nt, Homo sapiens
  misc_RNA (1)...(19): siRNA sense strand
ggagcaugauacuguguug

SEQ ID NO: 1950846 - RNA, 19 nt, Homo sapiens
  misc_RNA (1)...(19): siRNA sense strand
gggaaucagugggaaugaa

SEQ ID NO: 1950847 - RNA, 19 nt, Homo sapiens
  misc_RNA (1)...(19): siRNA sense strand
ucauagaagcggugaguaa

SEQ ID NO: 1950848 - RNA, 19 nt, Homo sapiens
  misc_RNA (1)...(19): siRNA sense strand
gaacaccauucucagucau

SEQ ID NO: 1950849 - RNA, 19 nt, Homo sapiens
  misc_RNA (1)...(19): siRNA sense strand
cuggugccauugaucauua

SEQ ID NO: 1950850 - RNA, 19 nt, Homo sapiens
  misc_RNA (1)...(19): siRNA sense strand
ccuacugccuguuugauug

SEQ ID NO: 1950851 - RNA, 19 nt, Homo sapiens
  misc_RNA (1)...(19): siRNA sense strand
gcuaccgacuauuuauuug

SEQ ID NO: 1950852 - RNA, 19 nt, Homo sapiens
  misc_RNA (1)...(19): siRNA sense strand
gauaguggauguggugaag

SEQ ID NO: 1950853 - RNA, 19 nt, Homo sapiens
  misc_RNA (1)...(19): siRNA sense strand
gugcagcauugccggagua

SEQ ID NO: 1950854 - RNA, 19 nt, Homo sapiens
  misc_RNA (1)...(19): siRNA sense strand
acgcuuacaugcaauauca

SEQ ID NO: 1950855 - RNA, 19 nt, Homo sapiens
  misc_RNA (1)...(19): siRNA sense strand
cuacugacguucaucaucu

SEQ ID NO: 1950856 - RNA, 19 nt, Homo sapiens
  misc_RNA (1)...(19): siRNA sense strand
gagguacacagcuuagaaa

SEQ ID NO: 1950857 - RNA, 19 nt, Homo sapiens
  misc_RNA (1)...(19): siRNA sense strand
guuggugacucuugagguu

SEQ ID NO: 1950858 - RNA, 19 nt, Homo sapiens
  misc_RNA (1)...(19): siRNA sense strand
aaagaaauccaggaagaaa

SEQ ID NO: 1950859 - RNA, 19 nt, Homo sapiens
  misc_RNA (1)...(19): siRNA sense strand
cugaugaaguuaucuggaa

SEQ ID NO: 1950860 - RNA, 19 nt, Homo sapiens
  misc_RNA (1)...(19): siRNA sense strand
ggaacgcuuacaugcaaua

SEQ ID NO: 1950861 - RNA, 19 nt, Homo sapiens
  misc_RNA (1)...(19): siRNA sense strand
gaacugguacaucaagaag

SEQ ID NO: 1950862 - RNA, 19 nt, Homo sapiens
  misc_RNA (1)...(19): siRNA sense strand
ccacagcuuggacuaaauu

SEQ ID NO: 1950863 - RNA, 19 nt, Homo sapiens
  misc_RNA (1)...(19): siRNA sense strand
aacgugguccuguauauua

SEQ ID NO: 1950864 - RNA, 19 nt, Homo sapiens
  misc_RNA (1)...(19): siRNA sense strand
guacagcguguugacauuu

SEQ ID NO: 1950865 - RNA, 19 nt, Homo sapiens
  misc_RNA (1)...(19): siRNA sense strand
ccaaccgcaucucaacaaa

SEQ ID NO: 1950866 - RNA, 19 nt, Homo sapiens
  misc_RNA (1)...(19): siRNA sense strand
ugagaaggauggagauaac

SEQ ID NO: 1950867 - RNA, 19 nt, Homo sapiens
  misc_RNA (1)...(19): siRNA sense strand
acagcaaauuccagaugua

SEQ ID NO: 1950868 - RNA, 19 nt, Homo sapiens
  misc_RNA (1)...(19): siRNA sense strand
ugcaggagcuggaaaccaa

SEQ ID NO: 1950869 - RNA, 19 nt, Homo sapiens
  misc_RNA (1)...(19): siRNA sense strand
agaacgugguccuguauau

SEQ ID NO: 1950870 - RNA, 19 nt, Homo sapiens
  misc_RNA (1)...(19): siRNA sense strand
ccuccucccuguagugauu

SEQ ID NO: 1950871 - RNA, 19 nt, Homo sapiens
  misc_RNA (1)...(19): siRNA sense strand
ggagacgaaccuuaaaaua

SEQ ID NO: 1950872 - RNA, 19 nt, Homo sapiens
  misc_RNA (1)...(19): siRNA sense strand
gagcuuugguucgccuuug

SEQ ID NO: 1950873 - RNA, 19 nt, Homo sapiens
  misc_RNA (1)...(19): siRNA sense strand
uaguggauguggugaagaa

SEQ ID NO: 1950874 - RNA, 19 nt, Homo sapiens
  misc_RNA (1)...(19): siRNA sense strand
uauggucacuucccagaau

SEQ ID NO: 1950875 - RNA, 19 nt, Homo sapiens
  misc_RNA (1)...(19): siRNA sense strand
ggaguaaccuauggucacu

SEQ ID NO: 1950876 - RNA, 19 nt, Homo sapiens
  misc_RNA (1)...(19): siRNA sense strand
cuggaacgcuuacaugcaa

SEQ ID NO: 1950877 - RNA, 19 nt, Homo sapiens
  misc_RNA (1)...(19): siRNA sense strand
gacaucaaaccuuaaugaa

SEQ ID NO: 1950878 - RNA, 19 nt, Homo sapiens
  misc_RNA (1)...(19): siRNA sense strand
ggccugaccagaucuuauu

SEQ ID NO: 1950879 - RNA, 19 nt, Homo sapiens
  misc_RNA (1)...(19): siRNA sense strand
cacgugaaguucugaugaa

SEQ ID NO: 1950880 - RNA, 19 nt, Homo sapiens
  misc_RNA (1)...(19): siRNA sense strand
gcagugggagacauuguga

SEQ ID NO: 1950881 - RNA, 19 nt, Homo sapiens
  misc_RNA (1)...(19): siRNA sense strand
cauauguuguuguuacugu

SEQ ID NO: 1950882 - RNA, 19 nt, Homo sapiens
  misc_RNA (1)...(19): siRNA sense strand
gugcaaagcggucauaugc

SEQ ID NO: 1950883 - RNA, 19 nt, Homo sapiens
  misc_RNA (1)...(19): siRNA sense strand
agagagccgucuucagaug

SEQ ID NO: 1950884 - RNA, 19 nt, Homo sapiens
  misc_RNA (1)...(19): siRNA sense strand
gaacuuagaugggaaaagc

SEQ ID NO: 1950885 - RNA, 19 nt, Homo sapiens
  misc_RNA (1)...(19): siRNA sense strand
cuaccucgauucuuguaug

SEQ ID NO: 1950886 - RNA, 19 nt, Homo sapiens
  misc_RNA (1)...(19): siRNA sense strand
ggucgucaaugggcaguau

SEQ ID NO: 1950887 - RNA, 19 nt, Homo sapiens
  misc_RNA (1)...(19): siRNA sense strand
ucuaugacuucacuggaaa

SEQ ID NO: 1950888 - RNA, 19 nt, Homo sapiens
  misc_RNA (1)...(19): siRNA sense strand
uggcauaguuguuuauacu

SEQ ID NO: 1950889 - RNA, 19 nt, Homo sapiens
  misc_RNA (1)...(19): siRNA sense strand
cucuugagguugugaagua

SEQ ID NO: 1950890 - RNA, 19 nt, Homo sapiens
  misc_RNA (1)...(19): siRNA sense strand
gcaugcaggccaccaacaa

SEQ ID NO: 1950891 - RNA, 19 nt, Homo sapiens
  misc_RNA (1)...(19): siRNA sense strand
ggaaagagaagaagaauuu

SEQ ID NO: 1950892 - RNA, 19 nt, Homo sapiens
  misc_RNA (1)...(19): siRNA sense strand
ccaaacaacucaaauacua

SEQ ID NO: 1950893 - RNA, 19 nt, Homo sapiens
  misc_RNA (1)...(19): siRNA sense strand
ggaaugggauccagaauau

SEQ ID NO: 1950894 - RNA, 19 nt, Homo sapiens
  misc_RNA (1)...(19): siRNA sense strand
gcaaaucuccuguuucuaa

SEQ ID NO: 1950895 - RNA, 19 nt, Homo sapiens
  misc_RNA (1)...(19): siRNA sense strand
uaaagagacuggauaugua

SEQ ID NO: 1950896 - RNA, 19 nt, Homo sapiens
  misc_RNA (1)...(19): siRNA sense strand
uaaauggacucaugacaaa

SEQ ID NO: 1950897 - RNA, 19 nt, Homo sapiens
  misc_RNA (1)...(19): siRNA sense strand
gcacaaagaagaagacaaa

SEQ ID NO: 1950898 - RNA, 19 nt, Homo sapiens
  misc_RNA (1)...(19): siRNA sense strand
ggaaauggaucuagucgau

SEQ ID NO: 1950899 - RNA, 19 nt, Homo sapiens
  misc_RNA (1)...(19): siRNA sense strand
gaaauacacaggagaauug

SEQ ID NO: 1950900 - RNA, 19 nt, Homo sapiens
  misc_RNA (1)...(19): siRNA sense strand
gaaagaagcgauacaguuc

SEQ ID NO: 1950901 - RNA, 19 nt, Homo sapiens
  misc_RNA (1)...(19): siRNA sense strand
gaacauaguacucggcaaa

SEQ ID NO: 1950902 - RNA, 19 nt, Homo sapiens
  misc_RNA (1)...(19): siRNA sense strand
gaaagccacugaagaacau

SEQ ID NO: 1950903 - RNA, 19 nt, Homo sapiens
  misc_RNA (1)...(19): siRNA sense strand
gaaaggcaauagagaaagu

SEQ ID NO: 1950904 - RNA, 19 nt, Homo sapiens
  misc_RNA (1)...(19): siRNA sense strand
gagaugaugguguggauua

SEQ ID NO: 1950905 - RNA, 19 nt, Homo sapiens
  misc_RNA (1)...(19): siRNA sense strand
uagagaaagugauggauuu

SEQ ID NO: 1950906 - RNA, 19 nt, Homo sapiens
  misc_RNA (1)...(19): siRNA sense strand
ggaaugagacgaccuuaug

SEQ ID NO: 1950907 - RNA, 19 nt, Homo sapiens
  misc_RNA (1)...(19): siRNA sense strand
gaggaaagcccacuuagga

SEQ ID NO: 1950908 - RNA, 19 nt, Homo sapiens
  misc_RNA (1)...(19): siRNA sense strand
cuagauuacuucagugaua

SEQ ID NO: 1950909 - RNA, 19 nt, Homo sapiens
  misc_RNA (1)...(19): siRNA sense strand
gaugaagagucuagaguau

SEQ ID NO: 1950910 - RNA, 19 nt, Homo sapiens
  misc_RNA (1)...(19): siRNA sense strand
gaacaugacccaucugagu

SEQ ID NO: 1950911 - RNA, 19 nt, Homo sapiens
  misc_RNA (1)...(19): siRNA sense strand
gaggaagcauacccguuua

SEQ ID NO: 1950912 - RNA, 19 nt, Homo sapiens
  misc_RNA (1)...(19): siRNA sense strand
guagagaucguauguauuc

SEQ ID NO: 1950913 - RNA, 19 nt, Homo sapiens
  misc_RNA (1)...(19): siRNA sense strand
gaaggaaagagaagaagaa

SEQ ID NO: 1950914 - RNA, 19 nt, Homo sapiens
  misc_RNA (1)...(19): siRNA sense strand
caagaucucauucuagaaa

SEQ ID NO: 1950915 - RNA, 19 nt, Homo sapiens
  misc_RNA (1)...(19): siRNA sense strand
gggaugggauuguugaaga

SEQ ID NO: 1950916 - RNA, 19 nt, Homo sapiens
  misc_RNA (1)...(19): siRNA sense strand
gaauuccgauccaucuuug

SEQ ID NO: 1950917 - RNA, 19 nt, Homo sapiens
  misc_RNA (1)...(19): siRNA sense strand
ucaggaagcucuagauuac

SEQ ID NO: 1950918 - RNA, 19 nt, Homo sapiens
  misc_RNA (1)...(19): siRNA sense strand
caaaucuccuguuucuaaa

SEQ ID NO: 1950919 - RNA, 19 nt, Homo sapiens
  misc_RNA (1)...(19): siRNA sense strand
gaagaggucgugguacuuu

SEQ ID NO: 1950920 - RNA, 19 nt, Homo sapiens
  misc_RNA (1)...(19): siRNA sense strand
ggaaaggccuagcacuaca

SEQ ID NO: 1950921 - RNA, 19 nt, Homo sapiens
  misc_RNA (1)...(19): siRNA sense strand
ugaagagucuagaguauuc

SEQ ID NO: 1950922 - RNA, 19 nt, Homo sapiens
  misc_RNA (1)...(19): siRNA sense strand
uauagcaaaucuccuguuu

SEQ ID NO: 1950923 - RNA, 19 nt, Homo sapiens
  misc_RNA (1)...(19): siRNA sense strand
gaaucuggaugcacgagaa

SEQ ID NO: 1950924 - RNA, 19 nt, Homo sapiens
  misc_RNA (1)...(19): siRNA sense strand
uagcaaaucuccuguuucu

SEQ ID NO: 1950925 - RNA, 19 nt, Homo sapiens
  misc_RNA (1)...(19): siRNA sense strand
uaguagagaucguauguau

SEQ ID NO: 1950926 - RNA, 19 nt, Homo sapiens
  misc_RNA (1)...(19): siRNA sense strand
gcagagggcgcuuuaacuu

SEQ ID NO: 1950927 - RNA, 19 nt, Homo sapiens
  misc_RNA (1)...(19): siRNA sense strand
cagaggagacagaggauua

SEQ ID NO: 1950928 - RNA, 19 nt, Homo sapiens
  misc_RNA (1)...(19): siRNA sense strand
gaucguauguauucuagag

SEQ ID NO: 1950929 - RNA, 19 nt, Homo sapiens
  misc_RNA (1)...(19): siRNA sense strand
gaagagaccauggaaaaua

SEQ ID NO: 1950930 - RNA, 19 nt, Homo sapiens
  misc_RNA (1)...(19): siRNA sense strand
agaaagugauggauuuaga

SEQ ID NO: 1950931 - RNA, 19 nt, Homo sapiens
  misc_RNA (1)...(19): siRNA sense strand
gagaaaggaucagagaaag

SEQ ID NO: 1950932 - RNA, 19 nt, Homo sapiens
  misc_RNA (1)...(19): siRNA sense strand
ggagacagaggauuauaga

SEQ ID NO: 1950933 - RNA, 19 nt, Homo sapiens
  misc_RNA (1)...(19): siRNA sense strand
gcaaaagagcccugaaaua

SEQ ID NO: 1950934 - RNA, 19 nt, Homo sapiens
  misc_RNA (1)...(19): siRNA sense strand
caagaaggagcaagaauuc

SEQ ID NO: 1950935 - RNA, 19 nt, Homo sapiens
  misc_RNA (1)...(19): siRNA sense strand
gaagaagagaccauggaaa

SEQ ID NO: 1950936 - RNA, 19 nt, Homo sapiens
  misc_RNA (1)...(19): siRNA sense strand
gguccaaacaacucaaaua

SEQ ID NO: 1950937 - RNA, 19 nt, Homo sapiens
  misc_RNA (1)...(19): siRNA sense strand
caaaagcacuucagaguca

SEQ ID NO: 1950938 - RNA, 19 nt, Homo sapiens
  misc_RNA (1)...(19): siRNA sense strand
gagaucguauguauucuag

SEQ ID NO: 1950939 - RNA, 19 nt, Homo sapiens
  misc_RNA (1)...(19): siRNA sense strand
guacaaguccaaaguuuca

SEQ ID NO: 1950940 - RNA, 19 nt, Homo sapiens
  misc_RNA (1)...(19): siRNA sense strand
gaagaaguccugcaaagac

SEQ ID NO: 1950941 - RNA, 19 nt, Homo sapiens
  misc_RNA (1)...(19): siRNA sense strand
gaaauggaucuagucgaua

SEQ ID NO: 1950942 - RNA, 19 nt, Homo sapiens
  misc_RNA (1)...(19): siRNA sense strand
gaaccgaaagauacauuug

SEQ ID NO: 1950943 - RNA, 19 nt, Homo sapiens
  misc_RNA (1)...(19): siRNA sense strand
uauucaaggucucguagua

SEQ ID NO: 1950944 - RNA, 19 nt, Homo sapiens
  misc_RNA (1)...(19): siRNA sense strand
ucucaaagauccagaagca

SEQ ID NO: 1950945 - RNA, 19 nt, Homo sapiens
  misc_RNA (1)...(19): siRNA sense strand
gcagaucucgccggucaua

SEQ ID NO: 1950946 - RNA, 19 nt, Homo sapiens
  misc_RNA (1)...(19): siRNA sense strand
ucaagaaggagcaagaauu

SEQ ID NO: 1950947 - RNA, 19 nt, Homo sapiens
  misc_RNA (1)...(19): siRNA sense strand
gagaguccguugaaaagua

SEQ ID NO: 1950948 - RNA, 19 nt, Homo sapiens
  misc_RNA (1)...(19): siRNA sense strand
gcacuucagagucauuuau

SEQ ID NO: 1950949 - RNA, 19 nt, Homo sapiens
  misc_RNA (1)...(19): siRNA sense strand
cuaguacacuuguccauuc

SEQ ID NO: 1950950 - RNA, 19 nt, Homo sapiens
  misc_RNA (1)...(19): siRNA sense strand
gaucaggaagcucuagauu

SEQ ID NO: 1950951 - RNA, 19 nt, Homo sapiens
  misc_RNA (1)...(19): siRNA sense strand
gaagagaguccguugaaaa

SEQ ID NO: 1950952 - RNA, 19 nt, Homo sapiens
  misc_RNA (1)...(19): siRNA sense strand
ggacagacgcaaggaagaa

SEQ ID NO: 1950953 - RNA, 19 nt, Homo sapiens
  misc_RNA (1)...(19): siRNA sense strand
ggaagagccagaggaguuu

SEQ ID NO: 1950954 - RNA, 19 nt, Homo sapiens
  misc_RNA (1)...(19): siRNA sense strand
ugaggaagcauacccguuu

SEQ ID NO: 1950955 - RNA, 19 nt, Homo sapiens
  misc_RNA (1)...(19): siRNA sense strand
uaaacgagcgguucacuuc

SEQ ID NO: 1950956 - RNA, 19 nt, Homo sapiens
  misc_RNA (1)...(19): siRNA sense strand
gaguauuccugcuugauag

SEQ ID NO: 1950957 - RNA, 19 nt, Homo sapiens
  misc_RNA (1)...(19): siRNA sense strand
gaaagcccacuuaggauca

SEQ ID NO: 1950958 - RNA, 19 nt, Homo sapiens
  misc_RNA (1)...(19): siRNA sense strand
cgaauuagaggcagaggaa

SEQ ID NO: 1950959 - RNA, 19 nt, Homo sapiens
  misc_RNA (1)...(19): siRNA sense strand
aaagagagcaagaucauuc

SEQ ID NO: 1950960 - RNA, 19 nt, Homo sapiens
  misc_RNA (1)...(19): siRNA sense strand
agaaagaagcgauacaguu

SEQ ID NO: 1950961 - RNA, 19 nt, Homo sapiens
  misc_RNA (1)...(19): siRNA sense strand
ucagguagcaguccuaaau

SEQ ID NO: 1950962 - RNA, 19 nt, Homo sapiens
  misc_RNA (1)...(19): siRNA sense strand
ugacauugaucgccguaga

SEQ ID NO: 1950963 - RNA, 19 nt, Homo sapiens
  misc_RNA (1)...(19): siRNA sense strand
auugacaucucaccaagua

SEQ ID NO: 1950964 - RNA, 19 nt, Homo sapiens
  misc_RNA (1)...(19): siRNA sense strand
caucacaucccuucacgaa

SEQ ID NO: 1950965 - RNA, 19 nt, Homo sapiens
  misc_RNA (1)...(19): siRNA sense strand
agagggcgcuuuaacuuca

SEQ ID NO: 1950966 - RNA, 19 nt, Homo sapiens
  misc_RNA (1)...(19): siRNA sense strand
gagcaagaauuccgaucca

SEQ ID NO: 1950967 - RNA, 19 nt, Homo sapiens
  misc_RNA (1)...(19): siRNA sense strand
gacuggauauguaguggaa

SEQ ID NO: 1950968 - RNA, 19 nt, Homo sapiens
  misc_RNA (1)...(19): siRNA sense strand
aggaaggacucaaguacaa

SEQ ID NO: 1950969 - RNA, 19 nt, Homo sapiens
  misc_RNA (1)...(19): siRNA sense strand
uaaagagucuggaaaacaa

SEQ ID NO: 1950970 - RNA, 19 nt, Homo sapiens
  misc_RNA (1)...(19): siRNA sense strand
agagaaaggaucagagaaa

SEQ ID NO: 1950971 - RNA, 19 nt, Homo sapiens
  misc_RNA (1)...(19): siRNA sense strand
gacaaucgcaccacagaau

SEQ ID NO: 1950972 - RNA, 19 nt, Homo sapiens
  misc_RNA (1)...(19): siRNA sense strand
uagaggguauuaucaagga

SEQ ID NO: 1950973 - RNA, 19 nt, Homo sapiens
  misc_RNA (1)...(19): siRNA sense strand
cagcugcaaugacccuaaa

SEQ ID NO: 1950974 - RNA, 19 nt, Homo sapiens
  misc_RNA (1)...(19): siRNA sense strand
guacacuuguccauucugu

SEQ ID NO: 1950975 - RNA, 19 nt, Homo sapiens
  misc_RNA (1)...(19): siRNA sense strand
guaauaccagggauaaaga

SEQ ID NO: 1950976 - RNA, 19 nt, Homo sapiens
  misc_RNA (1)...(19): siRNA sense strand
ucaggaaacugcaaagacu

SEQ ID NO: 1950977 - RNA, 19 nt, Homo sapiens
  misc_RNA (1)...(19): siRNA sense strand
cgaaagauacauuugaaca

SEQ ID NO: 1950978 - RNA, 19 nt, Homo sapiens
  misc_RNA (1)...(19): siRNA sense strand
gguagaggguauuaucaag

SEQ ID NO: 1950979 - RNA, 19 nt, Homo sapiens
  misc_RNA (1)...(19): siRNA sense strand
aaagacaggcugcuugcua

SEQ ID NO: 1950980 - RNA, 19 nt, Homo sapiens
  misc_RNA (1)...(19): siRNA sense strand
ucaccguccugaagucaaa

SEQ ID NO: 1950981 - RNA, 19 nt, Homo sapiens
  misc_RNA (1)...(19): siRNA sense strand
aagauaagcacaaagaaga

SEQ ID NO: 1950982 - RNA, 19 nt, Homo sapiens
  misc_RNA (1)...(19): siRNA sense strand
aaguacaaguccaaaguuu

SEQ ID NO: 1950983 - RNA, 19 nt, Homo sapiens
  misc_RNA (1)...(19): siRNA sense strand
gggauaaagaggcuucaaa

SEQ ID NO: 1950984 - RNA, 19 nt, Homo sapiens
  misc_RNA (1)...(19): siRNA sense strand
ucacauuccauucagcaua

SEQ ID NO: 1950985 - RNA, 19 nt, Homo sapiens
  misc_RNA (1)...(19): siRNA sense strand
caggaggaaccgaaagaua

SEQ ID NO: 1950986 - RNA, 19 nt, Homo sapiens
  misc_RNA (1)...(19): siRNA sense strand
gacaaauacugguccaaac

SEQ ID NO: 1950987 - RNA, 19 nt, Homo sapiens
  misc_RNA (1)...(19): siRNA sense strand
uaagaaggaaagagaagaa

SEQ ID NO: 1950988 - RNA, 19 nt, Homo sapiens
  misc_RNA (1)...(19): siRNA sense strand
uuaaagagacuggauaugu

SEQ ID NO: 1950989 - RNA, 19 nt, Homo sapiens
  misc_RNA (1)...(19): siRNA sense strand
acagaaugcuccaagagau

SEQ ID NO: 1950990 - RNA, 19 nt, Homo sapiens
  misc_RNA (1)...(19): siRNA sense strand
ggaugggauuguugaagau

SEQ ID NO: 1950991 - RNA, 19 nt, Homo sapiens
  misc_RNA (1)...(19): siRNA sense strand
gaacagaacuugccacaua

SEQ ID NO: 1950992 - RNA, 19 nt, Homo sapiens
  misc_RNA (1)...(19): siRNA sense strand
gaaagaaguuuggaucuca

SEQ ID NO: 1950993 - RNA, 19 nt, Homo sapiens
  misc_RNA (1)...(19): siRNA sense strand
gaagaugccuagagaaugg

SEQ ID NO: 1950994 - RNA, 19 nt, Homo sapiens
  misc_RNA (1)...(19): siRNA sense strand
caaccuuucuuguuaguaa

SEQ ID NO: 1950995 - RNA, 19 nt, Homo sapiens
  misc_RNA (1)...(19): siRNA sense strand
gaaagauuguuacugugaa

SEQ ID NO: 1950996 - RNA, 19 nt, Homo sapiens
  misc_RNA (1)...(19): siRNA sense strand
caaagacuauaggcaauaa

SEQ ID NO: 1950997 - RNA, 19 nt, Homo sapiens
  misc_RNA (1)...(19): siRNA sense strand
ccuagagaauggcaauuua

SEQ ID NO: 1950998 - RNA, 19 nt, Homo sapiens
  misc_RNA (1)...(19): siRNA sense strand
caaauauuguggagaauuc

SEQ ID NO: 1950999 - RNA, 19 nt, Homo sapiens
  misc_RNA (1)...(19): siRNA sense strand
ggaaagauuguuacuguga

SEQ ID NO: 1951000 - RNA, 19 nt, Homo sapiens
  misc_RNA (1)...(19): siRNA sense strand
gaugcagacucuucuuauu

SEQ ID NO: 1951001 - RNA, 19 nt, Homo sapiens
  misc_RNA (1)...(19): siRNA sense strand
uaucauaucuguaccucuu

SEQ ID NO: 1951002 - RNA, 19 nt, Homo sapiens
  misc_RNA (1)...(19): siRNA sense strand
aaugggagcugacugauau

SEQ ID NO: 1951003 - RNA, 19 nt, Homo sapiens
  misc_RNA (1)...(19): siRNA sense strand
ggucaacaaugguggaaug

SEQ ID NO: 1951004 - RNA, 19 nt, Homo sapiens
  misc_RNA (1)...(19): siRNA sense strand
gaaugggagcugacugaua

SEQ ID NO: 1951005 - RNA, 19 nt, Homo sapiens
  misc_RNA (1)...(19): siRNA sense strand
aaggaaagauuguuacugu

SEQ ID NO: 1951006 - RNA, 19 nt, Homo sapiens
  misc_RNA (1)...(19): siRNA sense strand
ggaccugugcaaucaaaua

SEQ ID NO: 1951007 - RNA, 19 nt, Homo sapiens
  misc_RNA (1)...(19): siRNA sense strand
cagcuuggaugucuacaga

SEQ ID NO: 1951008 - RNA, 19 nt, Homo sapiens
  misc_RNA (1)...(19): siRNA sense strand
ccaaugauuugaaagaagu

SEQ ID NO: 1951009 - RNA, 19 nt, Homo sapiens
  misc_RNA (1)...(19): siRNA sense strand
ggagaccagucccacaaga

SEQ ID NO: 1951010 - RNA, 19 nt, Homo sapiens
  misc_RNA (1)...(19): siRNA sense strand
gcuuggaugucuacagaaa

SEQ ID NO: 1951011 - RNA, 19 nt, Homo sapiens
  misc_RNA (1)...(19): siRNA sense strand
gugaggagcuggcuuacca

SEQ ID NO: 1951012 - RNA, 19 nt, Homo sapiens
  misc_RNA (1)...(19): siRNA sense strand
cagcauggccaaugauuug

SEQ ID NO: 1951013 - RNA, 19 nt, Homo sapiens
  misc_RNA (1)...(19): siRNA sense strand
gcuaauagagcuuaacuac

SEQ ID NO: 1951014 - RNA, 19 nt, Homo sapiens
  misc_RNA (1)...(19): siRNA sense strand
ugaauagcauccuggguau

SEQ ID NO: 1951015 - RNA, 19 nt, Homo sapiens
  misc_RNA (1)...(19): siRNA sense strand
cgacacugguucccaugaa

SEQ ID NO: 1951016 - RNA, 19 nt, Homo sapiens
  misc_RNA (1)...(19): siRNA sense strand
aaaagaagaugccuagaga

SEQ ID NO: 1951017 - RNA, 19 nt, Homo sapiens
  misc_RNA (1)...(19): siRNA sense strand
ggccaaugauuugaaagaa

SEQ ID NO: 1951018 - RNA, 19 nt, Homo sapiens
  misc_RNA (1)...(19): siRNA sense strand
uaaucagcauggccaauga

SEQ ID NO: 1951019 - RNA, 19 nt, Homo sapiens
  misc_RNA (1)...(19): siRNA sense strand
gauaccagcuuggaugucu

SEQ ID NO: 1951020 - RNA, 19 nt, Homo sapiens
  misc_RNA (1)...(19): siRNA sense strand
aagcaaggaaagauuguua

SEQ ID NO: 1951021 - RNA, 19 nt, Homo sapiens
  misc_RNA (1)...(19): siRNA sense strand
gaggaagcaaggaaagauu

SEQ ID NO: 1951022 - RNA, 19 nt, Homo sapiens
  misc_RNA (1)...(19): siRNA sense strand
gcagacucuucuuauuuua

SEQ ID NO: 1951023 - RNA, 19 nt, Homo sapiens
  misc_RNA (1)...(19): siRNA sense strand
ggaugcagacucuucuuau

SEQ ID NO: 1951024 - RNA, 19 nt, Homo sapiens
  misc_RNA (1)...(19): siRNA sense strand
uggcuuaccaguugucuaa

SEQ ID NO: 1951025 - RNA, 19 nt, Homo sapiens
  misc_RNA (1)...(19): siRNA sense strand
cauggccaaugauuugaaa

SEQ ID NO: 1951026 - RNA, 19 nt, Homo sapiens
  misc_RNA (1)...(19): siRNA sense strand
cacaaagacuauaggcaau

SEQ ID NO: 1951027 - RNA, 19 nt, Homo sapiens
  misc_RNA (1)...(19): siRNA sense strand
cuagagaauggcaauuuaa

SEQ ID NO: 1951028 - RNA, 19 nt, Homo sapiens
  misc_RNA (1)...(19): siRNA sense strand
cagaaugggagcugacuga

SEQ ID NO: 1951029 - RNA, 19 nt, Homo sapiens
  misc_RNA (1)...(19): siRNA sense strand
ggauugagaacuuuaagag

SEQ ID NO: 1951030 - RNA, 19 nt, Homo sapiens
  misc_RNA (1)...(19): siRNA sense strand
ccaugaagcggcuaccaaa

SEQ ID NO: 1951031 - RNA, 19 nt, Homo sapiens
  misc_RNA (1)...(19): siRNA sense strand
uuaauggccuucgaacaga

SEQ ID NO: 1951032 - RNA, 19 nt, Homo sapiens
  misc_RNA (1)...(19): siRNA sense strand
gccaaugauuugaaagaag

SEQ ID NO: 1951033 - RNA, 19 nt, Homo sapiens
  misc_RNA (1)...(19): siRNA sense strand
agaaaaggauugagaacuu

SEQ ID NO: 1951034 - RNA, 19 nt, Homo sapiens
  misc_RNA (1)...(19): siRNA sense strand
gaucucagaacaaccuuuc

SEQ ID NO: 1951035 - RNA, 19 nt, Homo sapiens
  misc_RNA (1)...(19): siRNA sense strand
ugaaagaaguuuggaucuc

SEQ ID NO: 1951036 - RNA, 19 nt, Homo sapiens
  misc_RNA (1)...(19): siRNA sense strand
guggauaaccaacaagaug

SEQ ID NO: 1951037 - RNA, 19 nt, Homo sapiens
  misc_RNA (1)...(19): siRNA sense strand
gaccugugcaaucaaauau

SEQ ID NO: 1951038 - RNA, 19 nt, Homo sapiens
  misc_RNA (1)...(19): siRNA sense strand
acaaagacuauaggcaaua

SEQ ID NO: 1951039 - RNA, 19 nt, Homo sapiens
  misc_RNA (1)...(19): siRNA sense strand
gagaggaagcaaggaaaga

SEQ ID NO: 1951040 - RNA, 19 nt, Homo sapiens
  misc_RNA (1)...(19): siRNA sense strand
aagaagaugccuagagaau

SEQ ID NO: 1951041 - RNA, 19 nt, Homo sapiens
  misc_RNA (1)...(19): siRNA sense strand
gaccagucccacaagauga

SEQ ID NO: 1951042 - RNA, 19 nt, Homo sapiens
  misc_RNA (1)...(19): siRNA sense strand
uaauggccuucgaacagaa

SEQ ID NO: 1951043 - RNA, 19 nt, Homo sapiens
  misc_RNA (1)...(19): siRNA sense strand
ggaagcaaggaaagauugu

SEQ ID NO: 1951044 - RNA, 19 nt, Homo sapiens
  misc_RNA (1)...(19): siRNA sense strand
gaagcaaggaaagauuguu

SEQ ID NO: 1951045 - RNA, 19 nt, Homo sapiens
  misc_RNA (1)...(19): siRNA sense strand
ccaggaguuugguagaauc

SEQ ID NO: 1951046 - RNA, 19 nt, Homo sapiens
  misc_RNA (1)...(19): siRNA sense strand
augcagacucuucuuauuu

SEQ ID NO: 1951047 - RNA, 19 nt, Homo sapiens
  misc_RNA (1)...(19): siRNA sense strand
gaaaagaagaugccuagag

SEQ ID NO: 1951048 - RNA, 19 nt, Homo sapiens
  misc_RNA (1)...(19): siRNA sense strand
gccuagagaauggcaauuu

SEQ ID NO: 1951049 - RNA, 19 nt, Homo sapiens
  misc_RNA (1)...(19): siRNA sense strand
cauccuggguaucauaucu

SEQ ID NO: 1951050 - RNA, 19 nt, Homo sapiens
  misc_RNA (1)...(19): siRNA sense strand
cuacagaaagcuaauagag

SEQ ID NO: 1951051 - RNA, 19 nt, Homo sapiens
  misc_RNA (1)...(19): siRNA sense strand
acuaggaguuucucuugug

SEQ ID NO: 1951052 - RNA, 19 nt, Homo sapiens
  misc_RNA (1)...(19): siRNA sense strand
ggaagaaaaggauugagaa

SEQ ID NO: 1951053 - RNA, 19 nt, Homo sapiens
  misc_RNA (1)...(19): siRNA sense strand
gacuauaggcaauaaugga

SEQ ID NO: 1951054 - RNA, 19 nt, Homo sapiens
  misc_RNA (1)...(19): siRNA sense strand
uagcauccuggguaucaua

SEQ ID NO: 1951055 - RNA, 19 nt, Homo sapiens
  misc_RNA (1)...(19): siRNA sense strand
ggaugucuacagaaagcua

SEQ ID NO: 1951056 - RNA, 19 nt, Homo sapiens
  misc_RNA (1)...(19): siRNA sense strand
gcaaggaaagauuguuacu

SEQ ID NO: 1951057 - RNA, 19 nt, Homo sapiens
  misc_RNA (1)...(19): siRNA sense strand
uggaugcagacucuucuua

SEQ ID NO: 1951058 - RNA, 19 nt, Homo sapiens
  misc_RNA (1)...(19): siRNA sense strand
gaccugaccgacacugguu

SEQ ID NO: 1951059 - RNA, 19 nt, Homo sapiens
  misc_RNA (1)...(19): siRNA sense strand
gugugcggcugauguuaau

SEQ ID NO: 1951060 - RNA, 19 nt, Homo sapiens
  misc_RNA (1)...(19): siRNA sense strand
gaugucuacagaaagcuaa

SEQ ID NO: 1951061 - RNA, 19 nt, Homo sapiens
  misc_RNA (1)...(19): siRNA sense strand
gacacugguucccaugaag

SEQ ID NO: 1951062 - RNA, 19 nt, Homo sapiens
  misc_RNA (1)...(19): siRNA sense strand
ccaacaagauggggaagaa

SEQ ID NO: 1951063 - RNA, 19 nt, Homo sapiens
  misc_RNA (1)...(19): siRNA sense strand
guaacauauuuguggcaau

SEQ ID NO: 1951064 - RNA, 19 nt, Homo sapiens
  misc_RNA (1)...(19): siRNA sense strand
gcauggccaaugauuugaa

SEQ ID NO: 1951065 - RNA, 19 nt, Homo sapiens
  misc_RNA (1)...(19): siRNA sense strand
ccagguauaauaguuucua

SEQ ID NO: 1951066 - RNA, 19 nt, Homo sapiens
  misc_RNA (1)...(19): siRNA sense strand
ucauaucuguaccucuuuc

SEQ ID NO: 1951067 - RNA, 19 nt, Homo sapiens
  misc_RNA (1)...(19): siRNA sense strand
ugaagcggcuaccaaagcu

SEQ ID NO: 1951068 - RNA, 19 nt, Homo sapiens
  misc_RNA (1)...(19): siRNA sense strand
gagaauggcaauuuaaaag

SEQ ID NO: 1951069 - RNA, 19 nt, Homo sapiens
  misc_RNA (1)...(19): siRNA sense strand
gaaguuuggaucucagaac

SEQ ID NO: 1951070 - RNA, 19 nt, Homo sapiens
  misc_RNA (1)...(19): siRNA sense strand
gcuuaccaguugucuaaac

SEQ ID NO: 1951071 - RNA, 19 nt, Homo sapiens
  misc_RNA (1)...(19): siRNA sense strand
uaagagugguguggaugca

SEQ ID NO: 1951072 - RNA, 19 nt, Homo sapiens
  misc_RNA (1)...(19): siRNA sense strand
ucagcauggccaaugauuu

SEQ ID NO: 1951073 - RNA, 19 nt, Homo sapiens
  misc_RNA (1)...(19): siRNA sense strand
gagaccagucccacaagau

SEQ ID NO: 1951074 - RNA, 19 nt, Homo sapiens
  misc_RNA (1)...(19): siRNA sense strand
gcuggagaagucacaaaga

SEQ ID NO: 1951075 - RNA, 19 nt, Homo sapiens
  misc_RNA (1)...(19): siRNA sense strand
caaggaaagauuguuacug

SEQ ID NO: 1951076 - RNA, 19 nt, Homo sapiens
  misc_RNA (1)...(19): siRNA sense strand
ugcagacucuucuuauuuu

SEQ ID NO: 1951077 - RNA, 19 nt, Homo sapiens
  misc_RNA (1)...(19): siRNA sense strand
ucgacauucuggucaacaa

SEQ ID NO: 1951078 - RNA, 19 nt, Homo sapiens
  misc_RNA (1)...(19): siRNA sense strand
gauugagaacuuuaagagu

SEQ ID NO: 1951079 - RNA, 19 nt, Homo sapiens
  misc_RNA (1)...(19): siRNA sense strand
acuggagccucgaguggaa

SEQ ID NO: 1951080 - RNA, 19 nt, Homo sapiens
  misc_RNA (1)...(19): siRNA sense strand
aaagaagaugccuagagaa

SEQ ID NO: 1951081 - RNA, 19 nt, Homo sapiens
  misc_RNA (1)...(19): siRNA sense strand
aaguuuggaucucagaaca

SEQ ID NO: 1951082 - RNA, 19 nt, Homo sapiens
  misc_RNA (1)...(19): siRNA sense strand
agaccagucccacaagaug

SEQ ID NO: 1951083 - RNA, 19 nt, Homo sapiens
  misc_RNA (1)...(19): siRNA sense strand
cguucucugugcauggaua

SEQ ID NO: 1951084 - RNA, 19 nt, Homo sapiens
  misc_RNA (1)...(19): siRNA sense strand
aagacuauaggcaauaaug

SEQ ID NO: 1951085 - RNA, 19 nt, Homo sapiens
  misc_RNA (1)...(19): siRNA sense strand
cgaccugacgcuacuaugg

SEQ ID NO: 1951086 - RNA, 19 nt, Homo sapiens
  misc_RNA (1)...(19): siRNA sense strand
agaagaugccuagagaaug

SEQ ID NO: 1951087 - RNA, 19 nt, Homo sapiens
  misc_RNA (1)...(19): siRNA sense strand
gcauggauaccagcuugga

SEQ ID NO: 1951088 - RNA, 19 nt, Homo sapiens
  misc_RNA (1)...(19): siRNA sense strand
cuggagaagucacaaagac

SEQ ID NO: 1951089 - RNA, 19 nt, Homo sapiens
  misc_RNA (1)...(19): siRNA sense strand
ugugugcggcugauguuaa

SEQ ID NO: 1951090 - RNA, 19 nt, Homo sapiens
  misc_RNA (1)...(19): siRNA sense strand
aagagugcaugagcuggaa

SEQ ID NO: 1951091 - RNA, 19 nt, Homo sapiens
  misc_RNA (1)...(19): siRNA sense strand
gcagagagcuauauuugga

SEQ ID NO: 1951092 - RNA, 19 nt, Homo sapiens
  misc_RNA (1)...(19): siRNA sense strand
caaacaggauugucacuuu

SEQ ID NO: 1951093 - RNA, 19 nt, Homo sapiens
  misc_RNA (1)...(19): siRNA sense strand
gaaacuaaaucucuagaag

SEQ ID NO: 1951094 - RNA, 19 nt, Homo sapiens
  misc_RNA (1)...(19): siRNA sense strand
aaacaggauugucacuuua

SEQ ID NO: 1951095 - RNA, 19 nt, Homo sapiens
  misc_RNA (1)...(19): siRNA sense strand
ggaaguaauuagagcuuug

SEQ ID NO: 1951096 - RNA, 19 nt, Homo sapiens
  misc_RNA (1)...(19): siRNA sense strand
gacaagcucucaaaguguu

SEQ ID NO: 1951097 - RNA, 19 nt, Homo sapiens
  misc_RNA (1)...(19): siRNA sense strand
gggugggccugcaaauuua

SEQ ID NO: 1951098 - RNA, 19 nt, Homo sapiens
  misc_RNA (1)...(19): siRNA sense strand
aagaauggcuaaagcaauu

SEQ ID NO: 1951099 - RNA, 19 nt, Homo sapiens
  misc_RNA (1)...(19): siRNA sense strand
gaaauaaucggaaguagac

SEQ ID NO: 1951100 - RNA, 19 nt, Homo sapiens
  misc_RNA (1)...(19): siRNA sense strand
gcacaagaauggcuaaagc

SEQ ID NO: 1951101 - RNA, 19 nt, Homo sapiens
  misc_RNA (1)...(19): siRNA sense strand
uagacaagcucucaaagug

SEQ ID NO: 1951102 - RNA, 19 nt, Homo sapiens
  misc_RNA (1)...(19): siRNA sense strand
gaucagauucguccacaaa

SEQ ID NO: 1951103 - RNA, 19 nt, Homo sapiens
  misc_RNA (1)...(19): siRNA sense strand
gcaugugauuucagguuaa

SEQ ID NO: 1951104 - RNA, 19 nt, Homo sapiens
  misc_RNA (1)...(19): siRNA sense strand
caaagagaugggcauaaua

SEQ ID NO: 1951105 - RNA, 19 nt, Homo sapiens
  misc_RNA (1)...(19): siRNA sense strand
acaaagagaugggcauaau

SEQ ID NO: 1951106 - RNA, 19 nt, Homo sapiens
  misc_RNA (1)...(19): siRNA sense strand
ggacaaaauugcuacauca

SEQ ID NO: 1951107 - RNA, 19 nt, Homo sapiens
  misc_RNA (1)...(19): siRNA sense strand
gaacaauccaaguagaaug

SEQ ID NO: 1951108 - RNA, 19 nt, Homo sapiens
  misc_RNA (1)...(19): siRNA sense strand
gauugucacuuuauaguac

SEQ ID NO: 1951109 - RNA, 19 nt, Homo sapiens
  misc_RNA (1)...(19): siRNA sense strand
uagaggcuauugcuaagaa

SEQ ID NO: 1951110 - RNA, 19 nt, Homo sapiens
  misc_RNA (1)...(19): siRNA sense strand
gagaugggcauaauaccaa

SEQ ID NO: 1951111 - RNA, 19 nt, Homo sapiens
  misc_RNA (1)...(19): siRNA sense strand
acaggauugucacuuuaua

SEQ ID NO: 1951112 - RNA, 19 nt, Homo sapiens
  misc_RNA (1)...(19): siRNA sense strand
ggaggaagcauuacagaac

SEQ ID NO: 1951113 - RNA, 19 nt, Homo sapiens
  misc_RNA (1)...(19): siRNA sense strand
ggauugucacuuuauagua

SEQ ID NO: 1951114 - RNA, 19 nt, Homo sapiens
  misc_RNA (1)...(19): siRNA sense strand
ucagauucguccacaaaga

SEQ ID NO: 1951115 - RNA, 19 nt, Homo sapiens
  misc_RNA (1)...(19): siRNA sense strand
ggaaguagacaagcucuca

SEQ ID NO: 1951116 - RNA, 19 nt, Homo sapiens
  misc_RNA (1)...(19): siRNA sense strand
gaaguaauuagagcuuuga

SEQ ID NO: 1951117 - RNA, 19 nt, Homo sapiens
  misc_RNA (1)...(19): siRNA sense strand
gcauuggcauucuuacucu

SEQ ID NO: 1951118 - RNA, 19 nt, Homo sapiens
  misc_RNA (1)...(19): siRNA sense strand
cccuuaaacuggauucaaa

SEQ ID NO: 1951119 - RNA, 19 nt, Homo sapiens
  misc_RNA (1)...(19): siRNA sense strand
ccacaaagagaugggcaua

SEQ ID NO: 1951120 - RNA, 19 nt, Homo sapiens
  misc_RNA (1)...(19): siRNA sense strand
ggguggaggagcagaauuu

SEQ ID NO: 1951121 - RNA, 19 nt, Homo sapiens
  misc_RNA (1)...(19): siRNA sense strand
ugaaauaaucggaaguaga

SEQ ID NO: 1951122 - RNA, 19 nt, Homo sapiens
  misc_RNA (1)...(19): siRNA sense strand
guagacaagcucucaaagu

SEQ ID NO: 1951123 - RNA, 19 nt, Homo sapiens
  misc_RNA (1)...(19): siRNA sense strand
uagaagaggcacaagaaug

SEQ ID NO: 1951124 - RNA, 19 nt, Homo sapiens
  misc_RNA (1)...(19): siRNA sense strand
acauaggaaugguugaaga

SEQ ID NO: 1951125 - RNA, 19 nt, Homo sapiens
  misc_RNA (1)...(19): siRNA sense strand
guuaugaugcuacaacuuc

SEQ ID NO: 1951126 - RNA, 19 nt, Homo sapiens
  misc_RNA (1)...(19): siRNA sense strand
ccacccggcuaguugaaau

SEQ ID NO: 1951127 - RNA, 19 nt, Homo sapiens
  misc_RNA (1)...(19): siRNA sense strand
ggagcagaauuuacuacag

SEQ ID NO: 1951128 - RNA, 19 nt, Homo sapiens
  misc_RNA (1)...(19): siRNA sense strand
ggaggagcagaauuuacua

SEQ ID NO: 1951129 - RNA, 19 nt, Homo sapiens
  misc_RNA (1)...(19): siRNA sense strand
gaaaaucaccauaggaauc

SEQ ID NO: 1951130 - RNA, 19 nt, Homo sapiens
  misc_RNA (1)...(19): siRNA sense strand
caagaauggcuaaagcaau

SEQ ID NO: 1951131 - RNA, 19 nt, Homo sapiens
  misc_RNA (1)...(19): siRNA sense strand
agaauuuacuacagcaugu

SEQ ID NO: 1951132 - RNA, 19 nt, Homo sapiens
  misc_RNA (1)...(19): siRNA sense strand
gcaccacccggcuaguuga

SEQ ID NO: 1951133 - RNA, 19 nt, Homo sapiens
  misc_RNA (1)...(19): siRNA sense strand
ggagacuuccuuuaauaag

SEQ ID NO: 1951134 - RNA, 19 nt, Homo sapiens
  misc_RNA (1)...(19): siRNA sense strand
guugaaauaaucggaagua

SEQ ID NO: 1951135 - RNA, 19 nt, Homo sapiens
  misc_RNA (1)...(19): siRNA sense strand
aaagagaugggcauaauac

SEQ ID NO: 1951136 - RNA, 19 nt, Homo sapiens
  misc_RNA (1)...(19): siRNA sense strand
agcaugugauuucagguua

SEQ ID NO: 1951137 - RNA, 19 nt, Homo sapiens
  misc_RNA (1)...(19): siRNA sense strand
gguggaggagcagaauuua

SEQ ID NO: 1951138 - RNA, 19 nt, Homo sapiens
  misc_RNA (1)...(19): siRNA sense strand
aaacauaggaaugguugaa

SEQ ID NO: 1951139 - RNA, 19 nt, Homo sapiens
  misc_RNA (1)...(19): siRNA sense strand
gcaaauuuagaggcuauug

SEQ ID NO: 1951140 - RNA, 19 nt, Homo sapiens
  misc_RNA (1)...(19): siRNA sense strand
ugaucugaaugcugugaaa

SEQ ID NO: 1951141 - RNA, 19 nt, Homo sapiens
  misc_RNA (1)...(19): siRNA sense strand
aggcagagagcuauauuug

SEQ ID NO: 1951142 - RNA, 19 nt, Homo sapiens
  misc_RNA (1)...(19): siRNA sense strand
gaaguagacaagcucucaa

SEQ ID NO: 1951143 - RNA, 19 nt, Homo sapiens
  misc_RNA (1)...(19): siRNA sense strand
guggauccauugaccuuca

SEQ ID NO: 1951144 - RNA, 19 nt, Homo sapiens
  misc_RNA (1)...(19): siRNA sense strand
gguucaagguugggcauug

SEQ ID NO: 1951145 - RNA, 19 nt, Homo sapiens
  misc_RNA (1)...(19): siRNA sense strand
ucuagaagaggcacaagaa

SEQ ID NO: 1951146 - RNA, 19 nt, Homo sapiens
  misc_RNA (1)...(19): siRNA sense strand
cggaaguaauuagagcuuu

SEQ ID NO: 1951147 - RNA, 19 nt, Homo sapiens
  misc_RNA (1)...(19): siRNA sense strand
ccaagggccaccggaagua

SEQ ID NO: 1951148 - RNA, 19 nt, Homo sapiens
  misc_RNA (1)...(19): siRNA sense strand
gcuaaagcaauucauccaa

SEQ ID NO: 1951149 - RNA, 19 nt, Homo sapiens
  misc_RNA (1)...(19): siRNA sense strand
caaaauugcuacaucaaac

SEQ ID NO: 1951150 - RNA, 19 nt, Homo sapiens
  misc_RNA (1)...(19): siRNA sense strand
agaagaggcacaagaaugg

SEQ ID NO: 1951151 - RNA, 19 nt, Homo sapiens
  misc_RNA (1)...(19): siRNA sense strand
gcucuaaacauaggaaugg

SEQ ID NO: 1951152 - RNA, 19 nt, Homo sapiens
  misc_RNA (1)...(19): siRNA sense strand
ccggcuaguugaaauaauc

SEQ ID NO: 1951153 - RNA, 19 nt, Homo sapiens
  misc_RNA (1)...(19): siRNA sense strand
acucugaacaauccaagua

SEQ ID NO: 1951154 - RNA, 19 nt, Homo sapiens
  misc_RNA (1)...(19): siRNA sense strand
caagggccaccggaaguaa

SEQ ID NO: 1951155 - RNA, 19 nt, Homo sapiens
  misc_RNA (1)...(19): siRNA sense strand
caauccaaguagaaugaau

SEQ ID NO: 1951156 - RNA, 19 nt, Homo sapiens
  misc_RNA (1)...(19): siRNA sense strand
ucugaacaauccaaguaga

SEQ ID NO: 1951157 - RNA, 19 nt, Homo sapiens
  misc_RNA (1)...(19): siRNA sense strand
cagagaguaagaucagauu

SEQ ID NO: 1951158 - RNA, 19 nt, Homo sapiens
  misc_RNA (1)...(19): siRNA sense strand
gaugaaacuaaaucucuag

SEQ ID NO: 1951159 - RNA, 19 nt, Homo sapiens
  misc_RNA (1)...(19): siRNA sense strand
gaugcuacaacuucuggaa

SEQ ID NO: 1951160 - RNA, 19 nt, Homo sapiens
  misc_RNA (1)...(19): siRNA sense strand
cugcaaauuuagaggcuau

SEQ ID NO: 1951161 - RNA, 19 nt, Homo sapiens
  misc_RNA (1)...(19): siRNA sense strand
ggggugggccugcaaauuu

SEQ ID NO: 1951162 - RNA, 19 nt, Homo sapiens
  misc_RNA (1)...(19): siRNA sense strand
uuacagaacgaaagagauc

SEQ ID NO: 1951163 - RNA, 19 nt, Homo sapiens
  misc_RNA (1)...(19): siRNA sense strand
auauuuggaggaagcauua

SEQ ID NO: 1951164 - RNA, 19 nt, Homo sapiens
  misc_RNA (1)...(19): siRNA sense strand
caugugauuucagguuaau

SEQ ID NO: 1951165 - RNA, 19 nt, Homo sapiens
  misc_RNA (1)...(19): siRNA sense strand
cagcaugugauuucagguu

SEQ ID NO: 1951166 - RNA, 19 nt, Homo sapiens
  misc_RNA (1)...(19): siRNA sense strand
agagcuauauuuggaggaa

SEQ ID NO: 1951167 - RNA, 19 nt, Homo sapiens
  misc_RNA (1)...(19): siRNA sense strand
gagaguaagaucagauucg

SEQ ID NO: 1951168 - RNA, 19 nt, Homo sapiens
  misc_RNA (1)...(19): siRNA sense strand
gaagcauuacagaacgaaa

SEQ ID NO: 1951169 - RNA, 19 nt, Homo sapiens
  misc_RNA (1)...(19): siRNA sense strand
acaagaauggcuaaagcaa

SEQ ID NO: 1951170 - RNA, 19 nt, Homo sapiens
  misc_RNA (1)...(19): siRNA sense strand
aacaauccaaguagaauga

SEQ ID NO: 1951171 - RNA, 19 nt, Homo sapiens
  misc_RNA (1)...(19): siRNA sense strand
ugugauuucagguuaauga

SEQ ID NO: 1951172 - RNA, 19 nt, Homo sapiens
  misc_RNA (1)...(19): siRNA sense strand
ggaagcauuacagaacgaa

SEQ ID NO: 1951173 - RNA, 19 nt, Homo sapiens
  misc_RNA (1)...(19): siRNA sense strand
cauuacagaacgaaagaga

SEQ ID NO: 1951174 - RNA, 19 nt, Homo sapiens
  misc_RNA (1)...(19): siRNA sense strand
guucaagguugggcauugg

SEQ ID NO: 1951175 - RNA, 19 nt, Homo sapiens
  misc_RNA (1)...(19): siRNA sense strand
ucaaacaggauugucacuu

SEQ ID NO: 1951176 - RNA, 19 nt, Homo sapiens
  misc_RNA (1)...(19): siRNA sense strand
guucaggcagagagcuaua

SEQ ID NO: 1951177 - RNA, 19 nt, Homo sapiens
  misc_RNA (1)...(19): siRNA sense strand
agacaagcucucaaagugu

SEQ ID NO: 1951178 - RNA, 19 nt, Homo sapiens
  misc_RNA (1)...(19): siRNA sense strand
ugaacaauccaaguagaau

SEQ ID NO: 1951179 - RNA, 19 nt, Homo sapiens
  misc_RNA (1)...(19): siRNA sense strand
caggcagagagcuauauuu

SEQ ID NO: 1951180 - RNA, 19 nt, Homo sapiens
  misc_RNA (1)...(19): siRNA sense strand
agaguaagaucagauucgu

SEQ ID NO: 1951181 - RNA, 19 nt, Homo sapiens
  misc_RNA (1)...(19): siRNA sense strand
aauacuuucucuucaggau

SEQ ID NO: 1951182 - RNA, 19 nt, Homo sapiens
  misc_RNA (1)...(19): siRNA sense strand
ggcuauugcuaagaaagga

SEQ ID NO: 1951183 - RNA, 19 nt, Homo sapiens
  misc_RNA (1)...(19): siRNA sense strand
ucaggcagagagcuauauu

SEQ ID NO: 1951184 - RNA, 19 nt, Homo sapiens
  misc_RNA (1)...(19): siRNA sense strand
ggcauuggcauucuuacuc

SEQ ID NO: 1951185 - RNA, 19 nt, Homo sapiens
  misc_RNA (1)...(19): siRNA sense strand
ccagagaguaagaucagau

SEQ ID NO: 1951186 - RNA, 19 nt, Homo sapiens
  misc_RNA (1)...(19): siRNA sense strand
cugaacaauccaaguagaa

SEQ ID NO: 1951187 - RNA, 19 nt, Homo sapiens
  misc_RNA (1)...(19): siRNA sense strand
ugacgggccucuuggauga

SEQ ID NO: 1951188 - RNA, 19 nt, Homo sapiens
  misc_RNA (1)...(19): siRNA sense strand
ggacaugacgggccucuug

SEQ ID NO: 1951189 - RNA, 19 nt, Homo sapiens
  misc_RNA (1)...(19): siRNA sense strand
gaccugcgcuucaacaauc

SEQ ID NO: 1951190 - RNA, 19 nt, Homo sapiens
  misc_RNA (1)...(19): siRNA sense strand
ggacaagaagacaguggua

SEQ ID NO: 1951191 - RNA, 19 nt, Homo sapiens
  misc_RNA (1)...(19): siRNA sense strand
ggacaacuuccgcuacuuc

SEQ ID NO: 1951192 - RNA, 19 nt, Homo sapiens
  misc_RNA (1)...(19): siRNA sense strand
ggacuacuucagccuauga

SEQ ID NO: 1951193 - RNA, 19 nt, Homo sapiens
  misc_RNA (1)...(19): siRNA sense strand
gggcuccucucuccuuuca

SEQ ID NO: 1951194 - RNA, 19 nt, Homo sapiens
  misc_RNA (1)...(19): siRNA sense strand
gaggacaacuuccgcuacu

SEQ ID NO: 1951195 - RNA, 19 nt, Homo sapiens
  misc_RNA (1)...(19): siRNA sense strand
gagagcaugcaggcuguua

SEQ ID NO: 1951196 - RNA, 19 nt, Homo sapiens
  misc_RNA (1)...(19): siRNA sense strand
guagcucgcacaugcauug

SEQ ID NO: 1951197 - RNA, 19 nt, Homo sapiens
  misc_RNA (1)...(19): siRNA sense strand
caacuuccgcuacuuccuu

SEQ ID NO: 1951198 - RNA, 19 nt, Homo sapiens
  misc_RNA (1)...(19): siRNA sense strand
gcggacuacuucagccuau

SEQ ID NO: 1951199 - RNA, 19 nt, Homo sapiens
  misc_RNA (1)...(19): siRNA sense strand
ggaccugcgcuucaacaau

SEQ ID NO: 1951200 - RNA, 19 nt, Homo sapiens
  misc_RNA (1)...(19): siRNA sense strand
cuacuuccuugcccagaug

SEQ ID NO: 1951201 - RNA, 19 nt, Homo sapiens
  misc_RNA (1)...(19): siRNA sense strand
cagccacacuguugcaucu

SEQ ID NO: 1951202 - RNA, 19 nt, Homo sapiens
  misc_RNA (1)...(19): siRNA sense strand
aggcugagcugcguacugu

SEQ ID NO: 1951203 - RNA, 19 nt, Homo sapiens
  misc_RNA (1)...(19): siRNA sense strand
gagcaugcaggcuguuauc

SEQ ID NO: 1951204 - RNA, 19 nt, Homo sapiens
  misc_RNA (1)...(19): siRNA sense strand
cugcccaccucaagaaguu

SEQ ID NO: 1951205 - RNA, 19 nt, Homo sapiens
  misc_RNA (1)...(19): siRNA sense strand
ccgcguagaagcugaguug

SEQ ID NO: 1951206 - RNA, 19 nt, Homo sapiens
  misc_RNA (1)...(19): siRNA sense strand
gccugcggcuccacuaugu

SEQ ID NO: 1951207 - RNA, 19 nt, Homo sapiens
  misc_RNA (1)...(19): siRNA sense strand
caucaaugaggagaaguuu

SEQ ID NO: 1951208 - RNA, 19 nt, Homo sapiens
  misc_RNA (1)...(19): siRNA sense strand
gcuacuuccuugcccagau

SEQ ID NO: 1951209 - RNA, 19 nt, Homo sapiens
  misc_RNA (1)...(19): siRNA sense strand
ggauggcgaggacaacuuc

SEQ ID NO: 1951210 - RNA, 19 nt, Homo sapiens
  misc_RNA (1)...(19): siRNA sense strand
ccuucccgcugcucaguuu

SEQ ID NO: 1951211 - RNA, 19 nt, Homo sapiens
  misc_RNA (1)...(19): siRNA sense strand
gcguggaccugcgcuucaa

SEQ ID NO: 1951212 - RNA, 19 nt, Homo sapiens
  misc_RNA (1)...(19): siRNA sense strand
ucaaugaggagaaguuugc

SEQ ID NO: 1951213 - RNA, 19 nt, Homo sapiens
  misc_RNA (1)...(19): siRNA sense strand
caucagcagccacacuguu

SEQ ID NO: 1951214 - RNA, 19 nt, Homo sapiens
  misc_RNA (1)...(19): siRNA sense strand
aguuggaccugagugguaa

SEQ ID NO: 1951215 - RNA, 19 nt, Homo sapiens
  misc_RNA (1)...(19): siRNA sense strand
gcucuccacucaucgauau

SEQ ID NO: 1951216 - RNA, 19 nt, Homo sapiens
  misc_RNA (1)...(19): siRNA sense strand
caauugauccuuucuacaa

SEQ ID NO: 1951217 - RNA, 19 nt, Homo sapiens
  misc_RNA (1)...(19): siRNA sense strand
ggaugaaguugaaauucug

SEQ ID NO: 1951218 - RNA, 19 nt, Homo sapiens
  misc_RNA (1)...(19): siRNA sense strand
ugacaaggauggugacucu

SEQ ID NO: 1951219 - RNA, 19 nt, Homo sapiens
  misc_RNA (1)...(19): siRNA sense strand
caagugaggaugaaguuga

SEQ ID NO: 1951220 - RNA, 19 nt, Homo sapiens
  misc_RNA (1)...(19): siRNA sense strand
gcuggugcauggacucaaa

SEQ ID NO: 1951221 - RNA, 19 nt, Homo sapiens
  misc_RNA (1)...(19): siRNA sense strand
gcacaauugauccuuucua

SEQ ID NO: 1951222 - RNA, 19 nt, Homo sapiens
  misc_RNA (1)...(19): siRNA sense strand
gugcauggacucaaacuug

SEQ ID NO: 1951223 - RNA, 19 nt, Homo sapiens
  misc_RNA (1)...(19): siRNA sense strand
acacauccaagucuacaua

SEQ ID NO: 1951224 - RNA, 19 nt, Homo sapiens
  misc_RNA (1)...(19): siRNA sense strand
gggcacaauugauccuuuc

SEQ ID NO: 1951225 - RNA, 19 nt, Homo sapiens
  misc_RNA (1)...(19): siRNA sense strand
gauccuuucuacaaugaau

SEQ ID NO: 1951226 - RNA, 19 nt, Homo sapiens
  misc_RNA (1)...(19): siRNA sense strand
cggaggauuucgagucuug

SEQ ID NO: 1951227 - RNA, 19 nt, Homo sapiens
  misc_RNA (1)...(19): siRNA sense strand
caagcaacuucuucagaca

SEQ ID NO: 1951228 - RNA, 19 nt, Homo sapiens
  misc_RNA (1)...(19): siRNA sense strand
cccagaagcccguguuuga

SEQ ID NO: 1951229 - RNA, 19 nt, Homo sapiens
  misc_RNA (1)...(19): siRNA sense strand
gugcucagacggaccuaua

SEQ ID NO: 1951230 - RNA, 19 nt, Homo sapiens
  misc_RNA (1)...(19): siRNA sense strand
gaucgucauuggccaguac

SEQ ID NO: 1951231 - RNA, 19 nt, Homo sapiens
  misc_RNA (1)...(19): siRNA sense strand
gcuggcagacugaauguug

SEQ ID NO: 1951232 - RNA, 19 nt, Homo sapiens
  misc_RNA (1)...(19): siRNA sense strand
cgucccagcucuccacuca

SEQ ID NO: 1951233 - RNA, 19 nt, Homo sapiens
  misc_RNA (1)...(19): siRNA sense strand
gagcugcuucugucacuga

SEQ ID NO: 1951234 - RNA, 19 nt, Homo sapiens
  misc_RNA (1)...(19): siRNA sense strand
caagaaggagcccauccaa

SEQ ID NO: 1951235 - RNA, 19 nt, Homo sapiens
  misc_RNA (1)...(19): siRNA sense strand
gaaaaugccagccuagugu

SEQ ID NO: 1951236 - RNA, 19 nt, Homo sapiens
  misc_RNA (1)...(19): siRNA sense strand
cacaauugauccuuucuac

SEQ ID NO: 1951237 - RNA, 19 nt, Homo sapiens
  misc_RNA (1)...(19): siRNA sense strand
cugcuucugucacugaauu

SEQ ID NO: 1951238 - RNA, 19 nt, Homo sapiens
  misc_RNA (1)...(19): siRNA sense strand
gauuucgagucuugaguca

SEQ ID NO: 1951239 - RNA, 19 nt, Homo sapiens
  misc_RNA (1)...(19): siRNA sense strand
gagccaagcaacuucuuca

SEQ ID NO: 1951240 - RNA, 19 nt, Homo sapiens
  misc_RNA (1)...(19): siRNA sense strand
uaaguucucccgccacugu

SEQ ID NO: 1951241 - RNA, 19 nt, Homo sapiens
  misc_RNA (1)...(19): siRNA sense strand
gcgacgauguggacucucu

SEQ ID NO: 1951242 - RNA, 19 nt, Homo sapiens
  misc_RNA (1)...(19): siRNA sense strand
ccagucaagugaggaugaa

SEQ ID NO: 1951243 - RNA, 19 nt, Homo sapiens
  misc_RNA (1)...(19): siRNA sense strand
agccuaguguuuacaguuu

SEQ ID NO: 1951244 - RNA, 19 nt, Homo sapiens
  misc_RNA (1)...(19): siRNA sense strand
gccaagcaacuucuucaga

SEQ ID NO: 1951245 - RNA, 19 nt, Homo sapiens
  misc_RNA (1)...(19): siRNA sense strand
guccagcuguugccaguca

SEQ ID NO: 1951246 - RNA, 19 nt, Homo sapiens
  misc_RNA (1)...(19): siRNA sense strand
gcuguugccagucaaguga

SEQ ID NO: 1951247 - RNA, 19 nt, Homo sapiens
  misc_RNA (1)...(19): siRNA sense strand
gaggaugaaguugaaauuc

SEQ ID NO: 1951248 - RNA, 19 nt, Homo sapiens
  misc_RNA (1)...(19): siRNA sense strand
gcgcuacaccuucgagauc

SEQ ID NO: 1951249 - RNA, 19 nt, Homo sapiens
  misc_RNA (1)...(19): siRNA sense strand
aggaugaaguugaaauucu

SEQ ID NO: 1951250 - RNA, 19 nt, Homo sapiens
  misc_RNA (1)...(19): siRNA sense strand
ugaggaugaaguugaaauu

SEQ ID NO: 1951251 - RNA, 19 nt, Homo sapiens
  misc_RNA (1)...(19): siRNA sense strand
aagugaggaugaaguugaa

SEQ ID NO: 1951252 - RNA, 19 nt, Homo sapiens
  misc_RNA (1)...(19): siRNA sense strand
gcagacugaauguugaugu

SEQ ID NO: 1951253 - RNA, 19 nt, Homo sapiens
  misc_RNA (1)...(19): siRNA sense strand
gcacuucagcacucaguac

SEQ ID NO: 1951254 - RNA, 19 nt, Homo sapiens
  misc_RNA (1)...(19): siRNA sense strand
caacuucuucagacagaug

SEQ ID NO: 1951255 - RNA, 19 nt, Homo sapiens
  misc_RNA (1)...(19): siRNA sense strand
aaaccaagaagacguccuu

SEQ ID NO: 1951256 - RNA, 19 nt, Homo sapiens
  misc_RNA (1)...(19): siRNA sense strand
caacaugaagagcagcaau

SEQ ID NO: 1951257 - RNA, 19 nt, Homo sapiens
  misc_RNA (1)...(19): siRNA sense strand
aagaagaacuggaaaaugc

SEQ ID NO: 1951258 - RNA, 19 nt, Homo sapiens
  misc_RNA (1)...(19): siRNA sense strand
cggcacugcugucagaagu

SEQ ID NO: 1951259 - RNA, 19 nt, Homo sapiens
  misc_RNA (1)...(19): siRNA sense strand
ucccagcucuccacucauc

SEQ ID NO: 1951260 - RNA, 19 nt, Homo sapiens
  misc_RNA (1)...(19): siRNA sense strand
cagaccagaagaacucaaa

SEQ ID NO: 1951261 - RNA, 19 nt, Homo sapiens
  misc_RNA (1)...(19): siRNA sense strand
aguacgaccugcugcacaa

SEQ ID NO: 1951262 - RNA, 19 nt, Homo sapiens
  misc_RNA (1)...(19): siRNA sense strand
ucuccacucaucgauauua

SEQ ID NO: 1951263 - RNA, 19 nt, Homo sapiens
  misc_RNA (1)...(19): siRNA sense strand
uccuucagcuucaaaguuc

SEQ ID NO: 1951264 - RNA, 19 nt, Homo sapiens
  misc_RNA (1)...(19): siRNA sense strand
uugaaauucugggaccuuu

SEQ ID NO: 1951265 - RNA, 19 nt, Homo sapiens
  misc_RNA (1)...(19): siRNA sense strand
gggagcugcuucugucacu

SEQ ID NO: 1951266 - RNA, 19 nt, Homo sapiens
  misc_RNA (1)...(19): siRNA sense strand
ccacucaucgauauuaaac

SEQ ID NO: 1951267 - RNA, 19 nt, Homo sapiens
  misc_RNA (1)...(19): siRNA sense strand
ggaucgucauuggccagua

SEQ ID NO: 1951268 - RNA, 19 nt, Homo sapiens
  misc_RNA (1)...(19): siRNA sense strand
ggaaaaugccagccuagug

SEQ ID NO: 1951269 - RNA, 19 nt, Homo sapiens
  misc_RNA (1)...(19): siRNA sense strand
cuucaaaguuccccaagaa

SEQ ID NO: 1951270 - RNA, 19 nt, Homo sapiens
  misc_RNA (1)...(19): siRNA sense strand
ugcauggacucaaacuugu

SEQ ID NO: 1951271 - RNA, 19 nt, Homo sapiens
  misc_RNA (1)...(19): siRNA sense strand
gacugaauguugaugucau

SEQ ID NO: 1951272 - RNA, 19 nt, Homo sapiens
  misc_RNA (1)...(19): siRNA sense strand
cagacugaauguugauguc

SEQ ID NO: 1951273 - RNA, 19 nt, Homo sapiens
  misc_RNA (1)...(19): siRNA sense strand
auauuaaacccaucgaguu

SEQ ID NO: 1951274 - RNA, 19 nt, Homo sapiens
  misc_RNA (1)...(19): siRNA sense strand
ugccggcacugcugucaga

SEQ ID NO: 1951275 - RNA, 19 nt, Homo sapiens
  misc_RNA (1)...(19): siRNA sense strand
caaaguuccccaagaagaa

SEQ ID NO: 1951276 - RNA, 19 nt, Homo sapiens
  misc_RNA (1)...(19): siRNA sense strand
uugauccuuucuacaauga

SEQ ID NO: 1951277 - RNA, 19 nt, Homo sapiens
  misc_RNA (1)...(19): siRNA sense strand
acaaggauggugacucugu

SEQ ID NO: 1951278 - RNA, 19 nt, Homo sapiens
  misc_RNA (1)...(19): siRNA sense strand
cagcgacgauguggacucu

SEQ ID NO: 1951279 - RNA, 19 nt, Homo sapiens
  misc_RNA (1)...(19): siRNA sense strand
uguacucccucgacuccaa

SEQ ID NO: 1951280 - RNA, 19 nt, Homo sapiens
  misc_RNA (1)...(19): siRNA sense strand
cuccacucaucgauauuaa

SEQ ID NO: 1951281 - RNA, 19 nt, Homo sapiens
  misc_RNA (1)...(19): siRNA sense strand
cagccuaguguuuacaguu

SEQ ID NO: 1951282 - RNA, 19 nt, Homo sapiens
  misc_RNA (1)...(19): siRNA sense strand
aaugccagccuaguguuua

SEQ ID NO: 1951283 - RNA, 19 nt, Homo sapiens
  misc_RNA (1)...(19): siRNA sense strand
ccggagcagugacaaggau

SEQ ID NO: 1951284 - RNA, 19 nt, Homo sapiens
  misc_RNA (1)...(19): siRNA sense strand
cauggacucaaacuuguga

SEQ ID NO: 1951285 - RNA, 19 nt, Homo sapiens
  misc_RNA (1)...(19): siRNA sense strand
ccaagugcuggcagacuga

SEQ ID NO: 1951286 - RNA, 19 nt, Homo sapiens
  misc_RNA (1)...(19): siRNA sense strand
ggaccuuucccugcucaga

SEQ ID NO: 1951287 - RNA, 19 nt, Homo sapiens
  misc_RNA (1)...(19): siRNA sense strand
ggagauccuguccaaguac

SEQ ID NO: 1951288 - RNA, 19 nt, Homo sapiens
  misc_RNA (1)...(19): siRNA sense strand
gccagucaagugaggauga

SEQ ID NO: 1951289 - RNA, 19 nt, Homo sapiens
  misc_RNA (1)...(19): siRNA sense strand
ccaguuggaaccauuaaac

SEQ ID NO: 1951290 - RNA, 19 nt, Homo sapiens
  misc_RNA (1)...(19): siRNA sense strand
ggacucaaacuugugaaaa

SEQ ID NO: 1951291 - RNA, 19 nt, Homo sapiens
  misc_RNA (1)...(19): siRNA sense strand
cuggcagacugaauguuga

SEQ ID NO: 1951292 - RNA, 19 nt, Homo sapiens
  misc_RNA (1)...(19): siRNA sense strand
gcuacgaguccagcuguug

SEQ ID NO: 1951293 - RNA, 19 nt, Homo sapiens
  misc_RNA (1)...(19): siRNA sense strand
gacccagaagcccguguuu

SEQ ID NO: 1951294 - RNA, 19 nt, Homo sapiens
  misc_RNA (1)...(19): siRNA sense strand
gaaggagcccauccaaccu

SEQ ID NO: 1951295 - RNA, 19 nt, Homo sapiens
  misc_RNA (1)...(19): siRNA sense strand
ucaaacgcaagacccagaa

SEQ ID NO: 1951296 - RNA, 19 nt, Homo sapiens
  misc_RNA (1)...(19): siRNA sense strand
ggaggcgcaugcucaacac

SEQ ID NO: 1951297 - RNA, 19 nt, Homo sapiens
  misc_RNA (1)...(19): siRNA sense strand
acaugaagagcagcaauga

SEQ ID NO: 1951298 - RNA, 19 nt, Homo sapiens
  misc_RNA (1)...(19): siRNA sense strand
aaaugccagccuaguguuu

SEQ ID NO: 1951299 - RNA, 19 nt, Homo sapiens
  misc_RNA (1)...(19): siRNA sense strand
uuucugugccuuuguguga

SEQ ID NO: 1951300 - RNA, 19 nt, Homo sapiens
  misc_RNA (1)...(19): siRNA sense strand
gaagaaggguguuguguua

SEQ ID NO: 1951301 - RNA, 19 nt, Homo sapiens
  misc_RNA (1)...(19): siRNA sense strand
ggacuaacguucaugauau

SEQ ID NO: 1951302 - RNA, 19 nt, Homo sapiens
  misc_RNA (1)...(19): siRNA sense strand
ggaaguaguugacgaugaa

SEQ ID NO: 1951303 - RNA, 19 nt, Homo sapiens
  misc_RNA (1)...(19): siRNA sense strand
ggaagaaacugcauuaaaa

SEQ ID NO: 1951304 - RNA, 19 nt, Homo sapiens
  misc_RNA (1)...(19): siRNA sense strand
uaaagugucuccuggauau

SEQ ID NO: 1951305 - RNA, 19 nt, Homo sapiens
  misc_RNA (1)...(19): siRNA sense strand
gaaagccacuugccucuuc

SEQ ID NO: 1951306 - RNA, 19 nt, Homo sapiens
  misc_RNA (1)...(19): siRNA sense strand
gaaacugaguccaacacua

SEQ ID NO: 1951307 - RNA, 19 nt, Homo sapiens
  misc_RNA (1)...(19): siRNA sense strand
gagcaaggguccuaugaug

SEQ ID NO: 1951308 - RNA, 19 nt, Homo sapiens
  misc_RNA (1)...(19): siRNA sense strand
ggaggaagaaacugcauua

SEQ ID NO: 1951309 - RNA, 19 nt, Homo sapiens
  misc_RNA (1)...(19): siRNA sense strand
caagaugaacucaaagaua

SEQ ID NO: 1951310 - RNA, 19 nt, Homo sapiens
  misc_RNA (1)...(19): siRNA sense strand
gaagagguaucagaaagug

SEQ ID NO: 1951311 - RNA, 19 nt, Homo sapiens
  misc_RNA (1)...(19): siRNA sense strand
agaacaagaugaacucaaa

SEQ ID NO: 1951312 - RNA, 19 nt, Homo sapiens
  misc_RNA (1)...(19): siRNA sense strand
ccgcugagcuggccaaguu

SEQ ID NO: 1951313 - RNA, 19 nt, Homo sapiens
  misc_RNA (1)...(19): siRNA sense strand
caagugugcuacaguuuga

SEQ ID NO: 1951314 - RNA, 19 nt, Homo sapiens
  misc_RNA (1)...(19): siRNA sense strand
cagcguacauacugaauga

SEQ ID NO: 1951315 - RNA, 19 nt, Homo sapiens
  misc_RNA (1)...(19): siRNA sense strand
gaaucugcauggaauauca

SEQ ID NO: 1951316 - RNA, 19 nt, Homo sapiens
  misc_RNA (1)...(19): siRNA sense strand
gggaacaacugaagacuac

SEQ ID NO: 1951317 - RNA, 19 nt, Homo sapiens
  misc_RNA (1)...(19): siRNA sense strand
cagggacacuauaaagaua

SEQ ID NO: 1951318 - RNA, 19 nt, Homo sapiens
  misc_RNA (1)...(19): siRNA sense strand
cuauggauuuggaaacuua

SEQ ID NO: 1951319 - RNA, 19 nt, Homo sapiens
  misc_RNA (1)...(19): siRNA sense strand
aagaugaacucaaagauag

SEQ ID NO: 1951320 - RNA, 19 nt, Homo sapiens
  misc_RNA (1)...(19): siRNA sense strand
ggacugacaaauauucaaa

SEQ ID NO: 1951321 - RNA, 19 nt, Homo sapiens
  misc_RNA (1)...(19): siRNA sense strand
guaaaccgcagcaauauuc

SEQ ID NO: 1951322 - RNA, 19 nt, Homo sapiens
  misc_RNA (1)...(19): siRNA sense strand
caagagagccugucgucaa

SEQ ID NO: 1951323 - RNA, 19 nt, Homo sapiens
  misc_RNA (1)...(19): siRNA sense strand
gaacugagugauguuauug

SEQ ID NO: 1951324 - RNA, 19 nt, Homo sapiens
  misc_RNA (1)...(19): siRNA sense strand
gaaauaggugcuucugaga

SEQ ID NO: 1951325 - RNA, 19 nt, Homo sapiens
  misc_RNA (1)...(19): siRNA sense strand
ggaagaaggguguuguguu

SEQ ID NO: 1951326 - RNA, 19 nt, Homo sapiens
  misc_RNA (1)...(19): siRNA sense strand
acacuaugcugguuugaga

SEQ ID NO: 1951327 - RNA, 19 nt, Homo sapiens
  misc_RNA (1)...(19): siRNA sense strand
ugaaugaucucuacaucuc

SEQ ID NO: 1951328 - RNA, 19 nt, Homo sapiens
  misc_RNA (1)...(19): siRNA sense strand
aaucuuaucugcuggacaa

SEQ ID NO: 1951329 - RNA, 19 nt, Homo sapiens
  misc_RNA (1)...(19): siRNA sense strand
aauaggugcuucugagauu

SEQ ID NO: 1951330 - RNA, 19 nt, Homo sapiens
  misc_RNA (1)...(19): siRNA sense strand
ggaagucucccuuacaaag

SEQ ID NO: 1951331 - RNA, 19 nt, Homo sapiens
  misc_RNA (1)...(19): siRNA sense strand
ugaacugagugauguuauu

SEQ ID NO: 1951332 - RNA, 19 nt, Homo sapiens
  misc_RNA (1)...(19): siRNA sense strand
gugaagagguaucagaaag

SEQ ID NO: 1951333 - RNA, 19 nt, Homo sapiens
  misc_RNA (1)...(19): siRNA sense strand
guuggcagcucuugcagaa

SEQ ID NO: 1951334 - RNA, 19 nt, Homo sapiens
  misc_RNA (1)...(19): siRNA sense strand
gagagaagaauguugaauc

SEQ ID NO: 1951335 - RNA, 19 nt, Homo sapiens
  misc_RNA (1)...(19): siRNA sense strand
aaacugaguccaacacuau

SEQ ID NO: 1951336 - RNA, 19 nt, Homo sapiens
  misc_RNA (1)...(19): siRNA sense strand
gaagugagcaaggguccua

SEQ ID NO: 1951337 - RNA, 19 nt, Homo sapiens
  misc_RNA (1)...(19): siRNA sense strand
gaugaacugagugauguua

SEQ ID NO: 1951338 - RNA, 19 nt, Homo sapiens
  misc_RNA (1)...(19): siRNA sense strand
gauauuaaggauccagauu

SEQ ID NO: 1951339 - RNA, 19 nt, Homo sapiens
  misc_RNA (1)...(19): siRNA sense strand
cauguuaacugcucuucug

SEQ ID NO: 1951340 - RNA, 19 nt, Homo sapiens
  misc_RNA (1)...(19): siRNA sense strand
gacagucaguucuuugcaa

SEQ ID NO: 1951341 - RNA, 19 nt, Homo sapiens
  misc_RNA (1)...(19): siRNA sense strand
gguuagaacuggaagaacu

SEQ ID NO: 1951342 - RNA, 19 nt, Homo sapiens
  misc_RNA (1)...(19): siRNA sense strand
gcagacacccugugaagag

SEQ ID NO: 1951343 - RNA, 19 nt, Homo sapiens
  misc_RNA (1)...(19): siRNA sense strand
gggacacuauaaagauauu

SEQ ID NO: 1951344 - RNA, 19 nt, Homo sapiens
  misc_RNA (1)...(19): siRNA sense strand
uauuaaggauccagauuuc

SEQ ID NO: 1951345 - RNA, 19 nt, Homo sapiens
  misc_RNA (1)...(19): siRNA sense strand
gcaauauucaggagagaga

SEQ ID NO: 1951346 - RNA, 19 nt, Homo sapiens
  misc_RNA (1)...(19): siRNA sense strand
ccaacacuaugcugguuug

SEQ ID NO: 1951347 - RNA, 19 nt, Homo sapiens
  misc_RNA (1)...(19): siRNA sense strand
agagaagaauguugaaucu

SEQ ID NO: 1951348 - RNA, 19 nt, Homo sapiens
  misc_RNA (1)...(19): siRNA sense strand
gcuacaguuugauugauau

SEQ ID NO: 1951349 - RNA, 19 nt, Homo sapiens
  misc_RNA (1)...(19): siRNA sense strand
cgucaagugugcuacaguu

SEQ ID NO: 1951350 - RNA, 19 nt, Homo sapiens
  misc_RNA (1)...(19): siRNA sense strand
gagagccugucgucaagug

SEQ ID NO: 1951351 - RNA, 19 nt, Homo sapiens
  misc_RNA (1)...(19): siRNA sense strand
gggcaccacugcuguaaac

SEQ ID NO: 1951352 - RNA, 19 nt, Homo sapiens
  misc_RNA (1)...(19): siRNA sense strand
ugaugcagauaaaggaauu

SEQ ID NO: 1951353 - RNA, 19 nt, Homo sapiens
  misc_RNA (1)...(19): siRNA sense strand
gcaaggguccuaugaugca

SEQ ID NO: 1951354 - RNA, 19 nt, Homo sapiens
  misc_RNA (1)...(19): siRNA sense strand
gagcagacacccugugaag

SEQ ID NO: 1951355 - RNA, 19 nt, Homo sapiens
  misc_RNA (1)...(19): siRNA sense strand
agaaguaucagcuacgaaa

SEQ ID NO: 1951356 - RNA, 19 nt, Homo sapiens
  misc_RNA (1)...(19): siRNA sense strand
gaagacuacaguucagguu

SEQ ID NO: 1951357 - RNA, 19 nt, Homo sapiens
  misc_RNA (1)...(19): siRNA sense strand
gaaggagagaagaauguug

SEQ ID NO: 1951358 - RNA, 19 nt, Homo sapiens
  misc_RNA (1)...(19): siRNA sense strand
gguccuaugaugcagauaa

SEQ ID NO: 1951359 - RNA, 19 nt, Homo sapiens
  misc_RNA (1)...(19): siRNA sense strand
agcagugccuuucuuauug

SEQ ID NO: 1951360 - RNA, 19 nt, Homo sapiens
  misc_RNA (1)...(19): siRNA sense strand
cgugucaucuggaaacgaa

SEQ ID NO: 1951361 - RNA, 19 nt, Homo sapiens
  misc_RNA (1)...(19): siRNA sense strand
ugaaacccgugucacugaa

SEQ ID NO: 1951362 - RNA, 19 nt, Homo sapiens
  misc_RNA (1)...(19): siRNA sense strand
aagcagugccuuucuuauu

SEQ ID NO: 1951363 - RNA, 19 nt, Homo sapiens
  misc_RNA (1)...(19): siRNA sense strand
guccuaugaugcagauaaa

SEQ ID NO: 1951364 - RNA, 19 nt, Homo sapiens
  misc_RNA (1)...(19): siRNA sense strand
ucagaaagucaaauccaaa

SEQ ID NO: 1951365 - RNA, 19 nt, Homo sapiens
  misc_RNA (1)...(19): siRNA sense strand
gagagagacggcugucaga

SEQ ID NO: 1951366 - RNA, 19 nt, Homo sapiens
  misc_RNA (1)...(19): siRNA sense strand
agaguuugauugggaaauu

SEQ ID NO: 1951367 - RNA, 19 nt, Homo sapiens
  misc_RNA (1)...(19): siRNA sense strand
agacuacaguucagguuuc

SEQ ID NO: 1951368 - RNA, 19 nt, Homo sapiens
  misc_RNA (1)...(19): siRNA sense strand
aggaagaaacugcauuaaa

SEQ ID NO: 1951369 - RNA, 19 nt, Homo sapiens
  misc_RNA (1)...(19): siRNA sense strand
gacuaacguucaugauauc

SEQ ID NO: 1951370 - RNA, 19 nt, Homo sapiens
  misc_RNA (1)...(19): siRNA sense strand
gggcugaacauguuaacug

SEQ ID NO: 1951371 - RNA, 19 nt, Homo sapiens
  misc_RNA (1)...(19): siRNA sense strand
gacacccugugaagaggua

SEQ ID NO: 1951372 - RNA, 19 nt, Homo sapiens
  misc_RNA (1)...(19): siRNA sense strand
gaguuugauugggaaauug

SEQ ID NO: 1951373 - RNA, 19 nt, Homo sapiens
  misc_RNA (1)...(19): siRNA sense strand
uugguggacugacaaauau

SEQ ID NO: 1951374 - RNA, 19 nt, Homo sapiens
  misc_RNA (1)...(19): siRNA sense strand
ucagacaccaaauaauuga

SEQ ID NO: 1951375 - RNA, 19 nt, Homo sapiens
  misc_RNA (1)...(19): siRNA sense strand
gaggaagaaacugcauuaa

SEQ ID NO: 1951376 - RNA, 19 nt, Homo sapiens
  misc_RNA (1)...(19): siRNA sense strand
uggacuaacguucaugaua

SEQ ID NO: 1951377 - RNA, 19 nt, Homo sapiens
  misc_RNA (1)...(19): siRNA sense strand
gguuugagacuuggacuaa

SEQ ID NO: 1951378 - RNA, 19 nt, Homo sapiens
  misc_RNA (1)...(19): siRNA sense strand
ggaaaagagucaggaacaa

SEQ ID NO: 1951379 - RNA, 19 nt, Homo sapiens
  misc_RNA (1)...(19): siRNA sense strand
ugcuacaguuugauugaua

SEQ ID NO: 1951380 - RNA, 19 nt, Homo sapiens
  misc_RNA (1)...(19): siRNA sense strand
gcagugccuuucuuauugc

SEQ ID NO: 1951381 - RNA, 19 nt, Homo sapiens
  misc_RNA (1)...(19): siRNA sense strand
gaacaagaugaacucaaag

SEQ ID NO: 1951382 - RNA, 19 nt, Homo sapiens
  misc_RNA (1)...(19): siRNA sense strand
gcucagauucagaacaaga

SEQ ID NO: 1951383 - RNA, 19 nt, Homo sapiens
  misc_RNA (1)...(19): siRNA sense strand
aggcucagauucagaacaa

SEQ ID NO: 1951384 - RNA, 19 nt, Homo sapiens
  misc_RNA (1)...(19): siRNA sense strand
uugauauccuucuggcaua

SEQ ID NO: 1951385 - RNA, 19 nt, Homo sapiens
  misc_RNA (1)...(19): siRNA sense strand
caagggcaccacugcugua

SEQ ID NO: 1951386 - RNA, 19 nt, Homo sapiens
  misc_RNA (1)...(19): siRNA sense strand
gaagacucaggcucagauu

SEQ ID NO: 1951387 - RNA, 19 nt, Homo sapiens
  misc_RNA (1)...(19): siRNA sense strand
cuacaucucagacuacugu

SEQ ID NO: 1951388 - RNA, 19 nt, Homo sapiens
  misc_RNA (1)...(19): siRNA sense strand
gacccagcguacauacuga

SEQ ID NO: 1951389 - RNA, 19 nt, Homo sapiens
  misc_RNA (1)...(19): siRNA sense strand
gaagaugaggcgauugaac

SEQ ID NO: 1951390 - RNA, 19 nt, Homo sapiens
  misc_RNA (1)...(19): siRNA sense strand
gaacaacugaagacuacag

SEQ ID NO: 1951391 - RNA, 19 nt, Homo sapiens
  misc_RNA (1)...(19): siRNA sense strand
aguugacgaugaagaguuu

SEQ ID NO: 1951392 - RNA, 19 nt, Homo sapiens
  misc_RNA (1)...(19): siRNA sense strand
gaacuggaagaacuagaag

SEQ ID NO: 1951393 - RNA, 19 nt, Homo sapiens
  misc_RNA (1)...(19): siRNA sense strand
cuugguggacugacaaaua

SEQ ID NO: 1951394 - RNA, 19 nt, Homo sapiens
  misc_RNA (1)...(19): siRNA sense strand
guuacaggaugaacugagu

SEQ ID NO: 1951395 - RNA, 19 nt, Homo sapiens
  misc_RNA (1)...(19): siRNA sense strand
gaaaauccaggacagcaaa

SEQ ID NO: 1951396 - RNA, 19 nt, Homo sapiens
  misc_RNA (1)...(19): siRNA sense strand
ucaagugugcuacaguuug

SEQ ID NO: 1951397 - RNA, 19 nt, Homo sapiens
  misc_RNA (1)...(19): siRNA sense strand
gucagacaccaaauaauug

SEQ ID NO: 1951398 - RNA, 19 nt, Homo sapiens
  misc_RNA (1)...(19): siRNA sense strand
gaugguggaguacgcagaa

SEQ ID NO: 1951399 - RNA, 19 nt, Homo sapiens
  misc_RNA (1)...(19): siRNA sense strand
ucuccuggauauucacaaa

SEQ ID NO: 1951400 - RNA, 19 nt, Homo sapiens
  misc_RNA (1)...(19): siRNA sense strand
gaagaaaggcacauuguua

SEQ ID NO: 1951401 - RNA, 19 nt, Homo sapiens
  misc_RNA (1)...(19): siRNA sense strand
gcagcaagauuguguauuu

SEQ ID NO: 1951402 - RNA, 19 nt, Homo sapiens
  misc_RNA (1)...(19): siRNA sense strand
gauguucccucagcuauua

SEQ ID NO: 1951403 - RNA, 19 nt, Homo sapiens
  misc_RNA (1)...(19): siRNA sense strand
gaagaugaauuuggaagaa

SEQ ID NO: 1951404 - RNA, 19 nt, Homo sapiens
  misc_RNA (1)...(19): siRNA sense strand
gaagaaauuuggucugcaa

SEQ ID NO: 1951405 - RNA, 19 nt, Homo sapiens
  misc_RNA (1)...(19): siRNA sense strand
gagggaagaauauuuguua

SEQ ID NO: 1951406 - RNA, 19 nt, Homo sapiens
  misc_RNA (1)...(19): siRNA sense strand
gaagcaacccuugaacuua

SEQ ID NO: 1951407 - RNA, 19 nt, Homo sapiens
  misc_RNA (1)...(19): siRNA sense strand
gauaauggcuggacuucug

SEQ ID NO: 1951408 - RNA, 19 nt, Homo sapiens
  misc_RNA (1)...(19): siRNA sense strand
gcaacaagcacccauauau

SEQ ID NO: 1951409 - RNA, 19 nt, Homo sapiens
  misc_RNA (1)...(19): siRNA sense strand
ugaguuaggugauauguug

SEQ ID NO: 1951410 - RNA, 19 nt, Homo sapiens
  misc_RNA (1)...(19): siRNA sense strand
gaagagccauuuccugcuu

SEQ ID NO: 1951411 - RNA, 19 nt, Homo sapiens
  misc_RNA (1)...(19): siRNA sense strand
gagaagagguggauuuggu

SEQ ID NO: 1951412 - RNA, 19 nt, Homo sapiens
  misc_RNA (1)...(19): siRNA sense strand
cagaaaguauucauuguga

SEQ ID NO: 1951413 - RNA, 19 nt, Homo sapiens
  misc_RNA (1)...(19): siRNA sense strand
gaaauagugagcaggauaa

SEQ ID NO: 1951414 - RNA, 19 nt, Homo sapiens
  misc_RNA (1)...(19): siRNA sense strand
caugaaagagcaagaaaua

SEQ ID NO: 1951415 - RNA, 19 nt, Homo sapiens
  misc_RNA (1)...(19): siRNA sense strand
gaucuccgauugucaaguu

SEQ ID NO: 1951416 - RNA, 19 nt, Homo sapiens
  misc_RNA (1)...(19): siRNA sense strand
gaaggaaugcccagaaaga

SEQ ID NO: 1951417 - RNA, 19 nt, Homo sapiens
  misc_RNA (1)...(19): siRNA sense strand
gauaaauugucacacuuga

SEQ ID NO: 1951418 - RNA, 19 nt, Homo sapiens
  misc_RNA (1)...(19): siRNA sense strand
gguacagucuucauuagaa

SEQ ID NO: 1951419 - RNA, 19 nt, Homo sapiens
  misc_RNA (1)...(19): siRNA sense strand
gggaggacauccagacauu

SEQ ID NO: 1951420 - RNA, 19 nt, Homo sapiens
  misc_RNA (1)...(19): siRNA sense strand
gaaagaggaucguguucca

SEQ ID NO: 1951421 - RNA, 19 nt, Homo sapiens
  misc_RNA (1)...(19): siRNA sense strand
agaagaagaugguguuaau

SEQ ID NO: 1951422 - RNA, 19 nt, Homo sapiens
  misc_RNA (1)...(19): siRNA sense strand
caaagugugguguguaaua

SEQ ID NO: 1951423 - RNA, 19 nt, Homo sapiens
  misc_RNA (1)...(19): siRNA sense strand
ggaagaagaggaagaugaa

SEQ ID NO: 1951424 - RNA, 19 nt, Homo sapiens
  misc_RNA (1)...(19): siRNA sense strand
gaagagguggauuugguua

SEQ ID NO: 1951425 - RNA, 19 nt, Homo sapiens
  misc_RNA (1)...(19): siRNA sense strand
guacagucuucauuagaaa

SEQ ID NO: 1951426 - RNA, 19 nt, Homo sapiens
  misc_RNA (1)...(19): siRNA sense strand
cuaccagccucuacagaua

SEQ ID NO: 1951427 - RNA, 19 nt, Homo sapiens
  misc_RNA (1)...(19): siRNA sense strand
gaucauccuuuaguucaaa

SEQ ID NO: 1951428 - RNA, 19 nt, Homo sapiens
  misc_RNA (1)...(19): siRNA sense strand
ggaauuugaagaagcauuu

SEQ ID NO: 1951429 - RNA, 19 nt, Homo sapiens
  misc_RNA (1)...(19): siRNA sense strand
gaaggccggugaccaagga

SEQ ID NO: 1951430 - RNA, 19 nt, Homo sapiens
  misc_RNA (1)...(19): siRNA sense strand
gcucuucucuagaccauga

SEQ ID NO: 1951431 - RNA, 19 nt, Homo sapiens
  misc_RNA (1)...(19): siRNA sense strand
gaacuuccugaaccuguua

SEQ ID NO: 1951432 - RNA, 19 nt, Homo sapiens
  misc_RNA (1)...(19): siRNA sense strand
gacaagagcuagcaucacu

SEQ ID NO: 1951433 - RNA, 19 nt, Homo sapiens
  misc_RNA (1)...(19): siRNA sense strand
gaaaguauucauugugaug

SEQ ID NO: 1951434 - RNA, 19 nt, Homo sapiens
  misc_RNA (1)...(19): siRNA sense strand
gcagcuuucucaagauuau

SEQ ID NO: 1951435 - RNA, 19 nt, Homo sapiens
  misc_RNA (1)...(19): siRNA sense strand
guagcaagauaugugauuu

SEQ ID NO: 1951436 - RNA, 19 nt, Homo sapiens
  misc_RNA (1)...(19): siRNA sense strand
gauguuacagccaaucaua

SEQ ID NO: 1951437 - RNA, 19 nt, Homo sapiens
  misc_RNA (1)...(19): siRNA sense strand
ccaugaagaugaagagaau

SEQ ID NO: 1951438 - RNA, 19 nt, Homo sapiens
  misc_RNA (1)...(19): siRNA sense strand
auucgaagaucauccuuua

SEQ ID NO: 1951439 - RNA, 19 nt, Homo sapiens
  misc_RNA (1)...(19): siRNA sense strand
gcuggaacauauugaagaa

SEQ ID NO: 1951440 - RNA, 19 nt, Homo sapiens
  misc_RNA (1)...(19): siRNA sense strand
gaagaagaagaugguguua

SEQ ID NO: 1951441 - RNA, 19 nt, Homo sapiens
  misc_RNA (1)...(19): siRNA sense strand
ggaagaagaagaugguguu

SEQ ID NO: 1951442 - RNA, 19 nt, Homo sapiens
  misc_RNA (1)...(19): siRNA sense strand
ugaagagaaugaagaugaa

SEQ ID NO: 1951443 - RNA, 19 nt, Homo sapiens
  misc_RNA (1)...(19): siRNA sense strand
aaacugcggaagcaaauua

SEQ ID NO: 1951444 - RNA, 19 nt, Homo sapiens
  misc_RNA (1)...(19): siRNA sense strand
gaaagagcaagaaauagug

SEQ ID NO: 1951445 - RNA, 19 nt, Homo sapiens
  misc_RNA (1)...(19): siRNA sense strand
cuuaucagcuggucaagaa

SEQ ID NO: 1951446 - RNA, 19 nt, Homo sapiens
  misc_RNA (1)...(19): siRNA sense strand
gaagaucauccuuuaguuc

SEQ ID NO: 1951447 - RNA, 19 nt, Homo sapiens
  misc_RNA (1)...(19): siRNA sense strand
gucuguagguauauuguua

SEQ ID NO: 1951448 - RNA, 19 nt, Homo sapiens
  misc_RNA (1)...(19): siRNA sense strand
guguuaaucuguccucuga

SEQ ID NO: 1951449 - RNA, 19 nt, Homo sapiens
  misc_RNA (1)...(19): siRNA sense strand
ggaagaaaggcacauuguu

SEQ ID NO: 1951450 - RNA, 19 nt, Homo sapiens
  misc_RNA (1)...(19): siRNA sense strand
cgaagaucauccuuuaguu

SEQ ID NO: 1951451 - RNA, 19 nt, Homo sapiens
  misc_RNA (1)...(19): siRNA sense strand
ugaugcagcuuucucaaga

SEQ ID NO: 1951452 - RNA, 19 nt, Homo sapiens
  misc_RNA (1)...(19): siRNA sense strand
cagcuucuaugccugaauu

SEQ ID NO: 1951453 - RNA, 19 nt, Homo sapiens
  misc_RNA (1)...(19): siRNA sense strand
uaaagaagcaacccuugaa

SEQ ID NO: 1951454 - RNA, 19 nt, Homo sapiens
  misc_RNA (1)...(19): siRNA sense strand
gaaauagcaagcccuccua

SEQ ID NO: 1951455 - RNA, 19 nt, Homo sapiens
  misc_RNA (1)...(19): siRNA sense strand
gaagcagcgugugucagua

SEQ ID NO: 1951456 - RNA, 19 nt, Homo sapiens
  misc_RNA (1)...(19): siRNA sense strand
aaagugugguguguaauaa

SEQ ID NO: 1951457 - RNA, 19 nt, Homo sapiens
  misc_RNA (1)...(19): siRNA sense strand
uuacugaacagguuaauga

SEQ ID NO: 1951458 - RNA, 19 nt, Homo sapiens
  misc_RNA (1)...(19): siRNA sense strand
aagcaacccuugaacuuau

SEQ ID NO: 1951459 - RNA, 19 nt, Homo sapiens
  misc_RNA (1)...(19): siRNA sense strand
ugccagaggugguacaauu

SEQ ID NO: 1951460 - RNA, 19 nt, Homo sapiens
  misc_RNA (1)...(19): siRNA sense strand
cuauuagccuucuuagauu

SEQ ID NO: 1951461 - RNA, 19 nt, Homo sapiens
  misc_RNA (1)...(19): siRNA sense strand
caauuaaggaugacugaaa

SEQ ID NO: 1951462 - RNA, 19 nt, Homo sapiens
  misc_RNA (1)...(19): siRNA sense strand
uguuaucccuggcaguuua

SEQ ID NO: 1951463 - RNA, 19 nt, Homo sapiens
  misc_RNA (1)...(19): siRNA sense strand
gagaggacagaacaccuua

SEQ ID NO: 1951464 - RNA, 19 nt, Homo sapiens
  misc_RNA (1)...(19): siRNA sense strand
agauugauauugcugauga

SEQ ID NO: 1951465 - RNA, 19 nt, Homo sapiens
  misc_RNA (1)...(19): siRNA sense strand
gcagaaaguauucauugug

SEQ ID NO: 1951466 - RNA, 19 nt, Homo sapiens
  misc_RNA (1)...(19): siRNA sense strand
gaauuuggaagaaaguuga

SEQ ID NO: 1951467 - RNA, 19 nt, Homo sapiens
  misc_RNA (1)...(19): siRNA sense strand
gaagcuaugcagcaagauu

SEQ ID NO: 1951468 - RNA, 19 nt, Homo sapiens
  misc_RNA (1)...(19): siRNA sense strand
uaaucuguccucugaguua

SEQ ID NO: 1951469 - RNA, 19 nt, Homo sapiens
  misc_RNA (1)...(19): siRNA sense strand
uagcaucacuccuguccuu

SEQ ID NO: 1951470 - RNA, 19 nt, Homo sapiens
  misc_RNA (1)...(19): siRNA sense strand
cauugagguuccauucaua

SEQ ID NO: 1951471 - RNA, 19 nt, Homo sapiens
  misc_RNA (1)...(19): siRNA sense strand
caauggaaaugcugagaca

SEQ ID NO: 1951472 - RNA, 19 nt, Homo sapiens
  misc_RNA (1)...(19): siRNA sense strand
uaaugaacuuucugaggaa

SEQ ID NO: 1951473 - RNA, 19 nt, Homo sapiens
  misc_RNA (1)...(19): siRNA sense strand
gaggacauccagacauuga

SEQ ID NO: 1951474 - RNA, 19 nt, Homo sapiens
  misc_RNA (1)...(19): siRNA sense strand
ugagaggugucuuccagaa

SEQ ID NO: 1951475 - RNA, 19 nt, Homo sapiens
  misc_RNA (1)...(19): siRNA sense strand
ugacagagcuuacaaaacu

SEQ ID NO: 1951476 - RNA, 19 nt, Homo sapiens
  misc_RNA (1)...(19): siRNA sense strand
ugucaguauuccacauuua

SEQ ID NO: 1951477 - RNA, 19 nt, Homo sapiens
  misc_RNA (1)...(19): siRNA sense strand
caaugaagcuaugcagcaa

SEQ ID NO: 1951478 - RNA, 19 nt, Homo sapiens
  misc_RNA (1)...(19): siRNA sense strand
aagaaaggcacauuguuaa

SEQ ID NO: 1951479 - RNA, 19 nt, Homo sapiens
  misc_RNA (1)...(19): siRNA sense strand
gaaagggaaagaaauagca

SEQ ID NO: 1951480 - RNA, 19 nt, Homo sapiens
  misc_RNA (1)...(19): siRNA sense strand
gaauguuucugauggugau

SEQ ID NO: 1951481 - RNA, 19 nt, Homo sapiens
  misc_RNA (1)...(19): siRNA sense strand
gaaaauacccagucuguag

SEQ ID NO: 1951482 - RNA, 19 nt, Homo sapiens
  misc_RNA (1)...(19): siRNA sense strand
gaacagguuaaugaacuuu

SEQ ID NO: 1951483 - RNA, 19 nt, Homo sapiens
  misc_RNA (1)...(19): siRNA sense strand
acagguacagucuucauua

SEQ ID NO: 1951484 - RNA, 19 nt, Homo sapiens
  misc_RNA (1)...(19): siRNA sense strand
guuaaaccucucuaugaua

SEQ ID NO: 1951485 - RNA, 19 nt, Homo sapiens
  misc_RNA (1)...(19): siRNA sense strand
ggacagaacaccuuaucag

SEQ ID NO: 1951486 - RNA, 19 nt, Homo sapiens
  misc_RNA (1)...(19): siRNA sense strand
ucacaccgcaguuuagauu

SEQ ID NO: 1951487 - RNA, 19 nt, Homo sapiens
  misc_RNA (1)...(19): siRNA sense strand
ggaagcagcgugugucagu

SEQ ID NO: 1951488 - RNA, 19 nt, Homo sapiens
  misc_RNA (1)...(19): siRNA sense strand
gcaagauuguguauuugag

SEQ ID NO: 1951489 - RNA, 19 nt, Homo sapiens
  misc_RNA (1)...(19): siRNA sense strand
gaagcagaaaguauucauu

SEQ ID NO: 1951490 - RNA, 19 nt, Homo sapiens
  misc_RNA (1)...(19): siRNA sense strand
caacaagcacccauauauc

SEQ ID NO: 1951491 - RNA, 19 nt, Homo sapiens
  misc_RNA (1)...(19): siRNA sense strand
gugguacaauuaaggauga

SEQ ID NO: 1951492 - RNA, 19 nt, Homo sapiens
  misc_RNA (1)...(19): siRNA sense strand
ggaacauauugaagaacuu

SEQ ID NO: 1951493 - RNA, 19 nt, Homo sapiens
  misc_RNA (1)...(19): siRNA sense strand
ugaaagagcaagaaauagu

SEQ ID NO: 1951494 - RNA, 19 nt, Homo sapiens
  misc_RNA (1)...(19): siRNA sense strand
gcgaaggggucagauguua

SEQ ID NO: 1951495 - RNA, 19 nt, Homo sapiens
  misc_RNA (1)...(19): siRNA sense strand
cccuugaacuuauucuuaa

SEQ ID NO: 1951496 - RNA, 19 nt, Homo sapiens
  misc_RNA (1)...(19): siRNA sense strand
agaaugaagaggaagauuu

SEQ ID NO: 1951497 - RNA, 19 nt, Homo sapiens
  misc_RNA (1)...(19): siRNA sense strand
uccagaagauaucaagaaa

SEQ ID NO: 1951498 - RNA, 19 nt, Homo sapiens
  misc_RNA (1)...(19): siRNA sense strand
uggaaggaaugcccagaaa

SEQ ID NO: 1951499 - RNA, 19 nt, Homo sapiens
  misc_RNA (1)...(19): siRNA sense strand
aaacaaaugcugacaagag

SEQ ID NO: 1951500 - RNA, 19 nt, Homo sapiens
  misc_RNA (1)...(19): siRNA sense strand
ggacacauaugcucacaau

SEQ ID NO: 1951501 - RNA, 19 nt, Homo sapiens
  misc_RNA (1)...(19): siRNA sense strand
acacauaugcucacaauga

SEQ ID NO: 1951502 - RNA, 19 nt, Homo sapiens
  misc_RNA (1)...(19): siRNA sense strand
gcagaggcuugggcaguuu

SEQ ID NO: 1951503 - RNA, 19 nt, Homo sapiens
  misc_RNA (1)...(19): siRNA sense strand
gggauaauaaguaacagua

SEQ ID NO: 1951504 - RNA, 19 nt, Homo sapiens
  misc_RNA (1)...(19): siRNA sense strand
gagaccagcccacagauga

SEQ ID NO: 1951505 - RNA, 19 nt, Homo sapiens
  misc_RNA (1)...(19): siRNA sense strand
ggaggagcagggacacaua

SEQ ID NO: 1951506 - RNA, 19 nt, Homo sapiens
  misc_RNA (1)...(19): siRNA sense strand
auaaguaacaguacccaua

SEQ ID NO: 1951507 - RNA, 19 nt, Homo sapiens
  misc_RNA (1)...(19): siRNA sense strand
ucacaaugauggcacuaag

SEQ ID NO: 1951508 - RNA, 19 nt, Homo sapiens
  misc_RNA (1)...(19): siRNA sense strand
cacauaugcucacaaugau

SEQ ID NO: 1951509 - RNA, 19 nt, Homo sapiens
  misc_RNA (1)...(19): siRNA sense strand
cagagacgcuagggaacuu

SEQ ID NO: 1951510 - RNA, 19 nt, Homo sapiens
  misc_RNA (1)...(19): siRNA sense strand
gaggagcagggacacauau

SEQ ID NO: 1951511 - RNA, 19 nt, Homo sapiens
  misc_RNA (1)...(19): siRNA sense strand
ggagaccagcccacagaug

SEQ ID NO: 1951512 - RNA, 19 nt, Homo sapiens
  misc_RNA (1)...(19): siRNA sense strand
acaaggggcugaaccaaga

SEQ ID NO: 1951513 - RNA, 19 nt, Homo sapiens
  misc_RNA (1)...(19): siRNA sense strand
ggucacagagcuuccaagu

SEQ ID NO: 1951514 - RNA, 19 nt, Homo sapiens
  misc_RNA (1)...(19): siRNA sense strand
uaaguaacaguacccauac

SEQ ID NO: 1951515 - RNA, 19 nt, Homo sapiens
  misc_RNA (1)...(19): siRNA sense strand
aggcuugggcaguuuauuu

SEQ ID NO: 1951516 - RNA, 19 nt, Homo sapiens
  misc_RNA (1)...(19): siRNA sense strand
guaacaguacccauacaca

SEQ ID NO: 1951517 - RNA, 19 nt, Homo sapiens
  misc_RNA (1)...(19): siRNA sense strand
gcacucauuuuauccucaa

SEQ ID NO: 1951518 - RNA, 19 nt, Homo sapiens
  misc_RNA (1)...(19): siRNA sense strand
acauauaacauccaacaag

SEQ ID NO: 1951519 - RNA, 19 nt, Homo sapiens
  misc_RNA (1)...(19): siRNA sense strand
uggcaacacugagcaagca

SEQ ID NO: 1951520 - RNA, 19 nt, Homo sapiens
  misc_RNA (1)...(19): siRNA sense strand
cagaggcuugggcaguuua

SEQ ID NO: 1951521 - RNA, 19 nt, Homo sapiens
  misc_RNA (1)...(19): siRNA sense strand
gcagagacgcuagggaacu

SEQ ID NO: 1951522 - RNA, 19 nt, Homo sapiens
  misc_RNA (1)...(19): siRNA sense strand
ugcagaggcuugggcaguu

SEQ ID NO: 1951523 - RNA, 19 nt, Homo sapiens
  misc_RNA (1)...(19): siRNA sense strand
ggauaauaaguaacaguac

SEQ ID NO: 1951524 - RNA, 19 nt, Homo sapiens
  misc_RNA (1)...(19): siRNA sense strand
ggcacuaaggcacauguug

SEQ ID NO: 1951525 - RNA, 19 nt, Homo sapiens
  misc_RNA (1)...(19): siRNA sense strand
acaaugaucuucuuaggaa

SEQ ID NO: 1951526 - RNA, 19 nt, Homo sapiens
  misc_RNA (1)...(19): siRNA sense strand
acaaagaacucuauacaca

SEQ ID NO: 1951527 - RNA, 19 nt, Homo sapiens
  misc_RNA (1)...(19): siRNA sense strand
gaacagggacucacgugaa

SEQ ID NO: 1951528 - RNA, 19 nt, Homo sapiens
  misc_RNA (1)...(19): siRNA sense strand
gaacugcaaagaccuguuu

SEQ ID NO: 1951529 - RNA, 19 nt, Homo sapiens
  misc_RNA (1)...(19): siRNA sense strand
ggacagaaauaagagaauc

SEQ ID NO: 1951530 - RNA, 19 nt, Homo sapiens
  misc_RNA (1)...(19): siRNA sense strand
gaaagacaaagaacucuau

SEQ ID NO: 1951531 - RNA, 19 nt, Homo sapiens
  misc_RNA (1)...(19): siRNA sense strand
aaagaacucuauacacaga

SEQ ID NO: 1951532 - RNA, 19 nt, Homo sapiens
  misc_RNA (1)...(19): siRNA sense strand
ccagaaagauuccagaacu

SEQ ID NO: 1951533 - RNA, 19 nt, Homo sapiens
  misc_RNA (1)...(19): siRNA sense strand
gaagaguggccgcaccuuu

SEQ ID NO: 1951534 - RNA, 19 nt, Homo sapiens
  misc_RNA (1)...(19): siRNA sense strand
gcgaagagagaguguauga

SEQ ID NO: 1951535 - RNA, 19 nt, Homo sapiens
  misc_RNA (1)...(19): siRNA sense strand
gggcguuucucaucuguga

SEQ ID NO: 1951536 - RNA, 19 nt, Homo sapiens
  misc_RNA (1)...(19): siRNA sense strand
ccgacaagcccaauguuua

SEQ ID NO: 1951537 - RNA, 19 nt, Homo sapiens
  misc_RNA (1)...(19): siRNA sense strand
gaccagauguacaaugauc

SEQ ID NO: 1951538 - RNA, 19 nt, Homo sapiens
  misc_RNA (1)...(19): siRNA sense strand
gauguacaaugaucuucuu

SEQ ID NO: 1951539 - RNA, 19 nt, Homo sapiens
  misc_RNA (1)...(19): siRNA sense strand
ggaaagacaaagaacucua

SEQ ID NO: 1951540 - RNA, 19 nt, Homo sapiens
  misc_RNA (1)...(19): siRNA sense strand
guacaaugaucuucuuagg

SEQ ID NO: 1951541 - RNA, 19 nt, Homo sapiens
  misc_RNA (1)...(19): siRNA sense strand
gcacaacauccucagcaaa

SEQ ID NO: 1951542 - RNA, 19 nt, Homo sapiens
  misc_RNA (1)...(19): siRNA sense strand
cgacaagcccaauguuuau

SEQ ID NO: 1951543 - RNA, 19 nt, Homo sapiens
  misc_RNA (1)...(19): siRNA sense strand
uacauaugcuggacagaaa

SEQ ID NO: 1951544 - RNA, 19 nt, Homo sapiens
  misc_RNA (1)...(19): siRNA sense strand
gauccucacuugcgaagag

SEQ ID NO: 1951545 - RNA, 19 nt, Homo sapiens
  misc_RNA (1)...(19): siRNA sense strand
cggaagacauggagaacga

SEQ ID NO: 1951546 - RNA, 19 nt, Homo sapiens
  misc_RNA (1)...(19): siRNA sense strand
cauaugaccagauguacaa

SEQ ID NO: 1951547 - RNA, 19 nt, Homo sapiens
  misc_RNA (1)...(19): siRNA sense strand
gcccaauguuuaugauuuc

SEQ ID NO: 1951548 - RNA, 19 nt, Homo sapiens
  misc_RNA (1)...(19): siRNA sense strand
ugugagcucugccagugua

SEQ ID NO: 1951549 - RNA, 19 nt, Homo sapiens
  misc_RNA (1)...(19): siRNA sense strand
agacaaagaacucuauaca

SEQ ID NO: 1951550 - RNA, 19 nt, Homo sapiens
  misc_RNA (1)...(19): siRNA sense strand
cagaaagauuccagaacug

SEQ ID NO: 1951551 - RNA, 19 nt, Homo sapiens
  misc_RNA (1)...(19): siRNA sense strand
aaagaccuguuugaucuga

SEQ ID NO: 1951552 - RNA, 19 nt, Homo sapiens
  misc_RNA (1)...(19): siRNA sense strand
cauaugcuggacagaaaua

SEQ ID NO: 1951553 - RNA, 19 nt, Homo sapiens
  misc_RNA (1)...(19): siRNA sense strand
agcccaauguuuaugauuu

SEQ ID NO: 1951554 - RNA, 19 nt, Homo sapiens
  misc_RNA (1)...(19): siRNA sense strand
gcauggaggcgcacaacau

SEQ ID NO: 1951555 - RNA, 19 nt, Homo sapiens
  misc_RNA (1)...(19): siRNA sense strand
caaugaucuucuuaggaaa

SEQ ID NO: 1951556 - RNA, 19 nt, Homo sapiens
  misc_RNA (1)...(19): siRNA sense strand
aaccacauaugaccagaug

SEQ ID NO: 1951557 - RNA, 19 nt, Homo sapiens
  misc_RNA (1)...(19): siRNA sense strand
gcacaccgucugcuucuac

SEQ ID NO: 1951558 - RNA, 19 nt, Homo sapiens
  misc_RNA (1)...(19): siRNA sense strand
augaccagauguacaauga

SEQ ID NO: 1951559 - RNA, 19 nt, Homo sapiens
  misc_RNA (1)...(19): siRNA sense strand
caagcccaauguuuaugau

SEQ ID NO: 1951560 - RNA, 19 nt, Homo sapiens
  misc_RNA (1)...(19): siRNA sense strand
cagaaugggauuuuacaua

SEQ ID NO: 1951561 - RNA, 19 nt, Homo sapiens
  misc_RNA (1)...(19): siRNA sense strand
gaaugggauuuuacauaug

SEQ ID NO: 1951562 - RNA, 19 nt, Homo sapiens
  misc_RNA (1)...(19): siRNA sense strand
uuacauaugcuggacagaa

SEQ ID NO: 1951563 - RNA, 19 nt, Homo sapiens
  misc_RNA (1)...(19): siRNA sense strand
ugcaggaguucgaggagaa

SEQ ID NO: 1951564 - RNA, 19 nt, Homo sapiens
  misc_RNA (1)...(19): siRNA sense strand
agaacucuauacacagaau

SEQ ID NO: 1951565 - RNA, 19 nt, Homo sapiens
  misc_RNA (1)...(19): siRNA sense strand
gacagaaauaagagaauca

SEQ ID NO: 1951566 - RNA, 19 nt, Homo sapiens
  misc_RNA (1)...(19): siRNA sense strand
gaacucuauacacagaaug

SEQ ID NO: 1951567 - RNA, 19 nt, Homo sapiens
  misc_RNA (1)...(19): siRNA sense strand
acacggaagacauggagaa

SEQ ID NO: 1951568 - RNA, 19 nt, Homo sapiens
  misc_RNA (1)...(19): siRNA sense strand
acaagcccaauguuuauga

SEQ ID NO: 1951569 - RNA, 19 nt, Homo sapiens
  misc_RNA (1)...(19): siRNA sense strand
ggccagaaagauuccagaa

SEQ ID NO: 1951570 - RNA, 19 nt, Homo sapiens
  misc_RNA (1)...(19): siRNA sense strand
gacaaagaacucuauacac

SEQ ID NO: 1951571 - RNA, 19 nt, Homo sapiens
  misc_RNA (1)...(19): siRNA sense strand
caccgucugcuucuacuga

SEQ ID NO: 1951572 - RNA, 19 nt, Homo sapiens
  misc_RNA (1)...(19): siRNA sense strand
guauccagcacacggaaga

SEQ ID NO: 1951573 - RNA, 19 nt, Homo sapiens
  misc_RNA (1)...(19): siRNA sense strand
ggugguggaagaucugaau

SEQ ID NO: 1951574 - RNA, 19 nt, Homo sapiens
  misc_RNA (1)...(19): siRNA sense strand
aaagauuccagaacugcaa

SEQ ID NO: 1951575 - RNA, 19 nt, Homo sapiens
  misc_RNA (1)...(19): siRNA sense strand
uaggaaagacaaagaacuc

SEQ ID NO: 1951576 - RNA, 19 nt, Homo sapiens
  misc_RNA (1)...(19): siRNA sense strand
aagaguggccgcaccuuuc

SEQ ID NO: 1951577 - RNA, 19 nt, Homo sapiens
  misc_RNA (1)...(19): siRNA sense strand
aacagggacucacgugaag

SEQ ID NO: 1951578 - RNA, 19 nt, Homo sapiens
  misc_RNA (1)...(19): siRNA sense strand
gacaagcccaauguuuaug

SEQ ID NO: 1951579 - RNA, 19 nt, Homo sapiens
  misc_RNA (1)...(19): siRNA sense strand
uaacauagaucgucucuua

SEQ ID NO: 1951580 - RNA, 19 nt, Homo sapiens
  misc_RNA (1)...(19): siRNA sense strand
gaagauggcucuaggcuaa

SEQ ID NO: 1951581 - RNA, 19 nt, Homo sapiens
  misc_RNA (1)...(19): siRNA sense strand
gcacaguucucuccaauaa

SEQ ID NO: 1951582 - RNA, 19 nt, Homo sapiens
  misc_RNA (1)...(19): siRNA sense strand
cgaaagaacuaccuuauug

SEQ ID NO: 1951583 - RNA, 19 nt, Homo sapiens
  misc_RNA (1)...(19): siRNA sense strand
gaucauacuuguguaguua

SEQ ID NO: 1951584 - RNA, 19 nt, Homo sapiens
  misc_RNA (1)...(19): siRNA sense strand
ccaaaggacugauaaauag

SEQ ID NO: 1951585 - RNA, 19 nt, Homo sapiens
  misc_RNA (1)...(19): siRNA sense strand
gaucgucucuuacugaauu

SEQ ID NO: 1951586 - RNA, 19 nt, Homo sapiens
  misc_RNA (1)...(19): siRNA sense strand
gcucuaggcuaaauaguaa

SEQ ID NO: 1951587 - RNA, 19 nt, Homo sapiens
  misc_RNA (1)...(19): siRNA sense strand
gcuaaagacugguugauga

SEQ ID NO: 1951588 - RNA, 19 nt, Homo sapiens
  misc_RNA (1)...(19): siRNA sense strand
guaagcaacugaacagauu

SEQ ID NO: 1951589 - RNA, 19 nt, Homo sapiens
  misc_RNA (1)...(19): siRNA sense strand
cuacacagcuuaucgauau

SEQ ID NO: 1951590 - RNA, 19 nt, Homo sapiens
  misc_RNA (1)...(19): siRNA sense strand
gcuacagucuucuuuauuu

SEQ ID NO: 1951591 - RNA, 19 nt, Homo sapiens
  misc_RNA (1)...(19): siRNA sense strand
ggauagaaaugauaaggaa

SEQ ID NO: 1951592 - RNA, 19 nt, Homo sapiens
  misc_RNA (1)...(19): siRNA sense strand
gcagcaaguucuuaauauu

SEQ ID NO: 1951593 - RNA, 19 nt, Homo sapiens
  misc_RNA (1)...(19): siRNA sense strand
uuaagucguugcuguauua

SEQ ID NO: 1951594 - RNA, 19 nt, Homo sapiens
  misc_RNA (1)...(19): siRNA sense strand
ugaagugacugcuguguuu

SEQ ID NO: 1951595 - RNA, 19 nt, Homo sapiens
  misc_RNA (1)...(19): siRNA sense strand
aauacgagcugaacaaauu

SEQ ID NO: 1951596 - RNA, 19 nt, Homo sapiens
  misc_RNA (1)...(19): siRNA sense strand
ucaagaauaucacgacauu

SEQ ID NO: 1951597 - RNA, 19 nt, Homo sapiens
  misc_RNA (1)...(19): siRNA sense strand
ggaugaaacccauaaauug

SEQ ID NO: 1951598 - RNA, 19 nt, Homo sapiens
  misc_RNA (1)...(19): siRNA sense strand
ucacauuacugaaggaauu

SEQ ID NO: 1951599 - RNA, 19 nt, Homo sapiens
  misc_RNA (1)...(19): siRNA sense strand
cagcagaucaucaagaaua

SEQ ID NO: 1951600 - RNA, 19 nt, Homo sapiens
  misc_RNA (1)...(19): siRNA sense strand
caaagaggauggaacacuu

SEQ ID NO: 1951601 - RNA, 19 nt, Homo sapiens
  misc_RNA (1)...(19): siRNA sense strand
ugagugauguagacuauuu

SEQ ID NO: 1951602 - RNA, 19 nt, Homo sapiens
  misc_RNA (1)...(19): siRNA sense strand
ggaguauccuggagguuaa

SEQ ID NO: 1951603 - RNA, 19 nt, Homo sapiens
  misc_RNA (1)...(19): siRNA sense strand
uaacagagacccuugaaga

SEQ ID NO: 1951604 - RNA, 19 nt, Homo sapiens
  misc_RNA (1)...(19): siRNA sense strand
gcacaccuuucaaacauau

SEQ ID NO: 1951605 - RNA, 19 nt, Homo sapiens
  misc_RNA (1)...(19): siRNA sense strand
gaaagaacuaccuuauuga

SEQ ID NO: 1951606 - RNA, 19 nt, Homo sapiens
  misc_RNA (1)...(19): siRNA sense strand
ggacucauauguugaccaa

SEQ ID NO: 1951607 - RNA, 19 nt, Homo sapiens
  misc_RNA (1)...(19): siRNA sense strand
gaacaguacccagcucuaa

SEQ ID NO: 1951608 - RNA, 19 nt, Homo sapiens
  misc_RNA (1)...(19): siRNA sense strand
gaugagugauguagacuau

SEQ ID NO: 1951609 - RNA, 19 nt, Homo sapiens
  misc_RNA (1)...(19): siRNA sense strand
gcagauggauccaguaggu

SEQ ID NO: 1951610 - RNA, 19 nt, Homo sapiens
  misc_RNA (1)...(19): siRNA sense strand
gcaaauacagccaaacaga

SEQ ID NO: 1951611 - RNA, 19 nt, Homo sapiens
  misc_RNA (1)...(19): siRNA sense strand
cuacugcccuccgaauuua

SEQ ID NO: 1951612 - RNA, 19 nt, Homo sapiens
  misc_RNA (1)...(19): siRNA sense strand
ccucaggacucauauguug

SEQ ID NO: 1951613 - RNA, 19 nt, Homo sapiens
  misc_RNA (1)...(19): siRNA sense strand
ggaagacucaguucaaguu

SEQ ID NO: 1951614 - RNA, 19 nt, Homo sapiens
  misc_RNA (1)...(19): siRNA sense strand
caucuuggcucccgaaauc

SEQ ID NO: 1951615 - RNA, 19 nt, Homo sapiens
  misc_RNA (1)...(19): siRNA sense strand
ggaagcagaacaucuaaga

SEQ ID NO: 1951616 - RNA, 19 nt, Homo sapiens
  misc_RNA (1)...(19): siRNA sense strand
cgaaagaggaguugacuug

SEQ ID NO: 1951617 - RNA, 19 nt, Homo sapiens
  misc_RNA (1)...(19): siRNA sense strand
ugguucagcuuguauauuu

SEQ ID NO: 1951618 - RNA, 19 nt, Homo sapiens
  misc_RNA (1)...(19): siRNA sense strand
gaaacucucuaaacaacag

SEQ ID NO: 1951619 - RNA, 19 nt, Homo sapiens
  misc_RNA (1)...(19): siRNA sense strand
uaaacaaagugcucuucuu

SEQ ID NO: 1951620 - RNA, 19 nt, Homo sapiens
  misc_RNA (1)...(19): siRNA sense strand
gaacagauugcugggagua

SEQ ID NO: 1951621 - RNA, 19 nt, Homo sapiens
  misc_RNA (1)...(19): siRNA sense strand
gaauucaggaggacucuuu

SEQ ID NO: 1951622 - RNA, 19 nt, Homo sapiens
  misc_RNA (1)...(19): siRNA sense strand
uaaagaugcuaauguacga

SEQ ID NO: 1951623 - RNA, 19 nt, Homo sapiens
  misc_RNA (1)...(19): siRNA sense strand
caucaagcauugcacaguu

SEQ ID NO: 1951624 - RNA, 19 nt, Homo sapiens
  misc_RNA (1)...(19): siRNA sense strand
gcaguuggauagaaaugau

SEQ ID NO: 1951625 - RNA, 19 nt, Homo sapiens
  misc_RNA (1)...(19): siRNA sense strand
uaaaggauuugcugucaca

SEQ ID NO: 1951626 - RNA, 19 nt, Homo sapiens
  misc_RNA (1)...(19): siRNA sense strand
gcagaacaucuaagaaaga

SEQ ID NO: 1951627 - RNA, 19 nt, Homo sapiens
  misc_RNA (1)...(19): siRNA sense strand
ggaaguauucagcuaaaga

SEQ ID NO: 1951628 - RNA, 19 nt, Homo sapiens
  misc_RNA (1)...(19): siRNA sense strand
guucggacuuuguuauuga

SEQ ID NO: 1951629 - RNA, 19 nt, Homo sapiens
  misc_RNA (1)...(19): siRNA sense strand
gggaguauccuggagguua

SEQ ID NO: 1951630 - RNA, 19 nt, Homo sapiens
  misc_RNA (1)...(19): siRNA sense strand
gauugcaguuggauagaaa

SEQ ID NO: 1951631 - RNA, 19 nt, Homo sapiens
  misc_RNA (1)...(19): siRNA sense strand
acaaagugcucuucuugga

SEQ ID NO: 1951632 - RNA, 19 nt, Homo sapiens
  misc_RNA (1)...(19): siRNA sense strand
ugucacagaugcaucacua

SEQ ID NO: 1951633 - RNA, 19 nt, Homo sapiens
  misc_RNA (1)...(19): siRNA sense strand
ggaaggaacaugccaacga

SEQ ID NO: 1951634 - RNA, 19 nt, Homo sapiens
  misc_RNA (1)...(19): siRNA sense strand
aaacaaagugcucuucuug

SEQ ID NO: 1951635 - RNA, 19 nt, Homo sapiens
  misc_RNA (1)...(19): siRNA sense strand
cauaaaggauuugcuguca

SEQ ID NO: 1951636 - RNA, 19 nt, Homo sapiens
  misc_RNA (1)...(19): siRNA sense strand
gaguggaaguguucaggaa

SEQ ID NO: 1951637 - RNA, 19 nt, Homo sapiens
  misc_RNA (1)...(19): siRNA sense strand
ggaucauacuuguguaguu

SEQ ID NO: 1951638 - RNA, 19 nt, Homo sapiens
  misc_RNA (1)...(19): siRNA sense strand
aaaggaaagagccaaauaa

SEQ ID NO: 1951639 - RNA, 19 nt, Homo sapiens
  misc_RNA (1)...(19): siRNA sense strand
cugaaaggauuuauugaga

SEQ ID NO: 1951640 - RNA, 19 nt, Homo sapiens
  misc_RNA (1)...(19): siRNA sense strand
guacccagcucuaauuacu

SEQ ID NO: 1951641 - RNA, 19 nt, Homo sapiens
  misc_RNA (1)...(19): siRNA sense strand
ucagaacuuugacaucuug

SEQ ID NO: 1951642 - RNA, 19 nt, Homo sapiens
  misc_RNA (1)...(19): siRNA sense strand
gaauuuaugauccacaaga

SEQ ID NO: 1951643 - RNA, 19 nt, Homo sapiens
  misc_RNA (1)...(19): siRNA sense strand
gaacacuuccaacaaacaa

SEQ ID NO: 1951644 - RNA, 19 nt, Homo sapiens
  misc_RNA (1)...(19): siRNA sense strand
ggaaagagccaaauaaaag

SEQ ID NO: 1951645 - RNA, 19 nt, Homo sapiens
  misc_RNA (1)...(19): siRNA sense strand
ucuguaagcuccuggauca

SEQ ID NO: 1951646 - RNA, 19 nt, Homo sapiens
  misc_RNA (1)...(19): siRNA sense strand
gaagugacugcuguguuua

SEQ ID NO: 1951647 - RNA, 19 nt, Homo sapiens
  misc_RNA (1)...(19): siRNA sense strand
gcuacugcccuccgaauuu

SEQ ID NO: 1951648 - RNA, 19 nt, Homo sapiens
  misc_RNA (1)...(19): siRNA sense strand
gaaggccugucaucuacug

SEQ ID NO: 1951649 - RNA, 19 nt, Homo sapiens
  misc_RNA (1)...(19): siRNA sense strand
uccaaaggacugauaaaua

SEQ ID NO: 1951650 - RNA, 19 nt, Homo sapiens
  misc_RNA (1)...(19): siRNA sense strand
uccaguagguugagagaaa

SEQ ID NO: 1951651 - RNA, 19 nt, Homo sapiens
  misc_RNA (1)...(19): siRNA sense strand
aagaauaucacgacauuga

SEQ ID NO: 1951652 - RNA, 19 nt, Homo sapiens
  misc_RNA (1)...(19): siRNA sense strand
aagcagaacaucuaagaaa

SEQ ID NO: 1951653 - RNA, 19 nt, Homo sapiens
  misc_RNA (1)...(19): siRNA sense strand
agauucagauaucguagua

SEQ ID NO: 1951654 - RNA, 19 nt, Homo sapiens
  misc_RNA (1)...(19): siRNA sense strand
acaguucucuccaauaaca

SEQ ID NO: 1951655 - RNA, 19 nt, Homo sapiens
  misc_RNA (1)...(19): siRNA sense strand
acaacuagcuacuccuguu

SEQ ID NO: 1951656 - RNA, 19 nt, Homo sapiens
  misc_RNA (1)...(19): siRNA sense strand
acucauauguugaccaaug

SEQ ID NO: 1951657 - RNA, 19 nt, Homo sapiens
  misc_RNA (1)...(19): siRNA sense strand
gaagacucaguucaaguuu

SEQ ID NO: 1951658 - RNA, 19 nt, Homo sapiens
  misc_RNA (1)...(19): siRNA sense strand
ggauugcaguuggauagaa

SEQ ID NO: 1951659 - RNA, 19 nt, Homo sapiens
  misc_RNA (1)...(19): siRNA sense strand
agucauggcuucgaaagaa

SEQ ID NO: 1951660 - RNA, 19 nt, Homo sapiens
  misc_RNA (1)...(19): siRNA sense strand
gaugaaacccauaaauugg

SEQ ID NO: 1951661 - RNA, 19 nt, Homo sapiens
  misc_RNA (1)...(19): siRNA sense strand
gcugaaagucuuagugaga

SEQ ID NO: 1951662 - RNA, 19 nt, Homo sapiens
  misc_RNA (1)...(19): siRNA sense strand
guggaaguauucagcuaaa

SEQ ID NO: 1951663 - RNA, 19 nt, Homo sapiens
  misc_RNA (1)...(19): siRNA sense strand
ggagguuaaugcaaauaca

SEQ ID NO: 1951664 - RNA, 19 nt, Homo sapiens
  misc_RNA (1)...(19): siRNA sense strand
gaaauaaccaagcacaaaa

SEQ ID NO: 1951665 - RNA, 19 nt, Homo sapiens
  misc_RNA (1)...(19): siRNA sense strand
uguggaaacucucuaaaca

SEQ ID NO: 1951666 - RNA, 19 nt, Homo sapiens
  misc_RNA (1)...(19): siRNA sense strand
gauuugcuuucucgguuaa

SEQ ID NO: 1951667 - RNA, 19 nt, Homo sapiens
  misc_RNA (1)...(19): siRNA sense strand
ucacagacuuacauuacug

SEQ ID NO: 1951668 - RNA, 19 nt, Homo sapiens
  misc_RNA (1)...(19): siRNA sense strand
gaacuuugacaucuugcaa

SEQ ID NO: 1951669 - RNA, 19 nt, Homo sapiens
  misc_RNA (1)...(19): siRNA sense strand
cauauuaagugaagugacu

SEQ ID NO: 1951670 - RNA, 19 nt, Homo sapiens
  misc_RNA (1)...(19): siRNA sense strand
uauaauugaugcacaccuu

SEQ ID NO: 1951671 - RNA, 19 nt, Homo sapiens
  misc_RNA (1)...(19): siRNA sense strand
ugauuugcuuucucgguua

SEQ ID NO: 1951672 - RNA, 19 nt, Homo sapiens
  misc_RNA (1)...(19): siRNA sense strand
agaaauaaccaagcacaaa

SEQ ID NO: 1951673 - RNA, 19 nt, Homo sapiens
  misc_RNA (1)...(19): siRNA sense strand
gaagcagaacaucuaagaa

SEQ ID NO: 1951674 - RNA, 19 nt, Homo sapiens
  misc_RNA (1)...(19): siRNA sense strand
gaguugacuuggcuucaga

SEQ ID NO: 1951675 - RNA, 19 nt, Homo sapiens
  misc_RNA (1)...(19): siRNA sense strand
acagaugcaucacuacaau

SEQ ID NO: 1951676 - RNA, 19 nt, Homo sapiens
  misc_RNA (1)...(19): siRNA sense strand
cugaacaaauuucuccauu

SEQ ID NO: 1951677 - RNA, 19 nt, Homo sapiens
  misc_RNA (1)...(19): siRNA sense strand
gaaggauugcaguuggaua

SEQ ID NO: 1951678 - RNA, 19 nt, Homo sapiens
  misc_RNA (1)...(19): siRNA sense strand
cagcaacacauccagguuu

SEQ ID NO: 1951679 - RNA, 19 nt, Homo sapiens
  misc_RNA (1)...(19): siRNA sense strand
gcaaugauauccaaggaau

SEQ ID NO: 1951680 - RNA, 19 nt, Homo sapiens
  misc_RNA (1)...(19): siRNA sense strand
gaucccagcuccaaggaaa

SEQ ID NO: 1951681 - RNA, 19 nt, Homo sapiens
  misc_RNA (1)...(19): siRNA sense strand
ggucucagcuccuugaucu

SEQ ID NO: 1951682 - RNA, 19 nt, Homo sapiens
  misc_RNA (1)...(19): siRNA sense strand
gaaggacacaggaggauau

SEQ ID NO: 1951683 - RNA, 19 nt, Homo sapiens
  misc_RNA (1)...(19): siRNA sense strand
ggaccuccaagcaaugaua

SEQ ID NO: 1951684 - RNA, 19 nt, Homo sapiens
  misc_RNA (1)...(19): siRNA sense strand
ggaaggacacaggaggaua

SEQ ID NO: 1951685 - RNA, 19 nt, Homo sapiens
  misc_RNA (1)...(19): siRNA sense strand
gcacacagaccccagcuuu

SEQ ID NO: 1951686 - RNA, 19 nt, Homo sapiens
  misc_RNA (1)...(19): siRNA sense strand
ugaccgacuuugccacaug

SEQ ID NO: 1951687 - RNA, 19 nt, Homo sapiens
  misc_RNA (1)...(19): siRNA sense strand
aaagagcucucggcacaca

SEQ ID NO: 1951688 - RNA, 19 nt, Homo sapiens
  misc_RNA (1)...(19): siRNA sense strand
aagcaaugauauccaagga

SEQ ID NO: 1951689 - RNA, 19 nt, Homo sapiens
  misc_RNA (1)...(19): siRNA sense strand
ucucagcuccuugaucuaa

SEQ ID NO: 1951690 - RNA, 19 nt, Homo sapiens
  misc_RNA (1)...(19): siRNA sense strand
ggagccagcaaaccauuuc

SEQ ID NO: 1951691 - RNA, 19 nt, Homo sapiens
  misc_RNA (1)...(19): siRNA sense strand
acacagaucccagcuccaa

SEQ ID NO: 1951692 - RNA, 19 nt, Homo sapiens
  misc_RNA (1)...(19): siRNA sense strand
uccaagcaaugauauccaa

SEQ ID NO: 1951693 - RNA, 19 nt, Homo sapiens
  misc_RNA (1)...(19): siRNA sense strand
ccucaggaauccaccuauc

SEQ ID NO: 1951694 - RNA, 19 nt, Homo sapiens
  misc_RNA (1)...(19): siRNA sense strand
gaccccagcuuuacaagga

SEQ ID NO: 1951695 - RNA, 19 nt, Homo sapiens
  misc_RNA (1)...(19): siRNA sense strand
aaugauauccaaggaauuc

SEQ ID NO: 1951696 - RNA, 19 nt, Homo sapiens
  misc_RNA (1)...(19): siRNA sense strand
gcaucaguccugccaaugg

SEQ ID NO: 1951697 - RNA, 19 nt, Homo sapiens
  misc_RNA (1)...(19): siRNA sense strand
ccacauggagccagcaaac

SEQ ID NO: 1951698 - RNA, 19 nt, Homo sapiens
  misc_RNA (1)...(19): siRNA sense strand
caggaugacugcagaaaag

SEQ ID NO: 1951699 - RNA, 19 nt, Homo sapiens
  misc_RNA (1)...(19): siRNA sense strand
caaugauauccaaggaauu

SEQ ID NO: 1951700 - RNA, 19 nt, Homo sapiens
  misc_RNA (1)...(19): siRNA sense strand
cguuaauccugaccgacuu

SEQ ID NO: 1951701 - RNA, 19 nt, Homo sapiens
  misc_RNA (1)...(19): siRNA sense strand
gaccuccaagcaaugauau

SEQ ID NO: 1951702 - RNA, 19 nt, Homo sapiens
  misc_RNA (1)...(19): siRNA sense strand
guuaauccugaccgacuuu

SEQ ID NO: 1951703 - RNA, 19 nt, Homo sapiens
  misc_RNA (1)...(19): siRNA sense strand
gcaaacaccucgucaggaa

SEQ ID NO: 1951704 - RNA, 19 nt, Homo sapiens
  misc_RNA (1)...(19): siRNA sense strand
ggaauucgcagacuccaua

SEQ ID NO: 1951705 - RNA, 19 nt, Homo sapiens
  misc_RNA (1)...(19): siRNA sense strand
gcagucaacucaaaugcaa

SEQ ID NO: 1951706 - RNA, 19 nt, Homo sapiens
  misc_RNA (1)...(19): siRNA sense strand
gcgcggaccuggagauuau

SEQ ID NO: 1951707 - RNA, 19 nt, Homo sapiens
  misc_RNA (1)...(19): siRNA sense strand
gcgcggaggugaaggagaa

SEQ ID NO: 1951708 - RNA, 19 nt, Homo sapiens
  misc_RNA (1)...(19): siRNA sense strand
ggacucagagcgaucgaua

SEQ ID NO: 1951709 - RNA, 19 nt, Homo sapiens
  misc_RNA (1)...(19): siRNA sense strand
gguccaagcggaaagauaa

SEQ ID NO: 1951710 - RNA, 19 nt, Homo sapiens
  misc_RNA (1)...(19): siRNA sense strand
ucacaaacacggaggauga

SEQ ID NO: 1951711 - RNA, 19 nt, Homo sapiens
  misc_RNA (1)...(19): siRNA sense strand
gagacacgcccuccaugua

SEQ ID NO: 1951712 - RNA, 19 nt, Homo sapiens
  misc_RNA (1)...(19): siRNA sense strand
auaaagcgcuggcaggaau

SEQ ID NO: 1951713 - RNA, 19 nt, Homo sapiens
  misc_RNA (1)...(19): siRNA sense strand
gggagcagcugaucaccau

SEQ ID NO: 1951714 - RNA, 19 nt, Homo sapiens
  misc_RNA (1)...(19): siRNA sense strand
gcggaaagauaaaguaagc

SEQ ID NO: 1951715 - RNA, 19 nt, Homo sapiens
  misc_RNA (1)...(19): siRNA sense strand
ccuacgagaucaccacaga

SEQ ID NO: 1951716 - RNA, 19 nt, Homo sapiens
  misc_RNA (1)...(19): siRNA sense strand
ggaaagauaaaguaagcau

SEQ ID NO: 1951717 - RNA, 19 nt, Homo sapiens
  misc_RNA (1)...(19): siRNA sense strand
ccaagaagaaggccaagau

SEQ ID NO: 1951718 - RNA, 19 nt, Homo sapiens
  misc_RNA (1)...(19): siRNA sense strand
gaugacgacacccucagua

SEQ ID NO: 1951719 - RNA, 19 nt, Homo sapiens
  misc_RNA (1)...(19): siRNA sense strand
caagcggaaagauaaagua

SEQ ID NO: 1951720 - RNA, 19 nt, Homo sapiens
  misc_RNA (1)...(19): siRNA sense strand
guucaaggccuuucagaag

SEQ ID NO: 1951721 - RNA, 19 nt, Homo sapiens
  misc_RNA (1)...(19): siRNA sense strand
guaagcauauugucaaccu

SEQ ID NO: 1951722 - RNA, 19 nt, Homo sapiens
  misc_RNA (1)...(19): siRNA sense strand
gcacaggccccaccaagaa

SEQ ID NO: 1951723 - RNA, 19 nt, Homo sapiens
  misc_RNA (1)...(19): siRNA sense strand
ucagagcgaucgauauucg

SEQ ID NO: 1951724 - RNA, 19 nt, Homo sapiens
  misc_RNA (1)...(19): siRNA sense strand
uaucccagcuggucacaca

SEQ ID NO: 1951725 - RNA, 19 nt, Homo sapiens
  misc_RNA (1)...(19): siRNA sense strand
gaacauccucuuccaucuc

SEQ ID NO: 1951726 - RNA, 19 nt, Homo sapiens
  misc_RNA (1)...(19): siRNA sense strand
caagaagaaggccaagaug

SEQ ID NO: 1951727 - RNA, 19 nt, Homo sapiens
  misc_RNA (1)...(19): siRNA sense strand
gagcagcugaucaccaugu

SEQ ID NO: 1951728 - RNA, 19 nt, Homo sapiens
  misc_RNA (1)...(19): siRNA sense strand
ggaaucgucaugaccaaag

SEQ ID NO: 1951729 - RNA, 19 nt, Homo sapiens
  misc_RNA (1)...(19): siRNA sense strand
acucagagcgaucgauauu

SEQ ID NO: 1951730 - RNA, 19 nt, Homo sapiens
  misc_RNA (1)...(19): siRNA sense strand
ugcaggagcuguucgacau

SEQ ID NO: 1951731 - RNA, 19 nt, Homo sapiens
  misc_RNA (1)...(19): siRNA sense strand
gcuaccggcugcgagagaa

SEQ ID NO: 1951732 - RNA, 19 nt, Homo sapiens
  misc_RNA (1)...(19): siRNA sense strand
aagcggaaagauaaaguaa

SEQ ID NO: 1951733 - RNA, 19 nt, Homo sapiens
  misc_RNA (1)...(19): siRNA sense strand
caccggagcagcagcaguu

SEQ ID NO: 1951734 - RNA, 19 nt, Homo sapiens
  misc_RNA (1)...(19): siRNA sense strand
cgauauucgugcgguuaaa

SEQ ID NO: 1951735 - RNA, 19 nt, Homo sapiens
  misc_RNA (1)...(19): siRNA sense strand
gaaucgucaugaccaaagg

SEQ ID NO: 1951736 - RNA, 19 nt, Homo sapiens
  misc_RNA (1)...(19): siRNA sense strand
ucagguccuucgugcaguu

SEQ ID NO: 1951737 - RNA, 19 nt, Homo sapiens
  misc_RNA (1)...(19): siRNA sense strand
caggaaucgucaugaccaa

SEQ ID NO: 1951738 - RNA, 19 nt, Homo sapiens
  misc_RNA (1)...(19): siRNA sense strand
gagcagcagcaguuucuac

SEQ ID NO: 1951739 - RNA, 19 nt, Homo sapiens
  misc_RNA (1)...(19): siRNA sense strand
ccuccgaccaggccgauuu

SEQ ID NO: 1951740 - RNA, 19 nt, Homo sapiens
  misc_RNA (1)...(19): siRNA sense strand
cgccaaugccgcaggaauu

SEQ ID NO: 1951741 - RNA, 19 nt, Homo sapiens
  misc_RNA (1)...(19): siRNA sense strand
aacugcagcuggucuggaa

SEQ ID NO: 1951742 - RNA, 19 nt, Homo sapiens
  misc_RNA (1)...(19): siRNA sense strand
ccugaguccuggcaucaca

SEQ ID NO: 1951743 - RNA, 19 nt, Homo sapiens
  misc_RNA (1)...(19): siRNA sense strand
aaacaccucgucaggaagu

SEQ ID NO: 1951744 - RNA, 19 nt, Homo sapiens
  misc_RNA (1)...(19): siRNA sense strand
cuggagggcugagcaguca

SEQ ID NO: 1951745 - RNA, 19 nt, Homo sapiens
  misc_RNA (1)...(19): siRNA sense strand
agaacauccucuuccaucu

SEQ ID NO: 1951746 - RNA, 19 nt, Homo sapiens
  misc_RNA (1)...(19): siRNA sense strand
ggagguccaagcggaaaga

SEQ ID NO: 1951747 - RNA, 19 nt, Homo sapiens
  misc_RNA (1)...(19): siRNA sense strand
ucaaaugcaaguccaagag

SEQ ID NO: 1951748 - RNA, 19 nt, Homo sapiens
  misc_RNA (1)...(19): siRNA sense strand
cgguagcgguggaggugaa

SEQ ID NO: 1951749 - RNA, 19 nt, Homo sapiens
  misc_RNA (1)...(19): siRNA sense strand
gacgacacccucaguacca

SEQ ID NO: 1951750 - RNA, 19 nt, Homo sapiens
  misc_RNA (1)...(19): siRNA sense strand
gccaaugccgcaggaauuc

SEQ ID NO: 1951751 - RNA, 19 nt, Homo sapiens
  misc_RNA (1)...(19): siRNA sense strand
gaauucgcagacuccauau

SEQ ID NO: 1951752 - RNA, 19 nt, Homo sapiens
  misc_RNA (1)...(19): siRNA sense strand
acaccuaccagucugugaa

SEQ ID NO: 1951753 - RNA, 19 nt, Homo sapiens
  misc_RNA (1)...(19): siRNA sense strand
cgcccuccauguacuguga

SEQ ID NO: 1951754 - RNA, 19 nt, Homo sapiens
  misc_RNA (1)...(19): siRNA sense strand
gacacgcccuccauguacu

SEQ ID NO: 1951755 - RNA, 19 nt, Homo sapiens
  misc_RNA (1)...(19): siRNA sense strand
uaagcauauugucaaccuu

SEQ ID NO: 1951756 - RNA, 19 nt, Homo sapiens
  misc_RNA (1)...(19): siRNA sense strand
ggagagaccugccugaaac

SEQ ID NO: 1951757 - RNA, 19 nt, Homo sapiens
  misc_RNA (1)...(19): siRNA sense strand
ccgggaagaguacagauaa

SEQ ID NO: 1951758 - RNA, 19 nt, Homo sapiens
  misc_RNA (1)...(19): siRNA sense strand
gcacaccagaggcaucuca

SEQ ID NO: 1951759 - RNA, 19 nt, Homo sapiens
  misc_RNA (1)...(19): siRNA sense strand
uagaacggauccuccucaa

SEQ ID NO: 1951760 - RNA, 19 nt, Homo sapiens
  misc_RNA (1)...(19): siRNA sense strand
uggagagaccugccugaaa

SEQ ID NO: 1951761 - RNA, 19 nt, Homo sapiens
  misc_RNA (1)...(19): siRNA sense strand
ucaggaggagccagaccua

SEQ ID NO: 1951762 - RNA, 19 nt, Homo sapiens
  misc_RNA (1)...(19): siRNA sense strand
ggaggagccagaccuagac

SEQ ID NO: 1951763 - RNA, 19 nt, Homo sapiens
  misc_RNA (1)...(19): siRNA sense strand
cuacaacccuauugcuuaa

SEQ ID NO: 1951764 - RNA, 19 nt, Homo sapiens
  misc_RNA (1)...(19): siRNA sense strand
gcucaaauauuucuacaac

SEQ ID NO: 1951765 - RNA, 19 nt, Homo sapiens
  misc_RNA (1)...(19): siRNA sense strand
uaauaucucugccuuguca

SEQ ID NO: 1951766 - RNA, 19 nt, Homo sapiens
  misc_RNA (1)...(19): siRNA sense strand
ucuacaacccuauugcuua

SEQ ID NO: 1951767 - RNA, 19 nt, Homo sapiens
  misc_RNA (1)...(19): siRNA sense strand
uuuaauaucucugccuugu

SEQ ID NO: 1951768 - RNA, 19 nt, Homo sapiens
  misc_RNA (1)...(19): siRNA sense strand
caacccuauugcuuaacaa

SEQ ID NO: 1951769 - RNA, 19 nt, Homo sapiens
  misc_RNA (1)...(19): siRNA sense strand
acaacccuauugcuuaaca

SEQ ID NO: 1951770 - RNA, 19 nt, Homo sapiens
  misc_RNA (1)...(19): siRNA sense strand
uggaagcguaccuuacuuu

SEQ ID NO: 1951771 - RNA, 19 nt, Homo sapiens
  misc_RNA (1)...(19): siRNA sense strand
gggcaucaccaaccuggau

SEQ ID NO: 1951772 - RNA, 19 nt, Homo sapiens
  misc_RNA (1)...(19): siRNA sense strand
gucaugugcuguucgucuu

SEQ ID NO: 1951773 - RNA, 19 nt, Homo sapiens
  misc_RNA (1)...(19): siRNA sense strand
uaaugaacucguccuggaa

SEQ ID NO: 1951774 - RNA, 19 nt, Homo sapiens
  misc_RNA (1)...(19): siRNA sense strand
cuuaacaacaggaaugaau

SEQ ID NO: 1951775 - RNA, 19 nt, Homo sapiens
  misc_RNA (1)...(19): siRNA sense strand
ucaugugcuguucgucuua

SEQ ID NO: 1951776 - RNA, 19 nt, Homo sapiens
  misc_RNA (1)...(19): siRNA sense strand
ggaagcguaccuuacuuuu

SEQ ID NO: 1951777 - RNA, 19 nt, Homo sapiens
  misc_RNA (1)...(19): siRNA sense strand
cgucuuaccaggaaacuac

SEQ ID NO: 1951778 - RNA, 19 nt, Homo sapiens
  misc_RNA (1)...(19): siRNA sense strand
guccuggaagcguaccuua

SEQ ID NO: 1951779 - RNA, 19 nt, Homo sapiens
  misc_RNA (1)...(19): siRNA sense strand
gggaagcgcugccugaaga

SEQ ID NO: 1951780 - RNA, 19 nt, Homo sapiens
  misc_RNA (1)...(19): siRNA sense strand
gaggauccuuggcagauga

SEQ ID NO: 1951781 - RNA, 19 nt, Homo sapiens
  misc_RNA (1)...(19): siRNA sense strand
ggaggcagcuggggaaaua

SEQ ID NO: 1951782 - RNA, 19 nt, Homo sapiens
  misc_RNA (1)...(19): siRNA sense strand
ccagcuggcuucccuaauc

SEQ ID NO: 1951783 - RNA, 19 nt, Homo sapiens
  misc_RNA (1)...(19): siRNA sense strand
uggcaaggguuccucugaa

SEQ ID NO: 1951784 - RNA, 19 nt, Homo sapiens
  misc_RNA (1)...(19): siRNA sense strand
gguaccagcuggggaaaua

SEQ ID NO: 1951785 - RNA, 19 nt, Homo sapiens
  misc_RNA (1)...(19): siRNA sense strand
ggaaauauuaaucgguauc

SEQ ID NO: 1951786 - RNA, 19 nt, Homo sapiens
  misc_RNA (1)...(19): siRNA sense strand
gggaaauauuaaucgguau

SEQ ID NO: 1951787 - RNA, 19 nt, Homo sapiens
  misc_RNA (1)...(19): siRNA sense strand
ccuccuggcucuucuugga

SEQ ID NO: 1951788 - RNA, 19 nt, Homo sapiens
  misc_RNA (1)...(19): siRNA sense strand
ggcaaggguuccucugaag

SEQ ID NO: 1951789 - RNA, 19 nt, Homo sapiens
  misc_RNA (1)...(19): siRNA sense strand
gagggaaucugggguauca

SEQ ID NO: 1951790 - RNA, 19 nt, Homo sapiens
  misc_RNA (1)...(19): siRNA sense strand
gaauauuaaucgguaucca

SEQ ID NO: 1951791 - RNA, 19 nt, Homo sapiens
  misc_RNA (1)...(19): siRNA sense strand
gaaucugggguaucaauaa

SEQ ID NO: 1951792 - RNA, 19 nt, Homo sapiens
  misc_RNA (1)...(19): siRNA sense strand
cgacugccccguucuaauu

SEQ ID NO: 1951793 - RNA, 19 nt, Homo sapiens
  misc_RNA (1)...(19): siRNA sense strand
cccuaggucuaaugacuug

SEQ ID NO: 1951794 - RNA, 19 nt, Homo sapiens
  misc_RNA (1)...(19): siRNA sense strand
ggaagcgcugccugaagaa

SEQ ID NO: 1951795 - RNA, 19 nt, Homo sapiens
  misc_RNA (1)...(19): siRNA sense strand
ugaggauccuuggcagaug

SEQ ID NO: 1951796 - RNA, 19 nt, Homo sapiens
  misc_RNA (1)...(19): siRNA sense strand
ggaaucugggguaucaaua

SEQ ID NO: 1951797 - RNA, 19 nt, Homo sapiens
  misc_RNA (1)...(19): siRNA sense strand
gcacagagcuugcuauuag

SEQ ID NO: 1951798 - RNA, 19 nt, Homo sapiens
  misc_RNA (1)...(19): siRNA sense strand
gaacgaauguugccugauu

SEQ ID NO: 1951799 - RNA, 19 nt, Homo sapiens
  misc_RNA (1)...(19): siRNA sense strand
ggagaacucuggaugcuuu

SEQ ID NO: 1951800 - RNA, 19 nt, Homo sapiens
  misc_RNA (1)...(19): siRNA sense strand
gaaggguacucacagcuua

SEQ ID NO: 1951801 - RNA, 19 nt, Homo sapiens
  misc_RNA (1)...(19): siRNA sense strand
cagcaaaucugucaucauu

SEQ ID NO: 1951802 - RNA, 19 nt, Homo sapiens
  misc_RNA (1)...(19): siRNA sense strand
caacuuggcuacugaagaa

SEQ ID NO: 1951803 - RNA, 19 nt, Homo sapiens
  misc_RNA (1)...(19): siRNA sense strand
gcaaaucugucaucauuag

SEQ ID NO: 1951804 - RNA, 19 nt, Homo sapiens
  misc_RNA (1)...(19): siRNA sense strand
gaauguugccugauuauuu

SEQ ID NO: 1951805 - RNA, 19 nt, Homo sapiens
  misc_RNA (1)...(19): siRNA sense strand
ggagagaguuugaaagaag

SEQ ID NO: 1951806 - RNA, 19 nt, Homo sapiens
  misc_RNA (1)...(19): siRNA sense strand
uuaaugacauggcuacuaa

SEQ ID NO: 1951807 - RNA, 19 nt, Homo sapiens
  misc_RNA (1)...(19): siRNA sense strand
gaagaaauaaccaagcauu

SEQ ID NO: 1951808 - RNA, 19 nt, Homo sapiens
  misc_RNA (1)...(19): siRNA sense strand
agaaguuagugaccuauua

SEQ ID NO: 1951809 - RNA, 19 nt, Homo sapiens
  misc_RNA (1)...(19): siRNA sense strand
gaccuuaucuguauuugau

SEQ ID NO: 1951810 - RNA, 19 nt, Homo sapiens
  misc_RNA (1)...(19): siRNA sense strand
uggaacagcuggcaaacua

SEQ ID NO: 1951811 - RNA, 19 nt, Homo sapiens
  misc_RNA (1)...(19): siRNA sense strand
gagaagcccuuuugaaauu

SEQ ID NO: 1951812 - RNA, 19 nt, Homo sapiens
  misc_RNA (1)...(19): siRNA sense strand
ggcaaucaguguaguguaa

SEQ ID NO: 1951813 - RNA, 19 nt, Homo sapiens
  misc_RNA (1)...(19): siRNA sense strand
gagaagaaauaaccaagca

SEQ ID NO: 1951814 - RNA, 19 nt, Homo sapiens
  misc_RNA (1)...(19): siRNA sense strand
gaaaagacuucaaauguca

SEQ ID NO: 1951815 - RNA, 19 nt, Homo sapiens
  misc_RNA (1)...(19): siRNA sense strand
ugaaagaaguacaugaaug

SEQ ID NO: 1951816 - RNA, 19 nt, Homo sapiens
  misc_RNA (1)...(19): siRNA sense strand
uggagacucuuaauucuaa

SEQ ID NO: 1951817 - RNA, 19 nt, Homo sapiens
  misc_RNA (1)...(19): siRNA sense strand
aaccaaacauaccuucuua

SEQ ID NO: 1951818 - RNA, 19 nt, Homo sapiens
  misc_RNA (1)...(19): siRNA sense strand
gacaaaugauuccagcaaa

SEQ ID NO: 1951819 - RNA, 19 nt, Homo sapiens
  misc_RNA (1)...(19): siRNA sense strand
ugugaacacugaagccuua

SEQ ID NO: 1951820 - RNA, 19 nt, Homo sapiens
  misc_RNA (1)...(19): siRNA sense strand
gaauguggacgugguguua

SEQ ID NO: 1951821 - RNA, 19 nt, Homo sapiens
  misc_RNA (1)...(19): siRNA sense strand
uggcauaucugcucugaga

SEQ ID NO: 1951822 - RNA, 19 nt, Homo sapiens
  misc_RNA (1)...(19): siRNA sense strand
gaagaccuuaucuguauuu

SEQ ID NO: 1951823 - RNA, 19 nt, Homo sapiens
  misc_RNA (1)...(19): siRNA sense strand
gacaccagauucucaaguu

SEQ ID NO: 1951824 - RNA, 19 nt, Homo sapiens
  misc_RNA (1)...(19): siRNA sense strand
gaaggaacagucauggaaa

SEQ ID NO: 1951825 - RNA, 19 nt, Homo sapiens
  misc_RNA (1)...(19): siRNA sense strand
gaagaaauugaacgugauu

SEQ ID NO: 1951826 - RNA, 19 nt, Homo sapiens
  misc_RNA (1)...(19): siRNA sense strand
gauaaugacccaguccuuu

SEQ ID NO: 1951827 - RNA, 19 nt, Homo sapiens
  misc_RNA (1)...(19): siRNA sense strand
gaggauuaauugcugaaga

SEQ ID NO: 1951828 - RNA, 19 nt, Homo sapiens
  misc_RNA (1)...(19): siRNA sense strand
cuucagugcugcuucuaua

SEQ ID NO: 1951829 - RNA, 19 nt, Homo sapiens
  misc_RNA (1)...(19): siRNA sense strand
cgagaggucuuagcuauag

SEQ ID NO: 1951830 - RNA, 19 nt, Homo sapiens
  misc_RNA (1)...(19): siRNA sense strand
aagaugauccugagaaauu

SEQ ID NO: 1951831 - RNA, 19 nt, Homo sapiens
  misc_RNA (1)...(19): siRNA sense strand
augaagaccuuaucuguau

SEQ ID NO: 1951832 - RNA, 19 nt, Homo sapiens
  misc_RNA (1)...(19): siRNA sense strand
gacucgagaucuuguugua

SEQ ID NO: 1951833 - RNA, 19 nt, Homo sapiens
  misc_RNA (1)...(19): siRNA sense strand
gaacacugaagccuuaaug

SEQ ID NO: 1951834 - RNA, 19 nt, Homo sapiens
  misc_RNA (1)...(19): siRNA sense strand
caaaagaggucuggaaaau

SEQ ID NO: 1951835 - RNA, 19 nt, Homo sapiens
  misc_RNA (1)...(19): siRNA sense strand
gcaccaacuuucugagcuu

SEQ ID NO: 1951836 - RNA, 19 nt, Homo sapiens
  misc_RNA (1)...(19): siRNA sense strand
gaaguuagugaccuauuau

SEQ ID NO: 1951837 - RNA, 19 nt, Homo sapiens
  misc_RNA (1)...(19): siRNA sense strand
agaagaugauccugagaaa

SEQ ID NO: 1951838 - RNA, 19 nt, Homo sapiens
  misc_RNA (1)...(19): siRNA sense strand
caagauggcaaucagugua

SEQ ID NO: 1951839 - RNA, 19 nt, Homo sapiens
  misc_RNA (1)...(19): siRNA sense strand
gaacagcuggcaaacuaug

SEQ ID NO: 1951840 - RNA, 19 nt, Homo sapiens
  misc_RNA (1)...(19): siRNA sense strand
gcuauuaguucugagucua

SEQ ID NO: 1951841 - RNA, 19 nt, Homo sapiens
  misc_RNA (1)...(19): siRNA sense strand
uaagagggauuccagaaac

SEQ ID NO: 1951842 - RNA, 19 nt, Homo sapiens
  misc_RNA (1)...(19): siRNA sense strand
guaaaacugugaacacuga

SEQ ID NO: 1951843 - RNA, 19 nt, Homo sapiens
  misc_RNA (1)...(19): siRNA sense strand
uuucugagcuucuauucuu

SEQ ID NO: 1951844 - RNA, 19 nt, Homo sapiens
  misc_RNA (1)...(19): siRNA sense strand
guaagagggauuccagaaa

SEQ ID NO: 1951845 - RNA, 19 nt, Homo sapiens
  misc_RNA (1)...(19): siRNA sense strand
gagcagcuucaacucaaua

SEQ ID NO: 1951846 - RNA, 19 nt, Homo sapiens
  misc_RNA (1)...(19): siRNA sense strand
gaggugcaaucuuugacaa

SEQ ID NO: 1951847 - RNA, 19 nt, Homo sapiens
  misc_RNA (1)...(19): siRNA sense strand
ucagagugauacuggcaua

SEQ ID NO: 1951848 - RNA, 19 nt, Homo sapiens
  misc_RNA (1)...(19): siRNA sense strand
gcauugggauugguuggaa

SEQ ID NO: 1951849 - RNA, 19 nt, Homo sapiens
  misc_RNA (1)...(19): siRNA sense strand
caccagauucucaaguuua

SEQ ID NO: 1951850 - RNA, 19 nt, Homo sapiens
  misc_RNA (1)...(19): siRNA sense strand
ccauucagccacuucaaua

SEQ ID NO: 1951851 - RNA, 19 nt, Homo sapiens
  misc_RNA (1)...(19): siRNA sense strand
gagagaguuugaaagaagu

SEQ ID NO: 1951852 - RNA, 19 nt, Homo sapiens
  misc_RNA (1)...(19): siRNA sense strand
ggaaagguccaacgacuac

SEQ ID NO: 1951853 - RNA, 19 nt, Homo sapiens
  misc_RNA (1)...(19): siRNA sense strand
uacgagaggucuuagcuau

SEQ ID NO: 1951854 - RNA, 19 nt, Homo sapiens
  misc_RNA (1)...(19): siRNA sense strand
ucacguguguucccaagga

SEQ ID NO: 1951855 - RNA, 19 nt, Homo sapiens
  misc_RNA (1)...(19): siRNA sense strand
ggacgugguguuaguaugu

SEQ ID NO: 1951856 - RNA, 19 nt, Homo sapiens
  misc_RNA (1)...(19): siRNA sense strand
gaacagucauggaaaauac

SEQ ID NO: 1951857 - RNA, 19 nt, Homo sapiens
  misc_RNA (1)...(19): siRNA sense strand
acaaaugauuccagcaaau

SEQ ID NO: 1951858 - RNA, 19 nt, Homo sapiens
  misc_RNA (1)...(19): siRNA sense strand
auaaugacccaguccuuua

SEQ ID NO: 1951859 - RNA, 19 nt, Homo sapiens
  misc_RNA (1)...(19): siRNA sense strand
uugaacaacugguagcaaa

SEQ ID NO: 1951860 - RNA, 19 nt, Homo sapiens
  misc_RNA (1)...(19): siRNA sense strand
acucacagcuuaugcauac

SEQ ID NO: 1951861 - RNA, 19 nt, Homo sapiens
  misc_RNA (1)...(19): siRNA sense strand
gcacccagccuuucagagu

SEQ ID NO: 1951862 - RNA, 19 nt, Homo sapiens
  misc_RNA (1)...(19): siRNA sense strand
ugaaggaacagucauggaa

SEQ ID NO: 1951863 - RNA, 19 nt, Homo sapiens
  misc_RNA (1)...(19): siRNA sense strand
guauuucacccucagaauu

SEQ ID NO: 1951864 - RNA, 19 nt, Homo sapiens
  misc_RNA (1)...(19): siRNA sense strand
uaugaagaccuuaucugua

SEQ ID NO: 1951865 - RNA, 19 nt, Homo sapiens
  misc_RNA (1)...(19): siRNA sense strand
gguugggacucuugauuca

SEQ ID NO: 1951866 - RNA, 19 nt, Homo sapiens
  misc_RNA (1)...(19): siRNA sense strand
gcugaagccugaggaagug

SEQ ID NO: 1951867 - RNA, 19 nt, Homo sapiens
  misc_RNA (1)...(19): siRNA sense strand
ucaguguaguguaaucauu

SEQ ID NO: 1951868 - RNA, 19 nt, Homo sapiens
  misc_RNA (1)...(19): siRNA sense strand
gcacauuaaccaaacauac

SEQ ID NO: 1951869 - RNA, 19 nt, Homo sapiens
  misc_RNA (1)...(19): siRNA sense strand
aggagagaaucacuacuuu

SEQ ID NO: 1951870 - RNA, 19 nt, Homo sapiens
  misc_RNA (1)...(19): siRNA sense strand
caggguuggcuuuaucuua

SEQ ID NO: 1951871 - RNA, 19 nt, Homo sapiens
  misc_RNA (1)...(19): siRNA sense strand
acaccagauucucaaguuu

SEQ ID NO: 1951872 - RNA, 19 nt, Homo sapiens
  misc_RNA (1)...(19): siRNA sense strand
guuaguauguuucgaacca

SEQ ID NO: 1951873 - RNA, 19 nt, Homo sapiens
  misc_RNA (1)...(19): siRNA sense strand
caacagagaagaaauaacc

SEQ ID NO: 1951874 - RNA, 19 nt, Homo sapiens
  misc_RNA (1)...(19): siRNA sense strand
gagaaggagaaguuaguga

SEQ ID NO: 1951875 - RNA, 19 nt, Homo sapiens
  misc_RNA (1)...(19): siRNA sense strand
ugaagaaauugaacgugau

SEQ ID NO: 1951876 - RNA, 19 nt, Homo sapiens
  misc_RNA (1)...(19): siRNA sense strand
cggagcagcuucaacucaa

SEQ ID NO: 1951877 - RNA, 19 nt, Homo sapiens
  misc_RNA (1)...(19): siRNA sense strand
gagaaucacuacuuuucaa

SEQ ID NO: 1951878 - RNA, 19 nt, Homo sapiens
  misc_RNA (1)...(19): siRNA sense strand
ccugagaaauuucgagaag

SEQ ID NO: 1951879 - RNA, 19 nt, Homo sapiens
  misc_RNA (1)...(19): siRNA sense strand
aacgaauguugccugauua

SEQ ID NO: 1951880 - RNA, 19 nt, Homo sapiens
  misc_RNA (1)...(19): siRNA sense strand
gaaaauacuguuugcagaa

SEQ ID NO: 1951881 - RNA, 19 nt, Homo sapiens
  misc_RNA (1)...(19): siRNA sense strand
uauuucacccucagaauuu

SEQ ID NO: 1951882 - RNA, 19 nt, Homo sapiens
  misc_RNA (1)...(19): siRNA sense strand
ucauuagcaucaaaggaaa

SEQ ID NO: 1951883 - RNA, 19 nt, Homo sapiens
  misc_RNA (1)...(19): siRNA sense strand
cuucaauacucaugggaaa

SEQ ID NO: 1951884 - RNA, 19 nt, Homo sapiens
  misc_RNA (1)...(19): siRNA sense strand
aaagaggucuggaaaauag

SEQ ID NO: 1951885 - RNA, 19 nt, Homo sapiens
  misc_RNA (1)...(19): siRNA sense strand
caaacuaugccauuagaag

SEQ ID NO: 1951886 - RNA, 19 nt, Homo sapiens
  misc_RNA (1)...(19): siRNA sense strand
uaaccaaacauaccuucuu

SEQ ID NO: 1951887 - RNA, 19 nt, Homo sapiens
  misc_RNA (1)...(19): siRNA sense strand
guuagugaccuauuauuca

SEQ ID NO: 1951888 - RNA, 19 nt, Homo sapiens
  misc_RNA (1)...(19): siRNA sense strand
uaucuuagcaccaacuuuc

SEQ ID NO: 1951889 - RNA, 19 nt, Homo sapiens
  misc_RNA (1)...(19): siRNA sense strand
gcaacuuggcuacugaaga

SEQ ID NO: 1951890 - RNA, 19 nt, Homo sapiens
  misc_RNA (1)...(19): siRNA sense strand
ggagcagcuucaacucaau

SEQ ID NO: 1951891 - RNA, 19 nt, Homo sapiens
  misc_RNA (1)...(19): siRNA sense strand
aaacuaugccauuagaaga

SEQ ID NO: 1951892 - RNA, 19 nt, Homo sapiens
  misc_RNA (1)...(19): siRNA sense strand
gaagaugauccugagaaau

SEQ ID NO: 1951893 - RNA, 19 nt, Homo sapiens
  misc_RNA (1)...(19): siRNA sense strand
gaggagaacucuggaugcu

SEQ ID NO: 1951894 - RNA, 19 nt, Homo sapiens
  misc_RNA (1)...(19): siRNA sense strand
ggagacucuuaauucuaaa

SEQ ID NO: 1951895 - RNA, 19 nt, Homo sapiens
  misc_RNA (1)...(19): siRNA sense strand
aaggagagaguuugaaaga

SEQ ID NO: 1951896 - RNA, 19 nt, Homo sapiens
  misc_RNA (1)...(19): siRNA sense strand
cagcuucaacucaauauca

SEQ ID NO: 1951897 - RNA, 19 nt, Homo sapiens
  misc_RNA (1)...(19): siRNA sense strand
gcacagagcuugcuauuag

SEQ ID NO: 1951898 - RNA, 19 nt, Homo sapiens
  misc_RNA (1)...(19): siRNA sense strand
gaacgaauguugccugauu

SEQ ID NO: 1951899 - RNA, 19 nt, Homo sapiens
  misc_RNA (1)...(19): siRNA sense strand
ggagaacucuggaugcuuu

SEQ ID NO: 1951900 - RNA, 19 nt, Homo sapiens
  misc_RNA (1)...(19): siRNA sense strand
gaaggguacucacagcuua

SEQ ID NO: 1951901 - RNA, 19 nt, Homo sapiens
  misc_RNA (1)...(19): siRNA sense strand
cagcaaaucugucaucauu

SEQ ID NO: 1951902 - RNA, 19 nt, Homo sapiens
  misc_RNA (1)...(19): siRNA sense strand
caacuuggcuacugaagaa

SEQ ID NO: 1951903 - RNA, 19 nt, Homo sapiens
  misc_RNA (1)...(19): siRNA sense strand
gcaaaucugucaucauuag

SEQ ID NO: 1951904 - RNA, 19 nt, Homo sapiens
  misc_RNA (1)...(19): siRNA sense strand
gaauguugccugauuauuu

SEQ ID NO: 1951905 - RNA, 19 nt, Homo sapiens
  misc_RNA (1)...(19): siRNA sense strand
ggagagaguuugaaagaag

SEQ ID NO: 1951906 - RNA, 19 nt, Homo sapiens
  misc_RNA (1)...(19): siRNA sense strand
uuaaugacauggcuacuaa

SEQ ID NO: 1951907 - RNA, 19 nt, Homo sapiens
  misc_RNA (1)...(19): siRNA sense strand
gaagaaauaaccaagcauu

SEQ ID NO: 1951908 - RNA, 19 nt, Homo sapiens
  misc_RNA (1)...(19): siRNA sense strand
agaaguuagugaccuauua

SEQ ID NO: 1951909 - RNA, 19 nt, Homo sapiens
  misc_RNA (1)...(19): siRNA sense strand
gaccuuaucuguauuugau

SEQ ID NO: 1951910 - RNA, 19 nt, Homo sapiens
  misc_RNA (1)...(19): siRNA sense strand
uggaacagcuggcaaacua

SEQ ID NO: 1951911 - RNA, 19 nt, Homo sapiens
  misc_RNA (1)...(19): siRNA sense strand
gagaagcccuuuugaaauu

SEQ ID NO: 1951912 - RNA, 19 nt, Homo sapiens
  misc_RNA (1)...(19): siRNA sense strand
ggcaaucaguguaguguaa

SEQ ID NO: 1951913 - RNA, 19 nt, Homo sapiens
  misc_RNA (1)...(19): siRNA sense strand
gagaagaaauaaccaagca

SEQ ID NO: 1951914 - RNA, 19 nt, Homo sapiens
  misc_RNA (1)...(19): siRNA sense strand
gaaaagacuucaaauguca

SEQ ID NO: 1951915 - RNA, 19 nt, Homo sapiens
  misc_RNA (1)...(19): siRNA sense strand
ugaaagaaguacaugaaug

SEQ ID NO: 1951916 - RNA, 19 nt, Homo sapiens
  misc_RNA (1)...(19): siRNA sense strand
uggagacucuuaauucuaa

SEQ ID NO: 1951917 - RNA, 19 nt, Homo sapiens
  misc_RNA (1)...(19): siRNA sense strand
aaccaaacauaccuucuua

SEQ ID NO: 1951918 - RNA, 19 nt, Homo sapiens
  misc_RNA (1)...(19): siRNA sense strand
gacaaaugauuccagcaaa

SEQ ID NO: 1951919 - RNA, 19 nt, Homo sapiens
  misc_RNA (1)...(19): siRNA sense strand
ugugaacacugaagccuua

SEQ ID NO: 1951920 - RNA, 19 nt, Homo sapiens
  misc_RNA (1)...(19): siRNA sense strand
gaauguggacgugguguua

SEQ ID NO: 1951921 - RNA, 19 nt, Homo sapiens
  misc_RNA (1)...(19): siRNA sense strand
uggcauaucugcucugaga

SEQ ID NO: 1951922 - RNA, 19 nt, Homo sapiens
  misc_RNA (1)...(19): siRNA sense strand
gaagaccuuaucuguauuu

SEQ ID NO: 1951923 - RNA, 19 nt, Homo sapiens
  misc_RNA (1)...(19): siRNA sense strand
gacaccagauucucaaguu

SEQ ID NO: 1951924 - RNA, 19 nt, Homo sapiens
  misc_RNA (1)...(19): siRNA sense strand
gaaggaacagucauggaaa

SEQ ID NO: 1951925 - RNA, 19 nt, Homo sapiens
  misc_RNA (1)...(19): siRNA sense strand
gaagaaauugaacgugauu

SEQ ID NO: 1951926 - RNA, 19 nt, Homo sapiens
  misc_RNA (1)...(19): siRNA sense strand
gauaaugacccaguccuuu

SEQ ID NO: 1951927 - RNA, 19 nt, Homo sapiens
  misc_RNA (1)...(19): siRNA sense strand
gaggauuaauugcugaaga

SEQ ID NO: 1951928 - RNA, 19 nt, Homo sapiens
  misc_RNA (1)...(19): siRNA sense strand
cuucagugcugcuucuaua

SEQ ID NO: 1951929 - RNA, 19 nt, Homo sapiens
  misc_RNA (1)...(19): siRNA sense strand
cgagaggucuuagcuauag

SEQ ID NO: 1951930 - RNA, 19 nt, Homo sapiens
  misc_RNA (1)...(19): siRNA sense strand
aagaugauccugagaaauu

SEQ ID NO: 1951931 - RNA, 19 nt, Homo sapiens
  misc_RNA (1)...(19): siRNA sense strand
augaagaccuuaucuguau

SEQ ID NO: 1951932 - RNA, 19 nt, Homo sapiens
  misc_RNA (1)...(19): siRNA sense strand
gacucgagaucuuguugua

SEQ ID NO: 1951933 - RNA, 19 nt, Homo sapiens
  misc_RNA (1)...(19): siRNA sense strand
gaacacugaagccuuaaug

SEQ ID NO: 1951934 - RNA, 19 nt, Homo sapiens
  misc_RNA (1)...(19): siRNA sense strand
caaaagaggucuggaaaau

SEQ ID NO: 1951935 - RNA, 19 nt, Homo sapiens
  misc_RNA (1)...(19): siRNA sense strand
gcaccaacuuucugagcuu

SEQ ID NO: 1951936 - RNA, 19 nt, Homo sapiens
  misc_RNA (1)...(19): siRNA sense strand
gaaguuagugaccuauuau

SEQ ID NO: 1951937 - RNA, 19 nt, Homo sapiens
  misc_RNA (1)...(19): siRNA sense strand
agaagaugauccugagaaa

SEQ ID NO: 1951938 - RNA, 19 nt, Homo sapiens
  misc_RNA (1)...(19): siRNA sense strand
caagauggcaaucagugua

SEQ ID NO: 1951939 - RNA, 19 nt, Homo sapiens
  misc_RNA (1)...(19): siRNA sense strand
gaacagcuggcaaacuaug

SEQ ID NO: 1951940 - RNA, 19 nt, Homo sapiens
  misc_RNA (1)...(19): siRNA sense strand
gcuauuaguucugagucua

SEQ ID NO: 1951941 - RNA, 19 nt, Homo sapiens
  misc_RNA (1)...(19): siRNA sense strand
uaagagggauuccagaaac

SEQ ID NO: 1951942 - RNA, 19 nt, Homo sapiens
  misc_RNA (1)...(19): siRNA sense strand
guaaaacugugaacacuga

SEQ ID NO: 1951943 - RNA, 19 nt, Homo sapiens
  misc_RNA (1)...(19): siRNA sense strand
uuucugagcuucuauucuu

SEQ ID NO: 1951944 - RNA, 19 nt, Homo sapiens
  misc_RNA (1)...(19): siRNA sense strand
guaagagggauuccagaaa

SEQ ID NO: 1951945 - RNA, 19 nt, Homo sapiens
  misc_RNA (1)...(19): siRNA sense strand
gagcagcuucaacucaaua

SEQ ID NO: 1951946 - RNA, 19 nt, Homo sapiens
  misc_RNA (1)...(19): siRNA sense strand
gaggugcaaucuuugacaa

SEQ ID NO: 1951947 - RNA, 19 nt, Homo sapiens
  misc_RNA (1)...(19): siRNA sense strand
ucagagugauacuggcaua

SEQ ID NO: 1951948 - RNA, 19 nt, Homo sapiens
  misc_RNA (1)...(19): siRNA sense strand
gcauugggauugguuggaa

SEQ ID NO: 1951949 - RNA, 19 nt, Homo sapiens
  misc_RNA (1)...(19): siRNA sense strand
caccagauucucaaguuua

SEQ ID NO: 1951950 - RNA, 19 nt, Homo sapiens
  misc_RNA (1)...(19): siRNA sense strand
ccauucagccacuucaaua

SEQ ID NO: 1951951 - RNA, 19 nt, Homo sapiens
  misc_RNA (1)...(19): siRNA sense strand
gagagaguuugaaagaagu

SEQ ID NO: 1951952 - RNA, 19 nt, Homo sapiens
  misc_RNA (1)...(19): siRNA sense strand
ggaaagguccaacgacuac

SEQ ID NO: 1951953 - RNA, 19 nt, Homo sapiens
  misc_RNA (1)...(19): siRNA sense strand
uacgagaggucuuagcuau

SEQ ID NO: 1951954 - RNA, 19 nt, Homo sapiens
  misc_RNA (1)...(19): siRNA sense strand
ucacguguguucccaagga

SEQ ID NO: 1951955 - RNA, 19 nt, Homo sapiens
  misc_RNA (1)...(19): siRNA sense strand
ggacgugguguuaguaugu

SEQ ID NO: 1951956 - RNA, 19 nt, Homo sapiens
  misc_RNA (1)...(19): siRNA sense strand
gaacagucauggaaaauac

SEQ ID NO: 1951957 - RNA, 19 nt, Homo sapiens
  misc_RNA (1)...(19): siRNA sense strand
acaaaugauuccagcaaau

SEQ ID NO: 1951958 - RNA, 19 nt, Homo sapiens
  misc_RNA (1)...(19): siRNA sense strand
auaaugacccaguccuuua

SEQ ID NO: 1951959 - RNA, 19 nt, Homo sapiens
  misc_RNA (1)...(19): siRNA sense strand
uugaacaacugguagcaaa

SEQ ID NO: 1951960 - RNA, 19 nt, Homo sapiens
  misc_RNA (1)...(19): siRNA sense strand
acucacagcuuaugcauac

SEQ ID NO: 1951961 - RNA, 19 nt, Homo sapiens
  misc_RNA (1)...(19): siRNA sense strand
gcacccagccuuucagagu

SEQ ID NO: 1951962 - RNA, 19 nt, Homo sapiens
  misc_RNA (1)...(19): siRNA sense strand
ugaaggaacagucauggaa

SEQ ID NO: 1951963 - RNA, 19 nt, Homo sapiens
  misc_RNA (1)...(19): siRNA sense strand
guauuucacccucagaauu

SEQ ID NO: 1951964 - RNA, 19 nt, Homo sapiens
  misc_RNA (1)...(19): siRNA sense strand
uaugaagaccuuaucugua

SEQ ID NO: 1951965 - RNA, 19 nt, Homo sapiens
  misc_RNA (1)...(19): siRNA sense strand
gguugggacucuugauuca

SEQ ID NO: 1951966 - RNA, 19 nt, Homo sapiens
  misc_RNA (1)...(19): siRNA sense strand
gcugaagccugaggaagug

SEQ ID NO: 1951967 - RNA, 19 nt, Homo sapiens
  misc_RNA (1)...(19): siRNA sense strand
ucaguguaguguaaucauu

SEQ ID NO: 1951968 - RNA, 19 nt, Homo sapiens
  misc_RNA (1)...(19): siRNA sense strand
gcacauuaaccaaacauac

SEQ ID NO: 1951969 - RNA, 19 nt, Homo sapiens
  misc_RNA (1)...(19): siRNA sense strand
aggagagaaucacuacuuu

SEQ ID NO: 1951970 - RNA, 19 nt, Homo sapiens
  misc_RNA (1)...(19): siRNA sense strand
caggguuggcuuuaucuua

SEQ ID NO: 1951971 - RNA, 19 nt, Homo sapiens
  misc_RNA (1)...(19): siRNA sense strand
acaccagauucucaaguuu

SEQ ID NO: 1951972 - RNA, 19 nt, Homo sapiens
  misc_RNA (1)...(19): siRNA sense strand
guuaguauguuucgaacca

SEQ ID NO: 1951973 - RNA, 19 nt, Homo sapiens
  misc_RNA (1)...(19): siRNA sense strand
caacagagaagaaauaacc

SEQ ID NO: 1951974 - RNA, 19 nt, Homo sapiens
  misc_RNA (1)...(19): siRNA sense strand
gagaaggagaaguuaguga

SEQ ID NO: 1951975 - RNA, 19 nt, Homo sapiens
  misc_RNA (1)...(19): siRNA sense strand
ugaagaaauugaacgugau

SEQ ID NO: 1951976 - RNA, 19 nt, Homo sapiens
  misc_RNA (1)...(19): siRNA sense strand
cggagcagcuucaacucaa

SEQ ID NO: 1951977 - RNA, 19 nt, Homo sapiens
  misc_RNA (1)...(19): siRNA sense strand
gagaaucacuacuuuucaa

SEQ ID NO: 1951978 - RNA, 19 nt, Homo sapiens
  misc_RNA (1)...(19): siRNA sense strand
ccugagaaauuucgagaag

SEQ ID NO: 1951979 - RNA, 19 nt, Homo sapiens
  misc_RNA (1)...(19): siRNA sense strand
aacgaauguugccugauua

SEQ ID NO: 1951980 - RNA, 19 nt, Homo sapiens
  misc_RNA (1)...(19): siRNA sense strand
gaaaauacuguuugcagaa

SEQ ID NO: 1951981 - RNA, 19 nt, Homo sapiens
  misc_RNA (1)...(19): siRNA sense strand
uauuucacccucagaauuu

SEQ ID NO: 1951982 - RNA, 19 nt, Homo sapiens
  misc_RNA (1)...(19): siRNA sense strand
ucauuagcaucaaaggaaa

SEQ ID NO: 1951983 - RNA, 19 nt, Homo sapiens
  misc_RNA (1)...(19): siRNA sense strand
cuucaauacucaugggaaa

SEQ ID NO: 1951984 - RNA, 19 nt, Homo sapiens
  misc_RNA (1)...(19): siRNA sense strand
aaagaggucuggaaaauag

SEQ ID NO: 1951985 - RNA, 19 nt, Homo sapiens
  misc_RNA (1)...(19): siRNA sense strand
caaacuaugccauuagaag

SEQ ID NO: 1951986 - RNA, 19 nt, Homo sapiens
  misc_RNA (1)...(19): siRNA sense strand
uaaccaaacauaccuucuu

SEQ ID NO: 1951987 - RNA, 19 nt, Homo sapiens
  misc_RNA (1)...(19): siRNA sense strand
guuagugaccuauuauuca

SEQ ID NO: 1951988 - RNA, 19 nt, Homo sapiens
  misc_RNA (1)...(19): siRNA sense strand
uaucuuagcaccaacuuuc

SEQ ID NO: 1951989 - RNA, 19 nt, Homo sapiens
  misc_RNA (1)...(19): siRNA sense strand
gcaacuuggcuacugaaga

SEQ ID NO: 1951990 - RNA, 19 nt, Homo sapiens
  misc_RNA (1)...(19): siRNA sense strand
ggagcagcuucaacucaau

SEQ ID NO: 1951991 - RNA, 19 nt, Homo sapiens
  misc_RNA (1)...(19): siRNA sense strand
aaacuaugccauuagaaga

SEQ ID NO: 1951992 - RNA, 19 nt, Homo sapiens
  misc_RNA (1)...(19): siRNA sense strand
gaagaugauccugagaaau

SEQ ID NO: 1951993 - RNA, 19 nt, Homo sapiens
  misc_RNA (1)...(19): siRNA sense strand
gaggagaacucuggaugcu

SEQ ID NO: 1951994 - RNA, 19 nt, Homo sapiens
  misc_RNA (1)...(19): siRNA sense strand
ggagacucuuaauucuaaa

SEQ ID NO: 1951995 - RNA, 19 nt, Homo sapiens
  misc_RNA (1)...(19): siRNA sense strand
aaggagagaguuugaaaga

SEQ ID NO: 1951996 - RNA, 19 nt, Homo sapiens
  misc_RNA (1)...(19): siRNA sense strand
cagcuucaacucaauauca

SEQ ID NO: 1951997 - RNA, 19 nt, Homo sapiens
  misc_RNA (1)...(19): siRNA sense strand
gaagaggaccauagaauuu

SEQ ID NO: 1951998 - RNA, 19 nt, Homo sapiens
  misc_RNA (1)...(19): siRNA sense strand
uagaagcacuccugcaaua

SEQ ID NO: 1951999 - RNA, 19 nt, Homo sapiens
  misc_RNA (1)...(19): siRNA sense strand
gaagagcucuguguaucaa

SEQ ID NO: 1952000 - RNA, 19 nt, Homo sapiens
  misc_RNA (1)...(19): siRNA sense strand
gaaugaauuuggaaucuuc

SEQ ID NO: 1952001 - RNA, 19 nt, Homo sapiens
  misc_RNA (1)...(19): siRNA sense strand
gaagugcaccgguuuagaa

SEQ ID NO: 1952002 - RNA, 19 nt, Homo sapiens
  misc_RNA (1)...(19): siRNA sense strand
gaagcaaacugcacauuuu

SEQ ID NO: 1952003 - RNA, 19 nt, Homo sapiens
  misc_RNA (1)...(19): siRNA sense strand
gaaacgugaugaugagguu

SEQ ID NO: 1952004 - RNA, 19 nt, Homo sapiens
  misc_RNA (1)...(19): siRNA sense strand
gagaauggaguauuugaaa

SEQ ID NO: 1952005 - RNA, 19 nt, Homo sapiens
  misc_RNA (1)...(19): siRNA sense strand
uuacauacccuuuaccuuu

SEQ ID NO: 1952006 - RNA, 19 nt, Homo sapiens
  misc_RNA (1)...(19): siRNA sense strand
ggacuuggaucaggaagga

SEQ ID NO: 1952007 - RNA, 19 nt, Homo sapiens
  misc_RNA (1)...(19): siRNA sense strand
ggaggcgccugcuuucauu

SEQ ID NO: 1952008 - RNA, 19 nt, Homo sapiens
  misc_RNA (1)...(19): siRNA sense strand
gaagcuccauugccuccua

SEQ ID NO: 1952009 - RNA, 19 nt, Homo sapiens
  misc_RNA (1)...(19): siRNA sense strand
gauagaagcauggaauuga

SEQ ID NO: 1952010 - RNA, 19 nt, Homo sapiens
  misc_RNA (1)...(19): siRNA sense strand
gaagcacuccugcaauauu

SEQ ID NO: 1952011 - RNA, 19 nt, Homo sapiens
  misc_RNA (1)...(19): siRNA sense strand
ucaugagaauggaguauuu

SEQ ID NO: 1952012 - RNA, 19 nt, Homo sapiens
  misc_RNA (1)...(19): siRNA sense strand
ggaaugaauuuggaaucuu

SEQ ID NO: 1952013 - RNA, 19 nt, Homo sapiens
  misc_RNA (1)...(19): siRNA sense strand
ggagagggucaacucguua

SEQ ID NO: 1952014 - RNA, 19 nt, Homo sapiens
  misc_RNA (1)...(19): siRNA sense strand
gagcuuagggugcugauug

SEQ ID NO: 1952015 - RNA, 19 nt, Homo sapiens
  misc_RNA (1)...(19): siRNA sense strand
uaucagaguuagaaacaga

SEQ ID NO: 1952016 - RNA, 19 nt, Homo sapiens
  misc_RNA (1)...(19): siRNA sense strand
gcaaaagucuaucagaguu

SEQ ID NO: 1952017 - RNA, 19 nt, Homo sapiens
  misc_RNA (1)...(19): siRNA sense strand
gcagauagaagcauggaau

SEQ ID NO: 1952018 - RNA, 19 nt, Homo sapiens
  misc_RNA (1)...(19): siRNA sense strand
agggaaacguuacuucuuu

SEQ ID NO: 1952019 - RNA, 19 nt, Homo sapiens
  misc_RNA (1)...(19): siRNA sense strand
gacaaacagggaaacguua

SEQ ID NO: 1952020 - RNA, 19 nt, Homo sapiens
  misc_RNA (1)...(19): siRNA sense strand
gauugaccaugcagaagaa

SEQ ID NO: 1952021 - RNA, 19 nt, Homo sapiens
  misc_RNA (1)...(19): siRNA sense strand
uagaagagcucuguguauc

SEQ ID NO: 1952022 - RNA, 19 nt, Homo sapiens
  misc_RNA (1)...(19): siRNA sense strand
gaggaagaguugcuagaag

SEQ ID NO: 1952023 - RNA, 19 nt, Homo sapiens
  misc_RNA (1)...(19): siRNA sense strand
ugaagaggaccauagaauu

SEQ ID NO: 1952024 - RNA, 19 nt, Homo sapiens
  misc_RNA (1)...(19): siRNA sense strand
guuuagagcuauagaagca

SEQ ID NO: 1952025 - RNA, 19 nt, Homo sapiens
  misc_RNA (1)...(19): siRNA sense strand
gcugauugaugauucacaa

SEQ ID NO: 1952026 - RNA, 19 nt, Homo sapiens
  misc_RNA (1)...(19): siRNA sense strand
gcuagaagagcucugugua

SEQ ID NO: 1952027 - RNA, 19 nt, Homo sapiens
  misc_RNA (1)...(19): siRNA sense strand
ggaaugccugcgcaguuua

SEQ ID NO: 1952028 - RNA, 19 nt, Homo sapiens
  misc_RNA (1)...(19): siRNA sense strand
uuagggugcugauugauga

SEQ ID NO: 1952029 - RNA, 19 nt, Homo sapiens
  misc_RNA (1)...(19): siRNA sense strand
gucagaaacaauaggauua

SEQ ID NO: 1952030 - RNA, 19 nt, Homo sapiens
  misc_RNA (1)...(19): siRNA sense strand
agggucaacucguuacaua

SEQ ID NO: 1952031 - RNA, 19 nt, Homo sapiens
  misc_RNA (1)...(19): siRNA sense strand
agccagagauuugagauuu

SEQ ID NO: 1952032 - RNA, 19 nt, Homo sapiens
  misc_RNA (1)...(19): siRNA sense strand
ggauugaccaugcagaaga

SEQ ID NO: 1952033 - RNA, 19 nt, Homo sapiens
  misc_RNA (1)...(19): siRNA sense strand
aggaagaguugcuagaaga

SEQ ID NO: 1952034 - RNA, 19 nt, Homo sapiens
  misc_RNA (1)...(19): siRNA sense strand
guaaugaguaucacaguca

SEQ ID NO: 1952035 - RNA, 19 nt, Homo sapiens
  misc_RNA (1)...(19): siRNA sense strand
ccagagauuugagauuuca

SEQ ID NO: 1952036 - RNA, 19 nt, Homo sapiens
  misc_RNA (1)...(19): siRNA sense strand
aagcacuccugcaauauug

SEQ ID NO: 1952037 - RNA, 19 nt, Homo sapiens
  misc_RNA (1)...(19): siRNA sense strand
caauaggauuaucaugaga

SEQ ID NO: 1952038 - RNA, 19 nt, Homo sapiens
  misc_RNA (1)...(19): siRNA sense strand
gauugaugauucacaaagu

SEQ ID NO: 1952039 - RNA, 19 nt, Homo sapiens
  misc_RNA (1)...(19): siRNA sense strand
acaauaggauuaucaugag

SEQ ID NO: 1952040 - RNA, 19 nt, Homo sapiens
  misc_RNA (1)...(19): siRNA sense strand
agaagcaaacugcacauuu

SEQ ID NO: 1952041 - RNA, 19 nt, Homo sapiens
  misc_RNA (1)...(19): siRNA sense strand
augggaaccuucucucuuu

SEQ ID NO: 1952042 - RNA, 19 nt, Homo sapiens
  misc_RNA (1)...(19): siRNA sense strand
ugacaaacagggaaacguu

SEQ ID NO: 1952043 - RNA, 19 nt, Homo sapiens
  misc_RNA (1)...(19): siRNA sense strand
caaacauucuucuguagac

SEQ ID NO: 1952044 - RNA, 19 nt, Homo sapiens
  misc_RNA (1)...(19): siRNA sense strand
cagaagaaauggaguugcu

SEQ ID NO: 1952045 - RNA, 19 nt, Homo sapiens
  misc_RNA (1)...(19): siRNA sense strand
auagaagcauggaauugaa

SEQ ID NO: 1952046 - RNA, 19 nt, Homo sapiens
  misc_RNA (1)...(19): siRNA sense strand
guauuugaaagcugugaua

SEQ ID NO: 1952047 - RNA, 19 nt, Homo sapiens
  misc_RNA (1)...(19): siRNA sense strand
ggaaaacuacuaccgauug

SEQ ID NO: 1952048 - RNA, 19 nt, Homo sapiens
  misc_RNA (1)...(19): siRNA sense strand
aaauggaguugcuguugga

SEQ ID NO: 1952049 - RNA, 19 nt, Homo sapiens
  misc_RNA (1)...(19): siRNA sense strand
agagugucuucugauauua

SEQ ID NO: 1952050 - RNA, 19 nt, Homo sapiens
  misc_RNA (1)...(19): siRNA sense strand
uaugauggcuucuuuaccu

SEQ ID NO: 1952051 - RNA, 19 nt, Homo sapiens
  misc_RNA (1)...(19): siRNA sense strand
gagugacccacaagucuuu

SEQ ID NO: 1952052 - RNA, 19 nt, Homo sapiens
  misc_RNA (1)...(19): siRNA sense strand
uauagaagcacuccugcaa

SEQ ID NO: 1952053 - RNA, 19 nt, Homo sapiens
  misc_RNA (1)...(19): siRNA sense strand
caccgaaacgugaugauga

SEQ ID NO: 1952054 - RNA, 19 nt, Homo sapiens
  misc_RNA (1)...(19): siRNA sense strand
ggagugacccacaagucuu

SEQ ID NO: 1952055 - RNA, 19 nt, Homo sapiens
  misc_RNA (1)...(19): siRNA sense strand
cagcauguaaugaguauca

SEQ ID NO: 1952056 - RNA, 19 nt, Homo sapiens
  misc_RNA (1)...(19): siRNA sense strand
gaaccucugacgucucuca

SEQ ID NO: 1952057 - RNA, 19 nt, Homo sapiens
  misc_RNA (1)...(19): siRNA sense strand
uggagagggucaacucguu

SEQ ID NO: 1952058 - RNA, 19 nt, Homo sapiens
  misc_RNA (1)...(19): siRNA sense strand
gccagagauuugagauuuc

SEQ ID NO: 1952059 - RNA, 19 nt, Homo sapiens
  misc_RNA (1)...(19): siRNA sense strand
cagacuggauggacuugga

SEQ ID NO: 1952060 - RNA, 19 nt, Homo sapiens
  misc_RNA (1)...(19): siRNA sense strand
uagaaccucugacgucucu

SEQ ID NO: 1952061 - RNA, 19 nt, Homo sapiens
  misc_RNA (1)...(19): siRNA sense strand
ggagaucuuggaugaggaa

SEQ ID NO: 1952062 - RNA, 19 nt, Homo sapiens
  misc_RNA (1)...(19): siRNA sense strand
ccaaacauucuucuguaga

SEQ ID NO: 1952063 - RNA, 19 nt, Homo sapiens
  misc_RNA (1)...(19): siRNA sense strand
caugggaaguggccucauc

SEQ ID NO: 1952064 - RNA, 19 nt, Homo sapiens
  misc_RNA (1)...(19): siRNA sense strand
gagauuucagcauguaaug

SEQ ID NO: 1952065 - RNA, 19 nt, Homo sapiens
  misc_RNA (1)...(19): siRNA sense strand
gggaaacguuacuucuuuu

SEQ ID NO: 1952066 - RNA, 19 nt, Homo sapiens
  misc_RNA (1)...(19): siRNA sense strand
ggacuaaugggaguugcuu

SEQ ID NO: 1952067 - RNA, 19 nt, Homo sapiens
  misc_RNA (1)...(19): siRNA sense strand
agaauggaguauuugaaag

SEQ ID NO: 1952068 - RNA, 19 nt, Homo sapiens
  misc_RNA (1)...(19): siRNA sense strand
uccauugccuccuaugaug

SEQ ID NO: 1952069 - RNA, 19 nt, Homo sapiens
  misc_RNA (1)...(19): siRNA sense strand
cuagaagagcucuguguau

SEQ ID NO: 1952070 - RNA, 19 nt, Homo sapiens
  misc_RNA (1)...(19): siRNA sense strand
uuugaaagcugugauaacu

SEQ ID NO: 1952071 - RNA, 19 nt, Homo sapiens
  misc_RNA (1)...(19): siRNA sense strand
ggucuucaagccagagauu

SEQ ID NO: 1952072 - RNA, 19 nt, Homo sapiens
  misc_RNA (1)...(19): siRNA sense strand
gaauggaguauuugaaagc

SEQ ID NO: 1952073 - RNA, 19 nt, Homo sapiens
  misc_RNA (1)...(19): siRNA sense strand
cagaaacaauaggauuauc

SEQ ID NO: 1952074 - RNA, 19 nt, Homo sapiens
  misc_RNA (1)...(19): siRNA sense strand
cagauagaagcauggaauu

SEQ ID NO: 1952075 - RNA, 19 nt, Homo sapiens
  misc_RNA (1)...(19): siRNA sense strand
gauuacaggaauuauguuc

SEQ ID NO: 1952076 - RNA, 19 nt, Homo sapiens
  misc_RNA (1)...(19): siRNA sense strand
gggaguugcuuuuggaaug

SEQ ID NO: 1952077 - RNA, 19 nt, Homo sapiens
  misc_RNA (1)...(19): siRNA sense strand
ccgauuggcugacgaucuc

SEQ ID NO: 1952078 - RNA, 19 nt, Homo sapiens
  misc_RNA (1)...(19): siRNA sense strand
gaguuuagagcuauagaag

SEQ ID NO: 1952079 - RNA, 19 nt, Homo sapiens
  misc_RNA (1)...(19): siRNA sense strand
cuccuaugauggcuucuuu

SEQ ID NO: 1952080 - RNA, 19 nt, Homo sapiens
  misc_RNA (1)...(19): siRNA sense strand
ugaggaagaguugcuagaa

SEQ ID NO: 1952081 - RNA, 19 nt, Homo sapiens
  misc_RNA (1)...(19): siRNA sense strand
gcugauuacaggaauuaug

SEQ ID NO: 1952082 - RNA, 19 nt, Homo sapiens
  misc_RNA (1)...(19): siRNA sense strand
augaugagguugaaucuac

SEQ ID NO: 1952083 - RNA, 19 nt, Homo sapiens
  misc_RNA (1)...(19): siRNA sense strand
gaugaugagguugaaucua

SEQ ID NO: 1952084 - RNA, 19 nt, Homo sapiens
  misc_RNA (1)...(19): siRNA sense strand
gaaaacuacuaccgauugg

SEQ ID NO: 1952085 - RNA, 19 nt, Homo sapiens
  misc_RNA (1)...(19): siRNA sense strand
agaaauggaguugcuguug

SEQ ID NO: 1952086 - RNA, 19 nt, Homo sapiens
  misc_RNA (1)...(19): siRNA sense strand
caguguagccccaguauuu

SEQ ID NO: 1952087 - RNA, 19 nt, Homo sapiens
  misc_RNA (1)...(19): siRNA sense strand
uggaaugaauuuggaaucu

SEQ ID NO: 1952088 - RNA, 19 nt, Homo sapiens
  misc_RNA (1)...(19): siRNA sense strand
ugaccaugcagaagaaaug

SEQ ID NO: 1952089 - RNA, 19 nt, Homo sapiens
  misc_RNA (1)...(19): siRNA sense strand
ugagaauggaguauuugaa

SEQ ID NO: 1952090 - RNA, 19 nt, Homo sapiens
  misc_RNA (1)...(19): siRNA sense strand
uagaagcauggaauugaaa

SEQ ID NO: 1952091 - RNA, 19 nt, Homo sapiens
  misc_RNA (1)...(19): siRNA sense strand
ggaguugcuuuuggaauga

SEQ ID NO: 1952092 - RNA, 19 nt, Homo sapiens
  misc_RNA (1)...(19): siRNA sense strand
ggugcugauugaugauuca

SEQ ID NO: 1952093 - RNA, 19 nt, Homo sapiens
  misc_RNA (1)...(19): siRNA sense strand
cagggaaacguuacuucuu

SEQ ID NO: 1952094 - RNA, 19 nt, Homo sapiens
  misc_RNA (1)...(19): siRNA sense strand
cccaaacauucuucuguag

SEQ ID NO: 1952095 - RNA, 19 nt, Homo sapiens
  misc_RNA (1)...(19): siRNA sense strand
ggauuaucaugagaaugga

SEQ ID NO: 1952096 - RNA, 19 nt, Homo sapiens
  misc_RNA (1)...(19): siRNA sense strand
cuugagaccuuggaugcuu

SEQ ID NO: 1952097 - RNA, 19 nt, Homo sapiens
  misc_RNA (1)...(19): siRNA sense strand
gaugggacuuggacuuaga

SEQ ID NO: 1952098 - RNA, 19 nt, Homo sapiens
  misc_RNA (1)...(19): siRNA sense strand
ggacuuggacuuagaagca

SEQ ID NO: 1952099 - RNA, 19 nt, Homo sapiens
  misc_RNA (1)...(19): siRNA sense strand
gggaugggacuuggacuua

SEQ ID NO: 1952100 - RNA, 19 nt, Homo sapiens
  misc_RNA (1)...(19): siRNA sense strand
cugcugcugucucaguuua

SEQ ID NO: 1952101 - RNA, 19 nt, Homo sapiens
  misc_RNA (1)...(19): siRNA sense strand
cagguggccucacuuguca

SEQ ID NO: 1952102 - RNA, 19 nt, Homo sapiens
  misc_RNA (1)...(19): siRNA sense strand
caguuuaccugggcaguug

SEQ ID NO: 1952103 - RNA, 19 nt, Homo sapiens
  misc_RNA (1)...(19): siRNA sense strand
ggaugggacuuggacuuag

SEQ ID NO: 1952104 - RNA, 19 nt, Homo sapiens
  misc_RNA (1)...(19): siRNA sense strand
ccucacuugucaucucaaa

SEQ ID NO: 1952105 - RNA, 19 nt, Homo sapiens
  misc_RNA (1)...(19): siRNA sense strand
ggccucacuugucaucuca

SEQ ID NO: 1952106 - RNA, 19 nt, Homo sapiens
  misc_RNA (1)...(19): siRNA sense strand
ccagguggccucacuuguc

SEQ ID NO: 1952107 - RNA, 19 nt, Homo sapiens
  misc_RNA (1)...(19): siRNA sense strand
ccagagaccucccugauga

SEQ ID NO: 1952108 - RNA, 19 nt, Homo sapiens
  misc_RNA (1)...(19): siRNA sense strand
ucaacuggcugggcaauuu

SEQ ID NO: 1952109 - RNA, 19 nt, Homo sapiens
  misc_RNA (1)...(19): siRNA sense strand
guacucaucuuuuaccuaa

SEQ ID NO: 1952110 - RNA, 19 nt, Homo sapiens
  misc_RNA (1)...(19): siRNA sense strand
gcagauaauugggaacugu

SEQ ID NO: 1952111 - RNA, 19 nt, Homo sapiens
  misc_RNA (1)...(19): siRNA sense strand
gggaaccuguggaugauga

SEQ ID NO: 1952112 - RNA, 19 nt, Homo sapiens
  misc_RNA (1)...(19): siRNA sense strand
gcauauuucuucacugagu

SEQ ID NO: 1952113 - RNA, 19 nt, Homo sapiens
  misc_RNA (1)...(19): siRNA sense strand
gcucagcacuuccugucuu

SEQ ID NO: 1952114 - RNA, 19 nt, Homo sapiens
  misc_RNA (1)...(19): siRNA sense strand
gcugggcaauuucuacauu

SEQ ID NO: 1952115 - RNA, 19 nt, Homo sapiens
  misc_RNA (1)...(19): siRNA sense strand
cuaaugguguccucaguug

SEQ ID NO: 1952116 - RNA, 19 nt, Homo sapiens
  misc_RNA (1)...(19): siRNA sense strand
uugcauauuucuucacuga

SEQ ID NO: 1952117 - RNA, 19 nt, Homo sapiens
  misc_RNA (1)...(19): siRNA sense strand
cuauagcucuccacucuuc

SEQ ID NO: 1952118 - RNA, 19 nt, Homo sapiens
  misc_RNA (1)...(19): siRNA sense strand
guccuaagcucagcacuuc

SEQ ID NO: 1952119 - RNA, 19 nt, Homo sapiens
  misc_RNA (1)...(19): siRNA sense strand
gaagacccagcaccaguga

SEQ ID NO: 1952120 - RNA, 19 nt, Homo sapiens
  misc_RNA (1)...(19): siRNA sense strand
caaccugucccucaucuuc

SEQ ID NO: 1952121 - RNA, 19 nt, Homo sapiens
  misc_RNA (1)...(19): siRNA sense strand
caugcaggguaccuccuua

SEQ ID NO: 1952122 - RNA, 19 nt, Homo sapiens
  misc_RNA (1)...(19): siRNA sense strand
gggccugucugugcucauu

SEQ ID NO: 1952123 - RNA, 19 nt, Homo sapiens
  misc_RNA (1)...(19): siRNA sense strand
caagaacaaggccaacaga

SEQ ID NO: 1952124 - RNA, 19 nt, Homo sapiens
  misc_RNA (1)...(19): siRNA sense strand
ugugucaucuccucuccua

SEQ ID NO: 1952125 - RNA, 19 nt, Homo sapiens
  misc_RNA (1)...(19): siRNA sense strand
gaagaugccaccgucaaca

SEQ ID NO: 1952126 - RNA, 19 nt, Homo sapiens
  misc_RNA (1)...(19): siRNA sense strand
gccaugacgcagauaauug

SEQ ID NO: 1952127 - RNA, 19 nt, Homo sapiens
  misc_RNA (1)...(19): siRNA sense strand
agacaguggugacguugau

SEQ ID NO: 1952128 - RNA, 19 nt, Homo sapiens
  misc_RNA (1)...(19): siRNA sense strand
gaccagagaccucccugau

SEQ ID NO: 1952129 - RNA, 19 nt, Homo sapiens
  misc_RNA (1)...(19): siRNA sense strand
gcucaacggcucccucauc

SEQ ID NO: 1952130 - RNA, 19 nt, Homo sapiens
  misc_RNA (1)...(19): siRNA sense strand
guugugggcuucuauagcu

SEQ ID NO: 1952131 - RNA, 19 nt, Homo sapiens
  misc_RNA (1)...(19): siRNA sense strand
agaacaaggccaacagaga

SEQ ID NO: 1952132 - RNA, 19 nt, Homo sapiens
  misc_RNA (1)...(19): siRNA sense strand
ccugcuggcugccuuuaga

SEQ ID NO: 1952133 - RNA, 19 nt, Homo sapiens
  misc_RNA (1)...(19): siRNA sense strand
caacggcucccucauccau

SEQ ID NO: 1952134 - RNA, 19 nt, Homo sapiens
  misc_RNA (1)...(19): siRNA sense strand
cugggaagcugcuagucaa

SEQ ID NO: 1952135 - RNA, 19 nt, Homo sapiens
  misc_RNA (1)...(19): siRNA sense strand
gguccuggcucugcagaca

SEQ ID NO: 1952136 - RNA, 19 nt, Homo sapiens
  misc_RNA (1)...(19): siRNA sense strand
cucgagcugugcaccuuua

SEQ ID NO: 1952137 - RNA, 19 nt, Homo sapiens
  misc_RNA (1)...(19): siRNA sense strand
agaggguccugcuggagaa

SEQ ID NO: 1952138 - RNA, 19 nt, Homo sapiens
  misc_RNA (1)...(19): siRNA sense strand
cuuccugucuucucucgaa

SEQ ID NO: 1952139 - RNA, 19 nt, Homo sapiens
  misc_RNA (1)...(19): siRNA sense strand
ccacagccaggaccagaga

SEQ ID NO: 1952140 - RNA, 19 nt, Homo sapiens
  misc_RNA (1)...(19): siRNA sense strand
gcaacugcuggaugaaugu

SEQ ID NO: 1952141 - RNA, 19 nt, Homo sapiens
  misc_RNA (1)...(19): siRNA sense strand
ucaguugugggcuucuaua

SEQ ID NO: 1952142 - RNA, 19 nt, Homo sapiens
  misc_RNA (1)...(19): siRNA sense strand
cuacaacgcagccuuugca

SEQ ID NO: 1952143 - RNA, 19 nt, Homo sapiens
  misc_RNA (1)...(19): siRNA sense strand
gcccuuugcauauuucuuc

SEQ ID NO: 1952144 - RNA, 19 nt, Homo sapiens
  misc_RNA (1)...(19): siRNA sense strand
gaugccaccgucaacaaga

SEQ ID NO: 1952145 - RNA, 19 nt, Homo sapiens
  misc_RNA (1)...(19): siRNA sense strand
ucuccaagcugggcuccuu

SEQ ID NO: 1952146 - RNA, 19 nt, Homo sapiens
  misc_RNA (1)...(19): siRNA sense strand
caacuggcugggcaauuuc

SEQ ID NO: 1952147 - RNA, 19 nt, Homo sapiens
  misc_RNA (1)...(19): siRNA sense strand
gguccuaagcucagcacuu

SEQ ID NO: 1952148 - RNA, 19 nt, Homo sapiens
  misc_RNA (1)...(19): siRNA sense strand
gaaccugaagugagcaacu

SEQ ID NO: 1952149 - RNA, 19 nt, Homo sapiens
  misc_RNA (1)...(19): siRNA sense strand
ccucuacaacgcagccuuu

SEQ ID NO: 1952150 - RNA, 19 nt, Homo sapiens
  misc_RNA (1)...(19): siRNA sense strand
gagacaguggugacguuga

SEQ ID NO: 1952151 - RNA, 19 nt, Homo sapiens
  misc_RNA (1)...(19): siRNA sense strand
ucauucagguuguacucau

SEQ ID NO: 1952152 - RNA, 19 nt, Homo sapiens
  misc_RNA (1)...(19): siRNA sense strand
cuccugcccuucuccauca

SEQ ID NO: 1952153 - RNA, 19 nt, Homo sapiens
  misc_RNA (1)...(19): siRNA sense strand
uucuauagcucuccacucu

SEQ ID NO: 1952154 - RNA, 19 nt, Homo sapiens
  misc_RNA (1)...(19): siRNA sense strand
gacauggagcugcuacaca

SEQ ID NO: 1952155 - RNA, 19 nt, Homo sapiens
  misc_RNA (1)...(19): siRNA sense strand
gacaagaacaaggccaaca

SEQ ID NO: 1952156 - RNA, 19 nt, Homo sapiens
  misc_RNA (1)...(19): siRNA sense strand
uacauuguguuccucuaca

SEQ ID NO: 1952157 - RNA, 19 nt, Homo sapiens
  misc_RNA (1)...(19): siRNA sense strand
ccaugacgcagauaauugg

SEQ ID NO: 1952158 - RNA, 19 nt, Homo sapiens
  misc_RNA (1)...(19): siRNA sense strand
ccucaguugugggcuucua

SEQ ID NO: 1952159 - RNA, 19 nt, Homo sapiens
  misc_RNA (1)...(19): siRNA sense strand
ucagguuguacucaucuuu

SEQ ID NO: 1952160 - RNA, 19 nt, Homo sapiens
  misc_RNA (1)...(19): siRNA sense strand
uggaggagcagcuguacug

SEQ ID NO: 1952161 - RNA, 19 nt, Homo sapiens
  misc_RNA (1)...(19): siRNA sense strand
ccaggacguugaccagaua

SEQ ID NO: 1952162 - RNA, 19 nt, Homo sapiens
  misc_RNA (1)...(19): siRNA sense strand
auaaacagcuggccaagga

SEQ ID NO: 1952163 - RNA, 19 nt, Homo sapiens
  misc_RNA (1)...(19): siRNA sense strand
ggaaucauccuccagaaca

SEQ ID NO: 1952164 - RNA, 19 nt, Homo sapiens
  misc_RNA (1)...(19): siRNA sense strand
cagcggagaugguaaugau

SEQ ID NO: 1952165 - RNA, 19 nt, Homo sapiens
  misc_RNA (1)...(19): siRNA sense strand
gaaucauccuccagaacaa

SEQ ID NO: 1952166 - RNA, 19 nt, Homo sapiens
  misc_RNA (1)...(19): siRNA sense strand
caaaguggacgaggaguuu

SEQ ID NO: 1952167 - RNA, 19 nt, Homo sapiens
  misc_RNA (1)...(19): siRNA sense strand
ccuccgggcugcaguauga

SEQ ID NO: 1952168 - RNA, 19 nt, Homo sapiens
  misc_RNA (1)...(19): siRNA sense strand
aggccaugcucaauaaaua

SEQ ID NO: 1952169 - RNA, 19 nt, Homo sapiens
  misc_RNA (1)...(19): siRNA sense strand
guaaugaucgaccgaaugu

SEQ ID NO: 1952170 - RNA, 19 nt, Homo sapiens
  misc_RNA (1)...(19): siRNA sense strand
ccacggccauccucacuca

SEQ ID NO: 1952171 - RNA, 19 nt, Homo sapiens
  misc_RNA (1)...(19): siRNA sense strand
cccaggccaugcucaauaa

SEQ ID NO: 1952172 - RNA, 19 nt, Homo sapiens
  misc_RNA (1)...(19): siRNA sense strand
gcaucgggcucaagcucaa

SEQ ID NO: 1952173 - RNA, 19 nt, Homo sapiens
  misc_RNA (1)...(19): siRNA sense strand
ccuguuuccuggagcauuu

SEQ ID NO: 1952174 - RNA, 19 nt, Homo sapiens
  misc_RNA (1)...(19): siRNA sense strand
caaacugaguggccugaag

SEQ ID NO: 1952175 - RNA, 19 nt, Homo sapiens
  misc_RNA (1)...(19): siRNA sense strand
ucagcaaggucgugcacaa

SEQ ID NO: 1952176 - RNA, 19 nt, Homo sapiens
  misc_RNA (1)...(19): siRNA sense strand
aggagaagccggacgagua

SEQ ID NO: 1952177 - RNA, 19 nt, Homo sapiens
  misc_RNA (1)...(19): siRNA sense strand
ggcucaagcucaagaucaa

SEQ ID NO: 1952178 - RNA, 19 nt, Homo sapiens
  misc_RNA (1)...(19): siRNA sense strand
gcccugagcaaacccauga

SEQ ID NO: 1952179 - RNA, 19 nt, Homo sapiens
  misc_RNA (1)...(19): siRNA sense strand
gccaggacguugaccagau

SEQ ID NO: 1952180 - RNA, 19 nt, Homo sapiens
  misc_RNA (1)...(19): siRNA sense strand
ggagaagccggacgaguac

SEQ ID NO: 1952181 - RNA, 19 nt, Homo sapiens
  misc_RNA (1)...(19): siRNA sense strand
aagcgaacgucuucaagca

SEQ ID NO: 1952182 - RNA, 19 nt, Homo sapiens
  misc_RNA (1)...(19): siRNA sense strand
aaacugaguggccugaaga

SEQ ID NO: 1952183 - RNA, 19 nt, Homo sapiens
  misc_RNA (1)...(19): siRNA sense strand
ucaacaaggcccugagugu

SEQ ID NO: 1952184 - RNA, 19 nt, Homo sapiens
  misc_RNA (1)...(19): siRNA sense strand
gguaaugaucgaccgaaug

SEQ ID NO: 1952185 - RNA, 19 nt, Homo sapiens
  misc_RNA (1)...(19): siRNA sense strand
agaccacccuugccuugga

SEQ ID NO: 1952186 - RNA, 19 nt, Homo sapiens
  misc_RNA (1)...(19): siRNA sense strand
cccaggacguggucaacaa

SEQ ID NO: 1952187 - RNA, 19 nt, Homo sapiens
  misc_RNA (1)...(19): siRNA sense strand
gggcucaagcucaagauca

SEQ ID NO: 1952188 - RNA, 19 nt, Homo sapiens
  misc_RNA (1)...(19): siRNA sense strand
gcaagcgaacgucuucaag

SEQ ID NO: 1952189 - RNA, 19 nt, Homo sapiens
  misc_RNA (1)...(19): siRNA sense strand
gcaaggucgugcacaacac

SEQ ID NO: 1952190 - RNA, 19 nt, Homo sapiens
  misc_RNA (1)...(19): siRNA sense strand
gcacccaggccaugcucaa

SEQ ID NO: 1952191 - RNA, 19 nt, Homo sapiens
  misc_RNA (1)...(19): siRNA sense strand
ccagcaaggaagccuguuu

SEQ ID NO: 1952192 - RNA, 19 nt, Homo sapiens
  misc_RNA (1)...(19): siRNA sense strand
uccaaggccugcccaaugg

SEQ ID NO: 1952193 - RNA, 19 nt, Homo sapiens
  misc_RNA (1)...(19): siRNA sense strand
ggccaugcucaauaaauau

SEQ ID NO: 1952194 - RNA, 19 nt, Homo sapiens
  misc_RNA (1)...(19): siRNA sense strand
uggcaucuuugucauccaa

SEQ ID NO: 1952195 - RNA, 19 nt, Homo sapiens
  misc_RNA (1)...(19): siRNA sense strand
ucaaugggaacucuguguu

SEQ ID NO: 1952196 - RNA, 19 nt, Homo sapiens
  misc_RNA (1)...(19): siRNA sense strand
aaugaucgaccgaauguuc

SEQ ID NO: 1952197 - RNA, 19 nt, Homo sapiens
  misc_RNA (1)...(19): siRNA sense strand
cagcaaggaagccuguuuc

SEQ ID NO: 1952198 - RNA, 19 nt, Homo sapiens
  misc_RNA (1)...(19): siRNA sense strand
ccggaaucauccuccagaa

SEQ ID NO: 1952199 - RNA, 19 nt, Homo sapiens
  misc_RNA (1)...(19): siRNA sense strand
gaccacccuugccuuggau

SEQ ID NO: 1952200 - RNA, 19 nt, Homo sapiens
  misc_RNA (1)...(19): siRNA sense strand
ccucagagccacccuugca

SEQ ID NO: 1952201 - RNA, 19 nt, Homo sapiens
  misc_RNA (1)...(19): siRNA sense strand
cgacuuccagcuccaguuc

SEQ ID NO: 1952202 - RNA, 19 nt, Homo sapiens
  misc_RNA (1)...(19): siRNA sense strand
gcugcaagcgaacgucuuc

SEQ ID NO: 1952203 - RNA, 19 nt, Homo sapiens
  misc_RNA (1)...(19): siRNA sense strand
gcugcaguaugagagcaaa

SEQ ID NO: 1952204 - RNA, 19 nt, Homo sapiens
  misc_RNA (1)...(19): siRNA sense strand
aggacucccugcagauguu

SEQ ID NO: 1952205 - RNA, 19 nt, Homo sapiens
  misc_RNA (1)...(19): siRNA sense strand
cuccacaccugcccaccaa

SEQ ID NO: 1952206 - RNA, 19 nt, Homo sapiens
  misc_RNA (1)...(19): siRNA sense strand
cgucuagcccggagaagau

SEQ ID NO: 1952207 - RNA, 19 nt, Homo sapiens
  misc_RNA (1)...(19): siRNA sense strand
acccaggccaugcucaaua

SEQ ID NO: 1952208 - RNA, 19 nt, Homo sapiens
  misc_RNA (1)...(19): siRNA sense strand
acaaaguggacgaggaguu

SEQ ID NO: 1952209 - RNA, 19 nt, Homo sapiens
  misc_RNA (1)...(19): siRNA sense strand
caggugccguccggaauca

SEQ ID NO: 1952210 - RNA, 19 nt, Homo sapiens
  misc_RNA (1)...(19): siRNA sense strand
gaaugugugugguucauaa

SEQ ID NO: 1952211 - RNA, 19 nt, Homo sapiens
  misc_RNA (1)...(19): siRNA sense strand
caacgaaguuauuccauca

SEQ ID NO: 1952212 - RNA, 19 nt, Homo sapiens
  misc_RNA (1)...(19): siRNA sense strand
ggugagauauccauguauu

SEQ ID NO: 1952213 - RNA, 19 nt, Homo sapiens
  misc_RNA (1)...(19): siRNA sense strand
ggaaacaacacucaacgaa

SEQ ID NO: 1952214 - RNA, 19 nt, Homo sapiens
  misc_RNA (1)...(19): siRNA sense strand
aaacaacacucaacgaagu

SEQ ID NO: 1952215 - RNA, 19 nt, Homo sapiens
  misc_RNA (1)...(19): siRNA sense strand
gcacuuaacgccauacuuc

SEQ ID NO: 1952216 - RNA, 19 nt, Homo sapiens
  misc_RNA (1)...(19): siRNA sense strand
gagacuuaaugaagccuua

SEQ ID NO: 1952217 - RNA, 19 nt, Homo sapiens
  misc_RNA (1)...(19): siRNA sense strand
ggacggagacuuaaugaag

SEQ ID NO: 1952218 - RNA, 19 nt, Homo sapiens
  misc_RNA (1)...(19): siRNA sense strand
gagcauuuacuccgccuua

SEQ ID NO: 1952219 - RNA, 19 nt, Homo sapiens
  misc_RNA (1)...(19): siRNA sense strand
gcauuuacuccgccuuaua

SEQ ID NO: 1952220 - RNA, 19 nt, Homo sapiens
  misc_RNA (1)...(19): siRNA sense strand
ggacagaggaagaaagcuu

SEQ ID NO: 1952221 - RNA, 19 nt, Homo sapiens
  misc_RNA (1)...(19): siRNA sense strand
gauagaaagcccucuggaa

SEQ ID NO: 1952222 - RNA, 19 nt, Homo sapiens
  misc_RNA (1)...(19): siRNA sense strand
gcgcaccaccaguuuauaa

SEQ ID NO: 1952223 - RNA, 19 nt, Homo sapiens
  misc_RNA (1)...(19): siRNA sense strand
cgaaggaucauaagauuca

SEQ ID NO: 1952224 - RNA, 19 nt, Homo sapiens
  misc_RNA (1)...(19): siRNA sense strand
ggacgugauugcugguuuc

SEQ ID NO: 1952225 - RNA, 19 nt, Homo sapiens
  misc_RNA (1)...(19): siRNA sense strand
caagcacaaucaagacgaa

SEQ ID NO: 1952226 - RNA, 19 nt, Homo sapiens
  misc_RNA (1)...(19): siRNA sense strand
auagaaagcccucuggaaa

SEQ ID NO: 1952227 - RNA, 19 nt, Homo sapiens
  misc_RNA (1)...(19): siRNA sense strand
cgaaugcacugacacuuuu

SEQ ID NO: 1952228 - RNA, 19 nt, Homo sapiens
  misc_RNA (1)...(19): siRNA sense strand
ucaaccgggucucugagua

SEQ ID NO: 1952229 - RNA, 19 nt, Homo sapiens
  misc_RNA (1)...(19): siRNA sense strand
gagauccuuucccuccaaa

SEQ ID NO: 1952230 - RNA, 19 nt, Homo sapiens
  misc_RNA (1)...(19): siRNA sense strand
gugugugguucauaacuuu

SEQ ID NO: 1952231 - RNA, 19 nt, Homo sapiens
  misc_RNA (1)...(19): siRNA sense strand
uuacuucgaaggaucauaa

SEQ ID NO: 1952232 - RNA, 19 nt, Homo sapiens
  misc_RNA (1)...(19): siRNA sense strand
uaaaggaacgcaaggaucu

SEQ ID NO: 1952233 - RNA, 19 nt, Homo sapiens
  misc_RNA (1)...(19): siRNA sense strand
ccacugcucggacgugauu

SEQ ID NO: 1952234 - RNA, 19 nt, Homo sapiens
  misc_RNA (1)...(19): siRNA sense strand
gagauauccauguauuuca

SEQ ID NO: 1952235 - RNA, 19 nt, Homo sapiens
  misc_RNA (1)...(19): siRNA sense strand
cgugauugcugguuucauc

SEQ ID NO: 1952236 - RNA, 19 nt, Homo sapiens
  misc_RNA (1)...(19): siRNA sense strand
ggaaugugugugguucaua

SEQ ID NO: 1952237 - RNA, 19 nt, Homo sapiens
  misc_RNA (1)...(19): siRNA sense strand
uuggugagauauccaugua

SEQ ID NO: 1952238 - RNA, 19 nt, Homo sapiens
  misc_RNA (1)...(19): siRNA sense strand
cuaauggcuuucccaagga

SEQ ID NO: 1952239 - RNA, 19 nt, Homo sapiens
  misc_RNA (1)...(19): siRNA sense strand
uguaaacgccggacaagug

SEQ ID NO: 1952240 - RNA, 19 nt, Homo sapiens
  misc_RNA (1)...(19): siRNA sense strand
ucgaaugcacugacacuuu

SEQ ID NO: 1952241 - RNA, 19 nt, Homo sapiens
  misc_RNA (1)...(19): siRNA sense strand
ucacagggguguuugcauu

SEQ ID NO: 1952242 - RNA, 19 nt, Homo sapiens
  misc_RNA (1)...(19): siRNA sense strand
ccugauugcucgggagaaa

SEQ ID NO: 1952243 - RNA, 19 nt, Homo sapiens
  misc_RNA (1)...(19): siRNA sense strand
ugagauauccauguauuuc

SEQ ID NO: 1952244 - RNA, 19 nt, Homo sapiens
  misc_RNA (1)...(19): siRNA sense strand
aaccuuaagugcacagaau

SEQ ID NO: 1952245 - RNA, 19 nt, Homo sapiens
  misc_RNA (1)...(19): siRNA sense strand
caaccgggucucugaguau

SEQ ID NO: 1952246 - RNA, 19 nt, Homo sapiens
  misc_RNA (1)...(19): siRNA sense strand
cauuuacuccgccuuauau

SEQ ID NO: 1952247 - RNA, 19 nt, Homo sapiens
  misc_RNA (1)...(19): siRNA sense strand
ggaccuggaagugauagaa

SEQ ID NO: 1952248 - RNA, 19 nt, Homo sapiens
  misc_RNA (1)...(19): siRNA sense strand
uucgaaggaucauaagauu

SEQ ID NO: 1952249 - RNA, 19 nt, Homo sapiens
  misc_RNA (1)...(19): siRNA sense strand
gaccuggaagugauagaaa

SEQ ID NO: 1952250 - RNA, 19 nt, Homo sapiens
  misc_RNA (1)...(19): siRNA sense strand
cagugcugcuugccuacua

SEQ ID NO: 1952251 - RNA, 19 nt, Homo sapiens
  misc_RNA (1)...(19): siRNA sense strand
ucaggugcauauccaagga

SEQ ID NO: 1952252 - RNA, 19 nt, Homo sapiens
  misc_RNA (1)...(19): siRNA sense strand
uaugccacgauguauauua

SEQ ID NO: 1952253 - RNA, 19 nt, Homo sapiens
  misc_RNA (1)...(19): siRNA sense strand
ccuuauaugccacgaugua

SEQ ID NO: 1952254 - RNA, 19 nt, Homo sapiens
  misc_RNA (1)...(19): siRNA sense strand
ccacuccaacugcuauuau

SEQ ID NO: 1952255 - RNA, 19 nt, Homo sapiens
  misc_RNA (1)...(19): siRNA sense strand
cgccauacuuccugacugu

SEQ ID NO: 1952256 - RNA, 19 nt, Homo sapiens
  misc_RNA (1)...(19): siRNA sense strand
cacuccaacugcuauuauu

SEQ ID NO: 1952257 - RNA, 19 nt, Homo sapiens
  misc_RNA (1)...(19): siRNA sense strand
caucaucccguguuuuaua

SEQ ID NO: 1952258 - RNA, 19 nt, Homo sapiens
  misc_RNA (1)...(19): siRNA sense strand
gagaaugcuguuaccugaa

SEQ ID NO: 1952259 - RNA, 19 nt, Homo sapiens
  misc_RNA (1)...(19): siRNA sense strand
gugagauauccauguauuu

SEQ ID NO: 1952260 - RNA, 19 nt, Homo sapiens
  misc_RNA (1)...(19): siRNA sense strand
agaaugcuguuaccugaac

SEQ ID NO: 1952261 - RNA, 19 nt, Homo sapiens
  misc_RNA (1)...(19): siRNA sense strand
gggaaugugugugguucau

SEQ ID NO: 1952262 - RNA, 19 nt, Homo sapiens
  misc_RNA (1)...(19): siRNA sense strand
cggacgugauugcugguuu

SEQ ID NO: 1952263 - RNA, 19 nt, Homo sapiens
  misc_RNA (1)...(19): siRNA sense strand
gcacaaucaagacgaagag

SEQ ID NO: 1952264 - RNA, 19 nt, Homo sapiens
  misc_RNA (1)...(19): siRNA sense strand
gauccuuucccuccaaaca

SEQ ID NO: 1952265 - RNA, 19 nt, Homo sapiens
  misc_RNA (1)...(19): siRNA sense strand
guguuugcauuuggacuuu

SEQ ID NO: 1952266 - RNA, 19 nt, Homo sapiens
  misc_RNA (1)...(19): siRNA sense strand
ucaggacggagacuuaaug

SEQ ID NO: 1952267 - RNA, 19 nt, Homo sapiens
  misc_RNA (1)...(19): siRNA sense strand
aaagcccucuggaaaccuu

SEQ ID NO: 1952268 - RNA, 19 nt, Homo sapiens
  misc_RNA (1)...(19): siRNA sense strand
ugugugugguucauaacuu

SEQ ID NO: 1952269 - RNA, 19 nt, Homo sapiens
  misc_RNA (1)...(19): siRNA sense strand
caacacucaacgaaguuau

SEQ ID NO: 1952270 - RNA, 19 nt, Homo sapiens
  misc_RNA (1)...(19): siRNA sense strand
caucccguguuuuauauuu

SEQ ID NO: 1952271 - RNA, 19 nt, Homo sapiens
  misc_RNA (1)...(19): siRNA sense strand
uaauggcuuucccaaggau

SEQ ID NO: 1952272 - RNA, 19 nt, Homo sapiens
  misc_RNA (1)...(19): siRNA sense strand
uccaaggauucuucuguca

SEQ ID NO: 1952273 - RNA, 19 nt, Homo sapiens
  misc_RNA (1)...(19): siRNA sense strand
uagaaagcccucuggaaac

SEQ ID NO: 1952274 - RNA, 19 nt, Homo sapiens
  misc_RNA (1)...(19): siRNA sense strand
cugcacagccuuccugaca

SEQ ID NO: 1952275 - RNA, 19 nt, Homo sapiens
  misc_RNA (1)...(19): siRNA sense strand
acaacacucaacgaaguua

SEQ ID NO: 1952276 - RNA, 19 nt, Homo sapiens
  misc_RNA (1)...(19): siRNA sense strand
gaccggagaaugcuguuac

SEQ ID NO: 1952277 - RNA, 19 nt, Homo sapiens
  misc_RNA (1)...(19): siRNA sense strand
caggacggagacuuaauga

SEQ ID NO: 1952278 - RNA, 19 nt, Homo sapiens
  misc_RNA (1)...(19): siRNA sense strand
guaggaaacaacacucaac

SEQ ID NO: 1952279 - RNA, 19 nt, Homo sapiens
  misc_RNA (1)...(19): siRNA sense strand
gcugcuugccuacuacuuc

SEQ ID NO: 1952280 - RNA, 19 nt, Homo sapiens
  misc_RNA (1)...(19): siRNA sense strand
gguguuugcauuuggacuu

SEQ ID NO: 1952281 - RNA, 19 nt, Homo sapiens
  misc_RNA (1)...(19): siRNA sense strand
gccacuccaacugcuauua

SEQ ID NO: 1952282 - RNA, 19 nt, Homo sapiens
  misc_RNA (1)...(19): siRNA sense strand
caacaagagaaucccugau

SEQ ID NO: 1952283 - RNA, 19 nt, Homo sapiens
  misc_RNA (1)...(19): siRNA sense strand
acgaaguuauuccaucauc

SEQ ID NO: 1952284 - RNA, 19 nt, Homo sapiens
  misc_RNA (1)...(19): siRNA sense strand
uuguugagcuugucaucau

SEQ ID NO: 1952285 - RNA, 19 nt, Homo sapiens
  misc_RNA (1)...(19): siRNA sense strand
cuucgaaggaucauaagau

SEQ ID NO: 1952286 - RNA, 19 nt, Homo sapiens
  misc_RNA (1)...(19): siRNA sense strand
ggagauacguugacgaaua

SEQ ID NO: 1952287 - RNA, 19 nt, Homo sapiens
  misc_RNA (1)...(19): siRNA sense strand
gagcauagguugcauucuu

SEQ ID NO: 1952288 - RNA, 19 nt, Homo sapiens
  misc_RNA (1)...(19): siRNA sense strand
gcaaaccguugaaggaauu

SEQ ID NO: 1952289 - RNA, 19 nt, Homo sapiens
  misc_RNA (1)...(19): siRNA sense strand
aagaggagaucucauagua

SEQ ID NO: 1952290 - RNA, 19 nt, Homo sapiens
  misc_RNA (1)...(19): siRNA sense strand
gaacaggcauuguaaacca

SEQ ID NO: 1952291 - RNA, 19 nt, Homo sapiens
  misc_RNA (1)...(19): siRNA sense strand
caugaaagcuaucguggaa

SEQ ID NO: 1952292 - RNA, 19 nt, Homo sapiens
  misc_RNA (1)...(19): siRNA sense strand
caagagaacaggcauugua

SEQ ID NO: 1952293 - RNA, 19 nt, Homo sapiens
  misc_RNA (1)...(19): siRNA sense strand
guucagaaauccaaguauu

SEQ ID NO: 1952294 - RNA, 19 nt, Homo sapiens
  misc_RNA (1)...(19): siRNA sense strand
gcaaguauuuucaccauaa

SEQ ID NO: 1952295 - RNA, 19 nt, Homo sapiens
  misc_RNA (1)...(19): siRNA sense strand
gcacuuaaauaguacugau

SEQ ID NO: 1952296 - RNA, 19 nt, Homo sapiens
  misc_RNA (1)...(19): siRNA sense strand
gaacaucacaguacuuugg

SEQ ID NO: 1952297 - RNA, 19 nt, Homo sapiens
  misc_RNA (1)...(19): siRNA sense strand
gaagugcaacguaugauga

SEQ ID NO: 1952298 - RNA, 19 nt, Homo sapiens
  misc_RNA (1)...(19): siRNA sense strand
cgaauccacugcaguaaau

SEQ ID NO: 1952299 - RNA, 19 nt, Homo sapiens
  misc_RNA (1)...(19): siRNA sense strand
gauccaacucaaagaauua

SEQ ID NO: 1952300 - RNA, 19 nt, Homo sapiens
  misc_RNA (1)...(19): siRNA sense strand
guacugaucccaauagugu

SEQ ID NO: 1952301 - RNA, 19 nt, Homo sapiens
  misc_RNA (1)...(19): siRNA sense strand
gaauuuaugcuuugucaug

SEQ ID NO: 1952302 - RNA, 19 nt, Homo sapiens
  misc_RNA (1)...(19): siRNA sense strand
gagauacguugacgaauac

SEQ ID NO: 1952303 - RNA, 19 nt, Homo sapiens
  misc_RNA (1)...(19): siRNA sense strand
cgaagaauguuagaauaug

SEQ ID NO: 1952304 - RNA, 19 nt, Homo sapiens
  misc_RNA (1)...(19): siRNA sense strand
guaaagagcaccuggcaau

SEQ ID NO: 1952305 - RNA, 19 nt, Homo sapiens
  misc_RNA (1)...(19): siRNA sense strand
acacagauaucaaaguugu

SEQ ID NO: 1952306 - RNA, 19 nt, Homo sapiens
  misc_RNA (1)...(19): siRNA sense strand
ggacuuaguacuuacgauu

SEQ ID NO: 1952307 - RNA, 19 nt, Homo sapiens
  misc_RNA (1)...(19): siRNA sense strand
ugaaggaauuuaugcuuug

SEQ ID NO: 1952308 - RNA, 19 nt, Homo sapiens
  misc_RNA (1)...(19): siRNA sense strand
gcaaugauggaacgaauau

SEQ ID NO: 1952309 - RNA, 19 nt, Homo sapiens
  misc_RNA (1)...(19): siRNA sense strand
ugacuacugugaaggauau

SEQ ID NO: 1952310 - RNA, 19 nt, Homo sapiens
  misc_RNA (1)...(19): siRNA sense strand
uaucagaucugccagucaa

SEQ ID NO: 1952311 - RNA, 19 nt, Homo sapiens
  misc_RNA (1)...(19): siRNA sense strand
gaagagccaccgaaggaaa

SEQ ID NO: 1952312 - RNA, 19 nt, Homo sapiens
  misc_RNA (1)...(19): siRNA sense strand
caccugaucugucaaagug

SEQ ID NO: 1952313 - RNA, 19 nt, Homo sapiens
  misc_RNA (1)...(19): siRNA sense strand
gaauaugauccaacucaaa

SEQ ID NO: 1952314 - RNA, 19 nt, Homo sapiens
  misc_RNA (1)...(19): siRNA sense strand
caagaaaacgcaaguauuu

SEQ ID NO: 1952315 - RNA, 19 nt, Homo sapiens
  misc_RNA (1)...(19): siRNA sense strand
ggucauguuuguauugugu

SEQ ID NO: 1952316 - RNA, 19 nt, Homo sapiens
  misc_RNA (1)...(19): siRNA sense strand
aaacagcuuucugccauuu

SEQ ID NO: 1952317 - RNA, 19 nt, Homo sapiens
  misc_RNA (1)...(19): siRNA sense strand
cggaagaggagaucucaua

SEQ ID NO: 1952318 - RNA, 19 nt, Homo sapiens
  misc_RNA (1)...(19): siRNA sense strand
gcagauggcguaucagauc

SEQ ID NO: 1952319 - RNA, 19 nt, Homo sapiens
  misc_RNA (1)...(19): siRNA sense strand
agaacucacuguccugauu

SEQ ID NO: 1952320 - RNA, 19 nt, Homo sapiens
  misc_RNA (1)...(19): siRNA sense strand
gaaggaauuuaugcuuugu

SEQ ID NO: 1952321 - RNA, 19 nt, Homo sapiens
  misc_RNA (1)...(19): siRNA sense strand
cauaguagcacacaagaga

SEQ ID NO: 1952322 - RNA, 19 nt, Homo sapiens
  misc_RNA (1)...(19): siRNA sense strand
ucaggcagauggcguauca

SEQ ID NO: 1952323 - RNA, 19 nt, Homo sapiens
  misc_RNA (1)...(19): siRNA sense strand
gaaaagauccaggaguaua

SEQ ID NO: 1952324 - RNA, 19 nt, Homo sapiens
  misc_RNA (1)...(19): siRNA sense strand
cacaacacaugauucagaa

SEQ ID NO: 1952325 - RNA, 19 nt, Homo sapiens
  misc_RNA (1)...(19): siRNA sense strand
ccacaacacaugauucaga

SEQ ID NO: 1952326 - RNA, 19 nt, Homo sapiens
  misc_RNA (1)...(19): siRNA sense strand
ugaaagcuaucguggaagu

SEQ ID NO: 1952327 - RNA, 19 nt, Homo sapiens
  misc_RNA (1)...(19): siRNA sense strand
gaacucacuguccugauug

SEQ ID NO: 1952328 - RNA, 19 nt, Homo sapiens
  misc_RNA (1)...(19): siRNA sense strand
caucaccaguuuaaagaau

SEQ ID NO: 1952329 - RNA, 19 nt, Homo sapiens
  misc_RNA (1)...(19): siRNA sense strand
gaagcgcaauagacacugu

SEQ ID NO: 1952330 - RNA, 19 nt, Homo sapiens
  misc_RNA (1)...(19): siRNA sense strand
uaccuuggaugaagcauug

SEQ ID NO: 1952331 - RNA, 19 nt, Homo sapiens
  misc_RNA (1)...(19): siRNA sense strand
uagguugcauucuuauuga

SEQ ID NO: 1952332 - RNA, 19 nt, Homo sapiens
  misc_RNA (1)...(19): siRNA sense strand
ucaaagaauuaccuuggau

SEQ ID NO: 1952333 - RNA, 19 nt, Homo sapiens
  misc_RNA (1)...(19): siRNA sense strand
ugauccaacucaaagaauu

SEQ ID NO: 1952334 - RNA, 19 nt, Homo sapiens
  misc_RNA (1)...(19): siRNA sense strand
gaaugacuacugugaagga

SEQ ID NO: 1952335 - RNA, 19 nt, Homo sapiens
  misc_RNA (1)...(19): siRNA sense strand
agaauuaccuuggaugaag

SEQ ID NO: 1952336 - RNA, 19 nt, Homo sapiens
  misc_RNA (1)...(19): siRNA sense strand
ccaggaguauagaggauga

SEQ ID NO: 1952337 - RNA, 19 nt, Homo sapiens
  misc_RNA (1)...(19): siRNA sense strand
gaaagcggguaucgaaucc

SEQ ID NO: 1952338 - RNA, 19 nt, Homo sapiens
  misc_RNA (1)...(19): siRNA sense strand
ccacaucaccaguuuaaag

SEQ ID NO: 1952339 - RNA, 19 nt, Homo sapiens
  misc_RNA (1)...(19): siRNA sense strand
caccauaaccagcuagauu

SEQ ID NO: 1952340 - RNA, 19 nt, Homo sapiens
  misc_RNA (1)...(19): siRNA sense strand
agcauagguugcauucuua

SEQ ID NO: 1952341 - RNA, 19 nt, Homo sapiens
  misc_RNA (1)...(19): siRNA sense strand
uaucgaauccacugcagua

SEQ ID NO: 1952342 - RNA, 19 nt, Homo sapiens
  misc_RNA (1)...(19): siRNA sense strand
guaaaccacaucaccaguu

SEQ ID NO: 1952343 - RNA, 19 nt, Homo sapiens
  misc_RNA (1)...(19): siRNA sense strand
ugaagaacaugagaaacug

SEQ ID NO: 1952344 - RNA, 19 nt, Homo sapiens
  misc_RNA (1)...(19): siRNA sense strand
gcugguagauauguuagga

SEQ ID NO: 1952345 - RNA, 19 nt, Homo sapiens
  misc_RNA (1)...(19): siRNA sense strand
acacaguucugcugguaga

SEQ ID NO: 1952346 - RNA, 19 nt, Homo sapiens
  misc_RNA (1)...(19): siRNA sense strand
caacguaugaugaugaaca

SEQ ID NO: 1952347 - RNA, 19 nt, Homo sapiens
  misc_RNA (1)...(19): siRNA sense strand
aauagacacuguucaaguc

SEQ ID NO: 1952348 - RNA, 19 nt, Homo sapiens
  misc_RNA (1)...(19): siRNA sense strand
gaagaggagaucucauagu

SEQ ID NO: 1952349 - RNA, 19 nt, Homo sapiens
  misc_RNA (1)...(19): siRNA sense strand
ccagcuagauugggaugaa

SEQ ID NO: 1952350 - RNA, 19 nt, Homo sapiens
  misc_RNA (1)...(19): siRNA sense strand
aaagagcaccuggcaauga

SEQ ID NO: 1952351 - RNA, 19 nt, Homo sapiens
  misc_RNA (1)...(19): siRNA sense strand
ggaagugcaacguaugaug

SEQ ID NO: 1952352 - RNA, 19 nt, Homo sapiens
  misc_RNA (1)...(19): siRNA sense strand
gcaaaguuguagagugcau

SEQ ID NO: 1952353 - RNA, 19 nt, Homo sapiens
  misc_RNA (1)...(19): siRNA sense strand
gaucugccagucaauaaau

SEQ ID NO: 1952354 - RNA, 19 nt, Homo sapiens
  misc_RNA (1)...(19): siRNA sense strand
guuagaauaugauccaacu

SEQ ID NO: 1952355 - RNA, 19 nt, Homo sapiens
  misc_RNA (1)...(19): siRNA sense strand
ggaagucacaagcggaaga

SEQ ID NO: 1952356 - RNA, 19 nt, Homo sapiens
  misc_RNA (1)...(19): siRNA sense strand
gaauauuaccuugguuuca

SEQ ID NO: 1952357 - RNA, 19 nt, Homo sapiens
  misc_RNA (1)...(19): siRNA sense strand
ccacugcaguaaaucuuca

SEQ ID NO: 1952358 - RNA, 19 nt, Homo sapiens
  misc_RNA (1)...(19): siRNA sense strand
gagaacaggcauuguaaac

SEQ ID NO: 1952359 - RNA, 19 nt, Homo sapiens
  misc_RNA (1)...(19): siRNA sense strand
caauagacacuguucaagu

SEQ ID NO: 1952360 - RNA, 19 nt, Homo sapiens
  misc_RNA (1)...(19): siRNA sense strand
aaaggaagcgcaauagaca

SEQ ID NO: 1952361 - RNA, 19 nt, Homo sapiens
  misc_RNA (1)...(19): siRNA sense strand
ucuaagagcaagauaugaa

SEQ ID NO: 1952362 - RNA, 19 nt, Homo sapiens
  misc_RNA (1)...(19): siRNA sense strand
ggaagaggagaucucauag

SEQ ID NO: 1952363 - RNA, 19 nt, Homo sapiens
  misc_RNA (1)...(19): siRNA sense strand
aauagugucuuccgaugug

SEQ ID NO: 1952364 - RNA, 19 nt, Homo sapiens
  misc_RNA (1)...(19): siRNA sense strand
gaagcagcucguucagaaa

SEQ ID NO: 1952365 - RNA, 19 nt, Homo sapiens
  misc_RNA (1)...(19): siRNA sense strand
caaaguggagacguucuaa

SEQ ID NO: 1952366 - RNA, 19 nt, Homo sapiens
  misc_RNA (1)...(19): siRNA sense strand
ugaccugguucgaagaaug

SEQ ID NO: 1952367 - RNA, 19 nt, Homo sapiens
  misc_RNA (1)...(19): siRNA sense strand
aaauaguacugaucccaau

SEQ ID NO: 1952368 - RNA, 19 nt, Homo sapiens
  misc_RNA (1)...(19): siRNA sense strand
guucuaagagcaagauaug

SEQ ID NO: 1952369 - RNA, 19 nt, Homo sapiens
  misc_RNA (1)...(19): siRNA sense strand
cagaucugccagucaauaa

SEQ ID NO: 1952370 - RNA, 19 nt, Homo sapiens
  misc_RNA (1)...(19): siRNA sense strand
guucgaagaauguuagaau

SEQ ID NO: 1952371 - RNA, 19 nt, Homo sapiens
  misc_RNA (1)...(19): siRNA sense strand
ugaugaagaacaugagaaa

SEQ ID NO: 1952372 - RNA, 19 nt, Homo sapiens
  misc_RNA (1)...(19): siRNA sense strand
ugaggagggucaccugauc

SEQ ID NO: 1952373 - RNA, 19 nt, Homo sapiens
  misc_RNA (1)...(19): siRNA sense strand
aaagaauuaccuuggauga

SEQ ID NO: 1952374 - RNA, 19 nt, Homo sapiens
  misc_RNA (1)...(19): siRNA sense strand
uagaauaugauccaacuca

SEQ ID NO: 1952375 - RNA, 19 nt, Homo sapiens
  misc_RNA (1)...(19): siRNA sense strand
gaucugaagccugaaaaua

SEQ ID NO: 1952376 - RNA, 19 nt, Homo sapiens
  misc_RNA (1)...(19): siRNA sense strand
gcaugcauguagcagugaa

SEQ ID NO: 1952377 - RNA, 19 nt, Homo sapiens
  misc_RNA (1)...(19): siRNA sense strand
aggaaaagauccaggagua

SEQ ID NO: 1952378 - RNA, 19 nt, Homo sapiens
  misc_RNA (1)...(19): siRNA sense strand
agaauaugauccaacucaa

SEQ ID NO: 1952379 - RNA, 19 nt, Homo sapiens
  misc_RNA (1)...(19): siRNA sense strand
gaagaacaugagaaacugu

SEQ ID NO: 1952380 - RNA, 19 nt, Homo sapiens
  misc_RNA (1)...(19): siRNA sense strand
ucagacucaugauaguaaa

SEQ ID NO: 1952381 - RNA, 19 nt, Homo sapiens
  misc_RNA (1)...(19): siRNA sense strand
ucagaucugccagucaaua

SEQ ID NO: 1952382 - RNA, 19 nt, Homo sapiens
  misc_RNA (1)...(19): siRNA sense strand
gacuuaguacuuacgauuu

SEQ ID NO: 1952383 - RNA, 19 nt, Homo sapiens
  misc_RNA (1)...(19): siRNA sense strand
aagagaacaggcauuguaa

SEQ ID NO: 1952384 - RNA, 19 nt, Homo sapiens
  misc_RNA (1)...(19): siRNA sense strand
ggcaaugauggaacgaaua

SEQ ID NO: 1952385 - RNA, 19 nt, Homo sapiens
  misc_RNA (1)...(19): siRNA sense strand
gcugcaaaccguugaagga

SEQ ID NO: 1952386 - RNA, 19 nt, Homo sapiens
  misc_RNA (1)...(19): siRNA sense strand
gacuaaagcuucacuauaa

SEQ ID NO: 1952387 - RNA, 19 nt, Homo sapiens
  misc_RNA (1)...(19): siRNA sense strand
gaggagagcuguuugacua

SEQ ID NO: 1952388 - RNA, 19 nt, Homo sapiens
  misc_RNA (1)...(19): siRNA sense strand
gguggaaucuaaaucauua

SEQ ID NO: 1952389 - RNA, 19 nt, Homo sapiens
  misc_RNA (1)...(19): siRNA sense strand
uaacaaggauuaccaucua

SEQ ID NO: 1952390 - RNA, 19 nt, Homo sapiens
  misc_RNA (1)...(19): siRNA sense strand
ucacagacaucaagucaaa

SEQ ID NO: 1952391 - RNA, 19 nt, Homo sapiens
  misc_RNA (1)...(19): siRNA sense strand
gaagaguacuuuauguuuc

SEQ ID NO: 1952392 - RNA, 19 nt, Homo sapiens
  misc_RNA (1)...(19): siRNA sense strand
caucacaguuuaccaagua

SEQ ID NO: 1952393 - RNA, 19 nt, Homo sapiens
  misc_RNA (1)...(19): siRNA sense strand
cagaacaccugcaaauaaa

SEQ ID NO: 1952394 - RNA, 19 nt, Homo sapiens
  misc_RNA (1)...(19): siRNA sense strand
caaagacuccaguuaauaa

SEQ ID NO: 1952395 - RNA, 19 nt, Homo sapiens
  misc_RNA (1)...(19): siRNA sense strand
gagcaugggcauacuguua

SEQ ID NO: 1952396 - RNA, 19 nt, Homo sapiens
  misc_RNA (1)...(19): siRNA sense strand
caaaucauaucuuggauca

SEQ ID NO: 1952397 - RNA, 19 nt, Homo sapiens
  misc_RNA (1)...(19): siRNA sense strand
ggagagcuguuugacuaua

SEQ ID NO: 1952398 - RNA, 19 nt, Homo sapiens
  misc_RNA (1)...(19): siRNA sense strand
gaacaucacaguuuaccaa

SEQ ID NO: 1952399 - RNA, 19 nt, Homo sapiens
  misc_RNA (1)...(19): siRNA sense strand
gaacaccugcaaauaaauu

SEQ ID NO: 1952400 - RNA, 19 nt, Homo sapiens
  misc_RNA (1)...(19): siRNA sense strand
gcauauaugucaacucuac

SEQ ID NO: 1952401 - RNA, 19 nt, Homo sapiens
  misc_RNA (1)...(19): siRNA sense strand
ggcaaacaauggaggauuu

SEQ ID NO: 1952402 - RNA, 19 nt, Homo sapiens
  misc_RNA (1)...(19): siRNA sense strand
gaaagugacaaugcaauuu

SEQ ID NO: 1952403 - RNA, 19 nt, Homo sapiens
  misc_RNA (1)...(19): siRNA sense strand
caaagaagcauguugacuu

SEQ ID NO: 1952404 - RNA, 19 nt, Homo sapiens
  misc_RNA (1)...(19): siRNA sense strand
gaagcauguugacuuugua

SEQ ID NO: 1952405 - RNA, 19 nt, Homo sapiens
  misc_RNA (1)...(19): siRNA sense strand
gaugugaccgcaagugaua

SEQ ID NO: 1952406 - RNA, 19 nt, Homo sapiens
  misc_RNA (1)...(19): siRNA sense strand
ggagagaugguagcuauaa

SEQ ID NO: 1952407 - RNA, 19 nt, Homo sapiens
  misc_RNA (1)...(19): siRNA sense strand
gcaugggcauacuguuaua

SEQ ID NO: 1952408 - RNA, 19 nt, Homo sapiens
  misc_RNA (1)...(19): siRNA sense strand
guaauggcuuuauacaaga

SEQ ID NO: 1952409 - RNA, 19 nt, Homo sapiens
  misc_RNA (1)...(19): siRNA sense strand
ucacuacgccaaaucguua

SEQ ID NO: 1952410 - RNA, 19 nt, Homo sapiens
  misc_RNA (1)...(19): siRNA sense strand
ccaaagacuccaguuaaua

SEQ ID NO: 1952411 - RNA, 19 nt, Homo sapiens
  misc_RNA (1)...(19): siRNA sense strand
gaaugaagaguacuuuaug

SEQ ID NO: 1952412 - RNA, 19 nt, Homo sapiens
  misc_RNA (1)...(19): siRNA sense strand
gagagaugguagcuauaaa

SEQ ID NO: 1952413 - RNA, 19 nt, Homo sapiens
  misc_RNA (1)...(19): siRNA sense strand
aaagggagccaaaguguuu

SEQ ID NO: 1952414 - RNA, 19 nt, Homo sapiens
  misc_RNA (1)...(19): siRNA sense strand
gccaaagacuccaguuaau

SEQ ID NO: 1952415 - RNA, 19 nt, Homo sapiens
  misc_RNA (1)...(19): siRNA sense strand
caaaugggguggaaucuaa

SEQ ID NO: 1952416 - RNA, 19 nt, Homo sapiens
  misc_RNA (1)...(19): siRNA sense strand
gaucagaggcagauguuug

SEQ ID NO: 1952417 - RNA, 19 nt, Homo sapiens
  misc_RNA (1)...(19): siRNA sense strand
ggaaagugacaaugcaauu

SEQ ID NO: 1952418 - RNA, 19 nt, Homo sapiens
  misc_RNA (1)...(19): siRNA sense strand
caugcaagauuacaacuau

SEQ ID NO: 1952419 - RNA, 19 nt, Homo sapiens
  misc_RNA (1)...(19): siRNA sense strand
ugaagaaccugagacauca

SEQ ID NO: 1952420 - RNA, 19 nt, Homo sapiens
  misc_RNA (1)...(19): siRNA sense strand
ccaguucguuuaaggcuuu

SEQ ID NO: 1952421 - RNA, 19 nt, Homo sapiens
  misc_RNA (1)...(19): siRNA sense strand
gcaaacaauggaggauuua

SEQ ID NO: 1952422 - RNA, 19 nt, Homo sapiens
  misc_RNA (1)...(19): siRNA sense strand
aaucauaucuuggaucaga

SEQ ID NO: 1952423 - RNA, 19 nt, Homo sapiens
  misc_RNA (1)...(19): siRNA sense strand
cagcauauaugucaacucu

SEQ ID NO: 1952424 - RNA, 19 nt, Homo sapiens
  misc_RNA (1)...(19): siRNA sense strand
gcagguggacccaaagaaa

SEQ ID NO: 1952425 - RNA, 19 nt, Homo sapiens
  misc_RNA (1)...(19): siRNA sense strand
gagccaaagacuccaguua

SEQ ID NO: 1952426 - RNA, 19 nt, Homo sapiens
  misc_RNA (1)...(19): siRNA sense strand
ccaguaaauucaacaggaa

SEQ ID NO: 1952427 - RNA, 19 nt, Homo sapiens
  misc_RNA (1)...(19): siRNA sense strand
ccaaggguaacaaggauua

SEQ ID NO: 1952428 - RNA, 19 nt, Homo sapiens
  misc_RNA (1)...(19): siRNA sense strand
gaagacauccuaucuagcu

SEQ ID NO: 1952429 - RNA, 19 nt, Homo sapiens
  misc_RNA (1)...(19): siRNA sense strand
gagagcuguuugacuauau

SEQ ID NO: 1952430 - RNA, 19 nt, Homo sapiens
  misc_RNA (1)...(19): siRNA sense strand
ggaacagacaaguuaauga

SEQ ID NO: 1952431 - RNA, 19 nt, Homo sapiens
  misc_RNA (1)...(19): siRNA sense strand
gaaacaacaggcaaacaau

SEQ ID NO: 1952432 - RNA, 19 nt, Homo sapiens
  misc_RNA (1)...(19): siRNA sense strand
gcaccugaguuaauacaag

SEQ ID NO: 1952433 - RNA, 19 nt, Homo sapiens
  misc_RNA (1)...(19): siRNA sense strand
gaaagggagccaaaguguu

SEQ ID NO: 1952434 - RNA, 19 nt, Homo sapiens
  misc_RNA (1)...(19): siRNA sense strand
agacuaaagcuucacuaua

SEQ ID NO: 1952435 - RNA, 19 nt, Homo sapiens
  misc_RNA (1)...(19): siRNA sense strand
uaagucugcuguaaagaau

SEQ ID NO: 1952436 - RNA, 19 nt, Homo sapiens
  misc_RNA (1)...(19): siRNA sense strand
caacaggaacagacaaguu

SEQ ID NO: 1952437 - RNA, 19 nt, Homo sapiens
  misc_RNA (1)...(19): siRNA sense strand
gaacagacaaguuaaugac

SEQ ID NO: 1952438 - RNA, 19 nt, Homo sapiens
  misc_RNA (1)...(19): siRNA sense strand
ggacagguggcuuugcaaa

SEQ ID NO: 1952439 - RNA, 19 nt, Homo sapiens
  misc_RNA (1)...(19): siRNA sense strand
aauaugauguucccaagug

SEQ ID NO: 1952440 - RNA, 19 nt, Homo sapiens
  misc_RNA (1)...(19): siRNA sense strand
uggaagacauccuaucuag

SEQ ID NO: 1952441 - RNA, 19 nt, Homo sapiens
  misc_RNA (1)...(19): siRNA sense strand
gaucucaaccaagcacaua

SEQ ID NO: 1952442 - RNA, 19 nt, Homo sapiens
  misc_RNA (1)...(19): siRNA sense strand
gaaaccagugccugaaaga

SEQ ID NO: 1952443 - RNA, 19 nt, Homo sapiens
  misc_RNA (1)...(19): siRNA sense strand
gaaccagcauaagagagaa

SEQ ID NO: 1952444 - RNA, 19 nt, Homo sapiens
  misc_RNA (1)...(19): siRNA sense strand
aauaagaaccagcauaaga

SEQ ID NO: 1952445 - RNA, 19 nt, Homo sapiens
  misc_RNA (1)...(19): siRNA sense strand
agacuccaguuaauaagaa

SEQ ID NO: 1952446 - RNA, 19 nt, Homo sapiens
  misc_RNA (1)...(19): siRNA sense strand
aucauuaacuccagccuua

SEQ ID NO: 1952447 - RNA, 19 nt, Homo sapiens
  misc_RNA (1)...(19): siRNA sense strand
guacaucacagaaacaaca

SEQ ID NO: 1952448 - RNA, 19 nt, Homo sapiens
  misc_RNA (1)...(19): siRNA sense strand
uaucugcuguugcuuaugu

SEQ ID NO: 1952449 - RNA, 19 nt, Homo sapiens
  misc_RNA (1)...(19): siRNA sense strand
acagacaucaagucaaaua

SEQ ID NO: 1952450 - RNA, 19 nt, Homo sapiens
  misc_RNA (1)...(19): siRNA sense strand
ggauuaccaucuacagaca

SEQ ID NO: 1952451 - RNA, 19 nt, Homo sapiens
  misc_RNA (1)...(19): siRNA sense strand
cuaucuagcugcaagguau

SEQ ID NO: 1952452 - RNA, 19 nt, Homo sapiens
  misc_RNA (1)...(19): siRNA sense strand
guuaauacaaggcaaauca

SEQ ID NO: 1952453 - RNA, 19 nt, Homo sapiens
  misc_RNA (1)...(19): siRNA sense strand
caaaaggguuauacacuga

SEQ ID NO: 1952454 - RNA, 19 nt, Homo sapiens
  misc_RNA (1)...(19): siRNA sense strand
aacaggaacagacaaguua

SEQ ID NO: 1952455 - RNA, 19 nt, Homo sapiens
  misc_RNA (1)...(19): siRNA sense strand
cugaaagaaacuccaauua

SEQ ID NO: 1952456 - RNA, 19 nt, Homo sapiens
  misc_RNA (1)...(19): siRNA sense strand
gcauucugcuucuucaaca

SEQ ID NO: 1952457 - RNA, 19 nt, Homo sapiens
  misc_RNA (1)...(19): siRNA sense strand
ccuggaucaugcaagauua

SEQ ID NO: 1952458 - RNA, 19 nt, Homo sapiens
  misc_RNA (1)...(19): siRNA sense strand
agaagcauguugacuuugu

SEQ ID NO: 1952459 - RNA, 19 nt, Homo sapiens
  misc_RNA (1)...(19): siRNA sense strand
uaugucaacucuaccaugu

SEQ ID NO: 1952460 - RNA, 19 nt, Homo sapiens
  misc_RNA (1)...(19): siRNA sense strand
guacuggacagaaucaaau

SEQ ID NO: 1952461 - RNA, 19 nt, Homo sapiens
  misc_RNA (1)...(19): siRNA sense strand
caauggaggauuuaauuuc

SEQ ID NO: 1952462 - RNA, 19 nt, Homo sapiens
  misc_RNA (1)...(19): siRNA sense strand
uuauucaccucgaugauga

SEQ ID NO: 1952463 - RNA, 19 nt, Homo sapiens
  misc_RNA (1)...(19): siRNA sense strand
ugcagcaccugaguuaaua

SEQ ID NO: 1952464 - RNA, 19 nt, Homo sapiens
  misc_RNA (1)...(19): siRNA sense strand
cauaagagagaaauacuca

SEQ ID NO: 1952465 - RNA, 19 nt, Homo sapiens
  misc_RNA (1)...(19): siRNA sense strand
caagaaggcucggggaaaa

SEQ ID NO: 1952466 - RNA, 19 nt, Homo sapiens
  misc_RNA (1)...(19): siRNA sense strand
guggauuucuaccauuuga

SEQ ID NO: 1952467 - RNA, 19 nt, Homo sapiens
  misc_RNA (1)...(19): siRNA sense strand
guguggauuucuaccauuu

SEQ ID NO: 1952468 - RNA, 19 nt, Homo sapiens
  misc_RNA (1)...(19): siRNA sense strand
guucuuauguguggauuuc

SEQ ID NO: 1952469 - RNA, 19 nt, Homo sapiens
  misc_RNA (1)...(19): siRNA sense strand
uaaugugacuacaacuaga

SEQ ID NO: 1952470 - RNA, 19 nt, Homo sapiens
  misc_RNA (1)...(19): siRNA sense strand
aaacuugccugccauaucc

SEQ ID NO: 1952471 - RNA, 19 nt, Homo sapiens
  misc_RNA (1)...(19): siRNA sense strand
gcuagagacagccaacaaa

SEQ ID NO: 1952472 - RNA, 19 nt, Homo sapiens
  misc_RNA (1)...(19): siRNA sense strand
cuggagagaugguagcuau

SEQ ID NO: 1952473 - RNA, 19 nt, Homo sapiens
  misc_RNA (1)...(19): siRNA sense strand
uuauguggcgggauuaaua

SEQ ID NO: 1952474 - RNA, 19 nt, Homo sapiens
  misc_RNA (1)...(19): siRNA sense strand
gucaaacacagucagauuu

SEQ ID NO: 1952475 - RNA, 19 nt, Homo sapiens
  misc_RNA (1)...(19): siRNA sense strand
guuaauaagaaccagcaua

SEQ ID NO: 1952476 - RNA, 19 nt, Homo sapiens
  misc_RNA (1)...(19): siRNA sense strand
cagaaaauuugcuguuuga

SEQ ID NO: 1952477 - RNA, 19 nt, Homo sapiens
  misc_RNA (1)...(19): siRNA sense strand
agagcuguuugacuauaua

SEQ ID NO: 1952478 - RNA, 19 nt, Homo sapiens
  misc_RNA (1)...(19): siRNA sense strand
ggauuucuaccauuugaug

SEQ ID NO: 1952479 - RNA, 19 nt, Homo sapiens
  misc_RNA (1)...(19): siRNA sense strand
aaagugacaaugcaauuug

SEQ ID NO: 1952480 - RNA, 19 nt, Homo sapiens
  misc_RNA (1)...(19): siRNA sense strand
cuaccuaucuucugcuucu

SEQ ID NO: 1952481 - RNA, 19 nt, Homo sapiens
  misc_RNA (1)...(19): siRNA sense strand
agaaacaacaggcaaacaa

SEQ ID NO: 1952482 - RNA, 19 nt, Homo sapiens
  misc_RNA (1)...(19): siRNA sense strand
gcugugggagucuggcuua

SEQ ID NO: 1952483 - RNA, 19 nt, Homo sapiens
  misc_RNA (1)...(19): siRNA sense strand
agagagaaauacucacuac

SEQ ID NO: 1952484 - RNA, 19 nt, Homo sapiens
  misc_RNA (1)...(19): siRNA sense strand
cuaagucugcuguaaagaa

SEQ ID NO: 1952485 - RNA, 19 nt, Homo sapiens
  misc_RNA (1)...(19): siRNA sense strand
uuaugcagcaccugaguua

SEQ ID NO: 1952486 - RNA, 19 nt, Homo sapiens
  misc_RNA (1)...(19): siRNA sense strand
gacaccagcuccaggauaa

SEQ ID NO: 1952487 - RNA, 19 nt, Homo sapiens
  misc_RNA (1)...(19): siRNA sense strand
gauaaaggcacagaugaga

SEQ ID NO: 1952488 - RNA, 19 nt, Homo sapiens
  misc_RNA (1)...(19): siRNA sense strand
gcacuggccacucuucaga

SEQ ID NO: 1952489 - RNA, 19 nt, Homo sapiens
  misc_RNA (1)...(19): siRNA sense strand
caugaccgcugcccacaga

SEQ ID NO: 1952490 - RNA, 19 nt, Homo sapiens
  misc_RNA (1)...(19): siRNA sense strand
cccaggaccuucuacaaug

SEQ ID NO: 1952491 - RNA, 19 nt, Homo sapiens
  misc_RNA (1)...(19): siRNA sense strand
gagguuaccaacaugcuuu

SEQ ID NO: 1952492 - RNA, 19 nt, Homo sapiens
  misc_RNA (1)...(19): siRNA sense strand
gacaccagguuucagcaau

SEQ ID NO: 1952493 - RNA, 19 nt, Homo sapiens
  misc_RNA (1)...(19): siRNA sense strand
cgacaccagcuccaggaua

SEQ ID NO: 1952494 - RNA, 19 nt, Homo sapiens
  misc_RNA (1)...(19): siRNA sense strand
gggcacaaccugcuucaag

SEQ ID NO: 1952495 - RNA, 19 nt, Homo sapiens
  misc_RNA (1)...(19): siRNA sense strand
cagcaaugccuacagaauc

SEQ ID NO: 1952496 - RNA, 19 nt, Homo sapiens
  misc_RNA (1)...(19): siRNA sense strand
gcccaggaccuucuacaau

SEQ ID NO: 1952497 - RNA, 19 nt, Homo sapiens
  misc_RNA (1)...(19): siRNA sense strand
ggauaaaggcacagaugag

SEQ ID NO: 1952498 - RNA, 19 nt, Homo sapiens
  misc_RNA (1)...(19): siRNA sense strand
acaccagguuucagcaaug

SEQ ID NO: 1952499 - RNA, 19 nt, Homo sapiens
  misc_RNA (1)...(19): siRNA sense strand
uuucagcaaugccuacaga

SEQ ID NO: 1952500 - RNA, 19 nt, Homo sapiens
  misc_RNA (1)...(19): siRNA sense strand
agcaaugccuacagaauca

SEQ ID NO: 1952501 - RNA, 19 nt, Homo sapiens
  misc_RNA (1)...(19): siRNA sense strand
cacccgagguuaccaacau

SEQ ID NO: 1952502 - RNA, 19 nt, Homo sapiens
  misc_RNA (1)...(19): siRNA sense strand
ggacuguguggaaggcaaa

SEQ ID NO: 1952503 - RNA, 19 nt, Homo sapiens
  misc_RNA (1)...(19): siRNA sense strand
caggauaaaggcacagaug

SEQ ID NO: 1952504 - RNA, 19 nt, Homo sapiens
  misc_RNA (1)...(19): siRNA sense strand
gguguggaguuggagauuc

SEQ ID NO: 1952505 - RNA, 19 nt, Homo sapiens
  misc_RNA (1)...(19): siRNA sense strand
gggcguggccuucuucaac

SEQ ID NO: 1952506 - RNA, 19 nt, Homo sapiens
  misc_RNA (1)...(19): siRNA sense strand
cauccgaaacuaccgauuc

SEQ ID NO: 1952507 - RNA, 19 nt, Homo sapiens
  misc_RNA (1)...(19): siRNA sense strand
aggcguguguggcguggua

SEQ ID NO: 1952508 - RNA, 19 nt, Homo sapiens
  misc_RNA (1)...(19): siRNA sense strand
ccaggaccuucuacaaugc

SEQ ID NO: 1952509 - RNA, 19 nt, Homo sapiens
  misc_RNA (1)...(19): siRNA sense strand
ggugcucucugugcucaug

SEQ ID NO: 1952510 - RNA, 19 nt, Homo sapiens
  misc_RNA (1)...(19): siRNA sense strand
aaccagugccugcagcuaa

SEQ ID NO: 1952511 - RNA, 19 nt, Homo sapiens
  misc_RNA (1)...(19): siRNA sense strand
acuauggcauccgaaacua

SEQ ID NO: 1952512 - RNA, 19 nt, Homo sapiens
  misc_RNA (1)...(19): siRNA sense strand
ucccaagccucgacagaag

SEQ ID NO: 1952513 - RNA, 19 nt, Homo sapiens
  misc_RNA (1)...(19): siRNA sense strand
ugacugugacaccagguuu

SEQ ID NO: 1952514 - RNA, 19 nt, Homo sapiens
  misc_RNA (1)...(19): siRNA sense strand
gagcacuggccacucuuca

SEQ ID NO: 1952515 - RNA, 19 nt, Homo sapiens
  misc_RNA (1)...(19): siRNA sense strand
gcucaacagcgcccaagag

SEQ ID NO: 1952516 - RNA, 19 nt, Homo sapiens
  misc_RNA (1)...(19): siRNA sense strand
ggaaggggccaccacauca

SEQ ID NO: 1952517 - RNA, 19 nt, Homo sapiens
  misc_RNA (1)...(19): siRNA sense strand
guguggaguuggagauucu

SEQ ID NO: 1952518 - RNA, 19 nt, Homo sapiens
  misc_RNA (1)...(19): siRNA sense strand
ccagugugagcaccagauu

SEQ ID NO: 1952519 - RNA, 19 nt, Homo sapiens
  misc_RNA (1)...(19): siRNA sense strand
ucagcaaugccuacagaau

SEQ ID NO: 1952520 - RNA, 19 nt, Homo sapiens
  misc_RNA (1)...(19): siRNA sense strand
ucucacccuugcaguacaa

SEQ ID NO: 1952521 - RNA, 19 nt, Homo sapiens
  misc_RNA (1)...(19): siRNA sense strand
ggagauccccugcuuugug

SEQ ID NO: 1952522 - RNA, 19 nt, Homo sapiens
  misc_RNA (1)...(19): siRNA sense strand
acaacuauggcauccgaaa

SEQ ID NO: 1952523 - RNA, 19 nt, Homo sapiens
  misc_RNA (1)...(19): siRNA sense strand
ggacucccuugcaagaaga

SEQ ID NO: 1952524 - RNA, 19 nt, Homo sapiens
  misc_RNA (1)...(19): siRNA sense strand
cccggacucugccaaauuu

SEQ ID NO: 1952525 - RNA, 19 nt, Homo sapiens
  misc_RNA (1)...(19): siRNA sense strand
gagaggaagcggcgaagau

SEQ ID NO: 1952526 - RNA, 19 nt, Homo sapiens
  misc_RNA (1)...(19): siRNA sense strand
cggcgaagauggcgagauc

SEQ ID NO: 1952527 - RNA, 19 nt, Homo sapiens
  misc_RNA (1)...(19): siRNA sense strand
cagcaguuuccuuuacuuu

SEQ ID NO: 1952528 - RNA, 19 nt, Homo sapiens
  misc_RNA (1)...(19): siRNA sense strand
ggugccagcaguuuccuuu

SEQ ID NO: 1952529 - RNA, 19 nt, Homo sapiens
  misc_RNA (1)...(19): siRNA sense strand
ccagcaguuuccuuuacuu

SEQ ID NO: 1952530 - RNA, 19 nt, Homo sapiens
  misc_RNA (1)...(19): siRNA sense strand
gccagcaguuuccuuuacu

SEQ ID NO: 1952531 - RNA, 19 nt, Homo sapiens
  misc_RNA (1)...(19): siRNA sense strand
gugccagcaguuuccuuua

SEQ ID NO: 1952532 - RNA, 19 nt, Homo sapiens
  misc_RNA (1)...(19): siRNA sense strand
ggaaagaaauggugcagau

SEQ ID NO: 1952533 - RNA, 19 nt, Homo sapiens
  misc_RNA (1)...(19): siRNA sense strand
gaacacaagcuacgguauu

SEQ ID NO: 1952534 - RNA, 19 nt, Homo sapiens
  misc_RNA (1)...(19): siRNA sense strand
caaaagggcugauaguaaa

SEQ ID NO: 1952535 - RNA, 19 nt, Homo sapiens
  misc_RNA (1)...(19): siRNA sense strand
aagcuacgguauuauguua

SEQ ID NO: 1952536 - RNA, 19 nt, Homo sapiens
  misc_RNA (1)...(19): siRNA sense strand
gaaagaaauggugcagaua

SEQ ID NO: 1952537 - RNA, 19 nt, Homo sapiens
  misc_RNA (1)...(19): siRNA sense strand
aaagaaauggugcagauaa

SEQ ID NO: 1952538 - RNA, 19 nt, Homo sapiens
  misc_RNA (1)...(19): siRNA sense strand
gcaaaagggcugauaguaa

SEQ ID NO: 1952539 - RNA, 19 nt, Homo sapiens
  misc_RNA (1)...(19): siRNA sense strand
cagagagcauggaaagaaa

SEQ ID NO: 1952540 - RNA, 19 nt, Homo sapiens
  misc_RNA (1)...(19): siRNA sense strand
aacacaagcuacgguauua

SEQ ID NO: 1952541 - RNA, 19 nt, Homo sapiens
  misc_RNA (1)...(19): siRNA sense strand
gguauuauguuaacaccau

SEQ ID NO: 1952542 - RNA, 19 nt, Homo sapiens
  misc_RNA (1)...(19): siRNA sense strand
caacagagagcauggaaag

SEQ ID NO: 1952543 - RNA, 19 nt, Homo sapiens
  misc_RNA (1)...(19): siRNA sense strand
aagaaauggugcagauaaa

SEQ ID NO: 1952544 - RNA, 19 nt, Homo sapiens
  misc_RNA (1)...(19): siRNA sense strand
gaagcaaaaucaggaaauu

SEQ ID NO: 1952545 - RNA, 19 nt, Homo sapiens
  misc_RNA (1)...(19): siRNA sense strand
acagagagcauggaaagaa

SEQ ID NO: 1952546 - RNA, 19 nt, Homo sapiens
  misc_RNA (1)...(19): siRNA sense strand
gggcugauaguaaaccaaa

SEQ ID NO: 1952547 - RNA, 19 nt, Homo sapiens
  misc_RNA (1)...(19): siRNA sense strand
ggaaauuuaagaacacaag

SEQ ID NO: 1952548 - RNA, 19 nt, Homo sapiens
  misc_RNA (1)...(19): siRNA sense strand
caagcuacgguauuauguu

SEQ ID NO: 1952549 - RNA, 19 nt, Homo sapiens
  misc_RNA (1)...(19): siRNA sense strand
gagagcauggaaagaaaug

SEQ ID NO: 1952550 - RNA, 19 nt, Homo sapiens
  misc_RNA (1)...(19): siRNA sense strand
gacaacagagagcauggaa

SEQ ID NO: 1952551 - RNA, 19 nt, Homo sapiens
  misc_RNA (1)...(19): siRNA sense strand
gcuacgguauuauguuaac

SEQ ID NO: 1952552 - RNA, 19 nt, Homo sapiens
  misc_RNA (1)...(19): siRNA sense strand
uaguaaaccaaaccucaaa

SEQ ID NO: 1952553 - RNA, 19 nt, Homo sapiens
  misc_RNA (1)...(19): siRNA sense strand
ggagagggaagcaaaauca

SEQ ID NO: 1952554 - RNA, 19 nt, Homo sapiens
  misc_RNA (1)...(19): siRNA sense strand
cacaagcuacgguauuaug

SEQ ID NO: 1952555 - RNA, 19 nt, Homo sapiens
  misc_RNA (1)...(19): siRNA sense strand
ucaggaaauuuaagaacac

SEQ ID NO: 1952556 - RNA, 19 nt, Homo sapiens
  misc_RNA (1)...(19): siRNA sense strand
gagcauggaaagaaauggu

SEQ ID NO: 1952557 - RNA, 19 nt, Homo sapiens
  misc_RNA (1)...(19): siRNA sense strand
caggaaauuuaagaacaca

SEQ ID NO: 1952558 - RNA, 19 nt, Homo sapiens
  misc_RNA (1)...(19): siRNA sense strand
gaaauggugcagauaaaag

SEQ ID NO: 1952559 - RNA, 19 nt, Homo sapiens
  misc_RNA (1)...(19): siRNA sense strand
aaaccaaaccucaaaagga

SEQ ID NO: 1952560 - RNA, 19 nt, Homo sapiens
  misc_RNA (1)...(19): siRNA sense strand
gaaggcagguuccauugaa

SEQ ID NO: 1952561 - RNA, 19 nt, Homo sapiens
  misc_RNA (1)...(19): siRNA sense strand
gaacaugacagagaacaua

SEQ ID NO: 1952562 - RNA, 19 nt, Homo sapiens
  misc_RNA (1)...(19): siRNA sense strand
gaaggaagagguagagaaa

SEQ ID NO: 1952563 - RNA, 19 nt, Homo sapiens
  misc_RNA (1)...(19): siRNA sense strand
gaauggaucccaagaagaa

SEQ ID NO: 1952564 - RNA, 19 nt, Homo sapiens
  misc_RNA (1)...(19): siRNA sense strand
gagcagcaccuucucauga

SEQ ID NO: 1952565 - RNA, 19 nt, Homo sapiens
  misc_RNA (1)...(19): siRNA sense strand
ggaagaagaggaagaggaa

SEQ ID NO: 1952566 - RNA, 19 nt, Homo sapiens
  misc_RNA (1)...(19): siRNA sense strand
cagagaacauagacuguga

SEQ ID NO: 1952567 - RNA, 19 nt, Homo sapiens
  misc_RNA (1)...(19): siRNA sense strand
gaaugaagagucucggauu

SEQ ID NO: 1952568 - RNA, 19 nt, Homo sapiens
  misc_RNA (1)...(19): siRNA sense strand
gugaauggaucccaagaag

SEQ ID NO: 1952569 - RNA, 19 nt, Homo sapiens
  misc_RNA (1)...(19): siRNA sense strand
gaaacaagaggaggaggaa

SEQ ID NO: 1952570 - RNA, 19 nt, Homo sapiens
  misc_RNA (1)...(19): siRNA sense strand
cgaagagaaugaagagucu

SEQ ID NO: 1952571 - RNA, 19 nt, Homo sapiens
  misc_RNA (1)...(19): siRNA sense strand
gagaaggcagguuccauug

SEQ ID NO: 1952572 - RNA, 19 nt, Homo sapiens
  misc_RNA (1)...(19): siRNA sense strand
ggaggacacgcaccuguga

SEQ ID NO: 1952573 - RNA, 19 nt, Homo sapiens
  misc_RNA (1)...(19): siRNA sense strand
ccagagaggaggaagaaga

SEQ ID NO: 1952574 - RNA, 19 nt, Homo sapiens
  misc_RNA (1)...(19): siRNA sense strand
gggacccacugcagauuau

SEQ ID NO: 1952575 - RNA, 19 nt, Homo sapiens
  misc_RNA (1)...(19): siRNA sense strand
aggaagagguagagaaaca

SEQ ID NO: 1952576 - RNA, 19 nt, Homo sapiens
  misc_RNA (1)...(19): siRNA sense strand
gagccucccuggcauaugc

SEQ ID NO: 1952577 - RNA, 19 nt, Homo sapiens
  misc_RNA (1)...(19): siRNA sense strand
agucggagaugcaggagaa

SEQ ID NO: 1952578 - RNA, 19 nt, Homo sapiens
  misc_RNA (1)...(19): siRNA sense strand
ugagaaggcagguuccauu

SEQ ID NO: 1952579 - RNA, 19 nt, Homo sapiens
  misc_RNA (1)...(19): siRNA sense strand
agauuggcauccagaacua

SEQ ID NO: 1952580 - RNA, 19 nt, Homo sapiens
  misc_RNA (1)...(19): siRNA sense strand
aaugaagagucucggauuc

SEQ ID NO: 1952581 - RNA, 19 nt, Homo sapiens
  misc_RNA (1)...(19): siRNA sense strand
cuacaucauucugaacaug

SEQ ID NO: 1952582 - RNA, 19 nt, Homo sapiens
  misc_RNA (1)...(19): siRNA sense strand
gaagagguagagaaacaag

SEQ ID NO: 1952583 - RNA, 19 nt, Homo sapiens
  misc_RNA (1)...(19): siRNA sense strand
gagggagaaggaagaggua

SEQ ID NO: 1952584 - RNA, 19 nt, Homo sapiens
  misc_RNA (1)...(19): siRNA sense strand
gaacggcugccacgacaac

SEQ ID NO: 1952585 - RNA, 19 nt, Homo sapiens
  misc_RNA (1)...(19): siRNA sense strand
gagauuggcauccagaacu

SEQ ID NO: 1952586 - RNA, 19 nt, Homo sapiens
  misc_RNA (1)...(19): siRNA sense strand
gcagcaccuucucaugaca

SEQ ID NO: 1952587 - RNA, 19 nt, Homo sapiens
  misc_RNA (1)...(19): siRNA sense strand
ugaagagucucggauucug

SEQ ID NO: 1952588 - RNA, 19 nt, Homo sapiens
  misc_RNA (1)...(19): siRNA sense strand
gagcaagcccagcgagaag

SEQ ID NO: 1952589 - RNA, 19 nt, Homo sapiens
  misc_RNA (1)...(19): siRNA sense strand
cauagacugugagguguuc

SEQ ID NO: 1952590 - RNA, 19 nt, Homo sapiens
  misc_RNA (1)...(19): siRNA sense strand
ggaagagguagagaaacaa

SEQ ID NO: 1952591 - RNA, 19 nt, Homo sapiens
  misc_RNA (1)...(19): siRNA sense strand
ucaggaagcaagcgaggaa

SEQ ID NO: 1952592 - RNA, 19 nt, Homo sapiens
  misc_RNA (1)...(19): siRNA sense strand
caaccagcagcuccuagaa

SEQ ID NO: 1952593 - RNA, 19 nt, Homo sapiens
  misc_RNA (1)...(19): siRNA sense strand
aggagcagcugguuugucu

SEQ ID NO: 1952594 - RNA, 19 nt, Homo sapiens
  misc_RNA (1)...(19): siRNA sense strand
gcgcuuggccugcucuaca

SEQ ID NO: 1952595 - RNA, 19 nt, Homo sapiens
  misc_RNA (1)...(19): siRNA sense strand
ugcaaggacuggagcaauc

SEQ ID NO: 1952596 - RNA, 19 nt, Homo sapiens
  misc_RNA (1)...(19): siRNA sense strand
acucagaggagccuaguga

SEQ ID NO: 1952597 - RNA, 19 nt, Homo sapiens
  misc_RNA (1)...(19): siRNA sense strand
gacaagaagaucucaacca

SEQ ID NO: 1952598 - RNA, 19 nt, Homo sapiens
  misc_RNA (1)...(19): siRNA sense strand
agaaggaagagguagagaa

SEQ ID NO: 1952599 - RNA, 19 nt, Homo sapiens
  misc_RNA (1)...(19): siRNA sense strand
uuuccugacuuaacugaga

SEQ ID NO: 1952600 - RNA, 19 nt, Homo sapiens
  misc_RNA (1)...(19): siRNA sense strand
ucagaggagccuagugaga

SEQ ID NO: 1952601 - RNA, 19 nt, Homo sapiens
  misc_RNA (1)...(19): siRNA sense strand
ggagcagcaccuucucaug

SEQ ID NO: 1952602 - RNA, 19 nt, Homo sapiens
  misc_RNA (1)...(19): siRNA sense strand
uggagccacuggacucaga

SEQ ID NO: 1952603 - RNA, 19 nt, Homo sapiens
  misc_RNA (1)...(19): siRNA sense strand
ggaggaagaagaggaagag

SEQ ID NO: 1952604 - RNA, 19 nt, Homo sapiens
  misc_RNA (1)...(19): siRNA sense strand
cucaagagcugccaaaccu

SEQ ID NO: 1952605 - RNA, 19 nt, Homo sapiens
  misc_RNA (1)...(19): siRNA sense strand
gcaagcccagcgagaagga

SEQ ID NO: 1952606 - RNA, 19 nt, Homo sapiens
  misc_RNA (1)...(19): siRNA sense strand
aagaagaggaagaggaaga

SEQ ID NO: 1952607 - RNA, 19 nt, Homo sapiens
  misc_RNA (1)...(19): siRNA sense strand
gggagaaggaagagguaga

SEQ ID NO: 1952608 - RNA, 19 nt, Homo sapiens
  misc_RNA (1)...(19): siRNA sense strand
aggauacccugggauucua

SEQ ID NO: 1952609 - RNA, 19 nt, Homo sapiens
  misc_RNA (1)...(19): siRNA sense strand
gacauggaacugacaccuu

SEQ ID NO: 1952610 - RNA, 19 nt, Homo sapiens
  misc_RNA (1)...(19): siRNA sense strand
ugaauggaucccaagaaga

SEQ ID NO: 1952611 - RNA, 19 nt, Homo sapiens
  misc_RNA (1)...(19): siRNA sense strand
ggagaaggaagagguagag

SEQ ID NO: 1952612 - RNA, 19 nt, Homo sapiens
  misc_RNA (1)...(19): siRNA sense strand
ggaagagcugaaugacuca

SEQ ID NO: 1952613 - RNA, 19 nt, Homo sapiens
  misc_RNA (1)...(19): siRNA sense strand
ucuagaaccucagccucuu

SEQ ID NO: 1952614 - RNA, 19 nt, Homo sapiens
  misc_RNA (1)...(19): siRNA sense strand
agaaggcagguuccauuga

SEQ ID NO: 1952615 - RNA, 19 nt, Homo sapiens
  misc_RNA (1)...(19): siRNA sense strand
auccagaacuauuccacaa

SEQ ID NO: 1952616 - RNA, 19 nt, Homo sapiens
  misc_RNA (1)...(19): siRNA sense strand
ugagcaagcccagcgagaa

SEQ ID NO: 1952617 - RNA, 19 nt, Homo sapiens
  misc_RNA (1)...(19): siRNA sense strand
gaggaagagcugaaugacu

SEQ ID NO: 1952618 - RNA, 19 nt, Homo sapiens
  misc_RNA (1)...(19): siRNA sense strand
aacaagaggaggaggaaga

SEQ ID NO: 1952619 - RNA, 19 nt, Homo sapiens
  misc_RNA (1)...(19): siRNA sense strand
ucaaccagcagcuccuaga

SEQ ID NO: 1952620 - RNA, 19 nt, Homo sapiens
  misc_RNA (1)...(19): siRNA sense strand
gcaaggacuggagcaaucu

SEQ ID NO: 1952621 - RNA, 19 nt, Homo sapiens
  misc_RNA (1)...(19): siRNA sense strand
aggaggaagagcugaauga

SEQ ID NO: 1952622 - RNA, 19 nt, Homo sapiens
  misc_RNA (1)...(19): siRNA sense strand
cucaagauguccuuuccau

SEQ ID NO: 1952623 - RNA, 19 nt, Homo sapiens
  misc_RNA (1)...(19): siRNA sense strand
ccacucaagauguccuuuc

SEQ ID NO: 1952624 - RNA, 19 nt, Homo sapiens
  misc_RNA (1)...(19): siRNA sense strand
gaagauccccuuggcucua

SEQ ID NO: 1952625 - RNA, 19 nt, Homo sapiens
  misc_RNA (1)...(19): siRNA sense strand
ccagcgaagagaaugaaga

SEQ ID NO: 1952626 - RNA, 19 nt, Homo sapiens
  misc_RNA (1)...(19): siRNA sense strand
gaggaggaagagcugaaug

SEQ ID NO: 1952627 - RNA, 19 nt, Homo sapiens
  misc_RNA (1)...(19): siRNA sense strand
gcugcucccugugaaugga

SEQ ID NO: 1952628 - RNA, 19 nt, Homo sapiens
  misc_RNA (1)...(19): siRNA sense strand
caucugcaucaucaucauu

SEQ ID NO: 1952629 - RNA, 19 nt, Homo sapiens
  misc_RNA (1)...(19): siRNA sense strand
ggaccuagguucucauauu

SEQ ID NO: 1952630 - RNA, 19 nt, Homo sapiens
  misc_RNA (1)...(19): siRNA sense strand
ugaaaucacucacugcaua

SEQ ID NO: 1952631 - RNA, 19 nt, Homo sapiens
  misc_RNA (1)...(19): siRNA sense strand
gaacucuggcucauccuua

SEQ ID NO: 1952632 - RNA, 19 nt, Homo sapiens
  misc_RNA (1)...(19): siRNA sense strand
gaccuagguucucauauuc

SEQ ID NO: 1952633 - RNA, 19 nt, Homo sapiens
  misc_RNA (1)...(19): siRNA sense strand
gaaaggcuguuggcaucaa

SEQ ID NO: 1952634 - RNA, 19 nt, Homo sapiens
  misc_RNA (1)...(19): siRNA sense strand
caacagcgccgucaucaac

SEQ ID NO: 1952635 - RNA, 19 nt, Homo sapiens
  misc_RNA (1)...(19): siRNA sense strand
gagaagcucaaguccauga

SEQ ID NO: 1952636 - RNA, 19 nt, Homo sapiens
  misc_RNA (1)...(19): siRNA sense strand
gaacuacuggcgcaaguca

SEQ ID NO: 1952637 - RNA, 19 nt, Homo sapiens
  misc_RNA (1)...(19): siRNA sense strand
guucucauauucuugguau

SEQ ID NO: 1952638 - RNA, 19 nt, Homo sapiens
  misc_RNA (1)...(19): siRNA sense strand
uguuagggcugaagaauag

SEQ ID NO: 1952639 - RNA, 19 nt, Homo sapiens
  misc_RNA (1)...(19): siRNA sense strand
agaagggccuguacaacga

SEQ ID NO: 1952640 - RNA, 19 nt, Homo sapiens
  misc_RNA (1)...(19): siRNA sense strand
gagaacuacuggcgcaagu

SEQ ID NO: 1952641 - RNA, 19 nt, Homo sapiens
  misc_RNA (1)...(19): siRNA sense strand
gggccaagcgcaaguauca

SEQ ID NO: 1952642 - RNA, 19 nt, Homo sapiens
  misc_RNA (1)...(19): siRNA sense strand
gauaugcugcugaugaaau

SEQ ID NO: 1952643 - RNA, 19 nt, Homo sapiens
  misc_RNA (1)...(19): siRNA sense strand
uggauaugcugcugaugaa

SEQ ID NO: 1952644 - RNA, 19 nt, Homo sapiens
  misc_RNA (1)...(19): siRNA sense strand
gaagacaagauuagaugca

SEQ ID NO: 1952645 - RNA, 19 nt, Homo sapiens
  misc_RNA (1)...(19): siRNA sense strand
guggauaugcugcugauga

SEQ ID NO: 1952646 - RNA, 19 nt, Homo sapiens
  misc_RNA (1)...(19): siRNA sense strand
gggcugaagaauagaauug

SEQ ID NO: 1952647 - RNA, 19 nt, Homo sapiens
  misc_RNA (1)...(19): siRNA sense strand
gcugcaaguuccaguucaa

SEQ ID NO: 1952648 - RNA, 19 nt, Homo sapiens
  misc_RNA (1)...(19): siRNA sense strand
ggacgagugcgccaagauc

SEQ ID NO: 1952649 - RNA, 19 nt, Homo sapiens
  misc_RNA (1)...(19): siRNA sense strand
ccucaggaagacaagauua

SEQ ID NO: 1952650 - RNA, 19 nt, Homo sapiens
  misc_RNA (1)...(19): siRNA sense strand
gcucauccuuacguaguug

SEQ ID NO: 1952651 - RNA, 19 nt, Homo sapiens
  misc_RNA (1)...(19): siRNA sense strand
ccuagguucucauauucuu

SEQ ID NO: 1952652 - RNA, 19 nt, Homo sapiens
  misc_RNA (1)...(19): siRNA sense strand
gcgcaacaaguacuucuuc

SEQ ID NO: 1952653 - RNA, 19 nt, Homo sapiens
  misc_RNA (1)...(19): siRNA sense strand
ggccacggauucuggagau

SEQ ID NO: 1952654 - RNA, 19 nt, Homo sapiens
  misc_RNA (1)...(19): siRNA sense strand
gaaaucacucacugcauac

SEQ ID NO: 1952655 - RNA, 19 nt, Homo sapiens
  misc_RNA (1)...(19): siRNA sense strand
gccaggaccuagguucuca

SEQ ID NO: 1952656 - RNA, 19 nt, Homo sapiens
  misc_RNA (1)...(19): siRNA sense strand
gcgccgucaucaacgacua

SEQ ID NO: 1952657 - RNA, 19 nt, Homo sapiens
  misc_RNA (1)...(19): siRNA sense strand
gcgccgagcagucaucauc

SEQ ID NO: 1952658 - RNA, 19 nt, Homo sapiens
  misc_RNA (1)...(19): siRNA sense strand
gcauacggccucaggacau

SEQ ID NO: 1952659 - RNA, 19 nt, Homo sapiens
  misc_RNA (1)...(19): siRNA sense strand
gugcuucggcugcaaguuc

SEQ ID NO: 1952660 - RNA, 19 nt, Homo sapiens
  misc_RNA (1)...(19): siRNA sense strand
caggaccuagguucucaua

SEQ ID NO: 1952661 - RNA, 19 nt, Homo sapiens
  misc_RNA (1)...(19): siRNA sense strand
gcggcugcaucgugucuca

SEQ ID NO: 1952662 - RNA, 19 nt, Homo sapiens
  misc_RNA (1)...(19): siRNA sense strand
ggaaaggcuguuggcauca

SEQ ID NO: 1952663 - RNA, 19 nt, Homo sapiens
  misc_RNA (1)...(19): siRNA sense strand
acuacuggcgcaagucaua

SEQ ID NO: 1952664 - RNA, 19 nt, Homo sapiens
  misc_RNA (1)...(19): siRNA sense strand
gcgcugagaagggccugua

SEQ ID NO: 1952665 - RNA, 19 nt, Homo sapiens
  misc_RNA (1)...(19): siRNA sense strand
ggagauggacaaggaagag

SEQ ID NO: 1952666 - RNA, 19 nt, Homo sapiens
  misc_RNA (1)...(19): siRNA sense strand
ggaacucuggcucauccuu

SEQ ID NO: 1952667 - RNA, 19 nt, Homo sapiens
  misc_RNA (1)...(19): siRNA sense strand
ucaggaagacaagauuaga

SEQ ID NO: 1952668 - RNA, 19 nt, Homo sapiens
  misc_RNA (1)...(19): siRNA sense strand
ucucauauucuugguauuc

SEQ ID NO: 1952669 - RNA, 19 nt, Homo sapiens
  misc_RNA (1)...(19): siRNA sense strand
guguccguguccuucuuua

SEQ ID NO: 1952670 - RNA, 19 nt, Homo sapiens
  misc_RNA (1)...(19): siRNA sense strand
gagauggacaaggaagaga

SEQ ID NO: 1952671 - RNA, 19 nt, Homo sapiens
  misc_RNA (1)...(19): siRNA sense strand
aggaagacaagauuagaug

SEQ ID NO: 1952672 - RNA, 19 nt, Homo sapiens
  misc_RNA (1)...(19): siRNA sense strand
caggaagacaagauuagau

SEQ ID NO: 1952673 - RNA, 19 nt, Homo sapiens
  misc_RNA (1)...(19): siRNA sense strand
ggauaugcugcugaugaaa

SEQ ID NO: 1952674 - RNA, 19 nt, Homo sapiens
  misc_RNA (1)...(19): siRNA sense strand
ggcgaaggcuacacuuacg

SEQ ID NO: 1952675 - RNA, 19 nt, Homo sapiens
  misc_RNA (1)...(19): siRNA sense strand
caguggauaugcugcugau

SEQ ID NO: 1952676 - RNA, 19 nt, Homo sapiens
  misc_RNA (1)...(19): siRNA sense strand
cauacggccucaggacauc

SEQ ID NO: 1952677 - RNA, 19 nt, Homo sapiens
  misc_RNA (1)...(19): siRNA sense strand
aaaggcuguuggcaucaau

SEQ ID NO: 1952678 - RNA, 19 nt, Homo sapiens
  misc_RNA (1)...(19): siRNA sense strand
ggcucauccuuacguaguu

SEQ ID NO: 1952679 - RNA, 19 nt, Homo sapiens
  misc_RNA (1)...(19): siRNA sense strand
gaacaucugugaagaaaug

SEQ ID NO: 1952680 - RNA, 19 nt, Homo sapiens
  misc_RNA (1)...(19): siRNA sense strand
ggaagcuucuggacucuuu

SEQ ID NO: 1952681 - RNA, 19 nt, Homo sapiens
  misc_RNA (1)...(19): siRNA sense strand
caaagaggcuuaggucaga

SEQ ID NO: 1952682 - RNA, 19 nt, Homo sapiens
  misc_RNA (1)...(19): siRNA sense strand
gaagaaagcccugaucauc

SEQ ID NO: 1952683 - RNA, 19 nt, Homo sapiens
  misc_RNA (1)...(19): siRNA sense strand
cgaaagggccucucugaaa

SEQ ID NO: 1952684 - RNA, 19 nt, Homo sapiens
  misc_RNA (1)...(19): siRNA sense strand
gaaagggccucucugaaaa

SEQ ID NO: 1952685 - RNA, 19 nt, Homo sapiens
  misc_RNA (1)...(19): siRNA sense strand
gagguuagauguugaagag

SEQ ID NO: 1952686 - RNA, 19 nt, Homo sapiens
  misc_RNA (1)...(19): siRNA sense strand
gcaccagccuguccaagga

SEQ ID NO: 1952687 - RNA, 19 nt, Homo sapiens
  misc_RNA (1)...(19): siRNA sense strand
aggaagcccuguuuguuua

SEQ ID NO: 1952688 - RNA, 19 nt, Homo sapiens
  misc_RNA (1)...(19): siRNA sense strand
cuaaggcacuggcagaauu

SEQ ID NO: 1952689 - RNA, 19 nt, Homo sapiens
  misc_RNA (1)...(19): siRNA sense strand
ccugaggacuuuccaguuu

SEQ ID NO: 1952690 - RNA, 19 nt, Homo sapiens
  misc_RNA (1)...(19): siRNA sense strand
gaaaccgucuggaugaagu

SEQ ID NO: 1952691 - RNA, 19 nt, Homo sapiens
  misc_RNA (1)...(19): siRNA sense strand
gccaaacccuguugcagaa

SEQ ID NO: 1952692 - RNA, 19 nt, Homo sapiens
  misc_RNA (1)...(19): siRNA sense strand
gaacagggccuuggaggau

SEQ ID NO: 1952693 - RNA, 19 nt, Homo sapiens
  misc_RNA (1)...(19): siRNA sense strand
uuugagaucuguaagcuuu

SEQ ID NO: 1952694 - RNA, 19 nt, Homo sapiens
  misc_RNA (1)...(19): siRNA sense strand
agaagcagcuccuccaugu

SEQ ID NO: 1952695 - RNA, 19 nt, Homo sapiens
  misc_RNA (1)...(19): siRNA sense strand
gaacagggcuuggcaaaag

SEQ ID NO: 1952696 - RNA, 19 nt, Homo sapiens
  misc_RNA (1)...(19): siRNA sense strand
aaagaaaccgucuggauga

SEQ ID NO: 1952697 - RNA, 19 nt, Homo sapiens
  misc_RNA (1)...(19): siRNA sense strand
guaccugccugccuuagau

SEQ ID NO: 1952698 - RNA, 19 nt, Homo sapiens
  misc_RNA (1)...(19): siRNA sense strand
caauucaucugccacuuuc

SEQ ID NO: 1952699 - RNA, 19 nt, Homo sapiens
  misc_RNA (1)...(19): siRNA sense strand
uggaaacccucaccugcua

SEQ ID NO: 1952700 - RNA, 19 nt, Homo sapiens
  misc_RNA (1)...(19): siRNA sense strand
ggugggaggugaugaagca

SEQ ID NO: 1952701 - RNA, 19 nt, Homo sapiens
  misc_RNA (1)...(19): siRNA sense strand
gcuaugagacuuugagcaa

SEQ ID NO: 1952702 - RNA, 19 nt, Homo sapiens
  misc_RNA (1)...(19): siRNA sense strand
caguuucucugcagccaua

SEQ ID NO: 1952703 - RNA, 19 nt, Homo sapiens
  misc_RNA (1)...(19): siRNA sense strand
cagacgaggugcugaagga

SEQ ID NO: 1952704 - RNA, 19 nt, Homo sapiens
  misc_RNA (1)...(19): siRNA sense strand
uggcuuauguggaggguuu

SEQ ID NO: 1952705 - RNA, 19 nt, Homo sapiens
  misc_RNA (1)...(19): siRNA sense strand
ggauaucacagcuuccauu

SEQ ID NO: 1952706 - RNA, 19 nt, Homo sapiens
  misc_RNA (1)...(19): siRNA sense strand
uaugagacuuugagcaaga

SEQ ID NO: 1952707 - RNA, 19 nt, Homo sapiens
  misc_RNA (1)...(19): siRNA sense strand
gcaacucuccguccucuuc

SEQ ID NO: 1952708 - RNA, 19 nt, Homo sapiens
  misc_RNA (1)...(19): siRNA sense strand
guuagauguugaagaggua

SEQ ID NO: 1952709 - RNA, 19 nt, Homo sapiens
  misc_RNA (1)...(19): siRNA sense strand
gaagugcagggucccaauu

SEQ ID NO: 1952710 - RNA, 19 nt, Homo sapiens
  misc_RNA (1)...(19): siRNA sense strand
gaagaccucaauacaacuu

SEQ ID NO: 1952711 - RNA, 19 nt, Homo sapiens
  misc_RNA (1)...(19): siRNA sense strand
uaaggcacuggcagaauua

SEQ ID NO: 1952712 - RNA, 19 nt, Homo sapiens
  misc_RNA (1)...(19): siRNA sense strand
acaggcagguggucucuga

SEQ ID NO: 1952713 - RNA, 19 nt, Homo sapiens
  misc_RNA (1)...(19): siRNA sense strand
ggacaaguuacgacagcua

SEQ ID NO: 1952714 - RNA, 19 nt, Homo sapiens
  misc_RNA (1)...(19): siRNA sense strand
caaacccuguugcagaaga

SEQ ID NO: 1952715 - RNA, 19 nt, Homo sapiens
  misc_RNA (1)...(19): siRNA sense strand
gaagaagaaagcccugauc

SEQ ID NO: 1952716 - RNA, 19 nt, Homo sapiens
  misc_RNA (1)...(19): siRNA sense strand
ccacuccucuucagcuugu

SEQ ID NO: 1952717 - RNA, 19 nt, Homo sapiens
  misc_RNA (1)...(19): siRNA sense strand
ccaauucaucugccacuuu

SEQ ID NO: 1952718 - RNA, 19 nt, Homo sapiens
  misc_RNA (1)...(19): siRNA sense strand
gauaucacagcuuccauug

SEQ ID NO: 1952719 - RNA, 19 nt, Homo sapiens
  misc_RNA (1)...(19): siRNA sense strand
cuccugaacugccugauga

SEQ ID NO: 1952720 - RNA, 19 nt, Homo sapiens
  misc_RNA (1)...(19): siRNA sense strand
gaauuuguccugccuuucu

SEQ ID NO: 1952721 - RNA, 19 nt, Homo sapiens
  misc_RNA (1)...(19): siRNA sense strand
gaacucggacacccagaau

SEQ ID NO: 1952722 - RNA, 19 nt, Homo sapiens
  misc_RNA (1)...(19): siRNA sense strand
ccugaugagucccgugaaa

SEQ ID NO: 1952723 - RNA, 19 nt, Homo sapiens
  misc_RNA (1)...(19): siRNA sense strand
auaaaguccuugcagguau

SEQ ID NO: 1952724 - RNA, 19 nt, Homo sapiens
  misc_RNA (1)...(19): siRNA sense strand
gggaggugaugaagcacaa

SEQ ID NO: 1952725 - RNA, 19 nt, Homo sapiens
  misc_RNA (1)...(19): siRNA sense strand
uugaacaucugugaagaaa

SEQ ID NO: 1952726 - RNA, 19 nt, Homo sapiens
  misc_RNA (1)...(19): siRNA sense strand
ucaaagaaaccgucuggau

SEQ ID NO: 1952727 - RNA, 19 nt, Homo sapiens
  misc_RNA (1)...(19): siRNA sense strand
caggaagaccucaauacaa

SEQ ID NO: 1952728 - RNA, 19 nt, Homo sapiens
  misc_RNA (1)...(19): siRNA sense strand
uggaacaugugaccguuga

SEQ ID NO: 1952729 - RNA, 19 nt, Homo sapiens
  misc_RNA (1)...(19): siRNA sense strand
aggaagaccucaauacaac

SEQ ID NO: 1952730 - RNA, 19 nt, Homo sapiens
  misc_RNA (1)...(19): siRNA sense strand
ugaccucgcuggccaaacu

SEQ ID NO: 1952731 - RNA, 19 nt, Homo sapiens
  misc_RNA (1)...(19): siRNA sense strand
gcgaaagggccucucugaa

SEQ ID NO: 1952732 - RNA, 19 nt, Homo sapiens
  misc_RNA (1)...(19): siRNA sense strand
acgaggugcugaaggaauu

SEQ ID NO: 1952733 - RNA, 19 nt, Homo sapiens
  misc_RNA (1)...(19): siRNA sense strand
aaaaguugcuggcuuaugu

SEQ ID NO: 1952734 - RNA, 19 nt, Homo sapiens
  misc_RNA (1)...(19): siRNA sense strand
ggaccgcuuuagcaaauac

SEQ ID NO: 1952735 - RNA, 19 nt, Homo sapiens
  misc_RNA (1)...(19): siRNA sense strand
gaacaugugaccguugaca

SEQ ID NO: 1952736 - RNA, 19 nt, Homo sapiens
  misc_RNA (1)...(19): siRNA sense strand
gcaagaccaacccuucugu

SEQ ID NO: 1952737 - RNA, 19 nt, Homo sapiens
  misc_RNA (1)...(19): siRNA sense strand
uaaaguccuugcagguauc

SEQ ID NO: 1952738 - RNA, 19 nt, Homo sapiens
  misc_RNA (1)...(19): siRNA sense strand
gcacuggcagaauuaacaa

SEQ ID NO: 1952739 - RNA, 19 nt, Homo sapiens
  misc_RNA (1)...(19): siRNA sense strand
ggaacucggacacccagaa

SEQ ID NO: 1952740 - RNA, 19 nt, Homo sapiens
  misc_RNA (1)...(19): siRNA sense strand
cuaggacccuugaacaucu

SEQ ID NO: 1952741 - RNA, 19 nt, Homo sapiens
  misc_RNA (1)...(19): siRNA sense strand
gcuccuccaugucccuuau

SEQ ID NO: 1952742 - RNA, 19 nt, Homo sapiens
  misc_RNA (1)...(19): siRNA sense strand
ggucagacuguucagcaaa

SEQ ID NO: 1952743 - RNA, 19 nt, Homo sapiens
  misc_RNA (1)...(19): siRNA sense strand
ccggaugucuggaucaagu

SEQ ID NO: 1952744 - RNA, 19 nt, Homo sapiens
  misc_RNA (1)...(19): siRNA sense strand
gaagcggugccucucuuug

SEQ ID NO: 1952745 - RNA, 19 nt, Homo sapiens
  misc_RNA (1)...(19): siRNA sense strand
ugucaugccucaaagaaac

SEQ ID NO: 1952746 - RNA, 19 nt, Homo sapiens
  misc_RNA (1)...(19): siRNA sense strand
cugaaaaguugcuggcuua

SEQ ID NO: 1952747 - RNA, 19 nt, Homo sapiens
  misc_RNA (1)...(19): siRNA sense strand
aauaaaguccuugcaggua

SEQ ID NO: 1952748 - RNA, 19 nt, Homo sapiens
  misc_RNA (1)...(19): siRNA sense strand
ggaagaagaaagcccugau

SEQ ID NO: 1952749 - RNA, 19 nt, Homo sapiens
  misc_RNA (1)...(19): siRNA sense strand
uccuggagcuccuguguga

SEQ ID NO: 1952750 - RNA, 19 nt, Homo sapiens
  misc_RNA (1)...(19): siRNA sense strand
ucaggaagaccucaauaca

SEQ ID NO: 1952751 - RNA, 19 nt, Homo sapiens
  misc_RNA (1)...(19): siRNA sense strand
uggcugacaugcugacugu

SEQ ID NO: 1952752 - RNA, 19 nt, Homo sapiens
  misc_RNA (1)...(19): siRNA sense strand
ggcgaaagggccucucuga

SEQ ID NO: 1952753 - RNA, 19 nt, Homo sapiens
  misc_RNA (1)...(19): siRNA sense strand
caaccacaccauccucuuc

SEQ ID NO: 1952754 - RNA, 19 nt, Homo sapiens
  misc_RNA (1)...(19): siRNA sense strand
gccaugcucugcacaucau

SEQ ID NO: 1952755 - RNA, 19 nt, Homo sapiens
  misc_RNA (1)...(19): siRNA sense strand
gaggaggucagacuguuca

SEQ ID NO: 1952756 - RNA, 19 nt, Homo sapiens
  misc_RNA (1)...(19): siRNA sense strand
ggugucaugccucaaagaa

SEQ ID NO: 1952757 - RNA, 19 nt, Homo sapiens
  misc_RNA (1)...(19): siRNA sense strand
auggaagugugcuacauuu

SEQ ID NO: 1952758 - RNA, 19 nt, Homo sapiens
  misc_RNA (1)...(19): siRNA sense strand
acgcgacgcucuaccugaa

SEQ ID NO: 1952759 - RNA, 19 nt, Homo sapiens
  misc_RNA (1)...(19): siRNA sense strand
gaagcuucuggacucuuua

SEQ ID NO: 1952760 - RNA, 19 nt, Homo sapiens
  misc_RNA (1)...(19): siRNA sense strand
gaaacccucaccugcuaug

SEQ ID NO: 1952761 - RNA, 19 nt, Homo sapiens
  misc_RNA (1)...(19): siRNA sense strand
ggaccgccauauggaagug

SEQ ID NO: 1952762 - RNA, 19 nt, Homo sapiens
  misc_RNA (1)...(19): siRNA sense strand
gaagcccuguuuguuuaca

SEQ ID NO: 1952763 - RNA, 19 nt, Homo sapiens
  misc_RNA (1)...(19): siRNA sense strand
gaccuaggacccuugaaca

SEQ ID NO: 1952764 - RNA, 19 nt, Homo sapiens
  misc_RNA (1)...(19): siRNA sense strand
uccaguggcugcucuucuu

SEQ ID NO: 1952765 - RNA, 19 nt, Homo sapiens
  misc_RNA (1)...(19): siRNA sense strand
aagaaaccgucuggaugaa

SEQ ID NO: 1952766 - RNA, 19 nt, Homo sapiens
  misc_RNA (1)...(19): siRNA sense strand
gcacacucccagcccuuug

SEQ ID NO: 1952767 - RNA, 19 nt, Homo sapiens
  misc_RNA (1)...(19): siRNA sense strand
uggcagaauuaacaaaguc

SEQ ID NO: 1952768 - RNA, 19 nt, Homo sapiens
  misc_RNA (1)...(19): siRNA sense strand
gagcaagaccaacccuucu

SEQ ID NO: 1952769 - RNA, 19 nt, Homo sapiens
  misc_RNA (1)...(19): siRNA sense strand
ggaccuaggacccuugaac

SEQ ID NO: 1952770 - RNA, 19 nt, Homo sapiens
  misc_RNA (1)...(19): siRNA sense strand
gaggaugcugucucucuug

SEQ ID NO: 1952771 - RNA, 19 nt, Homo sapiens
  misc_RNA (1)...(19): siRNA sense strand
ugagaucuguaagcuuuca

SEQ ID NO: 1952772 - RNA, 19 nt, Homo sapiens
  misc_RNA (1)...(19): siRNA sense strand
cggugccucucuuuggaua

SEQ ID NO: 1952773 - RNA, 19 nt, Homo sapiens
  misc_RNA (1)...(19): siRNA sense strand
uuggaccgcuuuagcaaau

SEQ ID NO: 1952774 - RNA, 19 nt, Homo sapiens
  misc_RNA (1)...(19): siRNA sense strand
uggcagagaaggugaagga

SEQ ID NO: 1952775 - RNA, 19 nt, Homo sapiens
  misc_RNA (1)...(19): siRNA sense strand
ggaagugcagggucccaau

SEQ ID NO: 1952776 - RNA, 19 nt, Homo sapiens
  misc_RNA (1)...(19): siRNA sense strand
gggccucucugaaaaguug

SEQ ID NO: 1952777 - RNA, 19 nt, Homo sapiens
  misc_RNA (1)...(19): siRNA sense strand
aacagggccuuggaggaua

SEQ ID NO: 1952778 - RNA, 19 nt, Homo sapiens
  misc_RNA (1)...(19): siRNA sense strand
gaaggugaaggaggcagaa

SEQ ID NO: 1952779 - RNA, 19 nt, Homo sapiens
  misc_RNA (1)...(19): siRNA sense strand
gugaauauguggccaagua

SEQ ID NO: 1952780 - RNA, 19 nt, Homo sapiens
  misc_RNA (1)...(19): siRNA sense strand
ccacacuucucauguauaa

SEQ ID NO: 1952781 - RNA, 19 nt, Homo sapiens
  misc_RNA (1)...(19): siRNA sense strand
uaacaaagcccuuccauuc

SEQ ID NO: 1952782 - RNA, 19 nt, Homo sapiens
  misc_RNA (1)...(19): siRNA sense strand
ucucugagguugacaauaa

SEQ ID NO: 1952783 - RNA, 19 nt, Homo sapiens
  misc_RNA (1)...(19): siRNA sense strand
gcacuuacuuucagcagaa

SEQ ID NO: 1952784 - RNA, 19 nt, Homo sapiens
  misc_RNA (1)...(19): siRNA sense strand
ugacucaacuuugcacuua

SEQ ID NO: 1952785 - RNA, 19 nt, Homo sapiens
  misc_RNA (1)...(19): siRNA sense strand
cagcagcucuucucaaguu

SEQ ID NO: 1952786 - RNA, 19 nt, Homo sapiens
  misc_RNA (1)...(19): siRNA sense strand
ccacaugacuuggaauuga

SEQ ID NO: 1952787 - RNA, 19 nt, Homo sapiens
  misc_RNA (1)...(19): siRNA sense strand
ugaggaagaugaugaccua

SEQ ID NO: 1952788 - RNA, 19 nt, Homo sapiens
  misc_RNA (1)...(19): siRNA sense strand
ggaagaugaugaccuaaag

SEQ ID NO: 1952789 - RNA, 19 nt, Homo sapiens
  misc_RNA (1)...(19): siRNA sense strand
gcugagugcugaugaguug

SEQ ID NO: 1952790 - RNA, 19 nt, Homo sapiens
  misc_RNA (1)...(19): siRNA sense strand
caaggcagaugaccuaauc

SEQ ID NO: 1952791 - RNA, 19 nt, Homo sapiens
  misc_RNA (1)...(19): siRNA sense strand
gggaaacccucagauauca

SEQ ID NO: 1952792 - RNA, 19 nt, Homo sapiens
  misc_RNA (1)...(19): siRNA sense strand
gaucguagguacugcaaca

SEQ ID NO: 1952793 - RNA, 19 nt, Homo sapiens
  misc_RNA (1)...(19): siRNA sense strand
gagcaaggcagaugaccua

SEQ ID NO: 1952794 - RNA, 19 nt, Homo sapiens
  misc_RNA (1)...(19): siRNA sense strand
agaaugauccuauagauga

SEQ ID NO: 1952795 - RNA, 19 nt, Homo sapiens
  misc_RNA (1)...(19): siRNA sense strand
guuggacacugaucuguuu

SEQ ID NO: 1952796 - RNA, 19 nt, Homo sapiens
  misc_RNA (1)...(19): siRNA sense strand
uacuggagcuucaggaaua

SEQ ID NO: 1952797 - RNA, 19 nt, Homo sapiens
  misc_RNA (1)...(19): siRNA sense strand
ccugaugacuuacaagauu

SEQ ID NO: 1952798 - RNA, 19 nt, Homo sapiens
  misc_RNA (1)...(19): siRNA sense strand
gaauauguggccaaguaua

SEQ ID NO: 1952799 - RNA, 19 nt, Homo sapiens
  misc_RNA (1)...(19): siRNA sense strand
ccaaugagaucgcugacau

SEQ ID NO: 1952800 - RNA, 19 nt, Homo sapiens
  misc_RNA (1)...(19): siRNA sense strand
gaacagugcgcuaacaaag

SEQ ID NO: 1952801 - RNA, 19 nt, Homo sapiens
  misc_RNA (1)...(19): siRNA sense strand
gcacggcaguugucucaca

SEQ ID NO: 1952802 - RNA, 19 nt, Homo sapiens
  misc_RNA (1)...(19): siRNA sense strand
gccgagaggugaacacaga

SEQ ID NO: 1952803 - RNA, 19 nt, Homo sapiens
  misc_RNA (1)...(19): siRNA sense strand
guccaggaguugucagaua

SEQ ID NO: 1952804 - RNA, 19 nt, Homo sapiens
  misc_RNA (1)...(19): siRNA sense strand
gcagguacuuggcuuuauc

SEQ ID NO: 1952805 - RNA, 19 nt, Homo sapiens
  misc_RNA (1)...(19): siRNA sense strand
gggcguauaguacaugaua

SEQ ID NO: 1952806 - RNA, 19 nt, Homo sapiens
  misc_RNA (1)...(19): siRNA sense strand
guugucagauagaggaaua

SEQ ID NO: 1952807 - RNA, 19 nt, Homo sapiens
  misc_RNA (1)...(19): siRNA sense strand
gaagacccauuugcuuuca

SEQ ID NO: 1952808 - RNA, 19 nt, Homo sapiens
  misc_RNA (1)...(19): siRNA sense strand
caagcaaugugaauaugug

SEQ ID NO: 1952809 - RNA, 19 nt, Homo sapiens
  misc_RNA (1)...(19): siRNA sense strand
gaaacccucagauaucaaa

SEQ ID NO: 1952810 - RNA, 19 nt, Homo sapiens
  misc_RNA (1)...(19): siRNA sense strand
gaacaccagccuaccaaug

SEQ ID NO: 1952811 - RNA, 19 nt, Homo sapiens
  misc_RNA (1)...(19): siRNA sense strand
ccuggaaacugaauuggaa

SEQ ID NO: 1952812 - RNA, 19 nt, Homo sapiens
  misc_RNA (1)...(19): siRNA sense strand
gggcaacugugagaaagaa

SEQ ID NO: 1952813 - RNA, 19 nt, Homo sapiens
  misc_RNA (1)...(19): siRNA sense strand
ggaaacauauacacuucuc

SEQ ID NO: 1952814 - RNA, 19 nt, Homo sapiens
  misc_RNA (1)...(19): siRNA sense strand
gcagugcucugugccaguu

SEQ ID NO: 1952815 - RNA, 19 nt, Homo sapiens
  misc_RNA (1)...(19): siRNA sense strand
gucuagagcuggaugagaa

SEQ ID NO: 1952816 - RNA, 19 nt, Homo sapiens
  misc_RNA (1)...(19): siRNA sense strand
acggcuaccugaugacuua

SEQ ID NO: 1952817 - RNA, 19 nt, Homo sapiens
  misc_RNA (1)...(19): siRNA sense strand
guacucuggugauaauaug

SEQ ID NO: 1952818 - RNA, 19 nt, Homo sapiens
  misc_RNA (1)...(19): siRNA sense strand
gcuauugaaugggcguaua

SEQ ID NO: 1952819 - RNA, 19 nt, Homo sapiens
  misc_RNA (1)...(19): siRNA sense strand
caccagacauuguuuccaa

SEQ ID NO: 1952820 - RNA, 19 nt, Homo sapiens
  misc_RNA (1)...(19): siRNA sense strand
ugaauuggaagacccauuu

SEQ ID NO: 1952821 - RNA, 19 nt, Homo sapiens
  misc_RNA (1)...(19): siRNA sense strand
cgaagaggcugaggagcuu

SEQ ID NO: 1952822 - RNA, 19 nt, Homo sapiens
  misc_RNA (1)...(19): siRNA sense strand
ucgcugacauuccacauga

SEQ ID NO: 1952823 - RNA, 19 nt, Homo sapiens
  misc_RNA (1)...(19): siRNA sense strand
gaugaugaccuaaagaaag

SEQ ID NO: 1952824 - RNA, 19 nt, Homo sapiens
  misc_RNA (1)...(19): siRNA sense strand
caacagccacuugcaggua

SEQ ID NO: 1952825 - RNA, 19 nt, Homo sapiens
  misc_RNA (1)...(19): siRNA sense strand
ugagaucgcugacauucca

SEQ ID NO: 1952826 - RNA, 19 nt, Homo sapiens
  misc_RNA (1)...(19): siRNA sense strand
gaaacugugcacccagaaa

SEQ ID NO: 1952827 - RNA, 19 nt, Homo sapiens
  misc_RNA (1)...(19): siRNA sense strand
ggaagacccauuugcuuuc

SEQ ID NO: 1952828 - RNA, 19 nt, Homo sapiens
  misc_RNA (1)...(19): siRNA sense strand
gaagaugaugaccuaaaga

SEQ ID NO: 1952829 - RNA, 19 nt, Homo sapiens
  misc_RNA (1)...(19): siRNA sense strand
cggcauacguuuaggaaag

SEQ ID NO: 1952830 - RNA, 19 nt, Homo sapiens
  misc_RNA (1)...(19): siRNA sense strand
ucuccacacuucucaugua

SEQ ID NO: 1952831 - RNA, 19 nt, Homo sapiens
  misc_RNA (1)...(19): siRNA sense strand
ccucagauaucaaagacau

SEQ ID NO: 1952832 - RNA, 19 nt, Homo sapiens
  misc_RNA (1)...(19): siRNA sense strand
ccaacggacuggauggaau

SEQ ID NO: 1952833 - RNA, 19 nt, Homo sapiens
  misc_RNA (1)...(19): siRNA sense strand
ccagagagagacagagauu

SEQ ID NO: 1952834 - RNA, 19 nt, Homo sapiens
  misc_RNA (1)...(19): siRNA sense strand
ucaaugaggaagaugauga

SEQ ID NO: 1952835 - RNA, 19 nt, Homo sapiens
  misc_RNA (1)...(19): siRNA sense strand
caacuuugcacuuacuuuc

SEQ ID NO: 1952836 - RNA, 19 nt, Homo sapiens
  misc_RNA (1)...(19): siRNA sense strand
gaaugggcguauaguacau

SEQ ID NO: 1952837 - RNA, 19 nt, Homo sapiens
  misc_RNA (1)...(19): siRNA sense strand
cacaugacuuggaauugaa

SEQ ID NO: 1952838 - RNA, 19 nt, Homo sapiens
  misc_RNA (1)...(19): siRNA sense strand
aaccaagccuccugcacua

SEQ ID NO: 1952839 - RNA, 19 nt, Homo sapiens
  misc_RNA (1)...(19): siRNA sense strand
gcacccaccacacacacua

SEQ ID NO: 1952840 - RNA, 19 nt, Homo sapiens
  misc_RNA (1)...(19): siRNA sense strand
cugaugaguugccggauga

SEQ ID NO: 1952841 - RNA, 19 nt, Homo sapiens
  misc_RNA (1)...(19): siRNA sense strand
uggaagacccauuugcuuu

SEQ ID NO: 1952842 - RNA, 19 nt, Homo sapiens
  misc_RNA (1)...(19): siRNA sense strand
gcagaggaaacccaggaaa

SEQ ID NO: 1952843 - RNA, 19 nt, Homo sapiens
  misc_RNA (1)...(19): siRNA sense strand
aauauguggccaaguauaa

SEQ ID NO: 1952844 - RNA, 19 nt, Homo sapiens
  misc_RNA (1)...(19): siRNA sense strand
cugaugacuuacaagauuu

SEQ ID NO: 1952845 - RNA, 19 nt, Homo sapiens
  misc_RNA (1)...(19): siRNA sense strand
gaccggauccucaugaaag

SEQ ID NO: 1952846 - RNA, 19 nt, Homo sapiens
  misc_RNA (1)...(19): siRNA sense strand
gaaugauccuauagaugag

SEQ ID NO: 1952847 - RNA, 19 nt, Homo sapiens
  misc_RNA (1)...(19): siRNA sense strand
gaagggaaacauauacacu

SEQ ID NO: 1952848 - RNA, 19 nt, Homo sapiens
  misc_RNA (1)...(19): siRNA sense strand
gaaggucaggcaccagaug

SEQ ID NO: 1952849 - RNA, 19 nt, Homo sapiens
  misc_RNA (1)...(19): siRNA sense strand
gaagccauuaugauaguga

SEQ ID NO: 1952850 - RNA, 19 nt, Homo sapiens
  misc_RNA (1)...(19): siRNA sense strand
ugacauuccacaugacuug

SEQ ID NO: 1952851 - RNA, 19 nt, Homo sapiens
  misc_RNA (1)...(19): siRNA sense strand
gaaagccacagccuucucu

SEQ ID NO: 1952852 - RNA, 19 nt, Homo sapiens
  misc_RNA (1)...(19): siRNA sense strand
ggcuacgccuucuguauca

SEQ ID NO: 1952853 - RNA, 19 nt, Homo sapiens
  misc_RNA (1)...(19): siRNA sense strand
caacggcuacgccuucugu

SEQ ID NO: 1952854 - RNA, 19 nt, Homo sapiens
  misc_RNA (1)...(19): siRNA sense strand
caacggacuggauggaaug

SEQ ID NO: 1952855 - RNA, 19 nt, Homo sapiens
  misc_RNA (1)...(19): siRNA sense strand
guacugcaacagccacuug

SEQ ID NO: 1952856 - RNA, 19 nt, Homo sapiens
  misc_RNA (1)...(19): siRNA sense strand
uccaacauauccucuugaa

SEQ ID NO: 1952857 - RNA, 19 nt, Homo sapiens
  misc_RNA (1)...(19): siRNA sense strand
ggacugaccggauccucau

SEQ ID NO: 1952858 - RNA, 19 nt, Homo sapiens
  misc_RNA (1)...(19): siRNA sense strand
gcagcacucccaccuguca

SEQ ID NO: 1952859 - RNA, 19 nt, Homo sapiens
  misc_RNA (1)...(19): siRNA sense strand
ggugaacagugcgcuaaca

SEQ ID NO: 1952860 - RNA, 19 nt, Homo sapiens
  misc_RNA (1)...(19): siRNA sense strand
uggaagccauuaugauagu

SEQ ID NO: 1952861 - RNA, 19 nt, Homo sapiens
  misc_RNA (1)...(19): siRNA sense strand
gaauuggaagacccauuug

SEQ ID NO: 1952862 - RNA, 19 nt, Homo sapiens
  misc_RNA (1)...(19): siRNA sense strand
guucugcuaccuugucaaa

SEQ ID NO: 1952863 - RNA, 19 nt, Homo sapiens
  misc_RNA (1)...(19): siRNA sense strand
ggcguauaguacaugauaa

SEQ ID NO: 1952864 - RNA, 19 nt, Homo sapiens
  misc_RNA (1)...(19): siRNA sense strand
gcuaccugaugacuuacaa

SEQ ID NO: 1952865 - RNA, 19 nt, Homo sapiens
  misc_RNA (1)...(19): siRNA sense strand
caaguugcacagccaaguu

SEQ ID NO: 1952866 - RNA, 19 nt, Homo sapiens
  misc_RNA (1)...(19): siRNA sense strand
ccagcagcaugcaguggaa

SEQ ID NO: 1952867 - RNA, 19 nt, Homo sapiens
  misc_RNA (1)...(19): siRNA sense strand
gguuuggacuggucugaag

SEQ ID NO: 1952868 - RNA, 19 nt, Homo sapiens
  misc_RNA (1)...(19): siRNA sense strand
agagcaaguuggcccagaa

SEQ ID NO: 1952869 - RNA, 19 nt, Homo sapiens
  misc_RNA (1)...(19): siRNA sense strand
aaucagaggaucguaggua

SEQ ID NO: 1952870 - RNA, 19 nt, Homo sapiens
  misc_RNA (1)...(19): siRNA sense strand
gcaaggcagaugaccuaau

SEQ ID NO: 1952871 - RNA, 19 nt, Homo sapiens
  misc_RNA (1)...(19): siRNA sense strand
ccgggaaacccucagauau

SEQ ID NO: 1952872 - RNA, 19 nt, Homo sapiens
  misc_RNA (1)...(19): siRNA sense strand
gcacccagaaacaucaguu

SEQ ID NO: 1952873 - RNA, 19 nt, Homo sapiens
  misc_RNA (1)...(19): siRNA sense strand
ugaguugccggaugacauu

SEQ ID NO: 1952874 - RNA, 19 nt, Homo sapiens
  misc_RNA (1)...(19): siRNA sense strand
caucguacucuggugauaa

SEQ ID NO: 1952875 - RNA, 19 nt, Homo sapiens
  misc_RNA (1)...(19): siRNA sense strand
ggaagccauuaugauagug

SEQ ID NO: 1952876 - RNA, 19 nt, Homo sapiens
  misc_RNA (1)...(19): siRNA sense strand
guacuggagcuucaggaau

SEQ ID NO: 1952877 - RNA, 19 nt, Homo sapiens
  misc_RNA (1)...(19): siRNA sense strand
ugccacggcuaccugauga

SEQ ID NO: 1952878 - RNA, 19 nt, Homo sapiens
  misc_RNA (1)...(19): siRNA sense strand
aauaagcccuugugcucau

SEQ ID NO: 1952879 - RNA, 19 nt, Homo sapiens
  misc_RNA (1)...(19): siRNA sense strand
ggacgugguucaggccauu

SEQ ID NO: 1952880 - RNA, 19 nt, Homo sapiens
  misc_RNA (1)...(19): siRNA sense strand
uggacgugcuggugaauaa

SEQ ID NO: 1952881 - RNA, 19 nt, Homo sapiens
  misc_RNA (1)...(19): siRNA sense strand
cuaugcagcuuccaaguuc

SEQ ID NO: 1952882 - RNA, 19 nt, Homo sapiens
  misc_RNA (1)...(19): siRNA sense strand
ggaauuggucuggaacuug

SEQ ID NO: 1952883 - RNA, 19 nt, Homo sapiens
  misc_RNA (1)...(19): siRNA sense strand
ggugaauaaugcuggaaug

SEQ ID NO: 1952884 - RNA, 19 nt, Homo sapiens
  misc_RNA (1)...(19): siRNA sense strand
cuggagggauucuucgaaa

SEQ ID NO: 1952885 - RNA, 19 nt, Homo sapiens
  misc_RNA (1)...(19): siRNA sense strand
caaccuuggccuucaaugu

SEQ ID NO: 1952886 - RNA, 19 nt, Homo sapiens
  misc_RNA (1)...(19): siRNA sense strand
gaucuccggcugcucauca

SEQ ID NO: 1952887 - RNA, 19 nt, Homo sapiens
  misc_RNA (1)...(19): siRNA sense strand
cugagacccugcacuacuu

SEQ ID NO: 1952888 - RNA, 19 nt, Homo sapiens
  misc_RNA (1)...(19): siRNA sense strand
cuucaacgaugucuaugca

SEQ ID NO: 1952889 - RNA, 19 nt, Homo sapiens
  misc_RNA (1)...(19): siRNA sense strand
gcaguucaacaucuucauc

SEQ ID NO: 1952890 - RNA, 19 nt, Homo sapiens
  misc_RNA (1)...(19): siRNA sense strand
ccaugcagaaugucuuuga

SEQ ID NO: 1952891 - RNA, 19 nt, Homo sapiens
  misc_RNA (1)...(19): siRNA sense strand
ccucaaccuuggccuucaa

SEQ ID NO: 1952892 - RNA, 19 nt, Homo sapiens
  misc_RNA (1)...(19): siRNA sense strand
cccagugucucagcuguau

SEQ ID NO: 1952893 - RNA, 19 nt, Homo sapiens
  misc_RNA (1)...(19): siRNA sense strand
ucgaaagccucgcuaucca

SEQ ID NO: 1952894 - RNA, 19 nt, Homo sapiens
  misc_RNA (1)...(19): siRNA sense strand
ggagggauucuucgaaagc

SEQ ID NO: 1952895 - RNA, 19 nt, Homo sapiens
  misc_RNA (1)...(19): siRNA sense strand
cggcugcucaucaggaauu

SEQ ID NO: 1952896 - RNA, 19 nt, Homo sapiens
  misc_RNA (1)...(19): siRNA sense strand
guggugaucagcaguguca

SEQ ID NO: 1952897 - RNA, 19 nt, Homo sapiens
  misc_RNA (1)...(19): siRNA sense strand
ccugcagggugucaucuuc

SEQ ID NO: 1952898 - RNA, 19 nt, Homo sapiens
  misc_RNA (1)...(19): siRNA sense strand
gacgugcuggugaauaaug

SEQ ID NO: 1952899 - RNA, 19 nt, Homo sapiens
  misc_RNA (1)...(19): siRNA sense strand
ggugaucagcagugucaug

SEQ ID NO: 1952900 - RNA, 19 nt, Homo sapiens
  misc_RNA (1)...(19): siRNA sense strand
ucuaugcagcuuccaaguu

SEQ ID NO: 1952901 - RNA, 19 nt, Homo sapiens
  misc_RNA (1)...(19): siRNA sense strand
gauaagaccuugccuaaua

SEQ ID NO: 1952902 - RNA, 19 nt, Homo sapiens
  misc_RNA (1)...(19): siRNA sense strand
gaagugauguuuacaaauc

SEQ ID NO: 1952903 - RNA, 19 nt, Homo sapiens
  misc_RNA (1)...(19): siRNA sense strand
ugaagaaacugaagagaaa

SEQ ID NO: 1952904 - RNA, 19 nt, Homo sapiens
  misc_RNA (1)...(19): siRNA sense strand
ccacuugccuuccagaaua

SEQ ID NO: 1952905 - RNA, 19 nt, Homo sapiens
  misc_RNA (1)...(19): siRNA sense strand
gagaagugauguuuacaaa

SEQ ID NO: 1952906 - RNA, 19 nt, Homo sapiens
  misc_RNA (1)...(19): siRNA sense strand
gaauggcccucaucaaaga

SEQ ID NO: 1952907 - RNA, 19 nt, Homo sapiens
  misc_RNA (1)...(19): siRNA sense strand
gcaaacaucucucuguagu

SEQ ID NO: 1952908 - RNA, 19 nt, Homo sapiens
  misc_RNA (1)...(19): siRNA sense strand
ggaagagacuugagcuguu

SEQ ID NO: 1952909 - RNA, 19 nt, Homo sapiens
  misc_RNA (1)...(19): siRNA sense strand
gaagagacuugagcuguug

SEQ ID NO: 1952910 - RNA, 19 nt, Homo sapiens
  misc_RNA (1)...(19): siRNA sense strand
ggaaaauacucgaugguua

SEQ ID NO: 1952911 - RNA, 19 nt, Homo sapiens
  misc_RNA (1)...(19): siRNA sense strand
gaaauuccauuacagaaac

SEQ ID NO: 1952912 - RNA, 19 nt, Homo sapiens
  misc_RNA (1)...(19): siRNA sense strand
cagcagaacuuguauacau

SEQ ID NO: 1952913 - RNA, 19 nt, Homo sapiens
  misc_RNA (1)...(19): siRNA sense strand
ugaacacgaugucccuuua

SEQ ID NO: 1952914 - RNA, 19 nt, Homo sapiens
  misc_RNA (1)...(19): siRNA sense strand
gcgaauggcccucaucaaa

SEQ ID NO: 1952915 - RNA, 19 nt, Homo sapiens
  misc_RNA (1)...(19): siRNA sense strand
ggaauucccucaggagaug

SEQ ID NO: 1952916 - RNA, 19 nt, Homo sapiens
  misc_RNA (1)...(19): siRNA sense strand
gaggauuuguaaugcaaua

SEQ ID NO: 1952917 - RNA, 19 nt, Homo sapiens
  misc_RNA (1)...(19): siRNA sense strand
caacagaccuccagcuacu

SEQ ID NO: 1952918 - RNA, 19 nt, Homo sapiens
  misc_RNA (1)...(19): siRNA sense strand
gagcaaauugucacaguaa

SEQ ID NO: 1952919 - RNA, 19 nt, Homo sapiens
  misc_RNA (1)...(19): siRNA sense strand
ccagaaaacuccacucuuu

SEQ ID NO: 1952920 - RNA, 19 nt, Homo sapiens
  misc_RNA (1)...(19): siRNA sense strand
uggagaguuuguucuauua

SEQ ID NO: 1952921 - RNA, 19 nt, Homo sapiens
  misc_RNA (1)...(19): siRNA sense strand
aagcaaacaucucucugua

SEQ ID NO: 1952922 - RNA, 19 nt, Homo sapiens
  misc_RNA (1)...(19): siRNA sense strand
gcagugcucuugugcgaau

SEQ ID NO: 1952923 - RNA, 19 nt, Homo sapiens
  misc_RNA (1)...(19): siRNA sense strand
gggcauuccuuaagcauuc

SEQ ID NO: 1952924 - RNA, 19 nt, Homo sapiens
  misc_RNA (1)...(19): siRNA sense strand
gacuugagcuguuguguag

SEQ ID NO: 1952925 - RNA, 19 nt, Homo sapiens
  misc_RNA (1)...(19): siRNA sense strand
gaccagaggauuuguaaug

SEQ ID NO: 1952926 - RNA, 19 nt, Homo sapiens
  misc_RNA (1)...(19): siRNA sense strand
ggauaucaguuucuagaca

SEQ ID NO: 1952927 - RNA, 19 nt, Homo sapiens
  misc_RNA (1)...(19): siRNA sense strand
gcauucagcagaacuugua

SEQ ID NO: 1952928 - RNA, 19 nt, Homo sapiens
  misc_RNA (1)...(19): siRNA sense strand
gaacacgaugucccuuuaa

SEQ ID NO: 1952929 - RNA, 19 nt, Homo sapiens
  misc_RNA (1)...(19): siRNA sense strand
ccacagagaagugauguuu

SEQ ID NO: 1952930 - RNA, 19 nt, Homo sapiens
  misc_RNA (1)...(19): siRNA sense strand
guggagaguuuguucuauu

SEQ ID NO: 1952931 - RNA, 19 nt, Homo sapiens
  misc_RNA (1)...(19): siRNA sense strand
ugaagcagcuaugcguuaa

SEQ ID NO: 1952932 - RNA, 19 nt, Homo sapiens
  misc_RNA (1)...(19): siRNA sense strand
aaaccuaccuggcaguguu

SEQ ID NO: 1952933 - RNA, 19 nt, Homo sapiens
  misc_RNA (1)...(19): siRNA sense strand
ugaaucaggucccgaaagu

SEQ ID NO: 1952934 - RNA, 19 nt, Homo sapiens
  misc_RNA (1)...(19): siRNA sense strand
cuaaagagaucagagaaag

SEQ ID NO: 1952935 - RNA, 19 nt, Homo sapiens
  misc_RNA (1)...(19): siRNA sense strand
cagcuacucuuugcauuug

SEQ ID NO: 1952936 - RNA, 19 nt, Homo sapiens
  misc_RNA (1)...(19): siRNA sense strand
gaccuugccuaauauucaa

SEQ ID NO: 1952937 - RNA, 19 nt, Homo sapiens
  misc_RNA (1)...(19): siRNA sense strand
ugagcaaauugucacagua

SEQ ID NO: 1952938 - RNA, 19 nt, Homo sapiens
  misc_RNA (1)...(19): siRNA sense strand
ccacaauucagcaaacaaa

SEQ ID NO: 1952939 - RNA, 19 nt, Homo sapiens
  misc_RNA (1)...(19): siRNA sense strand
ggaggaaggaagagacuug

SEQ ID NO: 1952940 - RNA, 19 nt, Homo sapiens
  misc_RNA (1)...(19): siRNA sense strand
acagagaagugauguuuac

SEQ ID NO: 1952941 - RNA, 19 nt, Homo sapiens
  misc_RNA (1)...(19): siRNA sense strand
uaacggcagugcucuugug

SEQ ID NO: 1952942 - RNA, 19 nt, Homo sapiens
  misc_RNA (1)...(19): siRNA sense strand
gcacccggaucucacuguu

SEQ ID NO: 1952943 - RNA, 19 nt, Homo sapiens
  misc_RNA (1)...(19): siRNA sense strand
cagaggauuuguaaugcaa

SEQ ID NO: 1952944 - RNA, 19 nt, Homo sapiens
  misc_RNA (1)...(19): siRNA sense strand
gaagauugaccagaggauu

SEQ ID NO: 1952945 - RNA, 19 nt, Homo sapiens
  misc_RNA (1)...(19): siRNA sense strand
aacaauauccugcagcuuu

SEQ ID NO: 1952946 - RNA, 19 nt, Homo sapiens
  misc_RNA (1)...(19): siRNA sense strand
ggagaguuuguucuauuaa

SEQ ID NO: 1952947 - RNA, 19 nt, Homo sapiens
  misc_RNA (1)...(19): siRNA sense strand
ggcaggauaucaguuucua

SEQ ID NO: 1952948 - RNA, 19 nt, Homo sapiens
  misc_RNA (1)...(19): siRNA sense strand
uaaacgaccacaagaggaa

SEQ ID NO: 1952949 - RNA, 19 nt, Homo sapiens
  misc_RNA (1)...(19): siRNA sense strand
agaaguacaagcagcauuu

SEQ ID NO: 1952950 - RNA, 19 nt, Homo sapiens
  misc_RNA (1)...(19): siRNA sense strand
gcaccuuccuguucaacuc

SEQ ID NO: 1952951 - RNA, 19 nt, Homo sapiens
  misc_RNA (1)...(19): siRNA sense strand
gccuugcaauagcucauua

SEQ ID NO: 1952952 - RNA, 19 nt, Homo sapiens
  misc_RNA (1)...(19): siRNA sense strand
uaggacaauuacuggauuu

SEQ ID NO: 1952953 - RNA, 19 nt, Homo sapiens
  misc_RNA (1)...(19): siRNA sense strand
uagaauauguaagggcauu

SEQ ID NO: 1952954 - RNA, 19 nt, Homo sapiens
  misc_RNA (1)...(19): siRNA sense strand
aaacugaagagaaaugguu

SEQ ID NO: 1952955 - RNA, 19 nt, Homo sapiens
  misc_RNA (1)...(19): siRNA sense strand
uggauaagaccuugccuaa

SEQ ID NO: 1952956 - RNA, 19 nt, Homo sapiens
  misc_RNA (1)...(19): siRNA sense strand
aaacuccacucuuugaaac

SEQ ID NO: 1952957 - RNA, 19 nt, Homo sapiens
  misc_RNA (1)...(19): siRNA sense strand
gagaaaugguuaucuucac

SEQ ID NO: 1952958 - RNA, 19 nt, Homo sapiens
  misc_RNA (1)...(19): siRNA sense strand
auaagaccuugccuaauau

SEQ ID NO: 1952959 - RNA, 19 nt, Homo sapiens
  misc_RNA (1)...(19): siRNA sense strand
gcuacucuuugcauuugaa

SEQ ID NO: 1952960 - RNA, 19 nt, Homo sapiens
  misc_RNA (1)...(19): siRNA sense strand
aagcaaagcacggucagua

SEQ ID NO: 1952961 - RNA, 19 nt, Homo sapiens
  misc_RNA (1)...(19): siRNA sense strand
gacaauuacuggauuucag

SEQ ID NO: 1952962 - RNA, 19 nt, Homo sapiens
  misc_RNA (1)...(19): siRNA sense strand
caaccagaaacugaaauuu

SEQ ID NO: 1952963 - RNA, 19 nt, Homo sapiens
  misc_RNA (1)...(19): siRNA sense strand
gauauccacuugccuucca

SEQ ID NO: 1952964 - RNA, 19 nt, Homo sapiens
  misc_RNA (1)...(19): siRNA sense strand
gagaguuuguucuauuaac

SEQ ID NO: 1952965 - RNA, 19 nt, Homo sapiens
  misc_RNA (1)...(19): siRNA sense strand
gccaacagaccuccagcua

SEQ ID NO: 1952966 - RNA, 19 nt, Homo sapiens
  misc_RNA (1)...(19): siRNA sense strand
caggauaucaguuucuaga

SEQ ID NO: 1952967 - RNA, 19 nt, Homo sapiens
  misc_RNA (1)...(19): siRNA sense strand
uuaggacaauuacuggauu

SEQ ID NO: 1952968 - RNA, 19 nt, Homo sapiens
  misc_RNA (1)...(19): siRNA sense strand
gaaguacaagcagcauuug

SEQ ID NO: 1952969 - RNA, 19 nt, Homo sapiens
  misc_RNA (1)...(19): siRNA sense strand
gccuaauauucaagaagua

SEQ ID NO: 1952970 - RNA, 19 nt, Homo sapiens
  misc_RNA (1)...(19): siRNA sense strand
ggacaauuacuggauuuca

SEQ ID NO: 1952971 - RNA, 19 nt, Homo sapiens
  misc_RNA (1)...(19): siRNA sense strand
gguggagaguuuguucuau

SEQ ID NO: 1952972 - RNA, 19 nt, Homo sapiens
  misc_RNA (1)...(19): siRNA sense strand
gaugcuggaucccuauuuu

SEQ ID NO: 1952973 - RNA, 19 nt, Homo sapiens
  misc_RNA (1)...(19): siRNA sense strand
uuguguagcuucucuuguu

SEQ ID NO: 1952974 - RNA, 19 nt, Homo sapiens
  misc_RNA (1)...(19): siRNA sense strand
aauacucgaugguuagaau

SEQ ID NO: 1952975 - RNA, 19 nt, Homo sapiens
  misc_RNA (1)...(19): siRNA sense strand
ccagcuacucuuugcauuu

SEQ ID NO: 1952976 - RNA, 19 nt, Homo sapiens
  misc_RNA (1)...(19): siRNA sense strand
agauuucgcuuugaugaau

SEQ ID NO: 1952977 - RNA, 19 nt, Homo sapiens
  misc_RNA (1)...(19): siRNA sense strand
uaaugagccuuuugaagaa

SEQ ID NO: 1952978 - RNA, 19 nt, Homo sapiens
  misc_RNA (1)...(19): siRNA sense strand
aagcagcuaugcguuaaug

SEQ ID NO: 1952979 - RNA, 19 nt, Homo sapiens
  misc_RNA (1)...(19): siRNA sense strand
uagcagaccaagaucuaaa

SEQ ID NO: 1952980 - RNA, 19 nt, Homo sapiens
  misc_RNA (1)...(19): siRNA sense strand
acagaaauuccauuacaga

SEQ ID NO: 1952981 - RNA, 19 nt, Homo sapiens
  misc_RNA (1)...(19): siRNA sense strand
caaagcacggucaguagga

SEQ ID NO: 1952982 - RNA, 19 nt, Homo sapiens
  misc_RNA (1)...(19): siRNA sense strand
ccaaccagaaacugaaauu

SEQ ID NO: 1952983 - RNA, 19 nt, Homo sapiens
  misc_RNA (1)...(19): siRNA sense strand
uaaagagaucagagaaaga

SEQ ID NO: 1952984 - RNA, 19 nt, Homo sapiens
  misc_RNA (1)...(19): siRNA sense strand
cauggcaggauaucaguuu

SEQ ID NO: 1952985 - RNA, 19 nt, Homo sapiens
  misc_RNA (1)...(19): siRNA sense strand
ugucagauuucgcuuugau

SEQ ID NO: 1952986 - RNA, 19 nt, Homo sapiens
  misc_RNA (1)...(19): siRNA sense strand
ucagauuucgcuuugauga

SEQ ID NO: 1952987 - RNA, 19 nt, Homo sapiens
  misc_RNA (1)...(19): siRNA sense strand
gaaaauacucgaugguuag

SEQ ID NO: 1952988 - RNA, 19 nt, Homo sapiens
  misc_RNA (1)...(19): siRNA sense strand
ccagaggauuuguaaugca

SEQ ID NO: 1952989 - RNA, 19 nt, Homo sapiens
  misc_RNA (1)...(19): siRNA sense strand
cgaauggcccucaucaaag

SEQ ID NO: 1952990 - RNA, 19 nt, Homo sapiens
  misc_RNA (1)...(19): siRNA sense strand
gcagaccaagaucuaaaga

SEQ ID NO: 1952991 - RNA, 19 nt, Homo sapiens
  misc_RNA (1)...(19): siRNA sense strand
augguuaucuucacuggaa

SEQ ID NO: 1952992 - RNA, 19 nt, Homo sapiens
  misc_RNA (1)...(19): siRNA sense strand
gaagaaacugaagagaaau

SEQ ID NO: 1952993 - RNA, 19 nt, Homo sapiens
  misc_RNA (1)...(19): siRNA sense strand
cugaagcagcuaugcguua

SEQ ID NO: 1952994 - RNA, 19 nt, Homo sapiens
  misc_RNA (1)...(19): siRNA sense strand
cagaaauuccauuacagaa

SEQ ID NO: 1952995 - RNA, 19 nt, Homo sapiens
  misc_RNA (1)...(19): siRNA sense strand
aagauugaccagaggauuu

SEQ ID NO: 1952996 - RNA, 19 nt, Homo sapiens
  misc_RNA (1)...(19): siRNA sense strand
gcaaauugucacaguaaac

SEQ ID NO: 1952997 - RNA, 19 nt, Homo sapiens
  misc_RNA (1)...(19): siRNA sense strand
acccggaucucacuguuug

SEQ ID NO: 1952998 - RNA, 19 nt, Homo sapiens
  misc_RNA (1)...(19): siRNA sense strand
acaucucucuguaguccua

SEQ ID NO: 1952999 - RNA, 19 nt, Homo sapiens
  misc_RNA (1)...(19): siRNA sense strand
ggaggaggaggaggaggua

SEQ ID NO: 1953000 - RNA, 19 nt, Homo sapiens
  misc_RNA (1)...(19): siRNA sense strand
ccaccuggcagcuguuaga

SEQ ID NO: 1953001 - RNA, 19 nt, Homo sapiens
  misc_RNA (1)...(19): siRNA sense strand
ugaaauaacuccagcagaa

SEQ ID NO: 1953002 - RNA, 19 nt, Homo sapiens
  misc_RNA (1)...(19): siRNA sense strand
gcacccagcuugccagauu

SEQ ID NO: 1953003 - RNA, 19 nt, Homo sapiens
  misc_RNA (1)...(19): siRNA sense strand
cagcagcgguggagucuga

SEQ ID NO: 1953004 - RNA, 19 nt, Homo sapiens
  misc_RNA (1)...(19): siRNA sense strand
agaaagcuauugcacagaa

SEQ ID NO: 1953005 - RNA, 19 nt, Homo sapiens
  misc_RNA (1)...(19): siRNA sense strand
cugagaagcugauggaguu

SEQ ID NO: 1953006 - RNA, 19 nt, Homo sapiens
  misc_RNA (1)...(19): siRNA sense strand
gguggagucugaaagauca

SEQ ID NO: 1953007 - RNA, 19 nt, Homo sapiens
  misc_RNA (1)...(19): siRNA sense strand
uaugauguguggauccuaa

SEQ ID NO: 1953008 - RNA, 19 nt, Homo sapiens
  misc_RNA (1)...(19): siRNA sense strand
ccagugcuguccucuuuga

SEQ ID NO: 1953009 - RNA, 19 nt, Homo sapiens
  misc_RNA (1)...(19): siRNA sense strand
ucacagagggagauucauu

SEQ ID NO: 1953010 - RNA, 19 nt, Homo sapiens
  misc_RNA (1)...(19): siRNA sense strand
ccagcagucuguucaacuu

SEQ ID NO: 1953011 - RNA, 19 nt, Homo sapiens
  misc_RNA (1)...(19): siRNA sense strand
ccaagaaccaggucgaaga

SEQ ID NO: 1953012 - RNA, 19 nt, Homo sapiens
  misc_RNA (1)...(19): siRNA sense strand
gcacggacaucagccuaca

SEQ ID NO: 1953013 - RNA, 19 nt, Homo sapiens
  misc_RNA (1)...(19): siRNA sense strand
uccaugaguuccaucguaa

SEQ ID NO: 1953014 - RNA, 19 nt, Homo sapiens
  misc_RNA (1)...(19): siRNA sense strand
gcagcucccuaagcaguga

SEQ ID NO: 1953015 - RNA, 19 nt, Homo sapiens
  misc_RNA (1)...(19): siRNA sense strand
gaaucucacuuuggaaggu

SEQ ID NO: 1953016 - RNA, 19 nt, Homo sapiens
  misc_RNA (1)...(19): siRNA sense strand
ugacaucacugaggaucga

SEQ ID NO: 1953017 - RNA, 19 nt, Homo sapiens
  misc_RNA (1)...(19): siRNA sense strand
agccagugcuguccucuuu

SEQ ID NO: 1953018 - RNA, 19 nt, Homo sapiens
  misc_RNA (1)...(19): siRNA sense strand
gaaauaacuccagcagaag

SEQ ID NO: 1953019 - RNA, 19 nt, Homo sapiens
  misc_RNA (1)...(19): siRNA sense strand
gauguguggauccuaauga

SEQ ID NO: 1953020 - RNA, 19 nt, Homo sapiens
  misc_RNA (1)...(19): siRNA sense strand
gaaaacugaaucucacuuu

SEQ ID NO: 1953021 - RNA, 19 nt, Homo sapiens
  misc_RNA (1)...(19): siRNA sense strand
aagaucagcagaacagaaa

SEQ ID NO: 1953022 - RNA, 19 nt, Homo sapiens
  misc_RNA (1)...(19): siRNA sense strand
gacaugcagccuaguguga

SEQ ID NO: 1953023 - RNA, 19 nt, Homo sapiens
  misc_RNA (1)...(19): siRNA sense strand
ccaucugucuggaggaguu

SEQ ID NO: 1953024 - RNA, 19 nt, Homo sapiens
  misc_RNA (1)...(19): siRNA sense strand
ucgaggagcugugugaaca

SEQ ID NO: 1953025 - RNA, 19 nt, Homo sapiens
  misc_RNA (1)...(19): siRNA sense strand
ugaaagaucagcagaacag

SEQ ID NO: 1953026 - RNA, 19 nt, Homo sapiens
  misc_RNA (1)...(19): siRNA sense strand
cagaugggccagccaguga

SEQ ID NO: 1953027 - RNA, 19 nt, Homo sapiens
  misc_RNA (1)...(19): siRNA sense strand
cuccaugaguuccaucgua

SEQ ID NO: 1953028 - RNA, 19 nt, Homo sapiens
  misc_RNA (1)...(19): siRNA sense strand
cgaagacuccaccucauuc

SEQ ID NO: 1953029 - RNA, 19 nt, Homo sapiens
  misc_RNA (1)...(19): siRNA sense strand
caucacagagggagauuca

SEQ ID NO: 1953030 - RNA, 19 nt, Homo sapiens
  misc_RNA (1)...(19): siRNA sense strand
gaaagcuauugcacagaac

SEQ ID NO: 1953031 - RNA, 19 nt, Homo sapiens
  misc_RNA (1)...(19): siRNA sense strand
ccacuguaccugugcaaug

SEQ ID NO: 1953032 - RNA, 19 nt, Homo sapiens
  misc_RNA (1)...(19): siRNA sense strand
cacagagggagauucauuu

SEQ ID NO: 1953033 - RNA, 19 nt, Homo sapiens
  misc_RNA (1)...(19): siRNA sense strand
guaaugacgcugagaagcu

SEQ ID NO: 1953034 - RNA, 19 nt, Homo sapiens
  misc_RNA (1)...(19): siRNA sense strand
ggaggggccuucugaaugg

SEQ ID NO: 1953035 - RNA, 19 nt, Homo sapiens
  misc_RNA (1)...(19): siRNA sense strand
uggcagcaguucuacuuuc

SEQ ID NO: 1953036 - RNA, 19 nt, Homo sapiens
  misc_RNA (1)...(19): siRNA sense strand
guccauggcagcaguucua

SEQ ID NO: 1953037 - RNA, 19 nt, Homo sapiens
  misc_RNA (1)...(19): siRNA sense strand
caacaucacagagggagau

SEQ ID NO: 1953038 - RNA, 19 nt, Homo sapiens
  misc_RNA (1)...(19): siRNA sense strand
gaaagaucagcagaacaga

SEQ ID NO: 1953039 - RNA, 19 nt, Homo sapiens
  misc_RNA (1)...(19): siRNA sense strand
ggcagcaguucuacuuucu

SEQ ID NO: 1953040 - RNA, 19 nt, Homo sapiens
  misc_RNA (1)...(19): siRNA sense strand
aaagaucagcagaacagaa

SEQ ID NO: 1953041 - RNA, 19 nt, Homo sapiens
  misc_RNA (1)...(19): siRNA sense strand
gagccaccuucuccugauc

SEQ ID NO: 1953042 - RNA, 19 nt, Homo sapiens
  misc_RNA (1)...(19): siRNA sense strand
cauggcagcaguucuacuu

SEQ ID NO: 1953043 - RNA, 19 nt, Homo sapiens
  misc_RNA (1)...(19): siRNA sense strand
caguggaucuggagaaagc

SEQ ID NO: 1953044 - RNA, 19 nt, Homo sapiens
  misc_RNA (1)...(19): siRNA sense strand
ggcaccaucuuugugauca

SEQ ID NO: 1953045 - RNA, 19 nt, Homo sapiens
  misc_RNA (1)...(19): siRNA sense strand
agaagcugauggaguuugu

SEQ ID NO: 1953046 - RNA, 19 nt, Homo sapiens
  misc_RNA (1)...(19): siRNA sense strand
aaacugaaucucacuuugg

SEQ ID NO: 1953047 - RNA, 19 nt, Homo sapiens
  misc_RNA (1)...(19): siRNA sense strand
ggccagugguguugaucug

SEQ ID NO: 1953048 - RNA, 19 nt, Homo sapiens
  misc_RNA (1)...(19): siRNA sense strand
gagaagcugauggaguuug

SEQ ID NO: 1953049 - RNA, 19 nt, Homo sapiens
  misc_RNA (1)...(19): siRNA sense strand
cacccagcuugccagauuu

SEQ ID NO: 1953050 - RNA, 19 nt, Homo sapiens
  misc_RNA (1)...(19): siRNA sense strand
ucgaagacuccaccucauu

SEQ ID NO: 1953051 - RNA, 19 nt, Homo sapiens
  misc_RNA (1)...(19): siRNA sense strand
aacugaaucucacuuugga

SEQ ID NO: 1953052 - RNA, 19 nt, Homo sapiens
  misc_RNA (1)...(19): siRNA sense strand
caagaggcugcuaccagaa

SEQ ID NO: 1953053 - RNA, 19 nt, Homo sapiens
  misc_RNA (1)...(19): siRNA sense strand
gcagucuguucaacuugca

SEQ ID NO: 1953054 - RNA, 19 nt, Homo sapiens
  misc_RNA (1)...(19): siRNA sense strand
gcugauggaguuuguguac

SEQ ID NO: 1953055 - RNA, 19 nt, Homo sapiens
  misc_RNA (1)...(19): siRNA sense strand
guugacgccuccagcaucu

SEQ ID NO: 1953056 - RNA, 19 nt, Homo sapiens
  misc_RNA (1)...(19): siRNA sense strand
gaucuggagaaagcuauug

SEQ ID NO: 1953057 - RNA, 19 nt, Homo sapiens
  misc_RNA (1)...(19): siRNA sense strand
gcaccaucuuugugaucau

SEQ ID NO: 1953058 - RNA, 19 nt, Homo sapiens
  misc_RNA (1)...(19): siRNA sense strand
ccagugaugacgacaaucu

SEQ ID NO: 1953059 - RNA, 19 nt, Homo sapiens
  misc_RNA (1)...(19): siRNA sense strand
gcgguggagucugaaagau

SEQ ID NO: 1953060 - RNA, 19 nt, Homo sapiens
  misc_RNA (1)...(19): siRNA sense strand
cagauuaugauguguggau

SEQ ID NO: 1953061 - RNA, 19 nt, Homo sapiens
  misc_RNA (1)...(19): siRNA sense strand
gccugucacuggcuagcaa

SEQ ID NO: 1953062 - RNA, 19 nt, Homo sapiens
  misc_RNA (1)...(19): siRNA sense strand
ucuggagccuggauucauc

SEQ ID NO: 1953063 - RNA, 19 nt, Homo sapiens
  misc_RNA (1)...(19): siRNA sense strand
agaacagccugggccauca

SEQ ID NO: 1953064 - RNA, 19 nt, Homo sapiens
  misc_RNA (1)...(19): siRNA sense strand
caggagcuacgggucauuu

SEQ ID NO: 1953065 - RNA, 19 nt, Homo sapiens
  misc_RNA (1)...(19): siRNA sense strand
uaacuccagcagaaggaaa

SEQ ID NO: 1953066 - RNA, 19 nt, Homo sapiens
  misc_RNA (1)...(19): siRNA sense strand
ccuaagcagugacuuugac

SEQ ID NO: 1953067 - RNA, 19 nt, Homo sapiens
  misc_RNA (1)...(19): siRNA sense strand
gagaaagcuauugcacaga

SEQ ID NO: 1953068 - RNA, 19 nt, Homo sapiens
  misc_RNA (1)...(19): siRNA sense strand
gugggcaccaucuuuguga

SEQ ID NO: 1953069 - RNA, 19 nt, Homo sapiens
  misc_RNA (1)...(19): siRNA sense strand
ugccagugaugacgacaau

SEQ ID NO: 1953070 - RNA, 19 nt, Homo sapiens
  misc_RNA (1)...(19): siRNA sense strand
ggucauuuccugccuccau

SEQ ID NO: 1953071 - RNA, 19 nt, Homo sapiens
  misc_RNA (1)...(19): siRNA sense strand
aagaggcugcuaccagaaa

SEQ ID NO: 1953072 - RNA, 19 nt, Homo sapiens
  misc_RNA (1)...(19): siRNA sense strand
cagcaguggaucuggagaa

SEQ ID NO: 1953073 - RNA, 19 nt, Homo sapiens
  misc_RNA (1)...(19): siRNA sense strand
gggacccucucgaucuuac

SEQ ID NO: 1953074 - RNA, 19 nt, Homo sapiens
  misc_RNA (1)...(19): siRNA sense strand
uuuccugccuccaugaguu

SEQ ID NO: 1953075 - RNA, 19 nt, Homo sapiens
  misc_RNA (1)...(19): siRNA sense strand
aaaacugaaucucacuuug

SEQ ID NO: 1953076 - RNA, 19 nt, Homo sapiens
  misc_RNA (1)...(19): siRNA sense strand
ggaacucgaggagcugugu

SEQ ID NO: 1953077 - RNA, 19 nt, Homo sapiens
  misc_RNA (1)...(19): siRNA sense strand
gcucuuccagugacucugu

SEQ ID NO: 1953078 - RNA, 19 nt, Homo sapiens
  misc_RNA (1)...(19): siRNA sense strand
ggaagaaggcagcaaagga

SEQ ID NO: 1953079 - RNA, 19 nt, Homo sapiens
  misc_RNA (1)...(19): siRNA sense strand
ucauggagcuggcccugaa

SEQ ID NO: 1953080 - RNA, 19 nt, Homo sapiens
  misc_RNA (1)...(19): siRNA sense strand
gacauuggcguucccauga

SEQ ID NO: 1953081 - RNA, 19 nt, Homo sapiens
  misc_RNA (1)...(19): siRNA sense strand
gcaaggugcagaaguagug

SEQ ID NO: 1953082 - RNA, 19 nt, Homo sapiens
  misc_RNA (1)...(19): siRNA sense strand
ggaccuggccaacauguuc

SEQ ID NO: 1953083 - RNA, 19 nt, Homo sapiens
  misc_RNA (1)...(19): siRNA sense strand
gaauauuuccgggacauug

SEQ ID NO: 1953084 - RNA, 19 nt, Homo sapiens
  misc_RNA (1)...(19): siRNA sense strand
ggagguggaggaauauuuc

SEQ ID NO: 1953085 - RNA, 19 nt, Homo sapiens
  misc_RNA (1)...(19): siRNA sense strand
ggacuucaaccugcuguga

SEQ ID NO: 1953086 - RNA, 19 nt, Homo sapiens
  misc_RNA (1)...(19): siRNA sense strand
gggagguggaggaauauuu

SEQ ID NO: 1953087 - RNA, 19 nt, Homo sapiens
  misc_RNA (1)...(19): siRNA sense strand
uggccaacauguuccguuu

SEQ ID NO: 1953088 - RNA, 19 nt, Homo sapiens
  misc_RNA (1)...(19): siRNA sense strand
caggugacguucccaugga

SEQ ID NO: 1953089 - RNA, 19 nt, Homo sapiens
  misc_RNA (1)...(19): siRNA sense strand
gaaccuccucucccacuuc

SEQ ID NO: 1953090 - RNA, 19 nt, Homo sapiens
  misc_RNA (1)...(19): siRNA sense strand
gcagggagaccaagaugac

SEQ ID NO: 1953091 - RNA, 19 nt, Homo sapiens
  misc_RNA (1)...(19): siRNA sense strand
ccuggaagaugggacauuc

SEQ ID NO: 1953092 - RNA, 19 nt, Homo sapiens
  misc_RNA (1)...(19): siRNA sense strand
ccuucaucgugaccaauua

SEQ ID NO: 1953093 - RNA, 19 nt, Homo sapiens
  misc_RNA (1)...(19): siRNA sense strand
gccugggccuccacuaugu

SEQ ID NO: 1953094 - RNA, 19 nt, Homo sapiens
  misc_RNA (1)...(19): siRNA sense strand
cuaggaagaaggcagcaaa

SEQ ID NO: 1953095 - RNA, 19 nt, Homo sapiens
  misc_RNA (1)...(19): siRNA sense strand
aaggggagguggaggaaua

SEQ ID NO: 1953096 - RNA, 19 nt, Homo sapiens
  misc_RNA (1)...(19): siRNA sense strand
ccaccuucaucgugaccaa

SEQ ID NO: 1953097 - RNA, 19 nt, Homo sapiens
  misc_RNA (1)...(19): siRNA sense strand
uggagaacaucaagaagcu

SEQ ID NO: 1953098 - RNA, 19 nt, Homo sapiens
  misc_RNA (1)...(19): siRNA sense strand
caagaaacugguggugguu

SEQ ID NO: 1953099 - RNA, 19 nt, Homo sapiens
  misc_RNA (1)...(19): siRNA sense strand
gccaggagcaggaggucaa

SEQ ID NO: 1953100 - RNA, 19 nt, Homo sapiens
  misc_RNA (1)...(19): siRNA sense strand
cgugcacgaugccaagaug

SEQ ID NO: 1953101 - RNA, 19 nt, Homo sapiens
  misc_RNA (1)...(19): siRNA sense strand
agacggaaagagcuacuug

SEQ ID NO: 1953102 - RNA, 19 nt, Homo sapiens
  misc_RNA (1)...(19): siRNA sense strand
gccuggagaacaucaagaa

SEQ ID NO: 1953103 - RNA, 19 nt, Homo sapiens
  misc_RNA (1)...(19): siRNA sense strand
acaucgggcugagcacuug

SEQ ID NO: 1953104 - RNA, 19 nt, Homo sapiens
  misc_RNA (1)...(19): siRNA sense strand
ccuccucucccacuucuug

SEQ ID NO: 1953105 - RNA, 19 nt, Homo sapiens
  misc_RNA (1)...(19): siRNA sense strand
gcacaaaggggacuucaac

SEQ ID NO: 1953106 - RNA, 19 nt, Homo sapiens
  misc_RNA (1)...(19): siRNA sense strand
ggaagaugggacauucaag

SEQ ID NO: 1953107 - RNA, 19 nt, Homo sapiens
  misc_RNA (1)...(19): siRNA sense strand
acgcugcccugcucaccaa

SEQ ID NO: 1953108 - RNA, 19 nt, Homo sapiens
  misc_RNA (1)...(19): siRNA sense strand
gggcuuacgccaccuucau

SEQ ID NO: 1953109 - RNA, 19 nt, Homo sapiens
  misc_RNA (1)...(19): siRNA sense strand
cccgaaacccuaggaagaa

SEQ ID NO: 1953110 - RNA, 19 nt, Homo sapiens
  misc_RNA (1)...(19): siRNA sense strand
ccgaaacccuaggaagaag

SEQ ID NO: 1953111 - RNA, 19 nt, Homo sapiens
  misc_RNA (1)...(19): siRNA sense strand
caucaucuccauccaguuc

SEQ ID NO: 1953112 - RNA, 19 nt, Homo sapiens
  misc_RNA (1)...(19): siRNA sense strand
ggcuguguauuaugucuug

SEQ ID NO: 1953113 - RNA, 19 nt, Homo sapiens
  misc_RNA (1)...(19): siRNA sense strand
gaucuccuacucucuguuc

SEQ ID NO: 1953114 - RNA, 19 nt, Homo sapiens
  misc_RNA (1)...(19): siRNA sense strand
uggcagaccuggugaugcu

SEQ ID NO: 1953115 - RNA, 19 nt, Homo sapiens
  misc_RNA (1)...(19): siRNA sense strand
gaugcugacgcuguacuuu

SEQ ID NO: 1953116 - RNA, 19 nt, Homo sapiens
  misc_RNA (1)...(19): siRNA sense strand
gggaucuccuacucucugu

SEQ ID NO: 1953117 - RNA, 19 nt, Homo sapiens
  misc_RNA (1)...(19): siRNA sense strand
ccucaucggcuccuuccuu

SEQ ID NO: 1953118 - RNA, 19 nt, Homo sapiens
  misc_RNA (1)...(19): siRNA sense strand
ccucagauccgcaccaacu

SEQ ID NO: 1953119 - RNA, 19 nt, Homo sapiens
  misc_RNA (1)...(19): siRNA sense strand
uggugaugcugacgcugua

SEQ ID NO: 1953120 - RNA, 19 nt, Homo sapiens
  misc_RNA (1)...(19): siRNA sense strand
gaaaugcaauugccacuug

SEQ ID NO: 1953121 - RNA, 19 nt, Homo sapiens
  misc_RNA (1)...(19): siRNA sense strand
gcucaugaccuuaaacuug

SEQ ID NO: 1953122 - RNA, 19 nt, Homo sapiens
  misc_RNA (1)...(19): siRNA sense strand
gggauugugugucucauga

SEQ ID NO: 1953123 - RNA, 19 nt, Homo sapiens
  misc_RNA (1)...(19): siRNA sense strand
caacaauucccuuucaaau

SEQ ID NO: 1953124 - RNA, 19 nt, Homo sapiens
  misc_RNA (1)...(19): siRNA sense strand
ugagggagcuugauuuguc

SEQ ID NO: 1953125 - RNA, 19 nt, Homo sapiens
  misc_RNA (1)...(19): siRNA sense strand
acaauucccuuucaaaucu

SEQ ID NO: 1953126 - RNA, 19 nt, Homo sapiens
  misc_RNA (1)...(19): siRNA sense strand
caucaucacuggcguugug

SEQ ID NO: 1953127 - RNA, 19 nt, Homo sapiens
  misc_RNA (1)...(19): siRNA sense strand
uaacuauacuugcgguuca

SEQ ID NO: 1953128 - RNA, 19 nt, Homo sapiens
  misc_RNA (1)...(19): siRNA sense strand
gaacgcugcauuuacaaga

SEQ ID NO: 1953129 - RNA, 19 nt, Homo sapiens
  misc_RNA (1)...(19): siRNA sense strand
cuucagcacuugcagguuu

SEQ ID NO: 1953130 - RNA, 19 nt, Homo sapiens
  misc_RNA (1)...(19): siRNA sense strand
caaccugcgucaugccauu

SEQ ID NO: 1953131 - RNA, 19 nt, Homo sapiens
  misc_RNA (1)...(19): siRNA sense strand
ugucagucaucuacaaauu

SEQ ID NO: 1953132 - RNA, 19 nt, Homo sapiens
  misc_RNA (1)...(19): siRNA sense strand
gggagaaccuaacuauacu

SEQ ID NO: 1953133 - RNA, 19 nt, Homo sapiens
  misc_RNA (1)...(19): siRNA sense strand
gauugugugucucaugaug

SEQ ID NO: 1953134 - RNA, 19 nt, Homo sapiens
  misc_RNA (1)...(19): siRNA sense strand
gacaaccucuggaaaugca

SEQ ID NO: 1953135 - RNA, 19 nt, Homo sapiens
  misc_RNA (1)...(19): siRNA sense strand
gagaaccuaacuauacuug

SEQ ID NO: 1953136 - RNA, 19 nt, Homo sapiens
  misc_RNA (1)...(19): siRNA sense strand
gagggagcuugauuuguca

SEQ ID NO: 1953137 - RNA, 19 nt, Homo sapiens
  misc_RNA (1)...(19): siRNA sense strand
cuggagaaauuugucuaua

SEQ ID NO: 1953138 - RNA, 19 nt, Homo sapiens
  misc_RNA (1)...(19): siRNA sense strand
guccaacaauucccuuuca

SEQ ID NO: 1953139 - RNA, 19 nt, Homo sapiens
  misc_RNA (1)...(19): siRNA sense strand
ccaacaauucccuuucaaa

SEQ ID NO: 1953140 - RNA, 19 nt, Homo sapiens
  misc_RNA (1)...(19): siRNA sense strand
ccauuuaccuccucagacu

SEQ ID NO: 1953141 - RNA, 19 nt, Homo sapiens
  misc_RNA (1)...(19): siRNA sense strand
uaagccaccuucccacauc

SEQ ID NO: 1953142 - RNA, 19 nt, Homo sapiens
  misc_RNA (1)...(19): siRNA sense strand
uacaccaucuuccugcuuu

SEQ ID NO: 1953143 - RNA, 19 nt, Homo sapiens
  misc_RNA (1)...(19): siRNA sense strand
acgcugcauuuacaagaua

SEQ ID NO: 1953144 - RNA, 19 nt, Homo sapiens
  misc_RNA (1)...(19): siRNA sense strand
uaccagcccugcccucuuc

SEQ ID NO: 1953145 - RNA, 19 nt, Homo sapiens
  misc_RNA (1)...(19): siRNA sense strand
aaggugaacugcuccuguu

SEQ ID NO: 1953146 - RNA, 19 nt, Homo sapiens
  misc_RNA (1)...(19): siRNA sense strand
gcugagggagcuugauuug

SEQ ID NO: 1953147 - RNA, 19 nt, Homo sapiens
  misc_RNA (1)...(19): siRNA sense strand
caaggacaaccucuggaaa

SEQ ID NO: 1953148 - RNA, 19 nt, Homo sapiens
  misc_RNA (1)...(19): siRNA sense strand
gaauccaugcccaguguga

SEQ ID NO: 1953149 - RNA, 19 nt, Homo sapiens
  misc_RNA (1)...(19): siRNA sense strand
cucaugaccuuaaacuugu

SEQ ID NO: 1953150 - RNA, 19 nt, Homo sapiens
  misc_RNA (1)...(19): siRNA sense strand
ccacuugcucggucuuaaa

SEQ ID NO: 1953151 - RNA, 19 nt, Homo sapiens
  misc_RNA (1)...(19): siRNA sense strand
acccagaauucacuccuuu

SEQ ID NO: 1953152 - RNA, 19 nt, Homo sapiens
  misc_RNA (1)...(19): siRNA sense strand
ggaaaugcaauugccacuu

SEQ ID NO: 1953153 - RNA, 19 nt, Homo sapiens
  misc_RNA (1)...(19): siRNA sense strand
ugggagaaccuaacuauac

SEQ ID NO: 1953154 - RNA, 19 nt, Homo sapiens
  misc_RNA (1)...(19): siRNA sense strand
gucagucaucuacaaauuu

SEQ ID NO: 1953155 - RNA, 19 nt, Homo sapiens
  misc_RNA (1)...(19): siRNA sense strand
ucaaggacaaccucuggaa

SEQ ID NO: 1953156 - RNA, 19 nt, Homo sapiens
  misc_RNA (1)...(19): siRNA sense strand
uccaugggcuucagcacuu

SEQ ID NO: 1953157 - RNA, 19 nt, Homo sapiens
  misc_RNA (1)...(19): siRNA sense strand
ccaaugauccugggaaggu

SEQ ID NO: 1953158 - RNA, 19 nt, Homo sapiens
  misc_RNA (1)...(19): siRNA sense strand
gccacuugcucggucuuaa

SEQ ID NO: 1953159 - RNA, 19 nt, Homo sapiens
  misc_RNA (1)...(19): siRNA sense strand
uaaaucuaacccagaauuc

SEQ ID NO: 1953160 - RNA, 19 nt, Homo sapiens
  misc_RNA (1)...(19): siRNA sense strand
aacucuggcuggagaaauu

SEQ ID NO: 1953161 - RNA, 19 nt, Homo sapiens
  misc_RNA (1)...(19): siRNA sense strand
ggagaaccuaacuauacuu

SEQ ID NO: 1953162 - RNA, 19 nt, Homo sapiens
  misc_RNA (1)...(19): siRNA sense strand
aggacaaccucuggaaaug

SEQ ID NO: 1953163 - RNA, 19 nt, Homo sapiens
  misc_RNA (1)...(19): siRNA sense strand
cucgaacgcugcauuuaca

SEQ ID NO: 1953164 - RNA, 19 nt, Homo sapiens
  misc_RNA (1)...(19): siRNA sense strand
gggagagacuugggagaac

SEQ ID NO: 1953165 - RNA, 19 nt, Homo sapiens
  misc_RNA (1)...(19): siRNA sense strand
agacucgaacgcugcauuu

SEQ ID NO: 1953166 - RNA, 19 nt, Homo sapiens
  misc_RNA (1)...(19): siRNA sense strand
gaucgagcgcuccuggaau

SEQ ID NO: 1953167 - RNA, 19 nt, Homo sapiens
  misc_RNA (1)...(19): siRNA sense strand
gucaugccauugccacugu

SEQ ID NO: 1953168 - RNA, 19 nt, Homo sapiens
  misc_RNA (1)...(19): siRNA sense strand
ggacuaacagacggcauca

SEQ ID NO: 1953169 - RNA, 19 nt, Homo sapiens
  misc_RNA (1)...(19): siRNA sense strand
gcuggagaaauuugucuau

SEQ ID NO: 1953170 - RNA, 19 nt, Homo sapiens
  misc_RNA (1)...(19): siRNA sense strand
gacucgaacgcugcauuua

SEQ ID NO: 1953171 - RNA, 19 nt, Homo sapiens
  misc_RNA (1)...(19): siRNA sense strand
gcugcccggacaaguguua

SEQ ID NO: 1953172 - RNA, 19 nt, Homo sapiens
  misc_RNA (1)...(19): siRNA sense strand
guccugaggccuccugaga

SEQ ID NO: 1953173 - RNA, 19 nt, Homo sapiens
  misc_RNA (1)...(19): siRNA sense strand
ggacaaccucuggaaaugc

SEQ ID NO: 1953174 - RNA, 19 nt, Homo sapiens
  misc_RNA (1)...(19): siRNA sense strand
aaggacaaccucuggaaau

SEQ ID NO: 1953175 - RNA, 19 nt, Homo sapiens
  misc_RNA (1)...(19): siRNA sense strand
cggcaucaucugugaauca

SEQ ID NO: 1953176 - RNA, 19 nt, Homo sapiens
  misc_RNA (1)...(19): siRNA sense strand
ccugaggccuccugagaac

SEQ ID NO: 1953177 - RNA, 19 nt, Homo sapiens
  misc_RNA (1)...(19): siRNA sense strand
gcacuugcagguuuuaaau

SEQ ID NO: 1953178 - RNA, 19 nt, Homo sapiens
  misc_RNA (1)...(19): siRNA sense strand
ggcguugugugugggauug

SEQ ID NO: 1953179 - RNA, 19 nt, Homo sapiens
  misc_RNA (1)...(19): siRNA sense strand
cauugccacugucaucauc

SEQ ID NO: 1953180 - RNA, 19 nt, Homo sapiens
  misc_RNA (1)...(19): siRNA sense strand
gacggcaucaucugugaau

SEQ ID NO: 1953181 - RNA, 19 nt, Homo sapiens
  misc_RNA (1)...(19): siRNA sense strand
caucuauggcugcaccuau

SEQ ID NO: 1953182 - RNA, 19 nt, Homo sapiens
  misc_RNA (1)...(19): siRNA sense strand
gcauuuacaagauaaucag

SEQ ID NO: 1953183 - RNA, 19 nt, Homo sapiens
  misc_RNA (1)...(19): siRNA sense strand
ugugugggauugugugucu

SEQ ID NO: 1953184 - RNA, 19 nt, Homo sapiens
  misc_RNA (1)...(19): siRNA sense strand
gaaagcggcugcucaaaga

SEQ ID NO: 1953185 - RNA, 19 nt, Homo sapiens
  misc_RNA (1)...(19): siRNA sense strand
ggaugaagcugaugaaaug

SEQ ID NO: 1953186 - RNA, 19 nt, Homo sapiens
  misc_RNA (1)...(19): siRNA sense strand
gaauaaagguuucaaagag

SEQ ID NO: 1953187 - RNA, 19 nt, Homo sapiens
  misc_RNA (1)...(19): siRNA sense strand
gaacguugcugaucuuauc

SEQ ID NO: 1953188 - RNA, 19 nt, Homo sapiens
  misc_RNA (1)...(19): siRNA sense strand
ggaaggguguggccauuaa

SEQ ID NO: 1953189 - RNA, 19 nt, Homo sapiens
  misc_RNA (1)...(19): siRNA sense strand
ggugaaacgugaugaauug

SEQ ID NO: 1953190 - RNA, 19 nt, Homo sapiens
  misc_RNA (1)...(19): siRNA sense strand
acuaugaucucccuaauaa

SEQ ID NO: 1953191 - RNA, 19 nt, Homo sapiens
  misc_RNA (1)...(19): siRNA sense strand
ucagagauaucgagcagua

SEQ ID NO: 1953192 - RNA, 19 nt, Homo sapiens
  misc_RNA (1)...(19): siRNA sense strand
gagcgggaguccaucauga

SEQ ID NO: 1953193 - RNA, 19 nt, Homo sapiens
  misc_RNA (1)...(19): siRNA sense strand
agacaugacuaaaguggaa

SEQ ID NO: 1953194 - RNA, 19 nt, Homo sapiens
  misc_RNA (1)...(19): siRNA sense strand
ucaaagagcagauuuacga

SEQ ID NO: 1953195 - RNA, 19 nt, Homo sapiens
  misc_RNA (1)...(19): siRNA sense strand
gaugaacguugcugaucuu

SEQ ID NO: 1953196 - RNA, 19 nt, Homo sapiens
  misc_RNA (1)...(19): siRNA sense strand
gagcagauuuacgauguau

SEQ ID NO: 1953197 - RNA, 19 nt, Homo sapiens
  misc_RNA (1)...(19): siRNA sense strand
gggaagaguggaaauuuga

SEQ ID NO: 1953198 - RNA, 19 nt, Homo sapiens
  misc_RNA (1)...(19): siRNA sense strand
gcucaaagaggaagacaug

SEQ ID NO: 1953199 - RNA, 19 nt, Homo sapiens
  misc_RNA (1)...(19): siRNA sense strand
gagggaagaguggaaauuu

SEQ ID NO: 1953200 - RNA, 19 nt, Homo sapiens
  misc_RNA (1)...(19): siRNA sense strand
gaaacgugaugaauugacu

SEQ ID NO: 1953201 - RNA, 19 nt, Homo sapiens
  misc_RNA (1)...(19): siRNA sense strand
ggagaugaccaacaaguuc

SEQ ID NO: 1953202 - RNA, 19 nt, Homo sapiens
  misc_RNA (1)...(19): siRNA sense strand
ugacuaaaguggaauucga

SEQ ID NO: 1953203 - RNA, 19 nt, Homo sapiens
  misc_RNA (1)...(19): siRNA sense strand
uaacuaugaucucccuaau

SEQ ID NO: 1953204 - RNA, 19 nt, Homo sapiens
  misc_RNA (1)...(19): siRNA sense strand
ucaagcagaucaucaaagg

SEQ ID NO: 1953205 - RNA, 19 nt, Homo sapiens
  misc_RNA (1)...(19): siRNA sense strand
gggaguccaucaugaagga

SEQ ID NO: 1953206 - RNA, 19 nt, Homo sapiens
  misc_RNA (1)...(19): siRNA sense strand
gcugaugaaauguugaaua

SEQ ID NO: 1953207 - RNA, 19 nt, Homo sapiens
  misc_RNA (1)...(19): siRNA sense strand
ucucaguccuccaguguuu

SEQ ID NO: 1953208 - RNA, 19 nt, Homo sapiens
  misc_RNA (1)...(19): siRNA sense strand
ugaagcugaugaaauguug

SEQ ID NO: 1953209 - RNA, 19 nt, Homo sapiens
  misc_RNA (1)...(19): siRNA sense strand
gugcuuauuucuacagaug

SEQ ID NO: 1953210 - RNA, 19 nt, Homo sapiens
  misc_RNA (1)...(19): siRNA sense strand
uggaaggcaucaagcaauu

SEQ ID NO: 1953211 - RNA, 19 nt, Homo sapiens
  misc_RNA (1)...(19): siRNA sense strand
gauaugauucgucgcagaa

SEQ ID NO: 1953212 - RNA, 19 nt, Homo sapiens
  misc_RNA (1)...(19): siRNA sense strand
aaacagccaccuucaguau

SEQ ID NO: 1953213 - RNA, 19 nt, Homo sapiens
  misc_RNA (1)...(19): siRNA sense strand
caucuacgcuuacgguuuu

SEQ ID NO: 1953214 - RNA, 19 nt, Homo sapiens
  misc_RNA (1)...(19): siRNA sense strand
aggaagacaugacuaaagu

SEQ ID NO: 1953215 - RNA, 19 nt, Homo sapiens
  misc_RNA (1)...(19): siRNA sense strand
gcggucaucuucugcaaca

SEQ ID NO: 1953216 - RNA, 19 nt, Homo sapiens
  misc_RNA (1)...(19): siRNA sense strand
aagagcagauuuacgaugu

SEQ ID NO: 1953217 - RNA, 19 nt, Homo sapiens
  misc_RNA (1)...(19): siRNA sense strand
gcaaucaagcagaucauca

SEQ ID NO: 1953218 - RNA, 19 nt, Homo sapiens
  misc_RNA (1)...(19): siRNA sense strand
aaggacacgugcuaucaaa

SEQ ID NO: 1953219 - RNA, 19 nt, Homo sapiens
  misc_RNA (1)...(19): siRNA sense strand
gaggaagacaugacuaaag

SEQ ID NO: 1953220 - RNA, 19 nt, Homo sapiens
  misc_RNA (1)...(19): siRNA sense strand
gcagauuuacgauguauac

SEQ ID NO: 1953221 - RNA, 19 nt, Homo sapiens
  misc_RNA (1)...(19): siRNA sense strand
uugaugagaugccgaugaa

SEQ ID NO: 1953222 - RNA, 19 nt, Homo sapiens
  misc_RNA (1)...(19): siRNA sense strand
guacuauuccacucagauu

SEQ ID NO: 1953223 - RNA, 19 nt, Homo sapiens
  misc_RNA (1)...(19): siRNA sense strand
caggugucccucaucauua

SEQ ID NO: 1953224 - RNA, 19 nt, Homo sapiens
  misc_RNA (1)...(19): siRNA sense strand
gcaucuacgcuuacgguuu

SEQ ID NO: 1953225 - RNA, 19 nt, Homo sapiens
  misc_RNA (1)...(19): siRNA sense strand
gccgagugcuuauuucuac

SEQ ID NO: 1953226 - RNA, 19 nt, Homo sapiens
  misc_RNA (1)...(19): siRNA sense strand
ggaaggcaucaagcaauuu

SEQ ID NO: 1953227 - RNA, 19 nt, Homo sapiens
  misc_RNA (1)...(19): siRNA sense strand
acacagaauugggagauca

SEQ ID NO: 1953228 - RNA, 19 nt, Homo sapiens
  misc_RNA (1)...(19): siRNA sense strand
gagaugaccaacaaguuca

SEQ ID NO: 1953229 - RNA, 19 nt, Homo sapiens
  misc_RNA (1)...(19): siRNA sense strand
ggguguggccauuaacuuu

SEQ ID NO: 1953230 - RNA, 19 nt, Homo sapiens
  misc_RNA (1)...(19): siRNA sense strand
ucaggugucccucaucauu

SEQ ID NO: 1953231 - RNA, 19 nt, Homo sapiens
  misc_RNA (1)...(19): siRNA sense strand
ccucaggugucccucauca

SEQ ID NO: 1953232 - RNA, 19 nt, Homo sapiens
  misc_RNA (1)...(19): siRNA sense strand
cgaaagcggcugcucaaag

SEQ ID NO: 1953233 - RNA, 19 nt, Homo sapiens
  misc_RNA (1)...(19): siRNA sense strand
uguaaagaaugacgacauc

SEQ ID NO: 1953234 - RNA, 19 nt, Homo sapiens
  misc_RNA (1)...(19): siRNA sense strand
uaugaucucccuaauaaca

SEQ ID NO: 1953235 - RNA, 19 nt, Homo sapiens
  misc_RNA (1)...(19): siRNA sense strand
caaucaagcagaucaucaa

SEQ ID NO: 1953236 - RNA, 19 nt, Homo sapiens
  misc_RNA (1)...(19): siRNA sense strand
ucgugaaacucaagcuuug

SEQ ID NO: 1953237 - RNA, 19 nt, Homo sapiens
  misc_RNA (1)...(19): siRNA sense strand
ggagagggaagaguggaaa

SEQ ID NO: 1953238 - RNA, 19 nt, Homo sapiens
  misc_RNA (1)...(19): siRNA sense strand
cgaugaacguugcugaucu

SEQ ID NO: 1953239 - RNA, 19 nt, Homo sapiens
  misc_RNA (1)...(19): siRNA sense strand
gaagaguggaaauuugaca

SEQ ID NO: 1953240 - RNA, 19 nt, Homo sapiens
  misc_RNA (1)...(19): siRNA sense strand
cacacgagauucuggagau

SEQ ID NO: 1953241 - RNA, 19 nt, Homo sapiens
  misc_RNA (1)...(19): siRNA sense strand
aagaggaagacaugacuaa

SEQ ID NO: 1953242 - RNA, 19 nt, Homo sapiens
  misc_RNA (1)...(19): siRNA sense strand
agggaagaguggaaauuug

SEQ ID NO: 1953243 - RNA, 19 nt, Homo sapiens
  misc_RNA (1)...(19): siRNA sense strand
gagauaucgagcaguacua

SEQ ID NO: 1953244 - RNA, 19 nt, Homo sapiens
  misc_RNA (1)...(19): siRNA sense strand
aggugucccucaucauuaa

SEQ ID NO: 1953245 - RNA, 19 nt, Homo sapiens
  misc_RNA (1)...(19): siRNA sense strand
agaaagagcgggaguccau

SEQ ID NO: 1953246 - RNA, 19 nt, Homo sapiens
  misc_RNA (1)...(19): siRNA sense strand
agagcagauuuacgaugua

SEQ ID NO: 1953247 - RNA, 19 nt, Homo sapiens
  misc_RNA (1)...(19): siRNA sense strand
gaaggcaucaagcaauuuu

SEQ ID NO: 1953248 - RNA, 19 nt, Homo sapiens
  misc_RNA (1)...(19): siRNA sense strand
guucaugaccgacccaauc

SEQ ID NO: 1953249 - RNA, 19 nt, Homo sapiens
  misc_RNA (1)...(19): siRNA sense strand
agaguuggcugugcagauc

SEQ ID NO: 1953250 - RNA, 19 nt, Homo sapiens
  misc_RNA (1)...(19): siRNA sense strand
gccagccgagugcuuauuu

SEQ ID NO: 1953251 - RNA, 19 nt, Homo sapiens
  misc_RNA (1)...(19): siRNA sense strand
uuuacgauguauacaggua

SEQ ID NO: 1953252 - RNA, 19 nt, Homo sapiens
  misc_RNA (1)...(19): siRNA sense strand
cgacauccgcauccucaga

SEQ ID NO: 1953253 - RNA, 19 nt, Homo sapiens
  misc_RNA (1)...(19): siRNA sense strand
ccuaauaacagagaauugu

SEQ ID NO: 1953254 - RNA, 19 nt, Homo sapiens
  misc_RNA (1)...(19): siRNA sense strand
acagccaccuucaguaucu

SEQ ID NO: 1953255 - RNA, 19 nt, Homo sapiens
  misc_RNA (1)...(19): siRNA sense strand
guguuuggauauucagguu

SEQ ID NO: 1953256 - RNA, 19 nt, Homo sapiens
  misc_RNA (1)...(19): siRNA sense strand
ugaucucccuaauaacaga

SEQ ID NO: 1953257 - RNA, 19 nt, Homo sapiens
  misc_RNA (1)...(19): siRNA sense strand
caaagaggaagacaugacu

SEQ ID NO: 1953258 - RNA, 19 nt, Homo sapiens
  misc_RNA (1)...(19): siRNA sense strand
uaaggacacgugcuaucaa

SEQ ID NO: 1953259 - RNA, 19 nt, Homo sapiens
  misc_RNA (1)...(19): siRNA sense strand
gauuacggacagcauguug

SEQ ID NO: 1953260 - RNA, 19 nt, Homo sapiens
  misc_RNA (1)...(19): siRNA sense strand
gguguggccauuaacuuug

SEQ ID NO: 1953261 - RNA, 19 nt, Homo sapiens
  misc_RNA (1)...(19): siRNA sense strand
gagugcuuauuucuacaga

SEQ ID NO: 1953262 - RNA, 19 nt, Homo sapiens
  misc_RNA (1)...(19): siRNA sense strand
ucacucaggcggucaucuu

SEQ ID NO: 1953263 - RNA, 19 nt, Homo sapiens
  misc_RNA (1)...(19): siRNA sense strand
guuucaaagagcagauuua

SEQ ID NO: 1953264 - RNA, 19 nt, Homo sapiens
  misc_RNA (1)...(19): siRNA sense strand
ggaagacaugacuaaagug

SEQ ID NO: 1953265 - RNA, 19 nt, Homo sapiens
  misc_RNA (1)...(19): siRNA sense strand
cuaaggacacgugcuauca

SEQ ID NO: 1953266 - RNA, 19 nt, Homo sapiens
  misc_RNA (1)...(19): siRNA sense strand
gauaucgagcaguacuauu

SEQ ID NO: 1953267 - RNA, 19 nt, Homo sapiens
  misc_RNA (1)...(19): siRNA sense strand
uuaacuaugaucucccuaa

SEQ ID NO: 1953268 - RNA, 19 nt, Homo sapiens
  misc_RNA (1)...(19): siRNA sense strand
gagaguuggcugugcagau

SEQ ID NO: 1953269 - RNA, 19 nt, Homo sapiens
  misc_RNA (1)...(19): siRNA sense strand
ggacacgugcuaucaaaau

SEQ ID NO: 1953270 - RNA, 19 nt, Homo sapiens
  misc_RNA (1)...(19): siRNA sense strand
acaggugguucucaucagu

SEQ ID NO: 1953271 - RNA, 19 nt, Homo sapiens
  misc_RNA (1)...(19): siRNA sense strand
gcgaggacaucaggaagcu

SEQ ID NO: 1953272 - RNA, 19 nt, Homo sapiens
  misc_RNA (1)...(19): siRNA sense strand
ccggaaggguguggccauu

SEQ ID NO: 1953273 - RNA, 19 nt, Homo sapiens
  misc_RNA (1)...(19): siRNA sense strand
gcuuauuucuacagauguc

SEQ ID NO: 1953274 - RNA, 19 nt, Homo sapiens
  misc_RNA (1)...(19): siRNA sense strand
ccagccgagugcuuauuuc

SEQ ID NO: 1953275 - RNA, 19 nt, Homo sapiens
  misc_RNA (1)...(19): siRNA sense strand
aaagaggaagacaugacua

SEQ ID NO: 1953276 - RNA, 19 nt, Homo sapiens
  misc_RNA (1)...(19): siRNA sense strand
uggaugaagcugaugaaau

SEQ ID NO: 1953277 - RNA, 19 nt, Homo sapiens
  misc_RNA (1)...(19): siRNA sense strand
acaucaggaagcuggauua

SEQ ID NO: 1953278 - RNA, 19 nt, Homo sapiens
  misc_RNA (1)...(19): siRNA sense strand
guguggccauuaacuuugu

SEQ ID NO: 1953279 - RNA, 19 nt, Homo sapiens
  misc_RNA (1)...(19): siRNA sense strand
cggaaggguguggccauua

SEQ ID NO: 1953280 - RNA, 19 nt, Homo sapiens
  misc_RNA (1)...(19): siRNA sense strand
acacaggugguucucauca

SEQ ID NO: 1953281 - RNA, 19 nt, Homo sapiens
  misc_RNA (1)...(19): siRNA sense strand
gcaauccagcaacgagcaa

SEQ ID NO: 1953282 - RNA, 19 nt, Homo sapiens
  misc_RNA (1)...(19): siRNA sense strand
caaagagcagauuuacgau

SEQ ID NO: 1953283 - RNA, 19 nt, Homo sapiens
  misc_RNA (1)...(19): siRNA sense strand
aacagagaauuguacauac

SEQ ID NO: 1953284 - RNA, 19 nt, Homo sapiens
  misc_RNA (1)...(19): siRNA sense strand
uaacuaaggugaagcugau

SEQ ID NO: 1953285 - RNA, 19 nt, Homo sapiens
  misc_RNA (1)...(19): siRNA sense strand
uaaggacucagaagaaaua

SEQ ID NO: 1953286 - RNA, 19 nt, Homo sapiens
  misc_RNA (1)...(19): siRNA sense strand
ugagagcucugaagaugaa

SEQ ID NO: 1953287 - RNA, 19 nt, Homo sapiens
  misc_RNA (1)...(19): siRNA sense strand
agagggagcugaagaagga

SEQ ID NO: 1953288 - RNA, 19 nt, Homo sapiens
  misc_RNA (1)...(19): siRNA sense strand
ugggagggcuuccuuauga

SEQ ID NO: 1953289 - RNA, 19 nt, Homo sapiens
  misc_RNA (1)...(19): siRNA sense strand
gaucaugugucuaacuauc

SEQ ID NO: 1953290 - RNA, 19 nt, Homo sapiens
  misc_RNA (1)...(19): siRNA sense strand
gaagaaaagaccaggauua

SEQ ID NO: 1953291 - RNA, 19 nt, Homo sapiens
  misc_RNA (1)...(19): siRNA sense strand
cagaagaaauagaugaugu

SEQ ID NO: 1953292 - RNA, 19 nt, Homo sapiens
  misc_RNA (1)...(19): siRNA sense strand
agagagagcucagaaguca

SEQ ID NO: 1953293 - RNA, 19 nt, Homo sapiens
  misc_RNA (1)...(19): siRNA sense strand
gagcacaaguccucaagca

SEQ ID NO: 1953294 - RNA, 19 nt, Homo sapiens
  misc_RNA (1)...(19): siRNA sense strand
ggacagcgccuggaucuuc

SEQ ID NO: 1953295 - RNA, 19 nt, Homo sapiens
  misc_RNA (1)...(19): siRNA sense strand
gauaaaucccauaggcaua

SEQ ID NO: 1953296 - RNA, 19 nt, Homo sapiens
  misc_RNA (1)...(19): siRNA sense strand
ucaguugggugguuacuau

SEQ ID NO: 1953297 - RNA, 19 nt, Homo sapiens
  misc_RNA (1)...(19): siRNA sense strand
gaagaaauagaugauguga

SEQ ID NO: 1953298 - RNA, 19 nt, Homo sapiens
  misc_RNA (1)...(19): siRNA sense strand
ggacucagaagaaauagau

SEQ ID NO: 1953299 - RNA, 19 nt, Homo sapiens
  misc_RNA (1)...(19): siRNA sense strand
gaccagaggagcacaauuc

SEQ ID NO: 1953300 - RNA, 19 nt, Homo sapiens
  misc_RNA (1)...(19): siRNA sense strand
caaauucaguugggugguu

SEQ ID NO: 1953301 - RNA, 19 nt, Homo sapiens
  misc_RNA (1)...(19): siRNA sense strand
gaaguaggagccgagauaa

SEQ ID NO: 1953302 - RNA, 19 nt, Homo sapiens
  misc_RNA (1)...(19): siRNA sense strand
ucaccaaguuugucugaga

SEQ ID NO: 1953303 - RNA, 19 nt, Homo sapiens
  misc_RNA (1)...(19): siRNA sense strand
ccuaaggacucagaagaaa

SEQ ID NO: 1953304 - RNA, 19 nt, Homo sapiens
  misc_RNA (1)...(19): siRNA sense strand
gaguggaucaugugucuaa

SEQ ID NO: 1953305 - RNA, 19 nt, Homo sapiens
  misc_RNA (1)...(19): siRNA sense strand
ggacaucaucuguguguuc

SEQ ID NO: 1953306 - RNA, 19 nt, Homo sapiens
  misc_RNA (1)...(19): siRNA sense strand
agaaguaggagccgagaua

SEQ ID NO: 1953307 - RNA, 19 nt, Homo sapiens
  misc_RNA (1)...(19): siRNA sense strand
uggaucaugugucuaacua

SEQ ID NO: 1953308 - RNA, 19 nt, Homo sapiens
  misc_RNA (1)...(19): siRNA sense strand
gacuucagcugcacaguag

SEQ ID NO: 1953309 - RNA, 19 nt, Homo sapiens
  misc_RNA (1)...(19): siRNA sense strand
gaaagccgaccgggaggua

SEQ ID NO: 1953310 - RNA, 19 nt, Homo sapiens
  misc_RNA (1)...(19): siRNA sense strand
ucugagagcucugaagaug

SEQ ID NO: 1953311 - RNA, 19 nt, Homo sapiens
  misc_RNA (1)...(19): siRNA sense strand
uagaugaugugaccagaca

SEQ ID NO: 1953312 - RNA, 19 nt, Homo sapiens
  misc_RNA (1)...(19): siRNA sense strand
gcaagacaguaaaggaaaa

SEQ ID NO: 1953313 - RNA, 19 nt, Homo sapiens
  misc_RNA (1)...(19): siRNA sense strand
gcacauucuagcugguaua

SEQ ID NO: 1953314 - RNA, 19 nt, Homo sapiens
  misc_RNA (1)...(19): siRNA sense strand
aaauucaguugggugguua

SEQ ID NO: 1953315 - RNA, 19 nt, Homo sapiens
  misc_RNA (1)...(19): siRNA sense strand
caucaucuguguguucuca

SEQ ID NO: 1953316 - RNA, 19 nt, Homo sapiens
  misc_RNA (1)...(19): siRNA sense strand
uaaaugcagucaaauucag

SEQ ID NO: 1953317 - RNA, 19 nt, Homo sapiens
  misc_RNA (1)...(19): siRNA sense strand
gagcaaccauccucuucgu

SEQ ID NO: 1953318 - RNA, 19 nt, Homo sapiens
  misc_RNA (1)...(19): siRNA sense strand
gaucaaaggaagaacuauc

SEQ ID NO: 1953319 - RNA, 19 nt, Homo sapiens
  misc_RNA (1)...(19): siRNA sense strand
ggaugacacuggcccuaag

SEQ ID NO: 1953320 - RNA, 19 nt, Homo sapiens
  misc_RNA (1)...(19): siRNA sense strand
gggagggcuuccuuaugaa

SEQ ID NO: 1953321 - RNA, 19 nt, Homo sapiens
  misc_RNA (1)...(19): siRNA sense strand
gaucaacgagcugaaugaa

SEQ ID NO: 1953322 - RNA, 19 nt, Homo sapiens
  misc_RNA (1)...(19): siRNA sense strand
gagggaggcaagagaagaa

SEQ ID NO: 1953323 - RNA, 19 nt, Homo sapiens
  misc_RNA (1)...(19): siRNA sense strand
uaaaucccauaggcauaaa

SEQ ID NO: 1953324 - RNA, 19 nt, Homo sapiens
  misc_RNA (1)...(19): siRNA sense strand
cuaacuaucgggcuccuaa

SEQ ID NO: 1953325 - RNA, 19 nt, Homo sapiens
  misc_RNA (1)...(19): siRNA sense strand
cagcaagaacucagagaga

SEQ ID NO: 1953326 - RNA, 19 nt, Homo sapiens
  misc_RNA (1)...(19): siRNA sense strand
gcaggagggaggcaagaga

SEQ ID NO: 1953327 - RNA, 19 nt, Homo sapiens
  misc_RNA (1)...(19): siRNA sense strand
ggcagaagcuccccaaauc

SEQ ID NO: 1953328 - RNA, 19 nt, Homo sapiens
  misc_RNA (1)...(19): siRNA sense strand
agacuucagcugcacagua

SEQ ID NO: 1953329 - RNA, 19 nt, Homo sapiens
  misc_RNA (1)...(19): siRNA sense strand
cagcugcacaguagauuug

SEQ ID NO: 1953330 - RNA, 19 nt, Homo sapiens
  misc_RNA (1)...(19): siRNA sense strand
ggagguacaggcagagcaa

SEQ ID NO: 1953331 - RNA, 19 nt, Homo sapiens
  misc_RNA (1)...(19): siRNA sense strand
ggagggaggcaagagaaga

SEQ ID NO: 1953332 - RNA, 19 nt, Homo sapiens
  misc_RNA (1)...(19): siRNA sense strand
gacaucaucuguguguucu

SEQ ID NO: 1953333 - RNA, 19 nt, Homo sapiens
  misc_RNA (1)...(19): siRNA sense strand
auaaaucccauaggcauaa

SEQ ID NO: 1953334 - RNA, 19 nt, Homo sapiens
  misc_RNA (1)...(19): siRNA sense strand
gcacagcagcaagaacuca

SEQ ID NO: 1953335 - RNA, 19 nt, Homo sapiens
  misc_RNA (1)...(19): siRNA sense strand
ccgaguggaucaugugucu

SEQ ID NO: 1953336 - RNA, 19 nt, Homo sapiens
  misc_RNA (1)...(19): siRNA sense strand
gaagaccagaggagcacaa

SEQ ID NO: 1953337 - RNA, 19 nt, Homo sapiens
  misc_RNA (1)...(19): siRNA sense strand
gauucuguuuccucugcua

SEQ ID NO: 1953338 - RNA, 19 nt, Homo sapiens
  misc_RNA (1)...(19): siRNA sense strand
guucuucgaaucccaguga

SEQ ID NO: 1953339 - RNA, 19 nt, Homo sapiens
  misc_RNA (1)...(19): siRNA sense strand
uauagaaguagaaguagga

SEQ ID NO: 1953340 - RNA, 19 nt, Homo sapiens
  misc_RNA (1)...(19): siRNA sense strand
ucagagagagcucagaagu

SEQ ID NO: 1953341 - RNA, 19 nt, Homo sapiens
  misc_RNA (1)...(19): siRNA sense strand
aggugaagcugaucaacga

SEQ ID NO: 1953342 - RNA, 19 nt, Homo sapiens
  misc_RNA (1)...(19): siRNA sense strand
gguauaaugggcguucuga

SEQ ID NO: 1953343 - RNA, 19 nt, Homo sapiens
  misc_RNA (1)...(19): siRNA sense strand
uauaaugggcguucugaag

SEQ ID NO: 1953344 - RNA, 19 nt, Homo sapiens
  misc_RNA (1)...(19): siRNA sense strand
gaugacacuggcccuaaga

SEQ ID NO: 1953345 - RNA, 19 nt, Homo sapiens
  misc_RNA (1)...(19): siRNA sense strand
gggcuuccuuaugaacuga

SEQ ID NO: 1953346 - RNA, 19 nt, Homo sapiens
  misc_RNA (1)...(19): siRNA sense strand
ggggagauuguuaacauua

SEQ ID NO: 1953347 - RNA, 19 nt, Homo sapiens
  misc_RNA (1)...(19): siRNA sense strand
aguaggagccgagauaaau

SEQ ID NO: 1953348 - RNA, 19 nt, Homo sapiens
  misc_RNA (1)...(19): siRNA sense strand
agagagcucagaagucaga

SEQ ID NO: 1953349 - RNA, 19 nt, Homo sapiens
  misc_RNA (1)...(19): siRNA sense strand
cuaagaagcacagcagcaa

SEQ ID NO: 1953350 - RNA, 19 nt, Homo sapiens
  misc_RNA (1)...(19): siRNA sense strand
caagaaaacugggaaaucc

SEQ ID NO: 1953351 - RNA, 19 nt, Homo sapiens
  misc_RNA (1)...(19): siRNA sense strand
guaggagccgagauaaauc

SEQ ID NO: 1953352 - RNA, 19 nt, Homo sapiens
  misc_RNA (1)...(19): siRNA sense strand
aagaagcacagcagcaaga

SEQ ID NO: 1953353 - RNA, 19 nt, Homo sapiens
  misc_RNA (1)...(19): siRNA sense strand
aagaucaaaggaagaacua

SEQ ID NO: 1953354 - RNA, 19 nt, Homo sapiens
  misc_RNA (1)...(19): siRNA sense strand
ucuguuuccucugcuauga

SEQ ID NO: 1953355 - RNA, 19 nt, Homo sapiens
  misc_RNA (1)...(19): siRNA sense strand
ugucugagagcucugaaga

SEQ ID NO: 1953356 - RNA, 19 nt, Homo sapiens
  misc_RNA (1)...(19): siRNA sense strand
gaccaggauuagggacaga

SEQ ID NO: 1953357 - RNA, 19 nt, Homo sapiens
  misc_RNA (1)...(19): siRNA sense strand
acacuggcccuaagaagca

SEQ ID NO: 1953358 - RNA, 19 nt, Homo sapiens
  misc_RNA (1)...(19): siRNA sense strand
gacgcaagacaguaaagga

SEQ ID NO: 1953359 - RNA, 19 nt, Homo sapiens
  misc_RNA (1)...(19): siRNA sense strand
caagaucaaaggaagaacu

SEQ ID NO: 1953360 - RNA, 19 nt, Homo sapiens
  misc_RNA (1)...(19): siRNA sense strand
gaggggaguucuucgaauc

SEQ ID NO: 1953361 - RNA, 19 nt, Homo sapiens
  misc_RNA (1)...(19): siRNA sense strand
caggagggaggcaagagaa

SEQ ID NO: 1953362 - RNA, 19 nt, Homo sapiens
  misc_RNA (1)...(19): siRNA sense strand
cgcaagacaguaaaggaaa

SEQ ID NO: 1953363 - RNA, 19 nt, Homo sapiens
  misc_RNA (1)...(19): siRNA sense strand
acucagaagaaauagauga

SEQ ID NO: 1953364 - RNA, 19 nt, Homo sapiens
  misc_RNA (1)...(19): siRNA sense strand
ugaacgagagguccagcuu

SEQ ID NO: 1953365 - RNA, 19 nt, Homo sapiens
  misc_RNA (1)...(19): siRNA sense strand
cacauucuagcugguauaa

SEQ ID NO: 1953366 - RNA, 19 nt, Homo sapiens
  misc_RNA (1)...(19): siRNA sense strand
ggcuucagaugcacauucu

SEQ ID NO: 1953367 - RNA, 19 nt, Homo sapiens
  misc_RNA (1)...(19): siRNA sense strand
cccagacgcaagacaguaa

SEQ ID NO: 1953368 - RNA, 19 nt, Homo sapiens
  misc_RNA (1)...(19): siRNA sense strand
acgcaagacaguaaaggaa

SEQ ID NO: 1953369 - RNA, 19 nt, Homo sapiens
  misc_RNA (1)...(19): siRNA sense strand
ggaggggaguucuucgaau

SEQ ID NO: 1953370 - RNA, 19 nt, Homo sapiens
  misc_RNA (1)...(19): siRNA sense strand
ugaucaacgagcugaauga

SEQ ID NO: 1953371 - RNA, 19 nt, Homo sapiens
  misc_RNA (1)...(19): siRNA sense strand
gcagcuggcuuccaccaua

SEQ ID NO: 1953372 - RNA, 19 nt, Homo sapiens
  misc_RNA (1)...(19): siRNA sense strand
gcacagcaguguccagaug

SEQ ID NO: 1953373 - RNA, 19 nt, Homo sapiens
  misc_RNA (1)...(19): siRNA sense strand
agaaauauauugccagguu

SEQ ID NO: 1953374 - RNA, 19 nt, Homo sapiens
  misc_RNA (1)...(19): siRNA sense strand
guacaaaggacuucuguga

SEQ ID NO: 1953375 - RNA, 19 nt, Homo sapiens
  misc_RNA (1)...(19): siRNA sense strand
uaccagagguucacgagua

SEQ ID NO: 1953376 - RNA, 19 nt, Homo sapiens
  misc_RNA (1)...(19): siRNA sense strand
acaagaagccauccaagua

SEQ ID NO: 1953377 - RNA, 19 nt, Homo sapiens
  misc_RNA (1)...(19): siRNA sense strand
aagaauacccagcucauua

SEQ ID NO: 1953378 - RNA, 19 nt, Homo sapiens
  misc_RNA (1)...(19): siRNA sense strand
cacaagagcuaccacauca

SEQ ID NO: 1953379 - RNA, 19 nt, Homo sapiens
  misc_RNA (1)...(19): siRNA sense strand
gcacauucacuuucaagaa

SEQ ID NO: 1953380 - RNA, 19 nt, Homo sapiens
  misc_RNA (1)...(19): siRNA sense strand
ccaggaagaucagcuuuga

SEQ ID NO: 1953381 - RNA, 19 nt, Homo sapiens
  misc_RNA (1)...(19): siRNA sense strand
cacgagaacuuccacaaga

SEQ ID NO: 1953382 - RNA, 19 nt, Homo sapiens
  misc_RNA (1)...(19): siRNA sense strand
ucaaguaccugcaccucuu

SEQ ID NO: 1953383 - RNA, 19 nt, Homo sapiens
  misc_RNA (1)...(19): siRNA sense strand
gcaugcaggugggcuguaa

SEQ ID NO: 1953384 - RNA, 19 nt, Homo sapiens
  misc_RNA (1)...(19): siRNA sense strand
ggaagagcacccacuauca

SEQ ID NO: 1953385 - RNA, 19 nt, Homo sapiens
  misc_RNA (1)...(19): siRNA sense strand
gaagaauacccagcucauu

SEQ ID NO: 1953386 - RNA, 19 nt, Homo sapiens
  misc_RNA (1)...(19): siRNA sense strand
gaagaucagcuuugagaag

SEQ ID NO: 1953387 - RNA, 19 nt, Homo sapiens
  misc_RNA (1)...(19): siRNA sense strand
gcacaagagcuaccacauc

SEQ ID NO: 1953388 - RNA, 19 nt, Homo sapiens
  misc_RNA (1)...(19): siRNA sense strand
gcacgcaaacuuccacuuc

SEQ ID NO: 1953389 - RNA, 19 nt, Homo sapiens
  misc_RNA (1)...(19): siRNA sense strand
gaaggagcccagcaacgaa

SEQ ID NO: 1953390 - RNA, 19 nt, Homo sapiens
  misc_RNA (1)...(19): siRNA sense strand
agaauacccagcucauuaa

SEQ ID NO: 1953391 - RNA, 19 nt, Homo sapiens
  misc_RNA (1)...(19): siRNA sense strand
cgacgaccuuguugacuuc

SEQ ID NO: 1953392 - RNA, 19 nt, Homo sapiens
  misc_RNA (1)...(19): siRNA sense strand
uaagcccucugccaccuuu

SEQ ID NO: 1953393 - RNA, 19 nt, Homo sapiens
  misc_RNA (1)...(19): siRNA sense strand
gggaagagcacccacuauc

SEQ ID NO: 1953394 - RNA, 19 nt, Homo sapiens
  misc_RNA (1)...(19): siRNA sense strand
ccaaggacggcuucaagaa

SEQ ID NO: 1953395 - RNA, 19 nt, Homo sapiens
  misc_RNA (1)...(19): siRNA sense strand
gcgcgguucucuaaguaug

SEQ ID NO: 1953396 - RNA, 19 nt, Homo sapiens
  misc_RNA (1)...(19): siRNA sense strand
gcaaggcuaccaaccacuu

SEQ ID NO: 1953397 - RNA, 19 nt, Homo sapiens
  misc_RNA (1)...(19): siRNA sense strand
uaaaccagccgucacugaa

SEQ ID NO: 1953398 - RNA, 19 nt, Homo sapiens
  misc_RNA (1)...(19): siRNA sense strand
gacagaagaccacgcacuu

SEQ ID NO: 1953399 - RNA, 19 nt, Homo sapiens
  misc_RNA (1)...(19): siRNA sense strand
ccagccagaugaccucuca

SEQ ID NO: 1953400 - RNA, 19 nt, Homo sapiens
  misc_RNA (1)...(19): siRNA sense strand
cagcaacgacgaccuuguu

SEQ ID NO: 1953401 - RNA, 19 nt, Homo sapiens
  misc_RNA (1)...(19): siRNA sense strand
aguacgaccuggagaaugu

SEQ ID NO: 1953402 - RNA, 19 nt, Homo sapiens
  misc_RNA (1)...(19): siRNA sense strand
ggcaacgacuucucuagag

SEQ ID NO: 1953403 - RNA, 19 nt, Homo sapiens
  misc_RNA (1)...(19): siRNA sense strand
auacccagcucauuaacga

SEQ ID NO: 1953404 - RNA, 19 nt, Homo sapiens
  misc_RNA (1)...(19): siRNA sense strand
agaacggacugcccacaga

SEQ ID NO: 1953405 - RNA, 19 nt, Homo sapiens
  misc_RNA (1)...(19): siRNA sense strand
ccgaguaccugaagucaac

SEQ ID NO: 1953406 - RNA, 19 nt, Homo sapiens
  misc_RNA (1)...(19): siRNA sense strand
guaccugcaccucuucaaa

SEQ ID NO: 1953407 - RNA, 19 nt, Homo sapiens
  misc_RNA (1)...(19): siRNA sense strand
acuacaacaugcacaagaa

SEQ ID NO: 1953408 - RNA, 19 nt, Homo sapiens
  misc_RNA (1)...(19): siRNA sense strand
gccuugacccugaguguaa

SEQ ID NO: 1953409 - RNA, 19 nt, Homo sapiens
  misc_RNA (1)...(19): siRNA sense strand
ggccaucgccuucaagaca

SEQ ID NO: 1953410 - RNA, 19 nt, Homo sapiens
  misc_RNA (1)...(19): siRNA sense strand
caagaagccauccaaguac

SEQ ID NO: 1953411 - RNA, 19 nt, Homo sapiens
  misc_RNA (1)...(19): siRNA sense strand
ccggcaaauucaucucuuu

SEQ ID NO: 1953412 - RNA, 19 nt, Homo sapiens
  misc_RNA (1)...(19): siRNA sense strand
gucuagaccugacugugaa

SEQ ID NO: 1953413 - RNA, 19 nt, Homo sapiens
  misc_RNA (1)...(19): siRNA sense strand
ccaaaccucccaacagcaa

SEQ ID NO: 1953414 - RNA, 19 nt, Homo sapiens
  misc_RNA (1)...(19): siRNA sense strand
gagcuggccaggaagauca

SEQ ID NO: 1953415 - RNA, 19 nt, Homo sapiens
  misc_RNA (1)...(19): siRNA sense strand
ucgagaagcacaagagcua

SEQ ID NO: 1953416 - RNA, 19 nt, Homo sapiens
  misc_RNA (1)...(19): siRNA sense strand
gcaggugggcuguaacaag

SEQ ID NO: 1953417 - RNA, 19 nt, Homo sapiens
  misc_RNA (1)...(19): siRNA sense strand
gaagagcacccacuaucac

SEQ ID NO: 1953418 - RNA, 19 nt, Homo sapiens
  misc_RNA (1)...(19): siRNA sense strand
gaacggacugcccacagau

SEQ ID NO: 1953419 - RNA, 19 nt, Homo sapiens
  misc_RNA (1)...(19): siRNA sense strand
ccaaguacgaccuggagaa

SEQ ID NO: 1953420 - RNA, 19 nt, Homo sapiens
  misc_RNA (1)...(19): siRNA sense strand
cacauucacuuucaagaac

SEQ ID NO: 1953421 - RNA, 19 nt, Homo sapiens
  misc_RNA (1)...(19): siRNA sense strand
acgagaacuuccacaagaa

SEQ ID NO: 1953422 - RNA, 19 nt, Homo sapiens
  misc_RNA (1)...(19): siRNA sense strand
agccgucacugaagaugua

SEQ ID NO: 1953423 - RNA, 19 nt, Homo sapiens
  misc_RNA (1)...(19): siRNA sense strand
ggaagaucagcuuugagaa

SEQ ID NO: 1953424 - RNA, 19 nt, Homo sapiens
  misc_RNA (1)...(19): siRNA sense strand
caagagcuaccacaucaag

SEQ ID NO: 1953425 - RNA, 19 nt, Homo sapiens
  misc_RNA (1)...(19): siRNA sense strand
caucaagcacgcaaacuuc

SEQ ID NO: 1953426 - RNA, 19 nt, Homo sapiens
  misc_RNA (1)...(19): siRNA sense strand
ccagaugaccucucacaag

SEQ ID NO: 1953427 - RNA, 19 nt, Homo sapiens
  misc_RNA (1)...(19): siRNA sense strand
gaacgggagcaccuacaag

SEQ ID NO: 1953428 - RNA, 19 nt, Homo sapiens
  misc_RNA (1)...(19): siRNA sense strand
ugaaggagcccagcaacga

SEQ ID NO: 1953429 - RNA, 19 nt, Homo sapiens
  misc_RNA (1)...(19): siRNA sense strand
gggaccgucuccacuguca

SEQ ID NO: 1953430 - RNA, 19 nt, Homo sapiens
  misc_RNA (1)...(19): siRNA sense strand
caagaacaagugugacauc

SEQ ID NO: 1953431 - RNA, 19 nt, Homo sapiens
  misc_RNA (1)...(19): siRNA sense strand
gcaguguccagaugcagaa

SEQ ID NO: 1953432 - RNA, 19 nt, Homo sapiens
  misc_RNA (1)...(19): siRNA sense strand
aggaagaucagcuuugaga

SEQ ID NO: 1953433 - RNA, 19 nt, Homo sapiens
  misc_RNA (1)...(19): siRNA sense strand
gccaaggacggcuucaaga

SEQ ID NO: 1953434 - RNA, 19 nt, Homo sapiens
  misc_RNA (1)...(19): siRNA sense strand
ucucuaaguaugaggagua

SEQ ID NO: 1953435 - RNA, 19 nt, Homo sapiens
  misc_RNA (1)...(19): siRNA sense strand
cgaguaagcaggacgugau

SEQ ID NO: 1953436 - RNA, 19 nt, Homo sapiens
  misc_RNA (1)...(19): siRNA sense strand
aaccagccgucacugaaga

SEQ ID NO: 1953437 - RNA, 19 nt, Homo sapiens
  misc_RNA (1)...(19): siRNA sense strand
ccaucaagcacgcaaacuu

SEQ ID NO: 1953438 - RNA, 19 nt, Homo sapiens
  misc_RNA (1)...(19): siRNA sense strand
cucgggagcuggagacuca

SEQ ID NO: 1953439 - RNA, 19 nt, Homo sapiens
  misc_RNA (1)...(19): siRNA sense strand
acgacgaccuuguugacuu

SEQ ID NO: 1953440 - RNA, 19 nt, Homo sapiens
  misc_RNA (1)...(19): siRNA sense strand
guacgacuucuucauccaa

SEQ ID NO: 1953441 - RNA, 19 nt, Homo sapiens
  misc_RNA (1)...(19): siRNA sense strand
acaagaagcgcgacaacuc

SEQ ID NO: 1953442 - RNA, 19 nt, Homo sapiens
  misc_RNA (1)...(19): siRNA sense strand
gcacaagaagcgcgacaac

SEQ ID NO: 1953443 - RNA, 19 nt, Homo sapiens
  misc_RNA (1)...(19): siRNA sense strand
gauccgccacuacaacaug

SEQ ID NO: 1953444 - RNA, 19 nt, Homo sapiens
  misc_RNA (1)...(19): siRNA sense strand
accagagguucacgaguaa

SEQ ID NO: 1953445 - RNA, 19 nt, Homo sapiens
  misc_RNA (1)...(19): siRNA sense strand
caaguacgaccuggagaau

SEQ ID NO: 1953446 - RNA, 19 nt, Homo sapiens
  misc_RNA (1)...(19): siRNA sense strand
gcccagcaacgaaucaaau

SEQ ID NO: 1953447 - RNA, 19 nt, Homo sapiens
  misc_RNA (1)...(19): siRNA sense strand
ggacugcccacagauaaac

SEQ ID NO: 1953448 - RNA, 19 nt, Homo sapiens
  misc_RNA (1)...(19): siRNA sense strand
cggcauguuuggcuaugau

SEQ ID NO: 1953449 - RNA, 19 nt, Homo sapiens
  misc_RNA (1)...(19): siRNA sense strand
gcaagcaagggccucaucu

SEQ ID NO: 1953450 - RNA, 19 nt, Homo sapiens
  misc_RNA (1)...(19): siRNA sense strand
uacgacuucuucauccaaa

SEQ ID NO: 1953451 - RNA, 19 nt, Homo sapiens
  misc_RNA (1)...(19): siRNA sense strand
gcauguuuggcuaugauga

SEQ ID NO: 1953452 - RNA, 19 nt, Homo sapiens
  misc_RNA (1)...(19): siRNA sense strand
ggcugcagcugcccuuaag

SEQ ID NO: 1953453 - RNA, 19 nt, Homo sapiens
  misc_RNA (1)...(19): siRNA sense strand
ccaccaaaccucccaacag

SEQ ID NO: 1953454 - RNA, 19 nt, Homo sapiens
  misc_RNA (1)...(19): siRNA sense strand
gaagaccggcgagaaucug

SEQ ID NO: 1953455 - RNA, 19 nt, Homo sapiens
  misc_RNA (1)...(19): siRNA sense strand
ggacgugauccgccacuac

SEQ ID NO: 1953456 - RNA, 19 nt, Homo sapiens
  misc_RNA (1)...(19): siRNA sense strand
ggcaaauucaucucuuuua

SEQ ID NO: 1953457 - RNA, 19 nt, Homo sapiens
  misc_RNA (1)...(19): siRNA sense strand
ccacgagaacuuccacaag

SEQ ID NO: 1953458 - RNA, 19 nt, Homo sapiens
  misc_RNA (1)...(19): siRNA sense strand
ccacggcugccaccucaau

SEQ ID NO: 1953459 - RNA, 19 nt, Homo sapiens
  misc_RNA (1)...(19): siRNA sense strand
gacgugauccgccacuaca

SEQ ID NO: 1953460 - RNA, 19 nt, Homo sapiens
  misc_RNA (1)...(19): siRNA sense strand
ggcugcacauucacuuuca

SEQ ID NO: 1953461 - RNA, 19 nt, Homo sapiens
  misc_RNA (1)...(19): siRNA sense strand
uggcaacgacuucucuaga

SEQ ID NO: 1953462 - RNA, 19 nt, Homo sapiens
  misc_RNA (1)...(19): siRNA sense strand
gccaggaagaucagcuuug

SEQ ID NO: 1953463 - RNA, 19 nt, Homo sapiens
  misc_RNA (1)...(19): siRNA sense strand
gugcagcgaugaggaagac

SEQ ID NO: 1953464 - RNA, 19 nt, Homo sapiens
  misc_RNA (1)...(19): siRNA sense strand
cuaaguaugaggaguacau

SEQ ID NO: 1953465 - RNA, 19 nt, Homo sapiens
  misc_RNA (1)...(19): siRNA sense strand
gcugcacauucacuuucaa

SEQ ID NO: 1953466 - RNA, 19 nt, Homo sapiens
  misc_RNA (1)...(19): siRNA sense strand
ccuccaccaugaccgaguu

SEQ ID NO: 1953467 - RNA, 19 nt, Homo sapiens
  misc_RNA (1)...(19): siRNA sense strand
gcacuaccacugccuugac

SEQ ID NO: 1953468 - RNA, 19 nt, Homo sapiens
  misc_RNA (1)...(19): siRNA sense strand
cgacugcagcgucuacuac

SEQ ID NO: 1953469 - RNA, 19 nt, Homo sapiens
  misc_RNA (1)...(19): siRNA sense strand
cagcuggcuuccaccauac

SEQ ID NO: 1953470 - RNA, 19 nt, Homo sapiens
  misc_RNA (1)...(19): siRNA sense strand
uacaagaagccauccaagu

SEQ ID NO: 1953471 - RNA, 19 nt, Homo sapiens
  misc_RNA (1)...(19): siRNA sense strand
gaaaggaccuggacaaguu

SEQ ID NO: 1953472 - RNA, 19 nt, Homo sapiens
  misc_RNA (1)...(19): siRNA sense strand
gaaauauggugucuugaaa

SEQ ID NO: 1953473 - RNA, 19 nt, Homo sapiens
  misc_RNA (1)...(19): siRNA sense strand
ugaggacacuggaguaaua

SEQ ID NO: 1953474 - RNA, 19 nt, Homo sapiens
  misc_RNA (1)...(19): siRNA sense strand
gaaacaagggcaugaauau

SEQ ID NO: 1953475 - RNA, 19 nt, Homo sapiens
  misc_RNA (1)...(19): siRNA sense strand
ggaaacaagggcaugaaua

SEQ ID NO: 1953476 - RNA, 19 nt, Homo sapiens
  misc_RNA (1)...(19): siRNA sense strand
ggaaauauggugucuugaa

SEQ ID NO: 1953477 - RNA, 19 nt, Homo sapiens
  misc_RNA (1)...(19): siRNA sense strand
ccauggagcuggaaauaug

SEQ ID NO: 1953478 - RNA, 19 nt, Homo sapiens
  misc_RNA (1)...(19): siRNA sense strand
caugaugacuuuguuauga

SEQ ID NO: 1953479 - RNA, 19 nt, Homo sapiens
  misc_RNA (1)...(19): siRNA sense strand
gaaaagauuugcacucguu

SEQ ID NO: 1953480 - RNA, 19 nt, Homo sapiens
  misc_RNA (1)...(19): siRNA sense strand
guccauggcugaagacuug

SEQ ID NO: 1953481 - RNA, 19 nt, Homo sapiens
  misc_RNA (1)...(19): siRNA sense strand
guagaagacucucaagaag

SEQ ID NO: 1953482 - RNA, 19 nt, Homo sapiens
  misc_RNA (1)...(19): siRNA sense strand
caauacccaugaugacuuu

SEQ ID NO: 1953483 - RNA, 19 nt, Homo sapiens
  misc_RNA (1)...(19): siRNA sense strand
gaagaauguccgcgaguuu

SEQ ID NO: 1953484 - RNA, 19 nt, Homo sapiens
  misc_RNA (1)...(19): siRNA sense strand
gaccuggacaaguuuauua

SEQ ID NO: 1953485 - RNA, 19 nt, Homo sapiens
  misc_RNA (1)...(19): siRNA sense strand
gcugcuggcuuaaaugcua

SEQ ID NO: 1953486 - RNA, 19 nt, Homo sapiens
  misc_RNA (1)...(19): siRNA sense strand
gauauacccuuugccaugu

SEQ ID NO: 1953487 - RNA, 19 nt, Homo sapiens
  misc_RNA (1)...(19): siRNA sense strand
agaagacucucaagaagug

SEQ ID NO: 1953488 - RNA, 19 nt, Homo sapiens
  misc_RNA (1)...(19): siRNA sense strand
gauuugcacucguucauca

SEQ ID NO: 1953489 - RNA, 19 nt, Homo sapiens
  misc_RNA (1)...(19): siRNA sense strand
gaucagcugaccuggcuua

SEQ ID NO: 1953490 - RNA, 19 nt, Homo sapiens
  misc_RNA (1)...(19): siRNA sense strand
gcucucgccuuuccuauca

SEQ ID NO: 1953491 - RNA, 19 nt, Homo sapiens
  misc_RNA (1)...(19): siRNA sense strand
ccuauaggcucuccaggaa

SEQ ID NO: 1953492 - RNA, 19 nt, Homo sapiens
  misc_RNA (1)...(19): siRNA sense strand
guggagauuucacuuaaga

SEQ ID NO: 1953493 - RNA, 19 nt, Homo sapiens
  misc_RNA (1)...(19): siRNA sense strand
guguggagauuucacuuaa

SEQ ID NO: 1953494 - RNA, 19 nt, Homo sapiens
  misc_RNA (1)...(19): siRNA sense strand
ucccagagguuacacauga

SEQ ID NO: 1953495 - RNA, 19 nt, Homo sapiens
  misc_RNA (1)...(19): siRNA sense strand
gaguuuggauauacccuuu

SEQ ID NO: 1953496 - RNA, 19 nt, Homo sapiens
  misc_RNA (1)...(19): siRNA sense strand
ccucaagacuguccaagug

SEQ ID NO: 1953497 - RNA, 19 nt, Homo sapiens
  misc_RNA (1)...(19): siRNA sense strand
uauggugucuugaaaugaa

SEQ ID NO: 1953498 - RNA, 19 nt, Homo sapiens
  misc_RNA (1)...(19): siRNA sense strand
aaagacaucccagagguua

SEQ ID NO: 1953499 - RNA, 19 nt, Homo sapiens
  misc_RNA (1)...(19): siRNA sense strand
gaccuucuaucgggaguuu

SEQ ID NO: 1953500 - RNA, 19 nt, Homo sapiens
  misc_RNA (1)...(19): siRNA sense strand
gcaauacccaugaugacuu

SEQ ID NO: 1953501 - RNA, 19 nt, Homo sapiens
  misc_RNA (1)...(19): siRNA sense strand
uaauauacccgucuguaga

SEQ ID NO: 1953502 - RNA, 19 nt, Homo sapiens
  misc_RNA (1)...(19): siRNA sense strand
aauauggugucuugaaaug

SEQ ID NO: 1953503 - RNA, 19 nt, Homo sapiens
  misc_RNA (1)...(19): siRNA sense strand
caccaucacucuuucuugu

SEQ ID NO: 1953504 - RNA, 19 nt, Homo sapiens
  misc_RNA (1)...(19): siRNA sense strand
cuggaaauauggugucuug

SEQ ID NO: 1953505 - RNA, 19 nt, Homo sapiens
  misc_RNA (1)...(19): siRNA sense strand
caacuuagcaaucaaagac

SEQ ID NO: 1953506 - RNA, 19 nt, Homo sapiens
  misc_RNA (1)...(19): siRNA sense strand
cugaagacuuggacucauu

SEQ ID NO: 1953507 - RNA, 19 nt, Homo sapiens
  misc_RNA (1)...(19): siRNA sense strand
cauguuugcucccaagaau

SEQ ID NO: 1953508 - RNA, 19 nt, Homo sapiens
  misc_RNA (1)...(19): siRNA sense strand
agauuucacuuaagacuuc

SEQ ID NO: 1953509 - RNA, 19 nt, Homo sapiens
  misc_RNA (1)...(19): siRNA sense strand
uguagaagacucucaagaa

SEQ ID NO: 1953510 - RNA, 19 nt, Homo sapiens
  misc_RNA (1)...(19): siRNA sense strand
gaagcuggcugugcaugag

SEQ ID NO: 1953511 - RNA, 19 nt, Homo sapiens
  misc_RNA (1)...(19): siRNA sense strand
uaacuuggcauucaugucu

SEQ ID NO: 1953512 - RNA, 19 nt, Homo sapiens
  misc_RNA (1)...(19): siRNA sense strand
ugaagacuuggacucauua

SEQ ID NO: 1953513 - RNA, 19 nt, Homo sapiens
  misc_RNA (1)...(19): siRNA sense strand
aguguuugcugcuggcuua

SEQ ID NO: 1953514 - RNA, 19 nt, Homo sapiens
  misc_RNA (1)...(19): siRNA sense strand
ucagauugguucaacuuag

SEQ ID NO: 1953515 - RNA, 19 nt, Homo sapiens
  misc_RNA (1)...(19): siRNA sense strand
cagcugaccuggcuuaucc

SEQ ID NO: 1953516 - RNA, 19 nt, Homo sapiens
  misc_RNA (1)...(19): siRNA sense strand
ucaauucccaggacagaaa

SEQ ID NO: 1953517 - RNA, 19 nt, Homo sapiens
  misc_RNA (1)...(19): siRNA sense strand
ugucauugcugcugaaguc

SEQ ID NO: 1953518 - RNA, 19 nt, Homo sapiens
  misc_RNA (1)...(19): siRNA sense strand
gcaguggcaauacccauga

SEQ ID NO: 1953519 - RNA, 19 nt, Homo sapiens
  misc_RNA (1)...(19): siRNA sense strand
guaauauacccgucuguag

SEQ ID NO: 1953520 - RNA, 19 nt, Homo sapiens
  misc_RNA (1)...(19): siRNA sense strand
ugagcagccucuccauaga

SEQ ID NO: 1953521 - RNA, 19 nt, Homo sapiens
  misc_RNA (1)...(19): siRNA sense strand
agaagaauguccgcgaguu

SEQ ID NO: 1953522 - RNA, 19 nt, Homo sapiens
  misc_RNA (1)...(19): siRNA sense strand
cgaguuugaugccuuugug

SEQ ID NO: 1953523 - RNA, 19 nt, Homo sapiens
  misc_RNA (1)...(19): siRNA sense strand
ccauguguguggagauuuc

SEQ ID NO: 1953524 - RNA, 19 nt, Homo sapiens
  misc_RNA (1)...(19): siRNA sense strand
ggacacuggaguaauauac

SEQ ID NO: 1953525 - RNA, 19 nt, Homo sapiens
  misc_RNA (1)...(19): siRNA sense strand
gcaccaucacucuuucuug

SEQ ID NO: 1953526 - RNA, 19 nt, Homo sapiens
  misc_RNA (1)...(19): siRNA sense strand
caaagacaucccagagguu

SEQ ID NO: 1953527 - RNA, 19 nt, Homo sapiens
  misc_RNA (1)...(19): siRNA sense strand
caggauauauuuuggagaa

SEQ ID NO: 1953528 - RNA, 19 nt, Homo sapiens
  misc_RNA (1)...(19): siRNA sense strand
gguuacacaugaagcaaag

SEQ ID NO: 1953529 - RNA, 19 nt, Homo sapiens
  misc_RNA (1)...(19): siRNA sense strand
ucaagacuguccaagugau

SEQ ID NO: 1953530 - RNA, 19 nt, Homo sapiens
  misc_RNA (1)...(19): siRNA sense strand
gccacacccuccaguagug

SEQ ID NO: 1953531 - RNA, 19 nt, Homo sapiens
  misc_RNA (1)...(19): siRNA sense strand
ggaccuggacaaguuuauu

SEQ ID NO: 1953532 - RNA, 19 nt, Homo sapiens
  misc_RNA (1)...(19): siRNA sense strand
gagcagccucuccauagau

SEQ ID NO: 1953533 - RNA, 19 nt, Homo sapiens
  misc_RNA (1)...(19): siRNA sense strand
cacaguccauggcugaaga

SEQ ID NO: 1953534 - RNA, 19 nt, Homo sapiens
  misc_RNA (1)...(19): siRNA sense strand
uauaggcucuccaggaaac

SEQ ID NO: 1953535 - RNA, 19 nt, Homo sapiens
  misc_RNA (1)...(19): siRNA sense strand
ccgcgaguuugaugccuuu

SEQ ID NO: 1953536 - RNA, 19 nt, Homo sapiens
  misc_RNA (1)...(19): siRNA sense strand
agcagccucuccauagaua

SEQ ID NO: 1953537 - RNA, 19 nt, Homo sapiens
  misc_RNA (1)...(19): siRNA sense strand
ccugacgaguuuggauaua

SEQ ID NO: 1953538 - RNA, 19 nt, Homo sapiens
  misc_RNA (1)...(19): siRNA sense strand
ggugaggacacuggaguaa

SEQ ID NO: 1953539 - RNA, 19 nt, Homo sapiens
  misc_RNA (1)...(19): siRNA sense strand
ucuugugcuuacagaauua

SEQ ID NO: 1953540 - RNA, 19 nt, Homo sapiens
  misc_RNA (1)...(19): siRNA sense strand
caagacuguccaagugauu

SEQ ID NO: 1953541 - RNA, 19 nt, Homo sapiens
  misc_RNA (1)...(19): siRNA sense strand
ucaacaaacccauuaacca

SEQ ID NO: 1953542 - RNA, 19 nt, Homo sapiens
  misc_RNA (1)...(19): siRNA sense strand
gagaggaccccaccuauca

SEQ ID NO: 1953543 - RNA, 19 nt, Homo sapiens
  misc_RNA (1)...(19): siRNA sense strand
acaagggcaugaauauguc

SEQ ID NO: 1953544 - RNA, 19 nt, Homo sapiens
  misc_RNA (1)...(19): siRNA sense strand
aacaagggcaugaauaugu

SEQ ID NO: 1953545 - RNA, 19 nt, Homo sapiens
  misc_RNA (1)...(19): siRNA sense strand
gagauuucacuuaagacuu

SEQ ID NO: 1953546 - RNA, 19 nt, Homo sapiens
  misc_RNA (1)...(19): siRNA sense strand
caagcucucgccuuuccua

SEQ ID NO: 1953547 - RNA, 19 nt, Homo sapiens
  misc_RNA (1)...(19): siRNA sense strand
aaacaagggcaugaauaug

SEQ ID NO: 1953548 - RNA, 19 nt, Homo sapiens
  misc_RNA (1)...(19): siRNA sense strand
uguuugcucccaagaauuu

SEQ ID NO: 1953549 - RNA, 19 nt, Homo sapiens
  misc_RNA (1)...(19): siRNA sense strand
gaccaucuuuguccgaaaa

SEQ ID NO: 1953550 - RNA, 19 nt, Homo sapiens
  misc_RNA (1)...(19): siRNA sense strand
aauauacccgucuguagaa

SEQ ID NO: 1953551 - RNA, 19 nt, Homo sapiens
  misc_RNA (1)...(19): siRNA sense strand
ggagauuucacuuaagacu

SEQ ID NO: 1953552 - RNA, 19 nt, Homo sapiens
  misc_RNA (1)...(19): siRNA sense strand
guucagauugguucaacuu

SEQ ID NO: 1953553 - RNA, 19 nt, Homo sapiens
  misc_RNA (1)...(19): siRNA sense strand
uauacccuuugccauguuu

SEQ ID NO: 1953554 - RNA, 19 nt, Homo sapiens
  misc_RNA (1)...(19): siRNA sense strand
guagugaggauacugaaac

SEQ ID NO: 1953555 - RNA, 19 nt, Homo sapiens
  misc_RNA (1)...(19): siRNA sense strand
guucaacuuagcaaucaaa

SEQ ID NO: 1953556 - RNA, 19 nt, Homo sapiens
  misc_RNA (1)...(19): siRNA sense strand
gcugaguggcuuaggagaa

SEQ ID NO: 1953557 - RNA, 19 nt, Homo sapiens
  misc_RNA (1)...(19): siRNA sense strand
ucagcugaguggcuuagga

SEQ ID NO: 1953558 - RNA, 19 nt, Homo sapiens
  misc_RNA (1)...(19): siRNA sense strand
acagaaaggaccuggacaa

SEQ ID NO: 1953559 - RNA, 19 nt, Homo sapiens
  misc_RNA (1)...(19): siRNA sense strand
aggugacccugacgaguuu

SEQ ID NO: 1953560 - RNA, 19 nt, Homo sapiens
  misc_RNA (1)...(19): siRNA sense strand
gugggcaccaucacucuuu

SEQ ID NO: 1953561 - RNA, 19 nt, Homo sapiens
  misc_RNA (1)...(19): siRNA sense strand
guuugcugcuggcuuaaau

SEQ ID NO: 1953562 - RNA, 19 nt, Homo sapiens
  misc_RNA (1)...(19): siRNA sense strand
ucauggggauuauuauuga

SEQ ID NO: 1953563 - RNA, 19 nt, Homo sapiens
  misc_RNA (1)...(19): siRNA sense strand
gcugaagacuuggacucau

SEQ ID NO: 1953564 - RNA, 19 nt, Homo sapiens
  misc_RNA (1)...(19): siRNA sense strand
caacggguucagauugguu

SEQ ID NO: 1953565 - RNA, 19 nt, Homo sapiens
  misc_RNA (1)...(19): siRNA sense strand
cagccucuccauagauauu

SEQ ID NO: 1953566 - RNA, 19 nt, Homo sapiens
  misc_RNA (1)...(19): siRNA sense strand
uguguggagauuucacuua

SEQ ID NO: 1953567 - RNA, 19 nt, Homo sapiens
  misc_RNA (1)...(19): siRNA sense strand
uguggaaacccugcaguaa

SEQ ID NO: 1953568 - RNA, 19 nt, Homo sapiens
  misc_RNA (1)...(19): siRNA sense strand
cagauugguucaacuuagc

SEQ ID NO: 1953569 - RNA, 19 nt, Homo sapiens
  misc_RNA (1)...(19): siRNA sense strand
uagaagacucucaagaagu

SEQ ID NO: 1953570 - RNA, 19 nt, Homo sapiens
  misc_RNA (1)...(19): siRNA sense strand
uaagacuucugagggagau

SEQ ID NO: 1953571 - RNA, 19 nt, Homo sapiens
  misc_RNA (1)...(19): siRNA sense strand
gaaacuugcucaaauauug

SEQ ID NO: 1953572 - RNA, 19 nt, Homo sapiens
  misc_RNA (1)...(19): siRNA sense strand
gagaggaacuggagcaauu

SEQ ID NO: 1953573 - RNA, 19 nt, Homo sapiens
  misc_RNA (1)...(19): siRNA sense strand
aaagaaagcugcauuggaa

SEQ ID NO: 1953574 - RNA, 19 nt, Homo sapiens
  misc_RNA (1)...(19): siRNA sense strand
ggaagcagcucaccgaaga

SEQ ID NO: 1953575 - RNA, 19 nt, Homo sapiens
  misc_RNA (1)...(19): siRNA sense strand
gaaguacugugaagauauu

SEQ ID NO: 1953576 - RNA, 19 nt, Homo sapiens
  misc_RNA (1)...(19): siRNA sense strand
cagaagaauuucagaagua

SEQ ID NO: 1953577 - RNA, 19 nt, Homo sapiens
  misc_RNA (1)...(19): siRNA sense strand
gcuagacaguuagaaauua

SEQ ID NO: 1953578 - RNA, 19 nt, Homo sapiens
  misc_RNA (1)...(19): siRNA sense strand
gaaauggaacagaaacaua

SEQ ID NO: 1953579 - RNA, 19 nt, Homo sapiens
  misc_RNA (1)...(19): siRNA sense strand
gaagaucaacugaaagaaa

SEQ ID NO: 1953580 - RNA, 19 nt, Homo sapiens
  misc_RNA (1)...(19): siRNA sense strand
gcaaagagaagaaggaguu

SEQ ID NO: 1953581 - RNA, 19 nt, Homo sapiens
  misc_RNA (1)...(19): siRNA sense strand
aauugaagcugacuacuaa

SEQ ID NO: 1953582 - RNA, 19 nt, Homo sapiens
  misc_RNA (1)...(19): siRNA sense strand
ccagacauauggaaaguga

SEQ ID NO: 1953583 - RNA, 19 nt, Homo sapiens
  misc_RNA (1)...(19): siRNA sense strand
gauggccacuguauguaua

SEQ ID NO: 1953584 - RNA, 19 nt, Homo sapiens
  misc_RNA (1)...(19): siRNA sense strand
gcucaaauauuggcagcua

SEQ ID NO: 1953585 - RNA, 19 nt, Homo sapiens
  misc_RNA (1)...(19): siRNA sense strand
ggaagacuuucugccauuu

SEQ ID NO: 1953586 - RNA, 19 nt, Homo sapiens
  misc_RNA (1)...(19): siRNA sense strand
cagaaguacugugaagaua

SEQ ID NO: 1953587 - RNA, 19 nt, Homo sapiens
  misc_RNA (1)...(19): siRNA sense strand
cauuauaguuggugaagaa

SEQ ID NO: 1953588 - RNA, 19 nt, Homo sapiens
  misc_RNA (1)...(19): siRNA sense strand
ccgaagauguggccaaguu

SEQ ID NO: 1953589 - RNA, 19 nt, Homo sapiens
  misc_RNA (1)...(19): siRNA sense strand
gauagauucuguugcuguu

SEQ ID NO: 1953590 - RNA, 19 nt, Homo sapiens
  misc_RNA (1)...(19): siRNA sense strand
uaagauagauucuguugcu

SEQ ID NO: 1953591 - RNA, 19 nt, Homo sapiens
  misc_RNA (1)...(19): siRNA sense strand
gagaaggcaucgcaaagag

SEQ ID NO: 1953592 - RNA, 19 nt, Homo sapiens
  misc_RNA (1)...(19): siRNA sense strand
guauaaagccauugaagau

SEQ ID NO: 1953593 - RNA, 19 nt, Homo sapiens
  misc_RNA (1)...(19): siRNA sense strand
gaaggcaucgcaaagagaa

SEQ ID NO: 1953594 - RNA, 19 nt, Homo sapiens
  misc_RNA (1)...(19): siRNA sense strand
uagauucuguugcuguuaa

SEQ ID NO: 1953595 - RNA, 19 nt, Homo sapiens
  misc_RNA (1)...(19): siRNA sense strand
gcagauucuccucccauua

SEQ ID NO: 1953596 - RNA, 19 nt, Homo sapiens
  misc_RNA (1)...(19): siRNA sense strand
caaacuuggugcuugagaa

SEQ ID NO: 1953597 - RNA, 19 nt, Homo sapiens
  misc_RNA (1)...(19): siRNA sense strand
uaagagcucugucucacau

SEQ ID NO: 1953598 - RNA, 19 nt, Homo sapiens
  misc_RNA (1)...(19): siRNA sense strand
agaaugcuguucccaagaa

SEQ ID NO: 1953599 - RNA, 19 nt, Homo sapiens
  misc_RNA (1)...(19): siRNA sense strand
gcagcuagacaguuagaaa

SEQ ID NO: 1953600 - RNA, 19 nt, Homo sapiens
  misc_RNA (1)...(19): siRNA sense strand
caauugaagcugacuacua

SEQ ID NO: 1953601 - RNA, 19 nt, Homo sapiens
  misc_RNA (1)...(19): siRNA sense strand
ggagcgagaagaacggaua

SEQ ID NO: 1953602 - RNA, 19 nt, Homo sapiens
  misc_RNA (1)...(19): siRNA sense strand
gagacaugcauauggcuua

SEQ ID NO: 1953603 - RNA, 19 nt, Homo sapiens
  misc_RNA (1)...(19): siRNA sense strand
ccagaagaauuucagaagu

SEQ ID NO: 1953604 - RNA, 19 nt, Homo sapiens
  misc_RNA (1)...(19): siRNA sense strand
gagaaacuugcucaaauau

SEQ ID NO: 1953605 - RNA, 19 nt, Homo sapiens
  misc_RNA (1)...(19): siRNA sense strand
acagaaacauagagaggaa

SEQ ID NO: 1953606 - RNA, 19 nt, Homo sapiens
  misc_RNA (1)...(19): siRNA sense strand
gcauauggcuuaggagaac

SEQ ID NO: 1953607 - RNA, 19 nt, Homo sapiens
  misc_RNA (1)...(19): siRNA sense strand
acaaacaccaauagagaua

SEQ ID NO: 1953608 - RNA, 19 nt, Homo sapiens
  misc_RNA (1)...(19): siRNA sense strand
ugacuacuaaggagaauaa

SEQ ID NO: 1953609 - RNA, 19 nt, Homo sapiens
  misc_RNA (1)...(19): siRNA sense strand
cgaagagcuugaugaggaa

SEQ ID NO: 1953610 - RNA, 19 nt, Homo sapiens
  misc_RNA (1)...(19): siRNA sense strand
guacugugaagauauugua

SEQ ID NO: 1953611 - RNA, 19 nt, Homo sapiens
  misc_RNA (1)...(19): siRNA sense strand
auaaagccauugaagauca

SEQ ID NO: 1953612 - RNA, 19 nt, Homo sapiens
  misc_RNA (1)...(19): siRNA sense strand
uuacaaacaccaauagaga

SEQ ID NO: 1953613 - RNA, 19 nt, Homo sapiens
  misc_RNA (1)...(19): siRNA sense strand
uauguauacuccagaagaa

SEQ ID NO: 1953614 - RNA, 19 nt, Homo sapiens
  misc_RNA (1)...(19): siRNA sense strand
cuaaggagaauaagauaga

SEQ ID NO: 1953615 - RNA, 19 nt, Homo sapiens
  misc_RNA (1)...(19): siRNA sense strand
gauaauacaggcagauucu

SEQ ID NO: 1953616 - RNA, 19 nt, Homo sapiens
  misc_RNA (1)...(19): siRNA sense strand
gugaagauauuguaaacac

SEQ ID NO: 1953617 - RNA, 19 nt, Homo sapiens
  misc_RNA (1)...(19): siRNA sense strand
gcaaagccauguggaagac

SEQ ID NO: 1953618 - RNA, 19 nt, Homo sapiens
  misc_RNA (1)...(19): siRNA sense strand
gaaaaggauugugcucuga

SEQ ID NO: 1953619 - RNA, 19 nt, Homo sapiens
  misc_RNA (1)...(19): siRNA sense strand
auuggcagcuagacaguua

SEQ ID NO: 1953620 - RNA, 19 nt, Homo sapiens
  misc_RNA (1)...(19): siRNA sense strand
cagauucuccucccauuau

SEQ ID NO: 1953621 - RNA, 19 nt, Homo sapiens
  misc_RNA (1)...(19): siRNA sense strand
uggaagacuuucugccauu

SEQ ID NO: 1953622 - RNA, 19 nt, Homo sapiens
  misc_RNA (1)...(19): siRNA sense strand
gaaucagccaccucggaua

SEQ ID NO: 1953623 - RNA, 19 nt, Homo sapiens
  misc_RNA (1)...(19): siRNA sense strand
cuacuaaggagaauaagau

SEQ ID NO: 1953624 - RNA, 19 nt, Homo sapiens
  misc_RNA (1)...(19): siRNA sense strand
agagcucugucucacauuu

SEQ ID NO: 1953625 - RNA, 19 nt, Homo sapiens
  misc_RNA (1)...(19): siRNA sense strand
gagauaauacaggcagauu

SEQ ID NO: 1953626 - RNA, 19 nt, Homo sapiens
  misc_RNA (1)...(19): siRNA sense strand
guauacuccagaagaauuu

SEQ ID NO: 1953627 - RNA, 19 nt, Homo sapiens
  misc_RNA (1)...(19): siRNA sense strand
ggcagauucuccucccauu

SEQ ID NO: 1953628 - RNA, 19 nt, Homo sapiens
  misc_RNA (1)...(19): siRNA sense strand
caaaagagacgggaaaaga

SEQ ID NO: 1953629 - RNA, 19 nt, Homo sapiens
  misc_RNA (1)...(19): siRNA sense strand
gaaugcuguucccaagaau

SEQ ID NO: 1953630 - RNA, 19 nt, Homo sapiens
  misc_RNA (1)...(19): siRNA sense strand
gguauugaccgaagagcuu

SEQ ID NO: 1953631 - RNA, 19 nt, Homo sapiens
  misc_RNA (1)...(19): siRNA sense strand
uaacaggagccagacauau

SEQ ID NO: 1953632 - RNA, 19 nt, Homo sapiens
  misc_RNA (1)...(19): siRNA sense strand
ggaaaaggagcgagaagaa

SEQ ID NO: 1953633 - RNA, 19 nt, Homo sapiens
  misc_RNA (1)...(19): siRNA sense strand
gaaggaguugcaagccaaa

SEQ ID NO: 1953634 - RNA, 19 nt, Homo sapiens
  misc_RNA (1)...(19): siRNA sense strand
agauucuccucccauuaua

SEQ ID NO: 1953635 - RNA, 19 nt, Homo sapiens
  misc_RNA (1)...(19): siRNA sense strand
gaagaacggauagcugaag

SEQ ID NO: 1953636 - RNA, 19 nt, Homo sapiens
  misc_RNA (1)...(19): siRNA sense strand
gugguugccuugagaaguc

SEQ ID NO: 1953637 - RNA, 19 nt, Homo sapiens
  misc_RNA (1)...(19): siRNA sense strand
caaacaccaauagagauaa

SEQ ID NO: 1953638 - RNA, 19 nt, Homo sapiens
  misc_RNA (1)...(19): siRNA sense strand
gcuguuaacauuucaaacu

SEQ ID NO: 1953639 - RNA, 19 nt, Homo sapiens
  misc_RNA (1)...(19): siRNA sense strand
gcuuaggagaacauuauaa

SEQ ID NO: 1953640 - RNA, 19 nt, Homo sapiens
  misc_RNA (1)...(19): siRNA sense strand
gcugagaaggcaucgcaaa

SEQ ID NO: 1953641 - RNA, 19 nt, Homo sapiens
  misc_RNA (1)...(19): siRNA sense strand
ugagaaggcaucgcaaaga

SEQ ID NO: 1953642 - RNA, 19 nt, Homo sapiens
  misc_RNA (1)...(19): siRNA sense strand
ggagccagacauauggaaa

SEQ ID NO: 1953643 - RNA, 19 nt, Homo sapiens
  misc_RNA (1)...(19): siRNA sense strand
ggaacuggagcaauugaag

SEQ ID NO: 1953644 - RNA, 19 nt, Homo sapiens
  misc_RNA (1)...(19): siRNA sense strand
agauauguauacuccagaa

SEQ ID NO: 1953645 - RNA, 19 nt, Homo sapiens
  misc_RNA (1)...(19): siRNA sense strand
gcacaaaagagacgggaaa

SEQ ID NO: 1953646 - RNA, 19 nt, Homo sapiens
  misc_RNA (1)...(19): siRNA sense strand
gcagcucaccgaagaugug

SEQ ID NO: 1953647 - RNA, 19 nt, Homo sapiens
  misc_RNA (1)...(19): siRNA sense strand
ucagaaguacugugaagau

SEQ ID NO: 1953648 - RNA, 19 nt, Homo sapiens
  misc_RNA (1)...(19): siRNA sense strand
uguauaaagccauugaaga

SEQ ID NO: 1953649 - RNA, 19 nt, Homo sapiens
  misc_RNA (1)...(19): siRNA sense strand
aaauggaacagaaacauag

SEQ ID NO: 1953650 - RNA, 19 nt, Homo sapiens
  misc_RNA (1)...(19): siRNA sense strand
gaggaacuggagcaauuga

SEQ ID NO: 1953651 - RNA, 19 nt, Homo sapiens
  misc_RNA (1)...(19): siRNA sense strand
ccaagaaugacaagaagag

SEQ ID NO: 1953652 - RNA, 19 nt, Homo sapiens
  misc_RNA (1)...(19): siRNA sense strand
gacugugguugccuugaga

SEQ ID NO: 1953653 - RNA, 19 nt, Homo sapiens
  misc_RNA (1)...(19): siRNA sense strand
cagcuagacaguuagaaau

SEQ ID NO: 1953654 - RNA, 19 nt, Homo sapiens
  misc_RNA (1)...(19): siRNA sense strand
ucaaauauuggcagcuaga

SEQ ID NO: 1953655 - RNA, 19 nt, Homo sapiens
  misc_RNA (1)...(19): siRNA sense strand
agacauauggaaagugaga

SEQ ID NO: 1953656 - RNA, 19 nt, Homo sapiens
  misc_RNA (1)...(19): siRNA sense strand
ggaaaagaaagcugcauug

SEQ ID NO: 1953657 - RNA, 19 nt, Homo sapiens
  misc_RNA (1)...(19): siRNA sense strand
ucagccaccucggauauca

SEQ ID NO: 1953658 - RNA, 19 nt, Homo sapiens
  misc_RNA (1)...(19): siRNA sense strand
uggcuuaggagaacauuau

SEQ ID NO: 1953659 - RNA, 19 nt, Homo sapiens
  misc_RNA (1)...(19): siRNA sense strand
guauguauaaagccauuga

SEQ ID NO: 1953660 - RNA, 19 nt, Homo sapiens
  misc_RNA (1)...(19): siRNA sense strand
uuaacaggagccagacaua

SEQ ID NO: 1953661 - RNA, 19 nt, Homo sapiens
  misc_RNA (1)...(19): siRNA sense strand
aaagccauguggaagacuu

SEQ ID NO: 1953662 - RNA, 19 nt, Homo sapiens
  misc_RNA (1)...(19): siRNA sense strand
acaugcauauggcuuagga

SEQ ID NO: 1953663 - RNA, 19 nt, Homo sapiens
  misc_RNA (1)...(19): siRNA sense strand
ugaccgaagagcuugauga

SEQ ID NO: 1953664 - RNA, 19 nt, Homo sapiens
  misc_RNA (1)...(19): siRNA sense strand
agaaguacugugaagauau

SEQ ID NO: 1953665 - RNA, 19 nt, Homo sapiens
  misc_RNA (1)...(19): siRNA sense strand
agaagaauuucagaaguac

SEQ ID NO: 1953666 - RNA, 19 nt, Homo sapiens
  misc_RNA (1)...(19): siRNA sense strand
uguauacuccagaagaauu

SEQ ID NO: 1953667 - RNA, 19 nt, Homo sapiens
  misc_RNA (1)...(19): siRNA sense strand
aaacuuggugcuugagaau

SEQ ID NO: 1953668 - RNA, 19 nt, Homo sapiens
  misc_RNA (1)...(19): siRNA sense strand
ugacugugguugccuugag

SEQ ID NO: 1953669 - RNA, 19 nt, Homo sapiens
  misc_RNA (1)...(19): siRNA sense strand
gagcaauugaagcugacua

SEQ ID NO: 1953670 - RNA, 19 nt, Homo sapiens
  misc_RNA (1)...(19): siRNA sense strand
aggagaacauuauaauucg

SEQ ID NO: 1953671 - RNA, 19 nt, Homo sapiens
  misc_RNA (1)...(19): siRNA sense strand
ggaacaaggucuuaauaaa

SEQ ID NO: 1953672 - RNA, 19 nt, Homo sapiens
  misc_RNA (1)...(19): siRNA sense strand
gaaauuggaugcauauaag

SEQ ID NO: 1953673 - RNA, 19 nt, Homo sapiens
  misc_RNA (1)...(19): siRNA sense strand
gcaaagagaaccaaagaaa

SEQ ID NO: 1953674 - RNA, 19 nt, Homo sapiens
  misc_RNA (1)...(19): siRNA sense strand
guaaagugcucugcccuaa

SEQ ID NO: 1953675 - RNA, 19 nt, Homo sapiens
  misc_RNA (1)...(19): siRNA sense strand
aaacgucccugcaaaguuc

SEQ ID NO: 1953676 - RNA, 19 nt, Homo sapiens
  misc_RNA (1)...(19): siRNA sense strand
aaagugcucugcccuaaga

SEQ ID NO: 1953677 - RNA, 19 nt, Homo sapiens
  misc_RNA (1)...(19): siRNA sense strand
gccagaaauuggaugcaua

SEQ ID NO: 1953678 - RNA, 19 nt, Homo sapiens
  misc_RNA (1)...(19): siRNA sense strand
gaaacgucccugcaaaguu

SEQ ID NO: 1953679 - RNA, 19 nt, Homo sapiens
  misc_RNA (1)...(19): siRNA sense strand
ccaggaacaucagcaaaga

SEQ ID NO: 1953680 - RNA, 19 nt, Homo sapiens
  misc_RNA (1)...(19): siRNA sense strand
gauaccaaucccuccauua

SEQ ID NO: 1953681 - RNA, 19 nt, Homo sapiens
  misc_RNA (1)...(19): siRNA sense strand
gcaaaguucugagacacau

SEQ ID NO: 1953682 - RNA, 19 nt, Homo sapiens
  misc_RNA (1)...(19): siRNA sense strand
caggaacaaggucuuaaua

SEQ ID NO: 1953683 - RNA, 19 nt, Homo sapiens
  misc_RNA (1)...(19): siRNA sense strand
ucagcaggcuucuaaucaa

SEQ ID NO: 1953684 - RNA, 19 nt, Homo sapiens
  misc_RNA (1)...(19): siRNA sense strand
ugagggaguuaauacaguu

SEQ ID NO: 1953685 - RNA, 19 nt, Homo sapiens
  misc_RNA (1)...(19): siRNA sense strand
ucuaaacugccaccuguua

SEQ ID NO: 1953686 - RNA, 19 nt, Homo sapiens
  misc_RNA (1)...(19): siRNA sense strand
cagcaaagagaaccaaaga

SEQ ID NO: 1953687 - RNA, 19 nt, Homo sapiens
  misc_RNA (1)...(19): siRNA sense strand
ucaauugcuuugccaggaa

SEQ ID NO: 1953688 - RNA, 19 nt, Homo sapiens
  misc_RNA (1)...(19): siRNA sense strand
gaacaucagcaaagagaac

SEQ ID NO: 1953689 - RNA, 19 nt, Homo sapiens
  misc_RNA (1)...(19): siRNA sense strand
ugagacacauccuccugaa

SEQ ID NO: 1953690 - RNA, 19 nt, Homo sapiens
  misc_RNA (1)...(19): siRNA sense strand
uccauuaccuucuaaacug

SEQ ID NO: 1953691 - RNA, 19 nt, Homo sapiens
  misc_RNA (1)...(19): siRNA sense strand
gaucagcaggcuucuaauc

SEQ ID NO: 1953692 - RNA, 19 nt, Homo sapiens
  misc_RNA (1)...(19): siRNA sense strand
ucacaggaacaaggucuua

SEQ ID NO: 1953693 - RNA, 19 nt, Homo sapiens
  misc_RNA (1)...(19): siRNA sense strand
ggguucaccugcaguuuca

SEQ ID NO: 1953694 - RNA, 19 nt, Homo sapiens
  misc_RNA (1)...(19): siRNA sense strand
ggaaacgucccugcaaagu

SEQ ID NO: 1953695 - RNA, 19 nt, Homo sapiens
  misc_RNA (1)...(19): siRNA sense strand
gcaagaagggagagugagu

SEQ ID NO: 1953696 - RNA, 19 nt, Homo sapiens
  misc_RNA (1)...(19): siRNA sense strand
ccagaaauuggaugcauau

SEQ ID NO: 1953697 - RNA, 19 nt, Homo sapiens
  misc_RNA (1)...(19): siRNA sense strand
gcuccaaaggccagaaauu

SEQ ID NO: 1953698 - RNA, 19 nt, Homo sapiens
  misc_RNA (1)...(19): siRNA sense strand
gcaguuucaugcuggucaa

SEQ ID NO: 1953699 - RNA, 19 nt, Homo sapiens
  misc_RNA (1)...(19): siRNA sense strand
gacacauccuccugaagug

SEQ ID NO: 1953700 - RNA, 19 nt, Homo sapiens
  misc_RNA (1)...(19): siRNA sense strand
aggaacaaggucuuaauaa

SEQ ID NO: 1953701 - RNA, 19 nt, Homo sapiens
  misc_RNA (1)...(19): siRNA sense strand
agacacauccuccugaagu

SEQ ID NO: 1953702 - RNA, 19 nt, Homo sapiens
  misc_RNA (1)...(19): siRNA sense strand
ugucaaaggcaguaaagug

SEQ ID NO: 1953703 - RNA, 19 nt, Homo sapiens
  misc_RNA (1)...(19): siRNA sense strand
gcaccuugaagacaauaug

SEQ ID NO: 1953704 - RNA, 19 nt, Homo sapiens
  misc_RNA (1)...(19): siRNA sense strand
cuaaacugccaccuguuaa

SEQ ID NO: 1953705 - RNA, 19 nt, Homo sapiens
  misc_RNA (1)...(19): siRNA sense strand
caaagagaaccaaagaaaa

SEQ ID NO: 1953706 - RNA, 19 nt, Homo sapiens
  misc_RNA (1)...(19): siRNA sense strand
uaauacaguuguggugaca

SEQ ID NO: 1953707 - RNA, 19 nt, Homo sapiens
  misc_RNA (1)...(19): siRNA sense strand
aggaucagcaggcuucuaa

SEQ ID NO: 1953708 - RNA, 19 nt, Homo sapiens
  misc_RNA (1)...(19): siRNA sense strand
ggccuggugccaacaauug

SEQ ID NO: 1953709 - RNA, 19 nt, Homo sapiens
  misc_RNA (1)...(19): siRNA sense strand
uaaacugccaccuguuaau

SEQ ID NO: 1953710 - RNA, 19 nt, Homo sapiens
  misc_RNA (1)...(19): siRNA sense strand
ggccagaaauuggaugcau

SEQ ID NO: 1953711 - RNA, 19 nt, Homo sapiens
  misc_RNA (1)...(19): siRNA sense strand
aaauuccacugcucuccuu

SEQ ID NO: 1953712 - RNA, 19 nt, Homo sapiens
  misc_RNA (1)...(19): siRNA sense strand
cagcaggcuucuaaucaac

SEQ ID NO: 1953713 - RNA, 19 nt, Homo sapiens
  misc_RNA (1)...(19): siRNA sense strand
gcaggcuucuaaucaacca

SEQ ID NO: 1953714 - RNA, 19 nt, Homo sapiens
  misc_RNA (1)...(19): siRNA sense strand
gggaguuaauacaguugug

SEQ ID NO: 1953715 - RNA, 19 nt, Homo sapiens
  misc_RNA (1)...(19): siRNA sense strand
gagcuccaaaggccagaaa

SEQ ID NO: 1953716 - RNA, 19 nt, Homo sapiens
  misc_RNA (1)...(19): siRNA sense strand
aggcagagcacacugacaa

SEQ ID NO: 1953717 - RNA, 19 nt, Homo sapiens
  misc_RNA (1)...(19): siRNA sense strand
ggaacaucagcaaagagaa

SEQ ID NO: 1953718 - RNA, 19 nt, Homo sapiens
  misc_RNA (1)...(19): siRNA sense strand
agauaccaaucccuccauu

SEQ ID NO: 1953719 - RNA, 19 nt, Homo sapiens
  misc_RNA (1)...(19): siRNA sense strand
ccagaccucagaagaagau

SEQ ID NO: 1953720 - RNA, 19 nt, Homo sapiens
  misc_RNA (1)...(19): siRNA sense strand
cuucuaaucaaccaaauuc

SEQ ID NO: 1953721 - RNA, 19 nt, Homo sapiens
  misc_RNA (1)...(19): siRNA sense strand
cuccaaaggccagaaauug

SEQ ID NO: 1953722 - RNA, 19 nt, Homo sapiens
  misc_RNA (1)...(19): siRNA sense strand
gccaggaacaucagcaaag

SEQ ID NO: 1953723 - RNA, 19 nt, Homo sapiens
  misc_RNA (1)...(19): siRNA sense strand
ccuugaagacaauauguug

SEQ ID NO: 1953724 - RNA, 19 nt, Homo sapiens
  misc_RNA (1)...(19): siRNA sense strand
ccugcaaaguucugagaca

SEQ ID NO: 1953725 - RNA, 19 nt, Homo sapiens
  misc_RNA (1)...(19): siRNA sense strand
aagcaagaagggagaguga

SEQ ID NO: 1953726 - RNA, 19 nt, Homo sapiens
  misc_RNA (1)...(19): siRNA sense strand
cagagaagucgagggaaga

SEQ ID NO: 1953727 - RNA, 19 nt, Homo sapiens
  misc_RNA (1)...(19): siRNA sense strand
caccagaggcaguggaauc

SEQ ID NO: 1953728 - RNA, 19 nt, Homo sapiens
  misc_RNA (1)...(19): siRNA sense strand
gaagucgagggaagaggau

SEQ ID NO: 1953729 - RNA, 19 nt, Homo sapiens
  misc_RNA (1)...(19): siRNA sense strand
auccggaaaucauugcaaa

SEQ ID NO: 1953730 - RNA, 19 nt, Homo sapiens
  misc_RNA (1)...(19): siRNA sense strand
cagaagaagauaccaaucc

SEQ ID NO: 1953731 - RNA, 19 nt, Homo sapiens
  misc_RNA (1)...(19): siRNA sense strand
aggaacaucagcaaagaga

SEQ ID NO: 1953732 - RNA, 19 nt, Homo sapiens
  misc_RNA (1)...(19): siRNA sense strand
caaaggccagaaauuggau

SEQ ID NO: 1953733 - RNA, 19 nt, Homo sapiens
  misc_RNA (1)...(19): siRNA sense strand
aaacugccaccuguuaauc

SEQ ID NO: 1953734 - RNA, 19 nt, Homo sapiens
  misc_RNA (1)...(19): siRNA sense strand
gaaguuuccugaacauuaa

SEQ ID NO: 1953735 - RNA, 19 nt, Homo sapiens
  misc_RNA (1)...(19): siRNA sense strand
ggucgaagcucucuggaua

SEQ ID NO: 1953736 - RNA, 19 nt, Homo sapiens
  misc_RNA (1)...(19): siRNA sense strand
guauagggcucaaggaaua

SEQ ID NO: 1953737 - RNA, 19 nt, Homo sapiens
  misc_RNA (1)...(19): siRNA sense strand
caagaaugcugacaaggua

SEQ ID NO: 1953738 - RNA, 19 nt, Homo sapiens
  misc_RNA (1)...(19): siRNA sense strand
ggaauaagcgcaaauaaau

SEQ ID NO: 1953739 - RNA, 19 nt, Homo sapiens
  misc_RNA (1)...(19): siRNA sense strand
gagcagaguuauaagaauu

SEQ ID NO: 1953740 - RNA, 19 nt, Homo sapiens
  misc_RNA (1)...(19): siRNA sense strand
ucgcagagcuggaugauaa

SEQ ID NO: 1953741 - RNA, 19 nt, Homo sapiens
  misc_RNA (1)...(19): siRNA sense strand
ugagugagcuugugauuga

SEQ ID NO: 1953742 - RNA, 19 nt, Homo sapiens
  misc_RNA (1)...(19): siRNA sense strand
gagaguggcugcuuucaga

SEQ ID NO: 1953743 - RNA, 19 nt, Homo sapiens
  misc_RNA (1)...(19): siRNA sense strand
uagaaagccuggagucaua

SEQ ID NO: 1953744 - RNA, 19 nt, Homo sapiens
  misc_RNA (1)...(19): siRNA sense strand
gaaagauagucaaggagaa

SEQ ID NO: 1953745 - RNA, 19 nt, Homo sapiens
  misc_RNA (1)...(19): siRNA sense strand
cgaaguuuccugaacauua

SEQ ID NO: 1953746 - RNA, 19 nt, Homo sapiens
  misc_RNA (1)...(19): siRNA sense strand
ugagaaagauagucaagga

SEQ ID NO: 1953747 - RNA, 19 nt, Homo sapiens
  misc_RNA (1)...(19): siRNA sense strand
gaagacgcccuugacuuua

SEQ ID NO: 1953748 - RNA, 19 nt, Homo sapiens
  misc_RNA (1)...(19): siRNA sense strand
acacaaagccuauuaucaa

SEQ ID NO: 1953749 - RNA, 19 nt, Homo sapiens
  misc_RNA (1)...(19): siRNA sense strand
gaagcucucuggauaacau

SEQ ID NO: 1953750 - RNA, 19 nt, Homo sapiens
  misc_RNA (1)...(19): siRNA sense strand
gagaaugacggaaguagaa

SEQ ID NO: 1953751 - RNA, 19 nt, Homo sapiens
  misc_RNA (1)...(19): siRNA sense strand
caaagccuauuaucaacaa

SEQ ID NO: 1953752 - RNA, 19 nt, Homo sapiens
  misc_RNA (1)...(19): siRNA sense strand
gaacagcaaggacagaaga

SEQ ID NO: 1953753 - RNA, 19 nt, Homo sapiens
  misc_RNA (1)...(19): siRNA sense strand
auaaaggacuguuugaaga

SEQ ID NO: 1953754 - RNA, 19 nt, Homo sapiens
  misc_RNA (1)...(19): siRNA sense strand
uaccuuugcuggaaugaua

SEQ ID NO: 1953755 - RNA, 19 nt, Homo sapiens
  misc_RNA (1)...(19): siRNA sense strand
caacggaugcccugaagaa

SEQ ID NO: 1953756 - RNA, 19 nt, Homo sapiens
  misc_RNA (1)...(19): siRNA sense strand
agaagacgcccuugacuuu

SEQ ID NO: 1953757 - RNA, 19 nt, Homo sapiens
  misc_RNA (1)...(19): siRNA sense strand
caauacagaucccuacaag

SEQ ID NO: 1953758 - RNA, 19 nt, Homo sapiens
  misc_RNA (1)...(19): siRNA sense strand
caaggaauaagcgcaaaua

SEQ ID NO: 1953759 - RNA, 19 nt, Homo sapiens
  misc_RNA (1)...(19): siRNA sense strand
ucagaaauuucagugauga

SEQ ID NO: 1953760 - RNA, 19 nt, Homo sapiens
  misc_RNA (1)...(19): siRNA sense strand
ccaauugguucgaaguuuc

SEQ ID NO: 1953761 - RNA, 19 nt, Homo sapiens
  misc_RNA (1)...(19): siRNA sense strand
uaucauaguggucauauug

SEQ ID NO: 1953762 - RNA, 19 nt, Homo sapiens
  misc_RNA (1)...(19): siRNA sense strand
ggagucauagauaaguuua

SEQ ID NO: 1953763 - RNA, 19 nt, Homo sapiens
  misc_RNA (1)...(19): siRNA sense strand
gaaagccgagaguucgaua

SEQ ID NO: 1953764 - RNA, 19 nt, Homo sapiens
  misc_RNA (1)...(19): siRNA sense strand
gaaguugaaccaagugugu

SEQ ID NO: 1953765 - RNA, 19 nt, Homo sapiens
  misc_RNA (1)...(19): siRNA sense strand
uaagagcauuuccgacaug

SEQ ID NO: 1953766 - RNA, 19 nt, Homo sapiens
  misc_RNA (1)...(19): siRNA sense strand
gagaagacgcccuugacuu

SEQ ID NO: 1953767 - RNA, 19 nt, Homo sapiens
  misc_RNA (1)...(19): siRNA sense strand
gcuugccgcuucacaggua

SEQ ID NO: 1953768 - RNA, 19 nt, Homo sapiens
  misc_RNA (1)...(19): siRNA sense strand
gaaaauaaaggacuguuug

SEQ ID NO: 1953769 - RNA, 19 nt, Homo sapiens
  misc_RNA (1)...(19): siRNA sense strand
caagcccgcacucugauua

SEQ ID NO: 1953770 - RNA, 19 nt, Homo sapiens
  misc_RNA (1)...(19): siRNA sense strand
gcggcaaauuuauaucuau

SEQ ID NO: 1953771 - RNA, 19 nt, Homo sapiens
  misc_RNA (1)...(19): siRNA sense strand
gcacaaccucucagaagug

SEQ ID NO: 1953772 - RNA, 19 nt, Homo sapiens
  misc_RNA (1)...(19): siRNA sense strand
ugaagcagcaguugccuuu

SEQ ID NO: 1953773 - RNA, 19 nt, Homo sapiens
  misc_RNA (1)...(19): siRNA sense strand
ggacaaaacugaggauuac

SEQ ID NO: 1953774 - RNA, 19 nt, Homo sapiens
  misc_RNA (1)...(19): siRNA sense strand
gugacugucuuuggaaauu

SEQ ID NO: 1953775 - RNA, 19 nt, Homo sapiens
  misc_RNA (1)...(19): siRNA sense strand
gaagagagaguggcugcuu

SEQ ID NO: 1953776 - RNA, 19 nt, Homo sapiens
  misc_RNA (1)...(19): siRNA sense strand
agaagcaguuguuggaaga

SEQ ID NO: 1953777 - RNA, 19 nt, Homo sapiens
  misc_RNA (1)...(19): siRNA sense strand
caagugaaacagcgaauuc

SEQ ID NO: 1953778 - RNA, 19 nt, Homo sapiens
  misc_RNA (1)...(19): siRNA sense strand
ugugggcgcuaauuuacua

SEQ ID NO: 1953779 - RNA, 19 nt, Homo sapiens
  misc_RNA (1)...(19): siRNA sense strand
gccugggacuuaccaauug

SEQ ID NO: 1953780 - RNA, 19 nt, Homo sapiens
  misc_RNA (1)...(19): siRNA sense strand
gaagugcgcauggaguuug

SEQ ID NO: 1953781 - RNA, 19 nt, Homo sapiens
  misc_RNA (1)...(19): siRNA sense strand
acaaaugacagacguguug

SEQ ID NO: 1953782 - RNA, 19 nt, Homo sapiens
  misc_RNA (1)...(19): siRNA sense strand
uacuggagcugaugaacaa

SEQ ID NO: 1953783 - RNA, 19 nt, Homo sapiens
  misc_RNA (1)...(19): siRNA sense strand
cgauaugauucuugggaaa

SEQ ID NO: 1953784 - RNA, 19 nt, Homo sapiens
  misc_RNA (1)...(19): siRNA sense strand
ccacaucucccagcgauug

SEQ ID NO: 1953785 - RNA, 19 nt, Homo sapiens
  misc_RNA (1)...(19): siRNA sense strand
cauaguggucauauugaua

SEQ ID NO: 1953786 - RNA, 19 nt, Homo sapiens
  misc_RNA (1)...(19): siRNA sense strand
gacacaaagccuauuauca

SEQ ID NO: 1953787 - RNA, 19 nt, Homo sapiens
  misc_RNA (1)...(19): siRNA sense strand
uugggaaacuagagaauga

SEQ ID NO: 1953788 - RNA, 19 nt, Homo sapiens
  misc_RNA (1)...(19): siRNA sense strand
guagggcccucaggaacaa

SEQ ID NO: 1953789 - RNA, 19 nt, Homo sapiens
  misc_RNA (1)...(19): siRNA sense strand
ugacagacguguuguugac

SEQ ID NO: 1953790 - RNA, 19 nt, Homo sapiens
  misc_RNA (1)...(19): siRNA sense strand
ugacugucuuuggaaauuu

SEQ ID NO: 1953791 - RNA, 19 nt, Homo sapiens
  misc_RNA (1)...(19): siRNA sense strand
acaaggagaggcugaagaa

SEQ ID NO: 1953792 - RNA, 19 nt, Homo sapiens
  misc_RNA (1)...(19): siRNA sense strand
gccgagaguucgauaugau

SEQ ID NO: 1953793 - RNA, 19 nt, Homo sapiens
  misc_RNA (1)...(19): siRNA sense strand
cagcaaggacagaagauug

SEQ ID NO: 1953794 - RNA, 19 nt, Homo sapiens
  misc_RNA (1)...(19): siRNA sense strand
gcacucugauuaccuuugc

SEQ ID NO: 1953795 - RNA, 19 nt, Homo sapiens
  misc_RNA (1)...(19): siRNA sense strand
ggcacaaccucucagaagu

SEQ ID NO: 1953796 - RNA, 19 nt, Homo sapiens
  misc_RNA (1)...(19): siRNA sense strand
ggaaaguguggaagagaga

SEQ ID NO: 1953797 - RNA, 19 nt, Homo sapiens
  misc_RNA (1)...(19): siRNA sense strand
gccguguacuguaucauug

SEQ ID NO: 1953798 - RNA, 19 nt, Homo sapiens
  misc_RNA (1)...(19): siRNA sense strand
aagagagaguggcugcuuu

SEQ ID NO: 1953799 - RNA, 19 nt, Homo sapiens
  misc_RNA (1)...(19): siRNA sense strand
caagacaggcucacucucu

SEQ ID NO: 1953800 - RNA, 19 nt, Homo sapiens
  misc_RNA (1)...(19): siRNA sense strand
aggaauaagcgcaaauaaa

SEQ ID NO: 1953801 - RNA, 19 nt, Homo sapiens
  misc_RNA (1)...(19): siRNA sense strand
uaaguuuacuagugacaca

SEQ ID NO: 1953802 - RNA, 19 nt, Homo sapiens
  misc_RNA (1)...(19): siRNA sense strand
gcaagugaaacagcgaauu

SEQ ID NO: 1953803 - RNA, 19 nt, Homo sapiens
  misc_RNA (1)...(19): siRNA sense strand
cugauuaccuuugcuggaa

SEQ ID NO: 1953804 - RNA, 19 nt, Homo sapiens
  misc_RNA (1)...(19): siRNA sense strand
uauggcgagucccacuuua

SEQ ID NO: 1953805 - RNA, 19 nt, Homo sapiens
  misc_RNA (1)...(19): siRNA sense strand
ggaagugcgcauggaguuu

SEQ ID NO: 1953806 - RNA, 19 nt, Homo sapiens
  misc_RNA (1)...(19): siRNA sense strand
gaauuacacccuugugacu

SEQ ID NO: 1953807 - RNA, 19 nt, Homo sapiens
  misc_RNA (1)...(19): siRNA sense strand
uugcuggaaugauaccaua

SEQ ID NO: 1953808 - RNA, 19 nt, Homo sapiens
  misc_RNA (1)...(19): siRNA sense strand
ggacuccacguucuaucuu

SEQ ID NO: 1953809 - RNA, 19 nt, Homo sapiens
  misc_RNA (1)...(19): siRNA sense strand
ccaagaaugcugacaaggu

SEQ ID NO: 1953810 - RNA, 19 nt, Homo sapiens
  misc_RNA (1)...(19): siRNA sense strand
ggagacggcagaugucaag

SEQ ID NO: 1953811 - RNA, 19 nt, Homo sapiens
  misc_RNA (1)...(19): siRNA sense strand
ugagcagaguuauaagaau

SEQ ID NO: 1953812 - RNA, 19 nt, Homo sapiens
  misc_RNA (1)...(19): siRNA sense strand
gggaugagaaagauaguca

SEQ ID NO: 1953813 - RNA, 19 nt, Homo sapiens
  misc_RNA (1)...(19): siRNA sense strand
cagcaacccuuccucuacu

SEQ ID NO: 1953814 - RNA, 19 nt, Homo sapiens
  misc_RNA (1)...(19): siRNA sense strand
agagugaaguggcggacaa

SEQ ID NO: 1953815 - RNA, 19 nt, Homo sapiens
  misc_RNA (1)...(19): siRNA sense strand
gacugucuuuggaaauuug

SEQ ID NO: 1953816 - RNA, 19 nt, Homo sapiens
  misc_RNA (1)...(19): siRNA sense strand
caagaaagcgagccaagcu

SEQ ID NO: 1953817 - RNA, 19 nt, Homo sapiens
  misc_RNA (1)...(19): siRNA sense strand
gauuaccuuugcuggaaug

SEQ ID NO: 1953818 - RNA, 19 nt, Homo sapiens
  misc_RNA (1)...(19): siRNA sense strand
gagugcagccaccaccuuu

SEQ ID NO: 1953819 - RNA, 19 nt, Homo sapiens
  misc_RNA (1)...(19): siRNA sense strand
aaagauagucaaggagaaa

SEQ ID NO: 1953820 - RNA, 19 nt, Homo sapiens
  misc_RNA (1)...(19): siRNA sense strand
ucauaguggucauauugau

SEQ ID NO: 1953821 - RNA, 19 nt, Homo sapiens
  misc_RNA (1)...(19): siRNA sense strand
guaucauaguggucauauu

SEQ ID NO: 1953822 - RNA, 19 nt, Homo sapiens
  misc_RNA (1)...(19): siRNA sense strand
aggagaggcugaagaacau

SEQ ID NO: 1953823 - RNA, 19 nt, Homo sapiens
  misc_RNA (1)...(19): siRNA sense strand
cacaaagccuauuaucaac

SEQ ID NO: 1953824 - RNA, 19 nt, Homo sapiens
  misc_RNA (1)...(19): siRNA sense strand
gauugaaagccgagaguuc

SEQ ID NO: 1953825 - RNA, 19 nt, Homo sapiens
  misc_RNA (1)...(19): siRNA sense strand
gcagaguuauaagaauuac

SEQ ID NO: 1953826 - RNA, 19 nt, Homo sapiens
  misc_RNA (1)...(19): siRNA sense strand
gguauagggcucaaggaau

SEQ ID NO: 1953827 - RNA, 19 nt, Homo sapiens
  misc_RNA (1)...(19): siRNA sense strand
guacuggagcugaugaaca

SEQ ID NO: 1953828 - RNA, 19 nt, Homo sapiens
  misc_RNA (1)...(19): siRNA sense strand
guagaaagccuggagucau

SEQ ID NO: 1953829 - RNA, 19 nt, Homo sapiens
  misc_RNA (1)...(19): siRNA sense strand
ucucagagcuuccccaugu

SEQ ID NO: 1953830 - RNA, 19 nt, Homo sapiens
  misc_RNA (1)...(19): siRNA sense strand
gcuguacacccggaaguuu

SEQ ID NO: 1953831 - RNA, 19 nt, Homo sapiens
  misc_RNA (1)...(19): siRNA sense strand
gcaguuguuggaagacuau

SEQ ID NO: 1953832 - RNA, 19 nt, Homo sapiens
  misc_RNA (1)...(19): siRNA sense strand
gaaagccuggagucauaga

SEQ ID NO: 1953833 - RNA, 19 nt, Homo sapiens
  misc_RNA (1)...(19): siRNA sense strand
agccuggagucauagauaa

SEQ ID NO: 1953834 - RNA, 19 nt, Homo sapiens
  misc_RNA (1)...(19): siRNA sense strand
caacauggcugugaauuau

SEQ ID NO: 1953835 - RNA, 19 nt, Homo sapiens
  misc_RNA (1)...(19): siRNA sense strand
gcagaggacugucuuuaug

SEQ ID NO: 1953836 - RNA, 19 nt, Homo sapiens
  misc_RNA (1)...(19): siRNA sense strand
ggaaagggaucguggaaca

SEQ ID NO: 1953837 - RNA, 19 nt, Homo sapiens
  misc_RNA (1)...(19): siRNA sense strand
gcaaagauaagaucaguga

SEQ ID NO: 1953838 - RNA, 19 nt, Homo sapiens
  misc_RNA (1)...(19): siRNA sense strand
ugaagaaacugaaggaaag

SEQ ID NO: 1953839 - RNA, 19 nt, Homo sapiens
  misc_RNA (1)...(19): siRNA sense strand
ugaaguacauugagacaga

SEQ ID NO: 1953840 - RNA, 19 nt, Homo sapiens
  misc_RNA (1)...(19): siRNA sense strand
agacagagcuaaagaagag

SEQ ID NO: 1953841 - RNA, 19 nt, Homo sapiens
  misc_RNA (1)...(19): siRNA sense strand
ggaugaggaugcagacaug

SEQ ID NO: 1953842 - RNA, 19 nt, Homo sapiens
  misc_RNA (1)...(19): siRNA sense strand
ccaacauggcugugaauua

SEQ ID NO: 1953843 - RNA, 19 nt, Homo sapiens
  misc_RNA (1)...(19): siRNA sense strand
augcagacaugaugaagua

SEQ ID NO: 1953844 - RNA, 19 nt, Homo sapiens
  misc_RNA (1)...(19): siRNA sense strand
ggacugucuuuaugaacuu

SEQ ID NO: 1953845 - RNA, 19 nt, Homo sapiens
  misc_RNA (1)...(19): siRNA sense strand
caaagaagaccgaggagau

SEQ ID NO: 1953846 - RNA, 19 nt, Homo sapiens
  misc_RNA (1)...(19): siRNA sense strand
gggcaaagauaagaucagu

SEQ ID NO: 1953847 - RNA, 19 nt, Homo sapiens
  misc_RNA (1)...(19): siRNA sense strand
ccgaggagaugcuuuccaa

SEQ ID NO: 1953848 - RNA, 19 nt, Homo sapiens
  misc_RNA (1)...(19): siRNA sense strand
caugaggaacagaaaguua

SEQ ID NO: 1953849 - RNA, 19 nt, Homo sapiens
  misc_RNA (1)...(19): siRNA sense strand
gaaaguuaagccaaagaau

SEQ ID NO: 1953850 - RNA, 19 nt, Homo sapiens
  misc_RNA (1)...(19): siRNA sense strand
cagagcagcagaacaagaa

SEQ ID NO: 1953851 - RNA, 19 nt, Homo sapiens
  misc_RNA (1)...(19): siRNA sense strand
gaucguggaacaugaggaa

SEQ ID NO: 1953852 - RNA, 19 nt, Homo sapiens
  misc_RNA (1)...(19): siRNA sense strand
aaaguuaagccaaagaaug

SEQ ID NO: 1953853 - RNA, 19 nt, Homo sapiens
  misc_RNA (1)...(19): siRNA sense strand
aacagaaaguuaagccaaa

SEQ ID NO: 1953854 - RNA, 19 nt, Homo sapiens
  misc_RNA (1)...(19): siRNA sense strand
gaacaugaggaacagaaag

SEQ ID NO: 1953855 - RNA, 19 nt, Homo sapiens
  misc_RNA (1)...(19): siRNA sense strand
gaggaaagggaucguggaa

SEQ ID NO: 1953856 - RNA, 19 nt, Homo sapiens
  misc_RNA (1)...(19): siRNA sense strand
agaggacugucuuuaugaa

SEQ ID NO: 1953857 - RNA, 19 nt, Homo sapiens
  misc_RNA (1)...(19): siRNA sense strand
ggaacaugaggaacagaaa

SEQ ID NO: 1953858 - RNA, 19 nt, Homo sapiens
  misc_RNA (1)...(19): siRNA sense strand
gcagagcagcagaacaaga

SEQ ID NO: 1953859 - RNA, 19 nt, Homo sapiens
  misc_RNA (1)...(19): siRNA sense strand
cuaccaacauggcugugaa

SEQ ID NO: 1953860 - RNA, 19 nt, Homo sapiens
  misc_RNA (1)...(19): siRNA sense strand
uggcagagcagcagaacaa

SEQ ID NO: 1953861 - RNA, 19 nt, Homo sapiens
  misc_RNA (1)...(19): siRNA sense strand
cagaggacugucuuuauga

SEQ ID NO: 1953862 - RNA, 19 nt, Homo sapiens
  misc_RNA (1)...(19): siRNA sense strand
gacaugaugaaguacauug

SEQ ID NO: 1953863 - RNA, 19 nt, Homo sapiens
  misc_RNA (1)...(19): siRNA sense strand
gagacagagcuaaagaaga

SEQ ID NO: 1953864 - RNA, 19 nt, Homo sapiens
  misc_RNA (1)...(19): siRNA sense strand
guacauugagacagagcua

SEQ ID NO: 1953865 - RNA, 19 nt, Homo sapiens
  misc_RNA (1)...(19): siRNA sense strand
caacagauuuuaucaugag

SEQ ID NO: 1953866 - RNA, 19 nt, Homo sapiens
  misc_RNA (1)...(19): siRNA sense strand
gaggaugcagacaugauga

SEQ ID NO: 1953867 - RNA, 19 nt, Homo sapiens
  misc_RNA (1)...(19): siRNA sense strand
cacaacagauuuuaucaug

SEQ ID NO: 1953868 - RNA, 19 nt, Homo sapiens
  misc_RNA (1)...(19): siRNA sense strand
gagcagcagaacaagaaga

SEQ ID NO: 1953869 - RNA, 19 nt, Homo sapiens
  misc_RNA (1)...(19): siRNA sense strand
gcagacaugaugaaguaca

SEQ ID NO: 1953870 - RNA, 19 nt, Homo sapiens
  misc_RNA (1)...(19): siRNA sense strand
gaugaaguacauugagaca

SEQ ID NO: 1953871 - RNA, 19 nt, Homo sapiens
  misc_RNA (1)...(19): siRNA sense strand
cagcagaacaagaagaaag

SEQ ID NO: 1953872 - RNA, 19 nt, Homo sapiens
  misc_RNA (1)...(19): siRNA sense strand
gaaugcagaggacugucuu

SEQ ID NO: 1953873 - RNA, 19 nt, Homo sapiens
  misc_RNA (1)...(19): siRNA sense strand
aaagaagaccgaggagaug

SEQ ID NO: 1953874 - RNA, 19 nt, Homo sapiens
  misc_RNA (1)...(19): siRNA sense strand
cagacaugaugaaguacau

SEQ ID NO: 1953875 - RNA, 19 nt, Homo sapiens
  misc_RNA (1)...(19): siRNA sense strand
guggauaugaagaaacuga

SEQ ID NO: 1953876 - RNA, 19 nt, Homo sapiens
  misc_RNA (1)...(19): siRNA sense strand
agaaaguuaagccaaagaa

SEQ ID NO: 1953877 - RNA, 19 nt, Homo sapiens
  misc_RNA (1)...(19): siRNA sense strand
gaagaccgaggagaugcuu

SEQ ID NO: 1953878 - RNA, 19 nt, Homo sapiens
  misc_RNA (1)...(19): siRNA sense strand
gaaaggggcaaagauaaga

SEQ ID NO: 1953879 - RNA, 19 nt, Homo sapiens
  misc_RNA (1)...(19): siRNA sense strand
gagcuaaagaagaggaaag

SEQ ID NO: 1953880 - RNA, 19 nt, Homo sapiens
  misc_RNA (1)...(19): siRNA sense strand
gaaagggaucguggaacau

SEQ ID NO: 1953881 - RNA, 19 nt, Homo sapiens
  misc_RNA (1)...(19): siRNA sense strand
acagaaaguuaagccaaag

SEQ ID NO: 1953882 - RNA, 19 nt, Homo sapiens
  misc_RNA (1)...(19): siRNA sense strand
cuucgugccuaccaacaug

SEQ ID NO: 1953883 - RNA, 19 nt, Homo sapiens
  misc_RNA (1)...(19): siRNA sense strand
augaugaaguacauugaga

SEQ ID NO: 1953884 - RNA, 19 nt, Homo sapiens
  misc_RNA (1)...(19): siRNA sense strand
caaccgaagggaugaggau

SEQ ID NO: 1953885 - RNA, 19 nt, Homo sapiens
  misc_RNA (1)...(19): siRNA sense strand
ugagacagagcuaaagaag

SEQ ID NO: 1953886 - RNA, 19 nt, Homo sapiens
  misc_RNA (1)...(19): siRNA sense strand
gggaugaggaugcagacau

SEQ ID NO: 1953887 - RNA, 19 nt, Homo sapiens
  misc_RNA (1)...(19): siRNA sense strand
augaagaaacugaaggaaa

SEQ ID NO: 1953888 - RNA, 19 nt, Homo sapiens
  misc_RNA (1)...(19): siRNA sense strand
augaggaacagaaaguuaa

SEQ ID NO: 1953889 - RNA, 19 nt, Homo sapiens
  misc_RNA (1)...(19): siRNA sense strand
aaagggaucguggaacaug

SEQ ID NO: 1953890 - RNA, 19 nt, Homo sapiens
  misc_RNA (1)...(19): siRNA sense strand
cguguuuccucagcaaaga

SEQ ID NO: 1953891 - RNA, 19 nt, Homo sapiens
  misc_RNA (1)...(19): siRNA sense strand
gaagaaacugaaggaaagg

SEQ ID NO: 1953892 - RNA, 19 nt, Homo sapiens
  misc_RNA (1)...(19): siRNA sense strand
acauugagacagagcuaaa

SEQ ID NO: 1953893 - RNA, 19 nt, Homo sapiens
  misc_RNA (1)...(19): siRNA sense strand
ugaggaugcagacaugaug

SEQ ID NO: 1953894 - RNA, 19 nt, Homo sapiens
  misc_RNA (1)...(19): siRNA sense strand
aagggaucguggaacauga

SEQ ID NO: 1953895 - RNA, 19 nt, Homo sapiens
  misc_RNA (1)...(19): siRNA sense strand
ggauaugaagaaacugaag

SEQ ID NO: 1953896 - RNA, 19 nt, Homo sapiens
  misc_RNA (1)...(19): siRNA sense strand
gcagcagaacaagaagaaa

SEQ ID NO: 1953897 - RNA, 19 nt, Homo sapiens
  misc_RNA (1)...(19): siRNA sense strand
gaaggaaaggggcaaagau

SEQ ID NO: 1953898 - RNA, 19 nt, Homo sapiens
  misc_RNA (1)...(19): siRNA sense strand
cagaaaguuaagccaaaga

SEQ ID NO: 1953899 - RNA, 19 nt, Homo sapiens
  misc_RNA (1)...(19): siRNA sense strand
ccgaagggaugaggaugca

SEQ ID NO: 1953900 - RNA, 19 nt, Homo sapiens
  misc_RNA (1)...(19): siRNA sense strand
guacagaacuugaggaaga

SEQ ID NO: 1953901 - RNA, 19 nt, Homo sapiens
  misc_RNA (1)...(19): siRNA sense strand
gaaggcaacugaugacuau

SEQ ID NO: 1953902 - RNA, 19 nt, Homo sapiens
  misc_RNA (1)...(19): siRNA sense strand
caacauggcugugaauuau

SEQ ID NO: 1953903 - RNA, 19 nt, Homo sapiens
  misc_RNA (1)...(19): siRNA sense strand
gaugaucccuuucagauga

SEQ ID NO: 1953904 - RNA, 19 nt, Homo sapiens
  misc_RNA (1)...(19): siRNA sense strand
gcagaggacugucuuuaug

SEQ ID NO: 1953905 - RNA, 19 nt, Homo sapiens
  misc_RNA (1)...(19): siRNA sense strand
ggaaagggaucguggaaca

SEQ ID NO: 1953906 - RNA, 19 nt, Homo sapiens
  misc_RNA (1)...(19): siRNA sense strand
gcaaagauaagaucaguga

SEQ ID NO: 1953907 - RNA, 19 nt, Homo sapiens
  misc_RNA (1)...(19): siRNA sense strand
ugaagaaacugaaggaaag

SEQ ID NO: 1953908 - RNA, 19 nt, Homo sapiens
  misc_RNA (1)...(19): siRNA sense strand
ugaaguacauugagacaga

SEQ ID NO: 1953909 - RNA, 19 nt, Homo sapiens
  misc_RNA (1)...(19): siRNA sense strand
agacagagcuaaagaagag

SEQ ID NO: 1953910 - RNA, 19 nt, Homo sapiens
  misc_RNA (1)...(19): siRNA sense strand
cagaggagguucgauuaaa

SEQ ID NO: 1953911 - RNA, 19 nt, Homo sapiens
  misc_RNA (1)...(19): siRNA sense strand
ggaugaggaugcagacaug

SEQ ID NO: 1953912 - RNA, 19 nt, Homo sapiens
  misc_RNA (1)...(19): siRNA sense strand
ccaacauggcugugaauua

SEQ ID NO: 1953913 - RNA, 19 nt, Homo sapiens
  misc_RNA (1)...(19): siRNA sense strand
augcagacaugaugaagua

SEQ ID NO: 1953914 - RNA, 19 nt, Homo sapiens
  misc_RNA (1)...(19): siRNA sense strand
ggacugucuuuaugaacuu

SEQ ID NO: 1953915 - RNA, 19 nt, Homo sapiens
  misc_RNA (1)...(19): siRNA sense strand
caaagaagaccgaggagau

SEQ ID NO: 1953916 - RNA, 19 nt, Homo sapiens
  misc_RNA (1)...(19): siRNA sense strand
gggcaaagauaagaucagu

SEQ ID NO: 1953917 - RNA, 19 nt, Homo sapiens
  misc_RNA (1)...(19): siRNA sense strand
ccgaggagaugcuuuccaa

SEQ ID NO: 1953918 - RNA, 19 nt, Homo sapiens
  misc_RNA (1)...(19): siRNA sense strand
caugaggaacagaaaguua

SEQ ID NO: 1953919 - RNA, 19 nt, Homo sapiens
  misc_RNA (1)...(19): siRNA sense strand
gaaaguuaagccaaagaau

SEQ ID NO: 1953920 - RNA, 19 nt, Homo sapiens
  misc_RNA (1)...(19): siRNA sense strand
cagagcagcagaacaagaa

SEQ ID NO: 1953921 - RNA, 19 nt, Homo sapiens
  misc_RNA (1)...(19): siRNA sense strand
gaucguggaacaugaggaa

SEQ ID NO: 1953922 - RNA, 19 nt, Homo sapiens
  misc_RNA (1)...(19): siRNA sense strand
aaaguuaagccaaagaaug

SEQ ID NO: 1953923 - RNA, 19 nt, Homo sapiens
  misc_RNA (1)...(19): siRNA sense strand
aacagaaaguuaagccaaa

SEQ ID NO: 1953924 - RNA, 19 nt, Homo sapiens
  misc_RNA (1)...(19): siRNA sense strand
gaacaugaggaacagaaag

SEQ ID NO: 1953925 - RNA, 19 nt, Homo sapiens
  misc_RNA (1)...(19): siRNA sense strand
gaggaaagggaucguggaa

SEQ ID NO: 1953926 - RNA, 19 nt, Homo sapiens
  misc_RNA (1)...(19): siRNA sense strand
gcaagcguccugcuaacga

SEQ ID NO: 1953927 - RNA, 19 nt, Homo sapiens
  misc_RNA (1)...(19): siRNA sense strand
agaggacugucuuuaugaa

SEQ ID NO: 1953928 - RNA, 19 nt, Homo sapiens
  misc_RNA (1)...(19): siRNA sense strand
ggaacaugaggaacagaaa

SEQ ID NO: 1953929 - RNA, 19 nt, Homo sapiens
  misc_RNA (1)...(19): siRNA sense strand
gcagagcagcagaacaaga

SEQ ID NO: 1953930 - RNA, 19 nt, Homo sapiens
  misc_RNA (1)...(19): siRNA sense strand
cuaccaacauggcugugaa

SEQ ID NO: 1953931 - RNA, 19 nt, Homo sapiens
  misc_RNA (1)...(19): siRNA sense strand
ucagaggagguucgauuaa

SEQ ID NO: 1953932 - RNA, 19 nt, Homo sapiens
  misc_RNA (1)...(19): siRNA sense strand
uggcagagcagcagaacaa

SEQ ID NO: 1953933 - RNA, 19 nt, Homo sapiens
  misc_RNA (1)...(19): siRNA sense strand
cagaggacugucuuuauga

SEQ ID NO: 1953934 - RNA, 19 nt, Homo sapiens
  misc_RNA (1)...(19): siRNA sense strand
gacaugaugaaguacauug

SEQ ID NO: 1953935 - RNA, 19 nt, Homo sapiens
  misc_RNA (1)...(19): siRNA sense strand
gagacagagcuaaagaaga

SEQ ID NO: 1953936 - RNA, 19 nt, Homo sapiens
  misc_RNA (1)...(19): siRNA sense strand
guacauugagacagagcua

SEQ ID NO: 1953937 - RNA, 19 nt, Homo sapiens
  misc_RNA (1)...(19): siRNA sense strand
caacagauuuuaucaugag

SEQ ID NO: 1953938 - RNA, 19 nt, Homo sapiens
  misc_RNA (1)...(19): siRNA sense strand
gugguaugguggauaugaa

SEQ ID NO: 1953939 - RNA, 19 nt, Homo sapiens
  misc_RNA (1)...(19): siRNA sense strand
cuaacgagaaggcaacuga

SEQ ID NO: 1953940 - RNA, 19 nt, Homo sapiens
  misc_RNA (1)...(19): siRNA sense strand
gaggaugcagacaugauga

SEQ ID NO: 1953941 - RNA, 19 nt, Homo sapiens
  misc_RNA (1)...(19): siRNA sense strand
cacaacagauuuuaucaug

SEQ ID NO: 1953942 - RNA, 19 nt, Homo sapiens
  misc_RNA (1)...(19): siRNA sense strand
uaugguggauaugaagaaa

SEQ ID NO: 1953943 - RNA, 19 nt, Homo sapiens
  misc_RNA (1)...(19): siRNA sense strand
gagcagcagaacaagaaga

SEQ ID NO: 1953944 - RNA, 19 nt, Homo sapiens
  misc_RNA (1)...(19): siRNA sense strand
gcagacaugaugaaguaca

SEQ ID NO: 1953945 - RNA, 19 nt, Homo sapiens
  misc_RNA (1)...(19): siRNA sense strand
agaaggcaacugaugacua

SEQ ID NO: 1953946 - RNA, 19 nt, Homo sapiens
  misc_RNA (1)...(19): siRNA sense strand
gaugaaguacauugagaca

SEQ ID NO: 1953947 - RNA, 19 nt, Homo sapiens
  misc_RNA (1)...(19): siRNA sense strand
cagcagaacaagaagaaag

SEQ ID NO: 1953948 - RNA, 19 nt, Homo sapiens
  misc_RNA (1)...(19): siRNA sense strand
gaaugcagaggacugucuu

SEQ ID NO: 1953949 - RNA, 19 nt, Homo sapiens
  misc_RNA (1)...(19): siRNA sense strand
aaagaagaccgaggagaug

SEQ ID NO: 1953950 - RNA, 19 nt, Homo sapiens
  misc_RNA (1)...(19): siRNA sense strand
cagacaugaugaaguacau

SEQ ID NO: 1953951 - RNA, 19 nt, Homo sapiens
  misc_RNA (1)...(19): siRNA sense strand
guggauaugaagaaacuga

SEQ ID NO: 1953952 - RNA, 19 nt, Homo sapiens
  misc_RNA (1)...(19): siRNA sense strand
agaaaguuaagccaaagaa

SEQ ID NO: 1953953 - RNA, 19 nt, Homo sapiens
  misc_RNA (1)...(19): siRNA sense strand
gaagaccgaggagaugcuu

SEQ ID NO: 1953954 - RNA, 19 nt, Homo sapiens
  misc_RNA (1)...(19): siRNA sense strand
gaaaggggcaaagauaaga

SEQ ID NO: 1953955 - RNA, 19 nt, Homo sapiens
  misc_RNA (1)...(19): siRNA sense strand
gagcuaaagaagaggaaag

SEQ ID NO: 1953956 - RNA, 19 nt, Homo sapiens
  misc_RNA (1)...(19): siRNA sense strand
gcaggacucagaggagguu

SEQ ID NO: 1953957 - RNA, 19 nt, Homo sapiens
  misc_RNA (1)...(19): siRNA sense strand
gaaagggaucguggaacau

SEQ ID NO: 1953958 - RNA, 19 nt, Homo sapiens
  misc_RNA (1)...(19): siRNA sense strand
acagaaaguuaagccaaag

SEQ ID NO: 1953959 - RNA, 19 nt, Homo sapiens
  misc_RNA (1)...(19): siRNA sense strand
ggagucagaggaagaugag

SEQ ID NO: 1953960 - RNA, 19 nt, Homo sapiens
  misc_RNA (1)...(19): siRNA sense strand
cuucgugccuaccaacaug

SEQ ID NO: 1953961 - RNA, 19 nt, Homo sapiens
  misc_RNA (1)...(19): siRNA sense strand
caaccgaagggaugaggau

SEQ ID NO: 1953962 - RNA, 19 nt, Homo sapiens
  misc_RNA (1)...(19): siRNA sense strand
guaugguggauaugaagaa

SEQ ID NO: 1953963 - RNA, 19 nt, Homo sapiens
  misc_RNA (1)...(19): siRNA sense strand
ugagacagagcuaaagaag

SEQ ID NO: 1953964 - RNA, 19 nt, Homo sapiens
  misc_RNA (1)...(19): siRNA sense strand
acucagaggagguucgauu

SEQ ID NO: 1953965 - RNA, 19 nt, Homo sapiens
  misc_RNA (1)...(19): siRNA sense strand
augaugaaguacauugaga

SEQ ID NO: 1953966 - RNA, 19 nt, Homo sapiens
  misc_RNA (1)...(19): siRNA sense strand
agaggagguucgauuaaaa

SEQ ID NO: 1953967 - RNA, 19 nt, Homo sapiens
  misc_RNA (1)...(19): siRNA sense strand
gggaugaggaugcagacau

SEQ ID NO: 1953968 - RNA, 19 nt, Homo sapiens
  misc_RNA (1)...(19): siRNA sense strand
aaagggaucguggaacaug

SEQ ID NO: 1953969 - RNA, 19 nt, Homo sapiens
  misc_RNA (1)...(19): siRNA sense strand
gagaaguucaagaaaauga

SEQ ID NO: 1953970 - RNA, 19 nt, Homo sapiens
  misc_RNA (1)...(19): siRNA sense strand
acgagaaggcaacugauga

SEQ ID NO: 1953971 - RNA, 19 nt, Homo sapiens
  misc_RNA (1)...(19): siRNA sense strand
cucagaggagguucgauua

SEQ ID NO: 1953972 - RNA, 19 nt, Homo sapiens
  misc_RNA (1)...(19): siRNA sense strand
augaagaaacugaaggaaa

SEQ ID NO: 1953973 - RNA, 19 nt, Homo sapiens
  misc_RNA (1)...(19): siRNA sense strand
augaggaacagaaaguuaa

SEQ ID NO: 1953974 - RNA, 19 nt, Homo sapiens
  misc_RNA (1)...(19): siRNA sense strand
cguguuuccucagcaaaga

SEQ ID NO: 1953975 - RNA, 19 nt, Homo sapiens
  misc_RNA (1)...(19): siRNA sense strand
gaagaaacugaaggaaagg

SEQ ID NO: 1953976 - RNA, 19 nt, Homo sapiens
  misc_RNA (1)...(19): siRNA sense strand
acauugagacagagcuaaa

SEQ ID NO: 1953977 - RNA, 19 nt, Homo sapiens
  misc_RNA (1)...(19): siRNA sense strand
ugaggaugcagacaugaug

SEQ ID NO: 1953978 - RNA, 19 nt, Homo sapiens
  misc_RNA (1)...(19): siRNA sense strand
aagggaucguggaacauga

SEQ ID NO: 1953979 - RNA, 19 nt, Homo sapiens
  misc_RNA (1)...(19): siRNA sense strand
gguaugguggauaugaaga

SEQ ID NO: 1953980 - RNA, 19 nt, Homo sapiens
  misc_RNA (1)...(19): siRNA sense strand
ccgaagggaugaggaugca

SEQ ID NO: 1953981 - RNA, 19 nt, Homo sapiens
  misc_RNA (1)...(19): siRNA sense strand
ggauaugaagaaacugaag

SEQ ID NO: 1953982 - RNA, 19 nt, Homo sapiens
  misc_RNA (1)...(19): siRNA sense strand
gcagcagaacaagaagaaa

SEQ ID NO: 1953983 - RNA, 19 nt, Homo sapiens
  misc_RNA (1)...(19): siRNA sense strand
gaaggaaaggggcaaagau

SEQ ID NO: 1953984 - RNA, 19 nt, Homo sapiens
  misc_RNA (1)...(19): siRNA sense strand
cagaaaguuaagccaaaga

SEQ ID NO: 1953985 - RNA, 19 nt, Homo sapiens
  misc_RNA (1)...(19): siRNA sense strand
ggacucagaggagguucga

SEQ ID NO: 1953986 - RNA, 19 nt, Homo sapiens
  misc_RNA (1)...(19): siRNA sense strand
gaaacuggaugcaucuuaa

SEQ ID NO: 1953987 - RNA, 19 nt, Homo sapiens
  misc_RNA (1)...(19): siRNA sense strand
agacaaagcuaaugaagaa

SEQ ID NO: 1953988 - RNA, 19 nt, Homo sapiens
  misc_RNA (1)...(19): siRNA sense strand
ugaagaaggucuggcauua

SEQ ID NO: 1953989 - RNA, 19 nt, Homo sapiens
  misc_RNA (1)...(19): siRNA sense strand
gaaauacaauaccaucuca

SEQ ID NO: 1953990 - RNA, 19 nt, Homo sapiens
  misc_RNA (1)...(19): siRNA sense strand
caagugagguggaagaaga

SEQ ID NO: 1953991 - RNA, 19 nt, Homo sapiens
  misc_RNA (1)...(19): siRNA sense strand
ugaagaagccuauaagaaa

SEQ ID NO: 1953992 - RNA, 19 nt, Homo sapiens
  misc_RNA (1)...(19): siRNA sense strand
gaaguuguguugucagaga

SEQ ID NO: 1953993 - RNA, 19 nt, Homo sapiens
  misc_RNA (1)...(19): siRNA sense strand
ggaaagggcacgagacaaa

SEQ ID NO: 1953994 - RNA, 19 nt, Homo sapiens
  misc_RNA (1)...(19): siRNA sense strand
gaagaagccuauaagaaac

SEQ ID NO: 1953995 - RNA, 19 nt, Homo sapiens
  misc_RNA (1)...(19): siRNA sense strand
cuaaaggacuuggauauuc

SEQ ID NO: 1953996 - RNA, 19 nt, Homo sapiens
  misc_RNA (1)...(19): siRNA sense strand
gauggaaucaguaauaaug

SEQ ID NO: 1953997 - RNA, 19 nt, Homo sapiens
  misc_RNA (1)...(19): siRNA sense strand
guuaaugacugggaauauu

SEQ ID NO: 1953998 - RNA, 19 nt, Homo sapiens
  misc_RNA (1)...(19): siRNA sense strand
gaauaagguuagaaacaca

SEQ ID NO: 1953999 - RNA, 19 nt, Homo sapiens
  misc_RNA (1)...(19): siRNA sense strand
gagaauaagguuagaaaca

SEQ ID NO: 1954000 - RNA, 19 nt, Homo sapiens
  misc_RNA (1)...(19): siRNA sense strand
gaagaagaggagagaguaa

SEQ ID NO: 1954001 - RNA, 19 nt, Homo sapiens
  misc_RNA (1)...(19): siRNA sense strand
gguagagaccacagaguua

SEQ ID NO: 1954002 - RNA, 19 nt, Homo sapiens
  misc_RNA (1)...(19): siRNA sense strand
ggacaaacaaagcacacua

SEQ ID NO: 1954003 - RNA, 19 nt, Homo sapiens
  misc_RNA (1)...(19): siRNA sense strand
ggacuuggauauucuucau

SEQ ID NO: 1954004 - RNA, 19 nt, Homo sapiens
  misc_RNA (1)...(19): siRNA sense strand
uaaaggacuuggauauucu

SEQ ID NO: 1954005 - RNA, 19 nt, Homo sapiens
  misc_RNA (1)...(19): siRNA sense strand
gcaaaugcuuccaagaaaa

SEQ ID NO: 1954006 - RNA, 19 nt, Homo sapiens
  misc_RNA (1)...(19): siRNA sense strand
gacaaacaaagcacacuaa

SEQ ID NO: 1954007 - RNA, 19 nt, Homo sapiens
  misc_RNA (1)...(19): siRNA sense strand
gagcaugucaaccuucauu

SEQ ID NO: 1954008 - RNA, 19 nt, Homo sapiens
  misc_RNA (1)...(19): siRNA sense strand
gagaccauuugcaaacuau

SEQ ID NO: 1954009 - RNA, 19 nt, Homo sapiens
  misc_RNA (1)...(19): siRNA sense strand
caaagcacacuaaccuaaa

SEQ ID NO: 1954010 - RNA, 19 nt, Homo sapiens
  misc_RNA (1)...(19): siRNA sense strand
acaauaccaucucaacuuc

SEQ ID NO: 1954011 - RNA, 19 nt, Homo sapiens
  misc_RNA (1)...(19): siRNA sense strand
ggaagaagaagaggagaga

SEQ ID NO: 1954012 - RNA, 19 nt, Homo sapiens
  misc_RNA (1)...(19): siRNA sense strand
guagagaccacagaguuaa

SEQ ID NO: 1954013 - RNA, 19 nt, Homo sapiens
  misc_RNA (1)...(19): siRNA sense strand
gagacaaagcuaaugaaga

SEQ ID NO: 1954014 - RNA, 19 nt, Homo sapiens
  misc_RNA (1)...(19): siRNA sense strand
guaucaagucuacugaaua

SEQ ID NO: 1954015 - RNA, 19 nt, Homo sapiens
  misc_RNA (1)...(19): siRNA sense strand
acaaagcacacuaaccuaa

SEQ ID NO: 1954016 - RNA, 19 nt, Homo sapiens
  misc_RNA (1)...(19): siRNA sense strand
cuucauaauucaucacaga

SEQ ID NO: 1954017 - RNA, 19 nt, Homo sapiens
  misc_RNA (1)...(19): siRNA sense strand
caagucuacugaauaugga

SEQ ID NO: 1954018 - RNA, 19 nt, Homo sapiens
  misc_RNA (1)...(19): siRNA sense strand
ugaagagcaugucaaccuu

SEQ ID NO: 1954019 - RNA, 19 nt, Homo sapiens
  misc_RNA (1)...(19): siRNA sense strand
cagagaauaagguuagaaa

SEQ ID NO: 1954020 - RNA, 19 nt, Homo sapiens
  misc_RNA (1)...(19): siRNA sense strand
cacccacacuucagaaaga

SEQ ID NO: 1954021 - RNA, 19 nt, Homo sapiens
  misc_RNA (1)...(19): siRNA sense strand
gggaauauucagagccuaa

SEQ ID NO: 1954022 - RNA, 19 nt, Homo sapiens
  misc_RNA (1)...(19): siRNA sense strand
cuacaggaagaaauagaua

SEQ ID NO: 1954023 - RNA, 19 nt, Homo sapiens
  misc_RNA (1)...(19): siRNA sense strand
aaacaaagcacacuaaccu

SEQ ID NO: 1954024 - RNA, 19 nt, Homo sapiens
  misc_RNA (1)...(19): siRNA sense strand
ucaaagcacccacacuuca

SEQ ID NO: 1954025 - RNA, 19 nt, Homo sapiens
  misc_RNA (1)...(19): siRNA sense strand
gaaagacagcagccagcaa

SEQ ID NO: 1954026 - RNA, 19 nt, Homo sapiens
  misc_RNA (1)...(19): siRNA sense strand
agagaccauuugcaaacua

SEQ ID NO: 1954027 - RNA, 19 nt, Homo sapiens
  misc_RNA (1)...(19): siRNA sense strand
agaaacuggaugcaucuua

SEQ ID NO: 1954028 - RNA, 19 nt, Homo sapiens
  misc_RNA (1)...(19): siRNA sense strand
ugaggaaguuguguuguca

SEQ ID NO: 1954029 - RNA, 19 nt, Homo sapiens
  misc_RNA (1)...(19): siRNA sense strand
gaccauuugcaaacuauga

SEQ ID NO: 1954030 - RNA, 19 nt, Homo sapiens
  misc_RNA (1)...(19): siRNA sense strand
ucagaaaacucucaaagca

SEQ ID NO: 1954031 - RNA, 19 nt, Homo sapiens
  misc_RNA (1)...(19): siRNA sense strand
caaagcuaaugaagaaggu

SEQ ID NO: 1954032 - RNA, 19 nt, Homo sapiens
  misc_RNA (1)...(19): siRNA sense strand
uacaauaccaucucaacuu

SEQ ID NO: 1954033 - RNA, 19 nt, Homo sapiens
  misc_RNA (1)...(19): siRNA sense strand
gacagcagccagcaagaga

SEQ ID NO: 1954034 - RNA, 19 nt, Homo sapiens
  misc_RNA (1)...(19): siRNA sense strand
gguuagaaacacagugaaa

SEQ ID NO: 1954035 - RNA, 19 nt, Homo sapiens
  misc_RNA (1)...(19): siRNA sense strand
uguaucaagucuacugaau

SEQ ID NO: 1954036 - RNA, 19 nt, Homo sapiens
  misc_RNA (1)...(19): siRNA sense strand
gcacgagacaaagcuaaug

SEQ ID NO: 1954037 - RNA, 19 nt, Homo sapiens
  misc_RNA (1)...(19): siRNA sense strand
ugucaaagaguaccagaga

SEQ ID NO: 1954038 - RNA, 19 nt, Homo sapiens
  misc_RNA (1)...(19): siRNA sense strand
uugaagaagccuauaagaa

SEQ ID NO: 1954039 - RNA, 19 nt, Homo sapiens
  misc_RNA (1)...(19): siRNA sense strand
agaagaagaggagagagua

SEQ ID NO: 1954040 - RNA, 19 nt, Homo sapiens
  misc_RNA (1)...(19): siRNA sense strand
aagaaggucuggcauuacu

SEQ ID NO: 1954041 - RNA, 19 nt, Homo sapiens
  misc_RNA (1)...(19): siRNA sense strand
gaagaaggucuggcauuac

SEQ ID NO: 1954042 - RNA, 19 nt, Homo sapiens
  misc_RNA (1)...(19): siRNA sense strand
uaccagagaccauuugcaa

SEQ ID NO: 1954043 - RNA, 19 nt, Homo sapiens
  misc_RNA (1)...(19): siRNA sense strand
ucucaaagcacccacacuu

SEQ ID NO: 1954044 - RNA, 19 nt, Homo sapiens
  misc_RNA (1)...(19): siRNA sense strand
ggaauauucagagccuaaa

SEQ ID NO: 1954045 - RNA, 19 nt, Homo sapiens
  misc_RNA (1)...(19): siRNA sense strand
gaguuaaugacugggaaua

SEQ ID NO: 1954046 - RNA, 19 nt, Homo sapiens
  misc_RNA (1)...(19): siRNA sense strand
gaaggucuggcauuacuac

SEQ ID NO: 1954047 - RNA, 19 nt, Homo sapiens
  misc_RNA (1)...(19): siRNA sense strand
caacagugugaaacucuga

SEQ ID NO: 1954048 - RNA, 19 nt, Homo sapiens
  misc_RNA (1)...(19): siRNA sense strand
ggaaucaguaauaaugaca

SEQ ID NO: 1954049 - RNA, 19 nt, Homo sapiens
  misc_RNA (1)...(19): siRNA sense strand
ucaagucuacugaauaugg

SEQ ID NO: 1954050 - RNA, 19 nt, Homo sapiens
  misc_RNA (1)...(19): siRNA sense strand
agaauaagguuagaaacac

SEQ ID NO: 1954051 - RNA, 19 nt, Homo sapiens
  misc_RNA (1)...(19): siRNA sense strand
uaaugaggaaguuguguug

SEQ ID NO: 1954052 - RNA, 19 nt, Homo sapiens
  misc_RNA (1)...(19): siRNA sense strand
gaaagggcacgagacaaag

SEQ ID NO: 1954053 - RNA, 19 nt, Homo sapiens
  misc_RNA (1)...(19): siRNA sense strand
ccagagaccauuugcaaac

SEQ ID NO: 1954054 - RNA, 19 nt, Homo sapiens
  misc_RNA (1)...(19): siRNA sense strand
aaaggauaaugaggaaguu

SEQ ID NO: 1954055 - RNA, 19 nt, Homo sapiens
  misc_RNA (1)...(19): siRNA sense strand
ucauugaagaagccuauaa

SEQ ID NO: 1954056 - RNA, 19 nt, Homo sapiens
  misc_RNA (1)...(19): siRNA sense strand
uggcauuacuacaggaaga

SEQ ID NO: 1954057 - RNA, 19 nt, Homo sapiens
  misc_RNA (1)...(19): siRNA sense strand
acuaauguaucaagucuac

SEQ ID NO: 1954058 - RNA, 19 nt, Homo sapiens
  misc_RNA (1)...(19): siRNA sense strand
gagaccacagaguuaauga

SEQ ID NO: 1954059 - RNA, 19 nt, Homo sapiens
  misc_RNA (1)...(19): siRNA sense strand
guuguguugucagagaaua

SEQ ID NO: 1954060 - RNA, 19 nt, Homo sapiens
  misc_RNA (1)...(19): siRNA sense strand
auucagagccuaaagaaca

SEQ ID NO: 1954061 - RNA, 19 nt, Homo sapiens
  misc_RNA (1)...(19): siRNA sense strand
cagcagccagcaagagaaa

SEQ ID NO: 1954062 - RNA, 19 nt, Homo sapiens
  misc_RNA (1)...(19): siRNA sense strand
guaguggaguacucucucu

SEQ ID NO: 1954063 - RNA, 19 nt, Homo sapiens
  misc_RNA (1)...(19): siRNA sense strand
gcacccacacuucagaaag

SEQ ID NO: 1954064 - RNA, 19 nt, Homo sapiens
  misc_RNA (1)...(19): siRNA sense strand
ucacagaugaagagcaugu

SEQ ID NO: 1954065 - RNA, 19 nt, Homo sapiens
  misc_RNA (1)...(19): siRNA sense strand
ucuaaaggacuuggauauu

SEQ ID NO: 1954066 - RNA, 19 nt, Homo sapiens
  misc_RNA (1)...(19): siRNA sense strand
ugcaaacuaugauggaauc

SEQ ID NO: 1954067 - RNA, 19 nt, Homo sapiens
  misc_RNA (1)...(19): siRNA sense strand
aagagcaugucaaccuuca

SEQ ID NO: 1954068 - RNA, 19 nt, Homo sapiens
  misc_RNA (1)...(19): siRNA sense strand
gggcacgagacaaagcuaa

SEQ ID NO: 1954069 - RNA, 19 nt, Homo sapiens
  misc_RNA (1)...(19): siRNA sense strand
cuacaacagugugaaacuc

SEQ ID NO: 1954070 - RNA, 19 nt, Homo sapiens
  misc_RNA (1)...(19): siRNA sense strand
gugugaaacucugaaaguc

SEQ ID NO: 1954071 - RNA, 19 nt, Homo sapiens
  misc_RNA (1)...(19): siRNA sense strand
ggauaaugaggaaguugug

SEQ ID NO: 1954072 - RNA, 19 nt, Homo sapiens
  misc_RNA (1)...(19): siRNA sense strand
ccacacuucagaaagaaau

SEQ ID NO: 1954073 - RNA, 19 nt, Homo sapiens
  misc_RNA (1)...(19): siRNA sense strand
gaggagagaguaaaacaga

SEQ ID NO: 1954074 - RNA, 19 nt, Homo sapiens
  misc_RNA (1)...(19): siRNA sense strand
uuaaugacugggaauauuc

SEQ ID NO: 1954075 - RNA, 19 nt, Homo sapiens
  misc_RNA (1)...(19): siRNA sense strand
gaagaaaagauugcuacaa

SEQ ID NO: 1954076 - RNA, 19 nt, Homo sapiens
  misc_RNA (1)...(19): siRNA sense strand
guaaaacagaugcaucaaa

SEQ ID NO: 1954077 - RNA, 19 nt, Homo sapiens
  misc_RNA (1)...(19): siRNA sense strand
ugucagagaauaagguuag

SEQ ID NO: 1954078 - RNA, 19 nt, Homo sapiens
  misc_RNA (1)...(19): siRNA sense strand
ccuggcaaccucugucaaa

SEQ ID NO: 1954079 - RNA, 19 nt, Homo sapiens
  misc_RNA (1)...(19): siRNA sense strand
aaagcacacuaaccuaaaa

SEQ ID NO: 1954080 - RNA, 19 nt, Homo sapiens
  misc_RNA (1)...(19): siRNA sense strand
cacgagacaaagcuaauga

SEQ ID NO: 1954081 - RNA, 19 nt, Homo sapiens
  misc_RNA (1)...(19): siRNA sense strand
uaagaaacuggaugcaucu

SEQ ID NO: 1954082 - RNA, 19 nt, Homo sapiens
  misc_RNA (1)...(19): siRNA sense strand
aaagaaauuuuggcgcuaa

SEQ ID NO: 1954083 - RNA, 19 nt, Homo sapiens
  misc_RNA (1)...(19): siRNA sense strand
gaccacagaguuaaugacu

SEQ ID NO: 1954084 - RNA, 19 nt, Homo sapiens
  misc_RNA (1)...(19): siRNA sense strand
aggaaguuguguugucaga

SEQ ID NO: 1954085 - RNA, 19 nt, Homo sapiens
  misc_RNA (1)...(19): siRNA sense strand
aagaagaggagagaguaaa

SEQ ID NO: 1954086 - RNA, 19 nt, Homo sapiens
  misc_RNA (1)...(19): siRNA sense strand
gaacccagcuaccuuauga

SEQ ID NO: 1954087 - RNA, 19 nt, Homo sapiens
  misc_RNA (1)...(19): siRNA sense strand
ggaaggacauugccaacua

SEQ ID NO: 1954088 - RNA, 19 nt, Homo sapiens
  misc_RNA (1)...(19): siRNA sense strand
ggaggaaagugauaucaaa

SEQ ID NO: 1954089 - RNA, 19 nt, Homo sapiens
  misc_RNA (1)...(19): siRNA sense strand
gagcagcggugguacauga

SEQ ID NO: 1954090 - RNA, 19 nt, Homo sapiens
  misc_RNA (1)...(19): siRNA sense strand
gcauucagcuguucuguau

SEQ ID NO: 1954091 - RNA, 19 nt, Homo sapiens
  misc_RNA (1)...(19): siRNA sense strand
ccagaacgaucccguagaa

SEQ ID NO: 1954092 - RNA, 19 nt, Homo sapiens
  misc_RNA (1)...(19): siRNA sense strand
ggaaagugauaucaaaugg

SEQ ID NO: 1954093 - RNA, 19 nt, Homo sapiens
  misc_RNA (1)...(19): siRNA sense strand
ucacagaugucaacaagau

SEQ ID NO: 1954094 - RNA, 19 nt, Homo sapiens
  misc_RNA (1)...(19): siRNA sense strand
gagaagaagugugaaguuc

SEQ ID NO: 1954095 - RNA, 19 nt, Homo sapiens
  misc_RNA (1)...(19): siRNA sense strand
caaggaggaugacauugaa

SEQ ID NO: 1954096 - RNA, 19 nt, Homo sapiens
  misc_RNA (1)...(19): siRNA sense strand
gaaagcagccauaugacaa

SEQ ID NO: 1954097 - RNA, 19 nt, Homo sapiens
  misc_RNA (1)...(19): siRNA sense strand
gaaacaagcgccuucuaug

SEQ ID NO: 1954098 - RNA, 19 nt, Homo sapiens
  misc_RNA (1)...(19): siRNA sense strand
caacaaggaggaugacauu

SEQ ID NO: 1954099 - RNA, 19 nt, Homo sapiens
  misc_RNA (1)...(19): siRNA sense strand
ucaguucuauuaccucuuu

SEQ ID NO: 1954100 - RNA, 19 nt, Homo sapiens
  misc_RNA (1)...(19): siRNA sense strand
gaacgaucccguagaaauc

SEQ ID NO: 1954101 - RNA, 19 nt, Homo sapiens
  misc_RNA (1)...(19): siRNA sense strand
ccagcuaccuuaugaauac

SEQ ID NO: 1954102 - RNA, 19 nt, Homo sapiens
  misc_RNA (1)...(19): siRNA sense strand
gcacaaccaccucucauuc

SEQ ID NO: 1954103 - RNA, 19 nt, Homo sapiens
  misc_RNA (1)...(19): siRNA sense strand
ggugguacaugaaccgauu

SEQ ID NO: 1954104 - RNA, 19 nt, Homo sapiens
  misc_RNA (1)...(19): siRNA sense strand
ccucauggcugggaucuug

SEQ ID NO: 1954105 - RNA, 19 nt, Homo sapiens
  misc_RNA (1)...(19): siRNA sense strand
caaagcagaugagaagagu

SEQ ID NO: 1954106 - RNA, 19 nt, Homo sapiens
  misc_RNA (1)...(19): siRNA sense strand
gaaggacauugccaacuac

SEQ ID NO: 1954107 - RNA, 19 nt, Homo sapiens
  misc_RNA (1)...(19): siRNA sense strand
ccaaggagaaucagcugua

SEQ ID NO: 1954108 - RNA, 19 nt, Homo sapiens
  misc_RNA (1)...(19): siRNA sense strand
gcucaggcauucagcuguu

SEQ ID NO: 1954109 - RNA, 19 nt, Homo sapiens
  misc_RNA (1)...(19): siRNA sense strand
ccagcaagauaaccuacaa

SEQ ID NO: 1954110 - RNA, 19 nt, Homo sapiens
  misc_RNA (1)...(19): siRNA sense strand
agacagcgaugacaagaag

SEQ ID NO: 1954111 - RNA, 19 nt, Homo sapiens
  misc_RNA (1)...(19): siRNA sense strand
guggagaaauuuccuaguc

SEQ ID NO: 1954112 - RNA, 19 nt, Homo sapiens
  misc_RNA (1)...(19): siRNA sense strand
cauucuacguccugguuua

SEQ ID NO: 1954113 - RNA, 19 nt, Homo sapiens
  misc_RNA (1)...(19): siRNA sense strand
acacuuaccugaccaugag

SEQ ID NO: 1954114 - RNA, 19 nt, Homo sapiens
  misc_RNA (1)...(19): siRNA sense strand
ucucauucauccuuuacua

SEQ ID NO: 1954115 - RNA, 19 nt, Homo sapiens
  misc_RNA (1)...(19): siRNA sense strand
aaacaagcgccuucuaugu

SEQ ID NO: 1954116 - RNA, 19 nt, Homo sapiens
  misc_RNA (1)...(19): siRNA sense strand
gagaaucagcuguacuuca

SEQ ID NO: 1954117 - RNA, 19 nt, Homo sapiens
  misc_RNA (1)...(19): siRNA sense strand
gguauccuguucacaaauc

SEQ ID NO: 1954118 - RNA, 19 nt, Homo sapiens
  misc_RNA (1)...(19): siRNA sense strand
gagcucuucuucaucuuca

SEQ ID NO: 1954119 - RNA, 19 nt, Homo sapiens
  misc_RNA (1)...(19): siRNA sense strand
guacaugaaccgauuugug

SEQ ID NO: 1954120 - RNA, 19 nt, Homo sapiens
  misc_RNA (1)...(19): siRNA sense strand
ugaaacaagcgccuucuau

SEQ ID NO: 1954121 - RNA, 19 nt, Homo sapiens
  misc_RNA (1)...(19): siRNA sense strand
cuaugcagccuacauguuu

SEQ ID NO: 1954122 - RNA, 19 nt, Homo sapiens
  misc_RNA (1)...(19): siRNA sense strand
ggccaucgguggaagaaag

SEQ ID NO: 1954123 - RNA, 19 nt, Homo sapiens
  misc_RNA (1)...(19): siRNA sense strand
acaaggaggaugacauuga

SEQ ID NO: 1954124 - RNA, 19 nt, Homo sapiens
  misc_RNA (1)...(19): siRNA sense strand
gaucacagaagacuacuac

SEQ ID NO: 1954125 - RNA, 19 nt, Homo sapiens
  misc_RNA (1)...(19): siRNA sense strand
gugguauccuguucacaaa

SEQ ID NO: 1954126 - RNA, 19 nt, Homo sapiens
  misc_RNA (1)...(19): siRNA sense strand
gaacagcgagaagaagugu

SEQ ID NO: 1954127 - RNA, 19 nt, Homo sapiens
  misc_RNA (1)...(19): siRNA sense strand
auucagcuguucuguauga

SEQ ID NO: 1954128 - RNA, 19 nt, Homo sapiens
  misc_RNA (1)...(19): siRNA sense strand
gguauccugagcaugauua

SEQ ID NO: 1954129 - RNA, 19 nt, Homo sapiens
  misc_RNA (1)...(19): siRNA sense strand
ggacauugccaacuacaac

SEQ ID NO: 1954130 - RNA, 19 nt, Homo sapiens
  misc_RNA (1)...(19): siRNA sense strand
ggugguauccuguucacaa

SEQ ID NO: 1954131 - RNA, 19 nt, Homo sapiens
  misc_RNA (1)...(19): siRNA sense strand
guagaaaucaaggcuguga

SEQ ID NO: 1954132 - RNA, 19 nt, Homo sapiens
  misc_RNA (1)...(19): siRNA sense strand
caacaccccuuuccagguu

SEQ ID NO: 1954133 - RNA, 19 nt, Homo sapiens
  misc_RNA (1)...(19): siRNA sense strand
cggcucggcuucacagaug

SEQ ID NO: 1954134 - RNA, 19 nt, Homo sapiens
  misc_RNA (1)...(19): siRNA sense strand
gauccucaucgucaucuuu

SEQ ID NO: 1954135 - RNA, 19 nt, Homo sapiens
  misc_RNA (1)...(19): siRNA sense strand
gaggaaagugauaucaaau

SEQ ID NO: 1954136 - RNA, 19 nt, Homo sapiens
  misc_RNA (1)...(19): siRNA sense strand
cgagaagaagugugaaguu

SEQ ID NO: 1954137 - RNA, 19 nt, Homo sapiens
  misc_RNA (1)...(19): siRNA sense strand
ggucgcgccuaucaacuuc

SEQ ID NO: 1954138 - RNA, 19 nt, Homo sapiens
  misc_RNA (1)...(19): siRNA sense strand
cuucacagaugucaacaag

SEQ ID NO: 1954139 - RNA, 19 nt, Homo sapiens
  misc_RNA (1)...(19): siRNA sense strand
uuaacaagcuggacaucgu

SEQ ID NO: 1954140 - RNA, 19 nt, Homo sapiens
  misc_RNA (1)...(19): siRNA sense strand
cgaaagcagccauaugaca

SEQ ID NO: 1954141 - RNA, 19 nt, Homo sapiens
  misc_RNA (1)...(19): siRNA sense strand
uccgaaagcagccauauga

SEQ ID NO: 1954142 - RNA, 19 nt, Homo sapiens
  misc_RNA (1)...(19): siRNA sense strand
gcaucugcuucguauugaa

SEQ ID NO: 1954143 - RNA, 19 nt, Homo sapiens
  misc_RNA (1)...(19): siRNA sense strand
gcgaugacaagaagaagga

SEQ ID NO: 1954144 - RNA, 19 nt, Homo sapiens
  misc_RNA (1)...(19): siRNA sense strand
ucaucgagcucuucuucau

SEQ ID NO: 1954145 - RNA, 19 nt, Homo sapiens
  misc_RNA (1)...(19): siRNA sense strand
agaaucagcuguacuucac

SEQ ID NO: 1954146 - RNA, 19 nt, Homo sapiens
  misc_RNA (1)...(19): siRNA sense strand
cuacuugggcuacuacuuc

SEQ ID NO: 1954147 - RNA, 19 nt, Homo sapiens
  misc_RNA (1)...(19): siRNA sense strand
agaacgaucccguagaaau

SEQ ID NO: 1954148 - RNA, 19 nt, Homo sapiens
  misc_RNA (1)...(19): siRNA sense strand
acacggcccucauggucuu

SEQ ID NO: 1954149 - RNA, 19 nt, Homo sapiens
  misc_RNA (1)...(19): siRNA sense strand
ccugguuuaugccaucuuu

SEQ ID NO: 1954150 - RNA, 19 nt, Homo sapiens
  misc_RNA (1)...(19): siRNA sense strand
ggcaucugcuucguauuga

SEQ ID NO: 1954151 - RNA, 19 nt, Homo sapiens
  misc_RNA (1)...(19): siRNA sense strand
uaaccuacaaggcagagaa

SEQ ID NO: 1954152 - RNA, 19 nt, Homo sapiens
  misc_RNA (1)...(19): siRNA sense strand
uggcaucugcuucguauug

SEQ ID NO: 1954153 - RNA, 19 nt, Homo sapiens
  misc_RNA (1)...(19): siRNA sense strand
gcuaccuuaugaauacuau

SEQ ID NO: 1954154 - RNA, 19 nt, Homo sapiens
  misc_RNA (1)...(19): siRNA sense strand
ccgagcggaucacagaaga

SEQ ID NO: 1954155 - RNA, 19 nt, Homo sapiens
  misc_RNA (1)...(19): siRNA sense strand
guucaucgagcucuucuuc

SEQ ID NO: 1954156 - RNA, 19 nt, Homo sapiens
  misc_RNA (1)...(19): siRNA sense strand
gggaggaaagugauaucaa

SEQ ID NO: 1954157 - RNA, 19 nt, Homo sapiens
  misc_RNA (1)...(19): siRNA sense strand
caaggagaaucagcuguac

SEQ ID NO: 1954158 - RNA, 19 nt, Homo sapiens
  misc_RNA (1)...(19): siRNA sense strand
cuacuacguccaccucauu

SEQ ID NO: 1954159 - RNA, 19 nt, Homo sapiens
  misc_RNA (1)...(19): siRNA sense strand
cauucauccuuuacuauca

SEQ ID NO: 1954160 - RNA, 19 nt, Homo sapiens
  misc_RNA (1)...(19): siRNA sense strand
cuaugcugcugugaagaua

SEQ ID NO: 1954161 - RNA, 19 nt, Homo sapiens
  misc_RNA (1)...(19): siRNA sense strand
ucuguacccuggugugguu

SEQ ID NO: 1954162 - RNA, 19 nt, Homo sapiens
  misc_RNA (1)...(19): siRNA sense strand
cgucuguaccgcacuuuaa

SEQ ID NO: 1954163 - RNA, 19 nt, Homo sapiens
  misc_RNA (1)...(19): siRNA sense strand
gagacagcgaugacaagaa

SEQ ID NO: 1954164 - RNA, 19 nt, Homo sapiens
  misc_RNA (1)...(19): siRNA sense strand
gcaucgucaugguguacuu

SEQ ID NO: 1954165 - RNA, 19 nt, Homo sapiens
  misc_RNA (1)...(19): siRNA sense strand
ccucaucgucaucuuugua

SEQ ID NO: 1954166 - RNA, 19 nt, Homo sapiens
  misc_RNA (1)...(19): siRNA sense strand
gaugacaagaagaaggaaa

SEQ ID NO: 1954167 - RNA, 19 nt, Homo sapiens
  misc_RNA (1)...(19): siRNA sense strand
acaaccaccucucauucau

SEQ ID NO: 1954168 - RNA, 19 nt, Homo sapiens
  misc_RNA (1)...(19): siRNA sense strand
ccacugguuuucuaucauu

SEQ ID NO: 1954169 - RNA, 19 nt, Homo sapiens
  misc_RNA (1)...(19): siRNA sense strand
gacacuuaccugaccauga

SEQ ID NO: 1954170 - RNA, 19 nt, Homo sapiens
  misc_RNA (1)...(19): siRNA sense strand
ggcauucagcuguucugua

SEQ ID NO: 1954171 - RNA, 19 nt, Homo sapiens
  misc_RNA (1)...(19): siRNA sense strand
ggacaucguggaguucauc

SEQ ID NO: 1954172 - RNA, 19 nt, Homo sapiens
  misc_RNA (1)...(19): siRNA sense strand
ggcuuccuguuccuuguuu

SEQ ID NO: 1954173 - RNA, 19 nt, Homo sapiens
  misc_RNA (1)...(19): siRNA sense strand
ucagugcuaucugggagaa

SEQ ID NO: 1954174 - RNA, 19 nt, Homo sapiens
  misc_RNA (1)...(19): siRNA sense strand
aagcagaugagaagaguuc

SEQ ID NO: 1954175 - RNA, 19 nt, Homo sapiens
  misc_RNA (1)...(19): siRNA sense strand
uggagaaauuuccuagucu

SEQ ID NO: 1954176 - RNA, 19 nt, Homo sapiens
  misc_RNA (1)...(19): siRNA sense strand
gugaaacaagcgccuucua

SEQ ID NO: 1954177 - RNA, 19 nt, Homo sapiens
  misc_RNA (1)...(19): siRNA sense strand
ugagugacguccagaucca

SEQ ID NO: 1954178 - RNA, 19 nt, Homo sapiens
  misc_RNA (1)...(19): siRNA sense strand
ucacagaagacuacuacgu

SEQ ID NO: 1954179 - RNA, 19 nt, Homo sapiens
  misc_RNA (1)...(19): siRNA sense strand
uaugcagccuacauguuug

SEQ ID NO: 1954180 - RNA, 19 nt, Homo sapiens
  misc_RNA (1)...(19): siRNA sense strand
acaaaucagcaucgucaug

SEQ ID NO: 1954181 - RNA, 19 nt, Homo sapiens
  misc_RNA (1)...(19): siRNA sense strand
gaggaugacauugaagaca

SEQ ID NO: 1954182 - RNA, 19 nt, Homo sapiens
  misc_RNA (1)...(19): siRNA sense strand
aacaagcgccuucuaugug

SEQ ID NO: 1954183 - RNA, 19 nt, Homo sapiens
  misc_RNA (1)...(19): siRNA sense strand
cauuaacuccguuguugug

SEQ ID NO: 1954184 - RNA, 19 nt, Homo sapiens
  misc_RNA (1)...(19): siRNA sense strand
acagcgagaagaaguguga

SEQ ID NO: 1954185 - RNA, 19 nt, Homo sapiens
  misc_RNA (1)...(19): siRNA sense strand
cugcugggcucaggcauuc

SEQ ID NO: 1954186 - RNA, 19 nt, Homo sapiens
  misc_RNA (1)...(19): siRNA sense strand
gaacagaaguggccaagaa

SEQ ID NO: 1954187 - RNA, 19 nt, Homo sapiens
  misc_RNA (1)...(19): siRNA sense strand
gagagaagcuugaagaauu

SEQ ID NO: 1954188 - RNA, 19 nt, Homo sapiens
  misc_RNA (1)...(19): siRNA sense strand
gaggagaacucgauccaaa

SEQ ID NO: 1954189 - RNA, 19 nt, Homo sapiens
  misc_RNA (1)...(19): siRNA sense strand
gaaaguaauggaugaagua

SEQ ID NO: 1954190 - RNA, 19 nt, Homo sapiens
  misc_RNA (1)...(19): siRNA sense strand
agagaagcuugaagaauua

SEQ ID NO: 1954191 - RNA, 19 nt, Homo sapiens
  misc_RNA (1)...(19): siRNA sense strand
caaauucagugaugacaga

SEQ ID NO: 1954192 - RNA, 19 nt, Homo sapiens
  misc_RNA (1)...(19): siRNA sense strand
gaauggaucuuggagaaug

SEQ ID NO: 1954193 - RNA, 19 nt, Homo sapiens
  misc_RNA (1)...(19): siRNA sense strand
gaaauugcauccaaagaac

SEQ ID NO: 1954194 - RNA, 19 nt, Homo sapiens
  misc_RNA (1)...(19): siRNA sense strand
ggaggaaucccagaaagua

SEQ ID NO: 1954195 - RNA, 19 nt, Homo sapiens
  misc_RNA (1)...(19): siRNA sense strand
guacauuucuucaguccuu

SEQ ID NO: 1954196 - RNA, 19 nt, Homo sapiens
  misc_RNA (1)...(19): siRNA sense strand
uagaauggaucuuggagaa

SEQ ID NO: 1954197 - RNA, 19 nt, Homo sapiens
  misc_RNA (1)...(19): siRNA sense strand
cuaacuagcuguguacauu

SEQ ID NO: 1954198 - RNA, 19 nt, Homo sapiens
  misc_RNA (1)...(19): siRNA sense strand
cggcacaguucuagagaua

SEQ ID NO: 1954199 - RNA, 19 nt, Homo sapiens
  misc_RNA (1)...(19): siRNA sense strand
agucugcucugccuauuua

SEQ ID NO: 1954200 - RNA, 19 nt, Homo sapiens
  misc_RNA (1)...(19): siRNA sense strand
gagaagcagaggaaguuua

SEQ ID NO: 1954201 - RNA, 19 nt, Homo sapiens
  misc_RNA (1)...(19): siRNA sense strand
gaaagcacgggcaaagaaa

SEQ ID NO: 1954202 - RNA, 19 nt, Homo sapiens
  misc_RNA (1)...(19): siRNA sense strand
caccugggauuuauugaaa

SEQ ID NO: 1954203 - RNA, 19 nt, Homo sapiens
  misc_RNA (1)...(19): siRNA sense strand
caucugcagucauucauug

SEQ ID NO: 1954204 - RNA, 19 nt, Homo sapiens
  misc_RNA (1)...(19): siRNA sense strand
aaacugcaccugggauuua

SEQ ID NO: 1954205 - RNA, 19 nt, Homo sapiens
  misc_RNA (1)...(19): siRNA sense strand
gaaacgaagagaagagaga

SEQ ID NO: 1954206 - RNA, 19 nt, Homo sapiens
  misc_RNA (1)...(19): siRNA sense strand
uaagagagaagcuugaaga

SEQ ID NO: 1954207 - RNA, 19 nt, Homo sapiens
  misc_RNA (1)...(19): siRNA sense strand
agagauuagugcugaagua

SEQ ID NO: 1954208 - RNA, 19 nt, Homo sapiens
  misc_RNA (1)...(19): siRNA sense strand
gaagucugcucugccuauu

SEQ ID NO: 1954209 - RNA, 19 nt, Homo sapiens
  misc_RNA (1)...(19): siRNA sense strand
gaggaaguuuaucggaauu

SEQ ID NO: 1954210 - RNA, 19 nt, Homo sapiens
  misc_RNA (1)...(19): siRNA sense strand
aagagcggauuaugaaauu

SEQ ID NO: 1954211 - RNA, 19 nt, Homo sapiens
  misc_RNA (1)...(19): siRNA sense strand
gauaagaagcgguccuaug

SEQ ID NO: 1954212 - RNA, 19 nt, Homo sapiens
  misc_RNA (1)...(19): siRNA sense strand
gacaggaguucaagagaca

SEQ ID NO: 1954213 - RNA, 19 nt, Homo sapiens
  misc_RNA (1)...(19): siRNA sense strand
ugaaauugcauccaaagaa

SEQ ID NO: 1954214 - RNA, 19 nt, Homo sapiens
  misc_RNA (1)...(19): siRNA sense strand
gaaaagagaagcagaggaa

SEQ ID NO: 1954215 - RNA, 19 nt, Homo sapiens
  misc_RNA (1)...(19): siRNA sense strand
auaagaagcgguccuauga

SEQ ID NO: 1954216 - RNA, 19 nt, Homo sapiens
  misc_RNA (1)...(19): siRNA sense strand
auucagagaccaagacuua

SEQ ID NO: 1954217 - RNA, 19 nt, Homo sapiens
  misc_RNA (1)...(19): siRNA sense strand
gagaagagagagagagaga

SEQ ID NO: 1954218 - RNA, 19 nt, Homo sapiens
  misc_RNA (1)...(19): siRNA sense strand
uggaucaucugcagucauu

SEQ ID NO: 1954219 - RNA, 19 nt, Homo sapiens
  misc_RNA (1)...(19): siRNA sense strand
aagaagcgguccuaugaga

SEQ ID NO: 1954220 - RNA, 19 nt, Homo sapiens
  misc_RNA (1)...(19): siRNA sense strand
gcacaguucuagagauagg

SEQ ID NO: 1954221 - RNA, 19 nt, Homo sapiens
  misc_RNA (1)...(19): siRNA sense strand
gaagagagagagagagaag

SEQ ID NO: 1954222 - RNA, 19 nt, Homo sapiens
  misc_RNA (1)...(19): siRNA sense strand
gaaacucaagaagagauua

SEQ ID NO: 1954223 - RNA, 19 nt, Homo sapiens
  misc_RNA (1)...(19): siRNA sense strand
ggaacuagaauggaucuug

SEQ ID NO: 1954224 - RNA, 19 nt, Homo sapiens
  misc_RNA (1)...(19): siRNA sense strand
gaggaaucccagaaaguaa

SEQ ID NO: 1954225 - RNA, 19 nt, Homo sapiens
  misc_RNA (1)...(19): siRNA sense strand
gaugacagaguaugcaaga

SEQ ID NO: 1954226 - RNA, 19 nt, Homo sapiens
  misc_RNA (1)...(19): siRNA sense strand
uagcagaaacucaagaaga

SEQ ID NO: 1954227 - RNA, 19 nt, Homo sapiens
  misc_RNA (1)...(19): siRNA sense strand
gcaccugggauuuauugaa

SEQ ID NO: 1954228 - RNA, 19 nt, Homo sapiens
  misc_RNA (1)...(19): siRNA sense strand
acuaggagcugaagggaau

SEQ ID NO: 1954229 - RNA, 19 nt, Homo sapiens
  misc_RNA (1)...(19): siRNA sense strand
gaucuuggagaaugucuga

SEQ ID NO: 1954230 - RNA, 19 nt, Homo sapiens
  misc_RNA (1)...(19): siRNA sense strand
ggagaacucgauccaaauc

SEQ ID NO: 1954231 - RNA, 19 nt, Homo sapiens
  misc_RNA (1)...(19): siRNA sense strand
uaagagcggauuaugaaau

SEQ ID NO: 1954232 - RNA, 19 nt, Homo sapiens
  misc_RNA (1)...(19): siRNA sense strand
uaacuagcuguguacauuu

SEQ ID NO: 1954233 - RNA, 19 nt, Homo sapiens
  misc_RNA (1)...(19): siRNA sense strand
gcuaauggcagaucagaag

SEQ ID NO: 1954234 - RNA, 19 nt, Homo sapiens
  misc_RNA (1)...(19): siRNA sense strand
gaaguuuaucggaauucua

SEQ ID NO: 1954235 - RNA, 19 nt, Homo sapiens
  misc_RNA (1)...(19): siRNA sense strand
caugauguccuuucuggaa

SEQ ID NO: 1954236 - RNA, 19 nt, Homo sapiens
  misc_RNA (1)...(19): siRNA sense strand
gcagagaacgauccaagag

SEQ ID NO: 1954237 - RNA, 19 nt, Homo sapiens
  misc_RNA (1)...(19): siRNA sense strand
agaaagcacgggcaaagaa

SEQ ID NO: 1954238 - RNA, 19 nt, Homo sapiens
  misc_RNA (1)...(19): siRNA sense strand
guaaauuguuagccaaggu

SEQ ID NO: 1954239 - RNA, 19 nt, Homo sapiens
  misc_RNA (1)...(19): siRNA sense strand
gaucaucugcagucauuca

SEQ ID NO: 1954240 - RNA, 19 nt, Homo sapiens
  misc_RNA (1)...(19): siRNA sense strand
gaccaagacuuagcaucau

SEQ ID NO: 1954241 - RNA, 19 nt, Homo sapiens
  misc_RNA (1)...(19): siRNA sense strand
gcaagagucaccuucucaa

SEQ ID NO: 1954242 - RNA, 19 nt, Homo sapiens
  misc_RNA (1)...(19): siRNA sense strand
agaggaaguuuaucggaau

SEQ ID NO: 1954243 - RNA, 19 nt, Homo sapiens
  misc_RNA (1)...(19): siRNA sense strand
uuuaagagcggauuaugaa

SEQ ID NO: 1954244 - RNA, 19 nt, Homo sapiens
  misc_RNA (1)...(19): siRNA sense strand
gaagcgguccuaugagagu

SEQ ID NO: 1954245 - RNA, 19 nt, Homo sapiens
  misc_RNA (1)...(19): siRNA sense strand
acagacgacuggcugauca

SEQ ID NO: 1954246 - RNA, 19 nt, Homo sapiens
  misc_RNA (1)...(19): siRNA sense strand
gagaaagcacgggcaaaga

SEQ ID NO: 1954247 - RNA, 19 nt, Homo sapiens
  misc_RNA (1)...(19): siRNA sense strand
cccagaaaguaauggauga

SEQ ID NO: 1954248 - RNA, 19 nt, Homo sapiens
  misc_RNA (1)...(19): siRNA sense strand
agagucaccuucucaacug

SEQ ID NO: 1954249 - RNA, 19 nt, Homo sapiens
  misc_RNA (1)...(19): siRNA sense strand
gauaggagcagagaacgau

SEQ ID NO: 1954250 - RNA, 19 nt, Homo sapiens
  misc_RNA (1)...(19): siRNA sense strand
caagguggaacaacuagga

SEQ ID NO: 1954251 - RNA, 19 nt, Homo sapiens
  misc_RNA (1)...(19): siRNA sense strand
guaaacugcaccugggauu

SEQ ID NO: 1954252 - RNA, 19 nt, Homo sapiens
  misc_RNA (1)...(19): siRNA sense strand
ggaaguuuaucggaauucu

SEQ ID NO: 1954253 - RNA, 19 nt, Homo sapiens
  misc_RNA (1)...(19): siRNA sense strand
aguaauggaugaaguagag

SEQ ID NO: 1954254 - RNA, 19 nt, Homo sapiens
  misc_RNA (1)...(19): siRNA sense strand
agaaaguaauggaugaagu

SEQ ID NO: 1954255 - RNA, 19 nt, Homo sapiens
  misc_RNA (1)...(19): siRNA sense strand
auucagugaugacagagua

SEQ ID NO: 1954256 - RNA, 19 nt, Homo sapiens
  misc_RNA (1)...(19): siRNA sense strand
agaucuaacuagcugugua

SEQ ID NO: 1954257 - RNA, 19 nt, Homo sapiens
  misc_RNA (1)...(19): siRNA sense strand
cgaacaggcggagaucuaa

SEQ ID NO: 1954258 - RNA, 19 nt, Homo sapiens
  misc_RNA (1)...(19): siRNA sense strand
ccagagaagucggcacagu

SEQ ID NO: 1954259 - RNA, 19 nt, Homo sapiens
  misc_RNA (1)...(19): siRNA sense strand
ucacacagcaagaauccaa

SEQ ID NO: 1954260 - RNA, 19 nt, Homo sapiens
  misc_RNA (1)...(19): siRNA sense strand
agaauuaaagagagucgua

SEQ ID NO: 1954261 - RNA, 19 nt, Homo sapiens
  misc_RNA (1)...(19): siRNA sense strand
gcuugaagaauuaaagaga

SEQ ID NO: 1954262 - RNA, 19 nt, Homo sapiens
  misc_RNA (1)...(19): siRNA sense strand
ggagauacaacucgucaac

SEQ ID NO: 1954263 - RNA, 19 nt, Homo sapiens
  misc_RNA (1)...(19): siRNA sense strand
ugaagggaauguggaggaa

SEQ ID NO: 1954264 - RNA, 19 nt, Homo sapiens
  misc_RNA (1)...(19): siRNA sense strand
gaacaacuaggagcugaag

SEQ ID NO: 1954265 - RNA, 19 nt, Homo sapiens
  misc_RNA (1)...(19): siRNA sense strand
gaagcuugaagaauuaaag

SEQ ID NO: 1954266 - RNA, 19 nt, Homo sapiens
  misc_RNA (1)...(19): siRNA sense strand
gagaucggaaagauaagaa

SEQ ID NO: 1954267 - RNA, 19 nt, Homo sapiens
  misc_RNA (1)...(19): siRNA sense strand
agaccaagacuuagcauca

SEQ ID NO: 1954268 - RNA, 19 nt, Homo sapiens
  misc_RNA (1)...(19): siRNA sense strand
agagagagagagagaagaa

SEQ ID NO: 1954269 - RNA, 19 nt, Homo sapiens
  misc_RNA (1)...(19): siRNA sense strand
agucauucauugcagauug

SEQ ID NO: 1954270 - RNA, 19 nt, Homo sapiens
  misc_RNA (1)...(19): siRNA sense strand
gagacaggaguucaagaga

SEQ ID NO: 1954271 - RNA, 19 nt, Homo sapiens
  misc_RNA (1)...(19): siRNA sense strand
cagagaagucggcacaguu

SEQ ID NO: 1954272 - RNA, 19 nt, Homo sapiens
  misc_RNA (1)...(19): siRNA sense strand
gaacgcaagaggagaacuc

SEQ ID NO: 1954273 - RNA, 19 nt, Homo sapiens
  misc_RNA (1)...(19): siRNA sense strand
caggaacggcugaaacgaa

SEQ ID NO: 1954274 - RNA, 19 nt, Homo sapiens
  misc_RNA (1)...(19): siRNA sense strand
gcagaaacucaagaagaga

SEQ ID NO: 1954275 - RNA, 19 nt, Homo sapiens
  misc_RNA (1)...(19): siRNA sense strand
ccgaacaggcggagaucua

SEQ ID NO: 1954276 - RNA, 19 nt, Homo sapiens
  misc_RNA (1)...(19): siRNA sense strand
gaagucggcacaguucuag

SEQ ID NO: 1954277 - RNA, 19 nt, Homo sapiens
  misc_RNA (1)...(19): siRNA sense strand
gauguccuuucuggaacua

SEQ ID NO: 1954278 - RNA, 19 nt, Homo sapiens
  misc_RNA (1)...(19): siRNA sense strand
gagaagaaagggagaagcu

SEQ ID NO: 1954279 - RNA, 19 nt, Homo sapiens
  misc_RNA (1)...(19): siRNA sense strand
cagcagaaacuucgagucu

SEQ ID NO: 1954280 - RNA, 19 nt, Homo sapiens
  misc_RNA (1)...(19): siRNA sense strand
agaagcagaggaaguuuau

SEQ ID NO: 1954281 - RNA, 19 nt, Homo sapiens
  misc_RNA (1)...(19): siRNA sense strand
ggaaucccagaaaguaaug

SEQ ID NO: 1954282 - RNA, 19 nt, Homo sapiens
  misc_RNA (1)...(19): siRNA sense strand
gcagauugugaucguagaa

SEQ ID NO: 1954283 - RNA, 19 nt, Homo sapiens
  misc_RNA (1)...(19): siRNA sense strand
ugacagaguaugcaagagu

SEQ ID NO: 1954284 - RNA, 19 nt, Homo sapiens
  misc_RNA (1)...(19): siRNA sense strand
gacgacuggcugaucauuu

SEQ ID NO: 1954285 - RNA, 19 nt, Homo sapiens
  misc_RNA (1)...(19): siRNA sense strand
guccaugaccuggcuuuaa

SEQ ID NO: 1954286 - RNA, 19 nt, Homo sapiens
  misc_RNA (1)...(19): siRNA sense strand
gaacagaccugcucuuucu

SEQ ID NO: 1954287 - RNA, 19 nt, Homo sapiens
  misc_RNA (1)...(19): siRNA sense strand
ggaaggaggcuacaacuua

SEQ ID NO: 1954288 - RNA, 19 nt, Homo sapiens
  misc_RNA (1)...(19): siRNA sense strand
ggaaagaagugaagaaugg

SEQ ID NO: 1954289 - RNA, 19 nt, Homo sapiens
  misc_RNA (1)...(19): siRNA sense strand
gaacaagaaagcacaauaa

SEQ ID NO: 1954290 - RNA, 19 nt, Homo sapiens
  misc_RNA (1)...(19): siRNA sense strand
caucaugcuucuauguuua

SEQ ID NO: 1954291 - RNA, 19 nt, Homo sapiens
  misc_RNA (1)...(19): siRNA sense strand
gaagaaagauaugcaagag

SEQ ID NO: 1954292 - RNA, 19 nt, Homo sapiens
  misc_RNA (1)...(19): siRNA sense strand
caaauggagugaugaacaa

SEQ ID NO: 1954293 - RNA, 19 nt, Homo sapiens
  misc_RNA (1)...(19): siRNA sense strand
ccagucaucuuauaugcua

SEQ ID NO: 1954294 - RNA, 19 nt, Homo sapiens
  misc_RNA (1)...(19): siRNA sense strand
caucuuauaugcuaacguu

SEQ ID NO: 1954295 - RNA, 19 nt, Homo sapiens
  misc_RNA (1)...(19): siRNA sense strand
gaaggaggcuacaacuuac

SEQ ID NO: 1954296 - RNA, 19 nt, Homo sapiens
  misc_RNA (1)...(19): siRNA sense strand
caauauggcuggguaacaa

SEQ ID NO: 1954297 - RNA, 19 nt, Homo sapiens
  misc_RNA (1)...(19): siRNA sense strand
gguaacaaguauaugaaga

SEQ ID NO: 1954298 - RNA, 19 nt, Homo sapiens
  misc_RNA (1)...(19): siRNA sense strand
acaaguaucuuugguggaa

SEQ ID NO: 1954299 - RNA, 19 nt, Homo sapiens
  misc_RNA (1)...(19): siRNA sense strand
aaacgagucagauuacuuu

SEQ ID NO: 1954300 - RNA, 19 nt, Homo sapiens
  misc_RNA (1)...(19): siRNA sense strand
gcaaauggagugaugaaca

SEQ ID NO: 1954301 - RNA, 19 nt, Homo sapiens
  misc_RNA (1)...(19): siRNA sense strand
cuacuucacugcagcaaau

SEQ ID NO: 1954302 - RNA, 19 nt, Homo sapiens
  misc_RNA (1)...(19): siRNA sense strand
ucauguaucugcucucaau

SEQ ID NO: 1954303 - RNA, 19 nt, Homo sapiens
  misc_RNA (1)...(19): siRNA sense strand
gucauccucuucuuaaauu

SEQ ID NO: 1954304 - RNA, 19 nt, Homo sapiens
  misc_RNA (1)...(19): siRNA sense strand
ucaucaugcuucuauguuu

SEQ ID NO: 1954305 - RNA, 19 nt, Homo sapiens
  misc_RNA (1)...(19): siRNA sense strand
caacuuacagugucaagau

SEQ ID NO: 1954306 - RNA, 19 nt, Homo sapiens
  misc_RNA (1)...(19): siRNA sense strand
caugagcgccgucgugaaa

SEQ ID NO: 1954307 - RNA, 19 nt, Homo sapiens
  misc_RNA (1)...(19): siRNA sense strand
cuauggacuuucuguguuu

SEQ ID NO: 1954308 - RNA, 19 nt, Homo sapiens
  misc_RNA (1)...(19): siRNA sense strand
ggacacaauuuucuucguu

SEQ ID NO: 1954309 - RNA, 19 nt, Homo sapiens
  misc_RNA (1)...(19): siRNA sense strand
ugaacaagaaagcacaaua

SEQ ID NO: 1954310 - RNA, 19 nt, Homo sapiens
  misc_RNA (1)...(19): siRNA sense strand
acaaguauaugaagaacag

SEQ ID NO: 1954311 - RNA, 19 nt, Homo sapiens
  misc_RNA (1)...(19): siRNA sense strand
guuagucauccucuucuua

SEQ ID NO: 1954312 - RNA, 19 nt, Homo sapiens
  misc_RNA (1)...(19): siRNA sense strand
gagggugguucauguugga

SEQ ID NO: 1954313 - RNA, 19 nt, Homo sapiens
  misc_RNA (1)...(19): siRNA sense strand
ggaagaaauaucucacaca

SEQ ID NO: 1954314 - RNA, 19 nt, Homo sapiens
  misc_RNA (1)...(19): siRNA sense strand
ggccuuugaugaugaaauc

SEQ ID NO: 1954315 - RNA, 19 nt, Homo sapiens
  misc_RNA (1)...(19): siRNA sense strand
acucuuaccuuccuaccuu

SEQ ID NO: 1954316 - RNA, 19 nt, Homo sapiens
  misc_RNA (1)...(19): siRNA sense strand
gugcuuuggugguacuauu

SEQ ID NO: 1954317 - RNA, 19 nt, Homo sapiens
  misc_RNA (1)...(19): siRNA sense strand
ugaagaaagauaugcaaga

SEQ ID NO: 1954318 - RNA, 19 nt, Homo sapiens
  misc_RNA (1)...(19): siRNA sense strand
uuccaucuaugcacaagua

SEQ ID NO: 1954319 - RNA, 19 nt, Homo sapiens
  misc_RNA (1)...(19): siRNA sense strand
gaacaguuuuauccacauu

SEQ ID NO: 1954320 - RNA, 19 nt, Homo sapiens
  misc_RNA (1)...(19): siRNA sense strand
gugguacuauuucuccaaa

SEQ ID NO: 1954321 - RNA, 19 nt, Homo sapiens
  misc_RNA (1)...(19): siRNA sense strand
gguucauguuggacucuua

SEQ ID NO: 1954322 - RNA, 19 nt, Homo sapiens
  misc_RNA (1)...(19): siRNA sense strand
gguauccucaccuuguaua

SEQ ID NO: 1954323 - RNA, 19 nt, Homo sapiens
  misc_RNA (1)...(19): siRNA sense strand
aggcucagcuggugcaguu

SEQ ID NO: 1954324 - RNA, 19 nt, Homo sapiens
  misc_RNA (1)...(19): siRNA sense strand
uuagucauccucuucuuaa

SEQ ID NO: 1954325 - RNA, 19 nt, Homo sapiens
  misc_RNA (1)...(19): siRNA sense strand
uagaguuccuggacacaau

SEQ ID NO: 1954326 - RNA, 19 nt, Homo sapiens
  misc_RNA (1)...(19): siRNA sense strand
gggaaagaagugaagaaug

SEQ ID NO: 1954327 - RNA, 19 nt, Homo sapiens
  misc_RNA (1)...(19): siRNA sense strand
uaacguuagucauccucuu

SEQ ID NO: 1954328 - RNA, 19 nt, Homo sapiens
  misc_RNA (1)...(19): siRNA sense strand
gcuacaacuuacaguguca

SEQ ID NO: 1954329 - RNA, 19 nt, Homo sapiens
  misc_RNA (1)...(19): siRNA sense strand
gguggugugucuugaacug

SEQ ID NO: 1954330 - RNA, 19 nt, Homo sapiens
  misc_RNA (1)...(19): siRNA sense strand
gucagagggugguucaugu

SEQ ID NO: 1954331 - RNA, 19 nt, Homo sapiens
  misc_RNA (1)...(19): siRNA sense strand
acuauggacuuucuguguu

SEQ ID NO: 1954332 - RNA, 19 nt, Homo sapiens
  misc_RNA (1)...(19): siRNA sense strand
uguaucugcucucaauaug

SEQ ID NO: 1954333 - RNA, 19 nt, Homo sapiens
  misc_RNA (1)...(19): siRNA sense strand
gucuugaacuggauaccuu

SEQ ID NO: 1954334 - RNA, 19 nt, Homo sapiens
  misc_RNA (1)...(19): siRNA sense strand
agagccaccugcagggaaa

SEQ ID NO: 1954335 - RNA, 19 nt, Homo sapiens
  misc_RNA (1)...(19): siRNA sense strand
guauaaucuuggaaucaca

SEQ ID NO: 1954336 - RNA, 19 nt, Homo sapiens
  misc_RNA (1)...(19): siRNA sense strand
cagcaaauggagugaugaa

SEQ ID NO: 1954337 - RNA, 19 nt, Homo sapiens
  misc_RNA (1)...(19): siRNA sense strand
gggaaggaggcuacaacuu

SEQ ID NO: 1954338 - RNA, 19 nt, Homo sapiens
  misc_RNA (1)...(19): siRNA sense strand
gacacaauuuucuucguuu

SEQ ID NO: 1954339 - RNA, 19 nt, Homo sapiens
  misc_RNA (1)...(19): siRNA sense strand
ggagugaugaacaagaaag

SEQ ID NO: 1954340 - RNA, 19 nt, Homo sapiens
  misc_RNA (1)...(19): siRNA sense strand
ugucauguaucugcucuca

SEQ ID NO: 1954341 - RNA, 19 nt, Homo sapiens
  misc_RNA (1)...(19): siRNA sense strand
gaaagaagugaagaauggu

SEQ ID NO: 1954342 - RNA, 19 nt, Homo sapiens
  misc_RNA (1)...(19): siRNA sense strand
aaaagccaaugaagaaaga

SEQ ID NO: 1954343 - RNA, 19 nt, Homo sapiens
  misc_RNA (1)...(19): siRNA sense strand
guacuccuacuauggacuu

SEQ ID NO: 1954344 - RNA, 19 nt, Homo sapiens
  misc_RNA (1)...(19): siRNA sense strand
caccuuguauaaucuugga

SEQ ID NO: 1954345 - RNA, 19 nt, Homo sapiens
  misc_RNA (1)...(19): siRNA sense strand
aagaagugaagaaugguuu

SEQ ID NO: 1954346 - RNA, 19 nt, Homo sapiens
  misc_RNA (1)...(19): siRNA sense strand
ucuaugcacaaguaucuuu

SEQ ID NO: 1954347 - RNA, 19 nt, Homo sapiens
  misc_RNA (1)...(19): siRNA sense strand
caucuaugcacaaguaucu

SEQ ID NO: 1954348 - RNA, 19 nt, Homo sapiens
  misc_RNA (1)...(19): siRNA sense strand
cagauuacuuuucuucaug

SEQ ID NO: 1954349 - RNA, 19 nt, Homo sapiens
  misc_RNA (1)...(19): siRNA sense strand
gagcucauucucuccacuu

SEQ ID NO: 1954350 - RNA, 19 nt, Homo sapiens
  misc_RNA (1)...(19): siRNA sense strand
cuuauguacuccuacuaug

SEQ ID NO: 1954351 - RNA, 19 nt, Homo sapiens
  misc_RNA (1)...(19): siRNA sense strand
uagucauccucuucuuaaa

SEQ ID NO: 1954352 - RNA, 19 nt, Homo sapiens
  misc_RNA (1)...(19): siRNA sense strand
uuacagugucaagaucuua

SEQ ID NO: 1954353 - RNA, 19 nt, Homo sapiens
  misc_RNA (1)...(19): siRNA sense strand
gaugaacaagaaagcacaa

SEQ ID NO: 1954354 - RNA, 19 nt, Homo sapiens
  misc_RNA (1)...(19): siRNA sense strand
auggagugaugaacaagaa

SEQ ID NO: 1954355 - RNA, 19 nt, Homo sapiens
  misc_RNA (1)...(19): siRNA sense strand
cauguuggacucuuaccuu

SEQ ID NO: 1954356 - RNA, 19 nt, Homo sapiens
  misc_RNA (1)...(19): siRNA sense strand
ccaaaucaguagaguuccu

SEQ ID NO: 1954357 - RNA, 19 nt, Homo sapiens
  misc_RNA (1)...(19): siRNA sense strand
uaucaucaugcuucuaugu

SEQ ID NO: 1954358 - RNA, 19 nt, Homo sapiens
  misc_RNA (1)...(19): siRNA sense strand
cagagggugguucauguug

SEQ ID NO: 1954359 - RNA, 19 nt, Homo sapiens
  misc_RNA (1)...(19): siRNA sense strand
gcagggaaagaagugaaga

SEQ ID NO: 1954360 - RNA, 19 nt, Homo sapiens
  misc_RNA (1)...(19): siRNA sense strand
uauguacuccuacuaugga

SEQ ID NO: 1954361 - RNA, 19 nt, Homo sapiens
  misc_RNA (1)...(19): siRNA sense strand
caucugguggugugucuug

SEQ ID NO: 1954362 - RNA, 19 nt, Homo sapiens
  misc_RNA (1)...(19): siRNA sense strand
cuggguaacaaguauauga

SEQ ID NO: 1954363 - RNA, 19 nt, Homo sapiens
  misc_RNA (1)...(19): siRNA sense strand
aaagaagugaagaaugguu

SEQ ID NO: 1954364 - RNA, 19 nt, Homo sapiens
  misc_RNA (1)...(19): siRNA sense strand
ucaucuuccagucaucuua

SEQ ID NO: 1954365 - RNA, 19 nt, Homo sapiens
  misc_RNA (1)...(19): siRNA sense strand
cuuggaaucacacuucuau

SEQ ID NO: 1954366 - RNA, 19 nt, Homo sapiens
  misc_RNA (1)...(19): siRNA sense strand
gcagcaaauggagugauga

SEQ ID NO: 1954367 - RNA, 19 nt, Homo sapiens
  misc_RNA (1)...(19): siRNA sense strand
ugcagcaaauggagugaug

SEQ ID NO: 1954368 - RNA, 19 nt, Homo sapiens
  misc_RNA (1)...(19): siRNA sense strand
caaugaagaaagauaugca

SEQ ID NO: 1954369 - RNA, 19 nt, Homo sapiens
  misc_RNA (1)...(19): siRNA sense strand
aagccaaugaagaaagaua

SEQ ID NO: 1954370 - RNA, 19 nt, Homo sapiens
  misc_RNA (1)...(19): siRNA sense strand
caucuuccagucaucuuau

SEQ ID NO: 1954371 - RNA, 19 nt, Homo sapiens
  misc_RNA (1)...(19): siRNA sense strand
ugucucaucuuccagucau

SEQ ID NO: 1954372 - RNA, 19 nt, Homo sapiens
  misc_RNA (1)...(19): siRNA sense strand
ucagagggugguucauguu

SEQ ID NO: 1954373 - RNA, 19 nt, Homo sapiens
  misc_RNA (1)...(19): siRNA sense strand
gggguauccucaccuugua

SEQ ID NO: 1954374 - RNA, 19 nt, Homo sapiens
  misc_RNA (1)...(19): siRNA sense strand
cuccaaaucaguagaguuc

SEQ ID NO: 1954375 - RNA, 19 nt, Homo sapiens
  misc_RNA (1)...(19): siRNA sense strand
guagaguuccuggacacaa

SEQ ID NO: 1954376 - RNA, 19 nt, Homo sapiens
  misc_RNA (1)...(19): siRNA sense strand
cagggaaagaagugaagaa

SEQ ID NO: 1954377 - RNA, 19 nt, Homo sapiens
  misc_RNA (1)...(19): siRNA sense strand
uuucuguguuuccaucuau

SEQ ID NO: 1954378 - RNA, 19 nt, Homo sapiens
  misc_RNA (1)...(19): siRNA sense strand
auccucaccuuguauaauc

SEQ ID NO: 1954379 - RNA, 19 nt, Homo sapiens
  misc_RNA (1)...(19): siRNA sense strand
cgagucagauuacuuuucu

SEQ ID NO: 1954380 - RNA, 19 nt, Homo sapiens
  misc_RNA (1)...(19): siRNA sense strand
aaucuuggaaucacacuuc

SEQ ID NO: 1954381 - RNA, 19 nt, Homo sapiens
  misc_RNA (1)...(19): siRNA sense strand
gagaagagaugucaaauga

SEQ ID NO: 1954382 - RNA, 19 nt, Homo sapiens
  misc_RNA (1)...(19): siRNA sense strand
caaaugaggacuccaguga

SEQ ID NO: 1954383 - RNA, 19 nt, Homo sapiens
  misc_RNA (1)...(19): siRNA sense strand
agacaugagucgaggagua

SEQ ID NO: 1954384 - RNA, 19 nt, Homo sapiens
  misc_RNA (1)...(19): siRNA sense strand
gaugagggcuguggagaug

SEQ ID NO: 1954385 - RNA, 19 nt, Homo sapiens
  misc_RNA (1)...(19): siRNA sense strand
ggacuccagugacuaugaa

SEQ ID NO: 1954386 - RNA, 19 nt, Homo sapiens
  misc_RNA (1)...(19): siRNA sense strand
gcgcaagcguuucuucaga

SEQ ID NO: 1954387 - RNA, 19 nt, Homo sapiens
  misc_RNA (1)...(19): siRNA sense strand
ggaguuuacugaggaaaga

SEQ ID NO: 1954388 - RNA, 19 nt, Homo sapiens
  misc_RNA (1)...(19): siRNA sense strand
gacucuagcuucuaccaaa

SEQ ID NO: 1954389 - RNA, 19 nt, Homo sapiens
  misc_RNA (1)...(19): siRNA sense strand
gaugaaacauagagaagag

SEQ ID NO: 1954390 - RNA, 19 nt, Homo sapiens
  misc_RNA (1)...(19): siRNA sense strand
cuucucagaucucaaauga

SEQ ID NO: 1954391 - RNA, 19 nt, Homo sapiens
  misc_RNA (1)...(19): siRNA sense strand
gcuccuuccugaugaauga

SEQ ID NO: 1954392 - RNA, 19 nt, Homo sapiens
  misc_RNA (1)...(19): siRNA sense strand
cagaggauucgcaugauua

SEQ ID NO: 1954393 - RNA, 19 nt, Homo sapiens
  misc_RNA (1)...(19): siRNA sense strand
gaucucaaaugacuauguc

SEQ ID NO: 1954394 - RNA, 19 nt, Homo sapiens
  misc_RNA (1)...(19): siRNA sense strand
caaaagcccuuccagaaau

SEQ ID NO: 1954395 - RNA, 19 nt, Homo sapiens
  misc_RNA (1)...(19): siRNA sense strand
ucagaggauucgcaugauu

SEQ ID NO: 1954396 - RNA, 19 nt, Homo sapiens
  misc_RNA (1)...(19): siRNA sense strand
gcacacugcaucaauguca

SEQ ID NO: 1954397 - RNA, 19 nt, Homo sapiens
  misc_RNA (1)...(19): siRNA sense strand
ccacaaaccagacaaagag

SEQ ID NO: 1954398 - RNA, 19 nt, Homo sapiens
  misc_RNA (1)...(19): siRNA sense strand
acagucagaugaaacauag

SEQ ID NO: 1954399 - RNA, 19 nt, Homo sapiens
  misc_RNA (1)...(19): siRNA sense strand
ucucagaucucaaaugacu

SEQ ID NO: 1954400 - RNA, 19 nt, Homo sapiens
  misc_RNA (1)...(19): siRNA sense strand
gacagucagaugaaacaua

SEQ ID NO: 1954401 - RNA, 19 nt, Homo sapiens
  misc_RNA (1)...(19): siRNA sense strand
gcauacagcccacauccau

SEQ ID NO: 1954402 - RNA, 19 nt, Homo sapiens
  misc_RNA (1)...(19): siRNA sense strand
guucuucucagaucucaaa

SEQ ID NO: 1954403 - RNA, 19 nt, Homo sapiens
  misc_RNA (1)...(19): siRNA sense strand
ugaggacagucagaugaaa

SEQ ID NO: 1954404 - RNA, 19 nt, Homo sapiens
  misc_RNA (1)...(19): siRNA sense strand
uuccagaaaucucuuuguu

SEQ ID NO: 1954405 - RNA, 19 nt, Homo sapiens
  misc_RNA (1)...(19): siRNA sense strand
gagcugaggacagugauuc

SEQ ID NO: 1954406 - RNA, 19 nt, Homo sapiens
  misc_RNA (1)...(19): siRNA sense strand
gaaacauagagaagagaug

SEQ ID NO: 1954407 - RNA, 19 nt, Homo sapiens
  misc_RNA (1)...(19): siRNA sense strand
gggauuaugcagacuuuca

SEQ ID NO: 1954408 - RNA, 19 nt, Homo sapiens
  misc_RNA (1)...(19): siRNA sense strand
cuucagaggauucgcauga

SEQ ID NO: 1954409 - RNA, 19 nt, Homo sapiens
  misc_RNA (1)...(19): siRNA sense strand
ucagaucucaaaugacuau

SEQ ID NO: 1954410 - RNA, 19 nt, Homo sapiens
  misc_RNA (1)...(19): siRNA sense strand
gcaugauuaugucaauguc

SEQ ID NO: 1954411 - RNA, 19 nt, Homo sapiens
  misc_RNA (1)...(19): siRNA sense strand
ccaaaagcccuuccagaaa

SEQ ID NO: 1954412 - RNA, 19 nt, Homo sapiens
  misc_RNA (1)...(19): siRNA sense strand
ggauucgcaugauuauguc

SEQ ID NO: 1954413 - RNA, 19 nt, Homo sapiens
  misc_RNA (1)...(19): siRNA sense strand
gccacaaaccagacaaaga

SEQ ID NO: 1954414 - RNA, 19 nt, Homo sapiens
  misc_RNA (1)...(19): siRNA sense strand
uuucagccauucacacaga

SEQ ID NO: 1954415 - RNA, 19 nt, Homo sapiens
  misc_RNA (1)...(19): siRNA sense strand
gacaugagucgaggaguau

SEQ ID NO: 1954416 - RNA, 19 nt, Homo sapiens
  misc_RNA (1)...(19): siRNA sense strand
ucagaugaaacauagagaa

SEQ ID NO: 1954417 - RNA, 19 nt, Homo sapiens
  misc_RNA (1)...(19): siRNA sense strand
gcagaagagauugcugaga

SEQ ID NO: 1954418 - RNA, 19 nt, Homo sapiens
  misc_RNA (1)...(19): siRNA sense strand
auagagaagagaugucaaa

SEQ ID NO: 1954419 - RNA, 19 nt, Homo sapiens
  misc_RNA (1)...(19): siRNA sense strand
gcaugugcccucccaagca

SEQ ID NO: 1954420 - RNA, 19 nt, Homo sapiens
  misc_RNA (1)...(19): siRNA sense strand
agccuccucuccagaaauu

SEQ ID NO: 1954421 - RNA, 19 nt, Homo sapiens
  misc_RNA (1)...(19): siRNA sense strand
gugccauccucaaacauag

SEQ ID NO: 1954422 - RNA, 19 nt, Homo sapiens
  misc_RNA (1)...(19): siRNA sense strand
ucagugccauccaggaaag

SEQ ID NO: 1954423 - RNA, 19 nt, Homo sapiens
  misc_RNA (1)...(19): siRNA sense strand
gcuggaguuuacugaggaa

SEQ ID NO: 1954424 - RNA, 19 nt, Homo sapiens
  misc_RNA (1)...(19): siRNA sense strand
agagaagagaugucaaaug

SEQ ID NO: 1954425 - RNA, 19 nt, Homo sapiens
  misc_RNA (1)...(19): siRNA sense strand
aggauucgcaugauuaugu

SEQ ID NO: 1954426 - RNA, 19 nt, Homo sapiens
  misc_RNA (1)...(19): siRNA sense strand
ugaggacuccagugacuau

SEQ ID NO: 1954427 - RNA, 19 nt, Homo sapiens
  misc_RNA (1)...(19): siRNA sense strand
augcagacuuucagccauu

SEQ ID NO: 1954428 - RNA, 19 nt, Homo sapiens
  misc_RNA (1)...(19): siRNA sense strand
ucgaggaguaugcgcauuu

SEQ ID NO: 1954429 - RNA, 19 nt, Homo sapiens
  misc_RNA (1)...(19): siRNA sense strand
aagcguuucuucagaggau

SEQ ID NO: 1954430 - RNA, 19 nt, Homo sapiens
  misc_RNA (1)...(19): siRNA sense strand
aaugaggacuccagugacu

SEQ ID NO: 1954431 - RNA, 19 nt, Homo sapiens
  misc_RNA (1)...(19): siRNA sense strand
gugaggacagucagaugaa

SEQ ID NO: 1954432 - RNA, 19 nt, Homo sapiens
  misc_RNA (1)...(19): siRNA sense strand
ugugccauccucaaacaua

SEQ ID NO: 1954433 - RNA, 19 nt, Homo sapiens
  misc_RNA (1)...(19): siRNA sense strand
gcugagacucuagcuucua

SEQ ID NO: 1954434 - RNA, 19 nt, Homo sapiens
  misc_RNA (1)...(19): siRNA sense strand
cagagacuaugaaaauguu

SEQ ID NO: 1954435 - RNA, 19 nt, Homo sapiens
  misc_RNA (1)...(19): siRNA sense strand
acucagcaauggagaaggu

SEQ ID NO: 1954436 - RNA, 19 nt, Homo sapiens
  misc_RNA (1)...(19): siRNA sense strand
cagaugaaacauagagaag

SEQ ID NO: 1954437 - RNA, 19 nt, Homo sapiens
  misc_RNA (1)...(19): siRNA sense strand
gcagagacuaugaaaaugu

SEQ ID NO: 1954438 - RNA, 19 nt, Homo sapiens
  misc_RNA (1)...(19): siRNA sense strand
ucggcacacugcaucaaug

SEQ ID NO: 1954439 - RNA, 19 nt, Homo sapiens
  misc_RNA (1)...(19): siRNA sense strand
ucgaggacaagacagauga

SEQ ID NO: 1954440 - RNA, 19 nt, Homo sapiens
  misc_RNA (1)...(19): siRNA sense strand
uccaggagcugaggacagu

SEQ ID NO: 1954441 - RNA, 19 nt, Homo sapiens
  misc_RNA (1)...(19): siRNA sense strand
caggagcugaggacaguga

SEQ ID NO: 1954442 - RNA, 19 nt, Homo sapiens
  misc_RNA (1)...(19): siRNA sense strand
gagugaggacagucagaug

SEQ ID NO: 1954443 - RNA, 19 nt, Homo sapiens
  misc_RNA (1)...(19): siRNA sense strand
ccauguccaaugugucaaa

SEQ ID NO: 1954444 - RNA, 19 nt, Homo sapiens
  misc_RNA (1)...(19): siRNA sense strand
gcagcagaucccaguggaa

SEQ ID NO: 1954445 - RNA, 19 nt, Homo sapiens
  misc_RNA (1)...(19): siRNA sense strand
gcagauagaucguguggua

SEQ ID NO: 1954446 - RNA, 19 nt, Homo sapiens
  misc_RNA (1)...(19): siRNA sense strand
gaggaaauuuggccaguua

SEQ ID NO: 1954447 - RNA, 19 nt, Homo sapiens
  misc_RNA (1)...(19): siRNA sense strand
gaaacugguugaagugauu

SEQ ID NO: 1954448 - RNA, 19 nt, Homo sapiens
  misc_RNA (1)...(19): siRNA sense strand
acaaaggacuucagaaaug

SEQ ID NO: 1954449 - RNA, 19 nt, Homo sapiens
  misc_RNA (1)...(19): siRNA sense strand
gaagaccacuuuagaaacu

SEQ ID NO: 1954450 - RNA, 19 nt, Homo sapiens
  misc_RNA (1)...(19): siRNA sense strand
ugacaaauccgcccuauau

SEQ ID NO: 1954451 - RNA, 19 nt, Homo sapiens
  misc_RNA (1)...(19): siRNA sense strand
gaaaugggcuugggaacca

SEQ ID NO: 1954452 - RNA, 19 nt, Homo sapiens
  misc_RNA (1)...(19): siRNA sense strand
ggaagaauccacugauaga

SEQ ID NO: 1954453 - RNA, 19 nt, Homo sapiens
  misc_RNA (1)...(19): siRNA sense strand
gccaguaucugaugccaaa

SEQ ID NO: 1954454 - RNA, 19 nt, Homo sapiens
  misc_RNA (1)...(19): siRNA sense strand
uaggaagaauccacugaua

SEQ ID NO: 1954455 - RNA, 19 nt, Homo sapiens
  misc_RNA (1)...(19): siRNA sense strand
caagauuggugaaagacaa

SEQ ID NO: 1954456 - RNA, 19 nt, Homo sapiens
  misc_RNA (1)...(19): siRNA sense strand
ugacaaaggacuucagaaa

SEQ ID NO: 1954457 - RNA, 19 nt, Homo sapiens
  misc_RNA (1)...(19): siRNA sense strand
gagaaacagaucaggauuu

SEQ ID NO: 1954458 - RNA, 19 nt, Homo sapiens
  misc_RNA (1)...(19): siRNA sense strand
ucccaagccuguuuauuaa

SEQ ID NO: 1954459 - RNA, 19 nt, Homo sapiens
  misc_RNA (1)...(19): siRNA sense strand
gcacauaccaguccagucu

SEQ ID NO: 1954460 - RNA, 19 nt, Homo sapiens
  misc_RNA (1)...(19): siRNA sense strand
cagugaaacuuguugaaga

SEQ ID NO: 1954461 - RNA, 19 nt, Homo sapiens
  misc_RNA (1)...(19): siRNA sense strand
gaaguggacaucuaugaau

SEQ ID NO: 1954462 - RNA, 19 nt, Homo sapiens
  misc_RNA (1)...(19): siRNA sense strand
ugaaacuuguugaagagua

SEQ ID NO: 1954463 - RNA, 19 nt, Homo sapiens
  misc_RNA (1)...(19): siRNA sense strand
ccaguuauccaauugauga

SEQ ID NO: 1954464 - RNA, 19 nt, Homo sapiens
  misc_RNA (1)...(19): siRNA sense strand
gugauacacuacuggauga

SEQ ID NO: 1954465 - RNA, 19 nt, Homo sapiens
  misc_RNA (1)...(19): siRNA sense strand
guagauagagccaaacaau

SEQ ID NO: 1954466 - RNA, 19 nt, Homo sapiens
  misc_RNA (1)...(19): siRNA sense strand
gaaacuuguugaagaguac

SEQ ID NO: 1954467 - RNA, 19 nt, Homo sapiens
  misc_RNA (1)...(19): siRNA sense strand
caaauucccaagccuguuu

SEQ ID NO: 1954468 - RNA, 19 nt, Homo sapiens
  misc_RNA (1)...(19): siRNA sense strand
uccaauugaugaacuagua

SEQ ID NO: 1954469 - RNA, 19 nt, Homo sapiens
  misc_RNA (1)...(19): siRNA sense strand
ggaaacugguugaagugau

SEQ ID NO: 1954470 - RNA, 19 nt, Homo sapiens
  misc_RNA (1)...(19): siRNA sense strand
ucgaagauaucgugucuca

SEQ ID NO: 1954471 - RNA, 19 nt, Homo sapiens
  misc_RNA (1)...(19): siRNA sense strand
caaaggacuucagaaaugg

SEQ ID NO: 1954472 - RNA, 19 nt, Homo sapiens
  misc_RNA (1)...(19): siRNA sense strand
gacaaaggacuucagaaau

SEQ ID NO: 1954473 - RNA, 19 nt, Homo sapiens
  misc_RNA (1)...(19): siRNA sense strand
gaagaauccacugauagaa

SEQ ID NO: 1954474 - RNA, 19 nt, Homo sapiens
  misc_RNA (1)...(19): siRNA sense strand
uagagcaucuggaggaaau

SEQ ID NO: 1954475 - RNA, 19 nt, Homo sapiens
  misc_RNA (1)...(19): siRNA sense strand
agaauccacugauagaaau

SEQ ID NO: 1954476 - RNA, 19 nt, Homo sapiens
  misc_RNA (1)...(19): siRNA sense strand
caagauaggcauuuuguaa

SEQ ID NO: 1954477 - RNA, 19 nt, Homo sapiens
  misc_RNA (1)...(19): siRNA sense strand
ccacaccucugcugcaucu

SEQ ID NO: 1954478 - RNA, 19 nt, Homo sapiens
  misc_RNA (1)...(19): siRNA sense strand
uucccaagccuguuuauua

SEQ ID NO: 1954479 - RNA, 19 nt, Homo sapiens
  misc_RNA (1)...(19): siRNA sense strand
ggagaaacagaucaggauu

SEQ ID NO: 1954480 - RNA, 19 nt, Homo sapiens
  misc_RNA (1)...(19): siRNA sense strand
caucgaagauaucgugucu

SEQ ID NO: 1954481 - RNA, 19 nt, Homo sapiens
  misc_RNA (1)...(19): siRNA sense strand
gcugaagaccacuuuagaa

SEQ ID NO: 1954482 - RNA, 19 nt, Homo sapiens
  misc_RNA (1)...(19): siRNA sense strand
gauagaucgugugguagaa

SEQ ID NO: 1954483 - RNA, 19 nt, Homo sapiens
  misc_RNA (1)...(19): siRNA sense strand
gauuggauuugccgaagau

SEQ ID NO: 1954484 - RNA, 19 nt, Homo sapiens
  misc_RNA (1)...(19): siRNA sense strand
gaaagggcagccaguaucu

SEQ ID NO: 1954485 - RNA, 19 nt, Homo sapiens
  misc_RNA (1)...(19): siRNA sense strand
ggugaaagacaacaagugu

SEQ ID NO: 1954486 - RNA, 19 nt, Homo sapiens
  misc_RNA (1)...(19): siRNA sense strand
agaggguguuugugagaua

SEQ ID NO: 1954487 - RNA, 19 nt, Homo sapiens
  misc_RNA (1)...(19): siRNA sense strand
cugaagaccacuuuagaaa

SEQ ID NO: 1954488 - RNA, 19 nt, Homo sapiens
  misc_RNA (1)...(19): siRNA sense strand
ucaauucuaugagcagguu

SEQ ID NO: 1954489 - RNA, 19 nt, Homo sapiens
  misc_RNA (1)...(19): siRNA sense strand
acuaguagauagagccaaa

SEQ ID NO: 1954490 - RNA, 19 nt, Homo sapiens
  misc_RNA (1)...(19): siRNA sense strand
aagaaacagugaaacuugu

SEQ ID NO: 1954491 - RNA, 19 nt, Homo sapiens
  misc_RNA (1)...(19): siRNA sense strand
ugccaaggcuacaucaaga

SEQ ID NO: 1954492 - RNA, 19 nt, Homo sapiens
  misc_RNA (1)...(19): siRNA sense strand
uaucugaugccaaagugua

SEQ ID NO: 1954493 - RNA, 19 nt, Homo sapiens
  misc_RNA (1)...(19): siRNA sense strand
gcacacaaucaauucuaug

SEQ ID NO: 1954494 - RNA, 19 nt, Homo sapiens
  misc_RNA (1)...(19): siRNA sense strand
gaagaaaacaguccaccaa

SEQ ID NO: 1954495 - RNA, 19 nt, Homo sapiens
  misc_RNA (1)...(19): siRNA sense strand
gcaaacauuuuaugaaagg

SEQ ID NO: 1954496 - RNA, 19 nt, Homo sapiens
  misc_RNA (1)...(19): siRNA sense strand
ucaaaagaguaguggauuu

SEQ ID NO: 1954497 - RNA, 19 nt, Homo sapiens
  misc_RNA (1)...(19): siRNA sense strand
gacaaauccgcccuauauu

SEQ ID NO: 1954498 - RNA, 19 nt, Homo sapiens
  misc_RNA (1)...(19): siRNA sense strand
gaaaacaguccaccaagug

SEQ ID NO: 1954499 - RNA, 19 nt, Homo sapiens
  misc_RNA (1)...(19): siRNA sense strand
caagaggguguuugugaga

SEQ ID NO: 1954500 - RNA, 19 nt, Homo sapiens
  misc_RNA (1)...(19): siRNA sense strand
aagaauccacugauagaaa

SEQ ID NO: 1954501 - RNA, 19 nt, Homo sapiens
  misc_RNA (1)...(19): siRNA sense strand
ggguuguucucauaauaau

SEQ ID NO: 1954502 - RNA, 19 nt, Homo sapiens
  misc_RNA (1)...(19): siRNA sense strand
uaaacacgccagaggaaau

SEQ ID NO: 1954503 - RNA, 19 nt, Homo sapiens
  misc_RNA (1)...(19): siRNA sense strand
caaguuccagcacaaguga

SEQ ID NO: 1954504 - RNA, 19 nt, Homo sapiens
  misc_RNA (1)...(19): siRNA sense strand
agaaacagaucaggauuuu

SEQ ID NO: 1954505 - RNA, 19 nt, Homo sapiens
  misc_RNA (1)...(19): siRNA sense strand
uguggaaacugguugaagu

SEQ ID NO: 1954506 - RNA, 19 nt, Homo sapiens
  misc_RNA (1)...(19): siRNA sense strand
gcuuauggcagagauauug

SEQ ID NO: 1954507 - RNA, 19 nt, Homo sapiens
  misc_RNA (1)...(19): siRNA sense strand
uugaugaacuaguagauag

SEQ ID NO: 1954508 - RNA, 19 nt, Homo sapiens
  misc_RNA (1)...(19): siRNA sense strand
ugccgaagauuaggaagaa

SEQ ID NO: 1954509 - RNA, 19 nt, Homo sapiens
  misc_RNA (1)...(19): siRNA sense strand
gcucugcugggucuucuuu

SEQ ID NO: 1954510 - RNA, 19 nt, Homo sapiens
  misc_RNA (1)...(19): siRNA sense strand
ucaagaaacagugaaacuu

SEQ ID NO: 1954511 - RNA, 19 nt, Homo sapiens
  misc_RNA (1)...(19): siRNA sense strand
cuguguggcugacuucaaa

SEQ ID NO: 1954512 - RNA, 19 nt, Homo sapiens
  misc_RNA (1)...(19): siRNA sense strand
gaggguguuugugagauau

SEQ ID NO: 1954513 - RNA, 19 nt, Homo sapiens
  misc_RNA (1)...(19): siRNA sense strand
cagaaaauuuggauacgaa

SEQ ID NO: 1954514 - RNA, 19 nt, Homo sapiens
  misc_RNA (1)...(19): siRNA sense strand
ucagcgaguuccagaaugg

SEQ ID NO: 1954515 - RNA, 19 nt, Homo sapiens
  misc_RNA (1)...(19): siRNA sense strand
cagcaaaccgcuagcaaag

SEQ ID NO: 1954516 - RNA, 19 nt, Homo sapiens
  misc_RNA (1)...(19): siRNA sense strand
gaaucaggcaaacauuuua

SEQ ID NO: 1954517 - RNA, 19 nt, Homo sapiens
  misc_RNA (1)...(19): siRNA sense strand
ugaaguggacaucuaugaa

SEQ ID NO: 1954518 - RNA, 19 nt, Homo sapiens
  misc_RNA (1)...(19): siRNA sense strand
cauaugaucacaagauugg

SEQ ID NO: 1954519 - RNA, 19 nt, Homo sapiens
  misc_RNA (1)...(19): siRNA sense strand
uaucgugucucaggaagau

SEQ ID NO: 1954520 - RNA, 19 nt, Homo sapiens
  misc_RNA (1)...(19): siRNA sense strand
ggaaauuuggccaguuauc

SEQ ID NO: 1954521 - RNA, 19 nt, Homo sapiens
  misc_RNA (1)...(19): siRNA sense strand
cagcacuauuccaggcaua

SEQ ID NO: 1954522 - RNA, 19 nt, Homo sapiens
  misc_RNA (1)...(19): siRNA sense strand
ucagcaaaccgcuagcaaa

SEQ ID NO: 1954523 - RNA, 19 nt, Homo sapiens
  misc_RNA (1)...(19): siRNA sense strand
cgacagcguacucauggaa

SEQ ID NO: 1954524 - RNA, 19 nt, Homo sapiens
  misc_RNA (1)...(19): siRNA sense strand
ucaagaggagaacaagaaa

SEQ ID NO: 1954525 - RNA, 19 nt, Homo sapiens
  misc_RNA (1)...(19): siRNA sense strand
cuuaagggacugaguauca

SEQ ID NO: 1954526 - RNA, 19 nt, Homo sapiens
  misc_RNA (1)...(19): siRNA sense strand
uccauaugaucacaagauu

SEQ ID NO: 1954527 - RNA, 19 nt, Homo sapiens
  misc_RNA (1)...(19): siRNA sense strand
aaacacgccagaggaaauu

SEQ ID NO: 1954528 - RNA, 19 nt, Homo sapiens
  misc_RNA (1)...(19): siRNA sense strand
caauuaaaggucacucugu

SEQ ID NO: 1954529 - RNA, 19 nt, Homo sapiens
  misc_RNA (1)...(19): siRNA sense strand
ugaaagggcagccaguauc

SEQ ID NO: 1954530 - RNA, 19 nt, Homo sapiens
  misc_RNA (1)...(19): siRNA sense strand
cacacaaucaauucuauga

SEQ ID NO: 1954531 - RNA, 19 nt, Homo sapiens
  misc_RNA (1)...(19): siRNA sense strand
aagguacgaaggcgaaaua

SEQ ID NO: 1954532 - RNA, 19 nt, Homo sapiens
  misc_RNA (1)...(19): siRNA sense strand
gauagagccaaacaaucuu

SEQ ID NO: 1954533 - RNA, 19 nt, Homo sapiens
  misc_RNA (1)...(19): siRNA sense strand
ugagacugcugggucagaa

SEQ ID NO: 1954534 - RNA, 19 nt, Homo sapiens
  misc_RNA (1)...(19): siRNA sense strand
ggccaguuauccaauugau

SEQ ID NO: 1954535 - RNA, 19 nt, Homo sapiens
  misc_RNA (1)...(19): siRNA sense strand
cgauuggauuugccgaaga

SEQ ID NO: 1954536 - RNA, 19 nt, Homo sapiens
  misc_RNA (1)...(19): siRNA sense strand
gcugaggcuuggcaugaca

SEQ ID NO: 1954537 - RNA, 19 nt, Homo sapiens
  misc_RNA (1)...(19): siRNA sense strand
ggaggagacaauuaaaggu

SEQ ID NO: 1954538 - RNA, 19 nt, Homo sapiens
  misc_RNA (1)...(19): siRNA sense strand
ugguugaaguggacaucua

SEQ ID NO: 1954539 - RNA, 19 nt, Homo sapiens
  misc_RNA (1)...(19): siRNA sense strand
gguguuucauucuuacagu

SEQ ID NO: 1954540 - RNA, 19 nt, Homo sapiens
  misc_RNA (1)...(19): siRNA sense strand
aaacagaucaggauuuuca

SEQ ID NO: 1954541 - RNA, 19 nt, Homo sapiens
  misc_RNA (1)...(19): siRNA sense strand
caugacaaauccgcccuau

SEQ ID NO: 1954542 - RNA, 19 nt, Homo sapiens
  misc_RNA (1)...(19): siRNA sense strand
uaaccaauuuuacccaaga

SEQ ID NO: 1954543 - RNA, 19 nt, Homo sapiens
  misc_RNA (1)...(19): siRNA sense strand
gggcagccaguaucugaug

SEQ ID NO: 1954544 - RNA, 19 nt, Homo sapiens
  misc_RNA (1)...(19): siRNA sense strand
uaugaaagggcagccagua

SEQ ID NO: 1954545 - RNA, 19 nt, Homo sapiens
  misc_RNA (1)...(19): siRNA sense strand
cuaaaggacugcuguguaa

SEQ ID NO: 1954546 - RNA, 19 nt, Homo sapiens
  misc_RNA (1)...(19): siRNA sense strand
ggagguggauaaaguacua

SEQ ID NO: 1954547 - RNA, 19 nt, Homo sapiens
  misc_RNA (1)...(19): siRNA sense strand
ggagaucgauguguacuug

SEQ ID NO: 1954548 - RNA, 19 nt, Homo sapiens
  misc_RNA (1)...(19): siRNA sense strand
ggacugcuguguaagcuau

SEQ ID NO: 1954549 - RNA, 19 nt, Homo sapiens
  misc_RNA (1)...(19): siRNA sense strand
guaaacaggagguggauaa

SEQ ID NO: 1954550 - RNA, 19 nt, Homo sapiens
  misc_RNA (1)...(19): siRNA sense strand
gaagguagagcuugagaug

SEQ ID NO: 1954551 - RNA, 19 nt, Homo sapiens
  misc_RNA (1)...(19): siRNA sense strand
gaagccggaugcacaauca

SEQ ID NO: 1954552 - RNA, 19 nt, Homo sapiens
  misc_RNA (1)...(19): siRNA sense strand
ucaagauccugaugaagaa

SEQ ID NO: 1954553 - RNA, 19 nt, Homo sapiens
  misc_RNA (1)...(19): siRNA sense strand
acacggagcucgucaaguc

SEQ ID NO: 1954554 - RNA, 19 nt, Homo sapiens
  misc_RNA (1)...(19): siRNA sense strand
gguggcaugugguaccuua

SEQ ID NO: 1954555 - RNA, 19 nt, Homo sapiens
  misc_RNA (1)...(19): siRNA sense strand
ccucgaagcugauggacaa

SEQ ID NO: 1954556 - RNA, 19 nt, Homo sapiens
  misc_RNA (1)...(19): siRNA sense strand
gggaguucauucugccuua

SEQ ID NO: 1954557 - RNA, 19 nt, Homo sapiens
  misc_RNA (1)...(19): siRNA sense strand
ugaagaggaugacccaguu

SEQ ID NO: 1954558 - RNA, 19 nt, Homo sapiens
  misc_RNA (1)...(19): siRNA sense strand
ggugaagagugacauccua

SEQ ID NO: 1954559 - RNA, 19 nt, Homo sapiens
  misc_RNA (1)...(19): siRNA sense strand
caacaaaggcugggaguuc

SEQ ID NO: 1954560 - RNA, 19 nt, Homo sapiens
  misc_RNA (1)...(19): siRNA sense strand
uaaaggaaaccaugccaaa

SEQ ID NO: 1954561 - RNA, 19 nt, Homo sapiens
  misc_RNA (1)...(19): siRNA sense strand
ggaacuggguggugaagag

SEQ ID NO: 1954562 - RNA, 19 nt, Homo sapiens
  misc_RNA (1)...(19): siRNA sense strand
cggaaaagcuguaucuauu

SEQ ID NO: 1954563 - RNA, 19 nt, Homo sapiens
  misc_RNA (1)...(19): siRNA sense strand
cagagccgcugggugguua

SEQ ID NO: 1954564 - RNA, 19 nt, Homo sapiens
  misc_RNA (1)...(19): siRNA sense strand
gggagcagauugcgcugaa

SEQ ID NO: 1954565 - RNA, 19 nt, Homo sapiens
  misc_RNA (1)...(19): siRNA sense strand
ccuaugaguuccugcagaa

SEQ ID NO: 1954566 - RNA, 19 nt, Homo sapiens
  misc_RNA (1)...(19): siRNA sense strand
gaacucaagcgccucuuca

SEQ ID NO: 1954567 - RNA, 19 nt, Homo sapiens
  misc_RNA (1)...(19): siRNA sense strand
gaucagcaucgacagguuu

SEQ ID NO: 1954568 - RNA, 19 nt, Homo sapiens
  misc_RNA (1)...(19): siRNA sense strand
ucaagaguguggagaagau

SEQ ID NO: 1954569 - RNA, 19 nt, Homo sapiens
  misc_RNA (1)...(19): siRNA sense strand
gaagagugacauccuauac

SEQ ID NO: 1954570 - RNA, 19 nt, Homo sapiens
  misc_RNA (1)...(19): siRNA sense strand
ucaagaagcacccggaugu

SEQ ID NO: 1954571 - RNA, 19 nt, Homo sapiens
  misc_RNA (1)...(19): siRNA sense strand
ucaagcgccucuucaaucu

SEQ ID NO: 1954572 - RNA, 19 nt, Homo sapiens
  misc_RNA (1)...(19): siRNA sense strand
ggguccaccugcauuacua

SEQ ID NO: 1954573 - RNA, 19 nt, Homo sapiens
  misc_RNA (1)...(19): siRNA sense strand
aggaaaccaugccaaagaa

SEQ ID NO: 1954574 - RNA, 19 nt, Homo sapiens
  misc_RNA (1)...(19): siRNA sense strand
gagacuucguuauguggaa

SEQ ID NO: 1954575 - RNA, 19 nt, Homo sapiens
  misc_RNA (1)...(19): siRNA sense strand
gaacacggagcucgucaag

SEQ ID NO: 1954576 - RNA, 19 nt, Homo sapiens
  misc_RNA (1)...(19): siRNA sense strand
gaugaccuacgaugacauu

SEQ ID NO: 1954577 - RNA, 19 nt, Homo sapiens
  misc_RNA (1)...(19): siRNA sense strand
uggauaaaguacuaaagga

SEQ ID NO: 1954578 - RNA, 19 nt, Homo sapiens
  misc_RNA (1)...(19): siRNA sense strand
aacaggagguggauaaagu

SEQ ID NO: 1954579 - RNA, 19 nt, Homo sapiens
  misc_RNA (1)...(19): siRNA sense strand
ugaagaaugugaaggucau

SEQ ID NO: 1954580 - RNA, 19 nt, Homo sapiens
  misc_RNA (1)...(19): siRNA sense strand
ggaaaagcuguaucuauuu

SEQ ID NO: 1954581 - RNA, 19 nt, Homo sapiens
  misc_RNA (1)...(19): siRNA sense strand
ccaagagucuggcggaaaa

SEQ ID NO: 1954582 - RNA, 19 nt, Homo sapiens
  misc_RNA (1)...(19): siRNA sense strand
gacgagaccagcacguauu

SEQ ID NO: 1954583 - RNA, 19 nt, Homo sapiens
  misc_RNA (1)...(19): siRNA sense strand
ggaggccaccuuucagaga

SEQ ID NO: 1954584 - RNA, 19 nt, Homo sapiens
  misc_RNA (1)...(19): siRNA sense strand
ggccgagacuucguuaugu

SEQ ID NO: 1954585 - RNA, 19 nt, Homo sapiens
  misc_RNA (1)...(19): siRNA sense strand
ccaagcagcagaagguaga

SEQ ID NO: 1954586 - RNA, 19 nt, Homo sapiens
  misc_RNA (1)...(19): siRNA sense strand
aaaccaaggcccagcagaa

SEQ ID NO: 1954587 - RNA, 19 nt, Homo sapiens
  misc_RNA (1)...(19): siRNA sense strand
ggaguucauucugccuuau

SEQ ID NO: 1954588 - RNA, 19 nt, Homo sapiens
  misc_RNA (1)...(19): siRNA sense strand
ccgaggaugugaaggacuu

SEQ ID NO: 1954589 - RNA, 19 nt, Homo sapiens
  misc_RNA (1)...(19): siRNA sense strand
gaagaggaugacccaguug

SEQ ID NO: 1954590 - RNA, 19 nt, Homo sapiens
  misc_RNA (1)...(19): siRNA sense strand
agacaugagugaucagcau

SEQ ID NO: 1954591 - RNA, 19 nt, Homo sapiens
  misc_RNA (1)...(19): siRNA sense strand
ugaagagugacauccuaua

SEQ ID NO: 1954592 - RNA, 19 nt, Homo sapiens
  misc_RNA (1)...(19): siRNA sense strand
gugaguaccugaugaugcu

SEQ ID NO: 1954593 - RNA, 19 nt, Homo sapiens
  misc_RNA (1)...(19): siRNA sense strand
uccagaagguggcgauguu

SEQ ID NO: 1954594 - RNA, 19 nt, Homo sapiens
  misc_RNA (1)...(19): siRNA sense strand
aaggaaaccaugccaaaga

SEQ ID NO: 1954595 - RNA, 19 nt, Homo sapiens
  misc_RNA (1)...(19): siRNA sense strand
gggccgagacuucguuaug

SEQ ID NO: 1954596 - RNA, 19 nt, Homo sapiens
  misc_RNA (1)...(19): siRNA sense strand
gccaggaggaggagaaaga

SEQ ID NO: 1954597 - RNA, 19 nt, Homo sapiens
  misc_RNA (1)...(19): siRNA sense strand
cgacagguuuugcuugaaa

SEQ ID NO: 1954598 - RNA, 19 nt, Homo sapiens
  misc_RNA (1)...(19): siRNA sense strand
ggaccagcggauccaagua

SEQ ID NO: 1954599 - RNA, 19 nt, Homo sapiens
  misc_RNA (1)...(19): siRNA sense strand
gccgagacuucguuaugug

SEQ ID NO: 1954600 - RNA, 19 nt, Homo sapiens
  misc_RNA (1)...(19): siRNA sense strand
gcuaugguggcauguggua

SEQ ID NO: 1954601 - RNA, 19 nt, Homo sapiens
  misc_RNA (1)...(19): siRNA sense strand
cagccucgaugaccuacga

SEQ ID NO: 1954602 - RNA, 19 nt, Homo sapiens
  misc_RNA (1)...(19): siRNA sense strand
cggguacgccgaaacauga

SEQ ID NO: 1954603 - RNA, 19 nt, Homo sapiens
  misc_RNA (1)...(19): siRNA sense strand
gggaguucaucaagaagca

SEQ ID NO: 1954604 - RNA, 19 nt, Homo sapiens
  misc_RNA (1)...(19): siRNA sense strand
cgaagcugauggacaagca

SEQ ID NO: 1954605 - RNA, 19 nt, Homo sapiens
  misc_RNA (1)...(19): siRNA sense strand
gcugggugguuaggaaaga

SEQ ID NO: 1954606 - RNA, 19 nt, Homo sapiens
  misc_RNA (1)...(19): siRNA sense strand
ccagcaacguccugucgau

SEQ ID NO: 1954607 - RNA, 19 nt, Homo sapiens
  misc_RNA (1)...(19): siRNA sense strand
gcacguauuccucgaagcu

SEQ ID NO: 1954608 - RNA, 19 nt, Homo sapiens
  misc_RNA (1)...(19): siRNA sense strand
uaaagggacaguacagucu

SEQ ID NO: 1954609 - RNA, 19 nt, Homo sapiens
  misc_RNA (1)...(19): siRNA sense strand
gcaccucucagccaagauc

SEQ ID NO: 1954610 - RNA, 19 nt, Homo sapiens
  misc_RNA (1)...(19): siRNA sense strand
ccucuucaaucugcacuug

SEQ ID NO: 1954611 - RNA, 19 nt, Homo sapiens
  misc_RNA (1)...(19): siRNA sense strand
gaccagcggauccaaguag

SEQ ID NO: 1954612 - RNA, 19 nt, Homo sapiens
  misc_RNA (1)...(19): siRNA sense strand
gagcuccaccugacaccuu

SEQ ID NO: 1954613 - RNA, 19 nt, Homo sapiens
  misc_RNA (1)...(19): siRNA sense strand
acuaaaggacugcugugua

SEQ ID NO: 1954614 - RNA, 19 nt, Homo sapiens
  misc_RNA (1)...(19): siRNA sense strand
cggaugagcagaagguguu

SEQ ID NO: 1954615 - RNA, 19 nt, Homo sapiens
  misc_RNA (1)...(19): siRNA sense strand
ggaugaggcggaagacgau

SEQ ID NO: 1954616 - RNA, 19 nt, Homo sapiens
  misc_RNA (1)...(19): siRNA sense strand
cgacgagaccagcacguau

SEQ ID NO: 1954617 - RNA, 19 nt, Homo sapiens
  misc_RNA (1)...(19): siRNA sense strand
aaagaagccggaugcacaa

SEQ ID NO: 1954618 - RNA, 19 nt, Homo sapiens
  misc_RNA (1)...(19): siRNA sense strand
caaaggcugggaguucauu

SEQ ID NO: 1954619 - RNA, 19 nt, Homo sapiens
  misc_RNA (1)...(19): siRNA sense strand
aacaaaggcugggaguuca

SEQ ID NO: 1954620 - RNA, 19 nt, Homo sapiens
  misc_RNA (1)...(19): siRNA sense strand
aagacgauguuaagcagau

SEQ ID NO: 1954621 - RNA, 19 nt, Homo sapiens
  misc_RNA (1)...(19): siRNA sense strand
agcuguaucuauuucagua

SEQ ID NO: 1954622 - RNA, 19 nt, Homo sapiens
  misc_RNA (1)...(19): siRNA sense strand
acaggagguggauaaagua

SEQ ID NO: 1954623 - RNA, 19 nt, Homo sapiens
  misc_RNA (1)...(19): siRNA sense strand
caccugacaccuuuacaug

SEQ ID NO: 1954624 - RNA, 19 nt, Homo sapiens
  misc_RNA (1)...(19): siRNA sense strand
uaaacaggagguggauaaa

SEQ ID NO: 1954625 - RNA, 19 nt, Homo sapiens
  misc_RNA (1)...(19): siRNA sense strand
gccgcugggugguuaggaa

SEQ ID NO: 1954626 - RNA, 19 nt, Homo sapiens
  misc_RNA (1)...(19): siRNA sense strand
ggcaugugguaccuuaaag

SEQ ID NO: 1954627 - RNA, 19 nt, Homo sapiens
  misc_RNA (1)...(19): siRNA sense strand
gaggaugacccaguuguac

SEQ ID NO: 1954628 - RNA, 19 nt, Homo sapiens
  misc_RNA (1)...(19): siRNA sense strand
gcgccgaggaugugaagga

SEQ ID NO: 1954629 - RNA, 19 nt, Homo sapiens
  misc_RNA (1)...(19): siRNA sense strand
cagcuucuccuaccuggau

SEQ ID NO: 1954630 - RNA, 19 nt, Homo sapiens
  misc_RNA (1)...(19): siRNA sense strand
agcagaagguagagcuuga

SEQ ID NO: 1954631 - RNA, 19 nt, Homo sapiens
  misc_RNA (1)...(19): siRNA sense strand
ugacauuccgcaccucuca

SEQ ID NO: 1954632 - RNA, 19 nt, Homo sapiens
  misc_RNA (1)...(19): siRNA sense strand
ccgcaccucucagccaaga

SEQ ID NO: 1954633 - RNA, 19 nt, Homo sapiens
  misc_RNA (1)...(19): siRNA sense strand
gaacuggguggugaagagu

SEQ ID NO: 1954634 - RNA, 19 nt, Homo sapiens
  misc_RNA (1)...(19): siRNA sense strand
caucucggaccgcaugcua

SEQ ID NO: 1954635 - RNA, 19 nt, Homo sapiens
  misc_RNA (1)...(19): siRNA sense strand
gccgugugcaguccuauga

SEQ ID NO: 1954636 - RNA, 19 nt, Homo sapiens
  misc_RNA (1)...(19): siRNA sense strand
agaggaugacccaguugua

SEQ ID NO: 1954637 - RNA, 19 nt, Homo sapiens
  misc_RNA (1)...(19): siRNA sense strand
gcggauccaaguagccaaa

SEQ ID NO: 1954638 - RNA, 19 nt, Homo sapiens
  misc_RNA (1)...(19): siRNA sense strand
ggaaaccaugccaaagaag

SEQ ID NO: 1954639 - RNA, 19 nt, Homo sapiens
  misc_RNA (1)...(19): siRNA sense strand
guacaggagaucgaugugu

SEQ ID NO: 1954640 - RNA, 19 nt, Homo sapiens
  misc_RNA (1)...(19): siRNA sense strand
uggcaaccgugaccaaacu

SEQ ID NO: 1954641 - RNA, 19 nt, Homo sapiens
  misc_RNA (1)...(19): siRNA sense strand
gugaagagugacauccuau

SEQ ID NO: 1954642 - RNA, 19 nt, Homo sapiens
  misc_RNA (1)...(19): siRNA sense strand
cccagugaguaccugauga

SEQ ID NO: 1954643 - RNA, 19 nt, Homo sapiens
  misc_RNA (1)...(19): siRNA sense strand
augaguuccugcagaagaa

SEQ ID NO: 1954644 - RNA, 19 nt, Homo sapiens
  misc_RNA (1)...(19): siRNA sense strand
uaugaguuccugcagaaga

SEQ ID NO: 1954645 - RNA, 19 nt, Homo sapiens
  misc_RNA (1)...(19): siRNA sense strand
gaaucgagcucccuucaga

SEQ ID NO: 1954646 - RNA, 19 nt, Homo sapiens
  misc_RNA (1)...(19): siRNA sense strand
ggaacaaccacgucauuaa

SEQ ID NO: 1954647 - RNA, 19 nt, Homo sapiens
  misc_RNA (1)...(19): siRNA sense strand
ggaaauauacgaucgacaa

SEQ ID NO: 1954648 - RNA, 19 nt, Homo sapiens
  misc_RNA (1)...(19): siRNA sense strand
cagaagaguuugucaggaa

SEQ ID NO: 1954649 - RNA, 19 nt, Homo sapiens
  misc_RNA (1)...(19): siRNA sense strand
caaaggacccuacaggauu

SEQ ID NO: 1954650 - RNA, 19 nt, Homo sapiens
  misc_RNA (1)...(19): siRNA sense strand
gaacauguccuguguacuc

SEQ ID NO: 1954651 - RNA, 19 nt, Homo sapiens
  misc_RNA (1)...(19): siRNA sense strand
caggagcuguggaaauaua

SEQ ID NO: 1954652 - RNA, 19 nt, Homo sapiens
  misc_RNA (1)...(19): siRNA sense strand
gaggaugaaucuucugaug

SEQ ID NO: 1954653 - RNA, 19 nt, Homo sapiens
  misc_RNA (1)...(19): siRNA sense strand
cgaggugccuucauucuug

SEQ ID NO: 1954654 - RNA, 19 nt, Homo sapiens
  misc_RNA (1)...(19): siRNA sense strand
cagcagcucucaggaguaa

SEQ ID NO: 1954655 - RNA, 19 nt, Homo sapiens
  misc_RNA (1)...(19): siRNA sense strand
ggaugaaucuucugaugca

SEQ ID NO: 1954656 - RNA, 19 nt, Homo sapiens
  misc_RNA (1)...(19): siRNA sense strand
ccagcgaggugccuucauu

SEQ ID NO: 1954657 - RNA, 19 nt, Homo sapiens
  misc_RNA (1)...(19): siRNA sense strand
cagcagaguuccauucaca

SEQ ID NO: 1954658 - RNA, 19 nt, Homo sapiens
  misc_RNA (1)...(19): siRNA sense strand
ccaagucccuggcaaugga

SEQ ID NO: 1954659 - RNA, 19 nt, Homo sapiens
  misc_RNA (1)...(19): siRNA sense strand
ggauagcaauggugugauc

SEQ ID NO: 1954660 - RNA, 19 nt, Homo sapiens
  misc_RNA (1)...(19): siRNA sense strand
aauauacgaucgacaaugu

SEQ ID NO: 1954661 - RNA, 19 nt, Homo sapiens
  misc_RNA (1)...(19): siRNA sense strand
agcaggagcuguggaaaua

SEQ ID NO: 1954662 - RNA, 19 nt, Homo sapiens
  misc_RNA (1)...(19): siRNA sense strand
gaacaaccacgucauuaac

SEQ ID NO: 1954663 - RNA, 19 nt, Homo sapiens
  misc_RNA (1)...(19): siRNA sense strand
ggccugugcucuacuguga

SEQ ID NO: 1954664 - RNA, 19 nt, Homo sapiens
  misc_RNA (1)...(19): siRNA sense strand
gaagguggauagcaauggu

SEQ ID NO: 1954665 - RNA, 19 nt, Homo sapiens
  misc_RNA (1)...(19): siRNA sense strand
uaagaaguaugaacauguc

SEQ ID NO: 1954666 - RNA, 19 nt, Homo sapiens
  misc_RNA (1)...(19): siRNA sense strand
guaugaacauguccugugu

SEQ ID NO: 1954667 - RNA, 19 nt, Homo sapiens
  misc_RNA (1)...(19): siRNA sense strand
aaaggacccuacaggauug

SEQ ID NO: 1954668 - RNA, 19 nt, Homo sapiens
  misc_RNA (1)...(19): siRNA sense strand
gcagagguaccguguggaa

SEQ ID NO: 1954669 - RNA, 19 nt, Homo sapiens
  misc_RNA (1)...(19): siRNA sense strand
gaaauauacgaucgacaau

SEQ ID NO: 1954670 - RNA, 19 nt, Homo sapiens
  misc_RNA (1)...(19): siRNA sense strand
ggacaagguggcucacuuc

SEQ ID NO: 1954671 - RNA, 19 nt, Homo sapiens
  misc_RNA (1)...(19): siRNA sense strand
gcuauaagaaguaugaaca

SEQ ID NO: 1954672 - RNA, 19 nt, Homo sapiens
  misc_RNA (1)...(19): siRNA sense strand
gagcgaauggcaaauguca

SEQ ID NO: 1954673 - RNA, 19 nt, Homo sapiens
  misc_RNA (1)...(19): siRNA sense strand
ucacuucuccuacccauuc

SEQ ID NO: 1954674 - RNA, 19 nt, Homo sapiens
  misc_RNA (1)...(19): siRNA sense strand
uggcugagcugaggagguu

SEQ ID NO: 1954675 - RNA, 19 nt, Homo sapiens
  misc_RNA (1)...(19): siRNA sense strand
ggaguggccugugcucuac

SEQ ID NO: 1954676 - RNA, 19 nt, Homo sapiens
  misc_RNA (1)...(19): siRNA sense strand
gcagaguuccauucacaau

SEQ ID NO: 1954677 - RNA, 19 nt, Homo sapiens
  misc_RNA (1)...(19): siRNA sense strand
aagcuuggcuauaagaagu

SEQ ID NO: 1954678 - RNA, 19 nt, Homo sapiens
  misc_RNA (1)...(19): siRNA sense strand
ccucuccuauguacggaua

SEQ ID NO: 1954679 - RNA, 19 nt, Homo sapiens
  misc_RNA (1)...(19): siRNA sense strand
cuacguccacuucuuugua

SEQ ID NO: 1954680 - RNA, 19 nt, Homo sapiens
  misc_RNA (1)...(19): siRNA sense strand
ucaaaggacccuacaggau

SEQ ID NO: 1954681 - RNA, 19 nt, Homo sapiens
  misc_RNA (1)...(19): siRNA sense strand
ugacuucacgggccucaaa

SEQ ID NO: 1954682 - RNA, 19 nt, Homo sapiens
  misc_RNA (1)...(19): siRNA sense strand
gcccaaggcuaugaguaug

SEQ ID NO: 1954683 - RNA, 19 nt, Homo sapiens
  misc_RNA (1)...(19): siRNA sense strand
cauguccuguguacucuga

SEQ ID NO: 1954684 - RNA, 19 nt, Homo sapiens
  misc_RNA (1)...(19): siRNA sense strand
cuggaacccuggucuccua

SEQ ID NO: 1954685 - RNA, 19 nt, Homo sapiens
  misc_RNA (1)...(19): siRNA sense strand
guggagaccuguggagcuu

SEQ ID NO: 1954686 - RNA, 19 nt, Homo sapiens
  misc_RNA (1)...(19): siRNA sense strand
ggagcccucagaagaguuu

SEQ ID NO: 1954687 - RNA, 19 nt, Homo sapiens
  misc_RNA (1)...(19): siRNA sense strand
guaaauggagaggucguuu

SEQ ID NO: 1954688 - RNA, 19 nt, Homo sapiens
  misc_RNA (1)...(19): siRNA sense strand
uauacgaucgacaauguuu

SEQ ID NO: 1954689 - RNA, 19 nt, Homo sapiens
  misc_RNA (1)...(19): siRNA sense strand
cauuggcgguucucuggaa

SEQ ID NO: 1954690 - RNA, 19 nt, Homo sapiens
  misc_RNA (1)...(19): siRNA sense strand
gcuaugaguaugacaaucu

SEQ ID NO: 1954691 - RNA, 19 nt, Homo sapiens
  misc_RNA (1)...(19): siRNA sense strand
gcaccgacuuugagaugac

SEQ ID NO: 1954692 - RNA, 19 nt, Homo sapiens
  misc_RNA (1)...(19): siRNA sense strand
ccucguaggcaccgacuuu

SEQ ID NO: 1954693 - RNA, 19 nt, Homo sapiens
  misc_RNA (1)...(19): siRNA sense strand
ucacacacccugacagucu

SEQ ID NO: 1954694 - RNA, 19 nt, Homo sapiens
  misc_RNA (1)...(19): siRNA sense strand
ccugggagcccucagaaga

SEQ ID NO: 1954695 - RNA, 19 nt, Homo sapiens
  misc_RNA (1)...(19): siRNA sense strand
caggaacaaccacgucauu

SEQ ID NO: 1954696 - RNA, 19 nt, Homo sapiens
  misc_RNA (1)...(19): siRNA sense strand
gaacgccugagccgcuuug

SEQ ID NO: 1954697 - RNA, 19 nt, Homo sapiens
  misc_RNA (1)...(19): siRNA sense strand
gcgaggugccuucauucuu

SEQ ID NO: 1954698 - RNA, 19 nt, Homo sapiens
  misc_RNA (1)...(19): siRNA sense strand
ccaugaggaugaaucuucu

SEQ ID NO: 1954699 - RNA, 19 nt, Homo sapiens
  misc_RNA (1)...(19): siRNA sense strand
gcagcucucaggaguaaca

SEQ ID NO: 1954700 - RNA, 19 nt, Homo sapiens
  misc_RNA (1)...(19): siRNA sense strand
gcccuccggcucuuuguaa

SEQ ID NO: 1954701 - RNA, 19 nt, Homo sapiens
  misc_RNA (1)...(19): siRNA sense strand
uggacaagguggcucacuu

SEQ ID NO: 1954702 - RNA, 19 nt, Homo sapiens
  misc_RNA (1)...(19): siRNA sense strand
guggauagcaaugguguga

SEQ ID NO: 1954703 - RNA, 19 nt, Homo sapiens
  misc_RNA (1)...(19): siRNA sense strand
uaacaccccucuucagaca

SEQ ID NO: 1954704 - RNA, 19 nt, Homo sapiens
  misc_RNA (1)...(19): siRNA sense strand
aggaacaaccacgucauua

SEQ ID NO: 1954705 - RNA, 19 nt, Homo sapiens
  misc_RNA (1)...(19): siRNA sense strand
ucucuacguccacuucuuu

SEQ ID NO: 1954706 - RNA, 19 nt, Homo sapiens
  misc_RNA (1)...(19): siRNA sense strand
gaagcaggagcuguggaaa

SEQ ID NO: 1954707 - RNA, 19 nt, Homo sapiens
  misc_RNA (1)...(19): siRNA sense strand
gcuuuggacuccgcacaga

SEQ ID NO: 1954708 - RNA, 19 nt, Homo sapiens
  misc_RNA (1)...(19): siRNA sense strand
cggaguggccugugcucua

SEQ ID NO: 1954709 - RNA, 19 nt, Homo sapiens
  misc_RNA (1)...(19): siRNA sense strand
gaguguucaaggaucuuua

SEQ ID NO: 1954710 - RNA, 19 nt, Homo sapiens
  misc_RNA (1)...(19): siRNA sense strand
ccagggccuucauggaauc

SEQ ID NO: 1954711 - RNA, 19 nt, Homo sapiens
  misc_RNA (1)...(19): siRNA sense strand
gcucacacacccugacagu

SEQ ID NO: 1954712 - RNA, 19 nt, Homo sapiens
  misc_RNA (1)...(19): siRNA sense strand
gaagaguuugucaggaaca

SEQ ID NO: 1954713 - RNA, 19 nt, Homo sapiens
  misc_RNA (1)...(19): siRNA sense strand
aaauggagaggucguuuca

SEQ ID NO: 1954714 - RNA, 19 nt, Homo sapiens
  misc_RNA (1)...(19): siRNA sense strand
ggcaccgacuuugagauga

SEQ ID NO: 1954715 - RNA, 19 nt, Homo sapiens
  misc_RNA (1)...(19): siRNA sense strand
uaaauggagaggucguuuc

SEQ ID NO: 1954716 - RNA, 19 nt, Homo sapiens
  misc_RNA (1)...(19): siRNA sense strand
guaggcaccgacuuugaga

SEQ ID NO: 1954717 - RNA, 19 nt, Homo sapiens
  misc_RNA (1)...(19): siRNA sense strand
ucgagcgaauggcaaaugu

SEQ ID NO: 1954718 - RNA, 19 nt, Homo sapiens
  misc_RNA (1)...(19): siRNA sense strand
agaagcaggagcuguggaa

SEQ ID NO: 1954719 - RNA, 19 nt, Homo sapiens
  misc_RNA (1)...(19): siRNA sense strand
gauaccaggauccuucaag

SEQ ID NO: 1954720 - RNA, 19 nt, Homo sapiens
  misc_RNA (1)...(19): siRNA sense strand
uacguccacuucuuuguag

SEQ ID NO: 1954721 - RNA, 19 nt, Homo sapiens
  misc_RNA (1)...(19): siRNA sense strand
gcaggagcuguggaaauau

SEQ ID NO: 1954722 - RNA, 19 nt, Homo sapiens
  misc_RNA (1)...(19): siRNA sense strand
ccaccaagucccuggcaau

SEQ ID NO: 1954723 - RNA, 19 nt, Homo sapiens
  misc_RNA (1)...(19): siRNA sense strand
ggacccuacaggauugaga

SEQ ID NO: 1954724 - RNA, 19 nt, Homo sapiens
  misc_RNA (1)...(19): siRNA sense strand
gccagcagaguuccauuca

SEQ ID NO: 1954725 - RNA, 19 nt, Homo sapiens
  misc_RNA (1)...(19): siRNA sense strand
ggguucagccagcagaguu

SEQ ID NO: 1954726 - RNA, 19 nt, Homo sapiens
  misc_RNA (1)...(19): siRNA sense strand
caacugcucacuggucaag

SEQ ID NO: 1954727 - RNA, 19 nt, Homo sapiens
  misc_RNA (1)...(19): siRNA sense strand
gcuuggcuauaagaaguau

SEQ ID NO: 1954728 - RNA, 19 nt, Homo sapiens
  misc_RNA (1)...(19): siRNA sense strand
cuccggcucuuuguaaaug

SEQ ID NO: 1954729 - RNA, 19 nt, Homo sapiens
  misc_RNA (1)...(19): siRNA sense strand
ggagagaagucauccauua

SEQ ID NO: 1954730 - RNA, 19 nt, Homo sapiens
  misc_RNA (1)...(19): siRNA sense strand
ggagugaacugauuccaua

SEQ ID NO: 1954731 - RNA, 19 nt, Homo sapiens
  misc_RNA (1)...(19): siRNA sense strand
gagcugaaguccuuagaua

SEQ ID NO: 1954732 - RNA, 19 nt, Homo sapiens
  misc_RNA (1)...(19): siRNA sense strand
gauaacagacguugccuua

SEQ ID NO: 1954733 - RNA, 19 nt, Homo sapiens
  misc_RNA (1)...(19): siRNA sense strand
gaaccuggcucccuaugau

SEQ ID NO: 1954734 - RNA, 19 nt, Homo sapiens
  misc_RNA (1)...(19): siRNA sense strand
gaaaaugggucaauaacuu

SEQ ID NO: 1954735 - RNA, 19 nt, Homo sapiens
  misc_RNA (1)...(19): siRNA sense strand
gaagaagucauugugguua

SEQ ID NO: 1954736 - RNA, 19 nt, Homo sapiens
  misc_RNA (1)...(19): siRNA sense strand
gggaacaaaccuuuaauuu

SEQ ID NO: 1954737 - RNA, 19 nt, Homo sapiens
  misc_RNA (1)...(19): siRNA sense strand
ccaauugccuucucaugaa

SEQ ID NO: 1954738 - RNA, 19 nt, Homo sapiens
  misc_RNA (1)...(19): siRNA sense strand
gcugagcugugaucugaua

SEQ ID NO: 1954739 - RNA, 19 nt, Homo sapiens
  misc_RNA (1)...(19): siRNA sense strand
uaacagacguugccuuaca

SEQ ID NO: 1954740 - RNA, 19 nt, Homo sapiens
  misc_RNA (1)...(19): siRNA sense strand
acagaagcauccuagaaua

SEQ ID NO: 1954741 - RNA, 19 nt, Homo sapiens
  misc_RNA (1)...(19): siRNA sense strand
gaacugauuccauauuuag

SEQ ID NO: 1954742 - RNA, 19 nt, Homo sapiens
  misc_RNA (1)...(19): siRNA sense strand
gugaacugauuccauauuu

SEQ ID NO: 1954743 - RNA, 19 nt, Homo sapiens
  misc_RNA (1)...(19): siRNA sense strand
caucguggauuuccuaaug

SEQ ID NO: 1954744 - RNA, 19 nt, Homo sapiens
  misc_RNA (1)...(19): siRNA sense strand
acagacaggugcccaaauu

SEQ ID NO: 1954745 - RNA, 19 nt, Homo sapiens
  misc_RNA (1)...(19): siRNA sense strand
gugcugagcugugaucuga

SEQ ID NO: 1954746 - RNA, 19 nt, Homo sapiens
  misc_RNA (1)...(19): siRNA sense strand
ggaaguggccagaggauug

SEQ ID NO: 1954747 - RNA, 19 nt, Homo sapiens
  misc_RNA (1)...(19): siRNA sense strand
gaucacaggugcgcugcua

SEQ ID NO: 1954748 - RNA, 19 nt, Homo sapiens
  misc_RNA (1)...(19): siRNA sense strand
gagugacuauuaccaauug

SEQ ID NO: 1954749 - RNA, 19 nt, Homo sapiens
  misc_RNA (1)...(19): siRNA sense strand
gagagaagucauccauuaa

SEQ ID NO: 1954750 - RNA, 19 nt, Homo sapiens
  misc_RNA (1)...(19): siRNA sense strand
gaagccagauauugugugu

SEQ ID NO: 1954751 - RNA, 19 nt, Homo sapiens
  misc_RNA (1)...(19): siRNA sense strand
agaccuaacuuccagcauu

SEQ ID NO: 1954752 - RNA, 19 nt, Homo sapiens
  misc_RNA (1)...(19): siRNA sense strand
agaggaggaucuaaagaaa

SEQ ID NO: 1954753 - RNA, 19 nt, Homo sapiens
  misc_RNA (1)...(19): siRNA sense strand
gguggaggaucucggauga

SEQ ID NO: 1954754 - RNA, 19 nt, Homo sapiens
  misc_RNA (1)...(19): siRNA sense strand
ggagcagcgugacuucauu

SEQ ID NO: 1954755 - RNA, 19 nt, Homo sapiens
  misc_RNA (1)...(19): siRNA sense strand
ggauugaagccaaagcuaa

SEQ ID NO: 1954756 - RNA, 19 nt, Homo sapiens
  misc_RNA (1)...(19): siRNA sense strand
uaacuucuauccggaguga

SEQ ID NO: 1954757 - RNA, 19 nt, Homo sapiens
  misc_RNA (1)...(19): siRNA sense strand
guuuagagcuuaugaugca

SEQ ID NO: 1954758 - RNA, 19 nt, Homo sapiens
  misc_RNA (1)...(19): siRNA sense strand
gaccuaacuuccagcauuc

SEQ ID NO: 1954759 - RNA, 19 nt, Homo sapiens
  misc_RNA (1)...(19): siRNA sense strand
cgagaagggugcagacauc

SEQ ID NO: 1954760 - RNA, 19 nt, Homo sapiens
  misc_RNA (1)...(19): siRNA sense strand
gggaagacuuguccagauc

SEQ ID NO: 1954761 - RNA, 19 nt, Homo sapiens
  misc_RNA (1)...(19): siRNA sense strand
uaugaugccugcuggaaug

SEQ ID NO: 1954762 - RNA, 19 nt, Homo sapiens
  misc_RNA (1)...(19): siRNA sense strand
gauugaagccaaagcuaaa

SEQ ID NO: 1954763 - RNA, 19 nt, Homo sapiens
  misc_RNA (1)...(19): siRNA sense strand
agacacagauuggagagaa

SEQ ID NO: 1954764 - RNA, 19 nt, Homo sapiens
  misc_RNA (1)...(19): siRNA sense strand
ggaguugacagccucauug

SEQ ID NO: 1954765 - RNA, 19 nt, Homo sapiens
  misc_RNA (1)...(19): siRNA sense strand
gggcucugcucucgaguga

SEQ ID NO: 1954766 - RNA, 19 nt, Homo sapiens
  misc_RNA (1)...(19): siRNA sense strand
ggaaggaagcaauauccaa

SEQ ID NO: 1954767 - RNA, 19 nt, Homo sapiens
  misc_RNA (1)...(19): siRNA sense strand
gcuugagcguguuggauuu

SEQ ID NO: 1954768 - RNA, 19 nt, Homo sapiens
  misc_RNA (1)...(19): siRNA sense strand
ccagaggauugaagccaaa

SEQ ID NO: 1954769 - RNA, 19 nt, Homo sapiens
  misc_RNA (1)...(19): siRNA sense strand
caacagggacaagaagaaa

SEQ ID NO: 1954770 - RNA, 19 nt, Homo sapiens
  misc_RNA (1)...(19): siRNA sense strand
gaagcagacuuggaugaag

SEQ ID NO: 1954771 - RNA, 19 nt, Homo sapiens
  misc_RNA (1)...(19): siRNA sense strand
acaaugcugugaucgagaa

SEQ ID NO: 1954772 - RNA, 19 nt, Homo sapiens
  misc_RNA (1)...(19): siRNA sense strand
caugggaacugcagauucu

SEQ ID NO: 1954773 - RNA, 19 nt, Homo sapiens
  misc_RNA (1)...(19): siRNA sense strand
gaagaaccaccaguccauu

SEQ ID NO: 1954774 - RNA, 19 nt, Homo sapiens
  misc_RNA (1)...(19): siRNA sense strand
gcccaccucuacuguuuga

SEQ ID NO: 1954775 - RNA, 19 nt, Homo sapiens
  misc_RNA (1)...(19): siRNA sense strand
aagcagacuuggaugaaga

SEQ ID NO: 1954776 - RNA, 19 nt, Homo sapiens
  misc_RNA (1)...(19): siRNA sense strand
gagcugugaucugauaaca

SEQ ID NO: 1954777 - RNA, 19 nt, Homo sapiens
  misc_RNA (1)...(19): siRNA sense strand
gaaaaugaagccagauauu

SEQ ID NO: 1954778 - RNA, 19 nt, Homo sapiens
  misc_RNA (1)...(19): siRNA sense strand
gaaguggccagaggauuga

SEQ ID NO: 1954779 - RNA, 19 nt, Homo sapiens
  misc_RNA (1)...(19): siRNA sense strand
cuacagaagcauccuagaa

SEQ ID NO: 1954780 - RNA, 19 nt, Homo sapiens
  misc_RNA (1)...(19): siRNA sense strand
ggcaguagguggaggaucu

SEQ ID NO: 1954781 - RNA, 19 nt, Homo sapiens
  misc_RNA (1)...(19): siRNA sense strand
gaggaucucggaugacaga

SEQ ID NO: 1954782 - RNA, 19 nt, Homo sapiens
  misc_RNA (1)...(19): siRNA sense strand
gagaagucauccauuaagc

SEQ ID NO: 1954783 - RNA, 19 nt, Homo sapiens
  misc_RNA (1)...(19): siRNA sense strand
gauuccauauuuagugaga

SEQ ID NO: 1954784 - RNA, 19 nt, Homo sapiens
  misc_RNA (1)...(19): siRNA sense strand
agccagauauuguguguau

SEQ ID NO: 1954785 - RNA, 19 nt, Homo sapiens
  misc_RNA (1)...(19): siRNA sense strand
gaagagcuggucauuaagg

SEQ ID NO: 1954786 - RNA, 19 nt, Homo sapiens
  misc_RNA (1)...(19): siRNA sense strand
ccagauauuguguguauuc

SEQ ID NO: 1954787 - RNA, 19 nt, Homo sapiens
  misc_RNA (1)...(19): siRNA sense strand
ggaccuguuuagagcuuau

SEQ ID NO: 1954788 - RNA, 19 nt, Homo sapiens
  misc_RNA (1)...(19): siRNA sense strand
uuaauuugguacccauuga

SEQ ID NO: 1954789 - RNA, 19 nt, Homo sapiens
  misc_RNA (1)...(19): siRNA sense strand
ggaguggacagcacaggaa

SEQ ID NO: 1954790 - RNA, 19 nt, Homo sapiens
  misc_RNA (1)...(19): siRNA sense strand
gcugaaguccuuagauauc

SEQ ID NO: 1954791 - RNA, 19 nt, Homo sapiens
  misc_RNA (1)...(19): siRNA sense strand
uggcucauccugucucaua

SEQ ID NO: 1954792 - RNA, 19 nt, Homo sapiens
  misc_RNA (1)...(19): siRNA sense strand
aaaugaagccagauauugu

SEQ ID NO: 1954793 - RNA, 19 nt, Homo sapiens
  misc_RNA (1)...(19): siRNA sense strand
gcaacaaugcugugaucga

SEQ ID NO: 1954794 - RNA, 19 nt, Homo sapiens
  misc_RNA (1)...(19): siRNA sense strand
uagagugacuauuaccaau

SEQ ID NO: 1954795 - RNA, 19 nt, Homo sapiens
  misc_RNA (1)...(19): siRNA sense strand
augcaucacuugcuauguu

SEQ ID NO: 1954796 - RNA, 19 nt, Homo sapiens
  misc_RNA (1)...(19): siRNA sense strand
gaagggugcagacaucaag

SEQ ID NO: 1954797 - RNA, 19 nt, Homo sapiens
  misc_RNA (1)...(19): siRNA sense strand
auuaagcgcucagucauug

SEQ ID NO: 1954798 - RNA, 19 nt, Homo sapiens
  misc_RNA (1)...(19): siRNA sense strand
cuacauggaagcaaacaga

SEQ ID NO: 1954799 - RNA, 19 nt, Homo sapiens
  misc_RNA (1)...(19): siRNA sense strand
aaagaagccaauacacuga

SEQ ID NO: 1954800 - RNA, 19 nt, Homo sapiens
  misc_RNA (1)...(19): siRNA sense strand
uauccggagugaacugauu

SEQ ID NO: 1954801 - RNA, 19 nt, Homo sapiens
  misc_RNA (1)...(19): siRNA sense strand
uaaugaagcagacuuggau

SEQ ID NO: 1954802 - RNA, 19 nt, Homo sapiens
  misc_RNA (1)...(19): siRNA sense strand
aagcuaaacgagugaauga

SEQ ID NO: 1954803 - RNA, 19 nt, Homo sapiens
  misc_RNA (1)...(19): siRNA sense strand
gacucuacauggaagcaaa

SEQ ID NO: 1954804 - RNA, 19 nt, Homo sapiens
  misc_RNA (1)...(19): siRNA sense strand
aagaggaggaucuaaagaa

SEQ ID NO: 1954805 - RNA, 19 nt, Homo sapiens
  misc_RNA (1)...(19): siRNA sense strand
ccaccucuacuguuugaaa

SEQ ID NO: 1954806 - RNA, 19 nt, Homo sapiens
  misc_RNA (1)...(19): siRNA sense strand
gaaccugcuugagcguguu

SEQ ID NO: 1954807 - RNA, 19 nt, Homo sapiens
  misc_RNA (1)...(19): siRNA sense strand
guugggaacaaaccuuuaa

SEQ ID NO: 1954808 - RNA, 19 nt, Homo sapiens
  misc_RNA (1)...(19): siRNA sense strand
ggaggaaggaagcaauauc

SEQ ID NO: 1954809 - RNA, 19 nt, Homo sapiens
  misc_RNA (1)...(19): siRNA sense strand
cagcccagauugucagcaa

SEQ ID NO: 1954810 - RNA, 19 nt, Homo sapiens
  misc_RNA (1)...(19): siRNA sense strand
gaagcauccuagaauacgu

SEQ ID NO: 1954811 - RNA, 19 nt, Homo sapiens
  misc_RNA (1)...(19): siRNA sense strand
gagcagcgugacuucauug

SEQ ID NO: 1954812 - RNA, 19 nt, Homo sapiens
  misc_RNA (1)...(19): siRNA sense strand
ugaagaagucauugugguu

SEQ ID NO: 1954813 - RNA, 19 nt, Homo sapiens
  misc_RNA (1)...(19): siRNA sense strand
gcagauucuuugcgcuaca

SEQ ID NO: 1954814 - RNA, 19 nt, Homo sapiens
  misc_RNA (1)...(19): siRNA sense strand
aaggacugcuugauuggaa

SEQ ID NO: 1954815 - RNA, 19 nt, Homo sapiens
  misc_RNA (1)...(19): siRNA sense strand
aggccaagauagcauagaa

SEQ ID NO: 1954816 - RNA, 19 nt, Homo sapiens
  misc_RNA (1)...(19): siRNA sense strand
gcucauccugucucauaaa

SEQ ID NO: 1954817 - RNA, 19 nt, Homo sapiens
  misc_RNA (1)...(19): siRNA sense strand
ggaauuucaagcaguagug

SEQ ID NO: 1954818 - RNA, 19 nt, Homo sapiens
  misc_RNA (1)...(19): siRNA sense strand
ggaagacuuguccagauca

SEQ ID NO: 1954819 - RNA, 19 nt, Homo sapiens
  misc_RNA (1)...(19): siRNA sense strand
cugauuccauauuuaguga

SEQ ID NO: 1954820 - RNA, 19 nt, Homo sapiens
  misc_RNA (1)...(19): siRNA sense strand
gaauuucaagcaguaguga

SEQ ID NO: 1954821 - RNA, 19 nt, Homo sapiens
  misc_RNA (1)...(19): siRNA sense strand
uacagaagcauccuagaau

SEQ ID NO: 1954822 - RNA, 19 nt, Homo sapiens
  misc_RNA (1)...(19): siRNA sense strand
gauccauccuacagaagca

SEQ ID NO: 1954823 - RNA, 19 nt, Homo sapiens
  misc_RNA (1)...(19): siRNA sense strand
guggaggaaggaagcaaua

SEQ ID NO: 1954824 - RNA, 19 nt, Homo sapiens
  misc_RNA (1)...(19): siRNA sense strand
ugggaagacuuguccagau

SEQ ID NO: 1954825 - RNA, 19 nt, Homo sapiens
  misc_RNA (1)...(19): siRNA sense strand
gggaacugcagauucuuug

SEQ ID NO: 1954826 - RNA, 19 nt, Homo sapiens
  misc_RNA (1)...(19): siRNA sense strand
agugucaucugcaacaaug

SEQ ID NO: 1954827 - RNA, 19 nt, Homo sapiens
  misc_RNA (1)...(19): siRNA sense strand
ggcucuaugugcagaauuc

SEQ ID NO: 1954828 - RNA, 19 nt, Homo sapiens
  misc_RNA (1)...(19): siRNA sense strand
cauccugucucauaaaaga

SEQ ID NO: 1954829 - RNA, 19 nt, Homo sapiens
  misc_RNA (1)...(19): siRNA sense strand
gagcagaccucaugaauaa

SEQ ID NO: 1954830 - RNA, 19 nt, Homo sapiens
  misc_RNA (1)...(19): siRNA sense strand
gcaguguucucacaacuua

SEQ ID NO: 1954831 - RNA, 19 nt, Homo sapiens
  misc_RNA (1)...(19): siRNA sense strand
gggaagaacuauuuguaaa

SEQ ID NO: 1954832 - RNA, 19 nt, Homo sapiens
  misc_RNA (1)...(19): siRNA sense strand
aaacaggccucuucagaaa

SEQ ID NO: 1954833 - RNA, 19 nt, Homo sapiens
  misc_RNA (1)...(19): siRNA sense strand
gaaagaaugggaagaacua

SEQ ID NO: 1954834 - RNA, 19 nt, Homo sapiens
  misc_RNA (1)...(19): siRNA sense strand
gaauuaagagcaugguaua

SEQ ID NO: 1954835 - RNA, 19 nt, Homo sapiens
  misc_RNA (1)...(19): siRNA sense strand
ggucugggaugccuuguuu

SEQ ID NO: 1954836 - RNA, 19 nt, Homo sapiens
  misc_RNA (1)...(19): siRNA sense strand
uaacaagucuggaggagau

SEQ ID NO: 1954837 - RNA, 19 nt, Homo sapiens
  misc_RNA (1)...(19): siRNA sense strand
gaaauugcaccacagauau

SEQ ID NO: 1954838 - RNA, 19 nt, Homo sapiens
  misc_RNA (1)...(19): siRNA sense strand
gcuggaagcuauuucuuug

SEQ ID NO: 1954839 - RNA, 19 nt, Homo sapiens
  misc_RNA (1)...(19): siRNA sense strand
gaagaagcaugauauugag

SEQ ID NO: 1954840 - RNA, 19 nt, Homo sapiens
  misc_RNA (1)...(19): siRNA sense strand
uaaagaacuucgaucaaug

SEQ ID NO: 1954841 - RNA, 19 nt, Homo sapiens
  misc_RNA (1)...(19): siRNA sense strand
gaagaucaaauucugguuu

SEQ ID NO: 1954842 - RNA, 19 nt, Homo sapiens
  misc_RNA (1)...(19): siRNA sense strand
acaaagggcuaaguucuaa

SEQ ID NO: 1954843 - RNA, 19 nt, Homo sapiens
  misc_RNA (1)...(19): siRNA sense strand
gauguacacucacugauuc

SEQ ID NO: 1954844 - RNA, 19 nt, Homo sapiens
  misc_RNA (1)...(19): siRNA sense strand
ugaagaagcaugauauuga

SEQ ID NO: 1954845 - RNA, 19 nt, Homo sapiens
  misc_RNA (1)...(19): siRNA sense strand
uggaggagauucaaauaaa

SEQ ID NO: 1954846 - RNA, 19 nt, Homo sapiens
  misc_RNA (1)...(19): siRNA sense strand
gaagagaacgaacagauca

SEQ ID NO: 1954847 - RNA, 19 nt, Homo sapiens
  misc_RNA (1)...(19): siRNA sense strand
ggacacucaucuuguaaau

SEQ ID NO: 1954848 - RNA, 19 nt, Homo sapiens
  misc_RNA (1)...(19): siRNA sense strand
gaagcuauuucuuuguguu

SEQ ID NO: 1954849 - RNA, 19 nt, Homo sapiens
  misc_RNA (1)...(19): siRNA sense strand
gaucaauaauccucuuuca

SEQ ID NO: 1954850 - RNA, 19 nt, Homo sapiens
  misc_RNA (1)...(19): siRNA sense strand
gggcaugcacgaacuguua

SEQ ID NO: 1954851 - RNA, 19 nt, Homo sapiens
  misc_RNA (1)...(19): siRNA sense strand
ccacagauauauggguuaa

SEQ ID NO: 1954852 - RNA, 19 nt, Homo sapiens
  misc_RNA (1)...(19): siRNA sense strand
guuagcaccuauagucuuu

SEQ ID NO: 1954853 - RNA, 19 nt, Homo sapiens
  misc_RNA (1)...(19): siRNA sense strand
ggagcagaccucaugaaua

SEQ ID NO: 1954854 - RNA, 19 nt, Homo sapiens
  misc_RNA (1)...(19): siRNA sense strand
caagaccagugacuuauca

SEQ ID NO: 1954855 - RNA, 19 nt, Homo sapiens
  misc_RNA (1)...(19): siRNA sense strand
caaaggugauggacacuca

SEQ ID NO: 1954856 - RNA, 19 nt, Homo sapiens
  misc_RNA (1)...(19): siRNA sense strand
cugaguaucuggaacauga

SEQ ID NO: 1954857 - RNA, 19 nt, Homo sapiens
  misc_RNA (1)...(19): siRNA sense strand
caaauuuccuuccuucaag

SEQ ID NO: 1954858 - RNA, 19 nt, Homo sapiens
  misc_RNA (1)...(19): siRNA sense strand
guacacucacugauucuua

SEQ ID NO: 1954859 - RNA, 19 nt, Homo sapiens
  misc_RNA (1)...(19): siRNA sense strand
gaacaagaaguaggcauug

SEQ ID NO: 1954860 - RNA, 19 nt, Homo sapiens
  misc_RNA (1)...(19): siRNA sense strand
gaacgaacagaucaccauu

SEQ ID NO: 1954861 - RNA, 19 nt, Homo sapiens
  misc_RNA (1)...(19): siRNA sense strand
ccagagcguucaaauguca

SEQ ID NO: 1954862 - RNA, 19 nt, Homo sapiens
  misc_RNA (1)...(19): siRNA sense strand
gaagggagucuuuggaaca

SEQ ID NO: 1954863 - RNA, 19 nt, Homo sapiens
  misc_RNA (1)...(19): siRNA sense strand
ggccagagcguucaaaugu

SEQ ID NO: 1954864 - RNA, 19 nt, Homo sapiens
  misc_RNA (1)...(19): siRNA sense strand
gccagaagaacaagaagua

SEQ ID NO: 1954865 - RNA, 19 nt, Homo sapiens
  misc_RNA (1)...(19): siRNA sense strand
agaaauugcaccacagaua

SEQ ID NO: 1954866 - RNA, 19 nt, Homo sapiens
  misc_RNA (1)...(19): siRNA sense strand
gcaagaaaaugugagaaaa

SEQ ID NO: 1954867 - RNA, 19 nt, Homo sapiens
  misc_RNA (1)...(19): siRNA sense strand
gcaguugaaugaccuggau

SEQ ID NO: 1954868 - RNA, 19 nt, Homo sapiens
  misc_RNA (1)...(19): siRNA sense strand
ggauguacacucacugauu

SEQ ID NO: 1954869 - RNA, 19 nt, Homo sapiens
  misc_RNA (1)...(19): siRNA sense strand
agaaugggaagaacuauuu

SEQ ID NO: 1954870 - RNA, 19 nt, Homo sapiens
  misc_RNA (1)...(19): siRNA sense strand
uaaacaggccucuucagaa

SEQ ID NO: 1954871 - RNA, 19 nt, Homo sapiens
  misc_RNA (1)...(19): siRNA sense strand
gaguuugccuggaggaaga

SEQ ID NO: 1954872 - RNA, 19 nt, Homo sapiens
  misc_RNA (1)...(19): siRNA sense strand
gcacuugaacagacuagaa

SEQ ID NO: 1954873 - RNA, 19 nt, Homo sapiens
  misc_RNA (1)...(19): siRNA sense strand
gauaaagaacuucgaucaa

SEQ ID NO: 1954874 - RNA, 19 nt, Homo sapiens
  misc_RNA (1)...(19): siRNA sense strand
ucaauaauccucuuucaca

SEQ ID NO: 1954875 - RNA, 19 nt, Homo sapiens
  misc_RNA (1)...(19): siRNA sense strand
agacaaaagucaauggaua

SEQ ID NO: 1954876 - RNA, 19 nt, Homo sapiens
  misc_RNA (1)...(19): siRNA sense strand
aagcaugccugugcaauug

SEQ ID NO: 1954877 - RNA, 19 nt, Homo sapiens
  misc_RNA (1)...(19): siRNA sense strand
ccuuagagauccaaagaga

SEQ ID NO: 1954878 - RNA, 19 nt, Homo sapiens
  misc_RNA (1)...(19): siRNA sense strand
gaacagacuagaaauugca

SEQ ID NO: 1954879 - RNA, 19 nt, Homo sapiens
  misc_RNA (1)...(19): siRNA sense strand
agcaugauauugagcuuua

SEQ ID NO: 1954880 - RNA, 19 nt, Homo sapiens
  misc_RNA (1)...(19): siRNA sense strand
ccaacaagauuugaugauc

SEQ ID NO: 1954881 - RNA, 19 nt, Homo sapiens
  misc_RNA (1)...(19): siRNA sense strand
acaauuacuuggcaacaau

SEQ ID NO: 1954882 - RNA, 19 nt, Homo sapiens
  misc_RNA (1)...(19): siRNA sense strand
gaaaagaaucugaagaaga

SEQ ID NO: 1954883 - RNA, 19 nt, Homo sapiens
  misc_RNA (1)...(19): siRNA sense strand
gaccagugacuuaucaauu

SEQ ID NO: 1954884 - RNA, 19 nt, Homo sapiens
  misc_RNA (1)...(19): siRNA sense strand
gcuuugaucucuaguaacu

SEQ ID NO: 1954885 - RNA, 19 nt, Homo sapiens
  misc_RNA (1)...(19): siRNA sense strand
gauuuagggccaacaauug

SEQ ID NO: 1954886 - RNA, 19 nt, Homo sapiens
  misc_RNA (1)...(19): siRNA sense strand
uuacuaaagucaaccagau

SEQ ID NO: 1954887 - RNA, 19 nt, Homo sapiens
  misc_RNA (1)...(19): siRNA sense strand
gacucuggcuucaccauug

SEQ ID NO: 1954888 - RNA, 19 nt, Homo sapiens
  misc_RNA (1)...(19): siRNA sense strand
gaugaucaauaauccucuu

SEQ ID NO: 1954889 - RNA, 19 nt, Homo sapiens
  misc_RNA (1)...(19): siRNA sense strand
ccacugguguucucagauc

SEQ ID NO: 1954890 - RNA, 19 nt, Homo sapiens
  misc_RNA (1)...(19): siRNA sense strand
gcaaauacugugcaaaggu

SEQ ID NO: 1954891 - RNA, 19 nt, Homo sapiens
  misc_RNA (1)...(19): siRNA sense strand
uuagagauccaaagagaaa

SEQ ID NO: 1954892 - RNA, 19 nt, Homo sapiens
  misc_RNA (1)...(19): siRNA sense strand
uacacucacugauucuuaa

SEQ ID NO: 1954893 - RNA, 19 nt, Homo sapiens
  misc_RNA (1)...(19): siRNA sense strand
ggaggagauucaaauaaaa

SEQ ID NO: 1954894 - RNA, 19 nt, Homo sapiens
  misc_RNA (1)...(19): siRNA sense strand
gaacuguuagcaccuauag

SEQ ID NO: 1954895 - RNA, 19 nt, Homo sapiens
  misc_RNA (1)...(19): siRNA sense strand
aaagaacuucgaucaauga

SEQ ID NO: 1954896 - RNA, 19 nt, Homo sapiens
  misc_RNA (1)...(19): siRNA sense strand
gaaagaaacacugaugacu

SEQ ID NO: 1954897 - RNA, 19 nt, Homo sapiens
  misc_RNA (1)...(19): siRNA sense strand
gcaaaacuaugggcagaaa

SEQ ID NO: 1954898 - RNA, 19 nt, Homo sapiens
  misc_RNA (1)...(19): siRNA sense strand
ugaacaagaugucaaaaga

SEQ ID NO: 1954899 - RNA, 19 nt, Homo sapiens
  misc_RNA (1)...(19): siRNA sense strand
ucguagccauguuacuuua

SEQ ID NO: 1954900 - RNA, 19 nt, Homo sapiens
  misc_RNA (1)...(19): siRNA sense strand
gggaaagaaacacugauga

SEQ ID NO: 1954901 - RNA, 19 nt, Homo sapiens
  misc_RNA (1)...(19): siRNA sense strand
ggaagcuauuucuuugugu

SEQ ID NO: 1954902 - RNA, 19 nt, Homo sapiens
  misc_RNA (1)...(19): siRNA sense strand
uggaugccaugugcaaaua

SEQ ID NO: 1954903 - RNA, 19 nt, Homo sapiens
  misc_RNA (1)...(19): siRNA sense strand
ccaaauuuccuuccuucaa

SEQ ID NO: 1954904 - RNA, 19 nt, Homo sapiens
  misc_RNA (1)...(19): siRNA sense strand
gcaugccugugcaauugaa

SEQ ID NO: 1954905 - RNA, 19 nt, Homo sapiens
  misc_RNA (1)...(19): siRNA sense strand
ggaacaugaugccuaugca

SEQ ID NO: 1954906 - RNA, 19 nt, Homo sapiens
  misc_RNA (1)...(19): siRNA sense strand
gcacagcccagugaggaaa

SEQ ID NO: 1954907 - RNA, 19 nt, Homo sapiens
  misc_RNA (1)...(19): siRNA sense strand
gcaguugcuuuauaaacag

SEQ ID NO: 1954908 - RNA, 19 nt, Homo sapiens
  misc_RNA (1)...(19): siRNA sense strand
caugguauagcaacauuaa

SEQ ID NO: 1954909 - RNA, 19 nt, Homo sapiens
  misc_RNA (1)...(19): siRNA sense strand
ggaagaacuauuuguaaac

SEQ ID NO: 1954910 - RNA, 19 nt, Homo sapiens
  misc_RNA (1)...(19): siRNA sense strand
gguauagcaacauuaaaga

SEQ ID NO: 1954911 - RNA, 19 nt, Homo sapiens
  misc_RNA (1)...(19): siRNA sense strand
gcagccagaagaacaagaa

SEQ ID NO: 1954912 - RNA, 19 nt, Homo sapiens
  misc_RNA (1)...(19): siRNA sense strand
uaucuucguagccauguua

SEQ ID NO: 1954913 - RNA, 19 nt, Homo sapiens
  misc_RNA (1)...(19): siRNA sense strand
cagccuggguuuaguagau

SEQ ID NO: 1954914 - RNA, 19 nt, Homo sapiens
  misc_RNA (1)...(19): siRNA sense strand
cuacugaagaagcaugaua

SEQ ID NO: 1954915 - RNA, 19 nt, Homo sapiens
  misc_RNA (1)...(19): siRNA sense strand
uuaaacaggccucuucaga

SEQ ID NO: 1954916 - RNA, 19 nt, Homo sapiens
  misc_RNA (1)...(19): siRNA sense strand
aaauugcaccacagauaua

SEQ ID NO: 1954917 - RNA, 19 nt, Homo sapiens
  misc_RNA (1)...(19): siRNA sense strand
ucucacaacuuauggaaac

SEQ ID NO: 1954918 - RNA, 19 nt, Homo sapiens
  misc_RNA (1)...(19): siRNA sense strand
guagccauguuacuuuaca

SEQ ID NO: 1954919 - RNA, 19 nt, Homo sapiens
  misc_RNA (1)...(19): siRNA sense strand
aggaucaucuacugaagaa

SEQ ID NO: 1954920 - RNA, 19 nt, Homo sapiens
  misc_RNA (1)...(19): siRNA sense strand
ggaaagaaacacugaugac

SEQ ID NO: 1954921 - RNA, 19 nt, Homo sapiens
  misc_RNA (1)...(19): siRNA sense strand
uggaagcuauuucuuugug

SEQ ID NO: 1954922 - RNA, 19 nt, Homo sapiens
  misc_RNA (1)...(19): siRNA sense strand
cuccaagcguugagaguuu

SEQ ID NO: 1954923 - RNA, 19 nt, Homo sapiens
  misc_RNA (1)...(19): siRNA sense strand
accagugacuuaucaauuc

SEQ ID NO: 1954924 - RNA, 19 nt, Homo sapiens
  misc_RNA (1)...(19): siRNA sense strand
auauugagcuuuacaugca

SEQ ID NO: 1954925 - RNA, 19 nt, Homo sapiens
  misc_RNA (1)...(19): siRNA sense strand
ccaccaagcuuuucuacau

SEQ ID NO: 1954926 - RNA, 19 nt, Homo sapiens
  misc_RNA (1)...(19): siRNA sense strand
gaacaagaugucaaaagaa

SEQ ID NO: 1954927 - RNA, 19 nt, Homo sapiens
  misc_RNA (1)...(19): siRNA sense strand
aaacagaucaaagacauuc

SEQ ID NO: 1954928 - RNA, 19 nt, Homo sapiens
  misc_RNA (1)...(19): siRNA sense strand
ggaaagaaugggaagaacu

SEQ ID NO: 1954929 - RNA, 19 nt, Homo sapiens
  misc_RNA (1)...(19): siRNA sense strand
ggacgagccuucaaacuuu

SEQ ID NO: 1954930 - RNA, 19 nt, Homo sapiens
  misc_RNA (1)...(19): siRNA sense strand
gaagagggcucagaacuug

SEQ ID NO: 1954931 - RNA, 19 nt, Homo sapiens
  misc_RNA (1)...(19): siRNA sense strand
agaauaaacugcucucuaa

SEQ ID NO: 1954932 - RNA, 19 nt, Homo sapiens
  misc_RNA (1)...(19): siRNA sense strand
caaagaacauuaaggagaa

SEQ ID NO: 1954933 - RNA, 19 nt, Homo sapiens
  misc_RNA (1)...(19): siRNA sense strand
gaaaguguccagcggaaua

SEQ ID NO: 1954934 - RNA, 19 nt, Homo sapiens
  misc_RNA (1)...(19): siRNA sense strand
gcauagaucuugagaacau

SEQ ID NO: 1954935 - RNA, 19 nt, Homo sapiens
  misc_RNA (1)...(19): siRNA sense strand
cuaaggagcuggagcacua

SEQ ID NO: 1954936 - RNA, 19 nt, Homo sapiens
  misc_RNA (1)...(19): siRNA sense strand
guacaugaaugaucacaga

SEQ ID NO: 1954937 - RNA, 19 nt, Homo sapiens
  misc_RNA (1)...(19): siRNA sense strand
acaaaggugucaucauuaa

SEQ ID NO: 1954938 - RNA, 19 nt, Homo sapiens
  misc_RNA (1)...(19): siRNA sense strand
gaacaaccagcucgcauuu

SEQ ID NO: 1954939 - RNA, 19 nt, Homo sapiens
  misc_RNA (1)...(19): siRNA sense strand
ggccugagcucaucaacuu

SEQ ID NO: 1954940 - RNA, 19 nt, Homo sapiens
  misc_RNA (1)...(19): siRNA sense strand
ucagagagcucaagcaagu

SEQ ID NO: 1954941 - RNA, 19 nt, Homo sapiens
  misc_RNA (1)...(19): siRNA sense strand
ccgggaagcugcagacuuu

SEQ ID NO: 1954942 - RNA, 19 nt, Homo sapiens
  misc_RNA (1)...(19): siRNA sense strand
gaacaucaacaagaacuuu

SEQ ID NO: 1954943 - RNA, 19 nt, Homo sapiens
  misc_RNA (1)...(19): siRNA sense strand
gaaccaagacaaccugcua

SEQ ID NO: 1954944 - RNA, 19 nt, Homo sapiens
  misc_RNA (1)...(19): siRNA sense strand
gaagagacgggcagaguug

SEQ ID NO: 1954945 - RNA, 19 nt, Homo sapiens
  misc_RNA (1)...(19): siRNA sense strand
acaagaacuuugagcagua

SEQ ID NO: 1954946 - RNA, 19 nt, Homo sapiens
  misc_RNA (1)...(19): siRNA sense strand
ucauguaccucuccaaguu

SEQ ID NO: 1954947 - RNA, 19 nt, Homo sapiens
  misc_RNA (1)...(19): siRNA sense strand
gaaguucuaugggaaguuc

SEQ ID NO: 1954948 - RNA, 19 nt, Homo sapiens
  misc_RNA (1)...(19): siRNA sense strand
ucuaaaggccugucucaua

SEQ ID NO: 1954949 - RNA, 19 nt, Homo sapiens
  misc_RNA (1)...(19): siRNA sense strand
acaaccagcucgcauuuga

SEQ ID NO: 1954950 - RNA, 19 nt, Homo sapiens
  misc_RNA (1)...(19): siRNA sense strand
ugacugcgaugaaggcaaa

SEQ ID NO: 1954951 - RNA, 19 nt, Homo sapiens
  misc_RNA (1)...(19): siRNA sense strand
ccaaagcccugugguacaa

SEQ ID NO: 1954952 - RNA, 19 nt, Homo sapiens
  misc_RNA (1)...(19): siRNA sense strand
cggagaacaucaacaagaa

SEQ ID NO: 1954953 - RNA, 19 nt, Homo sapiens
  misc_RNA (1)...(19): siRNA sense strand
gaagaaacaggcauagauc

SEQ ID NO: 1954954 - RNA, 19 nt, Homo sapiens
  misc_RNA (1)...(19): siRNA sense strand
uaaagaagaaacaggcaua

SEQ ID NO: 1954955 - RNA, 19 nt, Homo sapiens
  misc_RNA (1)...(19): siRNA sense strand
gaaacaggcauagaucuug

SEQ ID NO: 1954956 - RNA, 19 nt, Homo sapiens
  misc_RNA (1)...(19): siRNA sense strand
gcucagaacuuggccaaca

SEQ ID NO: 1954957 - RNA, 19 nt, Homo sapiens
  misc_RNA (1)...(19): siRNA sense strand
aaacaggcauagaucuuga

SEQ ID NO: 1954958 - RNA, 19 nt, Homo sapiens
  misc_RNA (1)...(19): siRNA sense strand
gaaaucagaacaaagucaa

SEQ ID NO: 1954959 - RNA, 19 nt, Homo sapiens
  misc_RNA (1)...(19): siRNA sense strand
gugaagcauuuguauauca

SEQ ID NO: 1954960 - RNA, 19 nt, Homo sapiens
  misc_RNA (1)...(19): siRNA sense strand
ucaaguccauggcgaauca

SEQ ID NO: 1954961 - RNA, 19 nt, Homo sapiens
  misc_RNA (1)...(19): siRNA sense strand
cuaaaggccugucucauac

SEQ ID NO: 1954962 - RNA, 19 nt, Homo sapiens
  misc_RNA (1)...(19): siRNA sense strand
caccaagugucucauaguu

SEQ ID NO: 1954963 - RNA, 19 nt, Homo sapiens
  misc_RNA (1)...(19): siRNA sense strand
gcuuucaucuucaaucaga

SEQ ID NO: 1954964 - RNA, 19 nt, Homo sapiens
  misc_RNA (1)...(19): siRNA sense strand
gaguugaaauccaugugaa

SEQ ID NO: 1954965 - RNA, 19 nt, Homo sapiens
  misc_RNA (1)...(19): siRNA sense strand
caucaccgccaacuucaua

SEQ ID NO: 1954966 - RNA, 19 nt, Homo sapiens
  misc_RNA (1)...(19): siRNA sense strand
cugcaagccucacuucauu

SEQ ID NO: 1954967 - RNA, 19 nt, Homo sapiens
  misc_RNA (1)...(19): siRNA sense strand
gaauaaacugcucucuaaa

SEQ ID NO: 1954968 - RNA, 19 nt, Homo sapiens
  misc_RNA (1)...(19): siRNA sense strand
acacaaagaacauuaagga

SEQ ID NO: 1954969 - RNA, 19 nt, Homo sapiens
  misc_RNA (1)...(19): siRNA sense strand
ugucggaguuugaguuuga

SEQ ID NO: 1954970 - RNA, 19 nt, Homo sapiens
  misc_RNA (1)...(19): siRNA sense strand
cgacacguguuacuucugu

SEQ ID NO: 1954971 - RNA, 19 nt, Homo sapiens
  misc_RNA (1)...(19): siRNA sense strand
gcauccacgugcaaaggua

SEQ ID NO: 1954972 - RNA, 19 nt, Homo sapiens
  misc_RNA (1)...(19): siRNA sense strand
aagacaaccugcuauccua

SEQ ID NO: 1954973 - RNA, 19 nt, Homo sapiens
  misc_RNA (1)...(19): siRNA sense strand
gacuuuaccugcauguaug

SEQ ID NO: 1954974 - RNA, 19 nt, Homo sapiens
  misc_RNA (1)...(19): siRNA sense strand
gaccucagcuuggccaaau

SEQ ID NO: 1954975 - RNA, 19 nt, Homo sapiens
  misc_RNA (1)...(19): siRNA sense strand
cccaucaggugaagcauuu

SEQ ID NO: 1954976 - RNA, 19 nt, Homo sapiens
  misc_RNA (1)...(19): siRNA sense strand
cuacaccucuggccuuuca

SEQ ID NO: 1954977 - RNA, 19 nt, Homo sapiens
  misc_RNA (1)...(19): siRNA sense strand
ggaagagacgggcagaguu

SEQ ID NO: 1954978 - RNA, 19 nt, Homo sapiens
  misc_RNA (1)...(19): siRNA sense strand
ucacuucauucacuguaaa

SEQ ID NO: 1954979 - RNA, 19 nt, Homo sapiens
  misc_RNA (1)...(19): siRNA sense strand
acagggaauuucacacaaa

SEQ ID NO: 1954980 - RNA, 19 nt, Homo sapiens
  misc_RNA (1)...(19): siRNA sense strand
gagagaaugacaugaacaa

SEQ ID NO: 1954981 - RNA, 19 nt, Homo sapiens
  misc_RNA (1)...(19): siRNA sense strand
caacagggaauuucacaca

SEQ ID NO: 1954982 - RNA, 19 nt, Homo sapiens
  misc_RNA (1)...(19): siRNA sense strand
cagaauaaacugcucucua

SEQ ID NO: 1954983 - RNA, 19 nt, Homo sapiens
  misc_RNA (1)...(19): siRNA sense strand
ucaccgaccugaccacauc

SEQ ID NO: 1954984 - RNA, 19 nt, Homo sapiens
  misc_RNA (1)...(19): siRNA sense strand
uaaggaagguggaaaucag

SEQ ID NO: 1954985 - RNA, 19 nt, Homo sapiens
  misc_RNA (1)...(19): siRNA sense strand
caacuuugacucuuugaau

SEQ ID NO: 1954986 - RNA, 19 nt, Homo sapiens
  misc_RNA (1)...(19): siRNA sense strand
ggaguugaaauccauguga

SEQ ID NO: 1954987 - RNA, 19 nt, Homo sapiens
  misc_RNA (1)...(19): siRNA sense strand
gagaggaggaggcaacaug

SEQ ID NO: 1954988 - RNA, 19 nt, Homo sapiens
  misc_RNA (1)...(19): siRNA sense strand
ggaaaucagaacaaaguca

SEQ ID NO: 1954989 - RNA, 19 nt, Homo sapiens
  misc_RNA (1)...(19): siRNA sense strand
cggagaacgugaaccaaga

SEQ ID NO: 1954990 - RNA, 19 nt, Homo sapiens
  misc_RNA (1)...(19): siRNA sense strand
caacuacagcucauccuau

SEQ ID NO: 1954991 - RNA, 19 nt, Homo sapiens
  misc_RNA (1)...(19): siRNA sense strand
gaauuucacacaaagaaca

SEQ ID NO: 1954992 - RNA, 19 nt, Homo sapiens
  misc_RNA (1)...(19): siRNA sense strand
gggaauuucacacaaagaa

SEQ ID NO: 1954993 - RNA, 19 nt, Homo sapiens
  misc_RNA (1)...(19): siRNA sense strand
ggacugcacccacuauuuu

SEQ ID NO: 1954994 - RNA, 19 nt, Homo sapiens
  misc_RNA (1)...(19): siRNA sense strand
gcaggaacgccgugucuca

SEQ ID NO: 1954995 - RNA, 19 nt, Homo sapiens
  misc_RNA (1)...(19): siRNA sense strand
caccuugccuccauguuug

SEQ ID NO: 1954996 - RNA, 19 nt, Homo sapiens
  misc_RNA (1)...(19): siRNA sense strand
cuggaaggguucagaagaa

SEQ ID NO: 1954997 - RNA, 19 nt, Homo sapiens
  misc_RNA (1)...(19): siRNA sense strand
cccaucaccuccucugaaa

SEQ ID NO: 1954998 - RNA, 19 nt, Homo sapiens
  misc_RNA (1)...(19): siRNA sense strand
gaacgugaaccaagacaac

SEQ ID NO: 1954999 - RNA, 19 nt, Homo sapiens
  misc_RNA (1)...(19): siRNA sense strand
uaucaguauucgccaacua

SEQ ID NO: 1955000 - RNA, 19 nt, Homo sapiens
  misc_RNA (1)...(19): siRNA sense strand
gcaagccucacuucauuca

SEQ ID NO: 1955001 - RNA, 19 nt, Homo sapiens
  misc_RNA (1)...(19): siRNA sense strand
ugaaugaucacagaccuaa

SEQ ID NO: 1955002 - RNA, 19 nt, Homo sapiens
  misc_RNA (1)...(19): siRNA sense strand
ccaggaaggagucagauau

SEQ ID NO: 1955003 - RNA, 19 nt, Homo sapiens
  misc_RNA (1)...(19): siRNA sense strand
ugaaauccaugugaaugug

SEQ ID NO: 1955004 - RNA, 19 nt, Homo sapiens
  misc_RNA (1)...(19): siRNA sense strand
caucgaccauaucaguauu

SEQ ID NO: 1955005 - RNA, 19 nt, Homo sapiens
  misc_RNA (1)...(19): siRNA sense strand
ucaccuugccuccauguuu

SEQ ID NO: 1955006 - RNA, 19 nt, Homo sapiens
  misc_RNA (1)...(19): siRNA sense strand
gagaaugacaugaacaaac

SEQ ID NO: 1955007 - RNA, 19 nt, Homo sapiens
  misc_RNA (1)...(19): siRNA sense strand
ccaacuucauaaacagaaa

SEQ ID NO: 1955008 - RNA, 19 nt, Homo sapiens
  misc_RNA (1)...(19): siRNA sense strand
cagcugaaguccuggucaa

SEQ ID NO: 1955009 - RNA, 19 nt, Homo sapiens
  misc_RNA (1)...(19): siRNA sense strand
agaaugacaugaacaaacg

SEQ ID NO: 1955010 - RNA, 19 nt, Homo sapiens
  misc_RNA (1)...(19): siRNA sense strand
gcugccauccuuagacuuu

SEQ ID NO: 1955011 - RNA, 19 nt, Homo sapiens
  misc_RNA (1)...(19): siRNA sense strand
cggcauggauggugaagag

SEQ ID NO: 1955012 - RNA, 19 nt, Homo sapiens
  misc_RNA (1)...(19): siRNA sense strand
aacuacagcucauccuauu

SEQ ID NO: 1955013 - RNA, 19 nt, Homo sapiens
  misc_RNA (1)...(19): siRNA sense strand
gugcuacacccacuucuug

SEQ ID NO: 1955014 - RNA, 19 nt, Homo sapiens
  misc_RNA (1)...(19): siRNA sense strand
ggucaaaccggagagaaug

SEQ ID NO: 1955015 - RNA, 19 nt, Homo sapiens
  misc_RNA (1)...(19): siRNA sense strand
ugacuuuaccugcauguau

SEQ ID NO: 1955016 - RNA, 19 nt, Homo sapiens
  misc_RNA (1)...(19): siRNA sense strand
aggcauagaucuugagaac

SEQ ID NO: 1955017 - RNA, 19 nt, Homo sapiens
  misc_RNA (1)...(19): siRNA sense strand
agaagaaacaggcauagau

SEQ ID NO: 1955018 - RNA, 19 nt, Homo sapiens
  misc_RNA (1)...(19): siRNA sense strand
uucaggaccuuaaagaaga

SEQ ID NO: 1955019 - RNA, 19 nt, Homo sapiens
  misc_RNA (1)...(19): siRNA sense strand
gugggaagcuggcgauugc

SEQ ID NO: 1955020 - RNA, 19 nt, Homo sapiens
  misc_RNA (1)...(19): siRNA sense strand
gcugggaguugaaauccau

SEQ ID NO: 1955021 - RNA, 19 nt, Homo sapiens
  misc_RNA (1)...(19): siRNA sense strand
cuacagcucauccuauuca

SEQ ID NO: 1955022 - RNA, 19 nt, Homo sapiens
  misc_RNA (1)...(19): siRNA sense strand
guggaaaucagaacaaagu

SEQ ID NO: 1955023 - RNA, 19 nt, Homo sapiens
  misc_RNA (1)...(19): siRNA sense strand
gaagguggaaaucagaaca

SEQ ID NO: 1955024 - RNA, 19 nt, Homo sapiens
  misc_RNA (1)...(19): siRNA sense strand
guaaggaagguggaaauca

SEQ ID NO: 1955025 - RNA, 19 nt, Homo sapiens
  misc_RNA (1)...(19): siRNA sense strand
gggcuccaaucaagagugu

SEQ ID NO: 1955026 - RNA, 19 nt, Homo sapiens
  misc_RNA (1)...(19): siRNA sense strand
ggugaagcauuuguauauc

SEQ ID NO: 1955027 - RNA, 19 nt, Homo sapiens
  misc_RNA (1)...(19): siRNA sense strand
uaucucaaccucacauuuc

SEQ ID NO: 1955028 - RNA, 19 nt, Homo sapiens
  misc_RNA (1)...(19): siRNA sense strand
gucaaucuguacaugaaug

SEQ ID NO: 1955029 - RNA, 19 nt, Homo sapiens
  misc_RNA (1)...(19): siRNA sense strand
ccagaaagcuccagauaaa

SEQ ID NO: 1955030 - RNA, 19 nt, Homo sapiens
  misc_RNA (1)...(19): siRNA sense strand
gagaugagcugacggaaau

SEQ ID NO: 1955031 - RNA, 19 nt, Homo sapiens
  misc_RNA (1)...(19): siRNA sense strand
caagauggcugaugucuca

SEQ ID NO: 1955032 - RNA, 19 nt, Homo sapiens
  misc_RNA (1)...(19): siRNA sense strand
aaacauugcuagcauuuga

SEQ ID NO: 1955033 - RNA, 19 nt, Homo sapiens
  misc_RNA (1)...(19): siRNA sense strand
caagauguccuauuauuga

SEQ ID NO: 1955034 - RNA, 19 nt, Homo sapiens
  misc_RNA (1)...(19): siRNA sense strand
ggugauagaugcccucaga

SEQ ID NO: 1955035 - RNA, 19 nt, Homo sapiens
  misc_RNA (1)...(19): siRNA sense strand
gaccagaaagcuccagaua

SEQ ID NO: 1955036 - RNA, 19 nt, Homo sapiens
  misc_RNA (1)...(19): siRNA sense strand
gaacccagaugcgguggaa

SEQ ID NO: 1955037 - RNA, 19 nt, Homo sapiens
  misc_RNA (1)...(19): siRNA sense strand
ggaccauccuggaagagaa

SEQ ID NO: 1955038 - RNA, 19 nt, Homo sapiens
  misc_RNA (1)...(19): siRNA sense strand
ggaagauacuggugucucu

SEQ ID NO: 1955039 - RNA, 19 nt, Homo sapiens
  misc_RNA (1)...(19): siRNA sense strand
cagagagggugcugaguga

SEQ ID NO: 1955040 - RNA, 19 nt, Homo sapiens
  misc_RNA (1)...(19): siRNA sense strand
gagcuuagaagaucccaaa

SEQ ID NO: 1955041 - RNA, 19 nt, Homo sapiens
  misc_RNA (1)...(19): siRNA sense strand
gaacauccaggaccaagau

SEQ ID NO: 1955042 - RNA, 19 nt, Homo sapiens
  misc_RNA (1)...(19): siRNA sense strand
gcgguggaauuguuuaaga

SEQ ID NO: 1955043 - RNA, 19 nt, Homo sapiens
  misc_RNA (1)...(19): siRNA sense strand
ucaagaagauccggaggaa

SEQ ID NO: 1955044 - RNA, 19 nt, Homo sapiens
  misc_RNA (1)...(19): siRNA sense strand
agacagaacuccggaagau

SEQ ID NO: 1955045 - RNA, 19 nt, Homo sapiens
  misc_RNA (1)...(19): siRNA sense strand
gcagaagacccgaccauag

SEQ ID NO: 1955046 - RNA, 19 nt, Homo sapiens
  misc_RNA (1)...(19): siRNA sense strand
cagaugcgguggaauuguu

SEQ ID NO: 1955047 - RNA, 19 nt, Homo sapiens
  misc_RNA (1)...(19): siRNA sense strand
cagaagacccgaccauaga

SEQ ID NO: 1955048 - RNA, 19 nt, Homo sapiens
  misc_RNA (1)...(19): siRNA sense strand
gaacaacaaccagcagaau

SEQ ID NO: 1955049 - RNA, 19 nt, Homo sapiens
  misc_RNA (1)...(19): siRNA sense strand
gaagaucccaaaaguauaa

SEQ ID NO: 1955050 - RNA, 19 nt, Homo sapiens
  misc_RNA (1)...(19): siRNA sense strand
ugagagacuuccagacaga

SEQ ID NO: 1955051 - RNA, 19 nt, Homo sapiens
  misc_RNA (1)...(19): siRNA sense strand
caucaccacuucccaagau

SEQ ID NO: 1955052 - RNA, 19 nt, Homo sapiens
  misc_RNA (1)...(19): siRNA sense strand
accaagauguccuauuauu

SEQ ID NO: 1955053 - RNA, 19 nt, Homo sapiens
  misc_RNA (1)...(19): siRNA sense strand
gcuagcauuugaagacaug

SEQ ID NO: 1955054 - RNA, 19 nt, Homo sapiens
  misc_RNA (1)...(19): siRNA sense strand
caugggagcuuagaagauc

SEQ ID NO: 1955055 - RNA, 19 nt, Homo sapiens
  misc_RNA (1)...(19): siRNA sense strand
agaaagcuccagauaaaga

SEQ ID NO: 1955056 - RNA, 19 nt, Homo sapiens
  misc_RNA (1)...(19): siRNA sense strand
gcacccaguggaugaauga

SEQ ID NO: 1955057 - RNA, 19 nt, Homo sapiens
  misc_RNA (1)...(19): siRNA sense strand
ccaagauguccuauuauug

SEQ ID NO: 1955058 - RNA, 19 nt, Homo sapiens
  misc_RNA (1)...(19): siRNA sense strand
uaagaaggcgaaugcaaug

SEQ ID NO: 1955059 - RNA, 19 nt, Homo sapiens
  misc_RNA (1)...(19): siRNA sense strand
gaaaacauugcuagcauuu

SEQ ID NO: 1955060 - RNA, 19 nt, Homo sapiens
  misc_RNA (1)...(19): siRNA sense strand
uugaagacaugcuggagaa

SEQ ID NO: 1955061 - RNA, 19 nt, Homo sapiens
  misc_RNA (1)...(19): siRNA sense strand
gaugaaugauccagaaacg

SEQ ID NO: 1955062 - RNA, 19 nt, Homo sapiens
  misc_RNA (1)...(19): siRNA sense strand
uaauugaacacgcagaaga

SEQ ID NO: 1955063 - RNA, 19 nt, Homo sapiens
  misc_RNA (1)...(19): siRNA sense strand
caugagagacuuccagaca

SEQ ID NO: 1955064 - RNA, 19 nt, Homo sapiens
  misc_RNA (1)...(19): siRNA sense strand
gacagaacuccggaagaua

SEQ ID NO: 1955065 - RNA, 19 nt, Homo sapiens
  misc_RNA (1)...(19): siRNA sense strand
cgacaguccucucuuucag

SEQ ID NO: 1955066 - RNA, 19 nt, Homo sapiens
  misc_RNA (1)...(19): siRNA sense strand
gagagggugcugagugaug

SEQ ID NO: 1955067 - RNA, 19 nt, Homo sapiens
  misc_RNA (1)...(19): siRNA sense strand
uggaguggcuaauugaaca

SEQ ID NO: 1955068 - RNA, 19 nt, Homo sapiens
  misc_RNA (1)...(19): siRNA sense strand
ucaucgagguggcgcagaa

SEQ ID NO: 1955069 - RNA, 19 nt, Homo sapiens
  misc_RNA (1)...(19): siRNA sense strand
ucauuucccugauggagau

SEQ ID NO: 1955070 - RNA, 19 nt, Homo sapiens
  misc_RNA (1)...(19): siRNA sense strand
cgguggaauuguuuaagaa

SEQ ID NO: 1955071 - RNA, 19 nt, Homo sapiens
  misc_RNA (1)...(19): siRNA sense strand
gcuaauugaacacgcagaa

SEQ ID NO: 1955072 - RNA, 19 nt, Homo sapiens
  misc_RNA (1)...(19): siRNA sense strand
uuaagaaggcgaaugcaau

SEQ ID NO: 1955073 - RNA, 19 nt, Homo sapiens
  misc_RNA (1)...(19): siRNA sense strand
gaaagcuccagauaaagag

SEQ ID NO: 1955074 - RNA, 19 nt, Homo sapiens
  misc_RNA (1)...(19): siRNA sense strand
auagaugcccucagaguga

SEQ ID NO: 1955075 - RNA, 19 nt, Homo sapiens
  misc_RNA (1)...(19): siRNA sense strand
uagaagaucccaaaaguau

SEQ ID NO: 1955076 - RNA, 19 nt, Homo sapiens
  misc_RNA (1)...(19): siRNA sense strand
cgaaaacauugcuagcauu

SEQ ID NO: 1955077 - RNA, 19 nt, Homo sapiens
  misc_RNA (1)...(19): siRNA sense strand
gaccaagauguccuauuau

SEQ ID NO: 1955078 - RNA, 19 nt, Homo sapiens
  misc_RNA (1)...(19): siRNA sense strand
gaagacccgaccauagaca

SEQ ID NO: 1955079 - RNA, 19 nt, Homo sapiens
  misc_RNA (1)...(19): siRNA sense strand
uagaugcccucagagugaa

SEQ ID NO: 1955080 - RNA, 19 nt, Homo sapiens
  misc_RNA (1)...(19): siRNA sense strand
ccaaaaguauaacccauca

SEQ ID NO: 1955081 - RNA, 19 nt, Homo sapiens
  misc_RNA (1)...(19): siRNA sense strand
ccauggaguggcuaauuga

SEQ ID NO: 1955082 - RNA, 19 nt, Homo sapiens
  misc_RNA (1)...(19): siRNA sense strand
gaaucuuccagacacuaaa

SEQ ID NO: 1955083 - RNA, 19 nt, Homo sapiens
  misc_RNA (1)...(19): siRNA sense strand
ggccgucauuucccugaug

SEQ ID NO: 1955084 - RNA, 19 nt, Homo sapiens
  misc_RNA (1)...(19): siRNA sense strand
gaugcgguggaauuguuua

SEQ ID NO: 1955085 - RNA, 19 nt, Homo sapiens
  misc_RNA (1)...(19): siRNA sense strand
gagcugacggaaaucuuca

SEQ ID NO: 1955086 - RNA, 19 nt, Homo sapiens
  misc_RNA (1)...(19): siRNA sense strand
agaccaacaugagagacuu

SEQ ID NO: 1955087 - RNA, 19 nt, Homo sapiens
  misc_RNA (1)...(19): siRNA sense strand
ugaacaacaaccagcagaa

SEQ ID NO: 1955088 - RNA, 19 nt, Homo sapiens
  misc_RNA (1)...(19): siRNA sense strand
agagaugagcugacggaaa

SEQ ID NO: 1955089 - RNA, 19 nt, Homo sapiens
  misc_RNA (1)...(19): siRNA sense strand
acagaacuccggaagauac

SEQ ID NO: 1955090 - RNA, 19 nt, Homo sapiens
  misc_RNA (1)...(19): siRNA sense strand
ugaugucucagcagaagaa

SEQ ID NO: 1955091 - RNA, 19 nt, Homo sapiens
  misc_RNA (1)...(19): siRNA sense strand
accagaaagcuccagauaa

SEQ ID NO: 1955092 - RNA, 19 nt, Homo sapiens
  misc_RNA (1)...(19): siRNA sense strand
agaaucuuccagacacuaa

SEQ ID NO: 1955093 - RNA, 19 nt, Homo sapiens
  misc_RNA (1)...(19): siRNA sense strand
aagaagauccggaggaaaa

SEQ ID NO: 1955094 - RNA, 19 nt, Homo sapiens
  misc_RNA (1)...(19): siRNA sense strand
caagaagauccggaggaaa

SEQ ID NO: 1955095 - RNA, 19 nt, Homo sapiens
  misc_RNA (1)...(19): siRNA sense strand
aaccugcccuccuacaaca

SEQ ID NO: 1955096 - RNA, 19 nt, Homo sapiens
  misc_RNA (1)...(19): siRNA sense strand
caaccugcccuccuacaac

SEQ ID NO: 1955097 - RNA, 19 nt, Homo sapiens
  misc_RNA (1)...(19): siRNA sense strand
ucacggagaugggcuuucc

SEQ ID NO: 1955098 - RNA, 19 nt, Homo sapiens
  misc_RNA (1)...(19): siRNA sense strand
agauaaagaggccauacug

SEQ ID NO: 1955099 - RNA, 19 nt, Homo sapiens
  misc_RNA (1)...(19): siRNA sense strand
ggacgaggacgaggaugag

SEQ ID NO: 1955100 - RNA, 19 nt, Homo sapiens
  misc_RNA (1)...(19): siRNA sense strand
gagagacuuccagacagaa

SEQ ID NO: 1955101 - RNA, 19 nt, Homo sapiens
  misc_RNA (1)...(19): siRNA sense strand
ugaccaacccgaaaacauu

SEQ ID NO: 1955102 - RNA, 19 nt, Homo sapiens
  misc_RNA (1)...(19): siRNA sense strand
ugauagaugcccucagagu

SEQ ID NO: 1955103 - RNA, 19 nt, Homo sapiens
  misc_RNA (1)...(19): siRNA sense strand
gcacauauacuucagauaa

SEQ ID NO: 1955104 - RNA, 19 nt, Homo sapiens
  misc_RNA (1)...(19): siRNA sense strand
caacaaguauggcugguuu

SEQ ID NO: 1955105 - RNA, 19 nt, Homo sapiens
  misc_RNA (1)...(19): siRNA sense strand
gaagaaggaugacaagaag

SEQ ID NO: 1955106 - RNA, 19 nt, Homo sapiens
  misc_RNA (1)...(19): siRNA sense strand
aaggaaagcugacuucaaa

SEQ ID NO: 1955107 - RNA, 19 nt, Homo sapiens
  misc_RNA (1)...(19): siRNA sense strand
gaaagauucagcacauaua

SEQ ID NO: 1955108 - RNA, 19 nt, Homo sapiens
  misc_RNA (1)...(19): siRNA sense strand
gcaaagcaacagaaguuua

SEQ ID NO: 1955109 - RNA, 19 nt, Homo sapiens
  misc_RNA (1)...(19): siRNA sense strand
gagcaaagcaacagaaguu

SEQ ID NO: 1955110 - RNA, 19 nt, Homo sapiens
  misc_RNA (1)...(19): siRNA sense strand
caaauagugugcaagcauu

SEQ ID NO: 1955111 - RNA, 19 nt, Homo sapiens
  misc_RNA (1)...(19): siRNA sense strand
ggagauaaguguaaguucu

SEQ ID NO: 1955112 - RNA, 19 nt, Homo sapiens
  misc_RNA (1)...(19): siRNA sense strand
uaaaugagcuguucaaacc

SEQ ID NO: 1955113 - RNA, 19 nt, Homo sapiens
  misc_RNA (1)...(19): siRNA sense strand
guccugaacuggucaauga

SEQ ID NO: 1955114 - RNA, 19 nt, Homo sapiens
  misc_RNA (1)...(19): siRNA sense strand
gugaugagguugaugauuc

SEQ ID NO: 1955115 - RNA, 19 nt, Homo sapiens
  misc_RNA (1)...(19): siRNA sense strand
caaauuaagugaagcuucu

SEQ ID NO: 1955116 - RNA, 19 nt, Homo sapiens
  misc_RNA (1)...(19): siRNA sense strand
gaucaguggucgugaagug

SEQ ID NO: 1955117 - RNA, 19 nt, Homo sapiens
  misc_RNA (1)...(19): siRNA sense strand
gaagaaguagugaacaaga

SEQ ID NO: 1955118 - RNA, 19 nt, Homo sapiens
  misc_RNA (1)...(19): siRNA sense strand
caaagcaacagaaguuuau

SEQ ID NO: 1955119 - RNA, 19 nt, Homo sapiens
  misc_RNA (1)...(19): siRNA sense strand
cccaagagauguagaugaa

SEQ ID NO: 1955120 - RNA, 19 nt, Homo sapiens
  misc_RNA (1)...(19): siRNA sense strand
gaguguaaaugacauagau

SEQ ID NO: 1955121 - RNA, 19 nt, Homo sapiens
  misc_RNA (1)...(19): siRNA sense strand
aaagcgaaguguuuacauu

SEQ ID NO: 1955122 - RNA, 19 nt, Homo sapiens
  misc_RNA (1)...(19): siRNA sense strand
gcaaggacaguguacuaaa

SEQ ID NO: 1955123 - RNA, 19 nt, Homo sapiens
  misc_RNA (1)...(19): siRNA sense strand
guagaugaaacagguauua

SEQ ID NO: 1955124 - RNA, 19 nt, Homo sapiens
  misc_RNA (1)...(19): siRNA sense strand
gagugaagcugaaaagaaa

SEQ ID NO: 1955125 - RNA, 19 nt, Homo sapiens
  misc_RNA (1)...(19): siRNA sense strand
ggaaagcacuagugaucag

SEQ ID NO: 1955126 - RNA, 19 nt, Homo sapiens
  misc_RNA (1)...(19): siRNA sense strand
caaaaucacucuagaaucu

SEQ ID NO: 1955127 - RNA, 19 nt, Homo sapiens
  misc_RNA (1)...(19): siRNA sense strand
caaggacaguguacuaaag

SEQ ID NO: 1955128 - RNA, 19 nt, Homo sapiens
  misc_RNA (1)...(19): siRNA sense strand
gaagauuaucgaagacaaa

SEQ ID NO: 1955129 - RNA, 19 nt, Homo sapiens
  misc_RNA (1)...(19): siRNA sense strand
ugucacacaucaaguuaaa

SEQ ID NO: 1955130 - RNA, 19 nt, Homo sapiens
  misc_RNA (1)...(19): siRNA sense strand
gaagagaaagaagaugaaa

SEQ ID NO: 1955131 - RNA, 19 nt, Homo sapiens
  misc_RNA (1)...(19): siRNA sense strand
uaucaaggcugucacacau

SEQ ID NO: 1955132 - RNA, 19 nt, Homo sapiens
  misc_RNA (1)...(19): siRNA sense strand
caagagauguagaugaaac

SEQ ID NO: 1955133 - RNA, 19 nt, Homo sapiens
  misc_RNA (1)...(19): siRNA sense strand
ugcaagagaugaagaacuu

SEQ ID NO: 1955134 - RNA, 19 nt, Homo sapiens
  misc_RNA (1)...(19): siRNA sense strand
ugaagaaggaugacaagaa

SEQ ID NO: 1955135 - RNA, 19 nt, Homo sapiens
  misc_RNA (1)...(19): siRNA sense strand
gaacaagauauggaaagaa

SEQ ID NO: 1955136 - RNA, 19 nt, Homo sapiens
  misc_RNA (1)...(19): siRNA sense strand
gcagggaaagcacuaguga

SEQ ID NO: 1955137 - RNA, 19 nt, Homo sapiens
  misc_RNA (1)...(19): siRNA sense strand
aggagaagauuaucgaaga

SEQ ID NO: 1955138 - RNA, 19 nt, Homo sapiens
  misc_RNA (1)...(19): siRNA sense strand
ugaacaagauauggaaaga

SEQ ID NO: 1955139 - RNA, 19 nt, Homo sapiens
  misc_RNA (1)...(19): siRNA sense strand
caaugaugaugaugaggaa

SEQ ID NO: 1955140 - RNA, 19 nt, Homo sapiens
  misc_RNA (1)...(19): siRNA sense strand
ucaaggcugucacacauca

SEQ ID NO: 1955141 - RNA, 19 nt, Homo sapiens
  misc_RNA (1)...(19): siRNA sense strand
gcccuagguccaaauguua

SEQ ID NO: 1955142 - RNA, 19 nt, Homo sapiens
  misc_RNA (1)...(19): siRNA sense strand
uaagaaaggagcaaagcaa

SEQ ID NO: 1955143 - RNA, 19 nt, Homo sapiens
  misc_RNA (1)...(19): siRNA sense strand
cuaaaggagauaaguguaa

SEQ ID NO: 1955144 - RNA, 19 nt, Homo sapiens
  misc_RNA (1)...(19): siRNA sense strand
guucaaaccuguaguugcu

SEQ ID NO: 1955145 - RNA, 19 nt, Homo sapiens
  misc_RNA (1)...(19): siRNA sense strand
uguaguaugugcauucuuc

SEQ ID NO: 1955146 - RNA, 19 nt, Homo sapiens
  misc_RNA (1)...(19): siRNA sense strand
gggaacagguggugaugag

SEQ ID NO: 1955147 - RNA, 19 nt, Homo sapiens
  misc_RNA (1)...(19): siRNA sense strand
ucccaagucuguaguaugu

SEQ ID NO: 1955148 - RNA, 19 nt, Homo sapiens
  misc_RNA (1)...(19): siRNA sense strand
gucgugaaguguuugaauu

SEQ ID NO: 1955149 - RNA, 19 nt, Homo sapiens
  misc_RNA (1)...(19): siRNA sense strand
gcacagagugaagcugaaa

SEQ ID NO: 1955150 - RNA, 19 nt, Homo sapiens
  misc_RNA (1)...(19): siRNA sense strand
aagaaguagugaacaagaa

SEQ ID NO: 1955151 - RNA, 19 nt, Homo sapiens
  misc_RNA (1)...(19): siRNA sense strand
uggaagaaguagugaacaa

SEQ ID NO: 1955152 - RNA, 19 nt, Homo sapiens
  misc_RNA (1)...(19): siRNA sense strand
caaguuaaauuuggucaac

SEQ ID NO: 1955153 - RNA, 19 nt, Homo sapiens
  misc_RNA (1)...(19): siRNA sense strand
ggucaaugaugaugaugag

SEQ ID NO: 1955154 - RNA, 19 nt, Homo sapiens
  misc_RNA (1)...(19): siRNA sense strand
caagauauggaaagaagga

SEQ ID NO: 1955155 - RNA, 19 nt, Homo sapiens
  misc_RNA (1)...(19): siRNA sense strand
aaacucaaauagugugcaa

SEQ ID NO: 1955156 - RNA, 19 nt, Homo sapiens
  misc_RNA (1)...(19): siRNA sense strand
gcgaaguguuuacauugau

SEQ ID NO: 1955157 - RNA, 19 nt, Homo sapiens
  misc_RNA (1)...(19): siRNA sense strand
uaaaggagauaaguguaag

SEQ ID NO: 1955158 - RNA, 19 nt, Homo sapiens
  misc_RNA (1)...(19): siRNA sense strand
gaucccaagucuguaguau

SEQ ID NO: 1955159 - RNA, 19 nt, Homo sapiens
  misc_RNA (1)...(19): siRNA sense strand
gaugaaacagguauuacug

SEQ ID NO: 1955160 - RNA, 19 nt, Homo sapiens
  misc_RNA (1)...(19): siRNA sense strand
gcugucacacaucaaguua

SEQ ID NO: 1955161 - RNA, 19 nt, Homo sapiens
  misc_RNA (1)...(19): siRNA sense strand
cgaaguguuuacauugaug

SEQ ID NO: 1955162 - RNA, 19 nt, Homo sapiens
  misc_RNA (1)...(19): siRNA sense strand
uuacauugaugcaagagau

SEQ ID NO: 1955163 - RNA, 19 nt, Homo sapiens
  misc_RNA (1)...(19): siRNA sense strand
gaugauucagugaguguaa

SEQ ID NO: 1955164 - RNA, 19 nt, Homo sapiens
  misc_RNA (1)...(19): siRNA sense strand
gaaagcugacuucaaagca

SEQ ID NO: 1955165 - RNA, 19 nt, Homo sapiens
  misc_RNA (1)...(19): siRNA sense strand
gaaggagaagauuaucgaa

SEQ ID NO: 1955166 - RNA, 19 nt, Homo sapiens
  misc_RNA (1)...(19): siRNA sense strand
gaacuggucaaugaugaug

SEQ ID NO: 1955167 - RNA, 19 nt, Homo sapiens
  misc_RNA (1)...(19): siRNA sense strand
aacaagauauggaaagaag

SEQ ID NO: 1955168 - RNA, 19 nt, Homo sapiens
  misc_RNA (1)...(19): siRNA sense strand
cagcacauauacuucagau

SEQ ID NO: 1955169 - RNA, 19 nt, Homo sapiens
  misc_RNA (1)...(19): siRNA sense strand
gaaaggagcaaagcaacag

SEQ ID NO: 1955170 - RNA, 19 nt, Homo sapiens
  misc_RNA (1)...(19): siRNA sense strand
gaugaggaagcagaugaua

SEQ ID NO: 1955171 - RNA, 19 nt, Homo sapiens
  misc_RNA (1)...(19): siRNA sense strand
caaagcagggaaagcacua

SEQ ID NO: 1955172 - RNA, 19 nt, Homo sapiens
  misc_RNA (1)...(19): siRNA sense strand
guacuaaaggagauaagug

SEQ ID NO: 1955173 - RNA, 19 nt, Homo sapiens
  misc_RNA (1)...(19): siRNA sense strand
aagaagagaaagaagauga

SEQ ID NO: 1955174 - RNA, 19 nt, Homo sapiens
  misc_RNA (1)...(19): siRNA sense strand
agaaggaugacaagaagaa

SEQ ID NO: 1955175 - RNA, 19 nt, Homo sapiens
  misc_RNA (1)...(19): siRNA sense strand
ggagaagauuaucgaagac

SEQ ID NO: 1955176 - RNA, 19 nt, Homo sapiens
  misc_RNA (1)...(19): siRNA sense strand
aguguaaguucucccauga

SEQ ID NO: 1955177 - RNA, 19 nt, Homo sapiens
  misc_RNA (1)...(19): siRNA sense strand
gaugacaagaagaaagauu

SEQ ID NO: 1955178 - RNA, 19 nt, Homo sapiens
  misc_RNA (1)...(19): siRNA sense strand
gaaggaugacaagaagaaa

SEQ ID NO: 1955179 - RNA, 19 nt, Homo sapiens
  misc_RNA (1)...(19): siRNA sense strand
agaaauugaagaaggauga

SEQ ID NO: 1955180 - RNA, 19 nt, Homo sapiens
  misc_RNA (1)...(19): siRNA sense strand
gaauaagaaaggagcaaag

SEQ ID NO: 1955181 - RNA, 19 nt, Homo sapiens
  misc_RNA (1)...(19): siRNA sense strand
ugacaagaagaaagauuug

SEQ ID NO: 1955182 - RNA, 19 nt, Homo sapiens
  misc_RNA (1)...(19): siRNA sense strand
cacaucaaguuaaauuugg

SEQ ID NO: 1955183 - RNA, 19 nt, Homo sapiens
  misc_RNA (1)...(19): siRNA sense strand
ugaugagguugaugauuca

SEQ ID NO: 1955184 - RNA, 19 nt, Homo sapiens
  misc_RNA (1)...(19): siRNA sense strand
gaaaaggaaaagacaagaa

SEQ ID NO: 1955185 - RNA, 19 nt, Homo sapiens
  misc_RNA (1)...(19): siRNA sense strand
ggauaauugggaugagaaa

SEQ ID NO: 1955186 - RNA, 19 nt, Homo sapiens
  misc_RNA (1)...(19): siRNA sense strand
aagcaaggacaguguacua

SEQ ID NO: 1955187 - RNA, 19 nt, Homo sapiens
  misc_RNA (1)...(19): siRNA sense strand
agaagauuaucgaagacaa

SEQ ID NO: 1955188 - RNA, 19 nt, Homo sapiens
  misc_RNA (1)...(19): siRNA sense strand
ggaaagcugacuucaaagc

SEQ ID NO: 1955189 - RNA, 19 nt, Homo sapiens
  misc_RNA (1)...(19): siRNA sense strand
ugaauuucguccugaacug

SEQ ID NO: 1955190 - RNA, 19 nt, Homo sapiens
  misc_RNA (1)...(19): siRNA sense strand
gccuguacaucccaagaga

SEQ ID NO: 1955191 - RNA, 19 nt, Homo sapiens
  misc_RNA (1)...(19): siRNA sense strand
cugaacuggucaaugauga

SEQ ID NO: 1955192 - RNA, 19 nt, Homo sapiens
  misc_RNA (1)...(19): siRNA sense strand
ggaagaaguagugaacaag

SEQ ID NO: 1955193 - RNA, 19 nt, Homo sapiens
  misc_RNA (1)...(19): siRNA sense strand
gcacuuccuccuggauuug

SEQ ID NO: 1955194 - RNA, 19 nt, Homo sapiens
  misc_RNA (1)...(19): siRNA sense strand
guccaaauguuaccaaaau

SEQ ID NO: 1955195 - RNA, 19 nt, Homo sapiens
  misc_RNA (1)...(19): siRNA sense strand
gcuaaaugagcuguucaaa

SEQ ID NO: 1955196 - RNA, 19 nt, Homo sapiens
  misc_RNA (1)...(19): siRNA sense strand
gaaagaaggaaagcugacu

SEQ ID NO: 1955197 - RNA, 19 nt, Homo sapiens
  misc_RNA (1)...(19): siRNA sense strand
gcaacagaaguuuaucaag

SEQ ID NO: 1955198 - RNA, 19 nt, Homo sapiens
  misc_RNA (1)...(19): siRNA sense strand
ucaaauagugugcaagcau

SEQ ID NO: 1955199 - RNA, 19 nt, Homo sapiens
  misc_RNA (1)...(19): siRNA sense strand
cgugaaguguuugaauuuc

SEQ ID NO: 1955200 - RNA, 19 nt, Homo sapiens
  misc_RNA (1)...(19): siRNA sense strand
caguggucgugaaguguuu

SEQ ID NO: 1955201 - RNA, 19 nt, Homo sapiens
  misc_RNA (1)...(19): siRNA sense strand
gauauggaaagaaggaaag

SEQ ID NO: 1955202 - RNA, 19 nt, Homo sapiens
  misc_RNA (1)...(19): siRNA sense strand
ugcccuagguccaaauguu

SEQ ID NO: 1955203 - RNA, 19 nt, Homo sapiens
  misc_RNA (1)...(19): siRNA sense strand
gcagcuggauggcuacaga

SEQ ID NO: 1955204 - RNA, 19 nt, Homo sapiens
  misc_RNA (1)...(19): siRNA sense strand
gccgguggcugacaagauu

SEQ ID NO: 1955205 - RNA, 19 nt, Homo sapiens
  misc_RNA (1)...(19): siRNA sense strand
ggacgcgaaugggcacuuu

SEQ ID NO: 1955206 - RNA, 19 nt, Homo sapiens
  misc_RNA (1)...(19): siRNA sense strand
ggaggcaucuucuucucau

SEQ ID NO: 1955207 - RNA, 19 nt, Homo sapiens
  misc_RNA (1)...(19): siRNA sense strand
gcgaaugggcacuuuguga

SEQ ID NO: 1955208 - RNA, 19 nt, Homo sapiens
  misc_RNA (1)...(19): siRNA sense strand
ccucggugcuccuggauga

SEQ ID NO: 1955209 - RNA, 19 nt, Homo sapiens
  misc_RNA (1)...(19): siRNA sense strand
cgaaugggcacuuugugaa

SEQ ID NO: 1955210 - RNA, 19 nt, Homo sapiens
  misc_RNA (1)...(19): siRNA sense strand
gcacccaccuccugaucuc

SEQ ID NO: 1955211 - RNA, 19 nt, Homo sapiens
  misc_RNA (1)...(19): siRNA sense strand
gcugggcucccuccaauau

SEQ ID NO: 1955212 - RNA, 19 nt, Homo sapiens
  misc_RNA (1)...(19): siRNA sense strand
ggagguccgugccauucug

SEQ ID NO: 1955213 - RNA, 19 nt, Homo sapiens
  misc_RNA (1)...(19): siRNA sense strand
gaaugggcacuuugugaag

SEQ ID NO: 1955214 - RNA, 19 nt, Homo sapiens
  misc_RNA (1)...(19): siRNA sense strand
gaggagguccgugccauuc

SEQ ID NO: 1955215 - RNA, 19 nt, Homo sapiens
  misc_RNA (1)...(19): siRNA sense strand
gaggugcagcgguucauca

SEQ ID NO: 1955216 - RNA, 19 nt, Homo sapiens
  misc_RNA (1)...(19): siRNA sense strand
gguucgaggcggucaaaga

SEQ ID NO: 1955217 - RNA, 19 nt, Homo sapiens
  misc_RNA (1)...(19): siRNA sense strand
ugggcucccuccaauauca

SEQ ID NO: 1955218 - RNA, 19 nt, Homo sapiens
  misc_RNA (1)...(19): siRNA sense strand
gccugcagcuguucaacgu

SEQ ID NO: 1955219 - RNA, 19 nt, Homo sapiens
  misc_RNA (1)...(19): siRNA sense strand
caccuucgcgcuccucuuc

SEQ ID NO: 1955220 - RNA, 19 nt, Homo sapiens
  misc_RNA (1)...(19): siRNA sense strand
cgaggagguccgugccauu

SEQ ID NO: 1955221 - RNA, 19 nt, Homo sapiens
  misc_RNA (1)...(19): siRNA sense strand
uaaggaaggugaaauuguu

SEQ ID NO: 1955222 - RNA, 19 nt, Homo sapiens
  misc_RNA (1)...(19): siRNA sense strand
gaaguagcccuaagauauu

SEQ ID NO: 1955223 - RNA, 19 nt, Homo sapiens
  misc_RNA (1)...(19): siRNA sense strand
gaauagacaugaccaaagg

SEQ ID NO: 1955224 - RNA, 19 nt, Homo sapiens
  misc_RNA (1)...(19): siRNA sense strand
uggcagagauugcuaugua

SEQ ID NO: 1955225 - RNA, 19 nt, Homo sapiens
  misc_RNA (1)...(19): siRNA sense strand
accaagagaugccaaguua

SEQ ID NO: 1955226 - RNA, 19 nt, Homo sapiens
  misc_RNA (1)...(19): siRNA sense strand
ggaaguggcugaaaaguau

SEQ ID NO: 1955227 - RNA, 19 nt, Homo sapiens
  misc_RNA (1)...(19): siRNA sense strand
ggaauuacaggacaugaaa

SEQ ID NO: 1955228 - RNA, 19 nt, Homo sapiens
  misc_RNA (1)...(19): siRNA sense strand
gaagaaaucaggacacaca

SEQ ID NO: 1955229 - RNA, 19 nt, Homo sapiens
  misc_RNA (1)...(19): siRNA sense strand
caagagaugccaaguuauu

SEQ ID NO: 1955230 - RNA, 19 nt, Homo sapiens
  misc_RNA (1)...(19): siRNA sense strand
agaaguagcccuaagauau

SEQ ID NO: 1955231 - RNA, 19 nt, Homo sapiens
  misc_RNA (1)...(19): siRNA sense strand
ugaaguggaugaagaaaca

SEQ ID NO: 1955232 - RNA, 19 nt, Homo sapiens
  misc_RNA (1)...(19): siRNA sense strand
agagauugcuauguacuua

SEQ ID NO: 1955233 - RNA, 19 nt, Homo sapiens
  misc_RNA (1)...(19): siRNA sense strand
acaaggaacuggaaagagu

SEQ ID NO: 1955234 - RNA, 19 nt, Homo sapiens
  misc_RNA (1)...(19): siRNA sense strand
cuagaaaacugcuggauuu

SEQ ID NO: 1955235 - RNA, 19 nt, Homo sapiens
  misc_RNA (1)...(19): siRNA sense strand
caagauuugcucaagauuu

SEQ ID NO: 1955236 - RNA, 19 nt, Homo sapiens
  misc_RNA (1)...(19): siRNA sense strand
ugagagccaugauauuguu

SEQ ID NO: 1955237 - RNA, 19 nt, Homo sapiens
  misc_RNA (1)...(19): siRNA sense strand
agaaggacgugcagaccua

SEQ ID NO: 1955238 - RNA, 19 nt, Homo sapiens
  misc_RNA (1)...(19): siRNA sense strand
gagccaugauauuguugua

SEQ ID NO: 1955239 - RNA, 19 nt, Homo sapiens
  misc_RNA (1)...(19): siRNA sense strand
gaaugagagccaugauauu

SEQ ID NO: 1955240 - RNA, 19 nt, Homo sapiens
  misc_RNA (1)...(19): siRNA sense strand
agaaacagcagcuaucuug

SEQ ID NO: 1955241 - RNA, 19 nt, Homo sapiens
  misc_RNA (1)...(19): siRNA sense strand
gaaaucaggacacacaaag

SEQ ID NO: 1955242 - RNA, 19 nt, Homo sapiens
  misc_RNA (1)...(19): siRNA sense strand
cggcagaccuccagaccaa

SEQ ID NO: 1955243 - RNA, 19 nt, Homo sapiens
  misc_RNA (1)...(19): siRNA sense strand
gaugccaaguuauuuacaa

SEQ ID NO: 1955244 - RNA, 19 nt, Homo sapiens
  misc_RNA (1)...(19): siRNA sense strand
gaagaaguagcccuaagau

SEQ ID NO: 1955245 - RNA, 19 nt, Homo sapiens
  misc_RNA (1)...(19): siRNA sense strand
aaauguacacgaagaagua

SEQ ID NO: 1955246 - RNA, 19 nt, Homo sapiens
  misc_RNA (1)...(19): siRNA sense strand
ggugaucccugagcaucua

SEQ ID NO: 1955247 - RNA, 19 nt, Homo sapiens
  misc_RNA (1)...(19): siRNA sense strand
aaguagcccuaagauauua

SEQ ID NO: 1955248 - RNA, 19 nt, Homo sapiens
  misc_RNA (1)...(19): siRNA sense strand
agagaugccaaguuauuua

SEQ ID NO: 1955249 - RNA, 19 nt, Homo sapiens
  misc_RNA (1)...(19): siRNA sense strand
ggaauagacaugaccaaag

SEQ ID NO: 1955250 - RNA, 19 nt, Homo sapiens
  misc_RNA (1)...(19): siRNA sense strand
guucugcccuccacguuug

SEQ ID NO: 1955251 - RNA, 19 nt, Homo sapiens
  misc_RNA (1)...(19): siRNA sense strand
ggcagaggcuggaaucaag

SEQ ID NO: 1955252 - RNA, 19 nt, Homo sapiens
  misc_RNA (1)...(19): siRNA sense strand
gccaaucucauuacaauuc

SEQ ID NO: 1955253 - RNA, 19 nt, Homo sapiens
  misc_RNA (1)...(19): siRNA sense strand
aaacagcagcuaucuugaa

SEQ ID NO: 1955254 - RNA, 19 nt, Homo sapiens
  misc_RNA (1)...(19): siRNA sense strand
gaaacagcagcuaucuuga

SEQ ID NO: 1955255 - RNA, 19 nt, Homo sapiens
  misc_RNA (1)...(19): siRNA sense strand
cgaagaaguagcccuaaga

SEQ ID NO: 1955256 - RNA, 19 nt, Homo sapiens
  misc_RNA (1)...(19): siRNA sense strand
gaagaaacagcagcuaucu

SEQ ID NO: 1955257 - RNA, 19 nt, Homo sapiens
  misc_RNA (1)...(19): siRNA sense strand
cagaagaaaucaggacaca

SEQ ID NO: 1955258 - RNA, 19 nt, Homo sapiens
  misc_RNA (1)...(19): siRNA sense strand
agaaugagagccaugauau

SEQ ID NO: 1955259 - RNA, 19 nt, Homo sapiens
  misc_RNA (1)...(19): siRNA sense strand
ugaaauuguugaaguggau

SEQ ID NO: 1955260 - RNA, 19 nt, Homo sapiens
  misc_RNA (1)...(19): siRNA sense strand
gccuugaacugccagaaga

SEQ ID NO: 1955261 - RNA, 19 nt, Homo sapiens
  misc_RNA (1)...(19): siRNA sense strand
aggcuggaaucaagaauga

SEQ ID NO: 1955262 - RNA, 19 nt, Homo sapiens
  misc_RNA (1)...(19): siRNA sense strand
gccaaguuauuuacaaugg

SEQ ID NO: 1955263 - RNA, 19 nt, Homo sapiens
  misc_RNA (1)...(19): siRNA sense strand
ccaaucucauuacaauuca

SEQ ID NO: 1955264 - RNA, 19 nt, Homo sapiens
  misc_RNA (1)...(19): siRNA sense strand
gaccaaaggccagguggaa

SEQ ID NO: 1955265 - RNA, 19 nt, Homo sapiens
  misc_RNA (1)...(19): siRNA sense strand
caacauuucgccucuucaa

SEQ ID NO: 1955266 - RNA, 19 nt, Homo sapiens
  misc_RNA (1)...(19): siRNA sense strand
cugccaaucucauuacaau

SEQ ID NO: 1955267 - RNA, 19 nt, Homo sapiens
  misc_RNA (1)...(19): siRNA sense strand
ggaacuugcuguccuugcu

SEQ ID NO: 1955268 - RNA, 19 nt, Homo sapiens
  misc_RNA (1)...(19): siRNA sense strand
aaugagagccaugauauug

SEQ ID NO: 1955269 - RNA, 19 nt, Homo sapiens
  misc_RNA (1)...(19): siRNA sense strand
aaacaaggaacuggaaaga

SEQ ID NO: 1955270 - RNA, 19 nt, Homo sapiens
  misc_RNA (1)...(19): siRNA sense strand
gaaguggcagagauugcua

SEQ ID NO: 1955271 - RNA, 19 nt, Homo sapiens
  misc_RNA (1)...(19): siRNA sense strand
ccaaguuauuuacaaugga

SEQ ID NO: 1955272 - RNA, 19 nt, Homo sapiens
  misc_RNA (1)...(19): siRNA sense strand
ggcaggugcugaagagauc

SEQ ID NO: 1955273 - RNA, 19 nt, Homo sapiens
  misc_RNA (1)...(19): siRNA sense strand
acacgugacuggaauagac

SEQ ID NO: 1955274 - RNA, 19 nt, Homo sapiens
  misc_RNA (1)...(19): siRNA sense strand
gugucuggguggugcuuua

SEQ ID NO: 1955275 - RNA, 19 nt, Homo sapiens
  misc_RNA (1)...(19): siRNA sense strand
aagaaugagagccaugaua

SEQ ID NO: 1955276 - RNA, 19 nt, Homo sapiens
  misc_RNA (1)...(19): siRNA sense strand
ggaaggugaaauuguugaa

SEQ ID NO: 1955277 - RNA, 19 nt, Homo sapiens
  misc_RNA (1)...(19): siRNA sense strand
ggucacugccaaucucauu

SEQ ID NO: 1955278 - RNA, 19 nt, Homo sapiens
  misc_RNA (1)...(19): siRNA sense strand
aaucaggacacacaaaguu

SEQ ID NO: 1955279 - RNA, 19 nt, Homo sapiens
  misc_RNA (1)...(19): siRNA sense strand
gaacugccagaagaaauca

SEQ ID NO: 1955280 - RNA, 19 nt, Homo sapiens
  misc_RNA (1)...(19): siRNA sense strand
gaagcaugguggggaguua

SEQ ID NO: 1955281 - RNA, 19 nt, Homo sapiens
  misc_RNA (1)...(19): siRNA sense strand
acgcugagauacagaagga

SEQ ID NO: 1955282 - RNA, 19 nt, Homo sapiens
  misc_RNA (1)...(19): siRNA sense strand
aaggugaaauuguugaagu

SEQ ID NO: 1955283 - RNA, 19 nt, Homo sapiens
  misc_RNA (1)...(19): siRNA sense strand
aagaaguagcccuaagaua

SEQ ID NO: 1955284 - RNA, 19 nt, Homo sapiens
  misc_RNA (1)...(19): siRNA sense strand
gcagaggcuggaaucaaga

SEQ ID NO: 1955285 - RNA, 19 nt, Homo sapiens
  misc_RNA (1)...(19): siRNA sense strand
gcuggaaucaagaaugaga

SEQ ID NO: 1955286 - RNA, 19 nt, Homo sapiens
  misc_RNA (1)...(19): siRNA sense strand
gacaggaccaaccaagaga

SEQ ID NO: 1955287 - RNA, 19 nt, Homo sapiens
  misc_RNA (1)...(19): siRNA sense strand
ccaaaggccagguggaagu

SEQ ID NO: 1955288 - RNA, 19 nt, Homo sapiens
  misc_RNA (1)...(19): siRNA sense strand
ugaagaaacagcagcuauc

SEQ ID NO: 1955289 - RNA, 19 nt, Homo sapiens
  misc_RNA (1)...(19): siRNA sense strand
ccaggcaucuaaugugacu

SEQ ID NO: 1955290 - RNA, 19 nt, Homo sapiens
  misc_RNA (1)...(19): siRNA sense strand
cauuucgccucuucaaaca

SEQ ID NO: 1955291 - RNA, 19 nt, Homo sapiens
  misc_RNA (1)...(19): siRNA sense strand
ggaucuggguaguggaagu

SEQ ID NO: 1955292 - RNA, 19 nt, Homo sapiens
  misc_RNA (1)...(19): siRNA sense strand
ucagaccaauuggagagaa

SEQ ID NO: 1955293 - RNA, 19 nt, Homo sapiens
  misc_RNA (1)...(19): siRNA sense strand
gaauucaagauuugcucaa

SEQ ID NO: 1955294 - RNA, 19 nt, Homo sapiens
  misc_RNA (1)...(19): siRNA sense strand
uuccaggcaucuaauguga

SEQ ID NO: 1955295 - RNA, 19 nt, Homo sapiens
  misc_RNA (1)...(19): siRNA sense strand
aaaggacacgugacuggaa

SEQ ID NO: 1955296 - RNA, 19 nt, Homo sapiens
  misc_RNA (1)...(19): siRNA sense strand
gagaugccaaguuauuuac

SEQ ID NO: 1955297 - RNA, 19 nt, Homo sapiens
  misc_RNA (1)...(19): siRNA sense strand
ucaagaaugagagccauga

SEQ ID NO: 1955298 - RNA, 19 nt, Homo sapiens
  misc_RNA (1)...(19): siRNA sense strand
ggacacgugacuggaauag

SEQ ID NO: 1955299 - RNA, 19 nt, Homo sapiens
  misc_RNA (1)...(19): siRNA sense strand
gcucaagauuuucugauca

SEQ ID NO: 1955300 - RNA, 19 nt, Homo sapiens
  misc_RNA (1)...(19): siRNA sense strand
agaaaucaggacacacaaa

SEQ ID NO: 1955301 - RNA, 19 nt, Homo sapiens
  misc_RNA (1)...(19): siRNA sense strand
uuaaccuugugccugauaa

SEQ ID NO: 1955302 - RNA, 19 nt, Homo sapiens
  misc_RNA (1)...(19): siRNA sense strand
gcuguucugcuuuggaguu

SEQ ID NO: 1955303 - RNA, 19 nt, Homo sapiens
  misc_RNA (1)...(19): siRNA sense strand
aacagcagcuaucuugaag

SEQ ID NO: 1955304 - RNA, 19 nt, Homo sapiens
  misc_RNA (1)...(19): siRNA sense strand
gaugaagaaacagcagcua

SEQ ID NO: 1955305 - RNA, 19 nt, Homo sapiens
  misc_RNA (1)...(19): siRNA sense strand
uuaaggaaggugaaauugu

SEQ ID NO: 1955306 - RNA, 19 nt, Homo sapiens
  misc_RNA (1)...(19): siRNA sense strand
aagagaugccaaguuauuu

SEQ ID NO: 1955307 - RNA, 19 nt, Homo sapiens
  misc_RNA (1)...(19): siRNA sense strand
gggcaggugcugaagagau

SEQ ID NO: 1955308 - RNA, 19 nt, Homo sapiens
  misc_RNA (1)...(19): siRNA sense strand
auauuucagugacgucuau

SEQ ID NO: 1955309 - RNA, 19 nt, Homo sapiens
  misc_RNA (1)...(19): siRNA sense strand
gggaagccuugcaaaaugu

SEQ ID NO: 1955310 - RNA, 19 nt, Homo sapiens
  misc_RNA (1)...(19): siRNA sense strand
gaaggugaaauuguugaag

SEQ ID NO: 1955311 - RNA, 19 nt, Homo sapiens
  misc_RNA (1)...(19): siRNA sense strand
aggcaucuaaugugacuuu

SEQ ID NO: 1955312 - RNA, 19 nt, Homo sapiens
  misc_RNA (1)...(19): siRNA sense strand
cuggagcuguucugcuuug

SEQ ID NO: 1955313 - RNA, 19 nt, Homo sapiens
  misc_RNA (1)...(19): siRNA sense strand
uucaagauuugcucaagau

SEQ ID NO: 1955314 - RNA, 19 nt, Homo sapiens
  misc_RNA (1)...(19): siRNA sense strand
ggcagagauugcuauguac

SEQ ID NO: 1955315 - RNA, 19 nt, Homo sapiens
  misc_RNA (1)...(19): siRNA sense strand
cuucaaacacucuaagaca

SEQ ID NO: 1955316 - RNA, 19 nt, Homo sapiens
  misc_RNA (1)...(19): siRNA sense strand
ugaacugccagaagaaauc

SEQ ID NO: 1955317 - RNA, 19 nt, Homo sapiens
  misc_RNA (1)...(19): siRNA sense strand
gaggcuggaaucaagaaug

SEQ ID NO: 1955318 - RNA, 19 nt, Homo sapiens
  misc_RNA (1)...(19): siRNA sense strand
acuaauguuugaugccaau

SEQ ID NO: 1955319 - RNA, 19 nt, Homo sapiens
  misc_RNA (1)...(19): siRNA sense strand
auucaagauuugcucaaga

SEQ ID NO: 1955320 - RNA, 19 nt, Homo sapiens
  misc_RNA (1)...(19): siRNA sense strand
gaagaauucaagauuugcu

SEQ ID NO: 1955321 - RNA, 19 nt, Homo sapiens
  misc_RNA (1)...(19): siRNA sense strand
ggauauccguguucaagua

SEQ ID NO: 1955322 - RNA, 19 nt, Homo sapiens
  misc_RNA (1)...(19): siRNA sense strand
cuaagagucuccugacaaa

SEQ ID NO: 1955323 - RNA, 19 nt, Homo sapiens
  misc_RNA (1)...(19): siRNA sense strand
gcugguaaccuacaucuuu

SEQ ID NO: 1955324 - RNA, 19 nt, Homo sapiens
  misc_RNA (1)...(19): siRNA sense strand
uaaccuacaucuuugucua

SEQ ID NO: 1955325 - RNA, 19 nt, Homo sapiens
  misc_RNA (1)...(19): siRNA sense strand
gcccagagccggaaacuga

SEQ ID NO: 1955326 - RNA, 19 nt, Homo sapiens
  misc_RNA (1)...(19): siRNA sense strand
gaucagaccuuccccuuca

SEQ ID NO: 1955327 - RNA, 19 nt, Homo sapiens
  misc_RNA (1)...(19): siRNA sense strand
ccagaccucuuuccucagu

SEQ ID NO: 1955328 - RNA, 19 nt, Homo sapiens
  misc_RNA (1)...(19): siRNA sense strand
gcuaucaucuuccugucau

SEQ ID NO: 1955329 - RNA, 19 nt, Homo sapiens
  misc_RNA (1)...(19): siRNA sense strand
gcacgccaguggucagaag

SEQ ID NO: 1955330 - RNA, 19 nt, Homo sapiens
  misc_RNA (1)...(19): siRNA sense strand
agaccucuuuccucaguaa

SEQ ID NO: 1955331 - RNA, 19 nt, Homo sapiens
  misc_RNA (1)...(19): siRNA sense strand
gaggauauccguguucaag

SEQ ID NO: 1955332 - RNA, 19 nt, Homo sapiens
  misc_RNA (1)...(19): siRNA sense strand
ggccuaugcucaccuacug

SEQ ID NO: 1955333 - RNA, 19 nt, Homo sapiens
  misc_RNA (1)...(19): siRNA sense strand
gaggcugugucaucacugu

SEQ ID NO: 1955334 - RNA, 19 nt, Homo sapiens
  misc_RNA (1)...(19): siRNA sense strand
ugucgcagcuggugcuugu

SEQ ID NO: 1955335 - RNA, 19 nt, Homo sapiens
  misc_RNA (1)...(19): siRNA sense strand
ugaagguccucccuaagag

SEQ ID NO: 1955336 - RNA, 19 nt, Homo sapiens
  misc_RNA (1)...(19): siRNA sense strand
ugucaucacugucaaagcu

SEQ ID NO: 1955337 - RNA, 19 nt, Homo sapiens
  misc_RNA (1)...(19): siRNA sense strand
cugguaaccuacaucuuug

SEQ ID NO: 1955338 - RNA, 19 nt, Homo sapiens
  misc_RNA (1)...(19): siRNA sense strand
ugaggaggauauccguguu

SEQ ID NO: 1955339 - RNA, 19 nt, Homo sapiens
  misc_RNA (1)...(19): siRNA sense strand
gcuggccuaugcucaccua

SEQ ID NO: 1955340 - RNA, 19 nt, Homo sapiens
  misc_RNA (1)...(19): siRNA sense strand
caucuucuccgcuaucauc

SEQ ID NO: 1955341 - RNA, 19 nt, Homo sapiens
  misc_RNA (1)...(19): siRNA sense strand
ccuaagagucuccugacaa

SEQ ID NO: 1955342 - RNA, 19 nt, Homo sapiens
  misc_RNA (1)...(19): siRNA sense strand
cugaagguccucccuaaga

SEQ ID NO: 1955343 - RNA, 19 nt, Homo sapiens
  misc_RNA (1)...(19): siRNA sense strand
gaagguccucccuaagagu

SEQ ID NO: 1955344 - RNA, 19 nt, Homo sapiens
  misc_RNA (1)...(19): siRNA sense strand
ggaggaugccagagguuuc

SEQ ID NO: 1955345 - RNA, 19 nt, Homo sapiens
  misc_RNA (1)...(19): siRNA sense strand
ccucuuuccucaguaaugu

SEQ ID NO: 1955346 - RNA, 19 nt, Homo sapiens
  misc_RNA (1)...(19): siRNA sense strand
cccaugcccugagagaauu

SEQ ID NO: 1955347 - RNA, 19 nt, Homo sapiens
  misc_RNA (1)...(19): siRNA sense strand
cuagggaagucaucucacu

SEQ ID NO: 1955348 - RNA, 19 nt, Homo sapiens
  misc_RNA (1)...(19): siRNA sense strand
gcaaguuuacaggcuggua

SEQ ID NO: 1955349 - RNA, 19 nt, Homo sapiens
  misc_RNA (1)...(19): siRNA sense strand
cuucuccgcuaucaucuuc

SEQ ID NO: 1955350 - RNA, 19 nt, Homo sapiens
  misc_RNA (1)...(19): siRNA sense strand
gcuaugugcagaaccacuu

SEQ ID NO: 1955351 - RNA, 19 nt, Homo sapiens
  misc_RNA (1)...(19): siRNA sense strand
gaggaugccagagguuuca

SEQ ID NO: 1955352 - RNA, 19 nt, Homo sapiens
  misc_RNA (1)...(19): siRNA sense strand
gcaugguugugcccucagu

SEQ ID NO: 1955353 - RNA, 19 nt, Homo sapiens
  misc_RNA (1)...(19): siRNA sense strand
gcuggcaauuucgagagaa

SEQ ID NO: 1955354 - RNA, 19 nt, Homo sapiens
  misc_RNA (1)...(19): siRNA sense strand
gaggaggauauccguguuc

SEQ ID NO: 1955355 - RNA, 19 nt, Homo sapiens
  misc_RNA (1)...(19): siRNA sense strand
gcccuggcacgguguauuc

SEQ ID NO: 1955356 - RNA, 19 nt, Homo sapiens
  misc_RNA (1)...(19): siRNA sense strand
gccaucuucuccgcuauca

SEQ ID NO: 1955357 - RNA, 19 nt, Homo sapiens
  misc_RNA (1)...(19): siRNA sense strand
caucucacuuggccuucug

SEQ ID NO: 1955358 - RNA, 19 nt, Homo sapiens
  misc_RNA (1)...(19): siRNA sense strand
gcugugucaucacugucaa

SEQ ID NO: 1955359 - RNA, 19 nt, Homo sapiens
  misc_RNA (1)...(19): siRNA sense strand
gaaagaagaagcucuagua

SEQ ID NO: 1955360 - RNA, 19 nt, Homo sapiens
  misc_RNA (1)...(19): siRNA sense strand
agaagaagcucuaguacaa

SEQ ID NO: 1955361 - RNA, 19 nt, Homo sapiens
  misc_RNA (1)...(19): siRNA sense strand
gaagaagaguggcgacaga

SEQ ID NO: 1955362 - RNA, 19 nt, Homo sapiens
  misc_RNA (1)...(19): siRNA sense strand
uaaacucggugguacauaa

SEQ ID NO: 1955363 - RNA, 19 nt, Homo sapiens
  misc_RNA (1)...(19): siRNA sense strand
gugaagaaacugcuaaaua

SEQ ID NO: 1955364 - RNA, 19 nt, Homo sapiens
  misc_RNA (1)...(19): siRNA sense strand
cacagaagaugaagauaaa

SEQ ID NO: 1955365 - RNA, 19 nt, Homo sapiens
  misc_RNA (1)...(19): siRNA sense strand
gaguaagacuuuauucuca

SEQ ID NO: 1955366 - RNA, 19 nt, Homo sapiens
  misc_RNA (1)...(19): siRNA sense strand
ggaagaagguuauuuugaa

SEQ ID NO: 1955367 - RNA, 19 nt, Homo sapiens
  misc_RNA (1)...(19): siRNA sense strand
acagaaacuugguagcuua

SEQ ID NO: 1955368 - RNA, 19 nt, Homo sapiens
  misc_RNA (1)...(19): siRNA sense strand
gaacaaauagcacaucaag

SEQ ID NO: 1955369 - RNA, 19 nt, Homo sapiens
  misc_RNA (1)...(19): siRNA sense strand
caaauggaaucuugcugaa

SEQ ID NO: 1955370 - RNA, 19 nt, Homo sapiens
  misc_RNA (1)...(19): siRNA sense strand
gcuuagcacugcauaauuc

SEQ ID NO: 1955371 - RNA, 19 nt, Homo sapiens
  misc_RNA (1)...(19): siRNA sense strand
agaaagaguuugugaagag

SEQ ID NO: 1955372 - RNA, 19 nt, Homo sapiens
  misc_RNA (1)...(19): siRNA sense strand
gguguuggaucuauagguu

SEQ ID NO: 1955373 - RNA, 19 nt, Homo sapiens
  misc_RNA (1)...(19): siRNA sense strand
acaucaagcuguuguaaug

SEQ ID NO: 1955374 - RNA, 19 nt, Homo sapiens
  misc_RNA (1)...(19): siRNA sense strand
guauagccauggaauugaa

SEQ ID NO: 1955375 - RNA, 19 nt, Homo sapiens
  misc_RNA (1)...(19): siRNA sense strand
acacagaagaugaagauaa

SEQ ID NO: 1955376 - RNA, 19 nt, Homo sapiens
  misc_RNA (1)...(19): siRNA sense strand
gcagaaagaguuugugaag

SEQ ID NO: 1955377 - RNA, 19 nt, Homo sapiens
  misc_RNA (1)...(19): siRNA sense strand
gcacaucaagcuguuguaa

SEQ ID NO: 1955378 - RNA, 19 nt, Homo sapiens
  misc_RNA (1)...(19): siRNA sense strand
gcuuucaagucaagaguaa

SEQ ID NO: 1955379 - RNA, 19 nt, Homo sapiens
  misc_RNA (1)...(19): siRNA sense strand
gaagaaacugcuaaauauc

SEQ ID NO: 1955380 - RNA, 19 nt, Homo sapiens
  misc_RNA (1)...(19): siRNA sense strand
guacaaagagagaagaugu

SEQ ID NO: 1955381 - RNA, 19 nt, Homo sapiens
  misc_RNA (1)...(19): siRNA sense strand
ccuggaagcugagaagaaa

SEQ ID NO: 1955382 - RNA, 19 nt, Homo sapiens
  misc_RNA (1)...(19): siRNA sense strand
gcacggaugccauuagcaa

SEQ ID NO: 1955383 - RNA, 19 nt, Homo sapiens
  misc_RNA (1)...(19): siRNA sense strand
gaaaagacacagaagauga

SEQ ID NO: 1955384 - RNA, 19 nt, Homo sapiens
  misc_RNA (1)...(19): siRNA sense strand
gaaacuugguagcuuagca

SEQ ID NO: 1955385 - RNA, 19 nt, Homo sapiens
  misc_RNA (1)...(19): siRNA sense strand
acaaacagcaguaucagaa

SEQ ID NO: 1955386 - RNA, 19 nt, Homo sapiens
  misc_RNA (1)...(19): siRNA sense strand
uguuggaucuauagguuua

SEQ ID NO: 1955387 - RNA, 19 nt, Homo sapiens
  misc_RNA (1)...(19): siRNA sense strand
ucacaaaguuuucaaccua

SEQ ID NO: 1955388 - RNA, 19 nt, Homo sapiens
  misc_RNA (1)...(19): siRNA sense strand
gaugauagccagagauuuu

SEQ ID NO: 1955389 - RNA, 19 nt, Homo sapiens
  misc_RNA (1)...(19): siRNA sense strand
gaagaagcucuaguacaaa

SEQ ID NO: 1955390 - RNA, 19 nt, Homo sapiens
  misc_RNA (1)...(19): siRNA sense strand
gaaucuugcugaagcucaa

SEQ ID NO: 1955391 - RNA, 19 nt, Homo sapiens
  misc_RNA (1)...(19): siRNA sense strand
cagaaagaguuugugaaga

SEQ ID NO: 1955392 - RNA, 19 nt, Homo sapiens
  misc_RNA (1)...(19): siRNA sense strand
agaagaugaugaacccaaa

SEQ ID NO: 1955393 - RNA, 19 nt, Homo sapiens
  misc_RNA (1)...(19): siRNA sense strand
ggugguacauaaagaagau

SEQ ID NO: 1955394 - RNA, 19 nt, Homo sapiens
  misc_RNA (1)...(19): siRNA sense strand
uaccacagaguccagauua

SEQ ID NO: 1955395 - RNA, 19 nt, Homo sapiens
  misc_RNA (1)...(19): siRNA sense strand
gaagaguggcgacagaaag

SEQ ID NO: 1955396 - RNA, 19 nt, Homo sapiens
  misc_RNA (1)...(19): siRNA sense strand
uuagaauccuuaccacaga

SEQ ID NO: 1955397 - RNA, 19 nt, Homo sapiens
  misc_RNA (1)...(19): siRNA sense strand
ugcugaagcucaacagaaa

SEQ ID NO: 1955398 - RNA, 19 nt, Homo sapiens
  misc_RNA (1)...(19): siRNA sense strand
aagcagaggaagaagguua

SEQ ID NO: 1955399 - RNA, 19 nt, Homo sapiens
  misc_RNA (1)...(19): siRNA sense strand
gggcuuuaauggaacaaau

SEQ ID NO: 1955400 - RNA, 19 nt, Homo sapiens
  misc_RNA (1)...(19): siRNA sense strand
gcgugcaaauggaaucuug

SEQ ID NO: 1955401 - RNA, 19 nt, Homo sapiens
  misc_RNA (1)...(19): siRNA sense strand
aaugauggacacuguauaa

SEQ ID NO: 1955402 - RNA, 19 nt, Homo sapiens
  misc_RNA (1)...(19): siRNA sense strand
gaaagccaaagcagaggaa

SEQ ID NO: 1955403 - RNA, 19 nt, Homo sapiens
  misc_RNA (1)...(19): siRNA sense strand
gggaugauagccagagauu

SEQ ID NO: 1955404 - RNA, 19 nt, Homo sapiens
  misc_RNA (1)...(19): siRNA sense strand
gaagcucaacagaaacuug

SEQ ID NO: 1955405 - RNA, 19 nt, Homo sapiens
  misc_RNA (1)...(19): siRNA sense strand
caaagcacaaacagcagua

SEQ ID NO: 1955406 - RNA, 19 nt, Homo sapiens
  misc_RNA (1)...(19): siRNA sense strand
gcuguuguaaugcaguuua

SEQ ID NO: 1955407 - RNA, 19 nt, Homo sapiens
  misc_RNA (1)...(19): siRNA sense strand
ccagauguauagccaugga

SEQ ID NO: 1955408 - RNA, 19 nt, Homo sapiens
  misc_RNA (1)...(19): siRNA sense strand
acaaauagcacaucaagcu

SEQ ID NO: 1955409 - RNA, 19 nt, Homo sapiens
  misc_RNA (1)...(19): siRNA sense strand
aagaagcucuaguacaaag

SEQ ID NO: 1955410 - RNA, 19 nt, Homo sapiens
  misc_RNA (1)...(19): siRNA sense strand
cuaugacaguucagaauca

SEQ ID NO: 1955411 - RNA, 19 nt, Homo sapiens
  misc_RNA (1)...(19): siRNA sense strand
gaagaagguuauuuugaag

SEQ ID NO: 1955412 - RNA, 19 nt, Homo sapiens
  misc_RNA (1)...(19): siRNA sense strand
gagcacggaugccauuagc

SEQ ID NO: 1955413 - RNA, 19 nt, Homo sapiens
  misc_RNA (1)...(19): siRNA sense strand
gcucaacagaaacuuggua

SEQ ID NO: 1955414 - RNA, 19 nt, Homo sapiens
  misc_RNA (1)...(19): siRNA sense strand
gccauuagcaaggauguuu

SEQ ID NO: 1955415 - RNA, 19 nt, Homo sapiens
  misc_RNA (1)...(19): siRNA sense strand
acagaaagaagaagcucua

SEQ ID NO: 1955416 - RNA, 19 nt, Homo sapiens
  misc_RNA (1)...(19): siRNA sense strand
aaacagcaguaucagaacu

SEQ ID NO: 1955417 - RNA, 19 nt, Homo sapiens
  misc_RNA (1)...(19): siRNA sense strand
guacauaaagaagaugaug

SEQ ID NO: 1955418 - RNA, 19 nt, Homo sapiens
  misc_RNA (1)...(19): siRNA sense strand
aaaugaacuugaagcuuuc

SEQ ID NO: 1955419 - RNA, 19 nt, Homo sapiens
  misc_RNA (1)...(19): siRNA sense strand
caaagcagaggaagaaggu

SEQ ID NO: 1955420 - RNA, 19 nt, Homo sapiens
  misc_RNA (1)...(19): siRNA sense strand
aaagagagaagaugugucu

SEQ ID NO: 1955421 - RNA, 19 nt, Homo sapiens
  misc_RNA (1)...(19): siRNA sense strand
gagcaugccaaagcacaaa

SEQ ID NO: 1955422 - RNA, 19 nt, Homo sapiens
  misc_RNA (1)...(19): siRNA sense strand
ccaagaggguguuuucguu

SEQ ID NO: 1955423 - RNA, 19 nt, Homo sapiens
  misc_RNA (1)...(19): siRNA sense strand
uugagucgaugggaugaua

SEQ ID NO: 1955424 - RNA, 19 nt, Homo sapiens
  misc_RNA (1)...(19): siRNA sense strand
gauguauagccauggaauu

SEQ ID NO: 1955425 - RNA, 19 nt, Homo sapiens
  misc_RNA (1)...(19): siRNA sense strand
cagcuuaaacucgguggua

SEQ ID NO: 1955426 - RNA, 19 nt, Homo sapiens
  misc_RNA (1)...(19): siRNA sense strand
cuucaguauucuaucagua

SEQ ID NO: 1955427 - RNA, 19 nt, Homo sapiens
  misc_RNA (1)...(19): siRNA sense strand
uggaacaaauagcacauca

SEQ ID NO: 1955428 - RNA, 19 nt, Homo sapiens
  misc_RNA (1)...(19): siRNA sense strand
cagaagaugaagauaaauc

SEQ ID NO: 1955429 - RNA, 19 nt, Homo sapiens
  misc_RNA (1)...(19): siRNA sense strand
agacacagaagaugaagau

SEQ ID NO: 1955430 - RNA, 19 nt, Homo sapiens
  misc_RNA (1)...(19): siRNA sense strand
ggaacaaauagcacaucaa

SEQ ID NO: 1955431 - RNA, 19 nt, Homo sapiens
  misc_RNA (1)...(19): siRNA sense strand
ccacagaguccagauuauc

SEQ ID NO: 1955432 - RNA, 19 nt, Homo sapiens
  misc_RNA (1)...(19): siRNA sense strand
caacagaaacuugguagcu

SEQ ID NO: 1955433 - RNA, 19 nt, Homo sapiens
  misc_RNA (1)...(19): siRNA sense strand
gcaguuuauuauggaaaug

SEQ ID NO: 1955434 - RNA, 19 nt, Homo sapiens
  misc_RNA (1)...(19): siRNA sense strand
aauagcacaucaagcuguu

SEQ ID NO: 1955435 - RNA, 19 nt, Homo sapiens
  misc_RNA (1)...(19): siRNA sense strand
gaugaugaacccaaaauga

SEQ ID NO: 1955436 - RNA, 19 nt, Homo sapiens
  misc_RNA (1)...(19): siRNA sense strand
uaccuuguaugugaagaaa

SEQ ID NO: 1955437 - RNA, 19 nt, Homo sapiens
  misc_RNA (1)...(19): siRNA sense strand
ccaaaaugauggacacugu

SEQ ID NO: 1955438 - RNA, 19 nt, Homo sapiens
  misc_RNA (1)...(19): siRNA sense strand
ggaucuauagguuuauuag

SEQ ID NO: 1955439 - RNA, 19 nt, Homo sapiens
  misc_RNA (1)...(19): siRNA sense strand
ugacaguucagaaucaugu

SEQ ID NO: 1955440 - RNA, 19 nt, Homo sapiens
  misc_RNA (1)...(19): siRNA sense strand
uagcacugcauaauucuga

SEQ ID NO: 1955441 - RNA, 19 nt, Homo sapiens
  misc_RNA (1)...(19): siRNA sense strand
ggcuuuaauggaacaaaua

SEQ ID NO: 1955442 - RNA, 19 nt, Homo sapiens
  misc_RNA (1)...(19): siRNA sense strand
ucaggagcaugccaaagca

SEQ ID NO: 1955443 - RNA, 19 nt, Homo sapiens
  misc_RNA (1)...(19): siRNA sense strand
caagaguaagacuuuauuc

SEQ ID NO: 1955444 - RNA, 19 nt, Homo sapiens
  misc_RNA (1)...(19): siRNA sense strand
aacagaaacuugguagcuu

SEQ ID NO: 1955445 - RNA, 19 nt, Homo sapiens
  misc_RNA (1)...(19): siRNA sense strand
agagugacuucgacguguu

SEQ ID NO: 1955446 - RNA, 19 nt, Homo sapiens
  misc_RNA (1)...(19): siRNA sense strand
cagaggaagaagguuauuu

SEQ ID NO: 1955447 - RNA, 19 nt, Homo sapiens
  misc_RNA (1)...(19): siRNA sense strand
aagcagaaagaguuuguga

SEQ ID NO: 1955448 - RNA, 19 nt, Homo sapiens
  misc_RNA (1)...(19): siRNA sense strand
uagcuuagcacugcauaau

SEQ ID NO: 1955449 - RNA, 19 nt, Homo sapiens
  misc_RNA (1)...(19): siRNA sense strand
gcagaggaagaagguuauu

SEQ ID NO: 1955450 - RNA, 19 nt, Homo sapiens
  misc_RNA (1)...(19): siRNA sense strand
gaagaugaagauaaaucag

SEQ ID NO: 1955451 - RNA, 19 nt, Homo sapiens
  misc_RNA (1)...(19): siRNA sense strand
gccaaaagcagaaagaguu

SEQ ID NO: 1955452 - RNA, 19 nt, Homo sapiens
  misc_RNA (1)...(19): siRNA sense strand
aaacucggugguacauaaa

SEQ ID NO: 1955453 - RNA, 19 nt, Homo sapiens
  misc_RNA (1)...(19): siRNA sense strand
caaccuaugacaguucaga

SEQ ID NO: 1955454 - RNA, 19 nt, Homo sapiens
  misc_RNA (1)...(19): siRNA sense strand
aagaggguguuuucguuua

SEQ ID NO: 1955455 - RNA, 19 nt, Homo sapiens
  misc_RNA (1)...(19): siRNA sense strand
agagagaagaugugucugu

SEQ ID NO: 1955456 - RNA, 19 nt, Homo sapiens
  misc_RNA (1)...(19): siRNA sense strand
gcacaaacagcaguaucag

SEQ ID NO: 1955457 - RNA, 19 nt, Homo sapiens
  misc_RNA (1)...(19): siRNA sense strand
ucaguauucuaucaguaca

SEQ ID NO: 1955458 - RNA, 19 nt, Homo sapiens
  misc_RNA (1)...(19): siRNA sense strand
ggaugauagccagagauuu

SEQ ID NO: 1955459 - RNA, 19 nt, Homo sapiens
  misc_RNA (1)...(19): siRNA sense strand
ucacaguccugccaucuua

SEQ ID NO: 1955460 - RNA, 19 nt, Homo sapiens
  misc_RNA (1)...(19): siRNA sense strand
cuacaaacaucugguaaga

SEQ ID NO: 1955461 - RNA, 19 nt, Homo sapiens
  misc_RNA (1)...(19): siRNA sense strand
acaaacaucugguaagaca

SEQ ID NO: 1955462 - RNA, 19 nt, Homo sapiens
  misc_RNA (1)...(19): siRNA sense strand
gauauuaccgucucaggaa

SEQ ID NO: 1955463 - RNA, 19 nt, Homo sapiens
  misc_RNA (1)...(19): siRNA sense strand
acaaguacauccacucaug

SEQ ID NO: 1955464 - RNA, 19 nt, Homo sapiens
  misc_RNA (1)...(19): siRNA sense strand
gaaaggaucaggacuccau

SEQ ID NO: 1955465 - RNA, 19 nt, Homo sapiens
  misc_RNA (1)...(19): siRNA sense strand
guacauccacucaugaaug

SEQ ID NO: 1955466 - RNA, 19 nt, Homo sapiens
  misc_RNA (1)...(19): siRNA sense strand
guguauaccuguaaagaca

SEQ ID NO: 1955467 - RNA, 19 nt, Homo sapiens
  misc_RNA (1)...(19): siRNA sense strand
aaacacagcagccauuugu

SEQ ID NO: 1955468 - RNA, 19 nt, Homo sapiens
  misc_RNA (1)...(19): siRNA sense strand
gaguggaaauaacugcauu

SEQ ID NO: 1955469 - RNA, 19 nt, Homo sapiens
  misc_RNA (1)...(19): siRNA sense strand
gagcuacaaacaucuggua

SEQ ID NO: 1955470 - RNA, 19 nt, Homo sapiens
  misc_RNA (1)...(19): siRNA sense strand
gcuuuaaccucagucauca

SEQ ID NO: 1955471 - RNA, 19 nt, Homo sapiens
  misc_RNA (1)...(19): siRNA sense strand
caucuuacuuuccucuugu

SEQ ID NO: 1955472 - RNA, 19 nt, Homo sapiens
  misc_RNA (1)...(19): siRNA sense strand
aaaagaagauggaaaugga

SEQ ID NO: 1955473 - RNA, 19 nt, Homo sapiens
  misc_RNA (1)...(19): siRNA sense strand
gaagauggaaauggauguu

SEQ ID NO: 1955474 - RNA, 19 nt, Homo sapiens
  misc_RNA (1)...(19): siRNA sense strand
caaguacauccacucauga

SEQ ID NO: 1955475 - RNA, 19 nt, Homo sapiens
  misc_RNA (1)...(19): siRNA sense strand
cacccacucugaccucuug

SEQ ID NO: 1955476 - RNA, 19 nt, Homo sapiens
  misc_RNA (1)...(19): siRNA sense strand
ccaucuuacuuuccucuug

SEQ ID NO: 1955477 - RNA, 19 nt, Homo sapiens
  misc_RNA (1)...(19): siRNA sense strand
gcagccauuuguaccuguu

SEQ ID NO: 1955478 - RNA, 19 nt, Homo sapiens
  misc_RNA (1)...(19): siRNA sense strand
cauuauggcugcuuuaacc

SEQ ID NO: 1955479 - RNA, 19 nt, Homo sapiens
  misc_RNA (1)...(19): siRNA sense strand
caagcucccguaaggauau

SEQ ID NO: 1955480 - RNA, 19 nt, Homo sapiens
  misc_RNA (1)...(19): siRNA sense strand
cgaguucugaguggaaaua

SEQ ID NO: 1955481 - RNA, 19 nt, Homo sapiens
  misc_RNA (1)...(19): siRNA sense strand
ucaagcucccguaaggaua

SEQ ID NO: 1955482 - RNA, 19 nt, Homo sapiens
  misc_RNA (1)...(19): siRNA sense strand
ggaucaggacuccauguca

SEQ ID NO: 1955483 - RNA, 19 nt, Homo sapiens
  misc_RNA (1)...(19): siRNA sense strand
ccuaaacacagcagccauu

SEQ ID NO: 1955484 - RNA, 19 nt, Homo sapiens
  misc_RNA (1)...(19): siRNA sense strand
cuaaacacagcagccauuu

SEQ ID NO: 1955485 - RNA, 19 nt, Homo sapiens
  misc_RNA (1)...(19): siRNA sense strand
acucaugaaugcagacaca

SEQ ID NO: 1955486 - RNA, 19 nt, Homo sapiens
  misc_RNA (1)...(19): siRNA sense strand
aaacaucugguaagacaag

SEQ ID NO: 1955487 - RNA, 19 nt, Homo sapiens
  misc_RNA (1)...(19): siRNA sense strand
uaaacacagcagccauuug

SEQ ID NO: 1955488 - RNA, 19 nt, Homo sapiens
  misc_RNA (1)...(19): siRNA sense strand
guauaccuguaaagacaag

SEQ ID NO: 1955489 - RNA, 19 nt, Homo sapiens
  misc_RNA (1)...(19): siRNA sense strand
guccugccaucuuacuuuc

SEQ ID NO: 1955490 - RNA, 19 nt, Homo sapiens
  misc_RNA (1)...(19): siRNA sense strand
gguaagacaaguacaucca

SEQ ID NO: 1955491 - RNA, 19 nt, Homo sapiens
  misc_RNA (1)...(19): siRNA sense strand
agacaaguacauccacuca

SEQ ID NO: 1955492 - RNA, 19 nt, Homo sapiens
  misc_RNA (1)...(19): siRNA sense strand
uaaggauauuaccgucuca

SEQ ID NO: 1955493 - RNA, 19 nt, Homo sapiens
  misc_RNA (1)...(19): siRNA sense strand
ggaaguaaaagaagaugga

SEQ ID NO: 1955494 - RNA, 19 nt, Homo sapiens
  misc_RNA (1)...(19): siRNA sense strand
uacauccacucaugaaugc

SEQ ID NO: 1955495 - RNA, 19 nt, Homo sapiens
  misc_RNA (1)...(19): siRNA sense strand
acacagcagccauuuguac

SEQ ID NO: 1955496 - RNA, 19 nt, Homo sapiens
  misc_RNA (1)...(19): siRNA sense strand
gcuacaaacaucugguaag

SEQ ID NO: 1955497 - RNA, 19 nt, Homo sapiens
  misc_RNA (1)...(19): siRNA sense strand
cacucaagcucccguaagg

SEQ ID NO: 1955498 - RNA, 19 nt, Homo sapiens
  misc_RNA (1)...(19): siRNA sense strand
gcuucauggucaucacuca

SEQ ID NO: 1955499 - RNA, 19 nt, Homo sapiens
  misc_RNA (1)...(19): siRNA sense strand
auauuaccgucucaggaaa

SEQ ID NO: 1955500 - RNA, 19 nt, Homo sapiens
  misc_RNA (1)...(19): siRNA sense strand
gguagcagguggagucuuu

SEQ ID NO: 1955501 - RNA, 19 nt, Homo sapiens
  misc_RNA (1)...(19): siRNA sense strand
gcucuuuacuugggcauua

SEQ ID NO: 1955502 - RNA, 19 nt, Homo sapiens
  misc_RNA (1)...(19): siRNA sense strand
agagugaguucaauuccua

SEQ ID NO: 1955503 - RNA, 19 nt, Homo sapiens
  misc_RNA (1)...(19): siRNA sense strand
gaaaucgcuccaacuacua

SEQ ID NO: 1955504 - RNA, 19 nt, Homo sapiens
  misc_RNA (1)...(19): siRNA sense strand
gaaaacaaguucuuauguc

SEQ ID NO: 1955505 - RNA, 19 nt, Homo sapiens
  misc_RNA (1)...(19): siRNA sense strand
gcaugaaauuugagauugg

SEQ ID NO: 1955506 - RNA, 19 nt, Homo sapiens
  misc_RNA (1)...(19): siRNA sense strand
agagaaaucgcuccaacua

SEQ ID NO: 1955507 - RNA, 19 nt, Homo sapiens
  misc_RNA (1)...(19): siRNA sense strand
agaaaucgcuccaacuacu

SEQ ID NO: 1955508 - RNA, 19 nt, Homo sapiens
  misc_RNA (1)...(19): siRNA sense strand
cuacuacgaugccuaccaa

SEQ ID NO: 1955509 - RNA, 19 nt, Homo sapiens
  misc_RNA (1)...(19): siRNA sense strand
ccaggaaucccgagccaaa

SEQ ID NO: 1955510 - RNA, 19 nt, Homo sapiens
  misc_RNA (1)...(19): siRNA sense strand
ggaaucauccucugcuuuu

SEQ ID NO: 1955511 - RNA, 19 nt, Homo sapiens
  misc_RNA (1)...(19): siRNA sense strand
cagcaugaaauuugagauu

SEQ ID NO: 1955512 - RNA, 19 nt, Homo sapiens
  misc_RNA (1)...(19): siRNA sense strand
cauuauuucuucccuguuc

SEQ ID NO: 1955513 - RNA, 19 nt, Homo sapiens
  misc_RNA (1)...(19): siRNA sense strand
ccugacagcaugaaauuug

SEQ ID NO: 1955514 - RNA, 19 nt, Homo sapiens
  misc_RNA (1)...(19): siRNA sense strand
ccaagggccucuggaugga

SEQ ID NO: 1955515 - RNA, 19 nt, Homo sapiens
  misc_RNA (1)...(19): siRNA sense strand
ccuguugccuggaaucuuc

SEQ ID NO: 1955516 - RNA, 19 nt, Homo sapiens
  misc_RNA (1)...(19): siRNA sense strand
caugaaauuugagauugga

SEQ ID NO: 1955517 - RNA, 19 nt, Homo sapiens
  misc_RNA (1)...(19): siRNA sense strand
ggaaaacaaguucuuaugu

SEQ ID NO: 1955518 - RNA, 19 nt, Homo sapiens
  misc_RNA (1)...(19): siRNA sense strand
gcacacugguugccaugcu

SEQ ID NO: 1955519 - RNA, 19 nt, Homo sapiens
  misc_RNA (1)...(19): siRNA sense strand
ucaagagugaguucaauuc

SEQ ID NO: 1955520 - RNA, 19 nt, Homo sapiens
  misc_RNA (1)...(19): siRNA sense strand
gaaucuucaugggauccua

SEQ ID NO: 1955521 - RNA, 19 nt, Homo sapiens
  misc_RNA (1)...(19): siRNA sense strand
cugacagcaugaaauuuga

SEQ ID NO: 1955522 - RNA, 19 nt, Homo sapiens
  misc_RNA (1)...(19): siRNA sense strand
caaagucaagagugaguuc

SEQ ID NO: 1955523 - RNA, 19 nt, Homo sapiens
  misc_RNA (1)...(19): siRNA sense strand
uuaugucggugccagcauu

SEQ ID NO: 1955524 - RNA, 19 nt, Homo sapiens
  misc_RNA (1)...(19): siRNA sense strand
ggucaaccucccaaaguca

SEQ ID NO: 1955525 - RNA, 19 nt, Homo sapiens
  misc_RNA (1)...(19): siRNA sense strand
cuaccaagcccaaccucuu

SEQ ID NO: 1955526 - RNA, 19 nt, Homo sapiens
  misc_RNA (1)...(19): siRNA sense strand
cacccagugugacaucuau

SEQ ID NO: 1955527 - RNA, 19 nt, Homo sapiens
  misc_RNA (1)...(19): siRNA sense strand
gagaaaucgcuccaacuac

SEQ ID NO: 1955528 - RNA, 19 nt, Homo sapiens
  misc_RNA (1)...(19): siRNA sense strand
caugagaugcacagucuuc

SEQ ID NO: 1955529 - RNA, 19 nt, Homo sapiens
  misc_RNA (1)...(19): siRNA sense strand
agcaugaaauuugagauug

SEQ ID NO: 1955530 - RNA, 19 nt, Homo sapiens
  misc_RNA (1)...(19): siRNA sense strand
acacacagcacaggcauca

SEQ ID NO: 1955531 - RNA, 19 nt, Homo sapiens
  misc_RNA (1)...(19): siRNA sense strand
gucaagagugaguucaauu

SEQ ID NO: 1955532 - RNA, 19 nt, Homo sapiens
  misc_RNA (1)...(19): siRNA sense strand
cucccaaagucaagaguga

SEQ ID NO: 1955533 - RNA, 19 nt, Homo sapiens
  misc_RNA (1)...(19): siRNA sense strand
ggugacauccagugcaauc

SEQ ID NO: 1955534 - RNA, 19 nt, Homo sapiens
  misc_RNA (1)...(19): siRNA sense strand
ucccuggccugcauuaucu

SEQ ID NO: 1955535 - RNA, 19 nt, Homo sapiens
  misc_RNA (1)...(19): siRNA sense strand
gauccuacgggacuucuac

SEQ ID NO: 1955536 - RNA, 19 nt, Homo sapiens
  misc_RNA (1)...(19): siRNA sense strand
agucaagagugaguucaau

SEQ ID NO: 1955537 - RNA, 19 nt, Homo sapiens
  misc_RNA (1)...(19): siRNA sense strand
uggaaucauccucugcuuu

SEQ ID NO: 1955538 - RNA, 19 nt, Homo sapiens
  misc_RNA (1)...(19): siRNA sense strand
gacagcaugaaauuugaga

SEQ ID NO: 1955539 - RNA, 19 nt, Homo sapiens
  misc_RNA (1)...(19): siRNA sense strand
gcacaugcgggucaaggaa

SEQ ID NO: 1955540 - RNA, 19 nt, Homo sapiens
  misc_RNA (1)...(19): siRNA sense strand
gcuagucucagcguacuua

SEQ ID NO: 1955541 - RNA, 19 nt, Homo sapiens
  misc_RNA (1)...(19): siRNA sense strand
guaaggugcgcuccgaaga

SEQ ID NO: 1955542 - RNA, 19 nt, Homo sapiens
  misc_RNA (1)...(19): siRNA sense strand
caaggaaggcagcaagauc

SEQ ID NO: 1955543 - RNA, 19 nt, Homo sapiens
  misc_RNA (1)...(19): siRNA sense strand
ggaacccgcagcuggagaa

SEQ ID NO: 1955544 - RNA, 19 nt, Homo sapiens
  misc_RNA (1)...(19): siRNA sense strand
agucucagcguacuuaaga

SEQ ID NO: 1955545 - RNA, 19 nt, Homo sapiens
  misc_RNA (1)...(19): siRNA sense strand
gcagcaagauccggaaccu

SEQ ID NO: 1955546 - RNA, 19 nt, Homo sapiens
  misc_RNA (1)...(19): siRNA sense strand
caagauccggaaccugaug

SEQ ID NO: 1955547 - RNA, 19 nt, Homo sapiens
  misc_RNA (1)...(19): siRNA sense strand
gcaagauccggaaccugau

SEQ ID NO: 1955548 - RNA, 19 nt, Homo sapiens
  misc_RNA (1)...(19): siRNA sense strand
ggccucgccauccuacuuu

SEQ ID NO: 1955549 - RNA, 19 nt, Homo sapiens
  misc_RNA (1)...(19): siRNA sense strand
cagcauagcuccaccaagu

SEQ ID NO: 1955550 - RNA, 19 nt, Homo sapiens
  misc_RNA (1)...(19): siRNA sense strand
ucaagacccucaacaacaa

SEQ ID NO: 1955551 - RNA, 19 nt, Homo sapiens
  misc_RNA (1)...(19): siRNA sense strand
gcaagcagcuagauucacu

SEQ ID NO: 1955552 - RNA, 19 nt, Homo sapiens
  misc_RNA (1)...(19): siRNA sense strand
ggagaggagugcaggaugu

SEQ ID NO: 1955553 - RNA, 19 nt, Homo sapiens
  misc_RNA (1)...(19): siRNA sense strand
gagcggagcaggcagcuuu

SEQ ID NO: 1955554 - RNA, 19 nt, Homo sapiens
  misc_RNA (1)...(19): siRNA sense strand
caggaugucuggagaaugu

SEQ ID NO: 1955555 - RNA, 19 nt, Homo sapiens
  misc_RNA (1)...(19): siRNA sense strand
cagacaaguuugcaagaaa

SEQ ID NO: 1955556 - RNA, 19 nt, Homo sapiens
  misc_RNA (1)...(19): siRNA sense strand
guaugaagaugaaaucaac

SEQ ID NO: 1955557 - RNA, 19 nt, Homo sapiens
  misc_RNA (1)...(19): siRNA sense strand
ucauggagcucaacaggau

SEQ ID NO: 1955558 - RNA, 19 nt, Homo sapiens
  misc_RNA (1)...(19): siRNA sense strand
gagcagcuguggcuuugca

SEQ ID NO: 1955559 - RNA, 19 nt, Homo sapiens
  misc_RNA (1)...(19): siRNA sense strand
gcauagcuccaccaaguga

SEQ ID NO: 1955560 - RNA, 19 nt, Homo sapiens
  misc_RNA (1)...(19): siRNA sense strand
accaggagcugaugaaugu

SEQ ID NO: 1955561 - RNA, 19 nt, Homo sapiens
  misc_RNA (1)...(19): siRNA sense strand
gggcugagauugaaaaugu

SEQ ID NO: 1955562 - RNA, 19 nt, Homo sapiens
  misc_RNA (1)...(19): siRNA sense strand
gaaguaugaagaugaaauc

SEQ ID NO: 1955563 - RNA, 19 nt, Homo sapiens
  misc_RNA (1)...(19): siRNA sense strand
cagcuauggugguggcuuu

SEQ ID NO: 1955564 - RNA, 19 nt, Homo sapiens
  misc_RNA (1)...(19): siRNA sense strand
ggcaguagccguggaguuu

SEQ ID NO: 1955565 - RNA, 19 nt, Homo sapiens
  misc_RNA (1)...(19): siRNA sense strand
gcauuucaguggucagcaa

SEQ ID NO: 1955566 - RNA, 19 nt, Homo sapiens
  misc_RNA (1)...(19): siRNA sense strand
agacaaguuugcaagaaau

SEQ ID NO: 1955567 - RNA, 19 nt, Homo sapiens
  misc_RNA (1)...(19): siRNA sense strand
gcuacgggcugagauugaa

SEQ ID NO: 1955568 - RNA, 19 nt, Homo sapiens
  misc_RNA (1)...(19): siRNA sense strand
ugguggagcugguggcuuu

SEQ ID NO: 1955569 - RNA, 19 nt, Homo sapiens
  misc_RNA (1)...(19): siRNA sense strand
gaccugggcagcaucauug

SEQ ID NO: 1955570 - RNA, 19 nt, Homo sapiens
  misc_RNA (1)...(19): siRNA sense strand
gaucaagacccucaacaac

SEQ ID NO: 1955571 - RNA, 19 nt, Homo sapiens
  misc_RNA (1)...(19): siRNA sense strand
gaagaugaaaucaacaaac

SEQ ID NO: 1955572 - RNA, 19 nt, Homo sapiens
  misc_RNA (1)...(19): siRNA sense strand
ggaugcggcuuucaugaac

SEQ ID NO: 1955573 - RNA, 19 nt, Homo sapiens
  misc_RNA (1)...(19): siRNA sense strand
acagacaaguuugcaagaa

SEQ ID NO: 1955574 - RNA, 19 nt, Homo sapiens
  misc_RNA (1)...(19): siRNA sense strand
guggagagauggcccucaa

SEQ ID NO: 1955575 - RNA, 19 nt, Homo sapiens
  misc_RNA (1)...(19): siRNA sense strand
agauggagcugucccagau

SEQ ID NO: 1955576 - RNA, 19 nt, Homo sapiens
  misc_RNA (1)...(19): siRNA sense strand
ggaccugggcagcaucauu

SEQ ID NO: 1955577 - RNA, 19 nt, Homo sapiens
  misc_RNA (1)...(19): siRNA sense strand
ugaggaacaccaagaguga

SEQ ID NO: 1955578 - RNA, 19 nt, Homo sapiens
  misc_RNA (1)...(19): siRNA sense strand
uggcagugguggcuacaaa

SEQ ID NO: 1955579 - RNA, 19 nt, Homo sapiens
  misc_RNA (1)...(19): siRNA sense strand
cagagugccgugugcauuu

SEQ ID NO: 1955580 - RNA, 19 nt, Homo sapiens
  misc_RNA (1)...(19): siRNA sense strand
uacagaaggcuaaggauga

SEQ ID NO: 1955581 - RNA, 19 nt, Homo sapiens
  misc_RNA (1)...(19): siRNA sense strand
acaacaaguuugccuccuu

SEQ ID NO: 1955582 - RNA, 19 nt, Homo sapiens
  misc_RNA (1)...(19): siRNA sense strand
caaguuugccuccuucauc

SEQ ID NO: 1955583 - RNA, 19 nt, Homo sapiens
  misc_RNA (1)...(19): siRNA sense strand
uacaucagcuuccuaugca

SEQ ID NO: 1955584 - RNA, 19 nt, Homo sapiens
  misc_RNA (1)...(19): siRNA sense strand
uggacagccugacagauga

SEQ ID NO: 1955585 - RNA, 19 nt, Homo sapiens
  misc_RNA (1)...(19): siRNA sense strand
guggacagccugacagaug

SEQ ID NO: 1955586 - RNA, 19 nt, Homo sapiens
  misc_RNA (1)...(19): siRNA sense strand
gcaacaagagcaucuccau

SEQ ID NO: 1955587 - RNA, 19 nt, Homo sapiens
  misc_RNA (1)...(19): siRNA sense strand
uaccagagcagcaguagug

SEQ ID NO: 1955588 - RNA, 19 nt, Homo sapiens
  misc_RNA (1)...(19): siRNA sense strand
ggauguggaugcggcuuuc

SEQ ID NO: 1955589 - RNA, 19 nt, Homo sapiens
  misc_RNA (1)...(19): siRNA sense strand
cggagcagcuguggcuuug

SEQ ID NO: 1955590 - RNA, 19 nt, Homo sapiens
  misc_RNA (1)...(19): siRNA sense strand
aacaagagcaucuccauca

SEQ ID NO: 1955591 - RNA, 19 nt, Homo sapiens
  misc_RNA (1)...(19): siRNA sense strand
gaauucaggaagugauugu

SEQ ID NO: 1955592 - RNA, 19 nt, Homo sapiens
  misc_RNA (1)...(19): siRNA sense strand
gagagauggcccucaagga

SEQ ID NO: 1955593 - RNA, 19 nt, Homo sapiens
  misc_RNA (1)...(19): siRNA sense strand
aagaugaaaucaacaaacg

SEQ ID NO: 1955594 - RNA, 19 nt, Homo sapiens
  misc_RNA (1)...(19): siRNA sense strand
ggaggaaguggcuacaagu

SEQ ID NO: 1955595 - RNA, 19 nt, Homo sapiens
  misc_RNA (1)...(19): siRNA sense strand
gaacaccaagagugagauc

SEQ ID NO: 1955596 - RNA, 19 nt, Homo sapiens
  misc_RNA (1)...(19): siRNA sense strand
caaaguggacagccugaca

SEQ ID NO: 1955597 - RNA, 19 nt, Homo sapiens
  misc_RNA (1)...(19): siRNA sense strand
ccgcagagaaugaguuugu

SEQ ID NO: 1955598 - RNA, 19 nt, Homo sapiens
  misc_RNA (1)...(19): siRNA sense strand
gcggagcagcuguggcuuu

SEQ ID NO: 1955599 - RNA, 19 nt, Homo sapiens
  misc_RNA (1)...(19): siRNA sense strand
uggugguccugguguauuu

SEQ ID NO: 1955600 - RNA, 19 nt, Homo sapiens
  misc_RNA (1)...(19): siRNA sense strand
cagcggcaguggcuaugga

SEQ ID NO: 1955601 - RNA, 19 nt, Homo sapiens
  misc_RNA (1)...(19): siRNA sense strand
gggaauucaggaagugauu

SEQ ID NO: 1955602 - RNA, 19 nt, Homo sapiens
  misc_RNA (1)...(19): siRNA sense strand
ggaauucaggaagugauug

SEQ ID NO: 1955603 - RNA, 19 nt, Homo sapiens
  misc_RNA (1)...(19): siRNA sense strand
cagcggcuauggagucagu

SEQ ID NO: 1955604 - RNA, 19 nt, Homo sapiens
  misc_RNA (1)...(19): siRNA sense strand
caccaagagugagaucaug

SEQ ID NO: 1955605 - RNA, 19 nt, Homo sapiens
  misc_RNA (1)...(19): siRNA sense strand
gaccugaggaacaccaaga

SEQ ID NO: 1955606 - RNA, 19 nt, Homo sapiens
  misc_RNA (1)...(19): siRNA sense strand
gggaugaccugaggaacac

SEQ ID NO: 1955607 - RNA, 19 nt, Homo sapiens
  misc_RNA (1)...(19): siRNA sense strand
ggacagccugacagaugaa

SEQ ID NO: 1955608 - RNA, 19 nt, Homo sapiens
  misc_RNA (1)...(19): siRNA sense strand
gagcgggaacagaucaaga

SEQ ID NO: 1955609 - RNA, 19 nt, Homo sapiens
  misc_RNA (1)...(19): siRNA sense strand
uucaggaagugauuguaaa

SEQ ID NO: 1955610 - RNA, 19 nt, Homo sapiens
  misc_RNA (1)...(19): siRNA sense strand
gagcugucccagaugcaaa

SEQ ID NO: 1955611 - RNA, 19 nt, Homo sapiens
  misc_RNA (1)...(19): siRNA sense strand
gacccucaacaacaaguuu

SEQ ID NO: 1955612 - RNA, 19 nt, Homo sapiens
  misc_RNA (1)...(19): siRNA sense strand
uggaggaaguggcuacaag

SEQ ID NO: 1955613 - RNA, 19 nt, Homo sapiens
  misc_RNA (1)...(19): siRNA sense strand
aguggcagcucuggcagua

SEQ ID NO: 1955614 - RNA, 19 nt, Homo sapiens
  misc_RNA (1)...(19): siRNA sense strand
ugacacgucugugguucug

SEQ ID NO: 1955615 - RNA, 19 nt, Homo sapiens
  misc_RNA (1)...(19): siRNA sense strand
ggaggcagcaccaguaucc

SEQ ID NO: 1955616 - RNA, 19 nt, Homo sapiens
  misc_RNA (1)...(19): siRNA sense strand
augccaagcuccaagacuu

SEQ ID NO: 1955617 - RNA, 19 nt, Homo sapiens
  misc_RNA (1)...(19): siRNA sense strand
uaugcaagcagcuagauuc

SEQ ID NO: 1955618 - RNA, 19 nt, Homo sapiens
  misc_RNA (1)...(19): siRNA sense strand
ccaaugccaagcuccaaga

SEQ ID NO: 1955619 - RNA, 19 nt, Homo sapiens
  misc_RNA (1)...(19): siRNA sense strand
gaggcuacgggcugagauu

SEQ ID NO: 1955620 - RNA, 19 nt, Homo sapiens
  misc_RNA (1)...(19): siRNA sense strand
gaugcggcuuucaugaaca

SEQ ID NO: 1955621 - RNA, 19 nt, Homo sapiens
  misc_RNA (1)...(19): siRNA sense strand
ugagcagcguggagagaug

SEQ ID NO: 1955622 - RNA, 19 nt, Homo sapiens
  misc_RNA (1)...(19): siRNA sense strand
cuacaucagcuuccuaugc

SEQ ID NO: 1955623 - RNA, 19 nt, Homo sapiens
  misc_RNA (1)...(19): siRNA sense strand
gaggaaguggcuacaaguc

SEQ ID NO: 1955624 - RNA, 19 nt, Homo sapiens
  misc_RNA (1)...(19): siRNA sense strand
gcucaagaaggauguggau

SEQ ID NO: 1955625 - RNA, 19 nt, Homo sapiens
  misc_RNA (1)...(19): siRNA sense strand
ucaguggucagcaauguca

SEQ ID NO: 1955626 - RNA, 19 nt, Homo sapiens
  misc_RNA (1)...(19): siRNA sense strand
ccagauugggcaaguaaag

SEQ ID NO: 1955627 - RNA, 19 nt, Homo sapiens
  misc_RNA (1)...(19): siRNA sense strand
ccaagagugagaucaugga

SEQ ID NO: 1955628 - RNA, 19 nt, Homo sapiens
  misc_RNA (1)...(19): siRNA sense strand
uggugggccuggcagcuuu

SEQ ID NO: 1955629 - RNA, 19 nt, Homo sapiens
  misc_RNA (1)...(19): siRNA sense strand
aggaagugauuguaaacca

SEQ ID NO: 1955630 - RNA, 19 nt, Homo sapiens
  misc_RNA (1)...(19): siRNA sense strand
ucagagugccgugugcauu

SEQ ID NO: 1955631 - RNA, 19 nt, Homo sapiens
  misc_RNA (1)...(19): siRNA sense strand
uggaugcggcuuucaugaa

SEQ ID NO: 1955632 - RNA, 19 nt, Homo sapiens
  misc_RNA (1)...(19): siRNA sense strand
uggaacagcagaacaaggu

SEQ ID NO: 1955633 - RNA, 19 nt, Homo sapiens
  misc_RNA (1)...(19): siRNA sense strand
guggaugcggcuuucauga

SEQ ID NO: 1955634 - RNA, 19 nt, Homo sapiens
  misc_RNA (1)...(19): siRNA sense strand
gcaccaguauccgcuucuc

SEQ ID NO: 1955635 - RNA, 19 nt, Homo sapiens
  misc_RNA (1)...(19): siRNA sense strand
gcagucgcagccucuacaa

SEQ ID NO: 1955636 - RNA, 19 nt, Homo sapiens
  misc_RNA (1)...(19): siRNA sense strand
cagcagcagcggcuaugga

SEQ ID NO: 1955637 - RNA, 19 nt, Homo sapiens
  misc_RNA (1)...(19): siRNA sense strand
gcagugguggcuacaaagg

SEQ ID NO: 1955638 - RNA, 19 nt, Homo sapiens
  misc_RNA (1)...(19): siRNA sense strand
gcacccaguaugaggagau

SEQ ID NO: 1955639 - RNA, 19 nt, Homo sapiens
  misc_RNA (1)...(19): siRNA sense strand
gaaagacgauguucaacuu

SEQ ID NO: 1955640 - RNA, 19 nt, Homo sapiens
  misc_RNA (1)...(19): siRNA sense strand
gaacugaauuguuuagaga

SEQ ID NO: 1955641 - RNA, 19 nt, Homo sapiens
  misc_RNA (1)...(19): siRNA sense strand
gagcaagaauccugcaaua

SEQ ID NO: 1955642 - RNA, 19 nt, Homo sapiens
  misc_RNA (1)...(19): siRNA sense strand
gaaagaaccaugacuguau

SEQ ID NO: 1955643 - RNA, 19 nt, Homo sapiens
  misc_RNA (1)...(19): siRNA sense strand
gagauuaaggcuaucauua

SEQ ID NO: 1955644 - RNA, 19 nt, Homo sapiens
  misc_RNA (1)...(19): siRNA sense strand
gcaucagacuggccauuua

SEQ ID NO: 1955645 - RNA, 19 nt, Homo sapiens
  misc_RNA (1)...(19): siRNA sense strand
gaagaacacgcauuggaua

SEQ ID NO: 1955646 - RNA, 19 nt, Homo sapiens
  misc_RNA (1)...(19): siRNA sense strand
gcaagaauccugcaauaug

SEQ ID NO: 1955647 - RNA, 19 nt, Homo sapiens
  misc_RNA (1)...(19): siRNA sense strand
gggaagagguuggaaagaa

SEQ ID NO: 1955648 - RNA, 19 nt, Homo sapiens
  misc_RNA (1)...(19): siRNA sense strand
ggccagagcuguguuuaaa

SEQ ID NO: 1955649 - RNA, 19 nt, Homo sapiens
  misc_RNA (1)...(19): siRNA sense strand
caguaacccugaagaauaa

SEQ ID NO: 1955650 - RNA, 19 nt, Homo sapiens
  misc_RNA (1)...(19): siRNA sense strand
gaacacgcauuggauauuc

SEQ ID NO: 1955651 - RNA, 19 nt, Homo sapiens
  misc_RNA (1)...(19): siRNA sense strand
gguauucucugccauguug

SEQ ID NO: 1955652 - RNA, 19 nt, Homo sapiens
  misc_RNA (1)...(19): siRNA sense strand
ggaaggagaaggaagaauu

SEQ ID NO: 1955653 - RNA, 19 nt, Homo sapiens
  misc_RNA (1)...(19): siRNA sense strand
ggaaauggaagaucgauug

SEQ ID NO: 1955654 - RNA, 19 nt, Homo sapiens
  misc_RNA (1)...(19): siRNA sense strand
caacagaggccauguggaa

SEQ ID NO: 1955655 - RNA, 19 nt, Homo sapiens
  misc_RNA (1)...(19): siRNA sense strand
gaaggagaaggaagaauuu

SEQ ID NO: 1955656 - RNA, 19 nt, Homo sapiens
  misc_RNA (1)...(19): siRNA sense strand
ggaaagauuuacuaagaag

SEQ ID NO: 1955657 - RNA, 19 nt, Homo sapiens
  misc_RNA (1)...(19): siRNA sense strand
gcacagcuauuugacuuug

SEQ ID NO: 1955658 - RNA, 19 nt, Homo sapiens
  misc_RNA (1)...(19): siRNA sense strand
gagcugauccggagaagaa

SEQ ID NO: 1955659 - RNA, 19 nt, Homo sapiens
  misc_RNA (1)...(19): siRNA sense strand
ucaaauaguggguuccuua

SEQ ID NO: 1955660 - RNA, 19 nt, Homo sapiens
  misc_RNA (1)...(19): siRNA sense strand
ggaaagaaccaugacugua

SEQ ID NO: 1955661 - RNA, 19 nt, Homo sapiens
  misc_RNA (1)...(19): siRNA sense strand
gagggaagcucuggaagug

SEQ ID NO: 1955662 - RNA, 19 nt, Homo sapiens
  misc_RNA (1)...(19): siRNA sense strand
caagaauccugcaauaugg

SEQ ID NO: 1955663 - RNA, 19 nt, Homo sapiens
  misc_RNA (1)...(19): siRNA sense strand
ggauugggcuuaucgaagu

SEQ ID NO: 1955664 - RNA, 19 nt, Homo sapiens
  misc_RNA (1)...(19): siRNA sense strand
aaaccagcuuuguggauua

SEQ ID NO: 1955665 - RNA, 19 nt, Homo sapiens
  misc_RNA (1)...(19): siRNA sense strand
ggaaaaugauucaguuuga

SEQ ID NO: 1955666 - RNA, 19 nt, Homo sapiens
  misc_RNA (1)...(19): siRNA sense strand
gaucgauugucuucagaaa

SEQ ID NO: 1955667 - RNA, 19 nt, Homo sapiens
  misc_RNA (1)...(19): siRNA sense strand
caaggaagacuuuaucaau

SEQ ID NO: 1955668 - RNA, 19 nt, Homo sapiens
  misc_RNA (1)...(19): siRNA sense strand
gcagaggcauuuguagcua

SEQ ID NO: 1955669 - RNA, 19 nt, Homo sapiens
  misc_RNA (1)...(19): siRNA sense strand
gaaggcacaugaacugaag

SEQ ID NO: 1955670 - RNA, 19 nt, Homo sapiens
  misc_RNA (1)...(19): siRNA sense strand
guaagaagugggcuacuaa

SEQ ID NO: 1955671 - RNA, 19 nt, Homo sapiens
  misc_RNA (1)...(19): siRNA sense strand
cgcauuggauauucauuua

SEQ ID NO: 1955672 - RNA, 19 nt, Homo sapiens
  misc_RNA (1)...(19): siRNA sense strand
aaagaaccaugacuguauu

SEQ ID NO: 1955673 - RNA, 19 nt, Homo sapiens
  misc_RNA (1)...(19): siRNA sense strand
ggagaaggaagaauuugaa

SEQ ID NO: 1955674 - RNA, 19 nt, Homo sapiens
  misc_RNA (1)...(19): siRNA sense strand
ggaacugaauuguuuagag

SEQ ID NO: 1955675 - RNA, 19 nt, Homo sapiens
  misc_RNA (1)...(19): siRNA sense strand
aggaugagauugagaauuc

SEQ ID NO: 1955676 - RNA, 19 nt, Homo sapiens
  misc_RNA (1)...(19): siRNA sense strand
uacaagcaguugaguguuu

SEQ ID NO: 1955677 - RNA, 19 nt, Homo sapiens
  misc_RNA (1)...(19): siRNA sense strand
gcaaggcaacuauuucuuc

SEQ ID NO: 1955678 - RNA, 19 nt, Homo sapiens
  misc_RNA (1)...(19): siRNA sense strand
cagaugauccucucacuug

SEQ ID NO: 1955679 - RNA, 19 nt, Homo sapiens
  misc_RNA (1)...(19): siRNA sense strand
ggaagagguuggaaagaac

SEQ ID NO: 1955680 - RNA, 19 nt, Homo sapiens
  misc_RNA (1)...(19): siRNA sense strand
ugucauaggugccgacuca

SEQ ID NO: 1955681 - RNA, 19 nt, Homo sapiens
  misc_RNA (1)...(19): siRNA sense strand
ucucuuagcugucauaggu

SEQ ID NO: 1955682 - RNA, 19 nt, Homo sapiens
  misc_RNA (1)...(19): siRNA sense strand
gaggugcugugcuguguau

SEQ ID NO: 1955683 - RNA, 19 nt, Homo sapiens
  misc_RNA (1)...(19): siRNA sense strand
gaagaucggcucccggaau

SEQ ID NO: 1955684 - RNA, 19 nt, Homo sapiens
  misc_RNA (1)...(19): siRNA sense strand
uggcauggaucaucuacaa

SEQ ID NO: 1955685 - RNA, 19 nt, Homo sapiens
  misc_RNA (1)...(19): siRNA sense strand
ucaaagagcccugacauag

SEQ ID NO: 1955686 - RNA, 19 nt, Homo sapiens
  misc_RNA (1)...(19): siRNA sense strand
guguuucguugcuguguua

SEQ ID NO: 1955687 - RNA, 19 nt, Homo sapiens
  misc_RNA (1)...(19): siRNA sense strand
gaagagcagccuacaacga

SEQ ID NO: 1955688 - RNA, 19 nt, Homo sapiens
  misc_RNA (1)...(19): siRNA sense strand
gaacagcuggagcgcauug

SEQ ID NO: 1955689 - RNA, 19 nt, Homo sapiens
  misc_RNA (1)...(19): siRNA sense strand
aagaauaaguaccuggauu

SEQ ID NO: 1955690 - RNA, 19 nt, Homo sapiens
  misc_RNA (1)...(19): siRNA sense strand
uguaagaagugggcuacua

SEQ ID NO: 1955691 - RNA, 19 nt, Homo sapiens
  misc_RNA (1)...(19): siRNA sense strand
cagaggcauuuguagcuaa

SEQ ID NO: 1955692 - RNA, 19 nt, Homo sapiens
  misc_RNA (1)...(19): siRNA sense strand
ggaaggcacaugaacugaa

SEQ ID NO: 1955693 - RNA, 19 nt, Homo sapiens
  misc_RNA (1)...(19): siRNA sense strand
gagaaggaagaauuugaaa

SEQ ID NO: 1955694 - RNA, 19 nt, Homo sapiens
  misc_RNA (1)...(19): siRNA sense strand
gauaauucaggaacgcaua

SEQ ID NO: 1955695 - RNA, 19 nt, Homo sapiens
  misc_RNA (1)...(19): siRNA sense strand
ugucugccauuguggauuu

SEQ ID NO: 1955696 - RNA, 19 nt, Homo sapiens
  misc_RNA (1)...(19): siRNA sense strand
gagaggugcugugcugugu

SEQ ID NO: 1955697 - RNA, 19 nt, Homo sapiens
  misc_RNA (1)...(19): siRNA sense strand
aagaucggcucccggaauu

SEQ ID NO: 1955698 - RNA, 19 nt, Homo sapiens
  misc_RNA (1)...(19): siRNA sense strand
gcugugcuguguaugaaga

SEQ ID NO: 1955699 - RNA, 19 nt, Homo sapiens
  misc_RNA (1)...(19): siRNA sense strand
uuaagaaggaugagauuga

SEQ ID NO: 1955700 - RNA, 19 nt, Homo sapiens
  misc_RNA (1)...(19): siRNA sense strand
ggaaagacgauguucaacu

SEQ ID NO: 1955701 - RNA, 19 nt, Homo sapiens
  misc_RNA (1)...(19): siRNA sense strand
gagauugagaauucuauug

SEQ ID NO: 1955702 - RNA, 19 nt, Homo sapiens
  misc_RNA (1)...(19): siRNA sense strand
gagaagaagaacacgcauu

SEQ ID NO: 1955703 - RNA, 19 nt, Homo sapiens
  misc_RNA (1)...(19): siRNA sense strand
gaguuuggauccgcagauu

SEQ ID NO: 1955704 - RNA, 19 nt, Homo sapiens
  misc_RNA (1)...(19): siRNA sense strand
ggagauuaaggcuaucauu

SEQ ID NO: 1955705 - RNA, 19 nt, Homo sapiens
  misc_RNA (1)...(19): siRNA sense strand
ggcgagaauuagagauuga

SEQ ID NO: 1955706 - RNA, 19 nt, Homo sapiens
  misc_RNA (1)...(19): siRNA sense strand
gcaaggcgagaauuagaga

SEQ ID NO: 1955707 - RNA, 19 nt, Homo sapiens
  misc_RNA (1)...(19): siRNA sense strand
gaaagcgcaaggcaacuau

SEQ ID NO: 1955708 - RNA, 19 nt, Homo sapiens
  misc_RNA (1)...(19): siRNA sense strand
gaaauggaagaucgauugu

SEQ ID NO: 1955709 - RNA, 19 nt, Homo sapiens
  misc_RNA (1)...(19): siRNA sense strand
agaagaagaacacgcauug

SEQ ID NO: 1955710 - RNA, 19 nt, Homo sapiens
  misc_RNA (1)...(19): siRNA sense strand
aauuagagauugagucaca

SEQ ID NO: 1955711 - RNA, 19 nt, Homo sapiens
  misc_RNA (1)...(19): siRNA sense strand
ucgaagugguggcuacaaa

SEQ ID NO: 1955712 - RNA, 19 nt, Homo sapiens
  misc_RNA (1)...(19): siRNA sense strand
cauaggugccgacucagua

SEQ ID NO: 1955713 - RNA, 19 nt, Homo sapiens
  misc_RNA (1)...(19): siRNA sense strand
uuucguugcuguguuauaa

SEQ ID NO: 1955714 - RNA, 19 nt, Homo sapiens
  misc_RNA (1)...(19): siRNA sense strand
gaaguguuacaucaccuuu

SEQ ID NO: 1955715 - RNA, 19 nt, Homo sapiens
  misc_RNA (1)...(19): siRNA sense strand
gagagagcuuugagagagu

SEQ ID NO: 1955716 - RNA, 19 nt, Homo sapiens
  misc_RNA (1)...(19): siRNA sense strand
ggauggauuauaugaaaga

SEQ ID NO: 1955717 - RNA, 19 nt, Homo sapiens
  misc_RNA (1)...(19): siRNA sense strand
uaagaaggaugagauugag

SEQ ID NO: 1955718 - RNA, 19 nt, Homo sapiens
  misc_RNA (1)...(19): siRNA sense strand
gaucuuuggauggauuaua

SEQ ID NO: 1955719 - RNA, 19 nt, Homo sapiens
  misc_RNA (1)...(19): siRNA sense strand
gagcuguguuuaaaaguuu

SEQ ID NO: 1955720 - RNA, 19 nt, Homo sapiens
  misc_RNA (1)...(19): siRNA sense strand
guaccuggauugggcuuau

SEQ ID NO: 1955721 - RNA, 19 nt, Homo sapiens
  misc_RNA (1)...(19): siRNA sense strand
cacaugaacugaagcuucu

SEQ ID NO: 1955722 - RNA, 19 nt, Homo sapiens
  misc_RNA (1)...(19): siRNA sense strand
ggcgauucauuccaacaaa

SEQ ID NO: 1955723 - RNA, 19 nt, Homo sapiens
  misc_RNA (1)...(19): siRNA sense strand
gaagugggcuacuaaaacu

SEQ ID NO: 1955724 - RNA, 19 nt, Homo sapiens
  misc_RNA (1)...(19): siRNA sense strand
uggcgaacauaagagaaua

SEQ ID NO: 1955725 - RNA, 19 nt, Homo sapiens
  misc_RNA (1)...(19): siRNA sense strand
aagacgauguucaacuuug

SEQ ID NO: 1955726 - RNA, 19 nt, Homo sapiens
  misc_RNA (1)...(19): siRNA sense strand
ccaaaugggaaauggaaga

SEQ ID NO: 1955727 - RNA, 19 nt, Homo sapiens
  misc_RNA (1)...(19): siRNA sense strand
aauggaagaucgauugucu

SEQ ID NO: 1955728 - RNA, 19 nt, Homo sapiens
  misc_RNA (1)...(19): siRNA sense strand
ggagcgcauuggacuguuc

SEQ ID NO: 1955729 - RNA, 19 nt, Homo sapiens
  misc_RNA (1)...(19): siRNA sense strand
agaauaaguaccuggauug

SEQ ID NO: 1955730 - RNA, 19 nt, Homo sapiens
  misc_RNA (1)...(19): siRNA sense strand
ucagucaugcggagauuaa

SEQ ID NO: 1955731 - RNA, 19 nt, Homo sapiens
  misc_RNA (1)...(19): siRNA sense strand
gaugagauugagaauucua

SEQ ID NO: 1955732 - RNA, 19 nt, Homo sapiens
  misc_RNA (1)...(19): siRNA sense strand
agcuggaacugaauuguuu

SEQ ID NO: 1955733 - RNA, 19 nt, Homo sapiens
  misc_RNA (1)...(19): siRNA sense strand
uugcacagcuauuugacuu

SEQ ID NO: 1955734 - RNA, 19 nt, Homo sapiens
  misc_RNA (1)...(19): siRNA sense strand
uaagaagugggcuacuaaa

SEQ ID NO: 1955735 - RNA, 19 nt, Homo sapiens
  misc_RNA (1)...(19): siRNA sense strand
caggagagccgaccauuuu

SEQ ID NO: 1955736 - RNA, 19 nt, Homo sapiens
  misc_RNA (1)...(19): siRNA sense strand
gaagaauaaguaccuggau

SEQ ID NO: 1955737 - RNA, 19 nt, Homo sapiens
  misc_RNA (1)...(19): siRNA sense strand
gugcugugcuguguaugaa

SEQ ID NO: 1955738 - RNA, 19 nt, Homo sapiens
  misc_RNA (1)...(19): siRNA sense strand
cagaagagcagccuacaac

SEQ ID NO: 1955739 - RNA, 19 nt, Homo sapiens
  misc_RNA (1)...(19): siRNA sense strand
ggacaaagauggagucagu

SEQ ID NO: 1955740 - RNA, 19 nt, Homo sapiens
  misc_RNA (1)...(19): siRNA sense strand
gaugauagccaaccugaua

SEQ ID NO: 1955741 - RNA, 19 nt, Homo sapiens
  misc_RNA (1)...(19): siRNA sense strand
ggacaagaauuccuuaacu

SEQ ID NO: 1955742 - RNA, 19 nt, Homo sapiens
  misc_RNA (1)...(19): siRNA sense strand
caaagcaggauaaugguua

SEQ ID NO: 1955743 - RNA, 19 nt, Homo sapiens
  misc_RNA (1)...(19): siRNA sense strand
ggucagugcuauugaagaa

SEQ ID NO: 1955744 - RNA, 19 nt, Homo sapiens
  misc_RNA (1)...(19): siRNA sense strand
gacaagaauuccuuaacuu

SEQ ID NO: 1955745 - RNA, 19 nt, Homo sapiens
  misc_RNA (1)...(19): siRNA sense strand
ggacgauucuuuaauugau

SEQ ID NO: 1955746 - RNA, 19 nt, Homo sapiens
  misc_RNA (1)...(19): siRNA sense strand
uauaaggucuauugggaua

SEQ ID NO: 1955747 - RNA, 19 nt, Homo sapiens
  misc_RNA (1)...(19): siRNA sense strand
gaauuucucguaugaauga

SEQ ID NO: 1955748 - RNA, 19 nt, Homo sapiens
  misc_RNA (1)...(19): siRNA sense strand
aaacagagccaaacagcua

SEQ ID NO: 1955749 - RNA, 19 nt, Homo sapiens
  misc_RNA (1)...(19): siRNA sense strand
gcaagacaguggugaaugg

SEQ ID NO: 1955750 - RNA, 19 nt, Homo sapiens
  misc_RNA (1)...(19): siRNA sense strand
ugaagaagcuauuggauac

SEQ ID NO: 1955751 - RNA, 19 nt, Homo sapiens
  misc_RNA (1)...(19): siRNA sense strand
gugcuuccaucaauaauga

SEQ ID NO: 1955752 - RNA, 19 nt, Homo sapiens
  misc_RNA (1)...(19): siRNA sense strand
gaucauuucuccucacgau

SEQ ID NO: 1955753 - RNA, 19 nt, Homo sapiens
  misc_RNA (1)...(19): siRNA sense strand
gcagugaaacgacuaauag

SEQ ID NO: 1955754 - RNA, 19 nt, Homo sapiens
  misc_RNA (1)...(19): siRNA sense strand
ugucauaagugcagaguug

SEQ ID NO: 1955755 - RNA, 19 nt, Homo sapiens
  misc_RNA (1)...(19): siRNA sense strand
caaagacacguacauguug

SEQ ID NO: 1955756 - RNA, 19 nt, Homo sapiens
  misc_RNA (1)...(19): siRNA sense strand
gaucaagaaaccauuaaga

SEQ ID NO: 1955757 - RNA, 19 nt, Homo sapiens
  misc_RNA (1)...(19): siRNA sense strand
gcaguccacuucuccacaa

SEQ ID NO: 1955758 - RNA, 19 nt, Homo sapiens
  misc_RNA (1)...(19): siRNA sense strand
aaagggauuucucaagcua

SEQ ID NO: 1955759 - RNA, 19 nt, Homo sapiens
  misc_RNA (1)...(19): siRNA sense strand
ggaccuggaauuucucgua

SEQ ID NO: 1955760 - RNA, 19 nt, Homo sapiens
  misc_RNA (1)...(19): siRNA sense strand
ggacagagcccaaaaucaa

SEQ ID NO: 1955761 - RNA, 19 nt, Homo sapiens
  misc_RNA (1)...(19): siRNA sense strand
caagaauuccuuaacuuug

SEQ ID NO: 1955762 - RNA, 19 nt, Homo sapiens
  misc_RNA (1)...(19): siRNA sense strand
ucaaagacacguacauguu

SEQ ID NO: 1955763 - RNA, 19 nt, Homo sapiens
  misc_RNA (1)...(19): siRNA sense strand
gauaauggagcucagauca

SEQ ID NO: 1955764 - RNA, 19 nt, Homo sapiens
  misc_RNA (1)...(19): siRNA sense strand
gaaacuuugugcuggaauc

SEQ ID NO: 1955765 - RNA, 19 nt, Homo sapiens
  misc_RNA (1)...(19): siRNA sense strand
uaucugccaugaucaagaa

SEQ ID NO: 1955766 - RNA, 19 nt, Homo sapiens
  misc_RNA (1)...(19): siRNA sense strand
gaagaaggaacugaaugaa

SEQ ID NO: 1955767 - RNA, 19 nt, Homo sapiens
  misc_RNA (1)...(19): siRNA sense strand
acaacuggcuaugaugaua

SEQ ID NO: 1955768 - RNA, 19 nt, Homo sapiens
  misc_RNA (1)...(19): siRNA sense strand
gaccuggaauuucucguau

SEQ ID NO: 1955769 - RNA, 19 nt, Homo sapiens
  misc_RNA (1)...(19): siRNA sense strand
agaaggaacugaaugaacu

SEQ ID NO: 1955770 - RNA, 19 nt, Homo sapiens
  misc_RNA (1)...(19): siRNA sense strand
gcagaaaggcaucgugauc

SEQ ID NO: 1955771 - RNA, 19 nt, Homo sapiens
  misc_RNA (1)...(19): siRNA sense strand
caaccacauuuaucaguca

SEQ ID NO: 1955772 - RNA, 19 nt, Homo sapiens
  misc_RNA (1)...(19): siRNA sense strand
ugaagaaggaacugaauga

SEQ ID NO: 1955773 - RNA, 19 nt, Homo sapiens
  misc_RNA (1)...(19): siRNA sense strand
gugcagaguuggcuagcuu

SEQ ID NO: 1955774 - RNA, 19 nt, Homo sapiens
  misc_RNA (1)...(19): siRNA sense strand
agaguuggcuagcuuccua

SEQ ID NO: 1955775 - RNA, 19 nt, Homo sapiens
  misc_RNA (1)...(19): siRNA sense strand
gcuaugggaccuggaauuu

SEQ ID NO: 1955776 - RNA, 19 nt, Homo sapiens
  misc_RNA (1)...(19): siRNA sense strand
acaauucagugacuuaaag

SEQ ID NO: 1955777 - RNA, 19 nt, Homo sapiens
  misc_RNA (1)...(19): siRNA sense strand
ccuggaauuucucguauga

SEQ ID NO: 1955778 - RNA, 19 nt, Homo sapiens
  misc_RNA (1)...(19): siRNA sense strand
ggaucgcagugcucucaaa

SEQ ID NO: 1955779 - RNA, 19 nt, Homo sapiens
  misc_RNA (1)...(19): siRNA sense strand
gagccaaacagcuaauaga

SEQ ID NO: 1955780 - RNA, 19 nt, Homo sapiens
  misc_RNA (1)...(19): siRNA sense strand
guaacugcaucucacaauc

SEQ ID NO: 1955781 - RNA, 19 nt, Homo sapiens
  misc_RNA (1)...(19): siRNA sense strand
gcagccaaaugaucaccuu

SEQ ID NO: 1955782 - RNA, 19 nt, Homo sapiens
  misc_RNA (1)...(19): siRNA sense strand
uagcagaagguaauaaaga

SEQ ID NO: 1955783 - RNA, 19 nt, Homo sapiens
  misc_RNA (1)...(19): siRNA sense strand
ggagacaaaggugaaguuu

SEQ ID NO: 1955784 - RNA, 19 nt, Homo sapiens
  misc_RNA (1)...(19): siRNA sense strand
ccgagugcuuccaucaaua

SEQ ID NO: 1955785 - RNA, 19 nt, Homo sapiens
  misc_RNA (1)...(19): siRNA sense strand
gauaaagggauuucucaag

SEQ ID NO: 1955786 - RNA, 19 nt, Homo sapiens
  misc_RNA (1)...(19): siRNA sense strand
cacaguaucacauuugaaa

SEQ ID NO: 1955787 - RNA, 19 nt, Homo sapiens
  misc_RNA (1)...(19): siRNA sense strand
cugagcagcugaagaagga

SEQ ID NO: 1955788 - RNA, 19 nt, Homo sapiens
  misc_RNA (1)...(19): siRNA sense strand
ugaaauuucugccauuagg

SEQ ID NO: 1955789 - RNA, 19 nt, Homo sapiens
  misc_RNA (1)...(19): siRNA sense strand
ggaaacauuaacuggcuuu

SEQ ID NO: 1955790 - RNA, 19 nt, Homo sapiens
  misc_RNA (1)...(19): siRNA sense strand
uaacuggcuuuaaguggau

SEQ ID NO: 1955791 - RNA, 19 nt, Homo sapiens
  misc_RNA (1)...(19): siRNA sense strand
uggaauuucucguaugaau

SEQ ID NO: 1955792 - RNA, 19 nt, Homo sapiens
  misc_RNA (1)...(19): siRNA sense strand
cgagugcuuccaucaauaa

SEQ ID NO: 1955793 - RNA, 19 nt, Homo sapiens
  misc_RNA (1)...(19): siRNA sense strand
ucauuucuccucacgauaa

SEQ ID NO: 1955794 - RNA, 19 nt, Homo sapiens
  misc_RNA (1)...(19): siRNA sense strand
gguagcagcagaagguuug

SEQ ID NO: 1955795 - RNA, 19 nt, Homo sapiens
  misc_RNA (1)...(19): siRNA sense strand
caugaucaagaaaccauua

SEQ ID NO: 1955796 - RNA, 19 nt, Homo sapiens
  misc_RNA (1)...(19): siRNA sense strand
uugggacgauucuuuaauu

SEQ ID NO: 1955797 - RNA, 19 nt, Homo sapiens
  misc_RNA (1)...(19): siRNA sense strand
uaugggaccuggaauuucu

SEQ ID NO: 1955798 - RNA, 19 nt, Homo sapiens
  misc_RNA (1)...(19): siRNA sense strand
gaaacauuaacuggcuuua

SEQ ID NO: 1955799 - RNA, 19 nt, Homo sapiens
  misc_RNA (1)...(19): siRNA sense strand
ggcagugaaacgacuaaua

SEQ ID NO: 1955800 - RNA, 19 nt, Homo sapiens
  misc_RNA (1)...(19): siRNA sense strand
agcagaagguaauaaagaa

SEQ ID NO: 1955801 - RNA, 19 nt, Homo sapiens
  misc_RNA (1)...(19): siRNA sense strand
aguacaaucugcagccaaa

SEQ ID NO: 1955802 - RNA, 19 nt, Homo sapiens
  misc_RNA (1)...(19): siRNA sense strand
ucagugacuuaaagcagaa

SEQ ID NO: 1955803 - RNA, 19 nt, Homo sapiens
  misc_RNA (1)...(19): siRNA sense strand
ucagugcuauugaagaaca

SEQ ID NO: 1955804 - RNA, 19 nt, Homo sapiens
  misc_RNA (1)...(19): siRNA sense strand
gaaacgacuaauagcagaa

SEQ ID NO: 1955805 - RNA, 19 nt, Homo sapiens
  misc_RNA (1)...(19): siRNA sense strand
aagaauuccuuaacuuugg

SEQ ID NO: 1955806 - RNA, 19 nt, Homo sapiens
  misc_RNA (1)...(19): siRNA sense strand
cgacuaauagcagaaggua

SEQ ID NO: 1955807 - RNA, 19 nt, Homo sapiens
  misc_RNA (1)...(19): siRNA sense strand
uugaagaagcuauuggaua

SEQ ID NO: 1955808 - RNA, 19 nt, Homo sapiens
  misc_RNA (1)...(19): siRNA sense strand
cgacccggaugcugauaga

SEQ ID NO: 1955809 - RNA, 19 nt, Homo sapiens
  misc_RNA (1)...(19): siRNA sense strand
ugacuacuuugaagaccuu

SEQ ID NO: 1955810 - RNA, 19 nt, Homo sapiens
  misc_RNA (1)...(19): siRNA sense strand
uaaggucuauugggauaau

SEQ ID NO: 1955811 - RNA, 19 nt, Homo sapiens
  misc_RNA (1)...(19): siRNA sense strand
gggacgauucuuuaauuga

SEQ ID NO: 1955812 - RNA, 19 nt, Homo sapiens
  misc_RNA (1)...(19): siRNA sense strand
aaugaucaccuucaccuuu

SEQ ID NO: 1955813 - RNA, 19 nt, Homo sapiens
  misc_RNA (1)...(19): siRNA sense strand
gaagaacuacgaaaauguu

SEQ ID NO: 1955814 - RNA, 19 nt, Homo sapiens
  misc_RNA (1)...(19): siRNA sense strand
augaaugacuugaccauca

SEQ ID NO: 1955815 - RNA, 19 nt, Homo sapiens
  misc_RNA (1)...(19): siRNA sense strand
gaagcuauuggauacaugu

SEQ ID NO: 1955816 - RNA, 19 nt, Homo sapiens
  misc_RNA (1)...(19): siRNA sense strand
aaagacacguacauguugu

SEQ ID NO: 1955817 - RNA, 19 nt, Homo sapiens
  misc_RNA (1)...(19): siRNA sense strand
ggaauuucucguaugaaug

SEQ ID NO: 1955818 - RNA, 19 nt, Homo sapiens
  misc_RNA (1)...(19): siRNA sense strand
gcugcaaccacauuuauca

SEQ ID NO: 1955819 - RNA, 19 nt, Homo sapiens
  misc_RNA (1)...(19): siRNA sense strand
agucagugccgcugucaua

SEQ ID NO: 1955820 - RNA, 19 nt, Homo sapiens
  misc_RNA (1)...(19): siRNA sense strand
cagaagguaauaaagaaga

SEQ ID NO: 1955821 - RNA, 19 nt, Homo sapiens
  misc_RNA (1)...(19): siRNA sense strand
guaccucuuuucugauaua

SEQ ID NO: 1955822 - RNA, 19 nt, Homo sapiens
  misc_RNA (1)...(19): siRNA sense strand
cagaagguuugcccgacuu

SEQ ID NO: 1955823 - RNA, 19 nt, Homo sapiens
  misc_RNA (1)...(19): siRNA sense strand
gaugggaaacagagccaaa

SEQ ID NO: 1955824 - RNA, 19 nt, Homo sapiens
  misc_RNA (1)...(19): siRNA sense strand
gaaagagaagaaccaggau

SEQ ID NO: 1955825 - RNA, 19 nt, Homo sapiens
  misc_RNA (1)...(19): siRNA sense strand
cuccugggcugguggcuuu

SEQ ID NO: 1955826 - RNA, 19 nt, Homo sapiens
  misc_RNA (1)...(19): siRNA sense strand
uaaagggauuucucaagcu

SEQ ID NO: 1955827 - RNA, 19 nt, Homo sapiens
  misc_RNA (1)...(19): siRNA sense strand
gaaccguggccucaagcuu

SEQ ID NO: 1955828 - RNA, 19 nt, Homo sapiens
  misc_RNA (1)...(19): siRNA sense strand
gcuguucuucccacuagua

SEQ ID NO: 1955829 - RNA, 19 nt, Homo sapiens
  misc_RNA (1)...(19): siRNA sense strand
gauccugaguuuccaacag

SEQ ID NO: 1955830 - RNA, 19 nt, Homo sapiens
  misc_RNA (1)...(19): siRNA sense strand
agucagcuuucaaggcuuu

SEQ ID NO: 1955831 - RNA, 19 nt, Homo sapiens
  misc_RNA (1)...(19): siRNA sense strand
uccaaaagcuuguggcaaa

SEQ ID NO: 1955832 - RNA, 19 nt, Homo sapiens
  misc_RNA (1)...(19): siRNA sense strand
acuaauagcagaagguaau

SEQ ID NO: 1955833 - RNA, 19 nt, Homo sapiens
  misc_RNA (1)...(19): siRNA sense strand
uuacaacuggcuaugauga

SEQ ID NO: 1955834 - RNA, 19 nt, Homo sapiens
  misc_RNA (1)...(19): siRNA sense strand
gcuaccauauuacuaaagc

SEQ ID NO: 1955835 - RNA, 19 nt, Homo sapiens
  misc_RNA (1)...(19): siRNA sense strand
ggccauuuauguggaguau

SEQ ID NO: 1955836 - RNA, 19 nt, Homo sapiens
  misc_RNA (1)...(19): siRNA sense strand
gaaggaacugaaugaacug

SEQ ID NO: 1955837 - RNA, 19 nt, Homo sapiens
  misc_RNA (1)...(19): siRNA sense strand
ccuuacaacuggcuaugau

SEQ ID NO: 1955838 - RNA, 19 nt, Homo sapiens
  misc_RNA (1)...(19): siRNA sense strand
ccucagaaacuacgaugga

SEQ ID NO: 1955839 - RNA, 19 nt, Homo sapiens
  misc_RNA (1)...(19): siRNA sense strand
gccgauaacuugcgucuga

SEQ ID NO: 1955840 - RNA, 19 nt, Homo sapiens
  misc_RNA (1)...(19): siRNA sense strand
ccaacaugcugcugaguga

SEQ ID NO: 1955841 - RNA, 19 nt, Homo sapiens
  misc_RNA (1)...(19): siRNA sense strand
gaaacugcuuacccacaau

SEQ ID NO: 1955842 - RNA, 19 nt, Homo sapiens
  misc_RNA (1)...(19): siRNA sense strand
ggacguauguuccccauca

SEQ ID NO: 1955843 - RNA, 19 nt, Homo sapiens
  misc_RNA (1)...(19): siRNA sense strand
ugaggagaaugaggaguuu

SEQ ID NO: 1955844 - RNA, 19 nt, Homo sapiens
  misc_RNA (1)...(19): siRNA sense strand
uaucugcccuguggaauuc

SEQ ID NO: 1955845 - RNA, 19 nt, Homo sapiens
  misc_RNA (1)...(19): siRNA sense strand
ugagggauaugaggagaau

SEQ ID NO: 1955846 - RNA, 19 nt, Homo sapiens
  misc_RNA (1)...(19): siRNA sense strand
cuucguggcgcguaugaua

SEQ ID NO: 1955847 - RNA, 19 nt, Homo sapiens
  misc_RNA (1)...(19): siRNA sense strand
ugagugaagaggaaacuga

SEQ ID NO: 1955848 - RNA, 19 nt, Homo sapiens
  misc_RNA (1)...(19): siRNA sense strand
gcugcugagugaagaggaa

SEQ ID NO: 1955849 - RNA, 19 nt, Homo sapiens
  misc_RNA (1)...(19): siRNA sense strand
gcuggagguggaagugaua

SEQ ID NO: 1955850 - RNA, 19 nt, Homo sapiens
  misc_RNA (1)...(19): siRNA sense strand
guaucugcccuguggaauu

SEQ ID NO: 1955851 - RNA, 19 nt, Homo sapiens
  misc_RNA (1)...(19): siRNA sense strand
ggaaucuggacguauguuc

SEQ ID NO: 1955852 - RNA, 19 nt, Homo sapiens
  misc_RNA (1)...(19): siRNA sense strand
ccaccgagguccguaucug

SEQ ID NO: 1955853 - RNA, 19 nt, Homo sapiens
  misc_RNA (1)...(19): siRNA sense strand
cccggaaucuggacguaug

SEQ ID NO: 1955854 - RNA, 19 nt, Homo sapiens
  misc_RNA (1)...(19): siRNA sense strand
ccaacuucguggcgcguau

SEQ ID NO: 1955855 - RNA, 19 nt, Homo sapiens
  misc_RNA (1)...(19): siRNA sense strand
agggauaugaggagaauga

SEQ ID NO: 1955856 - RNA, 19 nt, Homo sapiens
  misc_RNA (1)...(19): siRNA sense strand
ggaauucaaccccaacuuc

SEQ ID NO: 1955857 - RNA, 19 nt, Homo sapiens
  misc_RNA (1)...(19): siRNA sense strand
gaccaucacugacuucauc

SEQ ID NO: 1955858 - RNA, 19 nt, Homo sapiens
  misc_RNA (1)...(19): siRNA sense strand
ggacaugagugugggagaa

SEQ ID NO: 1955859 - RNA, 19 nt, Homo sapiens
  misc_RNA (1)...(19): siRNA sense strand
gaagugaucgacaggauug

SEQ ID NO: 1955860 - RNA, 19 nt, Homo sapiens
  misc_RNA (1)...(19): siRNA sense strand
acaaacgccugcucaaguu

SEQ ID NO: 1955861 - RNA, 19 nt, Homo sapiens
  misc_RNA (1)...(19): siRNA sense strand
ggagaagcccugaggaaga

SEQ ID NO: 1955862 - RNA, 19 nt, Homo sapiens
  misc_RNA (1)...(19): siRNA sense strand
uagaaggccugcuggaaga

SEQ ID NO: 1955863 - RNA, 19 nt, Homo sapiens
  misc_RNA (1)...(19): siRNA sense strand
gcuccaagcuagucaucuu

SEQ ID NO: 1955864 - RNA, 19 nt, Homo sapiens
  misc_RNA (1)...(19): siRNA sense strand
gccaaagccuugagaugga

SEQ ID NO: 1955865 - RNA, 19 nt, Homo sapiens
  misc_RNA (1)...(19): siRNA sense strand
ugacugcacuggacaucuu

SEQ ID NO: 1955866 - RNA, 19 nt, Homo sapiens
  misc_RNA (1)...(19): siRNA sense strand
ucuaugagauugaacaaca

SEQ ID NO: 1955867 - RNA, 19 nt, Homo sapiens
  misc_RNA (1)...(19): siRNA sense strand
gaaagaauccgugggaaac

SEQ ID NO: 1955868 - RNA, 19 nt, Homo sapiens
  misc_RNA (1)...(19): siRNA sense strand
gagaagcccugaggaagag

SEQ ID NO: 1955869 - RNA, 19 nt, Homo sapiens
  misc_RNA (1)...(19): siRNA sense strand
gaacaacauaagauugaga

SEQ ID NO: 1955870 - RNA, 19 nt, Homo sapiens
  misc_RNA (1)...(19): siRNA sense strand
gagauugaacaacauaaga

SEQ ID NO: 1955871 - RNA, 19 nt, Homo sapiens
  misc_RNA (1)...(19): siRNA sense strand
gggcugggaugacgaacug

SEQ ID NO: 1955872 - RNA, 19 nt, Homo sapiens
  misc_RNA (1)...(19): siRNA sense strand
gggaagugaucgacaggau

SEQ ID NO: 1955873 - RNA, 19 nt, Homo sapiens
  misc_RNA (1)...(19): siRNA sense strand
gaccagcagcucagaaaga

SEQ ID NO: 1955874 - RNA, 19 nt, Homo sapiens
  misc_RNA (1)...(19): siRNA sense strand
gggccucuauucccgcuuu

SEQ ID NO: 1955875 - RNA, 19 nt, Homo sapiens
  misc_RNA (1)...(19): siRNA sense strand
ucaaguuccugcacaucuu

SEQ ID NO: 1955876 - RNA, 19 nt, Homo sapiens
  misc_RNA (1)...(19): siRNA sense strand
ggaagugaucgacaggauu

SEQ ID NO: 1955877 - RNA, 19 nt, Homo sapiens
  misc_RNA (1)...(19): siRNA sense strand
ucuacacccucaucaagaa

SEQ ID NO: 1955878 - RNA, 19 nt, Homo sapiens
  misc_RNA (1)...(19): siRNA sense strand
cuaaugauagccuguuuga

SEQ ID NO: 1955879 - RNA, 19 nt, Homo sapiens
  misc_RNA (1)...(19): siRNA sense strand
aaugauagccuguuugaag

SEQ ID NO: 1955880 - RNA, 19 nt, Homo sapiens
  misc_RNA (1)...(19): siRNA sense strand
agaaagaauccgugggaaa

SEQ ID NO: 1955881 - RNA, 19 nt, Homo sapiens
  misc_RNA (1)...(19): siRNA sense strand
guucugagcaucaagagau

SEQ ID NO: 1955882 - RNA, 19 nt, Homo sapiens
  misc_RNA (1)...(19): siRNA sense strand
gcagaagucgguggaggaa

SEQ ID NO: 1955883 - RNA, 19 nt, Homo sapiens
  misc_RNA (1)...(19): siRNA sense strand
caaguuccugcacaucuuu

SEQ ID NO: 1955884 - RNA, 19 nt, Homo sapiens
  misc_RNA (1)...(19): siRNA sense strand
gcuagaaggccugcuggaa

SEQ ID NO: 1955885 - RNA, 19 nt, Homo sapiens
  misc_RNA (1)...(19): siRNA sense strand
acaccaugcuggagaucaa

SEQ ID NO: 1955886 - RNA, 19 nt, Homo sapiens
  misc_RNA (1)...(19): siRNA sense strand
ccacauccucacacacaaa

SEQ ID NO: 1955887 - RNA, 19 nt, Homo sapiens
  misc_RNA (1)...(19): siRNA sense strand
cacaaacgccugcucaagu

SEQ ID NO: 1955888 - RNA, 19 nt, Homo sapiens
  misc_RNA (1)...(19): siRNA sense strand
cuaccgcacuauccaagau

SEQ ID NO: 1955889 - RNA, 19 nt, Homo sapiens
  misc_RNA (1)...(19): siRNA sense strand
cagcagcucagaaagaauc

SEQ ID NO: 1955890 - RNA, 19 nt, Homo sapiens
  misc_RNA (1)...(19): siRNA sense strand
ucaagccucuggucuccau

SEQ ID NO: 1955891 - RNA, 19 nt, Homo sapiens
  misc_RNA (1)...(19): siRNA sense strand
gggccaaagccuugagaug

SEQ ID NO: 1955892 - RNA, 19 nt, Homo sapiens
  misc_RNA (1)...(19): siRNA sense strand
accagcagcucagaaagaa

SEQ ID NO: 1955893 - RNA, 19 nt, Homo sapiens
  misc_RNA (1)...(19): siRNA sense strand
gugaccagcagcucagaaa

SEQ ID NO: 1955894 - RNA, 19 nt, Homo sapiens
  misc_RNA (1)...(19): siRNA sense strand
cuccaucucuccuaaugau

SEQ ID NO: 1955895 - RNA, 19 nt, Homo sapiens
  misc_RNA (1)...(19): siRNA sense strand
gaugagcuuccuagagcaa

SEQ ID NO: 1955896 - RNA, 19 nt, Homo sapiens
  misc_RNA (1)...(19): siRNA sense strand
gaggaagaggacacuaugu

SEQ ID NO: 1955897 - RNA, 19 nt, Homo sapiens
  misc_RNA (1)...(19): siRNA sense strand
ugaggaagaggacacuaug

SEQ ID NO: 1955898 - RNA, 19 nt, Homo sapiens
  misc_RNA (1)...(19): siRNA sense strand
ggaaacggagggccaaagc

SEQ ID NO: 1955899 - RNA, 19 nt, Homo sapiens
  misc_RNA (1)...(19): siRNA sense strand
gcaacguacuccacauccu

SEQ ID NO: 1955900 - RNA, 19 nt, Homo sapiens
  misc_RNA (1)...(19): siRNA sense strand
acaaccaccuggacaugag

SEQ ID NO: 1955901 - RNA, 19 nt, Homo sapiens
  misc_RNA (1)...(19): siRNA sense strand
gaaggccugcuggaagaga

SEQ ID NO: 1955902 - RNA, 19 nt, Homo sapiens
  misc_RNA (1)...(19): siRNA sense strand
ccaagcuagucaucuucga

SEQ ID NO: 1955903 - RNA, 19 nt, Homo sapiens
  misc_RNA (1)...(19): siRNA sense strand
gucuccaucucuccuaaug

SEQ ID NO: 1955904 - RNA, 19 nt, Homo sapiens
  misc_RNA (1)...(19): siRNA sense strand
ugagcuuccuagagcaaga

SEQ ID NO: 1955905 - RNA, 19 nt, Homo sapiens
  misc_RNA (1)...(19): siRNA sense strand
ggccugggagugugagcua

SEQ ID NO: 1955906 - RNA, 19 nt, Homo sapiens
  misc_RNA (1)...(19): siRNA sense strand
ccaucucuccuaaugauag

SEQ ID NO: 1955907 - RNA, 19 nt, Homo sapiens
  misc_RNA (1)...(19): siRNA sense strand
guaaggagcuccagaaaga

SEQ ID NO: 1955908 - RNA, 19 nt, Homo sapiens
  misc_RNA (1)...(19): siRNA sense strand
ggaauagucuggucaagug

SEQ ID NO: 1955909 - RNA, 19 nt, Homo sapiens
  misc_RNA (1)...(19): siRNA sense strand
guauaaagaugcacauguu

SEQ ID NO: 1955910 - RNA, 19 nt, Homo sapiens
  misc_RNA (1)...(19): siRNA sense strand
agaaagaacuucaagaaca

SEQ ID NO: 1955911 - RNA, 19 nt, Homo sapiens
  misc_RNA (1)...(19): siRNA sense strand
gaaacacucuuugacauuc

SEQ ID NO: 1955912 - RNA, 19 nt, Homo sapiens
  misc_RNA (1)...(19): siRNA sense strand
gaaagaacuucaagaacag

SEQ ID NO: 1955913 - RNA, 19 nt, Homo sapiens
  misc_RNA (1)...(19): siRNA sense strand
caugaaagccuuccagaaa

SEQ ID NO: 1955914 - RNA, 19 nt, Homo sapiens
  misc_RNA (1)...(19): siRNA sense strand
agaagaaucugaaucugaa

SEQ ID NO: 1955915 - RNA, 19 nt, Homo sapiens
  misc_RNA (1)...(19): siRNA sense strand
acaaauaccuggagaaagg

SEQ ID NO: 1955916 - RNA, 19 nt, Homo sapiens
  misc_RNA (1)...(19): siRNA sense strand
ggagaaagguuuugaagau

SEQ ID NO: 1955917 - RNA, 19 nt, Homo sapiens
  misc_RNA (1)...(19): siRNA sense strand
caauacagcccucuacuug

SEQ ID NO: 1955918 - RNA, 19 nt, Homo sapiens
  misc_RNA (1)...(19): siRNA sense strand
cagaauauguucggaauca

SEQ ID NO: 1955919 - RNA, 19 nt, Homo sapiens
  misc_RNA (1)...(19): siRNA sense strand
ccagaaagaacuucaagaa

SEQ ID NO: 1955920 - RNA, 19 nt, Homo sapiens
  misc_RNA (1)...(19): siRNA sense strand
ggaagcaguagcuaaguuu

SEQ ID NO: 1955921 - RNA, 19 nt, Homo sapiens
  misc_RNA (1)...(19): siRNA sense strand
guagcuaaguuucuugaug

SEQ ID NO: 1955922 - RNA, 19 nt, Homo sapiens
  misc_RNA (1)...(19): siRNA sense strand
gcagaaacacucuuugaca

SEQ ID NO: 1955923 - RNA, 19 nt, Homo sapiens
  misc_RNA (1)...(19): siRNA sense strand
gaagaagaaucugaaucug

SEQ ID NO: 1955924 - RNA, 19 nt, Homo sapiens
  misc_RNA (1)...(19): siRNA sense strand
ugacaacauucauuucaug

SEQ ID NO: 1955925 - RNA, 19 nt, Homo sapiens
  misc_RNA (1)...(19): siRNA sense strand
guauugcuaugacaacauu

SEQ ID NO: 1955926 - RNA, 19 nt, Homo sapiens
  misc_RNA (1)...(19): siRNA sense strand
ggaaagucagcauggauaa

SEQ ID NO: 1955927 - RNA, 19 nt, Homo sapiens
  misc_RNA (1)...(19): siRNA sense strand
ugaaaccgguacugauuug

SEQ ID NO: 1955928 - RNA, 19 nt, Homo sapiens
  misc_RNA (1)...(19): siRNA sense strand
cagaaacacucuuugacau

SEQ ID NO: 1955929 - RNA, 19 nt, Homo sapiens
  misc_RNA (1)...(19): siRNA sense strand
gcuaauggaacacuuaaug

SEQ ID NO: 1955930 - RNA, 19 nt, Homo sapiens
  misc_RNA (1)...(19): siRNA sense strand
gugaagcucuuuaaaucau

SEQ ID NO: 1955931 - RNA, 19 nt, Homo sapiens
  misc_RNA (1)...(19): siRNA sense strand
gaagugguauaaagaugca

SEQ ID NO: 1955932 - RNA, 19 nt, Homo sapiens
  misc_RNA (1)...(19): siRNA sense strand
uaaucaggcgcuacaaaua

SEQ ID NO: 1955933 - RNA, 19 nt, Homo sapiens
  misc_RNA (1)...(19): siRNA sense strand
gagcugacucuguuacuga

SEQ ID NO: 1955934 - RNA, 19 nt, Homo sapiens
  misc_RNA (1)...(19): siRNA sense strand
gcaauacagcccucuacuu

SEQ ID NO: 1955935 - RNA, 19 nt, Homo sapiens
  misc_RNA (1)...(19): siRNA sense strand
gugguacacuggcagauga

SEQ ID NO: 1955936 - RNA, 19 nt, Homo sapiens
  misc_RNA (1)...(19): siRNA sense strand
gagaggaacaagcuagcua

SEQ ID NO: 1955937 - RNA, 19 nt, Homo sapiens
  misc_RNA (1)...(19): siRNA sense strand
uaacugaaaccgguacuga

SEQ ID NO: 1955938 - RNA, 19 nt, Homo sapiens
  misc_RNA (1)...(19): siRNA sense strand
gaacuucaagaacagaugu

SEQ ID NO: 1955939 - RNA, 19 nt, Homo sapiens
  misc_RNA (1)...(19): siRNA sense strand
gcugugaagcucuuuaaau

SEQ ID NO: 1955940 - RNA, 19 nt, Homo sapiens
  misc_RNA (1)...(19): siRNA sense strand
cugugaagcucuuuaaauc

SEQ ID NO: 1955941 - RNA, 19 nt, Homo sapiens
  misc_RNA (1)...(19): siRNA sense strand
cuacaaauaccuggagaaa

SEQ ID NO: 1955942 - RNA, 19 nt, Homo sapiens
  misc_RNA (1)...(19): siRNA sense strand
ugaagaagaaucugaaucu

SEQ ID NO: 1955943 - RNA, 19 nt, Homo sapiens
  misc_RNA (1)...(19): siRNA sense strand
gacaugaugcguacagaug

SEQ ID NO: 1955944 - RNA, 19 nt, Homo sapiens
  misc_RNA (1)...(19): siRNA sense strand
gccaauaagcaaaguguug

SEQ ID NO: 1955945 - RNA, 19 nt, Homo sapiens
  misc_RNA (1)...(19): siRNA sense strand
gcaagucuucggaaaguca

SEQ ID NO: 1955946 - RNA, 19 nt, Homo sapiens
  misc_RNA (1)...(19): siRNA sense strand
aagaagaucuagagaccau

SEQ ID NO: 1955947 - RNA, 19 nt, Homo sapiens
  misc_RNA (1)...(19): siRNA sense strand
guuugacccuacucaguuu

SEQ ID NO: 1955948 - RNA, 19 nt, Homo sapiens
  misc_RNA (1)...(19): siRNA sense strand
guaaugagcacuguggaau

SEQ ID NO: 1955949 - RNA, 19 nt, Homo sapiens
  misc_RNA (1)...(19): siRNA sense strand
ccaauaagcaaaguguuga

SEQ ID NO: 1955950 - RNA, 19 nt, Homo sapiens
  misc_RNA (1)...(19): siRNA sense strand
gaaggaguuucagcagcuu

SEQ ID NO: 1955951 - RNA, 19 nt, Homo sapiens
  misc_RNA (1)...(19): siRNA sense strand
uauguugacugguguucuu

SEQ ID NO: 1955952 - RNA, 19 nt, Homo sapiens
  misc_RNA (1)...(19): siRNA sense strand
aagaagaaucugaaucuga

SEQ ID NO: 1955953 - RNA, 19 nt, Homo sapiens
  misc_RNA (1)...(19): siRNA sense strand
cggaaagucagcauggaua

SEQ ID NO: 1955954 - RNA, 19 nt, Homo sapiens
  misc_RNA (1)...(19): siRNA sense strand
gaagcaauacagcccucua

SEQ ID NO: 1955955 - RNA, 19 nt, Homo sapiens
  misc_RNA (1)...(19): siRNA sense strand
agaaacacucuuugacauu

SEQ ID NO: 1955956 - RNA, 19 nt, Homo sapiens
  misc_RNA (1)...(19): siRNA sense strand
gguauaaagaugcacaugu

SEQ ID NO: 1955957 - RNA, 19 nt, Homo sapiens
  misc_RNA (1)...(19): siRNA sense strand
uggaagcaguagcuaaguu

SEQ ID NO: 1955958 - RNA, 19 nt, Homo sapiens
  misc_RNA (1)...(19): siRNA sense strand
caacaucccagagccaguu

SEQ ID NO: 1955959 - RNA, 19 nt, Homo sapiens
  misc_RNA (1)...(19): siRNA sense strand
gguuaaagaaggaguuuca

SEQ ID NO: 1955960 - RNA, 19 nt, Homo sapiens
  misc_RNA (1)...(19): siRNA sense strand
ucugguggcugguggaaug

SEQ ID NO: 1955961 - RNA, 19 nt, Homo sapiens
  misc_RNA (1)...(19): siRNA sense strand
gguuugacccuacucaguu

SEQ ID NO: 1955962 - RNA, 19 nt, Homo sapiens
  misc_RNA (1)...(19): siRNA sense strand
gaaagguuuugaagaugaa

SEQ ID NO: 1955963 - RNA, 19 nt, Homo sapiens
  misc_RNA (1)...(19): siRNA sense strand
caagcuagcuauguugacu

SEQ ID NO: 1955964 - RNA, 19 nt, Homo sapiens
  misc_RNA (1)...(19): siRNA sense strand
gaacucuuuccugccaaua

SEQ ID NO: 1955965 - RNA, 19 nt, Homo sapiens
  misc_RNA (1)...(19): siRNA sense strand
augcauccauucuuaauag

SEQ ID NO: 1955966 - RNA, 19 nt, Homo sapiens
  misc_RNA (1)...(19): siRNA sense strand
guuaaucaggcgcuacaaa

SEQ ID NO: 1955967 - RNA, 19 nt, Homo sapiens
  misc_RNA (1)...(19): siRNA sense strand
gcaaaggggaagaguguuu

SEQ ID NO: 1955968 - RNA, 19 nt, Homo sapiens
  misc_RNA (1)...(19): siRNA sense strand
gaguauugcuaugacaaca

SEQ ID NO: 1955969 - RNA, 19 nt, Homo sapiens
  misc_RNA (1)...(19): siRNA sense strand
gcucuuuaaaucauggaua

SEQ ID NO: 1955970 - RNA, 19 nt, Homo sapiens
  misc_RNA (1)...(19): siRNA sense strand
caaaccaucggagcucgua

SEQ ID NO: 1955971 - RNA, 19 nt, Homo sapiens
  misc_RNA (1)...(19): siRNA sense strand
uagcagagcaagccaucaa

SEQ ID NO: 1955972 - RNA, 19 nt, Homo sapiens
  misc_RNA (1)...(19): siRNA sense strand
ugagcacuguggaauggaa

SEQ ID NO: 1955973 - RNA, 19 nt, Homo sapiens
  misc_RNA (1)...(19): siRNA sense strand
gagaaagguuuugaagaug

SEQ ID NO: 1955974 - RNA, 19 nt, Homo sapiens
  misc_RNA (1)...(19): siRNA sense strand
gcgaggagcccauuuugaa

SEQ ID NO: 1955975 - RNA, 19 nt, Homo sapiens
  misc_RNA (1)...(19): siRNA sense strand
auagucuggucaaguguaa

SEQ ID NO: 1955976 - RNA, 19 nt, Homo sapiens
  misc_RNA (1)...(19): siRNA sense strand
uuaaucaggcgcuacaaau

SEQ ID NO: 1955977 - RNA, 19 nt, Homo sapiens
  misc_RNA (1)...(19): siRNA sense strand
gaagcaguagcuaaguuuc

SEQ ID NO: 1955978 - RNA, 19 nt, Homo sapiens
  misc_RNA (1)...(19): siRNA sense strand
guggugauccauuuaagga

SEQ ID NO: 1955979 - RNA, 19 nt, Homo sapiens
  misc_RNA (1)...(19): siRNA sense strand
agaaagguuuugaagauga

SEQ ID NO: 1955980 - RNA, 19 nt, Homo sapiens
  misc_RNA (1)...(19): siRNA sense strand
gucccguggugauccauuu

SEQ ID NO: 1955981 - RNA, 19 nt, Homo sapiens
  misc_RNA (1)...(19): siRNA sense strand
acugaaaccgguacugauu

SEQ ID NO: 1955982 - RNA, 19 nt, Homo sapiens
  misc_RNA (1)...(19): siRNA sense strand
aaacuugauuaccgucgau

SEQ ID NO: 1955983 - RNA, 19 nt, Homo sapiens
  misc_RNA (1)...(19): siRNA sense strand
cugcaagucuucggaaagu

SEQ ID NO: 1955984 - RNA, 19 nt, Homo sapiens
  misc_RNA (1)...(19): siRNA sense strand
gaggaacaagcuagcuaug

SEQ ID NO: 1955985 - RNA, 19 nt, Homo sapiens
  misc_RNA (1)...(19): siRNA sense strand
uauaaagaugcacauguug

SEQ ID NO: 1955986 - RNA, 19 nt, Homo sapiens
  misc_RNA (1)...(19): siRNA sense strand
aaugagcacuguggaaugg

SEQ ID NO: 1955987 - RNA, 19 nt, Homo sapiens
  misc_RNA (1)...(19): siRNA sense strand
ugaagcucuuuaaaucaug

SEQ ID NO: 1955988 - RNA, 19 nt, Homo sapiens
  misc_RNA (1)...(19): siRNA sense strand
acuggcagaugacaugaug

SEQ ID NO: 1955989 - RNA, 19 nt, Homo sapiens
  misc_RNA (1)...(19): siRNA sense strand
gaaagccuuccagaaaaua

SEQ ID NO: 1955990 - RNA, 19 nt, Homo sapiens
  misc_RNA (1)...(19): siRNA sense strand
ugaaagccuuccagaaaau

SEQ ID NO: 1955991 - RNA, 19 nt, Homo sapiens
  misc_RNA (1)...(19): siRNA sense strand
ucaugaaagccuuccagaa

SEQ ID NO: 1955992 - RNA, 19 nt, Homo sapiens
  misc_RNA (1)...(19): siRNA sense strand
aaccgguacugauuuggaa

SEQ ID NO: 1955993 - RNA, 19 nt, Homo sapiens
  misc_RNA (1)...(19): siRNA sense strand
aaagauaucaaugcaguag

SEQ ID NO: 1955994 - RNA, 19 nt, Homo sapiens
  misc_RNA (1)...(19): siRNA sense strand
gaacacuuaaugcauccau

SEQ ID NO: 1955995 - RNA, 19 nt, Homo sapiens
  misc_RNA (1)...(19): siRNA sense strand
uaauggaacacuuaaugca

SEQ ID NO: 1955996 - RNA, 19 nt, Homo sapiens
  misc_RNA (1)...(19): siRNA sense strand
gcaguagcuaaguuucuug

SEQ ID NO: 1955997 - RNA, 19 nt, Homo sapiens
  misc_RNA (1)...(19): siRNA sense strand
cugguguucuucuggcuaa

SEQ ID NO: 1955998 - RNA, 19 nt, Homo sapiens
  misc_RNA (1)...(19): siRNA sense strand
aaagucagcauggauaaca

SEQ ID NO: 1955999 - RNA, 19 nt, Homo sapiens
  misc_RNA (1)...(19): siRNA sense strand
auacagcccucuacuugcu

SEQ ID NO: 1956000 - RNA, 19 nt, Homo sapiens
  misc_RNA (1)...(19): siRNA sense strand
caauaagcaaaguguugaa

SEQ ID NO: 1956001 - RNA, 19 nt, Homo sapiens
  misc_RNA (1)...(19): siRNA sense strand
aaacacucuuugacauucu

SEQ ID NO: 1956002 - RNA, 19 nt, Homo sapiens
  misc_RNA (1)...(19): siRNA sense strand
uugaagugguauaaagaug

SEQ ID NO: 1956003 - RNA, 19 nt, Homo sapiens
  misc_RNA (1)...(19): siRNA sense strand
uaccgucgauaugcagaaa

SEQ ID NO: 1956004 - RNA, 19 nt, Homo sapiens
  misc_RNA (1)...(19): siRNA sense strand
cagaaagaacuucaagaac

SEQ ID NO: 1956005 - RNA, 19 nt, Homo sapiens
  misc_RNA (1)...(19): siRNA sense strand
cugaaaccgguacugauuu

SEQ ID NO: 1956006 - RNA, 19 nt, Homo sapiens
  misc_RNA (1)...(19): siRNA sense strand
gaagaguguuuuccuugag

SEQ ID NO: 1956007 - RNA, 19 nt, Homo sapiens
  misc_RNA (1)...(19): siRNA sense strand
gaaagaagacaaacagaaa

SEQ ID NO: 1956008 - RNA, 19 nt, Homo sapiens
  misc_RNA (1)...(19): siRNA sense strand
gaacugaucagccgacuuu

SEQ ID NO: 1956009 - RNA, 19 nt, Homo sapiens
  misc_RNA (1)...(19): siRNA sense strand
ggacaaguuugacauuauu

SEQ ID NO: 1956010 - RNA, 19 nt, Homo sapiens
  misc_RNA (1)...(19): siRNA sense strand
gcacaguuaucaaaccuuu

SEQ ID NO: 1956011 - RNA, 19 nt, Homo sapiens
  misc_RNA (1)...(19): siRNA sense strand
guaccgaccuccagaacua

SEQ ID NO: 1956012 - RNA, 19 nt, Homo sapiens
  misc_RNA (1)...(19): siRNA sense strand
guacugagccugugaagaa

SEQ ID NO: 1956013 - RNA, 19 nt, Homo sapiens
  misc_RNA (1)...(19): siRNA sense strand
cagcaaagauggauggaaa

SEQ ID NO: 1956014 - RNA, 19 nt, Homo sapiens
  misc_RNA (1)...(19): siRNA sense strand
uaacacaucuaaacacaga

SEQ ID NO: 1956015 - RNA, 19 nt, Homo sapiens
  misc_RNA (1)...(19): siRNA sense strand
aaagagggcuucccaauca

SEQ ID NO: 1956016 - RNA, 19 nt, Homo sapiens
  misc_RNA (1)...(19): siRNA sense strand
ugacauggccuucaaacua

SEQ ID NO: 1956017 - RNA, 19 nt, Homo sapiens
  misc_RNA (1)...(19): siRNA sense strand
ggaacuggcucagcuagaa

SEQ ID NO: 1956018 - RNA, 19 nt, Homo sapiens
  misc_RNA (1)...(19): siRNA sense strand
guucaaagcguucgaauga

SEQ ID NO: 1956019 - RNA, 19 nt, Homo sapiens
  misc_RNA (1)...(19): siRNA sense strand
gaaacuaccucagggacaa

SEQ ID NO: 1956020 - RNA, 19 nt, Homo sapiens
  misc_RNA (1)...(19): siRNA sense strand
ggacaaagacacaggagaa

SEQ ID NO: 1956021 - RNA, 19 nt, Homo sapiens
  misc_RNA (1)...(19): siRNA sense strand
ucucauaccucgagcaauu

SEQ ID NO: 1956022 - RNA, 19 nt, Homo sapiens
  misc_RNA (1)...(19): siRNA sense strand
cgagaagcaucuuguuaaa

SEQ ID NO: 1956023 - RNA, 19 nt, Homo sapiens
  misc_RNA (1)...(19): siRNA sense strand
cagcugacaugcagaauau

SEQ ID NO: 1956024 - RNA, 19 nt, Homo sapiens
  misc_RNA (1)...(19): siRNA sense strand
gaaggaaauugucacagau

SEQ ID NO: 1956025 - RNA, 19 nt, Homo sapiens
  misc_RNA (1)...(19): siRNA sense strand
ugaaggaaauugucacaga

SEQ ID NO: 1956026 - RNA, 19 nt, Homo sapiens
  misc_RNA (1)...(19): siRNA sense strand
caacucagucuucugcuua

SEQ ID NO: 1956027 - RNA, 19 nt, Homo sapiens
  misc_RNA (1)...(19): siRNA sense strand
ugaauuggcaguguuauua

SEQ ID NO: 1956028 - RNA, 19 nt, Homo sapiens
  misc_RNA (1)...(19): siRNA sense strand
caagaagucuccagcaagu

SEQ ID NO: 1956029 - RNA, 19 nt, Homo sapiens
  misc_RNA (1)...(19): siRNA sense strand
gaaccuauggccaaguaua

SEQ ID NO: 1956030 - RNA, 19 nt, Homo sapiens
  misc_RNA (1)...(19): siRNA sense strand
agacauucaucuucucaua

SEQ ID NO: 1956031 - RNA, 19 nt, Homo sapiens
  misc_RNA (1)...(19): siRNA sense strand
gcacaaagaccggaguaaa

SEQ ID NO: 1956032 - RNA, 19 nt, Homo sapiens
  misc_RNA (1)...(19): siRNA sense strand
cauccaagcuccacaagga

SEQ ID NO: 1956033 - RNA, 19 nt, Homo sapiens
  misc_RNA (1)...(19): siRNA sense strand
ccgaagaacucccacaaug

SEQ ID NO: 1956034 - RNA, 19 nt, Homo sapiens
  misc_RNA (1)...(19): siRNA sense strand
cagaacagaugacccuuga

SEQ ID NO: 1956035 - RNA, 19 nt, Homo sapiens
  misc_RNA (1)...(19): siRNA sense strand
cuacagagcgacuuccuua

SEQ ID NO: 1956036 - RNA, 19 nt, Homo sapiens
  misc_RNA (1)...(19): siRNA sense strand
ggaaagaacgggagcugaa

SEQ ID NO: 1956037 - RNA, 19 nt, Homo sapiens
  misc_RNA (1)...(19): siRNA sense strand
caaaauccuucgucaguua

SEQ ID NO: 1956038 - RNA, 19 nt, Homo sapiens
  misc_RNA (1)...(19): siRNA sense strand
auacugaacuggugaaugu

SEQ ID NO: 1956039 - RNA, 19 nt, Homo sapiens
  misc_RNA (1)...(19): siRNA sense strand
uaaacaagaugcacuggau

SEQ ID NO: 1956040 - RNA, 19 nt, Homo sapiens
  misc_RNA (1)...(19): siRNA sense strand
guagaaguccugcauauuc

SEQ ID NO: 1956041 - RNA, 19 nt, Homo sapiens
  misc_RNA (1)...(19): siRNA sense strand
caaagacacaggagaacua

SEQ ID NO: 1956042 - RNA, 19 nt, Homo sapiens
  misc_RNA (1)...(19): siRNA sense strand
cauaucaagucguucauga

SEQ ID NO: 1956043 - RNA, 19 nt, Homo sapiens
  misc_RNA (1)...(19): siRNA sense strand
gacauggccuucaaacuag

SEQ ID NO: 1956044 - RNA, 19 nt, Homo sapiens
  misc_RNA (1)...(19): siRNA sense strand
aaacaggacuuauggaaac

SEQ ID NO: 1956045 - RNA, 19 nt, Homo sapiens
  misc_RNA (1)...(19): siRNA sense strand
gaacagaugacccuugaag

SEQ ID NO: 1956046 - RNA, 19 nt, Homo sapiens
  misc_RNA (1)...(19): siRNA sense strand
gaaagagggcuucccaauc

SEQ ID NO: 1956047 - RNA, 19 nt, Homo sapiens
  misc_RNA (1)...(19): siRNA sense strand
gcaauuaugacuccuacaa

SEQ ID NO: 1956048 - RNA, 19 nt, Homo sapiens
  misc_RNA (1)...(19): siRNA sense strand
ugaggagacugaugacuau

SEQ ID NO: 1956049 - RNA, 19 nt, Homo sapiens
  misc_RNA (1)...(19): siRNA sense strand
gcagagaccaaauugcaaa

SEQ ID NO: 1956050 - RNA, 19 nt, Homo sapiens
  misc_RNA (1)...(19): siRNA sense strand
gaagagagucgcccuuaca

SEQ ID NO: 1956051 - RNA, 19 nt, Homo sapiens
  misc_RNA (1)...(19): siRNA sense strand
guggacaaguuugacauua

SEQ ID NO: 1956052 - RNA, 19 nt, Homo sapiens
  misc_RNA (1)...(19): siRNA sense strand
gaaguagaaguccugcaua

SEQ ID NO: 1956053 - RNA, 19 nt, Homo sapiens
  misc_RNA (1)...(19): siRNA sense strand
gaauaacagugggcaaauc

SEQ ID NO: 1956054 - RNA, 19 nt, Homo sapiens
  misc_RNA (1)...(19): siRNA sense strand
cacaacagcugaaucaaag

SEQ ID NO: 1956055 - RNA, 19 nt, Homo sapiens
  misc_RNA (1)...(19): siRNA sense strand
cugcagcacuugauuuauu

SEQ ID NO: 1956056 - RNA, 19 nt, Homo sapiens
  misc_RNA (1)...(19): siRNA sense strand
gaacagaggacacgucacu

SEQ ID NO: 1956057 - RNA, 19 nt, Homo sapiens
  misc_RNA (1)...(19): siRNA sense strand
cagaauauauuggcaguuc

SEQ ID NO: 1956058 - RNA, 19 nt, Homo sapiens
  misc_RNA (1)...(19): siRNA sense strand
gaauuggcaguguuauuaa

SEQ ID NO: 1956059 - RNA, 19 nt, Homo sapiens
  misc_RNA (1)...(19): siRNA sense strand
cgaaugaggagacugauga

SEQ ID NO: 1956060 - RNA, 19 nt, Homo sapiens
  misc_RNA (1)...(19): siRNA sense strand
aagcagcaauucuguggua

SEQ ID NO: 1956061 - RNA, 19 nt, Homo sapiens
  misc_RNA (1)...(19): siRNA sense strand
ggacuuauggaaacacuga

SEQ ID NO: 1956062 - RNA, 19 nt, Homo sapiens
  misc_RNA (1)...(19): siRNA sense strand
gcugaagucugggcacaaa

SEQ ID NO: 1956063 - RNA, 19 nt, Homo sapiens
  misc_RNA (1)...(19): siRNA sense strand
gagacuagacaaugagaaa

SEQ ID NO: 1956064 - RNA, 19 nt, Homo sapiens
  misc_RNA (1)...(19): siRNA sense strand
ggaaaguaaaguuggauga

SEQ ID NO: 1956065 - RNA, 19 nt, Homo sapiens
  misc_RNA (1)...(19): siRNA sense strand
caaauggcacagcugcuua

SEQ ID NO: 1956066 - RNA, 19 nt, Homo sapiens
  misc_RNA (1)...(19): siRNA sense strand
gccaugaguuguggaguaa

SEQ ID NO: 1956067 - RNA, 19 nt, Homo sapiens
  misc_RNA (1)...(19): siRNA sense strand
gagagucgcccuuacacaa

SEQ ID NO: 1956068 - RNA, 19 nt, Homo sapiens
  misc_RNA (1)...(19): siRNA sense strand
ucaagucguucaugaaaca

SEQ ID NO: 1956069 - RNA, 19 nt, Homo sapiens
  misc_RNA (1)...(19): siRNA sense strand
ggaaauugucacagauaaa

SEQ ID NO: 1956070 - RNA, 19 nt, Homo sapiens
  misc_RNA (1)...(19): siRNA sense strand
gaacuaguggcucugaaga

SEQ ID NO: 1956071 - RNA, 19 nt, Homo sapiens
  misc_RNA (1)...(19): siRNA sense strand
ucaaagacaucugcugugu

SEQ ID NO: 1956072 - RNA, 19 nt, Homo sapiens
  misc_RNA (1)...(19): siRNA sense strand
gaaagcacagggaacaaga

SEQ ID NO: 1956073 - RNA, 19 nt, Homo sapiens
  misc_RNA (1)...(19): siRNA sense strand
gccaagaagucuccagcaa

SEQ ID NO: 1956074 - RNA, 19 nt, Homo sapiens
  misc_RNA (1)...(19): siRNA sense strand
ucagauacagggaaaguaa

SEQ ID NO: 1956075 - RNA, 19 nt, Homo sapiens
  misc_RNA (1)...(19): siRNA sense strand
uccaugaaguccagaagua

SEQ ID NO: 1956076 - RNA, 19 nt, Homo sapiens
  misc_RNA (1)...(19): siRNA sense strand
caaacaggacuuauggaaa

SEQ ID NO: 1956077 - RNA, 19 nt, Homo sapiens
  misc_RNA (1)...(19): siRNA sense strand
ugaaaccgaagaagcaaua

SEQ ID NO: 1956078 - RNA, 19 nt, Homo sapiens
  misc_RNA (1)...(19): siRNA sense strand
ugaagaaggugagacuaga

SEQ ID NO: 1956079 - RNA, 19 nt, Homo sapiens
  misc_RNA (1)...(19): siRNA sense strand
gaccggauaucgggaaguu

SEQ ID NO: 1956080 - RNA, 19 nt, Homo sapiens
  misc_RNA (1)...(19): siRNA sense strand
caaagugaauuggcagugu

SEQ ID NO: 1956081 - RNA, 19 nt, Homo sapiens
  misc_RNA (1)...(19): siRNA sense strand
guuuggagcuguggaugua

SEQ ID NO: 1956082 - RNA, 19 nt, Homo sapiens
  misc_RNA (1)...(19): siRNA sense strand
ggacuugcucggcucuaua

SEQ ID NO: 1956083 - RNA, 19 nt, Homo sapiens
  misc_RNA (1)...(19): siRNA sense strand
acagaggacacgucacuua

SEQ ID NO: 1956084 - RNA, 19 nt, Homo sapiens
  misc_RNA (1)...(19): siRNA sense strand
caaaggagacagaaacauc

SEQ ID NO: 1956085 - RNA, 19 nt, Homo sapiens
  misc_RNA (1)...(19): siRNA sense strand
ccgagaagcaucuuguuaa

SEQ ID NO: 1956086 - RNA, 19 nt, Homo sapiens
  misc_RNA (1)...(19): siRNA sense strand
guccaaggguucaccugua

SEQ ID NO: 1956087 - RNA, 19 nt, Homo sapiens
  misc_RNA (1)...(19): siRNA sense strand
uagaaguccugcauauuca

SEQ ID NO: 1956088 - RNA, 19 nt, Homo sapiens
  misc_RNA (1)...(19): siRNA sense strand
gggaaacacccaaaaguua

SEQ ID NO: 1956089 - RNA, 19 nt, Homo sapiens
  misc_RNA (1)...(19): siRNA sense strand
gaacuuugcagccgucauc

SEQ ID NO: 1956090 - RNA, 19 nt, Homo sapiens
  misc_RNA (1)...(19): siRNA sense strand
ccaaacaggacuuauggaa

SEQ ID NO: 1956091 - RNA, 19 nt, Homo sapiens
  misc_RNA (1)...(19): siRNA sense strand
aaaguaaaguuggaugaga

SEQ ID NO: 1956092 - RNA, 19 nt, Homo sapiens
  misc_RNA (1)...(19): siRNA sense strand
caaggguucaccuguauuu

SEQ ID NO: 1956093 - RNA, 19 nt, Homo sapiens
  misc_RNA (1)...(19): siRNA sense strand
ggagaaagaagacaaacag

SEQ ID NO: 1956094 - RNA, 19 nt, Homo sapiens
  misc_RNA (1)...(19): siRNA sense strand
aaacaacagugacaagaac

SEQ ID NO: 1956095 - RNA, 19 nt, Homo sapiens
  misc_RNA (1)...(19): siRNA sense strand
uggcacagcugcuuaacau

SEQ ID NO: 1956096 - RNA, 19 nt, Homo sapiens
  misc_RNA (1)...(19): siRNA sense strand
ucacacaacagcugaauca

SEQ ID NO: 1956097 - RNA, 19 nt, Homo sapiens
  misc_RNA (1)...(19): siRNA sense strand
caauaggccuugcugacau

SEQ ID NO: 1956098 - RNA, 19 nt, Homo sapiens
  misc_RNA (1)...(19): siRNA sense strand
uaacagugggcaaaucaaa

SEQ ID NO: 1956099 - RNA, 19 nt, Homo sapiens
  misc_RNA (1)...(19): siRNA sense strand
gaguaaaagucaucgaaaa

SEQ ID NO: 1956100 - RNA, 19 nt, Homo sapiens
  misc_RNA (1)...(19): siRNA sense strand
gguccagccuugacagaau

SEQ ID NO: 1956101 - RNA, 19 nt, Homo sapiens
  misc_RNA (1)...(19): siRNA sense strand
aaacugcccuacuucaaca

SEQ ID NO: 1956102 - RNA, 19 nt, Homo sapiens
  misc_RNA (1)...(19): siRNA sense strand
gcaaaucaaacuagcagau

SEQ ID NO: 1956103 - RNA, 19 nt, Homo sapiens
  misc_RNA (1)...(19): siRNA sense strand
uaucaagucguucaugaaa

SEQ ID NO: 1956104 - RNA, 19 nt, Homo sapiens
  misc_RNA (1)...(19): siRNA sense strand
gacauuauugggauuauug

SEQ ID NO: 1956105 - RNA, 19 nt, Homo sapiens
  misc_RNA (1)...(19): siRNA sense strand
gcuaauggaaggauuggaa

SEQ ID NO: 1956106 - RNA, 19 nt, Homo sapiens
  misc_RNA (1)...(19): siRNA sense strand
gaaggcgucuacgagaaga

SEQ ID NO: 1956107 - RNA, 19 nt, Homo sapiens
  misc_RNA (1)...(19): siRNA sense strand
ggagagaguuggaagaaag

SEQ ID NO: 1956108 - RNA, 19 nt, Homo sapiens
  misc_RNA (1)...(19): siRNA sense strand
agagagagcugcugcaaga

SEQ ID NO: 1956109 - RNA, 19 nt, Homo sapiens
  misc_RNA (1)...(19): siRNA sense strand
gaagagaggauucguaugg

SEQ ID NO: 1956110 - RNA, 19 nt, Homo sapiens
  misc_RNA (1)...(19): siRNA sense strand
gaaacccucuccuuaaucu

SEQ ID NO: 1956111 - RNA, 19 nt, Homo sapiens
  misc_RNA (1)...(19): siRNA sense strand
gaagaagagaggauucgua

SEQ ID NO: 1956112 - RNA, 19 nt, Homo sapiens
  misc_RNA (1)...(19): siRNA sense strand
gaccuacccucucauacaa

SEQ ID NO: 1956113 - RNA, 19 nt, Homo sapiens
  misc_RNA (1)...(19): siRNA sense strand
uaacagaugaggaagauga

SEQ ID NO: 1956114 - RNA, 19 nt, Homo sapiens
  misc_RNA (1)...(19): siRNA sense strand
gcggaaacccucuccuuaa

SEQ ID NO: 1956115 - RNA, 19 nt, Homo sapiens
  misc_RNA (1)...(19): siRNA sense strand
gaacauacaaccuccucuu

SEQ ID NO: 1956116 - RNA, 19 nt, Homo sapiens
  misc_RNA (1)...(19): siRNA sense strand
cggaaacccucuccuuaau

SEQ ID NO: 1956117 - RNA, 19 nt, Homo sapiens
  misc_RNA (1)...(19): siRNA sense strand
ugaggaagaugaagauuuu

SEQ ID NO: 1956118 - RNA, 19 nt, Homo sapiens
  misc_RNA (1)...(19): siRNA sense strand
agaagaaagugaugaugau

SEQ ID NO: 1956119 - RNA, 19 nt, Homo sapiens
  misc_RNA (1)...(19): siRNA sense strand
cagaugacccucuaacaga

SEQ ID NO: 1956120 - RNA, 19 nt, Homo sapiens
  misc_RNA (1)...(19): siRNA sense strand
gagaggauucguauggaaa

SEQ ID NO: 1956121 - RNA, 19 nt, Homo sapiens
  misc_RNA (1)...(19): siRNA sense strand
agaaagugaugaugaugau

SEQ ID NO: 1956122 - RNA, 19 nt, Homo sapiens
  misc_RNA (1)...(19): siRNA sense strand
ucaaagcaguauucaagca

SEQ ID NO: 1956123 - RNA, 19 nt, Homo sapiens
  misc_RNA (1)...(19): siRNA sense strand
uagaugaccagaagaaaga

SEQ ID NO: 1956124 - RNA, 19 nt, Homo sapiens
  misc_RNA (1)...(19): siRNA sense strand
gaaagugaugaugaugaua

SEQ ID NO: 1956125 - RNA, 19 nt, Homo sapiens
  misc_RNA (1)...(19): siRNA sense strand
gaagaaagugaugaugaug

SEQ ID NO: 1956126 - RNA, 19 nt, Homo sapiens
  misc_RNA (1)...(19): siRNA sense strand
gcagaugacccucuaacag

SEQ ID NO: 1956127 - RNA, 19 nt, Homo sapiens
  misc_RNA (1)...(19): siRNA sense strand
gaagaagaaagugaugaug

SEQ ID NO: 1956128 - RNA, 19 nt, Homo sapiens
  misc_RNA (1)...(19): siRNA sense strand
aagaagaaagugaugauga

SEQ ID NO: 1956129 - RNA, 19 nt, Homo sapiens
  misc_RNA (1)...(19): siRNA sense strand
ggaaacccucuccuuaauc

SEQ ID NO: 1956130 - RNA, 19 nt, Homo sapiens
  misc_RNA (1)...(19): siRNA sense strand
acacugcgaucugaauuuc

SEQ ID NO: 1956131 - RNA, 19 nt, Homo sapiens
  misc_RNA (1)...(19): siRNA sense strand
gagcggaaacccucuccuu

SEQ ID NO: 1956132 - RNA, 19 nt, Homo sapiens
  misc_RNA (1)...(19): siRNA sense strand
agagaggauucguauggaa

SEQ ID NO: 1956133 - RNA, 19 nt, Homo sapiens
  misc_RNA (1)...(19): siRNA sense strand
ugaugcagaugacccucua

SEQ ID NO: 1956134 - RNA, 19 nt, Homo sapiens
  misc_RNA (1)...(19): siRNA sense strand
ucuaacagaugaggaagau

SEQ ID NO: 1956135 - RNA, 19 nt, Homo sapiens
  misc_RNA (1)...(19): siRNA sense strand
aagaagagaggauucguau

SEQ ID NO: 1956136 - RNA, 19 nt, Homo sapiens
  misc_RNA (1)...(19): siRNA sense strand
caggaaggaccaagaacaa

SEQ ID NO: 1956137 - RNA, 19 nt, Homo sapiens
  misc_RNA (1)...(19): siRNA sense strand
gagagaguuggaagaaaga

SEQ ID NO: 1956138 - RNA, 19 nt, Homo sapiens
  misc_RNA (1)...(19): siRNA sense strand
guagaugaccagaagaaag

SEQ ID NO: 1956139 - RNA, 19 nt, Homo sapiens
  misc_RNA (1)...(19): siRNA sense strand
aaagaaggugggaugauga

SEQ ID NO: 1956140 - RNA, 19 nt, Homo sapiens
  misc_RNA (1)...(19): siRNA sense strand
ggaaggaccaagaacaaaa

SEQ ID NO: 1956141 - RNA, 19 nt, Homo sapiens
  misc_RNA (1)...(19): siRNA sense strand
aaggugggaugaugacguu

SEQ ID NO: 1956142 - RNA, 19 nt, Homo sapiens
  misc_RNA (1)...(19): siRNA sense strand
gcagccaggccaaccuuug

SEQ ID NO: 1956143 - RNA, 19 nt, Homo sapiens
  misc_RNA (1)...(19): siRNA sense strand
cauacaaccuccucuucag

SEQ ID NO: 1956144 - RNA, 19 nt, Homo sapiens
  misc_RNA (1)...(19): siRNA sense strand
cugaagagcaggccaggaa

SEQ ID NO: 1956145 - RNA, 19 nt, Homo sapiens
  misc_RNA (1)...(19): siRNA sense strand
caggagagaguuggaagaa

SEQ ID NO: 1956146 - RNA, 19 nt, Homo sapiens
  misc_RNA (1)...(19): siRNA sense strand
ggaugaugacguugucuuc

SEQ ID NO: 1956147 - RNA, 19 nt, Homo sapiens
  misc_RNA (1)...(19): siRNA sense strand
gauacugcagcucuucuug

SEQ ID NO: 1956148 - RNA, 19 nt, Homo sapiens
  misc_RNA (1)...(19): siRNA sense strand
cagaugaggaagaugaaga

SEQ ID NO: 1956149 - RNA, 19 nt, Homo sapiens
  misc_RNA (1)...(19): siRNA sense strand
cguccaacccgagaacaua

SEQ ID NO: 1956150 - RNA, 19 nt, Homo sapiens
  misc_RNA (1)...(19): siRNA sense strand
aagaaagugaugaugauga

SEQ ID NO: 1956151 - RNA, 19 nt, Homo sapiens
  misc_RNA (1)...(19): siRNA sense strand
agaugacccucuaacagau

SEQ ID NO: 1956152 - RNA, 19 nt, Homo sapiens
  misc_RNA (1)...(19): siRNA sense strand
aaaagaaggugggaugaug

SEQ ID NO: 1956153 - RNA, 19 nt, Homo sapiens
  misc_RNA (1)...(19): siRNA sense strand
ggugauuugagccaacuuu

SEQ ID NO: 1956154 - RNA, 19 nt, Homo sapiens
  misc_RNA (1)...(19): siRNA sense strand
uuucaaagcaguauucaag

SEQ ID NO: 1956155 - RNA, 19 nt, Homo sapiens
  misc_RNA (1)...(19): siRNA sense strand
ugaagaagaaagugaugau

SEQ ID NO: 1956156 - RNA, 19 nt, Homo sapiens
  misc_RNA (1)...(19): siRNA sense strand
cagccaggccaaccuuuga

SEQ ID NO: 1956157 - RNA, 19 nt, Homo sapiens
  misc_RNA (1)...(19): siRNA sense strand
ccaggaaggaccaagaaca

SEQ ID NO: 1956158 - RNA, 19 nt, Homo sapiens
  misc_RNA (1)...(19): siRNA sense strand
caaccuugaugcagaugac

SEQ ID NO: 1956159 - RNA, 19 nt, Homo sapiens
  misc_RNA (1)...(19): siRNA sense strand
caagaacugugcaaaaggu

SEQ ID NO: 1956160 - RNA, 19 nt, Homo sapiens
  misc_RNA (1)...(19): siRNA sense strand
cagacagacuacucaggau

SEQ ID NO: 1956161 - RNA, 19 nt, Homo sapiens
  misc_RNA (1)...(19): siRNA sense strand
agaccuacccucucauaca

SEQ ID NO: 1956162 - RNA, 19 nt, Homo sapiens
  misc_RNA (1)...(19): siRNA sense strand
gaacugugcaaaaggugua

SEQ ID NO: 1956163 - RNA, 19 nt, Homo sapiens
  misc_RNA (1)...(19): siRNA sense strand
gaugaugacguugucuuca

SEQ ID NO: 1956164 - RNA, 19 nt, Homo sapiens
  misc_RNA (1)...(19): siRNA sense strand
ggccaggaaggaccaagaa

SEQ ID NO: 1956165 - RNA, 19 nt, Homo sapiens
  misc_RNA (1)...(19): siRNA sense strand
aagagaggauucguaugga

SEQ ID NO: 1956166 - RNA, 19 nt, Homo sapiens
  misc_RNA (1)...(19): siRNA sense strand
gagaguuggaagaaagaga

SEQ ID NO: 1956167 - RNA, 19 nt, Homo sapiens
  misc_RNA (1)...(19): siRNA sense strand
guguagaugaccagaagaa

SEQ ID NO: 1956168 - RNA, 19 nt, Homo sapiens
  misc_RNA (1)...(19): siRNA sense strand
ugaugacguugucuucaag

SEQ ID NO: 1956169 - RNA, 19 nt, Homo sapiens
  misc_RNA (1)...(19): siRNA sense strand
agcggaaacccucuccuua

SEQ ID NO: 1956170 - RNA, 19 nt, Homo sapiens
  misc_RNA (1)...(19): siRNA sense strand
ccucucauacaaagauaaa

SEQ ID NO: 1956171 - RNA, 19 nt, Homo sapiens
  misc_RNA (1)...(19): siRNA sense strand
aaagugaugaugaugauac

SEQ ID NO: 1956172 - RNA, 19 nt, Homo sapiens
  misc_RNA (1)...(19): siRNA sense strand
gaaaaggagaaggugauuu

SEQ ID NO: 1956173 - RNA, 19 nt, Homo sapiens
  misc_RNA (1)...(19): siRNA sense strand
aaaaggagaaggugauuug

SEQ ID NO: 1956174 - RNA, 19 nt, Homo sapiens
  misc_RNA (1)...(19): siRNA sense strand
aaccuccucuucaguguca

SEQ ID NO: 1956175 - RNA, 19 nt, Homo sapiens
  misc_RNA (1)...(19): siRNA sense strand
augaugacguugucuucaa

SEQ ID NO: 1956176 - RNA, 19 nt, Homo sapiens
  misc_RNA (1)...(19): siRNA sense strand
gaugacccucuaacagaug

SEQ ID NO: 1956177 - RNA, 19 nt, Homo sapiens
  misc_RNA (1)...(19): siRNA sense strand
agagagcugcugcaagaga

SEQ ID NO: 1956178 - RNA, 19 nt, Homo sapiens
  misc_RNA (1)...(19): siRNA sense strand
guucguaaccgugacuuca

SEQ ID NO: 1956179 - RNA, 19 nt, Homo sapiens
  misc_RNA (1)...(19): siRNA sense strand
gaugaggaagaugaagauu

SEQ ID NO: 1956180 - RNA, 19 nt, Homo sapiens
  misc_RNA (1)...(19): siRNA sense strand
gaugauacugcagcucuuc

SEQ ID NO: 1956181 - RNA, 19 nt, Homo sapiens
  misc_RNA (1)...(19): siRNA sense strand
acacacugcgaucugaauu

SEQ ID NO: 1956182 - RNA, 19 nt, Homo sapiens
  misc_RNA (1)...(19): siRNA sense strand
gggaugaugacguugucuu

SEQ ID NO: 1956183 - RNA, 19 nt, Homo sapiens
  misc_RNA (1)...(19): siRNA sense strand
aggagagaguuggaagaaa

SEQ ID NO: 1956184 - RNA, 19 nt, Homo sapiens
  misc_RNA (1)...(19): siRNA sense strand
acauacaaccuccucuuca

SEQ ID NO: 1956185 - RNA, 19 nt, Homo sapiens
  misc_RNA (1)...(19): siRNA sense strand
cacacugcgaucugaauuu

SEQ ID NO: 1956186 - RNA, 19 nt, Homo sapiens
  misc_RNA (1)...(19): siRNA sense strand
guauucaagcagagaccua

SEQ ID NO: 1956187 - RNA, 19 nt, Homo sapiens
  misc_RNA (1)...(19): siRNA sense strand
uaacacagauggaagaugu

SEQ ID NO: 1956188 - RNA, 19 nt, Homo sapiens
  misc_RNA (1)...(19): siRNA sense strand
caaauugugucagaagaua

SEQ ID NO: 1956189 - RNA, 19 nt, Homo sapiens
  misc_RNA (1)...(19): siRNA sense strand
aagcagaguugaaauagaa

SEQ ID NO: 1956190 - RNA, 19 nt, Homo sapiens
  misc_RNA (1)...(19): siRNA sense strand
gaacagaagcuauccaaac

SEQ ID NO: 1956191 - RNA, 19 nt, Homo sapiens
  misc_RNA (1)...(19): siRNA sense strand
uugaagccauugaaaguua

SEQ ID NO: 1956192 - RNA, 19 nt, Homo sapiens
  misc_RNA (1)...(19): siRNA sense strand
ugaaagcagaguugaaaua

SEQ ID NO: 1956193 - RNA, 19 nt, Homo sapiens
  misc_RNA (1)...(19): siRNA sense strand
gaaagcagaguugaaauag

SEQ ID NO: 1956194 - RNA, 19 nt, Homo sapiens
  misc_RNA (1)...(19): siRNA sense strand
gaagcuauccaaacgugaa

SEQ ID NO: 1956195 - RNA, 19 nt, Homo sapiens
  misc_RNA (1)...(19): siRNA sense strand
gccaccagcuguugcagaa

SEQ ID NO: 1956196 - RNA, 19 nt, Homo sapiens
  misc_RNA (1)...(19): siRNA sense strand
uguguuuccuguaauguuu

SEQ ID NO: 1956197 - RNA, 19 nt, Homo sapiens
  misc_RNA (1)...(19): siRNA sense strand
ggaggccgaauccaaauug

SEQ ID NO: 1956198 - RNA, 19 nt, Homo sapiens
  misc_RNA (1)...(19): siRNA sense strand
guaauguuucuguggauaa

SEQ ID NO: 1956199 - RNA, 19 nt, Homo sapiens
  misc_RNA (1)...(19): siRNA sense strand
gauaaggaacagaagcuau

SEQ ID NO: 1956200 - RNA, 19 nt, Homo sapiens
  misc_RNA (1)...(19): siRNA sense strand
gcaaauugugucagaagau

SEQ ID NO: 1956201 - RNA, 19 nt, Homo sapiens
  misc_RNA (1)...(19): siRNA sense strand
aaagcagaguugaaauaga

SEQ ID NO: 1956202 - RNA, 19 nt, Homo sapiens
  misc_RNA (1)...(19): siRNA sense strand
gucagaagauaaagagcuu

SEQ ID NO: 1956203 - RNA, 19 nt, Homo sapiens
  misc_RNA (1)...(19): siRNA sense strand
ggaaaaugguugcguccuu

SEQ ID NO: 1956204 - RNA, 19 nt, Homo sapiens
  misc_RNA (1)...(19): siRNA sense strand
ggaacagaagcuauccaaa

SEQ ID NO: 1956205 - RNA, 19 nt, Homo sapiens
  misc_RNA (1)...(19): siRNA sense strand
gccauugaaaguuauguuu

SEQ ID NO: 1956206 - RNA, 19 nt, Homo sapiens
  misc_RNA (1)...(19): siRNA sense strand
uguaauguuucuguggaua

SEQ ID NO: 1956207 - RNA, 19 nt, Homo sapiens
  misc_RNA (1)...(19): siRNA sense strand
guugcguccuugagacuuu

SEQ ID NO: 1956208 - RNA, 19 nt, Homo sapiens
  misc_RNA (1)...(19): siRNA sense strand
ggauaaggaacagaagcua

SEQ ID NO: 1956209 - RNA, 19 nt, Homo sapiens
  misc_RNA (1)...(19): siRNA sense strand
ugaagccauugaaaguuau

SEQ ID NO: 1956210 - RNA, 19 nt, Homo sapiens
  misc_RNA (1)...(19): siRNA sense strand
gaugcacgcccaagaaucu

SEQ ID NO: 1956211 - RNA, 19 nt, Homo sapiens
  misc_RNA (1)...(19): siRNA sense strand
ccucaguguugaagccauu

SEQ ID NO: 1956212 - RNA, 19 nt, Homo sapiens
  misc_RNA (1)...(19): siRNA sense strand
caccagcuguugcagaagu

SEQ ID NO: 1956213 - RNA, 19 nt, Homo sapiens
  misc_RNA (1)...(19): siRNA sense strand
aaaagcaaauugugucaga

SEQ ID NO: 1956214 - RNA, 19 nt, Homo sapiens
  misc_RNA (1)...(19): siRNA sense strand
aaagcaaauugugucagaa

SEQ ID NO: 1956215 - RNA, 19 nt, Homo sapiens
  misc_RNA (1)...(19): siRNA sense strand
gugggaggccgaauccaaa

SEQ ID NO: 1956216 - RNA, 19 nt, Homo sapiens
  misc_RNA (1)...(19): siRNA sense strand
gaggccgaauccaaauugu

SEQ ID NO: 1956217 - RNA, 19 nt, Homo sapiens
  misc_RNA (1)...(19): siRNA sense strand
acagaugcacgcccaagaa

SEQ ID NO: 1956218 - RNA, 19 nt, Homo sapiens
  misc_RNA (1)...(19): siRNA sense strand
cuugaaagcagaguugaaa

SEQ ID NO: 1956219 - RNA, 19 nt, Homo sapiens
  misc_RNA (1)...(19): siRNA sense strand
aacagaagcuauccaaacg

SEQ ID NO: 1956220 - RNA, 19 nt, Homo sapiens
  misc_RNA (1)...(19): siRNA sense strand
gaaaagucucuaacacaga

SEQ ID NO: 1956221 - RNA, 19 nt, Homo sapiens
  misc_RNA (1)...(19): siRNA sense strand
gggaggccgaauccaaauu

SEQ ID NO: 1956222 - RNA, 19 nt, Homo sapiens
  misc_RNA (1)...(19): siRNA sense strand
gcaggcguucggucacuga

SEQ ID NO: 1956223 - RNA, 19 nt, Homo sapiens
  misc_RNA (1)...(19): siRNA sense strand
cagaugcacgcccaagaau

SEQ ID NO: 1956224 - RNA, 19 nt, Homo sapiens
  misc_RNA (1)...(19): siRNA sense strand
guugaagccauugaaaguu

SEQ ID NO: 1956225 - RNA, 19 nt, Homo sapiens
  misc_RNA (1)...(19): siRNA sense strand
uaauguuucuguggauaag

SEQ ID NO: 1956226 - RNA, 19 nt, Homo sapiens
  misc_RNA (1)...(19): siRNA sense strand
aaaagucucuaacacagau

SEQ ID NO: 1956227 - RNA, 19 nt, Homo sapiens
  misc_RNA (1)...(19): siRNA sense strand
gaagccauugaaaguuaug

SEQ ID NO: 1956228 - RNA, 19 nt, Homo sapiens
  misc_RNA (1)...(19): siRNA sense strand
caacaaccaugacacagua

SEQ ID NO: 1956229 - RNA, 19 nt, Homo sapiens
  misc_RNA (1)...(19): siRNA sense strand
caucaaagauaacggauuu

SEQ ID NO: 1956230 - RNA, 19 nt, Homo sapiens
  misc_RNA (1)...(19): siRNA sense strand
aaagagaguucuaaaggua

SEQ ID NO: 1956231 - RNA, 19 nt, Homo sapiens
  misc_RNA (1)...(19): siRNA sense strand
ccucaaaccuccaggcaua

SEQ ID NO: 1956232 - RNA, 19 nt, Homo sapiens
  misc_RNA (1)...(19): siRNA sense strand
gauaacggauuugggauaa

SEQ ID NO: 1956233 - RNA, 19 nt, Homo sapiens
  misc_RNA (1)...(19): siRNA sense strand
gagcgacacugccagguuu

SEQ ID NO: 1956234 - RNA, 19 nt, Homo sapiens
  misc_RNA (1)...(19): siRNA sense strand
ccucccagcucauuuauaa

SEQ ID NO: 1956235 - RNA, 19 nt, Homo sapiens
  misc_RNA (1)...(19): siRNA sense strand
uauaagugcuccugugaaa

SEQ ID NO: 1956236 - RNA, 19 nt, Homo sapiens
  misc_RNA (1)...(19): siRNA sense strand
caaacacucugacaguuau

SEQ ID NO: 1956237 - RNA, 19 nt, Homo sapiens
  misc_RNA (1)...(19): siRNA sense strand
gcaaacacauccgcaacaa

SEQ ID NO: 1956238 - RNA, 19 nt, Homo sapiens
  misc_RNA (1)...(19): siRNA sense strand
gaggaucccaucaaagaua

SEQ ID NO: 1956239 - RNA, 19 nt, Homo sapiens
  misc_RNA (1)...(19): siRNA sense strand
ccaaacacucugacaguua

SEQ ID NO: 1956240 - RNA, 19 nt, Homo sapiens
  misc_RNA (1)...(19): siRNA sense strand
gaaaucaaacggacuguca

SEQ ID NO: 1956241 - RNA, 19 nt, Homo sapiens
  misc_RNA (1)...(19): siRNA sense strand
ugucaaaccuccagucuuc

SEQ ID NO: 1956242 - RNA, 19 nt, Homo sapiens
  misc_RNA (1)...(19): siRNA sense strand
gaaagaacccaagccagaa

SEQ ID NO: 1956243 - RNA, 19 nt, Homo sapiens
  misc_RNA (1)...(19): siRNA sense strand
ggacgaugguggccacaau

SEQ ID NO: 1956244 - RNA, 19 nt, Homo sapiens
  misc_RNA (1)...(19): siRNA sense strand
agaauggacuggaagaaug

SEQ ID NO: 1956245 - RNA, 19 nt, Homo sapiens
  misc_RNA (1)...(19): siRNA sense strand
uaaagagaguucuaaaggu

SEQ ID NO: 1956246 - RNA, 19 nt, Homo sapiens
  misc_RNA (1)...(19): siRNA sense strand
gguccuggcugcacauuuc

SEQ ID NO: 1956247 - RNA, 19 nt, Homo sapiens
  misc_RNA (1)...(19): siRNA sense strand
ggagaaagaccacauuacu

SEQ ID NO: 1956248 - RNA, 19 nt, Homo sapiens
  misc_RNA (1)...(19): siRNA sense strand
gcauuugccuuagagaaga

SEQ ID NO: 1956249 - RNA, 19 nt, Homo sapiens
  misc_RNA (1)...(19): siRNA sense strand
ggaugccacucgauucuuc

SEQ ID NO: 1956250 - RNA, 19 nt, Homo sapiens
  misc_RNA (1)...(19): siRNA sense strand
ccacaaugaucacagucaa

SEQ ID NO: 1956251 - RNA, 19 nt, Homo sapiens
  misc_RNA (1)...(19): siRNA sense strand
gagaauugccugcacuaug

SEQ ID NO: 1956252 - RNA, 19 nt, Homo sapiens
  misc_RNA (1)...(19): siRNA sense strand
gcggagaaagaccacauua

SEQ ID NO: 1956253 - RNA, 19 nt, Homo sapiens
  misc_RNA (1)...(19): siRNA sense strand
uaagugcuccugugaaaug

SEQ ID NO: 1956254 - RNA, 19 nt, Homo sapiens
  misc_RNA (1)...(19): siRNA sense strand
uuccagagcugcauauguu

SEQ ID NO: 1956255 - RNA, 19 nt, Homo sapiens
  misc_RNA (1)...(19): siRNA sense strand
ggacaacagaggagacaga

SEQ ID NO: 1956256 - RNA, 19 nt, Homo sapiens
  misc_RNA (1)...(19): siRNA sense strand
gagagccacaucagccuua

SEQ ID NO: 1956257 - RNA, 19 nt, Homo sapiens
  misc_RNA (1)...(19): siRNA sense strand
ccacaguguugcugcauca

SEQ ID NO: 1956258 - RNA, 19 nt, Homo sapiens
  misc_RNA (1)...(19): siRNA sense strand
gagguacugugcacacugu

SEQ ID NO: 1956259 - RNA, 19 nt, Homo sapiens
  misc_RNA (1)...(19): siRNA sense strand
uaacggauuugggauaaag

SEQ ID NO: 1956260 - RNA, 19 nt, Homo sapiens
  misc_RNA (1)...(19): siRNA sense strand
gcccaaagccgugcacuug

SEQ ID NO: 1956261 - RNA, 19 nt, Homo sapiens
  misc_RNA (1)...(19): siRNA sense strand
cugcauauguuugaucauu

SEQ ID NO: 1956262 - RNA, 19 nt, Homo sapiens
  misc_RNA (1)...(19): siRNA sense strand
uggaggcucuggcuaaguu

SEQ ID NO: 1956263 - RNA, 19 nt, Homo sapiens
  misc_RNA (1)...(19): siRNA sense strand
gcucucgaguucccacuga

SEQ ID NO: 1956264 - RNA, 19 nt, Homo sapiens
  misc_RNA (1)...(19): siRNA sense strand
gggaagcuuuggaguucaa

SEQ ID NO: 1956265 - RNA, 19 nt, Homo sapiens
  misc_RNA (1)...(19): siRNA sense strand
cauccuagcaacaguauug

SEQ ID NO: 1956266 - RNA, 19 nt, Homo sapiens
  misc_RNA (1)...(19): siRNA sense strand
gagaauggacuggaagaau

SEQ ID NO: 1956267 - RNA, 19 nt, Homo sapiens
  misc_RNA (1)...(19): siRNA sense strand
gcaacaaccaugacacagu

SEQ ID NO: 1956268 - RNA, 19 nt, Homo sapiens
  misc_RNA (1)...(19): siRNA sense strand
gagccacggucggacauug

SEQ ID NO: 1956269 - RNA, 19 nt, Homo sapiens
  misc_RNA (1)...(19): siRNA sense strand
cuacgugucccacaugaaa

SEQ ID NO: 1956270 - RNA, 19 nt, Homo sapiens
  misc_RNA (1)...(19): siRNA sense strand
gacccucccagcucauuua

SEQ ID NO: 1956271 - RNA, 19 nt, Homo sapiens
  misc_RNA (1)...(19): siRNA sense strand
agaauugccugcacuaugc

SEQ ID NO: 1956272 - RNA, 19 nt, Homo sapiens
  misc_RNA (1)...(19): siRNA sense strand
ccacuaaagagaguucuaa

SEQ ID NO: 1956273 - RNA, 19 nt, Homo sapiens
  misc_RNA (1)...(19): siRNA sense strand
ucucagggcccacuaaaga

SEQ ID NO: 1956274 - RNA, 19 nt, Homo sapiens
  misc_RNA (1)...(19): siRNA sense strand
gcacauuuccagaggacaa

SEQ ID NO: 1956275 - RNA, 19 nt, Homo sapiens
  misc_RNA (1)...(19): siRNA sense strand
uagagagaauggacuggaa

SEQ ID NO: 1956276 - RNA, 19 nt, Homo sapiens
  misc_RNA (1)...(19): siRNA sense strand
gauaaagcccaaacacucu

SEQ ID NO: 1956277 - RNA, 19 nt, Homo sapiens
  misc_RNA (1)...(19): siRNA sense strand
gaccuuggccuugcugaaa

SEQ ID NO: 1956278 - RNA, 19 nt, Homo sapiens
  misc_RNA (1)...(19): siRNA sense strand
gagacgcauuugccuuaga

SEQ ID NO: 1956279 - RNA, 19 nt, Homo sapiens
  misc_RNA (1)...(19): siRNA sense strand
ggaguguggagacgcauuu

SEQ ID NO: 1956280 - RNA, 19 nt, Homo sapiens
  misc_RNA (1)...(19): siRNA sense strand
agccacagcuuacacaaau

SEQ ID NO: 1956281 - RNA, 19 nt, Homo sapiens
  misc_RNA (1)...(19): siRNA sense strand
ugagugucauugucaagaa

SEQ ID NO: 1956282 - RNA, 19 nt, Homo sapiens
  misc_RNA (1)...(19): siRNA sense strand
gagcaaagugggcagaaca

SEQ ID NO: 1956283 - RNA, 19 nt, Homo sapiens
  misc_RNA (1)...(19): siRNA sense strand
gaauggacuggaagaaugu

SEQ ID NO: 1956284 - RNA, 19 nt, Homo sapiens
  misc_RNA (1)...(19): siRNA sense strand
uggagacgcauuugccuua

SEQ ID NO: 1956285 - RNA, 19 nt, Homo sapiens
  misc_RNA (1)...(19): siRNA sense strand
cuaaagagaguucuaaagg

SEQ ID NO: 1956286 - RNA, 19 nt, Homo sapiens
  misc_RNA (1)...(19): siRNA sense strand
gagaaagaccacauuacuc

SEQ ID NO: 1956287 - RNA, 19 nt, Homo sapiens
  misc_RNA (1)...(19): siRNA sense strand
gagcguccacauugaggua

SEQ ID NO: 1956288 - RNA, 19 nt, Homo sapiens
  misc_RNA (1)...(19): siRNA sense strand
gacgagagcaugacaaagg

SEQ ID NO: 1956289 - RNA, 19 nt, Homo sapiens
  misc_RNA (1)...(19): siRNA sense strand
ccaaguaaguccccuguug

SEQ ID NO: 1956290 - RNA, 19 nt, Homo sapiens
  misc_RNA (1)...(19): siRNA sense strand
caccagcaauucccaaagu

SEQ ID NO: 1956291 - RNA, 19 nt, Homo sapiens
  misc_RNA (1)...(19): siRNA sense strand
gggacgagagcaugacaaa

SEQ ID NO: 1956292 - RNA, 19 nt, Homo sapiens
  misc_RNA (1)...(19): siRNA sense strand
acaagcagaugcgggacua

SEQ ID NO: 1956293 - RNA, 19 nt, Homo sapiens
  misc_RNA (1)...(19): siRNA sense strand
gcacuuggccaaccugaac

SEQ ID NO: 1956294 - RNA, 19 nt, Homo sapiens
  misc_RNA (1)...(19): siRNA sense strand
ggagacagugccaggaguu

SEQ ID NO: 1956295 - RNA, 19 nt, Homo sapiens
  misc_RNA (1)...(19): siRNA sense strand
cauggagacuagagagaau

SEQ ID NO: 1956296 - RNA, 19 nt, Homo sapiens
  misc_RNA (1)...(19): siRNA sense strand
caaugucuccucugugguu

SEQ ID NO: 1956297 - RNA, 19 nt, Homo sapiens
  misc_RNA (1)...(19): siRNA sense strand
agccagacguccaaaguga

SEQ ID NO: 1956298 - RNA, 19 nt, Homo sapiens
  misc_RNA (1)...(19): siRNA sense strand
gcagaugcgggacuacaug

SEQ ID NO: 1956299 - RNA, 19 nt, Homo sapiens
  misc_RNA (1)...(19): siRNA sense strand
cguagcaucugcagugaca

SEQ ID NO: 1956300 - RNA, 19 nt, Homo sapiens
  misc_RNA (1)...(19): siRNA sense strand
ggaucagccuggccacaca

SEQ ID NO: 1956301 - RNA, 19 nt, Homo sapiens
  misc_RNA (1)...(19): siRNA sense strand
gaugaaaguguguccuugu

SEQ ID NO: 1956302 - RNA, 19 nt, Homo sapiens
  misc_RNA (1)...(19): siRNA sense strand
gcaaggggcucgucaugca

SEQ ID NO: 1956303 - RNA, 19 nt, Homo sapiens
  misc_RNA (1)...(19): siRNA sense strand
cugaggaucccaucaaaga

SEQ ID NO: 1956304 - RNA, 19 nt, Homo sapiens
  misc_RNA (1)...(19): siRNA sense strand
acaagaagaggcacauuca

SEQ ID NO: 1956305 - RNA, 19 nt, Homo sapiens
  misc_RNA (1)...(19): siRNA sense strand
ccacacaaaggaucucuca

SEQ ID NO: 1956306 - RNA, 19 nt, Homo sapiens
  misc_RNA (1)...(19): siRNA sense strand
aggaucccaucaaagauaa

SEQ ID NO: 1956307 - RNA, 19 nt, Homo sapiens
  misc_RNA (1)...(19): siRNA sense strand
gagagaauggacuggaaga

SEQ ID NO: 1956308 - RNA, 19 nt, Homo sapiens
  misc_RNA (1)...(19): siRNA sense strand
ccagacguccaaagugaaa

SEQ ID NO: 1956309 - RNA, 19 nt, Homo sapiens
  misc_RNA (1)...(19): siRNA sense strand
ccaacagccugcgcaaaca

SEQ ID NO: 1956310 - RNA, 19 nt, Homo sapiens
  misc_RNA (1)...(19): siRNA sense strand
gcagaagccggaguugaug

SEQ ID NO: 1956311 - RNA, 19 nt, Homo sapiens
  misc_RNA (1)...(19): siRNA sense strand
ggagcgacacugccagguu

SEQ ID NO: 1956312 - RNA, 19 nt, Homo sapiens
  misc_RNA (1)...(19): siRNA sense strand
gcaauucccaaagugagaa

SEQ ID NO: 1956313 - RNA, 19 nt, Homo sapiens
  misc_RNA (1)...(19): siRNA sense strand
gaugguggccacaaugauc

SEQ ID NO: 1956314 - RNA, 19 nt, Homo sapiens
  misc_RNA (1)...(19): siRNA sense strand
gcaggugggcgucuucaag

SEQ ID NO: 1956315 - RNA, 19 nt, Homo sapiens
  misc_RNA (1)...(19): siRNA sense strand
gguacucaaucaagugucu

SEQ ID NO: 1956316 - RNA, 19 nt, Homo sapiens
  misc_RNA (1)...(19): siRNA sense strand
ccaaacauggccucacuuc

SEQ ID NO: 1956317 - RNA, 19 nt, Homo sapiens
  misc_RNA (1)...(19): siRNA sense strand
agacgcugcucuucuucaa

SEQ ID NO: 1956318 - RNA, 19 nt, Homo sapiens
  misc_RNA (1)...(19): siRNA sense strand
ggagacgcauuugccuuag

SEQ ID NO: 1956319 - RNA, 19 nt, Homo sapiens
  misc_RNA (1)...(19): siRNA sense strand
cccaaacacucugacaguu

SEQ ID NO: 1956320 - RNA, 19 nt, Homo sapiens
  misc_RNA (1)...(19): siRNA sense strand
ggcggagcguccacauuga

SEQ ID NO: 1956321 - RNA, 19 nt, Homo sapiens
  misc_RNA (1)...(19): siRNA sense strand
caaggaggccauccagaca

SEQ ID NO: 1956322 - RNA, 19 nt, Homo sapiens
  misc_RNA (1)...(19): siRNA sense strand
ccacagcuuacacaaaugu

SEQ ID NO: 1956323 - RNA, 19 nt, Homo sapiens
  misc_RNA (1)...(19): siRNA sense strand
gcaggaacacgagcaaagu

SEQ ID NO: 1956324 - RNA, 19 nt, Homo sapiens
  misc_RNA (1)...(19): siRNA sense strand
gcaaaggcucaccgucugu

SEQ ID NO: 1956325 - RNA, 19 nt, Homo sapiens
  misc_RNA (1)...(19): siRNA sense strand
ugugggaaauuugauucua

SEQ ID NO: 1956326 - RNA, 19 nt, Homo sapiens
  misc_RNA (1)...(19): siRNA sense strand
gcucacagacaggcaagaa

SEQ ID NO: 1956327 - RNA, 19 nt, Homo sapiens
  misc_RNA (1)...(19): siRNA sense strand
gugggaaauuugauucuac

SEQ ID NO: 1956328 - RNA, 19 nt, Homo sapiens
  misc_RNA (1)...(19): siRNA sense strand
gaccugcuguugcacauga

SEQ ID NO: 1956329 - RNA, 19 nt, Homo sapiens
  misc_RNA (1)...(19): siRNA sense strand
ggacuuggaccugcuguug

SEQ ID NO: 1956330 - RNA, 19 nt, Homo sapiens
  misc_RNA (1)...(19): siRNA sense strand
gagagugggcucagugaug

SEQ ID NO: 1956331 - RNA, 19 nt, Homo sapiens
  misc_RNA (1)...(19): siRNA sense strand
agagugggcucagugaugu

SEQ ID NO: 1956332 - RNA, 19 nt, Homo sapiens
  misc_RNA (1)...(19): siRNA sense strand
gcacuggaucuccuacaac

SEQ ID NO: 1956333 - RNA, 19 nt, Homo sapiens
  misc_RNA (1)...(19): siRNA sense strand
aaagagacguucccagauu

SEQ ID NO: 1956334 - RNA, 19 nt, Homo sapiens
  misc_RNA (1)...(19): siRNA sense strand
ccagauuucuucuucaauu

SEQ ID NO: 1956335 - RNA, 19 nt, Homo sapiens
  misc_RNA (1)...(19): siRNA sense strand
ccaacgagguuaugaguca

SEQ ID NO: 1956336 - RNA, 19 nt, Homo sapiens
  misc_RNA (1)...(19): siRNA sense strand
ggaagaagccgugguggaa

SEQ ID NO: 1956337 - RNA, 19 nt, Homo sapiens
  misc_RNA (1)...(19): siRNA sense strand
ggccugggcuuauacuauu

SEQ ID NO: 1956338 - RNA, 19 nt, Homo sapiens
  misc_RNA (1)...(19): siRNA sense strand
ugaaggagaugacaaaugc

SEQ ID NO: 1956339 - RNA, 19 nt, Homo sapiens
  misc_RNA (1)...(19): siRNA sense strand
ggagugagaauguguaugu

SEQ ID NO: 1956340 - RNA, 19 nt, Homo sapiens
  misc_RNA (1)...(19): siRNA sense strand
cagcagcaaugcagacuug

SEQ ID NO: 1956341 - RNA, 19 nt, Homo sapiens
  misc_RNA (1)...(19): siRNA sense strand
gcaggagcuuggcauagaa

SEQ ID NO: 1956342 - RNA, 19 nt, Homo sapiens
  misc_RNA (1)...(19): siRNA sense strand
caacuaccgcucacuguuu

SEQ ID NO: 1956343 - RNA, 19 nt, Homo sapiens
  misc_RNA (1)...(19): siRNA sense strand
gaaggaacgggaccaauuc

SEQ ID NO: 1956344 - RNA, 19 nt, Homo sapiens
  misc_RNA (1)...(19): siRNA sense strand
gaaagcggagugagaaugu

SEQ ID NO: 1956345 - RNA, 19 nt, Homo sapiens
  misc_RNA (1)...(19): siRNA sense strand
gaugacaaaugcugacagu

SEQ ID NO: 1956346 - RNA, 19 nt, Homo sapiens
  misc_RNA (1)...(19): siRNA sense strand
gaaagagacguucccagau

SEQ ID NO: 1956347 - RNA, 19 nt, Homo sapiens
  misc_RNA (1)...(19): siRNA sense strand
ugagaaggacgaguacuua

SEQ ID NO: 1956348 - RNA, 19 nt, Homo sapiens
  misc_RNA (1)...(19): siRNA sense strand
ucaguucuaugcagucuug

SEQ ID NO: 1956349 - RNA, 19 nt, Homo sapiens
  misc_RNA (1)...(19): siRNA sense strand
aacaauacauggaugagaa

SEQ ID NO: 1956350 - RNA, 19 nt, Homo sapiens
  misc_RNA (1)...(19): siRNA sense strand
gaacaauacauggaugaga

SEQ ID NO: 1956351 - RNA, 19 nt, Homo sapiens
  misc_RNA (1)...(19): siRNA sense strand
guucaacacuguccucaag

SEQ ID NO: 1956352 - RNA, 19 nt, Homo sapiens
  misc_RNA (1)...(19): siRNA sense strand
gccauggccugggcuuaua

SEQ ID NO: 1956353 - RNA, 19 nt, Homo sapiens
  misc_RNA (1)...(19): siRNA sense strand
aagagacguucccagauuu

SEQ ID NO: 1956354 - RNA, 19 nt, Homo sapiens
  misc_RNA (1)...(19): siRNA sense strand
ugaaggaacgggaccaauu

SEQ ID NO: 1956355 - RNA, 19 nt, Homo sapiens
  misc_RNA (1)...(19): siRNA sense strand
ggaacgggaccaauucuuc

SEQ ID NO: 1956356 - RNA, 19 nt, Homo sapiens
  misc_RNA (1)...(19): siRNA sense strand
gaagaagccgugguggaaa

SEQ ID NO: 1956357 - RNA, 19 nt, Homo sapiens
  misc_RNA (1)...(19): siRNA sense strand
gcaagaaggacguggucaa

SEQ ID NO: 1956358 - RNA, 19 nt, Homo sapiens
  misc_RNA (1)...(19): siRNA sense strand
guucccagauuucuucuuc

SEQ ID NO: 1956359 - RNA, 19 nt, Homo sapiens
  misc_RNA (1)...(19): siRNA sense strand
ggaaagcggagugagaaug

SEQ ID NO: 1956360 - RNA, 19 nt, Homo sapiens
  misc_RNA (1)...(19): siRNA sense strand
aacuaccgcucacuguuua

SEQ ID NO: 1956361 - RNA, 19 nt, Homo sapiens
  misc_RNA (1)...(19): siRNA sense strand
gaacgggaccaauucuucu

SEQ ID NO: 1956362 - RNA, 19 nt, Homo sapiens
  misc_RNA (1)...(19): siRNA sense strand
gggaccaauucuucucuga

SEQ ID NO: 1956363 - RNA, 19 nt, Homo sapiens
  misc_RNA (1)...(19): siRNA sense strand
ggaccaagugcaaagaugu

SEQ ID NO: 1956364 - RNA, 19 nt, Homo sapiens
  misc_RNA (1)...(19): siRNA sense strand
acaagaagccaagcaagaa

SEQ ID NO: 1956365 - RNA, 19 nt, Homo sapiens
  misc_RNA (1)...(19): siRNA sense strand
acagugaacaccuacauga

SEQ ID NO: 1956366 - RNA, 19 nt, Homo sapiens
  misc_RNA (1)...(19): siRNA sense strand
gguuaugagucaguucuau

SEQ ID NO: 1956367 - RNA, 19 nt, Homo sapiens
  misc_RNA (1)...(19): siRNA sense strand
aagaagccgugguggaaau

SEQ ID NO: 1956368 - RNA, 19 nt, Homo sapiens
  misc_RNA (1)...(19): siRNA sense strand
augcagacuugcucaacua

SEQ ID NO: 1956369 - RNA, 19 nt, Homo sapiens
  misc_RNA (1)...(19): siRNA sense strand
gaaggacgaguacuuacag

SEQ ID NO: 1956370 - RNA, 19 nt, Homo sapiens
  misc_RNA (1)...(19): siRNA sense strand
gcaaauccaggagcugaug

SEQ ID NO: 1956371 - RNA, 19 nt, Homo sapiens
  misc_RNA (1)...(19): siRNA sense strand
gggaacaauacauggauga

SEQ ID NO: 1956372 - RNA, 19 nt, Homo sapiens
  misc_RNA (1)...(19): siRNA sense strand
caagacagaagagcaaauc

SEQ ID NO: 1956373 - RNA, 19 nt, Homo sapiens
  misc_RNA (1)...(19): siRNA sense strand
cagaggagggugacgagaa

SEQ ID NO: 1956374 - RNA, 19 nt, Homo sapiens
  misc_RNA (1)...(19): siRNA sense strand
uggaugagaaggacgagua

SEQ ID NO: 1956375 - RNA, 19 nt, Homo sapiens
  misc_RNA (1)...(19): siRNA sense strand
acacuguccucaagaguac

SEQ ID NO: 1956376 - RNA, 19 nt, Homo sapiens
  misc_RNA (1)...(19): siRNA sense strand
agccagagccugcaagcua

SEQ ID NO: 1956377 - RNA, 19 nt, Homo sapiens
  misc_RNA (1)...(19): siRNA sense strand
cauagaacuccaugaggaa

SEQ ID NO: 1956378 - RNA, 19 nt, Homo sapiens
  misc_RNA (1)...(19): siRNA sense strand
uaccuucccucucaagaca

SEQ ID NO: 1956379 - RNA, 19 nt, Homo sapiens
  misc_RNA (1)...(19): siRNA sense strand
ggagcggcuucaggugauu

SEQ ID NO: 1956380 - RNA, 19 nt, Homo sapiens
  misc_RNA (1)...(19): siRNA sense strand
uugauggccucguggagaa

SEQ ID NO: 1956381 - RNA, 19 nt, Homo sapiens
  misc_RNA (1)...(19): siRNA sense strand
ucaacacuguccucaagag

SEQ ID NO: 1956382 - RNA, 19 nt, Homo sapiens
  misc_RNA (1)...(19): siRNA sense strand
ucccagauuucuucuucaa

SEQ ID NO: 1956383 - RNA, 19 nt, Homo sapiens
  misc_RNA (1)...(19): siRNA sense strand
caaggaugccuggaaggaa

SEQ ID NO: 1956384 - RNA, 19 nt, Homo sapiens
  misc_RNA (1)...(19): siRNA sense strand
gccugggcuuauacuauuu

SEQ ID NO: 1956385 - RNA, 19 nt, Homo sapiens
  misc_RNA (1)...(19): siRNA sense strand
agaggagggugacgagaag

SEQ ID NO: 1956386 - RNA, 19 nt, Homo sapiens
  misc_RNA (1)...(19): siRNA sense strand
agcaggagcuuggcauaga

SEQ ID NO: 1956387 - RNA, 19 nt, Homo sapiens
  misc_RNA (1)...(19): siRNA sense strand
guacuuacagcagcuaaag

SEQ ID NO: 1956388 - RNA, 19 nt, Homo sapiens
  misc_RNA (1)...(19): siRNA sense strand
caagaagccaagcaagaag

SEQ ID NO: 1956389 - RNA, 19 nt, Homo sapiens
  misc_RNA (1)...(19): siRNA sense strand
aacaagaagccaagcaaga

SEQ ID NO: 1956390 - RNA, 19 nt, Homo sapiens
  misc_RNA (1)...(19): siRNA sense strand
gagaaggacgaguacuuac

SEQ ID NO: 1956391 - RNA, 19 nt, Homo sapiens
  misc_RNA (1)...(19): siRNA sense strand
gagugagcccuuugugcaa

SEQ ID NO: 1956392 - RNA, 19 nt, Homo sapiens
  misc_RNA (1)...(19): siRNA sense strand
ucaacuaccgcucacuguu

SEQ ID NO: 1956393 - RNA, 19 nt, Homo sapiens
  misc_RNA (1)...(19): siRNA sense strand
gacguucccagauuucuuc

SEQ ID NO: 1956394 - RNA, 19 nt, Homo sapiens
  misc_RNA (1)...(19): siRNA sense strand
ucaagaucuuccacuccaa

SEQ ID NO: 1956395 - RNA, 19 nt, Homo sapiens
  misc_RNA (1)...(19): siRNA sense strand
caggagauccagcgcacuu

SEQ ID NO: 1956396 - RNA, 19 nt, Homo sapiens
  misc_RNA (1)...(19): siRNA sense strand
guucuaugcagucuugaug

SEQ ID NO: 1956397 - RNA, 19 nt, Homo sapiens
  misc_RNA (1)...(19): siRNA sense strand
agaaggacguggucaaccu

SEQ ID NO: 1956398 - RNA, 19 nt, Homo sapiens
  misc_RNA (1)...(19): siRNA sense strand
uggacgugcuccuggaaga

SEQ ID NO: 1956399 - RNA, 19 nt, Homo sapiens
  misc_RNA (1)...(19): siRNA sense strand
ucaaggaugccuggaagga

SEQ ID NO: 1956400 - RNA, 19 nt, Homo sapiens
  misc_RNA (1)...(19): siRNA sense strand
gagaacaagaagccaagca

SEQ ID NO: 1956401 - RNA, 19 nt, Homo sapiens
  misc_RNA (1)...(19): siRNA sense strand
gaccaagugcaaagaugug

SEQ ID NO: 1956402 - RNA, 19 nt, Homo sapiens
  misc_RNA (1)...(19): siRNA sense strand
gcugaggagcagaaagaga

SEQ ID NO: 1956403 - RNA, 19 nt, Homo sapiens
  misc_RNA (1)...(19): siRNA sense strand
ggagggugacgagaaggaa

SEQ ID NO: 1956404 - RNA, 19 nt, Homo sapiens
  misc_RNA (1)...(19): siRNA sense strand
gacagugaacaccuacaug

SEQ ID NO: 1956405 - RNA, 19 nt, Homo sapiens
  misc_RNA (1)...(19): siRNA sense strand
ggacaagcagacagugaac

SEQ ID NO: 1956406 - RNA, 19 nt, Homo sapiens
  misc_RNA (1)...(19): siRNA sense strand
caucccagcagcagcaaug

SEQ ID NO: 1956407 - RNA, 19 nt, Homo sapiens
  misc_RNA (1)...(19): siRNA sense strand
uacuaaccauggagcaguu

SEQ ID NO: 1956408 - RNA, 19 nt, Homo sapiens
  misc_RNA (1)...(19): siRNA sense strand
guuaugagucaguucuaug

SEQ ID NO: 1956409 - RNA, 19 nt, Homo sapiens
  misc_RNA (1)...(19): siRNA sense strand
uggaccaagugcaaagaug

SEQ ID NO: 1956410 - RNA, 19 nt, Homo sapiens
  misc_RNA (1)...(19): siRNA sense strand
agaacaagaagccaagcaa

SEQ ID NO: 1956411 - RNA, 19 nt, Homo sapiens
  misc_RNA (1)...(19): siRNA sense strand
caacacuguccucaagagu

SEQ ID NO: 1956412 - RNA, 19 nt, Homo sapiens
  misc_RNA (1)...(19): siRNA sense strand
gcacaugagcacgcugaag

SEQ ID NO: 1956413 - RNA, 19 nt, Homo sapiens
  misc_RNA (1)...(19): siRNA sense strand
caagaaggacguggucaac

SEQ ID NO: 1956414 - RNA, 19 nt, Homo sapiens
  misc_RNA (1)...(19): siRNA sense strand
cggccugacuggaccaagu

SEQ ID NO: 1956415 - RNA, 19 nt, Homo sapiens
  misc_RNA (1)...(19): siRNA sense strand
gaaauaggauccaguaugu

SEQ ID NO: 1956416 - RNA, 19 nt, Homo sapiens
  misc_RNA (1)...(19): siRNA sense strand
ggccaaaucugaaauagga

SEQ ID NO: 1956417 - RNA, 19 nt, Homo sapiens
  misc_RNA (1)...(19): siRNA sense strand
ggaccgaacucucauucaa

SEQ ID NO: 1956418 - RNA, 19 nt, Homo sapiens
  misc_RNA (1)...(19): siRNA sense strand
gcaacaaaguggaacgauu

SEQ ID NO: 1956419 - RNA, 19 nt, Homo sapiens
  misc_RNA (1)...(19): siRNA sense strand
caauuacacuguuuccuuu

SEQ ID NO: 1956420 - RNA, 19 nt, Homo sapiens
  misc_RNA (1)...(19): siRNA sense strand
guacuucucugcugguuug

SEQ ID NO: 1956421 - RNA, 19 nt, Homo sapiens
  misc_RNA (1)...(19): siRNA sense strand
gcuuauggcucuuacugua

SEQ ID NO: 1956422 - RNA, 19 nt, Homo sapiens
  misc_RNA (1)...(19): siRNA sense strand
agacaacacugcaaggauu

SEQ ID NO: 1956423 - RNA, 19 nt, Homo sapiens
  misc_RNA (1)...(19): siRNA sense strand
uggauucucuuucaacuuu

SEQ ID NO: 1956424 - RNA, 19 nt, Homo sapiens
  misc_RNA (1)...(19): siRNA sense strand
gcaauuacacuguuuccuu

SEQ ID NO: 1956425 - RNA, 19 nt, Homo sapiens
  misc_RNA (1)...(19): siRNA sense strand
caucucaucuuaccuuaau

SEQ ID NO: 1956426 - RNA, 19 nt, Homo sapiens
  misc_RNA (1)...(19): siRNA sense strand
guagcugcaucauuacuuu

SEQ ID NO: 1956427 - RNA, 19 nt, Homo sapiens
  misc_RNA (1)...(19): siRNA sense strand
gaucaaagguagcuaaaau

SEQ ID NO: 1956428 - RNA, 19 nt, Homo sapiens
  misc_RNA (1)...(19): siRNA sense strand
caacaaaguggaacgauuc

SEQ ID NO: 1956429 - RNA, 19 nt, Homo sapiens
  misc_RNA (1)...(19): siRNA sense strand
gauccaguaugucugaaau

SEQ ID NO: 1956430 - RNA, 19 nt, Homo sapiens
  misc_RNA (1)...(19): siRNA sense strand
gcacaugagcuuggaguug

SEQ ID NO: 1956431 - RNA, 19 nt, Homo sapiens
  misc_RNA (1)...(19): siRNA sense strand
uaaccagcacacaauaaua

SEQ ID NO: 1956432 - RNA, 19 nt, Homo sapiens
  misc_RNA (1)...(19): siRNA sense strand
gaucacagccgcacaugag

SEQ ID NO: 1956433 - RNA, 19 nt, Homo sapiens
  misc_RNA (1)...(19): siRNA sense strand
ugaaauaggauccaguaug

SEQ ID NO: 1956434 - RNA, 19 nt, Homo sapiens
  misc_RNA (1)...(19): siRNA sense strand
uggcuuauuuggagcagua

SEQ ID NO: 1956435 - RNA, 19 nt, Homo sapiens
  misc_RNA (1)...(19): siRNA sense strand
cauaauaccuuggauucuc

SEQ ID NO: 1956436 - RNA, 19 nt, Homo sapiens
  misc_RNA (1)...(19): siRNA sense strand
uggcuaaacuggcaauuac

SEQ ID NO: 1956437 - RNA, 19 nt, Homo sapiens
  misc_RNA (1)...(19): siRNA sense strand
gcacacaauaauacucuau

SEQ ID NO: 1956438 - RNA, 19 nt, Homo sapiens
  misc_RNA (1)...(19): siRNA sense strand
guaaccagcacacaauaau

SEQ ID NO: 1956439 - RNA, 19 nt, Homo sapiens
  misc_RNA (1)...(19): siRNA sense strand
uaccuuggauucucuuuca

SEQ ID NO: 1956440 - RNA, 19 nt, Homo sapiens
  misc_RNA (1)...(19): siRNA sense strand
gcuguggccuuaguuuaug

SEQ ID NO: 1956441 - RNA, 19 nt, Homo sapiens
  misc_RNA (1)...(19): siRNA sense strand
gagaucaaagguagcuaaa

SEQ ID NO: 1956442 - RNA, 19 nt, Homo sapiens
  misc_RNA (1)...(19): siRNA sense strand
ucccugggcucuuuguuga

SEQ ID NO: 1956443 - RNA, 19 nt, Homo sapiens
  misc_RNA (1)...(19): siRNA sense strand
gacaacacugcaaggauuu

SEQ ID NO: 1956444 - RNA, 19 nt, Homo sapiens
  misc_RNA (1)...(19): siRNA sense strand
uaaggagagaucaaaggua

SEQ ID NO: 1956445 - RNA, 19 nt, Homo sapiens
  misc_RNA (1)...(19): siRNA sense strand
aaauacugcuuucucaagu

SEQ ID NO: 1956446 - RNA, 19 nt, Homo sapiens
  misc_RNA (1)...(19): siRNA sense strand
guggcuaaacuggcaauua

SEQ ID NO: 1956447 - RNA, 19 nt, Homo sapiens
  misc_RNA (1)...(19): siRNA sense strand
gcuuucugcuguggccuua

SEQ ID NO: 1956448 - RNA, 19 nt, Homo sapiens
  misc_RNA (1)...(19): siRNA sense strand
ccgcgucaaucuucucugu

SEQ ID NO: 1956449 - RNA, 19 nt, Homo sapiens
  misc_RNA (1)...(19): siRNA sense strand
aaucuucucuguggcuuau

SEQ ID NO: 1956450 - RNA, 19 nt, Homo sapiens
  misc_RNA (1)...(19): siRNA sense strand
ccuccuggcuauccuuugu

SEQ ID NO: 1956451 - RNA, 19 nt, Homo sapiens
  misc_RNA (1)...(19): siRNA sense strand
ucugaaauaggauccagua

SEQ ID NO: 1956452 - RNA, 19 nt, Homo sapiens
  misc_RNA (1)...(19): siRNA sense strand
ggccuuaguuuauguaacc

SEQ ID NO: 1956453 - RNA, 19 nt, Homo sapiens
  misc_RNA (1)...(19): siRNA sense strand
caacugcuaaggagagauc

SEQ ID NO: 1956454 - RNA, 19 nt, Homo sapiens
  misc_RNA (1)...(19): siRNA sense strand
gaggaccgaacucucauuc

SEQ ID NO: 1956455 - RNA, 19 nt, Homo sapiens
  misc_RNA (1)...(19): siRNA sense strand
gugcauaauaccuuggauu

SEQ ID NO: 1956456 - RNA, 19 nt, Homo sapiens
  misc_RNA (1)...(19): siRNA sense strand
agagaucaaagguagcuaa

SEQ ID NO: 1956457 - RNA, 19 nt, Homo sapiens
  misc_RNA (1)...(19): siRNA sense strand
ucuucucuguggcuuauuu

SEQ ID NO: 1956458 - RNA, 19 nt, Homo sapiens
  misc_RNA (1)...(19): siRNA sense strand
uguucacgcugguggcuaa

SEQ ID NO: 1956459 - RNA, 19 nt, Homo sapiens
  misc_RNA (1)...(19): siRNA sense strand
gcucuuuguugaaguugag

SEQ ID NO: 1956460 - RNA, 19 nt, Homo sapiens
  misc_RNA (1)...(19): siRNA sense strand
cccaucucaucuuaccuua

SEQ ID NO: 1956461 - RNA, 19 nt, Homo sapiens
  misc_RNA (1)...(19): siRNA sense strand
cugguuugcugcccuaugu

SEQ ID NO: 1956462 - RNA, 19 nt, Homo sapiens
  misc_RNA (1)...(19): siRNA sense strand
aaacuggcaauuacacugu

SEQ ID NO: 1956463 - RNA, 19 nt, Homo sapiens
  misc_RNA (1)...(19): siRNA sense strand
uguaaccagcacacaauaa

SEQ ID NO: 1956464 - RNA, 19 nt, Homo sapiens
  misc_RNA (1)...(19): siRNA sense strand
uauguaaccagcacacaau

SEQ ID NO: 1956465 - RNA, 19 nt, Homo sapiens
  misc_RNA (1)...(19): siRNA sense strand
aaagguagcuaaaauuggu

SEQ ID NO: 1956466 - RNA, 19 nt, Homo sapiens
  misc_RNA (1)...(19): siRNA sense strand
cgaacucucauucaacauc

SEQ ID NO: 1956467 - RNA, 19 nt, Homo sapiens
  misc_RNA (1)...(19): siRNA sense strand
ggauccaguaugucugaaa

SEQ ID NO: 1956468 - RNA, 19 nt, Homo sapiens
  misc_RNA (1)...(19): siRNA sense strand
gggcugcuuauggcucuua

SEQ ID NO: 1956469 - RNA, 19 nt, Homo sapiens
  misc_RNA (1)...(19): siRNA sense strand
uaggauccaguaugucuga

SEQ ID NO: 1956470 - RNA, 19 nt, Homo sapiens
  misc_RNA (1)...(19): siRNA sense strand
ccagacaacacugcaagga

SEQ ID NO: 1956471 - RNA, 19 nt, Homo sapiens
  misc_RNA (1)...(19): siRNA sense strand
gcuaaggagagaucaaagg

SEQ ID NO: 1956472 - RNA, 19 nt, Homo sapiens
  misc_RNA (1)...(19): siRNA sense strand
uuauggcucuuacuguaca

SEQ ID NO: 1956473 - RNA, 19 nt, Homo sapiens
  misc_RNA (1)...(19): siRNA sense strand
cugcuguggccuuaguuua

SEQ ID NO: 1956474 - RNA, 19 nt, Homo sapiens
  misc_RNA (1)...(19): siRNA sense strand
ucaaagguagcuaaaauug

SEQ ID NO: 1956475 - RNA, 19 nt, Homo sapiens
  misc_RNA (1)...(19): siRNA sense strand
ggagagaucaaagguagcu

SEQ ID NO: 1956476 - RNA, 19 nt, Homo sapiens
  misc_RNA (1)...(19): siRNA sense strand
gugcaaauauauguuuagc

SEQ ID NO: 1956477 - RNA, 19 nt, Homo sapiens
  misc_RNA (1)...(19): siRNA sense strand
accgaacucucauucaaca

SEQ ID NO: 1956478 - RNA, 19 nt, Homo sapiens
  misc_RNA (1)...(19): siRNA sense strand
uagcuaaaauuggugcuuu

SEQ ID NO: 1956479 - RNA, 19 nt, Homo sapiens
  misc_RNA (1)...(19): siRNA sense strand
cuaaggagagaucaaaggu

SEQ ID NO: 1956480 - RNA, 19 nt, Homo sapiens
  misc_RNA (1)...(19): siRNA sense strand
ucacgcugguggcuaaacu

SEQ ID NO: 1956481 - RNA, 19 nt, Homo sapiens
  misc_RNA (1)...(19): siRNA sense strand
auaauaccuuggauucucu

SEQ ID NO: 1956482 - RNA, 19 nt, Homo sapiens
  misc_RNA (1)...(19): siRNA sense strand
gcauaauaccuuggauucu

SEQ ID NO: 1956483 - RNA, 19 nt, Homo sapiens
  misc_RNA (1)...(19): siRNA sense strand
cagcacacaauaauacucu

SEQ ID NO: 1956484 - RNA, 19 nt, Homo sapiens
  misc_RNA (1)...(19): siRNA sense strand
gaaagaagcucucauugaa

SEQ ID NO: 1956485 - RNA, 19 nt, Homo sapiens
  misc_RNA (1)...(19): siRNA sense strand
gaauauaacugucagaugu

SEQ ID NO: 1956486 - RNA, 19 nt, Homo sapiens
  misc_RNA (1)...(19): siRNA sense strand
guacaaagaucaagagaga

SEQ ID NO: 1956487 - RNA, 19 nt, Homo sapiens
  misc_RNA (1)...(19): siRNA sense strand
gaaggaagauaacccugua

SEQ ID NO: 1956488 - RNA, 19 nt, Homo sapiens
  misc_RNA (1)...(19): siRNA sense strand
gaagaacccaucaaguuua

SEQ ID NO: 1956489 - RNA, 19 nt, Homo sapiens
  misc_RNA (1)...(19): siRNA sense strand
uaagacagauuccuugaaa

SEQ ID NO: 1956490 - RNA, 19 nt, Homo sapiens
  misc_RNA (1)...(19): siRNA sense strand
ggaauaugcugaaggaaau

SEQ ID NO: 1956491 - RNA, 19 nt, Homo sapiens
  misc_RNA (1)...(19): siRNA sense strand
gaagaugccuuuguuuaug

SEQ ID NO: 1956492 - RNA, 19 nt, Homo sapiens
  misc_RNA (1)...(19): siRNA sense strand
ccaaggaacuaacaagaaa

SEQ ID NO: 1956493 - RNA, 19 nt, Homo sapiens
  misc_RNA (1)...(19): siRNA sense strand
ggaagaacccaucaaguuu

SEQ ID NO: 1956494 - RNA, 19 nt, Homo sapiens
  misc_RNA (1)...(19): siRNA sense strand
caaucagucuacagaauua

SEQ ID NO: 1956495 - RNA, 19 nt, Homo sapiens
  misc_RNA (1)...(19): siRNA sense strand
gcaggaauaugcugaagga

SEQ ID NO: 1956496 - RNA, 19 nt, Homo sapiens
  misc_RNA (1)...(19): siRNA sense strand
gcuaaacaguugaauaugu

SEQ ID NO: 1956497 - RNA, 19 nt, Homo sapiens
  misc_RNA (1)...(19): siRNA sense strand
caaagucaccugcguuuaa

SEQ ID NO: 1956498 - RNA, 19 nt, Homo sapiens
  misc_RNA (1)...(19): siRNA sense strand
gaagaagagcuugaauaua

SEQ ID NO: 1956499 - RNA, 19 nt, Homo sapiens
  misc_RNA (1)...(19): siRNA sense strand
gaagagacccucaaucagu

SEQ ID NO: 1956500 - RNA, 19 nt, Homo sapiens
  misc_RNA (1)...(19): siRNA sense strand
gaacagcuccagcagugua

SEQ ID NO: 1956501 - RNA, 19 nt, Homo sapiens
  misc_RNA (1)...(19): siRNA sense strand
gaaggugacucuuuguaca

SEQ ID NO: 1956502 - RNA, 19 nt, Homo sapiens
  misc_RNA (1)...(19): siRNA sense strand
cagaagaugccuuuguuua

SEQ ID NO: 1956503 - RNA, 19 nt, Homo sapiens
  misc_RNA (1)...(19): siRNA sense strand
agaaggaucucaaggaaug

SEQ ID NO: 1956504 - RNA, 19 nt, Homo sapiens
  misc_RNA (1)...(19): siRNA sense strand
ccagaaggaucucaaggaa

SEQ ID NO: 1956505 - RNA, 19 nt, Homo sapiens
  misc_RNA (1)...(19): siRNA sense strand
cagcugagcaacaacauua

SEQ ID NO: 1956506 - RNA, 19 nt, Homo sapiens
  misc_RNA (1)...(19): siRNA sense strand
agacagauuccuugaaaua

SEQ ID NO: 1956507 - RNA, 19 nt, Homo sapiens
  misc_RNA (1)...(19): siRNA sense strand
caugaaaucugaugaugau

SEQ ID NO: 1956508 - RNA, 19 nt, Homo sapiens
  misc_RNA (1)...(19): siRNA sense strand
caaauuauccuacagagau

SEQ ID NO: 1956509 - RNA, 19 nt, Homo sapiens
  misc_RNA (1)...(19): siRNA sense strand
gaagauaacccuguaccaa

SEQ ID NO: 1956510 - RNA, 19 nt, Homo sapiens
  misc_RNA (1)...(19): siRNA sense strand
ugacccagcugcuugcuuu

SEQ ID NO: 1956511 - RNA, 19 nt, Homo sapiens
  misc_RNA (1)...(19): siRNA sense strand
uugaggagcuguuaagaaa

SEQ ID NO: 1956512 - RNA, 19 nt, Homo sapiens
  misc_RNA (1)...(19): siRNA sense strand
gagaauuacuugggaaugu

SEQ ID NO: 1956513 - RNA, 19 nt, Homo sapiens
  misc_RNA (1)...(19): siRNA sense strand
uaauggaaauccuaaccua

SEQ ID NO: 1956514 - RNA, 19 nt, Homo sapiens
  misc_RNA (1)...(19): siRNA sense strand
ugaaagaagcucucauuga

SEQ ID NO: 1956515 - RNA, 19 nt, Homo sapiens
  misc_RNA (1)...(19): siRNA sense strand
uugcagcucucccuuauuu

SEQ ID NO: 1956516 - RNA, 19 nt, Homo sapiens
  misc_RNA (1)...(19): siRNA sense strand
gaaaauucaucuccacaaa

SEQ ID NO: 1956517 - RNA, 19 nt, Homo sapiens
  misc_RNA (1)...(19): siRNA sense strand
gcaacaacauuagaagugu

SEQ ID NO: 1956518 - RNA, 19 nt, Homo sapiens
  misc_RNA (1)...(19): siRNA sense strand
gaaaauggcucugcacuag

SEQ ID NO: 1956519 - RNA, 19 nt, Homo sapiens
  misc_RNA (1)...(19): siRNA sense strand
gaauugcagcucucccuua

SEQ ID NO: 1956520 - RNA, 19 nt, Homo sapiens
  misc_RNA (1)...(19): siRNA sense strand
gaagugugguccuuagaca

SEQ ID NO: 1956521 - RNA, 19 nt, Homo sapiens
  misc_RNA (1)...(19): siRNA sense strand
aaauucaucuccacaaaug

SEQ ID NO: 1956522 - RNA, 19 nt, Homo sapiens
  misc_RNA (1)...(19): siRNA sense strand
cagaagagacccucaauca

SEQ ID NO: 1956523 - RNA, 19 nt, Homo sapiens
  misc_RNA (1)...(19): siRNA sense strand
gcaaguuuauauucccaaa

SEQ ID NO: 1956524 - RNA, 19 nt, Homo sapiens
  misc_RNA (1)...(19): siRNA sense strand
cuacagagaugcuaaacag

SEQ ID NO: 1956525 - RNA, 19 nt, Homo sapiens
  misc_RNA (1)...(19): siRNA sense strand
ggagaugauuucugagauc

SEQ ID NO: 1956526 - RNA, 19 nt, Homo sapiens
  misc_RNA (1)...(19): siRNA sense strand
gaauuacuugggaauguua

SEQ ID NO: 1956527 - RNA, 19 nt, Homo sapiens
  misc_RNA (1)...(19): siRNA sense strand
caucaaguuuagaggauuu

SEQ ID NO: 1956528 - RNA, 19 nt, Homo sapiens
  misc_RNA (1)...(19): siRNA sense strand
gaaaaccaauacauucgua

SEQ ID NO: 1956529 - RNA, 19 nt, Homo sapiens
  misc_RNA (1)...(19): siRNA sense strand
ccucuucccuugagcagua

SEQ ID NO: 1956530 - RNA, 19 nt, Homo sapiens
  misc_RNA (1)...(19): siRNA sense strand
gcaaggcauacauuuagua

SEQ ID NO: 1956531 - RNA, 19 nt, Homo sapiens
  misc_RNA (1)...(19): siRNA sense strand
gcagaagaguuguguugca

SEQ ID NO: 1956532 - RNA, 19 nt, Homo sapiens
  misc_RNA (1)...(19): siRNA sense strand
gaaauccuaaccuagauga

SEQ ID NO: 1956533 - RNA, 19 nt, Homo sapiens
  misc_RNA (1)...(19): siRNA sense strand
agacaagaaugccgaccua

SEQ ID NO: 1956534 - RNA, 19 nt, Homo sapiens
  misc_RNA (1)...(19): siRNA sense strand
cagagaugcuaaacaguug

SEQ ID NO: 1956535 - RNA, 19 nt, Homo sapiens
  misc_RNA (1)...(19): siRNA sense strand
auacgaaggugacucuuug

SEQ ID NO: 1956536 - RNA, 19 nt, Homo sapiens
  misc_RNA (1)...(19): siRNA sense strand
aaacaggauuccagaagga

SEQ ID NO: 1956537 - RNA, 19 nt, Homo sapiens
  misc_RNA (1)...(19): siRNA sense strand
gcugaaagaagcucucauu

SEQ ID NO: 1956538 - RNA, 19 nt, Homo sapiens
  misc_RNA (1)...(19): siRNA sense strand
ccaauacauucguagaguu

SEQ ID NO: 1956539 - RNA, 19 nt, Homo sapiens
  misc_RNA (1)...(19): siRNA sense strand
caagaaugccgaccuacaa

SEQ ID NO: 1956540 - RNA, 19 nt, Homo sapiens
  misc_RNA (1)...(19): siRNA sense strand
gaaacagugcaaagacaaa

SEQ ID NO: 1956541 - RNA, 19 nt, Homo sapiens
  misc_RNA (1)...(19): siRNA sense strand
agaagaagagcuugaauau

SEQ ID NO: 1956542 - RNA, 19 nt, Homo sapiens
  misc_RNA (1)...(19): siRNA sense strand
gguggucacuuucaaaucu

SEQ ID NO: 1956543 - RNA, 19 nt, Homo sapiens
  misc_RNA (1)...(19): siRNA sense strand
gcccuguuguugcuaauuu

SEQ ID NO: 1956544 - RNA, 19 nt, Homo sapiens
  misc_RNA (1)...(19): siRNA sense strand
uagaccagcugaaagaaga

SEQ ID NO: 1956545 - RNA, 19 nt, Homo sapiens
  misc_RNA (1)...(19): siRNA sense strand
gaugaugauuggagugugu

SEQ ID NO: 1956546 - RNA, 19 nt, Homo sapiens
  misc_RNA (1)...(19): siRNA sense strand
gaaaugugaaguccuggaa

SEQ ID NO: 1956547 - RNA, 19 nt, Homo sapiens
  misc_RNA (1)...(19): siRNA sense strand
uuaaacugguggucacuuu

SEQ ID NO: 1956548 - RNA, 19 nt, Homo sapiens
  misc_RNA (1)...(19): siRNA sense strand
aaagguauguggauucauc

SEQ ID NO: 1956549 - RNA, 19 nt, Homo sapiens
  misc_RNA (1)...(19): siRNA sense strand
uaaccuagaugagacuguu

SEQ ID NO: 1956550 - RNA, 19 nt, Homo sapiens
  misc_RNA (1)...(19): siRNA sense strand
agaauaacgagcaaguuua

SEQ ID NO: 1956551 - RNA, 19 nt, Homo sapiens
  misc_RNA (1)...(19): siRNA sense strand
cgcuauagcuucaacaaug

SEQ ID NO: 1956552 - RNA, 19 nt, Homo sapiens
  misc_RNA (1)...(19): siRNA sense strand
gaugcuaaacaguugaaua

SEQ ID NO: 1956553 - RNA, 19 nt, Homo sapiens
  misc_RNA (1)...(19): siRNA sense strand
ugacaacccaggaaacaaa

SEQ ID NO: 1956554 - RNA, 19 nt, Homo sapiens
  misc_RNA (1)...(19): siRNA sense strand
cagaauugguccacuuuag

SEQ ID NO: 1956555 - RNA, 19 nt, Homo sapiens
  misc_RNA (1)...(19): siRNA sense strand
gacccaagaugcaacaaag

SEQ ID NO: 1956556 - RNA, 19 nt, Homo sapiens
  misc_RNA (1)...(19): siRNA sense strand
gacaaagucaccugcguuu

SEQ ID NO: 1956557 - RNA, 19 nt, Homo sapiens
  misc_RNA (1)...(19): siRNA sense strand
aagaagaagagcuugaaua

SEQ ID NO: 1956558 - RNA, 19 nt, Homo sapiens
  misc_RNA (1)...(19): siRNA sense strand
gaucaagagagaauuacuu

SEQ ID NO: 1956559 - RNA, 19 nt, Homo sapiens
  misc_RNA (1)...(19): siRNA sense strand
gaaacucgggccuucauuc

SEQ ID NO: 1956560 - RNA, 19 nt, Homo sapiens
  misc_RNA (1)...(19): siRNA sense strand
gaaugccgaccuacaaaga

SEQ ID NO: 1956561 - RNA, 19 nt, Homo sapiens
  misc_RNA (1)...(19): siRNA sense strand
gaaagaauguggggaugaa

SEQ ID NO: 1956562 - RNA, 19 nt, Homo sapiens
  misc_RNA (1)...(19): siRNA sense strand
gcugaaagaagacauggaa

SEQ ID NO: 1956563 - RNA, 19 nt, Homo sapiens
  misc_RNA (1)...(19): siRNA sense strand
ccaucaaccugcaccaaga

SEQ ID NO: 1956564 - RNA, 19 nt, Homo sapiens
  misc_RNA (1)...(19): siRNA sense strand
gcacuagagucagaauugg

SEQ ID NO: 1956565 - RNA, 19 nt, Homo sapiens
  misc_RNA (1)...(19): siRNA sense strand
gagcaguagugcaccuguu

SEQ ID NO: 1956566 - RNA, 19 nt, Homo sapiens
  misc_RNA (1)...(19): siRNA sense strand
aagaauaacgagcaaguuu

SEQ ID NO: 1956567 - RNA, 19 nt, Homo sapiens
  misc_RNA (1)...(19): siRNA sense strand
cagaagaguuguguugcaa

SEQ ID NO: 1956568 - RNA, 19 nt, Homo sapiens
  misc_RNA (1)...(19): siRNA sense strand
ccacuuccuuuguccauuc

SEQ ID NO: 1956569 - RNA, 19 nt, Homo sapiens
  misc_RNA (1)...(19): siRNA sense strand
caccugcguuuaacuuuga

SEQ ID NO: 1956570 - RNA, 19 nt, Homo sapiens
  misc_RNA (1)...(19): siRNA sense strand
ucaaaaggcugaccugaau

SEQ ID NO: 1956571 - RNA, 19 nt, Homo sapiens
  misc_RNA (1)...(19): siRNA sense strand
gaagaauaacgagcaaguu

SEQ ID NO: 1956572 - RNA, 19 nt, Homo sapiens
  misc_RNA (1)...(19): siRNA sense strand
uacaaucgcuauuugcaau

SEQ ID NO: 1956573 - RNA, 19 nt, Homo sapiens
  misc_RNA (1)...(19): siRNA sense strand
ccacaaaugcauguuggua

SEQ ID NO: 1956574 - RNA, 19 nt, Homo sapiens
  misc_RNA (1)...(19): siRNA sense strand
cgaucuauguguaucagaa

SEQ ID NO: 1956575 - RNA, 19 nt, Homo sapiens
  misc_RNA (1)...(19): siRNA sense strand
ucaaucagucuacagaauu

SEQ ID NO: 1956576 - RNA, 19 nt, Homo sapiens
  misc_RNA (1)...(19): siRNA sense strand
gguugcuggugaagaauaa

SEQ ID NO: 1956577 - RNA, 19 nt, Homo sapiens
  misc_RNA (1)...(19): siRNA sense strand
gaaacgcuauagcuucaac

SEQ ID NO: 1956578 - RNA, 19 nt, Homo sapiens
  misc_RNA (1)...(19): siRNA sense strand
ccaggguccuuaucauuca

SEQ ID NO: 1956579 - RNA, 19 nt, Homo sapiens
  misc_RNA (1)...(19): siRNA sense strand
aggaagaacccaucaaguu

SEQ ID NO: 1956580 - RNA, 19 nt, Homo sapiens
  misc_RNA (1)...(19): siRNA sense strand
aauaccaacuguaauggaa

SEQ ID NO: 1956581 - RNA, 19 nt, Homo sapiens
  misc_RNA (1)...(19): siRNA sense strand
guugcaaggcauacauuua

SEQ ID NO: 1956582 - RNA, 19 nt, Homo sapiens
  misc_RNA (1)...(19): siRNA sense strand
gagagacuguggagaugca

SEQ ID NO: 1956583 - RNA, 19 nt, Homo sapiens
  misc_RNA (1)...(19): siRNA sense strand
ccagagagacuguggagau

SEQ ID NO: 1956584 - RNA, 19 nt, Homo sapiens
  misc_RNA (1)...(19): siRNA sense strand
gcaaugacuuggaauuaug

SEQ ID NO: 1956585 - RNA, 19 nt, Homo sapiens
  misc_RNA (1)...(19): siRNA sense strand
gaaggaggcugaccaagag

SEQ ID NO: 1956586 - RNA, 19 nt, Homo sapiens
  misc_RNA (1)...(19): siRNA sense strand
ggccaugccuccaggauug

SEQ ID NO: 1956587 - RNA, 19 nt, Homo sapiens
  misc_RNA (1)...(19): siRNA sense strand
caccaagacucucuauuca

SEQ ID NO: 1956588 - RNA, 19 nt, Homo sapiens
  misc_RNA (1)...(19): siRNA sense strand
gggaaaagauuaaggaaau

SEQ ID NO: 1956589 - RNA, 19 nt, Homo sapiens
  misc_RNA (1)...(19): siRNA sense strand
gcucugcaaugacuuggaa

SEQ ID NO: 1956590 - RNA, 19 nt, Homo sapiens
  misc_RNA (1)...(19): siRNA sense strand
ccacagcucugcaaugacu

SEQ ID NO: 1956591 - RNA, 19 nt, Homo sapiens
  misc_RNA (1)...(19): siRNA sense strand
ccaagacucucuauucaac

SEQ ID NO: 1956592 - RNA, 19 nt, Homo sapiens
  misc_RNA (1)...(19): siRNA sense strand
gcaaggagcgcucagaaaa

SEQ ID NO: 1956593 - RNA, 19 nt, Homo sapiens
  misc_RNA (1)...(19): siRNA sense strand
gucccgagcuguucaaauc

SEQ ID NO: 1956594 - RNA, 19 nt, Homo sapiens
  misc_RNA (1)...(19): siRNA sense strand
ucaccaagacucucuauuc

SEQ ID NO: 1956595 - RNA, 19 nt, Homo sapiens
  misc_RNA (1)...(19): siRNA sense strand
ccauggcccuccuggauga

SEQ ID NO: 1956596 - RNA, 19 nt, Homo sapiens
  misc_RNA (1)...(19): siRNA sense strand
ggagacagcaggcacuuag

SEQ ID NO: 1956597 - RNA, 19 nt, Homo sapiens
  misc_RNA (1)...(19): siRNA sense strand
ggacuucgaucaguugacu

SEQ ID NO: 1956598 - RNA, 19 nt, Homo sapiens
  misc_RNA (1)...(19): siRNA sense strand
agaaggugcuggaaaugga

SEQ ID NO: 1956599 - RNA, 19 nt, Homo sapiens
  misc_RNA (1)...(19): siRNA sense strand
caaccuggaccucgucuug

SEQ ID NO: 1956600 - RNA, 19 nt, Homo sapiens
  misc_RNA (1)...(19): siRNA sense strand
ggagaaggaggcugaccaa

SEQ ID NO: 1956601 - RNA, 19 nt, Homo sapiens
  misc_RNA (1)...(19): siRNA sense strand
agaaggaggcugaccaaga

SEQ ID NO: 1956602 - RNA, 19 nt, Homo sapiens
  misc_RNA (1)...(19): siRNA sense strand
ggcgagcacuuccuguuca

SEQ ID NO: 1956603 - RNA, 19 nt, Homo sapiens
  misc_RNA (1)...(19): siRNA sense strand
ucauggagcagccuaagaa

SEQ ID NO: 1956604 - RNA, 19 nt, Homo sapiens
  misc_RNA (1)...(19): siRNA sense strand
cgacauugccacugaguuc

SEQ ID NO: 1956605 - RNA, 19 nt, Homo sapiens
  misc_RNA (1)...(19): siRNA sense strand
acccacagcucugcaauga

SEQ ID NO: 1956606 - RNA, 19 nt, Homo sapiens
  misc_RNA (1)...(19): siRNA sense strand
aggagaaggugcuggaaau

SEQ ID NO: 1956607 - RNA, 19 nt, Homo sapiens
  misc_RNA (1)...(19): siRNA sense strand
ccaggacgcccaggacuuu

SEQ ID NO: 1956608 - RNA, 19 nt, Homo sapiens
  misc_RNA (1)...(19): siRNA sense strand
gacuuggaauuaugugaug

SEQ ID NO: 1956609 - RNA, 19 nt, Homo sapiens
  misc_RNA (1)...(19): siRNA sense strand
ccuccaggauugagaccua

SEQ ID NO: 1956610 - RNA, 19 nt, Homo sapiens
  misc_RNA (1)...(19): siRNA sense strand
gagagcagcacguguuugg

SEQ ID NO: 1956611 - RNA, 19 nt, Homo sapiens
  misc_RNA (1)...(19): siRNA sense strand
ugcaaugacuuggaauuau

SEQ ID NO: 1956612 - RNA, 19 nt, Homo sapiens
  misc_RNA (1)...(19): siRNA sense strand
ugucggagcuuagccuuca

SEQ ID NO: 1956613 - RNA, 19 nt, Homo sapiens
  misc_RNA (1)...(19): siRNA sense strand
caacgcaucccuucucaac

SEQ ID NO: 1956614 - RNA, 19 nt, Homo sapiens
  misc_RNA (1)...(19): siRNA sense strand
ccagcagucugucuacuac

SEQ ID NO: 1956615 - RNA, 19 nt, Homo sapiens
  misc_RNA (1)...(19): siRNA sense strand
gagcacuuccuguucaugu

SEQ ID NO: 1956616 - RNA, 19 nt, Homo sapiens
  misc_RNA (1)...(19): siRNA sense strand
cugcaaugacuuggaauua

SEQ ID NO: 1956617 - RNA, 19 nt, Homo sapiens
  misc_RNA (1)...(19): siRNA sense strand
cagccucugucaagucuuc

SEQ ID NO: 1956618 - RNA, 19 nt, Homo sapiens
  misc_RNA (1)...(19): siRNA sense strand
ggcaaggagcgcucagaaa

SEQ ID NO: 1956619 - RNA, 19 nt, Homo sapiens
  misc_RNA (1)...(19): siRNA sense strand
ggagaaggugcuggaaaug

SEQ ID NO: 1956620 - RNA, 19 nt, Homo sapiens
  misc_RNA (1)...(19): siRNA sense strand
ggagaccgucagccagaaa

SEQ ID NO: 1956621 - RNA, 19 nt, Homo sapiens
  misc_RNA (1)...(19): siRNA sense strand
gcgagagcagcacguguuu

SEQ ID NO: 1956622 - RNA, 19 nt, Homo sapiens
  misc_RNA (1)...(19): siRNA sense strand
gcucagaaaacuugucuuu

SEQ ID NO: 1956623 - RNA, 19 nt, Homo sapiens
  misc_RNA (1)...(19): siRNA sense strand
gaccuacccugggcguguu

SEQ ID NO: 1956624 - RNA, 19 nt, Homo sapiens
  misc_RNA (1)...(19): siRNA sense strand
ucaauggucccgagcuguu

SEQ ID NO: 1956625 - RNA, 19 nt, Homo sapiens
  misc_RNA (1)...(19): siRNA sense strand
cccaggacuuuguggugua

SEQ ID NO: 1956626 - RNA, 19 nt, Homo sapiens
  misc_RNA (1)...(19): siRNA sense strand
gcgcaucucccagcucuuc

SEQ ID NO: 1956627 - RNA, 19 nt, Homo sapiens
  misc_RNA (1)...(19): siRNA sense strand
cugcucuccuggauaguaa

SEQ ID NO: 1956628 - RNA, 19 nt, Homo sapiens
  misc_RNA (1)...(19): siRNA sense strand
gagaaggugcuggaaaugg

SEQ ID NO: 1956629 - RNA, 19 nt, Homo sapiens
  misc_RNA (1)...(19): siRNA sense strand
ucagaaaacuugucuuugc

SEQ ID NO: 1956630 - RNA, 19 nt, Homo sapiens
  misc_RNA (1)...(19): siRNA sense strand
acccugaccucgugucuca

SEQ ID NO: 1956631 - RNA, 19 nt, Homo sapiens
  misc_RNA (1)...(19): siRNA sense strand
ccaggacuuugugguguau

SEQ ID NO: 1956632 - RNA, 19 nt, Homo sapiens
  misc_RNA (1)...(19): siRNA sense strand
cagcgcagccucugucaag

SEQ ID NO: 1956633 - RNA, 19 nt, Homo sapiens
  misc_RNA (1)...(19): siRNA sense strand
caggagaaggugcuggaaa

SEQ ID NO: 1956634 - RNA, 19 nt, Homo sapiens
  misc_RNA (1)...(19): siRNA sense strand
acgcaucccuucucaacuc

SEQ ID NO: 1956635 - RNA, 19 nt, Homo sapiens
  misc_RNA (1)...(19): siRNA sense strand
gugggccuguggaucaauu

SEQ ID NO: 1956636 - RNA, 19 nt, Homo sapiens
  misc_RNA (1)...(19): siRNA sense strand
gggcgagcacuuccuguuc

SEQ ID NO: 1956637 - RNA, 19 nt, Homo sapiens
  misc_RNA (1)...(19): siRNA sense strand
ggacacaggggacaucuuc

SEQ ID NO: 1956638 - RNA, 19 nt, Homo sapiens
  misc_RNA (1)...(19): siRNA sense strand
ugggcgacauugccacuga

SEQ ID NO: 1956639 - RNA, 19 nt, Homo sapiens
  misc_RNA (1)...(19): siRNA sense strand
ggauaguaacccuuucaca

SEQ ID NO: 1956640 - RNA, 19 nt, Homo sapiens
  misc_RNA (1)...(19): siRNA sense strand
ucuacuaccucaccaagac

SEQ ID NO: 1956641 - RNA, 19 nt, Homo sapiens
  misc_RNA (1)...(19): siRNA sense strand
gcacuuccuguucauguac

SEQ ID NO: 1956642 - RNA, 19 nt, Homo sapiens
  misc_RNA (1)...(19): siRNA sense strand
cugugaaccugcucugugu

SEQ ID NO: 1956643 - RNA, 19 nt, Homo sapiens
  misc_RNA (1)...(19): siRNA sense strand
gcgagcacuuccuguucau

SEQ ID NO: 1956644 - RNA, 19 nt, Homo sapiens
  misc_RNA (1)...(19): siRNA sense strand
gggccaugccuccaggauu

SEQ ID NO: 1956645 - RNA, 19 nt, Homo sapiens
  misc_RNA (1)...(19): siRNA sense strand
ugccugcucuccuggauag

SEQ ID NO: 1956646 - RNA, 19 nt, Homo sapiens
  misc_RNA (1)...(19): siRNA sense strand
cguggacgccuucgcuuug

SEQ ID NO: 1956647 - RNA, 19 nt, Homo sapiens
  misc_RNA (1)...(19): siRNA sense strand
ugacuuggaauuaugugau

SEQ ID NO: 1956648 - RNA, 19 nt, Homo sapiens
  misc_RNA (1)...(19): siRNA sense strand
caaugacuuggaauuaugu

SEQ ID NO: 1956649 - RNA, 19 nt, Homo sapiens
  misc_RNA (1)...(19): siRNA sense strand
gcaaaggccugucguagga

SEQ ID NO: 1956650 - RNA, 19 nt, Homo sapiens
  misc_RNA (1)...(19): siRNA sense strand
gaugacagguggaaauuug

SEQ ID NO: 1956651 - RNA, 19 nt, Homo sapiens
  misc_RNA (1)...(19): siRNA sense strand
ggagucaacuuuccaccaa

SEQ ID NO: 1956652 - RNA, 19 nt, Homo sapiens
  misc_RNA (1)...(19): siRNA sense strand
uaagagagacgcuggagua

SEQ ID NO: 1956653 - RNA, 19 nt, Homo sapiens
  misc_RNA (1)...(19): siRNA sense strand
gaacugagcuccccuaggu

SEQ ID NO: 1956654 - RNA, 19 nt, Homo sapiens
  misc_RNA (1)...(19): siRNA sense strand
gccauugccucuuuuauua

SEQ ID NO: 1956655 - RNA, 19 nt, Homo sapiens
  misc_RNA (1)...(19): siRNA sense strand
ggagaaggagcaacuagaa

SEQ ID NO: 1956656 - RNA, 19 nt, Homo sapiens
  misc_RNA (1)...(19): siRNA sense strand
gcccagaaauggcucagaa

SEQ ID NO: 1956657 - RNA, 19 nt, Homo sapiens
  misc_RNA (1)...(19): siRNA sense strand
cagauacgcugcugaccaa

SEQ ID NO: 1956658 - RNA, 19 nt, Homo sapiens
  misc_RNA (1)...(19): siRNA sense strand
agaagcagcucuggaguug

SEQ ID NO: 1956659 - RNA, 19 nt, Homo sapiens
  misc_RNA (1)...(19): siRNA sense strand
gagagacgcuggaguaccu

SEQ ID NO: 1956660 - RNA, 19 nt, Homo sapiens
  misc_RNA (1)...(19): siRNA sense strand
ccagaguccuuggaacuga

SEQ ID NO: 1956661 - RNA, 19 nt, Homo sapiens
  misc_RNA (1)...(19): siRNA sense strand
gaacaccaccccuuacuug

SEQ ID NO: 1956662 - RNA, 19 nt, Homo sapiens
  misc_RNA (1)...(19): siRNA sense strand
caggagggaucccaaccuu

SEQ ID NO: 1956663 - RNA, 19 nt, Homo sapiens
  misc_RNA (1)...(19): siRNA sense strand
ggagcaaaggccugucgua

SEQ ID NO: 1956664 - RNA, 19 nt, Homo sapiens
  misc_RNA (1)...(19): siRNA sense strand
ggcaugaggaccuacguuu

SEQ ID NO: 1956665 - RNA, 19 nt, Homo sapiens
  misc_RNA (1)...(19): siRNA sense strand
gcgcagaaaccaggaaugu

SEQ ID NO: 1956666 - RNA, 19 nt, Homo sapiens
  misc_RNA (1)...(19): siRNA sense strand
auccgaggcuggcuucaua

SEQ ID NO: 1956667 - RNA, 19 nt, Homo sapiens
  misc_RNA (1)...(19): siRNA sense strand
gagucaacuuuccaccaaa

SEQ ID NO: 1956668 - RNA, 19 nt, Homo sapiens
  misc_RNA (1)...(19): siRNA sense strand
uuuggccgcugacaccuua

SEQ ID NO: 1956669 - RNA, 19 nt, Homo sapiens
  misc_RNA (1)...(19): siRNA sense strand
gagcugggcaccuuaagag

SEQ ID NO: 1956670 - RNA, 19 nt, Homo sapiens
  misc_RNA (1)...(19): siRNA sense strand
auacgcugcugaccaaguu

SEQ ID NO: 1956671 - RNA, 19 nt, Homo sapiens
  misc_RNA (1)...(19): siRNA sense strand
gcaggagcugggcaccuua

SEQ ID NO: 1956672 - RNA, 19 nt, Homo sapiens
  misc_RNA (1)...(19): siRNA sense strand
aggaggagauagaccagaa

SEQ ID NO: 1956673 - RNA, 19 nt, Homo sapiens
  misc_RNA (1)...(19): siRNA sense strand
gaaggagcaacuagaagca

SEQ ID NO: 1956674 - RNA, 19 nt, Homo sapiens
  misc_RNA (1)...(19): siRNA sense strand
ggagcugggcaccuuaaga

SEQ ID NO: 1956675 - RNA, 19 nt, Homo sapiens
  misc_RNA (1)...(19): siRNA sense strand
cuccagaggucgugguaga

SEQ ID NO: 1956676 - RNA, 19 nt, Homo sapiens
  misc_RNA (1)...(19): siRNA sense strand
gcaguggcacagaaugaug

SEQ ID NO: 1956677 - RNA, 19 nt, Homo sapiens
  misc_RNA (1)...(19): siRNA sense strand
gagaaggagcaacuagaag

SEQ ID NO: 1956678 - RNA, 19 nt, Homo sapiens
  misc_RNA (1)...(19): siRNA sense strand
ggaggagaaggagcaacua

SEQ ID NO: 1956679 - RNA, 19 nt, Homo sapiens
  misc_RNA (1)...(19): siRNA sense strand
gccacccucugucacuuga

SEQ ID NO: 1956680 - RNA, 19 nt, Homo sapiens
  misc_RNA (1)...(19): siRNA sense strand
gaggagaaggagcaacuag

SEQ ID NO: 1956681 - RNA, 19 nt, Homo sapiens
  misc_RNA (1)...(19): siRNA sense strand
cgccagcccucacuuaggu

SEQ ID NO: 1956682 - RNA, 19 nt, Homo sapiens
  misc_RNA (1)...(19): siRNA sense strand
cugggcaccuuaagagaga

SEQ ID NO: 1956683 - RNA, 19 nt, Homo sapiens
  misc_RNA (1)...(19): siRNA sense strand
uagaagcagcucuggaguu

SEQ ID NO: 1956684 - RNA, 19 nt, Homo sapiens
  misc_RNA (1)...(19): siRNA sense strand
ccgcugacaccuuagaaga

SEQ ID NO: 1956685 - RNA, 19 nt, Homo sapiens
  misc_RNA (1)...(19): siRNA sense strand
uguccgaccuccucuggau

SEQ ID NO: 1956686 - RNA, 19 nt, Homo sapiens
  misc_RNA (1)...(19): siRNA sense strand
caaagcuuggagacagaua

SEQ ID NO: 1956687 - RNA, 19 nt, Homo sapiens
  misc_RNA (1)...(19): siRNA sense strand
aagcagcucuggaguugac

SEQ ID NO: 1956688 - RNA, 19 nt, Homo sapiens
  misc_RNA (1)...(19): siRNA sense strand
cuccggccauugccucuuu

SEQ ID NO: 1956689 - RNA, 19 nt, Homo sapiens
  misc_RNA (1)...(19): siRNA sense strand
ccucgccagcccucacuua

SEQ ID NO: 1956690 - RNA, 19 nt, Homo sapiens
  misc_RNA (1)...(19): siRNA sense strand
gggccacccucugucacuu

SEQ ID NO: 1956691 - RNA, 19 nt, Homo sapiens
  misc_RNA (1)...(19): siRNA sense strand
agaagcaggaggagaagga

SEQ ID NO: 1956692 - RNA, 19 nt, Homo sapiens
  misc_RNA (1)...(19): siRNA sense strand
cuacaauauuagaccagau

SEQ ID NO: 1956693 - RNA, 19 nt, Homo sapiens
  misc_RNA (1)...(19): siRNA sense strand
cuccccagcuacaauauua

SEQ ID NO: 1956694 - RNA, 19 nt, Homo sapiens
  misc_RNA (1)...(19): siRNA sense strand
caggagcugggcaccuuaa

SEQ ID NO: 1956695 - RNA, 19 nt, Homo sapiens
  misc_RNA (1)...(19): siRNA sense strand
aaacaagacuggagagaua

SEQ ID NO: 1956696 - RNA, 19 nt, Homo sapiens
  misc_RNA (1)...(19): siRNA sense strand
gaacaagcaucccaacaug

SEQ ID NO: 1956697 - RNA, 19 nt, Homo sapiens
  misc_RNA (1)...(19): siRNA sense strand
caacaaaucccucaacuug

SEQ ID NO: 1956698 - RNA, 19 nt, Homo sapiens
  misc_RNA (1)...(19): siRNA sense strand
guacgugccugauguguuu

SEQ ID NO: 1956699 - RNA, 19 nt, Homo sapiens
  misc_RNA (1)...(19): siRNA sense strand
gaacaucagcugcaagauu

SEQ ID NO: 1956700 - RNA, 19 nt, Homo sapiens
  misc_RNA (1)...(19): siRNA sense strand
aauaauggcuucucgguuu

SEQ ID NO: 1956701 - RNA, 19 nt, Homo sapiens
  misc_RNA (1)...(19): siRNA sense strand
aagguuggcuggauauuua

SEQ ID NO: 1956702 - RNA, 19 nt, Homo sapiens
  misc_RNA (1)...(19): siRNA sense strand
aacaucagcugcaagauua

SEQ ID NO: 1956703 - RNA, 19 nt, Homo sapiens
  misc_RNA (1)...(19): siRNA sense strand
ugaaauugcugccaaacuu

SEQ ID NO: 1956704 - RNA, 19 nt, Homo sapiens
  misc_RNA (1)...(19): siRNA sense strand
ggacaccuauuuccuaagu

SEQ ID NO: 1956705 - RNA, 19 nt, Homo sapiens
  misc_RNA (1)...(19): siRNA sense strand
gcaggagacuuccagaaca

SEQ ID NO: 1956706 - RNA, 19 nt, Homo sapiens
  misc_RNA (1)...(19): siRNA sense strand
agaaacagcagcaacauuu

SEQ ID NO: 1956707 - RNA, 19 nt, Homo sapiens
  misc_RNA (1)...(19): siRNA sense strand
gacaauaucauguuugaga

SEQ ID NO: 1956708 - RNA, 19 nt, Homo sapiens
  misc_RNA (1)...(19): siRNA sense strand
aggaugagauugaucagua

SEQ ID NO: 1956709 - RNA, 19 nt, Homo sapiens
  misc_RNA (1)...(19): siRNA sense strand
ugaaguggcugcgauuuau

SEQ ID NO: 1956710 - RNA, 19 nt, Homo sapiens
  misc_RNA (1)...(19): siRNA sense strand
aaacaggacgggaagauuu

SEQ ID NO: 1956711 - RNA, 19 nt, Homo sapiens
  misc_RNA (1)...(19): siRNA sense strand
cgaauggcaucuguacuaa

SEQ ID NO: 1956712 - RNA, 19 nt, Homo sapiens
  misc_RNA (1)...(19): siRNA sense strand
gcggaagguuggcuggaua

SEQ ID NO: 1956713 - RNA, 19 nt, Homo sapiens
  misc_RNA (1)...(19): siRNA sense strand
uggaguaucucaucauaga

SEQ ID NO: 1956714 - RNA, 19 nt, Homo sapiens
  misc_RNA (1)...(19): siRNA sense strand
gcugggcccucaucugaaa

SEQ ID NO: 1956715 - RNA, 19 nt, Homo sapiens
  misc_RNA (1)...(19): siRNA sense strand
gaagguuggcuggauauuu

SEQ ID NO: 1956716 - RNA, 19 nt, Homo sapiens
  misc_RNA (1)...(19): siRNA sense strand
gaucacagcaacaaagaga

SEQ ID NO: 1956717 - RNA, 19 nt, Homo sapiens
  misc_RNA (1)...(19): siRNA sense strand
gaccucgucucagaagaua

SEQ ID NO: 1956718 - RNA, 19 nt, Homo sapiens
  misc_RNA (1)...(19): siRNA sense strand
caccgucgcugaccgcuuu

SEQ ID NO: 1956719 - RNA, 19 nt, Homo sapiens
  misc_RNA (1)...(19): siRNA sense strand
gguaccagguguccaauca

SEQ ID NO: 1956720 - RNA, 19 nt, Homo sapiens
  misc_RNA (1)...(19): siRNA sense strand
gagaacaucagcugcaaga

SEQ ID NO: 1956721 - RNA, 19 nt, Homo sapiens
  misc_RNA (1)...(19): siRNA sense strand
ggucaccaaugaaguuaug

SEQ ID NO: 1956722 - RNA, 19 nt, Homo sapiens
  misc_RNA (1)...(19): siRNA sense strand
gaaauugcugccaaacuug

SEQ ID NO: 1956723 - RNA, 19 nt, Homo sapiens
  misc_RNA (1)...(19): siRNA sense strand
ccagcaauuuggguacuua

SEQ ID NO: 1956724 - RNA, 19 nt, Homo sapiens
  misc_RNA (1)...(19): siRNA sense strand
gaaauggagacgucaguuc

SEQ ID NO: 1956725 - RNA, 19 nt, Homo sapiens
  misc_RNA (1)...(19): siRNA sense strand
ccaccuauuugucucagaa

SEQ ID NO: 1956726 - RNA, 19 nt, Homo sapiens
  misc_RNA (1)...(19): siRNA sense strand
gccgagagcaucauaauuc

SEQ ID NO: 1956727 - RNA, 19 nt, Homo sapiens
  misc_RNA (1)...(19): siRNA sense strand
aagcugaaguggucgauga

SEQ ID NO: 1956728 - RNA, 19 nt, Homo sapiens
  misc_RNA (1)...(19): siRNA sense strand
guacaggcauguggacaau

SEQ ID NO: 1956729 - RNA, 19 nt, Homo sapiens
  misc_RNA (1)...(19): siRNA sense strand
gagaaacagcagcaacauu

SEQ ID NO: 1956730 - RNA, 19 nt, Homo sapiens
  misc_RNA (1)...(19): siRNA sense strand
gaaacaagacuggagagau

SEQ ID NO: 1956731 - RNA, 19 nt, Homo sapiens
  misc_RNA (1)...(19): siRNA sense strand
ucccaggucuccaugagua

SEQ ID NO: 1956732 - RNA, 19 nt, Homo sapiens
  misc_RNA (1)...(19): siRNA sense strand
ugaaguggucgaugaaauu

SEQ ID NO: 1956733 - RNA, 19 nt, Homo sapiens
  misc_RNA (1)...(19): siRNA sense strand
ccgaauggcaucuguacua

SEQ ID NO: 1956734 - RNA, 19 nt, Homo sapiens
  misc_RNA (1)...(19): siRNA sense strand
ccaccgggcuucaaagucu

SEQ ID NO: 1956735 - RNA, 19 nt, Homo sapiens
  misc_RNA (1)...(19): siRNA sense strand
gcauggcgauuuguuguuc

SEQ ID NO: 1956736 - RNA, 19 nt, Homo sapiens
  misc_RNA (1)...(19): siRNA sense strand
acaggcauguggacaauau

SEQ ID NO: 1956737 - RNA, 19 nt, Homo sapiens
  misc_RNA (1)...(19): siRNA sense strand
caggagacuuccagaacaa

SEQ ID NO: 1956738 - RNA, 19 nt, Homo sapiens
  misc_RNA (1)...(19): siRNA sense strand
gaaguggucgaugaaauug

SEQ ID NO: 1956739 - RNA, 19 nt, Homo sapiens
  misc_RNA (1)...(19): siRNA sense strand
uggacaauaucauguuuga

SEQ ID NO: 1956740 - RNA, 19 nt, Homo sapiens
  misc_RNA (1)...(19): siRNA sense strand
gagagaaacagcagcaaca

SEQ ID NO: 1956741 - RNA, 19 nt, Homo sapiens
  misc_RNA (1)...(19): siRNA sense strand
uguggaguaucucaucaua

SEQ ID NO: 1956742 - RNA, 19 nt, Homo sapiens
  misc_RNA (1)...(19): siRNA sense strand
auaauggcuucucgguuua

SEQ ID NO: 1956743 - RNA, 19 nt, Homo sapiens
  misc_RNA (1)...(19): siRNA sense strand
cgguuuacaucaauagaaa

SEQ ID NO: 1956744 - RNA, 19 nt, Homo sapiens
  misc_RNA (1)...(19): siRNA sense strand
ccaacgugguggaggauga

SEQ ID NO: 1956745 - RNA, 19 nt, Homo sapiens
  misc_RNA (1)...(19): siRNA sense strand
gaauaccucaucuguguuc

SEQ ID NO: 1956746 - RNA, 19 nt, Homo sapiens
  misc_RNA (1)...(19): siRNA sense strand
auaaggacguagacaaguu

SEQ ID NO: 1956747 - RNA, 19 nt, Homo sapiens
  misc_RNA (1)...(19): siRNA sense strand
gcaauuuggguacuuauac

SEQ ID NO: 1956748 - RNA, 19 nt, Homo sapiens
  misc_RNA (1)...(19): siRNA sense strand
guucuuggauaccaucuca

SEQ ID NO: 1956749 - RNA, 19 nt, Homo sapiens
  misc_RNA (1)...(19): siRNA sense strand
acacaggacuuccauagcu

SEQ ID NO: 1956750 - RNA, 19 nt, Homo sapiens
  misc_RNA (1)...(19): siRNA sense strand
cgaugaaauugcugccaaa

SEQ ID NO: 1956751 - RNA, 19 nt, Homo sapiens
  misc_RNA (1)...(19): siRNA sense strand
caucauagacaucacaaca

SEQ ID NO: 1956752 - RNA, 19 nt, Homo sapiens
  misc_RNA (1)...(19): siRNA sense strand
gccauucgaugaggacuau

SEQ ID NO: 1956753 - RNA, 19 nt, Homo sapiens
  misc_RNA (1)...(19): siRNA sense strand
gcugaccgcuuucuugacu

SEQ ID NO: 1956754 - RNA, 19 nt, Homo sapiens
  misc_RNA (1)...(19): siRNA sense strand
acaccuauuuccuaaguuc

SEQ ID NO: 1956755 - RNA, 19 nt, Homo sapiens
  misc_RNA (1)...(19): siRNA sense strand
ccucaucuguguucuugga

SEQ ID NO: 1956756 - RNA, 19 nt, Homo sapiens
  misc_RNA (1)...(19): siRNA sense strand
uaaggacguagacaaguuu

SEQ ID NO: 1956757 - RNA, 19 nt, Homo sapiens
  misc_RNA (1)...(19): siRNA sense strand
acaaaucccucaacuugcu

SEQ ID NO: 1956758 - RNA, 19 nt, Homo sapiens
  misc_RNA (1)...(19): siRNA sense strand
ugucagcacugcacguuca

SEQ ID NO: 1956759 - RNA, 19 nt, Homo sapiens
  misc_RNA (1)...(19): siRNA sense strand
gaugaggacuaucuaaacc

SEQ ID NO: 1956760 - RNA, 19 nt, Homo sapiens
  misc_RNA (1)...(19): siRNA sense strand
gcaaacaggacgggaagau

SEQ ID NO: 1956761 - RNA, 19 nt, Homo sapiens
  misc_RNA (1)...(19): siRNA sense strand
aauggcaucuguacuaagu

SEQ ID NO: 1956762 - RNA, 19 nt, Homo sapiens
  misc_RNA (1)...(19): siRNA sense strand
ucaucuguguucuuggaua

SEQ ID NO: 1956763 - RNA, 19 nt, Homo sapiens
  misc_RNA (1)...(19): siRNA sense strand
ucauagacaucacaacaac

SEQ ID NO: 1956764 - RNA, 19 nt, Homo sapiens
  misc_RNA (1)...(19): siRNA sense strand
ccaaggagucuagcaguga

SEQ ID NO: 1956765 - RNA, 19 nt, Homo sapiens
  misc_RNA (1)...(19): siRNA sense strand
agacagggaaccagcaauu

SEQ ID NO: 1956766 - RNA, 19 nt, Homo sapiens
  misc_RNA (1)...(19): siRNA sense strand
gcgauuuguuguuccuguu

SEQ ID NO: 1956767 - RNA, 19 nt, Homo sapiens
  misc_RNA (1)...(19): siRNA sense strand
gacagggaaccagcaauuu

SEQ ID NO: 1956768 - RNA, 19 nt, Homo sapiens
  misc_RNA (1)...(19): siRNA sense strand
ccaucacgcugaacagaca

SEQ ID NO: 1956769 - RNA, 19 nt, Homo sapiens
  misc_RNA (1)...(19): siRNA sense strand
uaacagccuccuccaacaa

SEQ ID NO: 1956770 - RNA, 19 nt, Homo sapiens
  misc_RNA (1)...(19): siRNA sense strand
ggaugagauugaucaguac

SEQ ID NO: 1956771 - RNA, 19 nt, Homo sapiens
  misc_RNA (1)...(19): siRNA sense strand
caaacaggacgggaagauu

SEQ ID NO: 1956772 - RNA, 19 nt, Homo sapiens
  misc_RNA (1)...(19): siRNA sense strand
uaccucaucuguguucuug

SEQ ID NO: 1956773 - RNA, 19 nt, Homo sapiens
  misc_RNA (1)...(19): siRNA sense strand
uagcuuggccaccuauuug

SEQ ID NO: 1956774 - RNA, 19 nt, Homo sapiens
  misc_RNA (1)...(19): siRNA sense strand
cugaaguggcugcgauuua

SEQ ID NO: 1956775 - RNA, 19 nt, Homo sapiens
  misc_RNA (1)...(19): siRNA sense strand
ggacgggaagauuuacaga

SEQ ID NO: 1956776 - RNA, 19 nt, Homo sapiens
  misc_RNA (1)...(19): siRNA sense strand
gucgagggcuccacacaca

SEQ ID NO: 1956777 - RNA, 19 nt, Homo sapiens
  misc_RNA (1)...(19): siRNA sense strand
gagcaguacgugccugaug

SEQ ID NO: 1956778 - RNA, 19 nt, Homo sapiens
  misc_RNA (1)...(19): siRNA sense strand
uguggacaauaucauguuu

SEQ ID NO: 1956779 - RNA, 19 nt, Homo sapiens
  misc_RNA (1)...(19): siRNA sense strand
gaaguggcugcgauuuaug

SEQ ID NO: 1956780 - RNA, 19 nt, Homo sapiens
  misc_RNA (1)...(19): siRNA sense strand
aggauccaguuuacacuuu

SEQ ID NO: 1956781 - RNA, 19 nt, Homo sapiens
  misc_RNA (1)...(19): siRNA sense strand
caacaacuuuccccaagga

SEQ ID NO: 1956782 - RNA, 19 nt, Homo sapiens
  misc_RNA (1)...(19): siRNA sense strand
gcacugcgucccucuagag

SEQ ID NO: 1956783 - RNA, 19 nt, Homo sapiens
  misc_RNA (1)...(19): siRNA sense strand
gcacugguccgugaugagu

SEQ ID NO: 1956784 - RNA, 19 nt, Homo sapiens
  misc_RNA (1)...(19): siRNA sense strand
acagggaaccagcaauuug

SEQ ID NO: 1956785 - RNA, 19 nt, Homo sapiens
  misc_RNA (1)...(19): siRNA sense strand
gaucaguaccucagcaaac

SEQ ID NO: 1956786 - RNA, 19 nt, Homo sapiens
  misc_RNA (1)...(19): siRNA sense strand
gaguaucucaucauagaca

SEQ ID NO: 1956787 - RNA, 19 nt, Homo sapiens
  misc_RNA (1)...(19): siRNA sense strand
ucacagcaacaaagagaga

SEQ ID NO: 1956788 - RNA, 19 nt, Homo sapiens
  misc_RNA (1)...(19): siRNA sense strand
aacaggacgggaagauuua

SEQ ID NO: 1956789 - RNA, 19 nt, Homo sapiens
  misc_RNA (1)...(19): siRNA sense strand
cugaaguggucgaugaaau

SEQ ID NO: 1956790 - RNA, 19 nt, Homo sapiens
  misc_RNA (1)...(19): siRNA sense strand
caagcauggcgauuuguug

SEQ ID NO: 1956791 - RNA, 19 nt, Homo sapiens
  misc_RNA (1)...(19): siRNA sense strand
gaaacagcagcaacauuuu

SEQ ID NO: 1956792 - RNA, 19 nt, Homo sapiens
  misc_RNA (1)...(19): siRNA sense strand
ccaacaaaucccucaacuu

SEQ ID NO: 1956793 - RNA, 19 nt, Homo sapiens
  misc_RNA (1)...(19): siRNA sense strand
cacaggacuuccauagcuu

SEQ ID NO: 1956794 - RNA, 19 nt, Homo sapiens
  misc_RNA (1)...(19): siRNA sense strand
ugccugauguguuuuauaa

SEQ ID NO: 1956795 - RNA, 19 nt, Homo sapiens
  misc_RNA (1)...(19): siRNA sense strand
gcggaagcgucccuacuga

SEQ ID NO: 1956796 - RNA, 19 nt, Homo sapiens
  misc_RNA (1)...(19): siRNA sense strand
caagggccagggagcgauu

SEQ ID NO: 1956797 - RNA, 19 nt, Homo sapiens
  misc_RNA (1)...(19): siRNA sense strand
ucaaaccacucuucaauuu

SEQ ID NO: 1956798 - RNA, 19 nt, Homo sapiens
  misc_RNA (1)...(19): siRNA sense strand
ggaugaaucuguugcaaga

SEQ ID NO: 1956799 - RNA, 19 nt, Homo sapiens
  misc_RNA (1)...(19): siRNA sense strand
gcacaaaugucaccgucaa

SEQ ID NO: 1956800 - RNA, 19 nt, Homo sapiens
  misc_RNA (1)...(19): siRNA sense strand
gaagaacuguugcccaaag

SEQ ID NO: 1956801 - RNA, 19 nt, Homo sapiens
  misc_RNA (1)...(19): siRNA sense strand
ggagcaaacuggcuaacau

SEQ ID NO: 1956802 - RNA, 19 nt, Homo sapiens
  misc_RNA (1)...(19): siRNA sense strand
caaacuggcuaacauucuu

SEQ ID NO: 1956803 - RNA, 19 nt, Homo sapiens
  misc_RNA (1)...(19): siRNA sense strand
cuggaugucuugaucaaua

SEQ ID NO: 1956804 - RNA, 19 nt, Homo sapiens
  misc_RNA (1)...(19): siRNA sense strand
gcccuuacaugaagacuga

SEQ ID NO: 1956805 - RNA, 19 nt, Homo sapiens
  misc_RNA (1)...(19): siRNA sense strand
gcccagacuuccauuuauu

SEQ ID NO: 1956806 - RNA, 19 nt, Homo sapiens
  misc_RNA (1)...(19): siRNA sense strand
ccaaagcuauggaugaauc

SEQ ID NO: 1956807 - RNA, 19 nt, Homo sapiens
  misc_RNA (1)...(19): siRNA sense strand
gaacagugaacaaagcuau

SEQ ID NO: 1956808 - RNA, 19 nt, Homo sapiens
  misc_RNA (1)...(19): siRNA sense strand
gcccaaagcuauggaugaa

SEQ ID NO: 1956809 - RNA, 19 nt, Homo sapiens
  misc_RNA (1)...(19): siRNA sense strand
ggucaaaccacucuucaau

SEQ ID NO: 1956810 - RNA, 19 nt, Homo sapiens
  misc_RNA (1)...(19): siRNA sense strand
gaaggagugucaggaagau

SEQ ID NO: 1956811 - RNA, 19 nt, Homo sapiens
  misc_RNA (1)...(19): siRNA sense strand
gagaugcaguucggaguga

SEQ ID NO: 1956812 - RNA, 19 nt, Homo sapiens
  misc_RNA (1)...(19): siRNA sense strand
gaacuguugcccaaagcua

SEQ ID NO: 1956813 - RNA, 19 nt, Homo sapiens
  misc_RNA (1)...(19): siRNA sense strand
gagcaaacuggcuaacauu

SEQ ID NO: 1956814 - RNA, 19 nt, Homo sapiens
  misc_RNA (1)...(19): siRNA sense strand
uaaagaggaagaacuguug

SEQ ID NO: 1956815 - RNA, 19 nt, Homo sapiens
  misc_RNA (1)...(19): siRNA sense strand
caagaaaacucugggauau

SEQ ID NO: 1956816 - RNA, 19 nt, Homo sapiens
  misc_RNA (1)...(19): siRNA sense strand
gaagacugaagauggguuu

SEQ ID NO: 1956817 - RNA, 19 nt, Homo sapiens
  misc_RNA (1)...(19): siRNA sense strand
guaaagaggaagaacuguu

SEQ ID NO: 1956818 - RNA, 19 nt, Homo sapiens
  misc_RNA (1)...(19): siRNA sense strand
aaaccacucuucaauuugg

SEQ ID NO: 1956819 - RNA, 19 nt, Homo sapiens
  misc_RNA (1)...(19): siRNA sense strand
ccagugcccuuacaugaag

SEQ ID NO: 1956820 - RNA, 19 nt, Homo sapiens
  misc_RNA (1)...(19): siRNA sense strand
gcaagaaaacucugggaua

SEQ ID NO: 1956821 - RNA, 19 nt, Homo sapiens
  misc_RNA (1)...(19): siRNA sense strand
gaagauacuuuggggauug

SEQ ID NO: 1956822 - RNA, 19 nt, Homo sapiens
  misc_RNA (1)...(19): siRNA sense strand
gugcccagacuuccauuua

SEQ ID NO: 1956823 - RNA, 19 nt, Homo sapiens
  misc_RNA (1)...(19): siRNA sense strand
gcaggauugugguaguuuc

SEQ ID NO: 1956824 - RNA, 19 nt, Homo sapiens
  misc_RNA (1)...(19): siRNA sense strand
ggauugugguaguuucuuc

SEQ ID NO: 1956825 - RNA, 19 nt, Homo sapiens
  misc_RNA (1)...(19): siRNA sense strand
guagaaggagugucaggaa

SEQ ID NO: 1956826 - RNA, 19 nt, Homo sapiens
  misc_RNA (1)...(19): siRNA sense strand
uaaauacggagacaucaau

SEQ ID NO: 1956827 - RNA, 19 nt, Homo sapiens
  misc_RNA (1)...(19): siRNA sense strand
aggaaaugcuccaggaaga

SEQ ID NO: 1956828 - RNA, 19 nt, Homo sapiens
  misc_RNA (1)...(19): siRNA sense strand
ccauuuauuuggccucuuc

SEQ ID NO: 1956829 - RNA, 19 nt, Homo sapiens
  misc_RNA (1)...(19): siRNA sense strand
ugugguaguuucuuccaaa

SEQ ID NO: 1956830 - RNA, 19 nt, Homo sapiens
  misc_RNA (1)...(19): siRNA sense strand
uggaugucuugaucaauaa

SEQ ID NO: 1956831 - RNA, 19 nt, Homo sapiens
  misc_RNA (1)...(19): siRNA sense strand
caaaugucaccgucaaugu

SEQ ID NO: 1956832 - RNA, 19 nt, Homo sapiens
  misc_RNA (1)...(19): siRNA sense strand
augaaucuguugcaagaaa

SEQ ID NO: 1956833 - RNA, 19 nt, Homo sapiens
  misc_RNA (1)...(19): siRNA sense strand
cagcaggauugugguaguu

SEQ ID NO: 1956834 - RNA, 19 nt, Homo sapiens
  misc_RNA (1)...(19): siRNA sense strand
ggaagacugugcugaucac

SEQ ID NO: 1956835 - RNA, 19 nt, Homo sapiens
  misc_RNA (1)...(19): siRNA sense strand
cauacacauuccacuguug

SEQ ID NO: 1956836 - RNA, 19 nt, Homo sapiens
  misc_RNA (1)...(19): siRNA sense strand
gcaaacuggcuaacauucu

SEQ ID NO: 1956837 - RNA, 19 nt, Homo sapiens
  misc_RNA (1)...(19): siRNA sense strand
guugcauccugguauugua

SEQ ID NO: 1956838 - RNA, 19 nt, Homo sapiens
  misc_RNA (1)...(19): siRNA sense strand
uugaugacuugaacaguga

SEQ ID NO: 1956839 - RNA, 19 nt, Homo sapiens
  misc_RNA (1)...(19): siRNA sense strand
uuucaaaacuccaguagaa

SEQ ID NO: 1956840 - RNA, 19 nt, Homo sapiens
  misc_RNA (1)...(19): siRNA sense strand
uuagaaggcacaaauguca

SEQ ID NO: 1956841 - RNA, 19 nt, Homo sapiens
  misc_RNA (1)...(19): siRNA sense strand
acagugaacaaagcuauaa

SEQ ID NO: 1956842 - RNA, 19 nt, Homo sapiens
  misc_RNA (1)...(19): siRNA sense strand
gucaaaccacucuucaauu

SEQ ID NO: 1956843 - RNA, 19 nt, Homo sapiens
  misc_RNA (1)...(19): siRNA sense strand
gggaggcacauacacauuc

SEQ ID NO: 1956844 - RNA, 19 nt, Homo sapiens
  misc_RNA (1)...(19): siRNA sense strand
caauaacgcagggaucuuc

SEQ ID NO: 1956845 - RNA, 19 nt, Homo sapiens
  misc_RNA (1)...(19): siRNA sense strand
ggaagaacuguugcccaaa

SEQ ID NO: 1956846 - RNA, 19 nt, Homo sapiens
  misc_RNA (1)...(19): siRNA sense strand
acauacacauuccacuguu

SEQ ID NO: 1956847 - RNA, 19 nt, Homo sapiens
  misc_RNA (1)...(19): siRNA sense strand
gcuuagaaggcacaaaugu

SEQ ID NO: 1956848 - RNA, 19 nt, Homo sapiens
  misc_RNA (1)...(19): siRNA sense strand
gggaagacugugcugauca

SEQ ID NO: 1956849 - RNA, 19 nt, Homo sapiens
  misc_RNA (1)...(19): siRNA sense strand
ugagguagaaggaguguca

SEQ ID NO: 1956850 - RNA, 19 nt, Homo sapiens
  misc_RNA (1)...(19): siRNA sense strand
ggaagauacuuuggggauu

SEQ ID NO: 1956851 - RNA, 19 nt, Homo sapiens
  misc_RNA (1)...(19): siRNA sense strand
agaaaacucugggauauca

SEQ ID NO: 1956852 - RNA, 19 nt, Homo sapiens
  misc_RNA (1)...(19): siRNA sense strand
ccagacuuccauuuauuug

SEQ ID NO: 1956853 - RNA, 19 nt, Homo sapiens
  misc_RNA (1)...(19): siRNA sense strand
ggcuggaugucuugaucaa

SEQ ID NO: 1956854 - RNA, 19 nt, Homo sapiens
  misc_RNA (1)...(19): siRNA sense strand
ccagcaggauugugguagu

SEQ ID NO: 1956855 - RNA, 19 nt, Homo sapiens
  misc_RNA (1)...(19): siRNA sense strand
agaaggagugucaggaaga

SEQ ID NO: 1956856 - RNA, 19 nt, Homo sapiens
  misc_RNA (1)...(19): siRNA sense strand
ugcccagacuuccauuuau

SEQ ID NO: 1956857 - RNA, 19 nt, Homo sapiens
  misc_RNA (1)...(19): siRNA sense strand
ugacuugaacagugaacaa

SEQ ID NO: 1956858 - RNA, 19 nt, Homo sapiens
  misc_RNA (1)...(19): siRNA sense strand
agugaugguuggccugcua

SEQ ID NO: 1956859 - RNA, 19 nt, Homo sapiens
  misc_RNA (1)...(19): siRNA sense strand
aaacuggcuaacauucuuu

SEQ ID NO: 1956860 - RNA, 19 nt, Homo sapiens
  misc_RNA (1)...(19): siRNA sense strand
gacuugaacagugaacaaa

SEQ ID NO: 1956861 - RNA, 19 nt, Homo sapiens
  misc_RNA (1)...(19): siRNA sense strand
cccagacuuccauuuauuu

SEQ ID NO: 1956862 - RNA, 19 nt, Homo sapiens
  misc_RNA (1)...(19): siRNA sense strand
uguguugcauccugguauu

SEQ ID NO: 1956863 - RNA, 19 nt, Homo sapiens
  misc_RNA (1)...(19): siRNA sense strand
ccgcuuagaaggcacaaau

SEQ ID NO: 1956864 - RNA, 19 nt, Homo sapiens
  misc_RNA (1)...(19): siRNA sense strand
ggaggcacauacacauucc

SEQ ID NO: 1956865 - RNA, 19 nt, Homo sapiens
  misc_RNA (1)...(19): siRNA sense strand
ggaaaugcuccaggaagag

SEQ ID NO: 1956866 - RNA, 19 nt, Homo sapiens
  misc_RNA (1)...(19): siRNA sense strand
aauacggagacaucaauuu

SEQ ID NO: 1956867 - RNA, 19 nt, Homo sapiens
  misc_RNA (1)...(19): siRNA sense strand
uaggcuggaugucuugauc

SEQ ID NO: 1956868 - RNA, 19 nt, Homo sapiens
  misc_RNA (1)...(19): siRNA sense strand
guagaaggugcccagacuu

SEQ ID NO: 1956869 - RNA, 19 nt, Homo sapiens
  misc_RNA (1)...(19): siRNA sense strand
acaaaugucaccgucaaug

SEQ ID NO: 1956870 - RNA, 19 nt, Homo sapiens
  misc_RNA (1)...(19): siRNA sense strand
cgggaagacugugcugauc

SEQ ID NO: 1956871 - RNA, 19 nt, Homo sapiens
  misc_RNA (1)...(19): siRNA sense strand
ugaagauggguuugagaug

SEQ ID NO: 1956872 - RNA, 19 nt, Homo sapiens
  misc_RNA (1)...(19): siRNA sense strand
aguagaaggugcccagacu

SEQ ID NO: 1956873 - RNA, 19 nt, Homo sapiens
  misc_RNA (1)...(19): siRNA sense strand
uuauaaauacggagacauc

SEQ ID NO: 1956874 - RNA, 19 nt, Homo sapiens
  misc_RNA (1)...(19): siRNA sense strand
ugggauaucagugaaguga

SEQ ID NO: 1956875 - RNA, 19 nt, Homo sapiens
  misc_RNA (1)...(19): siRNA sense strand
acucugggauaucagugaa

SEQ ID NO: 1956876 - RNA, 19 nt, Homo sapiens
  misc_RNA (1)...(19): siRNA sense strand
gacugaagauggguuugag

SEQ ID NO: 1956877 - RNA, 19 nt, Homo sapiens
  misc_RNA (1)...(19): siRNA sense strand
aagauggguuugagaugca

SEQ ID NO: 1956878 - RNA, 19 nt, Homo sapiens
  misc_RNA (1)...(19): siRNA sense strand
agacugaagauggguuuga

SEQ ID NO: 1956879 - RNA, 19 nt, Homo sapiens
  misc_RNA (1)...(19): siRNA sense strand
aaaugucaccgucaaugug

SEQ ID NO: 1956880 - RNA, 19 nt, Homo sapiens
  misc_RNA (1)...(19): siRNA sense strand
ccaggaaaugcuccaggaa

SEQ ID NO: 1956881 - RNA, 19 nt, Homo sapiens
  misc_RNA (1)...(19): siRNA sense strand
ugguuggccugcuaaaaua

SEQ ID NO: 1956882 - RNA, 19 nt, Homo sapiens
  misc_RNA (1)...(19): siRNA sense strand
gcaugaaucugacuccuuu

SEQ ID NO: 1956883 - RNA, 19 nt, Homo sapiens
  misc_RNA (1)...(19): siRNA sense strand
gagaaugugucccaggauu

SEQ ID NO: 1956884 - RNA, 19 nt, Homo sapiens
  misc_RNA (1)...(19): siRNA sense strand
gagagaggcugcagguuca

SEQ ID NO: 1956885 - RNA, 19 nt, Homo sapiens
  misc_RNA (1)...(19): siRNA sense strand
aaacagggcucugaugaga

SEQ ID NO: 1956886 - RNA, 19 nt, Homo sapiens
  misc_RNA (1)...(19): siRNA sense strand
gcucaaagaggguaccaua

SEQ ID NO: 1956887 - RNA, 19 nt, Homo sapiens
  misc_RNA (1)...(19): siRNA sense strand
ggaaggagaccagcauaaa

SEQ ID NO: 1956888 - RNA, 19 nt, Homo sapiens
  misc_RNA (1)...(19): siRNA sense strand
gaaaggauggagugugaaa

SEQ ID NO: 1956889 - RNA, 19 nt, Homo sapiens
  misc_RNA (1)...(19): siRNA sense strand
aagaaaggauggaguguga

SEQ ID NO: 1956890 - RNA, 19 nt, Homo sapiens
  misc_RNA (1)...(19): siRNA sense strand
gcgacaaggugaugacgaa

SEQ ID NO: 1956891 - RNA, 19 nt, Homo sapiens
  misc_RNA (1)...(19): siRNA sense strand
gaaucugacuccuuuacug

SEQ ID NO: 1956892 - RNA, 19 nt, Homo sapiens
  misc_RNA (1)...(19): siRNA sense strand
acacugggcucuuuaccaa

SEQ ID NO: 1956893 - RNA, 19 nt, Homo sapiens
  misc_RNA (1)...(19): siRNA sense strand
gcagcucgaugccucagaa

SEQ ID NO: 1956894 - RNA, 19 nt, Homo sapiens
  misc_RNA (1)...(19): siRNA sense strand
gaauaagcuuggugaacug

SEQ ID NO: 1956895 - RNA, 19 nt, Homo sapiens
  misc_RNA (1)...(19): siRNA sense strand
uaagccauaucauuaguga

SEQ ID NO: 1956896 - RNA, 19 nt, Homo sapiens
  misc_RNA (1)...(19): siRNA sense strand
gaugagaacaugucagaau

SEQ ID NO: 1956897 - RNA, 19 nt, Homo sapiens
  misc_RNA (1)...(19): siRNA sense strand
caagugggcuccugaucau

SEQ ID NO: 1956898 - RNA, 19 nt, Homo sapiens
  misc_RNA (1)...(19): siRNA sense strand
guucaagucugcuaagaag

SEQ ID NO: 1956899 - RNA, 19 nt, Homo sapiens
  misc_RNA (1)...(19): siRNA sense strand
gaaguagaaagaauggauu

SEQ ID NO: 1956900 - RNA, 19 nt, Homo sapiens
  misc_RNA (1)...(19): siRNA sense strand
gaaaccagcagugugugua

SEQ ID NO: 1956901 - RNA, 19 nt, Homo sapiens
  misc_RNA (1)...(19): siRNA sense strand
uaaggacugucgagaagug

SEQ ID NO: 1956902 - RNA, 19 nt, Homo sapiens
  misc_RNA (1)...(19): siRNA sense strand
caaagaggguaccauacuc

SEQ ID NO: 1956903 - RNA, 19 nt, Homo sapiens
  misc_RNA (1)...(19): siRNA sense strand
gcaacauucuuggcaugaa

SEQ ID NO: 1956904 - RNA, 19 nt, Homo sapiens
  misc_RNA (1)...(19): siRNA sense strand
guaccauacucgcuugaau

SEQ ID NO: 1956905 - RNA, 19 nt, Homo sapiens
  misc_RNA (1)...(19): siRNA sense strand
ccaaaucacccagcucuga

SEQ ID NO: 1956906 - RNA, 19 nt, Homo sapiens
  misc_RNA (1)...(19): siRNA sense strand
uggcuccggugaccaauuu

SEQ ID NO: 1956907 - RNA, 19 nt, Homo sapiens
  misc_RNA (1)...(19): siRNA sense strand
agaauaagcuuggugaacu

SEQ ID NO: 1956908 - RNA, 19 nt, Homo sapiens
  misc_RNA (1)...(19): siRNA sense strand
gaucauuguucugaaguag

SEQ ID NO: 1956909 - RNA, 19 nt, Homo sapiens
  misc_RNA (1)...(19): siRNA sense strand
gauggagugugaaacagau

SEQ ID NO: 1956910 - RNA, 19 nt, Homo sapiens
  misc_RNA (1)...(19): siRNA sense strand
gaaaagagcccuggauaca

SEQ ID NO: 1956911 - RNA, 19 nt, Homo sapiens
  misc_RNA (1)...(19): siRNA sense strand
gggaaggagaccagcauaa

SEQ ID NO: 1956912 - RNA, 19 nt, Homo sapiens
  misc_RNA (1)...(19): siRNA sense strand
ggccacggauugugugaau

SEQ ID NO: 1956913 - RNA, 19 nt, Homo sapiens
  misc_RNA (1)...(19): siRNA sense strand
gaaggagaccagcauaaac

SEQ ID NO: 1956914 - RNA, 19 nt, Homo sapiens
  misc_RNA (1)...(19): siRNA sense strand
agaccagcauaaacacuuu

SEQ ID NO: 1956915 - RNA, 19 nt, Homo sapiens
  misc_RNA (1)...(19): siRNA sense strand
cgcaacuacugcuacauuu

SEQ ID NO: 1956916 - RNA, 19 nt, Homo sapiens
  misc_RNA (1)...(19): siRNA sense strand
agaguaagcaacauucuug

SEQ ID NO: 1956917 - RNA, 19 nt, Homo sapiens
  misc_RNA (1)...(19): siRNA sense strand
ugaagcgagugacaucaga

SEQ ID NO: 1956918 - RNA, 19 nt, Homo sapiens
  misc_RNA (1)...(19): siRNA sense strand
ugacucugaugacacaaug

SEQ ID NO: 1956919 - RNA, 19 nt, Homo sapiens
  misc_RNA (1)...(19): siRNA sense strand
ccagugcaguucacaugga

SEQ ID NO: 1956920 - RNA, 19 nt, Homo sapiens
  misc_RNA (1)...(19): siRNA sense strand
cacgugacaucaagaggaa

SEQ ID NO: 1956921 - RNA, 19 nt, Homo sapiens
  misc_RNA (1)...(19): siRNA sense strand
gagaccagcauaaacacuu

SEQ ID NO: 1956922 - RNA, 19 nt, Homo sapiens
  misc_RNA (1)...(19): siRNA sense strand
gaaggcugguugggaagga

SEQ ID NO: 1956923 - RNA, 19 nt, Homo sapiens
  misc_RNA (1)...(19): siRNA sense strand
gauucuggauuggauaaau

SEQ ID NO: 1956924 - RNA, 19 nt, Homo sapiens
  misc_RNA (1)...(19): siRNA sense strand
ccaagugggcuccugauca

SEQ ID NO: 1956925 - RNA, 19 nt, Homo sapiens
  misc_RNA (1)...(19): siRNA sense strand
gaaagaaaggauggagugu

SEQ ID NO: 1956926 - RNA, 19 nt, Homo sapiens
  misc_RNA (1)...(19): siRNA sense strand
ggugucagauuggagcuau

SEQ ID NO: 1956927 - RNA, 19 nt, Homo sapiens
  misc_RNA (1)...(19): siRNA sense strand
cagcgaggccucugaguca

SEQ ID NO: 1956928 - RNA, 19 nt, Homo sapiens
  misc_RNA (1)...(19): siRNA sense strand
ggauggagugugaaacaga

SEQ ID NO: 1956929 - RNA, 19 nt, Homo sapiens
  misc_RNA (1)...(19): siRNA sense strand
gcuaagaagcagcgucugu

SEQ ID NO: 1956930 - RNA, 19 nt, Homo sapiens
  misc_RNA (1)...(19): siRNA sense strand
acagagugauugguucuau

SEQ ID NO: 1956931 - RNA, 19 nt, Homo sapiens
  misc_RNA (1)...(19): siRNA sense strand
ggaagcgucguucugacuu

SEQ ID NO: 1956932 - RNA, 19 nt, Homo sapiens
  misc_RNA (1)...(19): siRNA sense strand
ugaucauuguucugaagua

SEQ ID NO: 1956933 - RNA, 19 nt, Homo sapiens
  misc_RNA (1)...(19): siRNA sense strand
acuaaggacugucgagaag

SEQ ID NO: 1956934 - RNA, 19 nt, Homo sapiens
  misc_RNA (1)...(19): siRNA sense strand
cuaaucuucugcccaagug

SEQ ID NO: 1956935 - RNA, 19 nt, Homo sapiens
  misc_RNA (1)...(19): siRNA sense strand
ucugacuccuuuacugaaa

SEQ ID NO: 1956936 - RNA, 19 nt, Homo sapiens
  misc_RNA (1)...(19): siRNA sense strand
cagcagagaaagccacaga

SEQ ID NO: 1956937 - RNA, 19 nt, Homo sapiens
  misc_RNA (1)...(19): siRNA sense strand
ccacagcaucuuugucuag

SEQ ID NO: 1956938 - RNA, 19 nt, Homo sapiens
  misc_RNA (1)...(19): siRNA sense strand
ucagauuccacauuccuuu

SEQ ID NO: 1956939 - RNA, 19 nt, Homo sapiens
  misc_RNA (1)...(19): siRNA sense strand
cagagugauugguucuaug

SEQ ID NO: 1956940 - RNA, 19 nt, Homo sapiens
  misc_RNA (1)...(19): siRNA sense strand
gaaggugaagcgagugaca

SEQ ID NO: 1956941 - RNA, 19 nt, Homo sapiens
  misc_RNA (1)...(19): siRNA sense strand
ucaaagaggguaccauacu

SEQ ID NO: 1956942 - RNA, 19 nt, Homo sapiens
  misc_RNA (1)...(19): siRNA sense strand
gaagggcgacaaggugaug

SEQ ID NO: 1956943 - RNA, 19 nt, Homo sapiens
  misc_RNA (1)...(19): siRNA sense strand
gaugacgaacagagugauu

SEQ ID NO: 1956944 - RNA, 19 nt, Homo sapiens
  misc_RNA (1)...(19): siRNA sense strand
augagaacaugucagaaug

SEQ ID NO: 1956945 - RNA, 19 nt, Homo sapiens
  misc_RNA (1)...(19): siRNA sense strand
gaaagccacagacgcaacu

SEQ ID NO: 1956946 - RNA, 19 nt, Homo sapiens
  misc_RNA (1)...(19): siRNA sense strand
gccacagcaucuuugucua

SEQ ID NO: 1956947 - RNA, 19 nt, Homo sapiens
  misc_RNA (1)...(19): siRNA sense strand
acugagaggauaagccaua

SEQ ID NO: 1956948 - RNA, 19 nt, Homo sapiens
  misc_RNA (1)...(19): siRNA sense strand
aaucugacuccuuuacuga

SEQ ID NO: 1956949 - RNA, 19 nt, Homo sapiens
  misc_RNA (1)...(19): siRNA sense strand
agacgcaacuacugcuaca

SEQ ID NO: 1956950 - RNA, 19 nt, Homo sapiens
  misc_RNA (1)...(19): siRNA sense strand
gcagaauaagcuuggugaa

SEQ ID NO: 1956951 - RNA, 19 nt, Homo sapiens
  misc_RNA (1)...(19): siRNA sense strand
ugaaguagaaagaauggau

SEQ ID NO: 1956952 - RNA, 19 nt, Homo sapiens
  misc_RNA (1)...(19): siRNA sense strand
agagugauugguucuauga

SEQ ID NO: 1956953 - RNA, 19 nt, Homo sapiens
  misc_RNA (1)...(19): siRNA sense strand
uggaugaggccacuaagga

SEQ ID NO: 1956954 - RNA, 19 nt, Homo sapiens
  misc_RNA (1)...(19): siRNA sense strand
gcucuuuaccaaugaugaa

SEQ ID NO: 1956955 - RNA, 19 nt, Homo sapiens
  misc_RNA (1)...(19): siRNA sense strand
aaacaggaaggaaagaaag

SEQ ID NO: 1956956 - RNA, 19 nt, Homo sapiens
  misc_RNA (1)...(19): siRNA sense strand
ggccacagcaucuuugucu

SEQ ID NO: 1956957 - RNA, 19 nt, Homo sapiens
  misc_RNA (1)...(19): siRNA sense strand
aggauucacugucccuaau

SEQ ID NO: 1956958 - RNA, 19 nt, Homo sapiens
  misc_RNA (1)...(19): siRNA sense strand
acugggcucuuuaccaaug

SEQ ID NO: 1956959 - RNA, 19 nt, Homo sapiens
  misc_RNA (1)...(19): siRNA sense strand
ucaagaguaagcaacauuc

SEQ ID NO: 1956960 - RNA, 19 nt, Homo sapiens
  misc_RNA (1)...(19): siRNA sense strand
aaggagaccagcauaaaca

SEQ ID NO: 1956961 - RNA, 19 nt, Homo sapiens
  misc_RNA (1)...(19): siRNA sense strand
uagugacucugaugacaca

SEQ ID NO: 1956962 - RNA, 19 nt, Homo sapiens
  misc_RNA (1)...(19): siRNA sense strand
ugagcugguacacgacuua

SEQ ID NO: 1956963 - RNA, 19 nt, Homo sapiens
  misc_RNA (1)...(19): siRNA sense strand
gguucaagucugcuaagaa

SEQ ID NO: 1956964 - RNA, 19 nt, Homo sapiens
  misc_RNA (1)...(19): siRNA sense strand
gcucgaugccucagaaagg

SEQ ID NO: 1956965 - RNA, 19 nt, Homo sapiens
  misc_RNA (1)...(19): siRNA sense strand
acagggcucugaugagaac

SEQ ID NO: 1956966 - RNA, 19 nt, Homo sapiens
  misc_RNA (1)...(19): siRNA sense strand
gaaggaaagaaaggaugga

SEQ ID NO: 1956967 - RNA, 19 nt, Homo sapiens
  misc_RNA (1)...(19): siRNA sense strand
ggagugugaaacagaugaa

SEQ ID NO: 1956968 - RNA, 19 nt, Homo sapiens
  misc_RNA (1)...(19): siRNA sense strand
caaccacaccagcaucaca

SEQ ID NO: 1956969 - RNA, 19 nt, Homo sapiens
  misc_RNA (1)...(19): siRNA sense strand
aaacgacacccagcucuca

SEQ ID NO: 1956970 - RNA, 19 nt, Homo sapiens
  misc_RNA (1)...(19): siRNA sense strand
ugacacaaugguagccaaa

SEQ ID NO: 1956971 - RNA, 19 nt, Homo sapiens
  misc_RNA (1)...(19): siRNA sense strand
gucaagaguaagcaacauu

SEQ ID NO: 1956972 - RNA, 19 nt, Homo sapiens
  misc_RNA (1)...(19): siRNA sense strand
gcaccuugucgaccacuca

SEQ ID NO: 1956973 - RNA, 19 nt, Homo sapiens
  misc_RNA (1)...(19): siRNA sense strand
uaaaaugccacaagaaaag

SEQ ID NO: 1956974 - RNA, 19 nt, Homo sapiens
  misc_RNA (1)...(19): siRNA sense strand
gcaacuacugcuacauuuu

SEQ ID NO: 1956975 - RNA, 19 nt, Homo sapiens
  misc_RNA (1)...(19): siRNA sense strand
acgcaacuacugcuacauu

SEQ ID NO: 1956976 - RNA, 19 nt, Homo sapiens
  misc_RNA (1)...(19): siRNA sense strand
ccaccauguucacgugaca

SEQ ID NO: 1956977 - RNA, 19 nt, Homo sapiens
  misc_RNA (1)...(19): siRNA sense strand
caggauucacugucccuaa

SEQ ID NO: 1956978 - RNA, 19 nt, Homo sapiens
  misc_RNA (1)...(19): siRNA sense strand
acaaggugaugacgaacag

SEQ ID NO: 1956979 - RNA, 19 nt, Homo sapiens
  misc_RNA (1)...(19): siRNA sense strand
gacaaggugaugacgaaca

SEQ ID NO: 1956980 - RNA, 19 nt, Homo sapiens
  misc_RNA (1)...(19): siRNA sense strand
gggcucugaugagaacaug

SEQ ID NO: 1956981 - RNA, 19 nt, Homo sapiens
  misc_RNA (1)...(19): siRNA sense strand
gugugaaacagaugaacaa

SEQ ID NO: 1956982 - RNA, 19 nt, Homo sapiens
  misc_RNA (1)...(19): siRNA sense strand
gcaugaaucugacuccuuu

SEQ ID NO: 1956983 - RNA, 19 nt, Homo sapiens
  misc_RNA (1)...(19): siRNA sense strand
gagaaugugucccaggauu

SEQ ID NO: 1956984 - RNA, 19 nt, Homo sapiens
  misc_RNA (1)...(19): siRNA sense strand
gagagaggcugcagguuca

SEQ ID NO: 1956985 - RNA, 19 nt, Homo sapiens
  misc_RNA (1)...(19): siRNA sense strand
aaacagggcucugaugaga

SEQ ID NO: 1956986 - RNA, 19 nt, Homo sapiens
  misc_RNA (1)...(19): siRNA sense strand
gcucaaagaggguaccaua

SEQ ID NO: 1956987 - RNA, 19 nt, Homo sapiens
  misc_RNA (1)...(19): siRNA sense strand
ggaaggagaccagcauaaa

SEQ ID NO: 1956988 - RNA, 19 nt, Homo sapiens
  misc_RNA (1)...(19): siRNA sense strand
gaaaggauggagugugaaa

SEQ ID NO: 1956989 - RNA, 19 nt, Homo sapiens
  misc_RNA (1)...(19): siRNA sense strand
aagaaaggauggaguguga

SEQ ID NO: 1956990 - RNA, 19 nt, Homo sapiens
  misc_RNA (1)...(19): siRNA sense strand
gcgacaaggugaugacgaa

SEQ ID NO: 1956991 - RNA, 19 nt, Homo sapiens
  misc_RNA (1)...(19): siRNA sense strand
gaaucugacuccuuuacug

SEQ ID NO: 1956992 - RNA, 19 nt, Homo sapiens
  misc_RNA (1)...(19): siRNA sense strand
acacugggcucuuuaccaa

SEQ ID NO: 1956993 - RNA, 19 nt, Homo sapiens
  misc_RNA (1)...(19): siRNA sense strand
gcagcucgaugccucagaa

SEQ ID NO: 1956994 - RNA, 19 nt, Homo sapiens
  misc_RNA (1)...(19): siRNA sense strand
gaauaagcuuggugaacug

SEQ ID NO: 1956995 - RNA, 19 nt, Homo sapiens
  misc_RNA (1)...(19): siRNA sense strand
uaagccauaucauuaguga

SEQ ID NO: 1956996 - RNA, 19 nt, Homo sapiens
  misc_RNA (1)...(19): siRNA sense strand
gaugagaacaugucagaau

SEQ ID NO: 1956997 - RNA, 19 nt, Homo sapiens
  misc_RNA (1)...(19): siRNA sense strand
caagugggcuccugaucau

SEQ ID NO: 1956998 - RNA, 19 nt, Homo sapiens
  misc_RNA (1)...(19): siRNA sense strand
guucaagucugcuaagaag

SEQ ID NO: 1956999 - RNA, 19 nt, Homo sapiens
  misc_RNA (1)...(19): siRNA sense strand
gaaguagaaagaauggauu

SEQ ID NO: 1957000 - RNA, 19 nt, Homo sapiens
  misc_RNA (1)...(19): siRNA sense strand
gaaaccagcagugugugua

SEQ ID NO: 1957001 - RNA, 19 nt, Homo sapiens
  misc_RNA (1)...(19): siRNA sense strand
uaaggacugucgagaagug

SEQ ID NO: 1957002 - RNA, 19 nt, Homo sapiens
  misc_RNA (1)...(19): siRNA sense strand
caaagaggguaccauacuc

SEQ ID NO: 1957003 - RNA, 19 nt, Homo sapiens
  misc_RNA (1)...(19): siRNA sense strand
gcaacauucuuggcaugaa

SEQ ID NO: 1957004 - RNA, 19 nt, Homo sapiens
  misc_RNA (1)...(19): siRNA sense strand
guaccauacucgcuugaau

SEQ ID NO: 1957005 - RNA, 19 nt, Homo sapiens
  misc_RNA (1)...(19): siRNA sense strand
ccaaaucacccagcucuga

SEQ ID NO: 1957006 - RNA, 19 nt, Homo sapiens
  misc_RNA (1)...(19): siRNA sense strand
uggcuccggugaccaauuu

SEQ ID NO: 1957007 - RNA, 19 nt, Homo sapiens
  misc_RNA (1)...(19): siRNA sense strand
agaauaagcuuggugaacu

SEQ ID NO: 1957008 - RNA, 19 nt, Homo sapiens
  misc_RNA (1)...(19): siRNA sense strand
gaucauuguucugaaguag

SEQ ID NO: 1957009 - RNA, 19 nt, Homo sapiens
  misc_RNA (1)...(19): siRNA sense strand
gauggagugugaaacagau

SEQ ID NO: 1957010 - RNA, 19 nt, Homo sapiens
  misc_RNA (1)...(19): siRNA sense strand
gaaaagagcccuggauaca

SEQ ID NO: 1957011 - RNA, 19 nt, Homo sapiens
  misc_RNA (1)...(19): siRNA sense strand
gggaaggagaccagcauaa

SEQ ID NO: 1957012 - RNA, 19 nt, Homo sapiens
  misc_RNA (1)...(19): siRNA sense strand
ggccacggauugugugaau

SEQ ID NO: 1957013 - RNA, 19 nt, Homo sapiens
  misc_RNA (1)...(19): siRNA sense strand
gaaggagaccagcauaaac

SEQ ID NO: 1957014 - RNA, 19 nt, Homo sapiens
  misc_RNA (1)...(19): siRNA sense strand
agaccagcauaaacacuuu

SEQ ID NO: 1957015 - RNA, 19 nt, Homo sapiens
  misc_RNA (1)...(19): siRNA sense strand
cgcaacuacugcuacauuu

SEQ ID NO: 1957016 - RNA, 19 nt, Homo sapiens
  misc_RNA (1)...(19): siRNA sense strand
agaguaagcaacauucuug

SEQ ID NO: 1957017 - RNA, 19 nt, Homo sapiens
  misc_RNA (1)...(19): siRNA sense strand
ugaagcgagugacaucaga

SEQ ID NO: 1957018 - RNA, 19 nt, Homo sapiens
  misc_RNA (1)...(19): siRNA sense strand
ugacucugaugacacaaug

SEQ ID NO: 1957019 - RNA, 19 nt, Homo sapiens
  misc_RNA (1)...(19): siRNA sense strand
ccagugcaguucacaugga

SEQ ID NO: 1957020 - RNA, 19 nt, Homo sapiens
  misc_RNA (1)...(19): siRNA sense strand
cacgugacaucaagaggaa

SEQ ID NO: 1957021 - RNA, 19 nt, Homo sapiens
  misc_RNA (1)...(19): siRNA sense strand
gagaccagcauaaacacuu

SEQ ID NO: 1957022 - RNA, 19 nt, Homo sapiens
  misc_RNA (1)...(19): siRNA sense strand
gaaggcugguugggaagga

SEQ ID NO: 1957023 - RNA, 19 nt, Homo sapiens
  misc_RNA (1)...(19): siRNA sense strand
gauucuggauuggauaaau

SEQ ID NO: 1957024 - RNA, 19 nt, Homo sapiens
  misc_RNA (1)...(19): siRNA sense strand
ccaagugggcuccugauca

SEQ ID NO: 1957025 - RNA, 19 nt, Homo sapiens
  misc_RNA (1)...(19): siRNA sense strand
gaaagaaaggauggagugu

SEQ ID NO: 1957026 - RNA, 19 nt, Homo sapiens
  misc_RNA (1)...(19): siRNA sense strand
ggugucagauuggagcuau

SEQ ID NO: 1957027 - RNA, 19 nt, Homo sapiens
  misc_RNA (1)...(19): siRNA sense strand
cagcgaggccucugaguca

SEQ ID NO: 1957028 - RNA, 19 nt, Homo sapiens
  misc_RNA (1)...(19): siRNA sense strand
ggauggagugugaaacaga

SEQ ID NO: 1957029 - RNA, 19 nt, Homo sapiens
  misc_RNA (1)...(19): siRNA sense strand
gcuaagaagcagcgucugu

SEQ ID NO: 1957030 - RNA, 19 nt, Homo sapiens
  misc_RNA (1)...(19): siRNA sense strand
acagagugauugguucuau

SEQ ID NO: 1957031 - RNA, 19 nt, Homo sapiens
  misc_RNA (1)...(19): siRNA sense strand
ggaagcgucguucugacuu

SEQ ID NO: 1957032 - RNA, 19 nt, Homo sapiens
  misc_RNA (1)...(19): siRNA sense strand
ugaucauuguucugaagua

SEQ ID NO: 1957033 - RNA, 19 nt, Homo sapiens
  misc_RNA (1)...(19): siRNA sense strand
acuaaggacugucgagaag

SEQ ID NO: 1957034 - RNA, 19 nt, Homo sapiens
  misc_RNA (1)...(19): siRNA sense strand
cuaaucuucugcccaagug

SEQ ID NO: 1957035 - RNA, 19 nt, Homo sapiens
  misc_RNA (1)...(19): siRNA sense strand
ucugacuccuuuacugaaa

SEQ ID NO: 1957036 - RNA, 19 nt, Homo sapiens
  misc_RNA (1)...(19): siRNA sense strand
cagcagagaaagccacaga

SEQ ID NO: 1957037 - RNA, 19 nt, Homo sapiens
  misc_RNA (1)...(19): siRNA sense strand
ccacagcaucuuugucuag

SEQ ID NO: 1957038 - RNA, 19 nt, Homo sapiens
  misc_RNA (1)...(19): siRNA sense strand
ucagauuccacauuccuuu

SEQ ID NO: 1957039 - RNA, 19 nt, Homo sapiens
  misc_RNA (1)...(19): siRNA sense strand
cagagugauugguucuaug

SEQ ID NO: 1957040 - RNA, 19 nt, Homo sapiens
  misc_RNA (1)...(19): siRNA sense strand
gaaggugaagcgagugaca

SEQ ID NO: 1957041 - RNA, 19 nt, Homo sapiens
  misc_RNA (1)...(19): siRNA sense strand
ucaaagaggguaccauacu

SEQ ID NO: 1957042 - RNA, 19 nt, Homo sapiens
  misc_RNA (1)...(19): siRNA sense strand
gaagggcgacaaggugaug

SEQ ID NO: 1957043 - RNA, 19 nt, Homo sapiens
  misc_RNA (1)...(19): siRNA sense strand
gaugacgaacagagugauu

SEQ ID NO: 1957044 - RNA, 19 nt, Homo sapiens
  misc_RNA (1)...(19): siRNA sense strand
augagaacaugucagaaug

SEQ ID NO: 1957045 - RNA, 19 nt, Homo sapiens
  misc_RNA (1)...(19): siRNA sense strand
gaaagccacagacgcaacu

SEQ ID NO: 1957046 - RNA, 19 nt, Homo sapiens
  misc_RNA (1)...(19): siRNA sense strand
gccacagcaucuuugucua

SEQ ID NO: 1957047 - RNA, 19 nt, Homo sapiens
  misc_RNA (1)...(19): siRNA sense strand
acugagaggauaagccaua

SEQ ID NO: 1957048 - RNA, 19 nt, Homo sapiens
  misc_RNA (1)...(19): siRNA sense strand
aaucugacuccuuuacuga

SEQ ID NO: 1957049 - RNA, 19 nt, Homo sapiens
  misc_RNA (1)...(19): siRNA sense strand
agacgcaacuacugcuaca

SEQ ID NO: 1957050 - RNA, 19 nt, Homo sapiens
  misc_RNA (1)...(19): siRNA sense strand
gcagaauaagcuuggugaa

SEQ ID NO: 1957051 - RNA, 19 nt, Homo sapiens
  misc_RNA (1)...(19): siRNA sense strand
ugaaguagaaagaauggau

SEQ ID NO: 1957052 - RNA, 19 nt, Homo sapiens
  misc_RNA (1)...(19): siRNA sense strand
agagugauugguucuauga

SEQ ID NO: 1957053 - RNA, 19 nt, Homo sapiens
  misc_RNA (1)...(19): siRNA sense strand
uggaugaggccacuaagga

SEQ ID NO: 1957054 - RNA, 19 nt, Homo sapiens
  misc_RNA (1)...(19): siRNA sense strand
gcucuuuaccaaugaugaa

SEQ ID NO: 1957055 - RNA, 19 nt, Homo sapiens
  misc_RNA (1)...(19): siRNA sense strand
aaacaggaaggaaagaaag

SEQ ID NO: 1957056 - RNA, 19 nt, Homo sapiens
  misc_RNA (1)...(19): siRNA sense strand
ggccacagcaucuuugucu

SEQ ID NO: 1957057 - RNA, 19 nt, Homo sapiens
  misc_RNA (1)...(19): siRNA sense strand
aggauucacugucccuaau

SEQ ID NO: 1957058 - RNA, 19 nt, Homo sapiens
  misc_RNA (1)...(19): siRNA sense strand
acugggcucuuuaccaaug

SEQ ID NO: 1957059 - RNA, 19 nt, Homo sapiens
  misc_RNA (1)...(19): siRNA sense strand
ucaagaguaagcaacauuc

SEQ ID NO: 1957060 - RNA, 19 nt, Homo sapiens
  misc_RNA (1)...(19): siRNA sense strand
aaggagaccagcauaaaca

SEQ ID NO: 1957061 - RNA, 19 nt, Homo sapiens
  misc_RNA (1)...(19): siRNA sense strand
uagugacucugaugacaca

SEQ ID NO: 1957062 - RNA, 19 nt, Homo sapiens
  misc_RNA (1)...(19): siRNA sense strand
ugagcugguacacgacuua

SEQ ID NO: 1957063 - RNA, 19 nt, Homo sapiens
  misc_RNA (1)...(19): siRNA sense strand
gguucaagucugcuaagaa

SEQ ID NO: 1957064 - RNA, 19 nt, Homo sapiens
  misc_RNA (1)...(19): siRNA sense strand
gcucgaugccucagaaagg

SEQ ID NO: 1957065 - RNA, 19 nt, Homo sapiens
  misc_RNA (1)...(19): siRNA sense strand
acagggcucugaugagaac

SEQ ID NO: 1957066 - RNA, 19 nt, Homo sapiens
  misc_RNA (1)...(19): siRNA sense strand
gaaggaaagaaaggaugga

SEQ ID NO: 1957067 - RNA, 19 nt, Homo sapiens
  misc_RNA (1)...(19): siRNA sense strand
ggagugugaaacagaugaa

SEQ ID NO: 1957068 - RNA, 19 nt, Homo sapiens
  misc_RNA (1)...(19): siRNA sense strand
caaccacaccagcaucaca

SEQ ID NO: 1957069 - RNA, 19 nt, Homo sapiens
  misc_RNA (1)...(19): siRNA sense strand
aaacgacacccagcucuca

SEQ ID NO: 1957070 - RNA, 19 nt, Homo sapiens
  misc_RNA (1)...(19): siRNA sense strand
ugacacaaugguagccaaa

SEQ ID NO: 1957071 - RNA, 19 nt, Homo sapiens
  misc_RNA (1)...(19): siRNA sense strand
gucaagaguaagcaacauu

SEQ ID NO: 1957072 - RNA, 19 nt, Homo sapiens
  misc_RNA (1)...(19): siRNA sense strand
gcaccuugucgaccacuca

SEQ ID NO: 1957073 - RNA, 19 nt, Homo sapiens
  misc_RNA (1)...(19): siRNA sense strand
uaaaaugccacaagaaaag

SEQ ID NO: 1957074 - RNA, 19 nt, Homo sapiens
  misc_RNA (1)...(19): siRNA sense strand
gcaacuacugcuacauuuu

SEQ ID NO: 1957075 - RNA, 19 nt, Homo sapiens
  misc_RNA (1)...(19): siRNA sense strand
acgcaacuacugcuacauu

SEQ ID NO: 1957076 - RNA, 19 nt, Homo sapiens
  misc_RNA (1)...(19): siRNA sense strand
ccaccauguucacgugaca

SEQ ID NO: 1957077 - RNA, 19 nt, Homo sapiens
  misc_RNA (1)...(19): siRNA sense strand
caggauucacugucccuaa

SEQ ID NO: 1957078 - RNA, 19 nt, Homo sapiens
  misc_RNA (1)...(19): siRNA sense strand
acaaggugaugacgaacag

SEQ ID NO: 1957079 - RNA, 19 nt, Homo sapiens
  misc_RNA (1)...(19): siRNA sense strand
gacaaggugaugacgaaca

SEQ ID NO: 1957080 - RNA, 19 nt, Homo sapiens
  misc_RNA (1)...(19): siRNA sense strand
gggcucugaugagaacaug

SEQ ID NO: 1957081 - RNA, 19 nt, Homo sapiens
  misc_RNA (1)...(19): siRNA sense strand
gugugaaacagaugaacaa

SEQ ID NO: 1957082 - RNA, 19 nt, Homo sapiens
  misc_RNA (1)...(19): siRNA sense strand
gcauggaggugacgaaugu

SEQ ID NO: 1957083 - RNA, 19 nt, Homo sapiens
  misc_RNA (1)...(19): siRNA sense strand
gcagauggcacucuccuuu

SEQ ID NO: 1957084 - RNA, 19 nt, Homo sapiens
  misc_RNA (1)...(19): siRNA sense strand
guucaucucuuucuccuau

SEQ ID NO: 1957085 - RNA, 19 nt, Homo sapiens
  misc_RNA (1)...(19): siRNA sense strand
ggagacugcugagaccaaa

SEQ ID NO: 1957086 - RNA, 19 nt, Homo sapiens
  misc_RNA (1)...(19): siRNA sense strand
gauucuggcuguucuaaag

SEQ ID NO: 1957087 - RNA, 19 nt, Homo sapiens
  misc_RNA (1)...(19): siRNA sense strand
caauucagcugcccuucug

SEQ ID NO: 1957088 - RNA, 19 nt, Homo sapiens
  misc_RNA (1)...(19): siRNA sense strand
gugcugacauuuccaucaa

SEQ ID NO: 1957089 - RNA, 19 nt, Homo sapiens
  misc_RNA (1)...(19): siRNA sense strand
ccaaaaggcuucacucagu

SEQ ID NO: 1957090 - RNA, 19 nt, Homo sapiens
  misc_RNA (1)...(19): siRNA sense strand
cuggacaucugcuucacua

SEQ ID NO: 1957091 - RNA, 19 nt, Homo sapiens
  misc_RNA (1)...(19): siRNA sense strand
ggaaaccaucuccuucuca

SEQ ID NO: 1957092 - RNA, 19 nt, Homo sapiens
  misc_RNA (1)...(19): siRNA sense strand
ugagcaugauggcauuuga

SEQ ID NO: 1957093 - RNA, 19 nt, Homo sapiens
  misc_RNA (1)...(19): siRNA sense strand
gagauucuggcuguucuaa

SEQ ID NO: 1957094 - RNA, 19 nt, Homo sapiens
  misc_RNA (1)...(19): siRNA sense strand
uacgggaccuuauucuuca

SEQ ID NO: 1957095 - RNA, 19 nt, Homo sapiens
  misc_RNA (1)...(19): siRNA sense strand
cuacgggaccuuauucuuc

SEQ ID NO: 1957096 - RNA, 19 nt, Homo sapiens
  misc_RNA (1)...(19): siRNA sense strand
gaaugugaucuuccuagga

SEQ ID NO: 1957097 - RNA, 19 nt, Homo sapiens
  misc_RNA (1)...(19): siRNA sense strand
gcccauguacuucuuccua

SEQ ID NO: 1957098 - RNA, 19 nt, Homo sapiens
  misc_RNA (1)...(19): siRNA sense strand
ggaagccuaagucuaagga

SEQ ID NO: 1957099 - RNA, 19 nt, Homo sapiens
  misc_RNA (1)...(19): siRNA sense strand
gcacacgcccauguacuuc

SEQ ID NO: 1957100 - RNA, 19 nt, Homo sapiens
  misc_RNA (1)...(19): siRNA sense strand
ucuauagccugaggaacaa

SEQ ID NO: 1957101 - RNA, 19 nt, Homo sapiens
  misc_RNA (1)...(19): siRNA sense strand
gcaauucagcugcccuucu

SEQ ID NO: 1957102 - RNA, 19 nt, Homo sapiens
  misc_RNA (1)...(19): siRNA sense strand
ucaaugugaucagcaugga

SEQ ID NO: 1957103 - RNA, 19 nt, Homo sapiens
  misc_RNA (1)...(19): siRNA sense strand
gagcagacaaagaggaucu

SEQ ID NO: 1957104 - RNA, 19 nt, Homo sapiens
  misc_RNA (1)...(19): siRNA sense strand
ugacgaaugugaucuuccu

SEQ ID NO: 1957105 - RNA, 19 nt, Homo sapiens
  misc_RNA (1)...(19): siRNA sense strand
ggugacgaaugugaucuuc

SEQ ID NO: 1957106 - RNA, 19 nt, Homo sapiens
  misc_RNA (1)...(19): siRNA sense strand
guuggccugugcugacauu

SEQ ID NO: 1957107 - RNA, 19 nt, Homo sapiens
  misc_RNA (1)...(19): siRNA sense strand
gaugugaaggcugcuguga

SEQ ID NO: 1957108 - RNA, 19 nt, Homo sapiens
  misc_RNA (1)...(19): siRNA sense strand
agaggaucuuucagacaaa

SEQ ID NO: 1957109 - RNA, 19 nt, Homo sapiens
  misc_RNA (1)...(19): siRNA sense strand
caugggagcagacaaagag

SEQ ID NO: 1957110 - RNA, 19 nt, Homo sapiens
  misc_RNA (1)...(19): siRNA sense strand
uccuaugucuucaucauca

SEQ ID NO: 1957111 - RNA, 19 nt, Homo sapiens
  misc_RNA (1)...(19): siRNA sense strand
ggaggugacgaaugugauc

SEQ ID NO: 1957112 - RNA, 19 nt, Homo sapiens
  misc_RNA (1)...(19): siRNA sense strand
gagcaugauggcauuugau

SEQ ID NO: 1957113 - RNA, 19 nt, Homo sapiens
  misc_RNA (1)...(19): siRNA sense strand
acacgcccauguacuucuu

SEQ ID NO: 1957114 - RNA, 19 nt, Homo sapiens
  misc_RNA (1)...(19): siRNA sense strand
gcugauguaccucgugauc

SEQ ID NO: 1957115 - RNA, 19 nt, Homo sapiens
  misc_RNA (1)...(19): siRNA sense strand
gaggaacaaggaugugaag

SEQ ID NO: 1957116 - RNA, 19 nt, Homo sapiens
  misc_RNA (1)...(19): siRNA sense strand
gaggaucuuucagacaaac

SEQ ID NO: 1957117 - RNA, 19 nt, Homo sapiens
  misc_RNA (1)...(19): siRNA sense strand
cagauggcacucuccuuug

SEQ ID NO: 1957118 - RNA, 19 nt, Homo sapiens
  misc_RNA (1)...(19): siRNA sense strand
gacaucugcuucacuaccu

SEQ ID NO: 1957119 - RNA, 19 nt, Homo sapiens
  misc_RNA (1)...(19): siRNA sense strand
gguacuccgugaucaugag

SEQ ID NO: 1957120 - RNA, 19 nt, Homo sapiens
  misc_RNA (1)...(19): siRNA sense strand
gugagauucuggcuguucu

SEQ ID NO: 1957121 - RNA, 19 nt, Homo sapiens
  misc_RNA (1)...(19): siRNA sense strand
ucaucucuuucuccuaugu

SEQ ID NO: 1957122 - RNA, 19 nt, Homo sapiens
  misc_RNA (1)...(19): siRNA sense strand
gggaccuuauucuucaugu

SEQ ID NO: 1957123 - RNA, 19 nt, Homo sapiens
  misc_RNA (1)...(19): siRNA sense strand
cgucuucuacgggaccuua

SEQ ID NO: 1957124 - RNA, 19 nt, Homo sapiens
  misc_RNA (1)...(19): siRNA sense strand
ugaggaacaaggaugugaa

SEQ ID NO: 1957125 - RNA, 19 nt, Homo sapiens
  misc_RNA (1)...(19): siRNA sense strand
gggagcagacaaagaggau

SEQ ID NO: 1957126 - RNA, 19 nt, Homo sapiens
  misc_RNA (1)...(19): siRNA sense strand
gaaaggagaagcaaauaua

SEQ ID NO: 1957127 - RNA, 19 nt, Homo sapiens
  misc_RNA (1)...(19): siRNA sense strand
ggaagaaccucguuucgaa

SEQ ID NO: 1957128 - RNA, 19 nt, Homo sapiens
  misc_RNA (1)...(19): siRNA sense strand
gaacggaacugucuagaag

SEQ ID NO: 1957129 - RNA, 19 nt, Homo sapiens
  misc_RNA (1)...(19): siRNA sense strand
gaagaaccaugaaauuguu

SEQ ID NO: 1957130 - RNA, 19 nt, Homo sapiens
  misc_RNA (1)...(19): siRNA sense strand
ggacaacaauuugcauuaa

SEQ ID NO: 1957131 - RNA, 19 nt, Homo sapiens
  misc_RNA (1)...(19): siRNA sense strand
caaucaagcuuuagaagaa

SEQ ID NO: 1957132 - RNA, 19 nt, Homo sapiens
  misc_RNA (1)...(19): siRNA sense strand
gaaccucguuucgaaauuu

SEQ ID NO: 1957133 - RNA, 19 nt, Homo sapiens
  misc_RNA (1)...(19): siRNA sense strand
ggaagacaguuuaucagaa

SEQ ID NO: 1957134 - RNA, 19 nt, Homo sapiens
  misc_RNA (1)...(19): siRNA sense strand
ugaaugcccucaucuaauu

SEQ ID NO: 1957135 - RNA, 19 nt, Homo sapiens
  misc_RNA (1)...(19): siRNA sense strand
gaaggaauuugccuauaug

SEQ ID NO: 1957136 - RNA, 19 nt, Homo sapiens
  misc_RNA (1)...(19): siRNA sense strand
gaagacaguuuaucagaag

SEQ ID NO: 1957137 - RNA, 19 nt, Homo sapiens
  misc_RNA (1)...(19): siRNA sense strand
aaacaacucuguaacugaa

SEQ ID NO: 1957138 - RNA, 19 nt, Homo sapiens
  misc_RNA (1)...(19): siRNA sense strand
ugacagagauguuaaaugc

SEQ ID NO: 1957139 - RNA, 19 nt, Homo sapiens
  misc_RNA (1)...(19): siRNA sense strand
gaagaaggacaacaauuug

SEQ ID NO: 1957140 - RNA, 19 nt, Homo sapiens
  misc_RNA (1)...(19): siRNA sense strand
ggaacuaauugucaaacuu

SEQ ID NO: 1957141 - RNA, 19 nt, Homo sapiens
  misc_RNA (1)...(19): siRNA sense strand
gcaguuugauugcuucuau

SEQ ID NO: 1957142 - RNA, 19 nt, Homo sapiens
  misc_RNA (1)...(19): siRNA sense strand
gaacuaauugucaaacuug

SEQ ID NO: 1957143 - RNA, 19 nt, Homo sapiens
  misc_RNA (1)...(19): siRNA sense strand
ugaagaaggacaacaauuu

SEQ ID NO: 1957144 - RNA, 19 nt, Homo sapiens
  misc_RNA (1)...(19): siRNA sense strand
uggagacccugaacaaaua

SEQ ID NO: 1957145 - RNA, 19 nt, Homo sapiens
  misc_RNA (1)...(19): siRNA sense strand
ugaaggaauuugccuauau

SEQ ID NO: 1957146 - RNA, 19 nt, Homo sapiens
  misc_RNA (1)...(19): siRNA sense strand
ggcaaagaaucagauauuu

SEQ ID NO: 1957147 - RNA, 19 nt, Homo sapiens
  misc_RNA (1)...(19): siRNA sense strand
gcaaguaguugagucuguu

SEQ ID NO: 1957148 - RNA, 19 nt, Homo sapiens
  misc_RNA (1)...(19): siRNA sense strand
caaagccaauugauuacaa

SEQ ID NO: 1957149 - RNA, 19 nt, Homo sapiens
  misc_RNA (1)...(19): siRNA sense strand
ccagauggguguuggcaaa

SEQ ID NO: 1957150 - RNA, 19 nt, Homo sapiens
  misc_RNA (1)...(19): siRNA sense strand
ugaagauccugcaucagua

SEQ ID NO: 1957151 - RNA, 19 nt, Homo sapiens
  misc_RNA (1)...(19): siRNA sense strand
gcaggcagaugaugaacug

SEQ ID NO: 1957152 - RNA, 19 nt, Homo sapiens
  misc_RNA (1)...(19): siRNA sense strand
aaacaugguggcuguaaua

SEQ ID NO: 1957153 - RNA, 19 nt, Homo sapiens
  misc_RNA (1)...(19): siRNA sense strand
gcagaaaggagaagcaaau

SEQ ID NO: 1957154 - RNA, 19 nt, Homo sapiens
  misc_RNA (1)...(19): siRNA sense strand
caaaugcaggauaugauua

SEQ ID NO: 1957155 - RNA, 19 nt, Homo sapiens
  misc_RNA (1)...(19): siRNA sense strand
gggaaaacaugcaaaauau

SEQ ID NO: 1957156 - RNA, 19 nt, Homo sapiens
  misc_RNA (1)...(19): siRNA sense strand
ggaugaaagugaccauauc

SEQ ID NO: 1957157 - RNA, 19 nt, Homo sapiens
  misc_RNA (1)...(19): siRNA sense strand
ggaacugucuagaagaauc

SEQ ID NO: 1957158 - RNA, 19 nt, Homo sapiens
  misc_RNA (1)...(19): siRNA sense strand
agagggaucugaauucuca

SEQ ID NO: 1957159 - RNA, 19 nt, Homo sapiens
  misc_RNA (1)...(19): siRNA sense strand
caugguggcuguaauaaag

SEQ ID NO: 1957160 - RNA, 19 nt, Homo sapiens
  misc_RNA (1)...(19): siRNA sense strand
ggaauuugccuauaugaag

SEQ ID NO: 1957161 - RNA, 19 nt, Homo sapiens
  misc_RNA (1)...(19): siRNA sense strand
gaagaaccucguuucgaaa

SEQ ID NO: 1957162 - RNA, 19 nt, Homo sapiens
  misc_RNA (1)...(19): siRNA sense strand
ugacgaguaugaagaugaa

SEQ ID NO: 1957163 - RNA, 19 nt, Homo sapiens
  misc_RNA (1)...(19): siRNA sense strand
ucauggaacucauaaaugg

SEQ ID NO: 1957164 - RNA, 19 nt, Homo sapiens
  misc_RNA (1)...(19): siRNA sense strand
gcacggaguuuugaaauga

SEQ ID NO: 1957165 - RNA, 19 nt, Homo sapiens
  misc_RNA (1)...(19): siRNA sense strand
gcaagauggucagagaguu

SEQ ID NO: 1957166 - RNA, 19 nt, Homo sapiens
  misc_RNA (1)...(19): siRNA sense strand
cauuaaagcuucacagacu

SEQ ID NO: 1957167 - RNA, 19 nt, Homo sapiens
  misc_RNA (1)...(19): siRNA sense strand
gaaaacaacucuguaacug

SEQ ID NO: 1957168 - RNA, 19 nt, Homo sapiens
  misc_RNA (1)...(19): siRNA sense strand
gaagcuauggaacuaauug

SEQ ID NO: 1957169 - RNA, 19 nt, Homo sapiens
  misc_RNA (1)...(19): siRNA sense strand
ugaugaagcuauggaacua

SEQ ID NO: 1957170 - RNA, 19 nt, Homo sapiens
  misc_RNA (1)...(19): siRNA sense strand
gauacaccauguugaagau

SEQ ID NO: 1957171 - RNA, 19 nt, Homo sapiens
  misc_RNA (1)...(19): siRNA sense strand
ugucuuggcuuuauuuauc

SEQ ID NO: 1957172 - RNA, 19 nt, Homo sapiens
  misc_RNA (1)...(19): siRNA sense strand
uuccaaagccaauugauua

SEQ ID NO: 1957173 - RNA, 19 nt, Homo sapiens
  misc_RNA (1)...(19): siRNA sense strand
guugacaaaugcaggauau

SEQ ID NO: 1957174 - RNA, 19 nt, Homo sapiens
  misc_RNA (1)...(19): siRNA sense strand
gaaucaguauagaacaaga

SEQ ID NO: 1957175 - RNA, 19 nt, Homo sapiens
  misc_RNA (1)...(19): siRNA sense strand
ucagagggcugcuauugca

SEQ ID NO: 1957176 - RNA, 19 nt, Homo sapiens
  misc_RNA (1)...(19): siRNA sense strand
caaugugucuuggcuuuau

SEQ ID NO: 1957177 - RNA, 19 nt, Homo sapiens
  misc_RNA (1)...(19): siRNA sense strand
gauaugauuaccuagcuuu

SEQ ID NO: 1957178 - RNA, 19 nt, Homo sapiens
  misc_RNA (1)...(19): siRNA sense strand
gaaggugaaacgucaguug

SEQ ID NO: 1957179 - RNA, 19 nt, Homo sapiens
  misc_RNA (1)...(19): siRNA sense strand
ggucauggaacucauaaau

SEQ ID NO: 1957180 - RNA, 19 nt, Homo sapiens
  misc_RNA (1)...(19): siRNA sense strand
gaagauccugcaucaguau

SEQ ID NO: 1957181 - RNA, 19 nt, Homo sapiens
  misc_RNA (1)...(19): siRNA sense strand
ccacagaugguuucaacuu

SEQ ID NO: 1957182 - RNA, 19 nt, Homo sapiens
  misc_RNA (1)...(19): siRNA sense strand
ggcuaucgguugacaaaug

SEQ ID NO: 1957183 - RNA, 19 nt, Homo sapiens
  misc_RNA (1)...(19): siRNA sense strand
gauggguguuggcaaagaa

SEQ ID NO: 1957184 - RNA, 19 nt, Homo sapiens
  misc_RNA (1)...(19): siRNA sense strand
aaaggaagacaguuuauca

SEQ ID NO: 1957185 - RNA, 19 nt, Homo sapiens
  misc_RNA (1)...(19): siRNA sense strand
ugaagaaccaugaaauugu

SEQ ID NO: 1957186 - RNA, 19 nt, Homo sapiens
  misc_RNA (1)...(19): siRNA sense strand
gaaauuuccaguuccaaag

SEQ ID NO: 1957187 - RNA, 19 nt, Homo sapiens
  misc_RNA (1)...(19): siRNA sense strand
gaacaaauaaaggaagaca

SEQ ID NO: 1957188 - RNA, 19 nt, Homo sapiens
  misc_RNA (1)...(19): siRNA sense strand
ucagauacaccauguugaa

SEQ ID NO: 1957189 - RNA, 19 nt, Homo sapiens
  misc_RNA (1)...(19): siRNA sense strand
guccagggcuaucgguuga

SEQ ID NO: 1957190 - RNA, 19 nt, Homo sapiens
  misc_RNA (1)...(19): siRNA sense strand
cagaacuggugaaacagaa

SEQ ID NO: 1957191 - RNA, 19 nt, Homo sapiens
  misc_RNA (1)...(19): siRNA sense strand
ugggagcuaugaaucagua

SEQ ID NO: 1957192 - RNA, 19 nt, Homo sapiens
  misc_RNA (1)...(19): siRNA sense strand
caggcaagauggucagaga

SEQ ID NO: 1957193 - RNA, 19 nt, Homo sapiens
  misc_RNA (1)...(19): siRNA sense strand
gaaaugacugaauucaauc

SEQ ID NO: 1957194 - RNA, 19 nt, Homo sapiens
  misc_RNA (1)...(19): siRNA sense strand
acagagauguuaaaugcau

SEQ ID NO: 1957195 - RNA, 19 nt, Homo sapiens
  misc_RNA (1)...(19): siRNA sense strand
gaugaaagugaccauauca

SEQ ID NO: 1957196 - RNA, 19 nt, Homo sapiens
  misc_RNA (1)...(19): siRNA sense strand
ugacaaaugcaggauauga

SEQ ID NO: 1957197 - RNA, 19 nt, Homo sapiens
  misc_RNA (1)...(19): siRNA sense strand
uggcaaagaaucagauauu

SEQ ID NO: 1957198 - RNA, 19 nt, Homo sapiens
  misc_RNA (1)...(19): siRNA sense strand
guaguugagucuguuggaa

SEQ ID NO: 1957199 - RNA, 19 nt, Homo sapiens
  misc_RNA (1)...(19): siRNA sense strand
agacgucgauugcagaaag

SEQ ID NO: 1957200 - RNA, 19 nt, Homo sapiens
  misc_RNA (1)...(19): siRNA sense strand
gccuugucgucauuaaaua

SEQ ID NO: 1957201 - RNA, 19 nt, Homo sapiens
  misc_RNA (1)...(19): siRNA sense strand
uaauugccuugucgucauu

SEQ ID NO: 1957202 - RNA, 19 nt, Homo sapiens
  misc_RNA (1)...(19): siRNA sense strand
ugcaggauaugauuaccua

SEQ ID NO: 1957203 - RNA, 19 nt, Homo sapiens
  misc_RNA (1)...(19): siRNA sense strand
cagaaaggagaagcaaaua

SEQ ID NO: 1957204 - RNA, 19 nt, Homo sapiens
  misc_RNA (1)...(19): siRNA sense strand
ggagcuaugaaucaguaua

SEQ ID NO: 1957205 - RNA, 19 nt, Homo sapiens
  misc_RNA (1)...(19): siRNA sense strand
gaacugucuagaagaauca

SEQ ID NO: 1957206 - RNA, 19 nt, Homo sapiens
  misc_RNA (1)...(19): siRNA sense strand
ggaaaugcaggcagaugau

SEQ ID NO: 1957207 - RNA, 19 nt, Homo sapiens
  misc_RNA (1)...(19): siRNA sense strand
uuaaggauaucaggagaga

SEQ ID NO: 1957208 - RNA, 19 nt, Homo sapiens
  misc_RNA (1)...(19): siRNA sense strand
aaacaaacgcgauuaucau

SEQ ID NO: 1957209 - RNA, 19 nt, Homo sapiens
  misc_RNA (1)...(19): siRNA sense strand
ggauaugauuaccuagcuu

SEQ ID NO: 1957210 - RNA, 19 nt, Homo sapiens
  misc_RNA (1)...(19): siRNA sense strand
aacaaacgcgauuaucaua

SEQ ID NO: 1957211 - RNA, 19 nt, Homo sapiens
  misc_RNA (1)...(19): siRNA sense strand
ucaaucaagcuuuagaaga

SEQ ID NO: 1957212 - RNA, 19 nt, Homo sapiens
  misc_RNA (1)...(19): siRNA sense strand
gaucugaauucucauuuuc

SEQ ID NO: 1957213 - RNA, 19 nt, Homo sapiens
  misc_RNA (1)...(19): siRNA sense strand
gaacugcuucauccauuag

SEQ ID NO: 1957214 - RNA, 19 nt, Homo sapiens
  misc_RNA (1)...(19): siRNA sense strand
ucucugccaugaaggaauu

SEQ ID NO: 1957215 - RNA, 19 nt, Homo sapiens
  misc_RNA (1)...(19): siRNA sense strand
acaaaugcaggauaugauu

SEQ ID NO: 1957216 - RNA, 19 nt, Homo sapiens
  misc_RNA (1)...(19): siRNA sense strand
uaaacaugguggcuguaau

SEQ ID NO: 1957217 - RNA, 19 nt, Homo sapiens
  misc_RNA (1)...(19): siRNA sense strand
aaagagggaucugaauucu

SEQ ID NO: 1957218 - RNA, 19 nt, Homo sapiens
  misc_RNA (1)...(19): siRNA sense strand
gcuauggaacuaauuguca

SEQ ID NO: 1957219 - RNA, 19 nt, Homo sapiens
  misc_RNA (1)...(19): siRNA sense strand
gauccugcaucaguauaug

SEQ ID NO: 1957220 - RNA, 19 nt, Homo sapiens
  misc_RNA (1)...(19): siRNA sense strand
caguuugauugcuucuaua

SEQ ID NO: 1957221 - RNA, 19 nt, Homo sapiens
  misc_RNA (1)...(19): siRNA sense strand
uauagaacaagaacucuga

SEQ ID NO: 1957222 - RNA, 19 nt, Homo sapiens
  misc_RNA (1)...(19): siRNA sense strand
acaacucuguaacugaauu

SEQ ID NO: 1957223 - RNA, 19 nt, Homo sapiens
  misc_RNA (1)...(19): siRNA sense strand
ggagacccugaacaaauaa

SEQ ID NO: 1957224 - RNA, 19 nt, Homo sapiens
  misc_RNA (1)...(19): siRNA sense strand
cauuagguccagaugauaa

SEQ ID NO: 1957225 - RNA, 19 nt, Homo sapiens
  misc_RNA (1)...(19): siRNA sense strand
gaaaugcaggcagaugaug

SEQ ID NO: 1957226 - RNA, 19 nt, Homo sapiens
  misc_RNA (1)...(19): siRNA sense strand
gcucaacacuauuuaagua

SEQ ID NO: 1957227 - RNA, 19 nt, Homo sapiens
  misc_RNA (1)...(19): siRNA sense strand
ggaagucacugcuuuggaa

SEQ ID NO: 1957228 - RNA, 19 nt, Homo sapiens
  misc_RNA (1)...(19): siRNA sense strand
agacauagcuauccaaaug

SEQ ID NO: 1957229 - RNA, 19 nt, Homo sapiens
  misc_RNA (1)...(19): siRNA sense strand
gcauguggcugaauucauu

SEQ ID NO: 1957230 - RNA, 19 nt, Homo sapiens
  misc_RNA (1)...(19): siRNA sense strand
gaaaauggcaguccuaaua

SEQ ID NO: 1957231 - RNA, 19 nt, Homo sapiens
  misc_RNA (1)...(19): siRNA sense strand
ugaagaaggugauuaugaa

SEQ ID NO: 1957232 - RNA, 19 nt, Homo sapiens
  misc_RNA (1)...(19): siRNA sense strand
ggaagaggaugaagaaggu

SEQ ID NO: 1957233 - RNA, 19 nt, Homo sapiens
  misc_RNA (1)...(19): siRNA sense strand
gaucaagaaggaaacuuua

SEQ ID NO: 1957234 - RNA, 19 nt, Homo sapiens
  misc_RNA (1)...(19): siRNA sense strand
caagaaacuucaguaauuc

SEQ ID NO: 1957235 - RNA, 19 nt, Homo sapiens
  misc_RNA (1)...(19): siRNA sense strand
gaagaaucauguuaagaag

SEQ ID NO: 1957236 - RNA, 19 nt, Homo sapiens
  misc_RNA (1)...(19): siRNA sense strand
acaugaagcucaacacuau

SEQ ID NO: 1957237 - RNA, 19 nt, Homo sapiens
  misc_RNA (1)...(19): siRNA sense strand
guaaugaaguggagcaaag

SEQ ID NO: 1957238 - RNA, 19 nt, Homo sapiens
  misc_RNA (1)...(19): siRNA sense strand
ggaggaagaggaugaagaa

SEQ ID NO: 1957239 - RNA, 19 nt, Homo sapiens
  misc_RNA (1)...(19): siRNA sense strand
gcaaugaccguacauccaa

SEQ ID NO: 1957240 - RNA, 19 nt, Homo sapiens
  misc_RNA (1)...(19): siRNA sense strand
gcagaagcauuugaagaau

SEQ ID NO: 1957241 - RNA, 19 nt, Homo sapiens
  misc_RNA (1)...(19): siRNA sense strand
guucuuccauuucauuuga

SEQ ID NO: 1957242 - RNA, 19 nt, Homo sapiens
  misc_RNA (1)...(19): siRNA sense strand
gaaauucccauaaguguac

SEQ ID NO: 1957243 - RNA, 19 nt, Homo sapiens
  misc_RNA (1)...(19): siRNA sense strand
agacauauaugccacagau

SEQ ID NO: 1957244 - RNA, 19 nt, Homo sapiens
  misc_RNA (1)...(19): siRNA sense strand
agaaggugauuaugaagaa

SEQ ID NO: 1957245 - RNA, 19 nt, Homo sapiens
  misc_RNA (1)...(19): siRNA sense strand
gacaaacaguaaugaagug

SEQ ID NO: 1957246 - RNA, 19 nt, Homo sapiens
  misc_RNA (1)...(19): siRNA sense strand
gaaaaugggaauucugaua

SEQ ID NO: 1957247 - RNA, 19 nt, Homo sapiens
  misc_RNA (1)...(19): siRNA sense strand
gaagcucaacacuauuuaa

SEQ ID NO: 1957248 - RNA, 19 nt, Homo sapiens
  misc_RNA (1)...(19): siRNA sense strand
ugaagaagaugauuaugac

SEQ ID NO: 1957249 - RNA, 19 nt, Homo sapiens
  misc_RNA (1)...(19): siRNA sense strand
gguuguguccggauauuua

SEQ ID NO: 1957250 - RNA, 19 nt, Homo sapiens
  misc_RNA (1)...(19): siRNA sense strand
ggaugaagaaggugauuau

SEQ ID NO: 1957251 - RNA, 19 nt, Homo sapiens
  misc_RNA (1)...(19): siRNA sense strand
ggaacugugugccauccaa

SEQ ID NO: 1957252 - RNA, 19 nt, Homo sapiens
  misc_RNA (1)...(19): siRNA sense strand
ucaacaggaugaucaggaa

SEQ ID NO: 1957253 - RNA, 19 nt, Homo sapiens
  misc_RNA (1)...(19): siRNA sense strand
gaaucaagaaacuucagua

SEQ ID NO: 1957254 - RNA, 19 nt, Homo sapiens
  misc_RNA (1)...(19): siRNA sense strand
ccacagaucaagaaggaaa

SEQ ID NO: 1957255 - RNA, 19 nt, Homo sapiens
  misc_RNA (1)...(19): siRNA sense strand
ccaagugaaacaauucuuu

SEQ ID NO: 1957256 - RNA, 19 nt, Homo sapiens
  misc_RNA (1)...(19): siRNA sense strand
agaagcauuugaagaauca

SEQ ID NO: 1957257 - RNA, 19 nt, Homo sapiens
  misc_RNA (1)...(19): siRNA sense strand
acaaccaagugaaacaauu

SEQ ID NO: 1957258 - RNA, 19 nt, Homo sapiens
  misc_RNA (1)...(19): siRNA sense strand
gcaguccuaauaauucuuu

SEQ ID NO: 1957259 - RNA, 19 nt, Homo sapiens
  misc_RNA (1)...(19): siRNA sense strand
auacagaggcagcaaauug

SEQ ID NO: 1957260 - RNA, 19 nt, Homo sapiens
  misc_RNA (1)...(19): siRNA sense strand
gaaggaaacaaagaaguca

SEQ ID NO: 1957261 - RNA, 19 nt, Homo sapiens
  misc_RNA (1)...(19): siRNA sense strand
guaugaacaugaagcucaa

SEQ ID NO: 1957262 - RNA, 19 nt, Homo sapiens
  misc_RNA (1)...(19): siRNA sense strand
guacauccaaccgauuuaa

SEQ ID NO: 1957263 - RNA, 19 nt, Homo sapiens
  misc_RNA (1)...(19): siRNA sense strand
auuaugaccugaaucaaga

SEQ ID NO: 1957264 - RNA, 19 nt, Homo sapiens
  misc_RNA (1)...(19): siRNA sense strand
cagaagcauuugaagaauc

SEQ ID NO: 1957265 - RNA, 19 nt, Homo sapiens
  misc_RNA (1)...(19): siRNA sense strand
gaacaugaagcucaacacu

SEQ ID NO: 1957266 - RNA, 19 nt, Homo sapiens
  misc_RNA (1)...(19): siRNA sense strand
ucccauaaguguaccagaa

SEQ ID NO: 1957267 - RNA, 19 nt, Homo sapiens
  misc_RNA (1)...(19): siRNA sense strand
aaaggcaauuugaagauuc

SEQ ID NO: 1957268 - RNA, 19 nt, Homo sapiens
  misc_RNA (1)...(19): siRNA sense strand
cgacaaacaguaaugaagu

SEQ ID NO: 1957269 - RNA, 19 nt, Homo sapiens
  misc_RNA (1)...(19): siRNA sense strand
accagaagauguuauugaa

SEQ ID NO: 1957270 - RNA, 19 nt, Homo sapiens
  misc_RNA (1)...(19): siRNA sense strand
ucacugcuuuggaagaaau

SEQ ID NO: 1957271 - RNA, 19 nt, Homo sapiens
  misc_RNA (1)...(19): siRNA sense strand
gaacugugugccauccaaa

SEQ ID NO: 1957272 - RNA, 19 nt, Homo sapiens
  misc_RNA (1)...(19): siRNA sense strand
uagaccaacuuaauagaca

SEQ ID NO: 1957273 - RNA, 19 nt, Homo sapiens
  misc_RNA (1)...(19): siRNA sense strand
ugaaauucccauaagugua

SEQ ID NO: 1957274 - RNA, 19 nt, Homo sapiens
  misc_RNA (1)...(19): siRNA sense strand
gcacaaccaagugaaacaa

SEQ ID NO: 1957275 - RNA, 19 nt, Homo sapiens
  misc_RNA (1)...(19): siRNA sense strand
ccauaaguguaccagaaga

SEQ ID NO: 1957276 - RNA, 19 nt, Homo sapiens
  misc_RNA (1)...(19): siRNA sense strand
ucauugaaauucccauaag

SEQ ID NO: 1957277 - RNA, 19 nt, Homo sapiens
  misc_RNA (1)...(19): siRNA sense strand
caaccaagugaaacaauuc

SEQ ID NO: 1957278 - RNA, 19 nt, Homo sapiens
  misc_RNA (1)...(19): siRNA sense strand
ugccacagaucaagaagga

SEQ ID NO: 1957279 - RNA, 19 nt, Homo sapiens
  misc_RNA (1)...(19): siRNA sense strand
aaugggaauucugauagua

SEQ ID NO: 1957280 - RNA, 19 nt, Homo sapiens
  misc_RNA (1)...(19): siRNA sense strand
gaccaacuuaauagacaua

SEQ ID NO: 1957281 - RNA, 19 nt, Homo sapiens
  misc_RNA (1)...(19): siRNA sense strand
gaagaaggugauuaugaag

SEQ ID NO: 1957282 - RNA, 19 nt, Homo sapiens
  misc_RNA (1)...(19): siRNA sense strand
gaauucugauaguaaggau

SEQ ID NO: 1957283 - RNA, 19 nt, Homo sapiens
  misc_RNA (1)...(19): siRNA sense strand
aaauggcaguccuaauaau

SEQ ID NO: 1957284 - RNA, 19 nt, Homo sapiens
  misc_RNA (1)...(19): siRNA sense strand
ggaauucugauaguaagga

SEQ ID NO: 1957285 - RNA, 19 nt, Homo sapiens
  misc_RNA (1)...(19): siRNA sense strand
ccagaagauguuauugaaa

SEQ ID NO: 1957286 - RNA, 19 nt, Homo sapiens
  misc_RNA (1)...(19): siRNA sense strand
uaccagaagauguuauuga

SEQ ID NO: 1957287 - RNA, 19 nt, Homo sapiens
  misc_RNA (1)...(19): siRNA sense strand
gaucaggaagucacugcuu

SEQ ID NO: 1957288 - RNA, 19 nt, Homo sapiens
  misc_RNA (1)...(19): siRNA sense strand
uguucuaguucuuccauuu

SEQ ID NO: 1957289 - RNA, 19 nt, Homo sapiens
  misc_RNA (1)...(19): siRNA sense strand
ugaaguggagcaaaggaaa

SEQ ID NO: 1957290 - RNA, 19 nt, Homo sapiens
  misc_RNA (1)...(19): siRNA sense strand
cauugaaauucccauaagu

SEQ ID NO: 1957291 - RNA, 19 nt, Homo sapiens
  misc_RNA (1)...(19): siRNA sense strand
cgauuuaaaugugcgacaa

SEQ ID NO: 1957292 - RNA, 19 nt, Homo sapiens
  misc_RNA (1)...(19): siRNA sense strand
gaaggugauuaugaagaag

SEQ ID NO: 1957293 - RNA, 19 nt, Homo sapiens
  misc_RNA (1)...(19): siRNA sense strand
ggagacacuuacugcuucu

SEQ ID NO: 1957294 - RNA, 19 nt, Homo sapiens
  misc_RNA (1)...(19): siRNA sense strand
gauuuaaaugugcgacaaa

SEQ ID NO: 1957295 - RNA, 19 nt, Homo sapiens
  misc_RNA (1)...(19): siRNA sense strand
cugagcauguggcugaauu

SEQ ID NO: 1957296 - RNA, 19 nt, Homo sapiens
  misc_RNA (1)...(19): siRNA sense strand
ugaccugaaucaagaaacu

SEQ ID NO: 1957297 - RNA, 19 nt, Homo sapiens
  misc_RNA (1)...(19): siRNA sense strand
gaagauacagaggcagcaa

SEQ ID NO: 1957298 - RNA, 19 nt, Homo sapiens
  misc_RNA (1)...(19): siRNA sense strand
cauccaaccgauuuaaaug

SEQ ID NO: 1957299 - RNA, 19 nt, Homo sapiens
  misc_RNA (1)...(19): siRNA sense strand
aaaugggaauucugauagu

SEQ ID NO: 1957300 - RNA, 19 nt, Homo sapiens
  misc_RNA (1)...(19): siRNA sense strand
agagucaucugcacaacca

SEQ ID NO: 1957301 - RNA, 19 nt, Homo sapiens
  misc_RNA (1)...(19): siRNA sense strand
ugaagcucaacacuauuua

SEQ ID NO: 1957302 - RNA, 19 nt, Homo sapiens
  misc_RNA (1)...(19): siRNA sense strand
uaaguguccugcucuuggu

SEQ ID NO: 1957303 - RNA, 19 nt, Homo sapiens
  misc_RNA (1)...(19): siRNA sense strand
gugauuaugaagaagauga

SEQ ID NO: 1957304 - RNA, 19 nt, Homo sapiens
  misc_RNA (1)...(19): siRNA sense strand
ggaugauuaugaggaggaa

SEQ ID NO: 1957305 - RNA, 19 nt, Homo sapiens
  misc_RNA (1)...(19): siRNA sense strand
uaguaaggauuuggaagug

SEQ ID NO: 1957306 - RNA, 19 nt, Homo sapiens
  misc_RNA (1)...(19): siRNA sense strand
ugaaggaaacaaagaaguc

SEQ ID NO: 1957307 - RNA, 19 nt, Homo sapiens
  misc_RNA (1)...(19): siRNA sense strand
gcgacaaacaguaaugaag

SEQ ID NO: 1957308 - RNA, 19 nt, Homo sapiens
  misc_RNA (1)...(19): siRNA sense strand
acauauaugccacagauca

SEQ ID NO: 1957309 - RNA, 19 nt, Homo sapiens
  misc_RNA (1)...(19): siRNA sense strand
augaagaaggugauuauga

SEQ ID NO: 1957310 - RNA, 19 nt, Homo sapiens
  misc_RNA (1)...(19): siRNA sense strand
ccagaaugccaugagcuuu

SEQ ID NO: 1957311 - RNA, 19 nt, Homo sapiens
  misc_RNA (1)...(19): siRNA sense strand
guccggauauuuaaaagaa

SEQ ID NO: 1957312 - RNA, 19 nt, Homo sapiens
  misc_RNA (1)...(19): siRNA sense strand
cagcucaacaggaugauca

SEQ ID NO: 1957313 - RNA, 19 nt, Homo sapiens
  misc_RNA (1)...(19): siRNA sense strand
ucaagaaggaaacuuuaag

SEQ ID NO: 1957314 - RNA, 19 nt, Homo sapiens
  misc_RNA (1)...(19): siRNA sense strand
agaucaagaaggaaacuuu

SEQ ID NO: 1957315 - RNA, 19 nt, Homo sapiens
  misc_RNA (1)...(19): siRNA sense strand
aauggcaguccuaauaauu

SEQ ID NO: 1957316 - RNA, 19 nt, Homo sapiens
  misc_RNA (1)...(19): siRNA sense strand
caucugcacaaccaaguga

SEQ ID NO: 1957317 - RNA, 19 nt, Homo sapiens
  misc_RNA (1)...(19): siRNA sense strand
caacuuaauagacauagcu

SEQ ID NO: 1957318 - RNA, 19 nt, Homo sapiens
  misc_RNA (1)...(19): siRNA sense strand
gagcaaaggaaaaugcaaa

SEQ ID NO: 1957319 - RNA, 19 nt, Homo sapiens
  misc_RNA (1)...(19): siRNA sense strand
uccaaccgauuuaaaugug

SEQ ID NO: 1957320 - RNA, 19 nt, Homo sapiens
  misc_RNA (1)...(19): siRNA sense strand
agucacugcuuuggaagaa

SEQ ID NO: 1957321 - RNA, 19 nt, Homo sapiens
  misc_RNA (1)...(19): siRNA sense strand
gagcauguggcugaauuca

SEQ ID NO: 1957322 - RNA, 19 nt, Homo sapiens
  misc_RNA (1)...(19): siRNA sense strand
gaucuuccucugcuguaug

SEQ ID NO: 1957323 - RNA, 19 nt, Homo sapiens
  misc_RNA (1)...(19): siRNA sense strand
guggagacacuuacugcuu

SEQ ID NO: 1957324 - RNA, 19 nt, Homo sapiens
  misc_RNA (1)...(19): siRNA sense strand
gacacuuacugcuucuagu

SEQ ID NO: 1957325 - RNA, 19 nt, Homo sapiens
  misc_RNA (1)...(19): siRNA sense strand
ucaagccuuuaacugaaug

SEQ ID NO: 1957326 - RNA, 19 nt, Homo sapiens
  misc_RNA (1)...(19): siRNA sense strand
caaaugcugacccuacaaa

SEQ ID NO: 1957327 - RNA, 19 nt, Homo sapiens
  misc_RNA (1)...(19): siRNA sense strand
ccagagaagcccagacguu

SEQ ID NO: 1957328 - RNA, 19 nt, Homo sapiens
  misc_RNA (1)...(19): siRNA sense strand
gagugcagcagacccagua

SEQ ID NO: 1957329 - RNA, 19 nt, Homo sapiens
  misc_RNA (1)...(19): siRNA sense strand
ggacaaagccccaggaacu

SEQ ID NO: 1957330 - RNA, 19 nt, Homo sapiens
  misc_RNA (1)...(19): siRNA sense strand
gcaaaugcugacccuacaa

SEQ ID NO: 1957331 - RNA, 19 nt, Homo sapiens
  misc_RNA (1)...(19): siRNA sense strand
gcagacccaguacgcaaau

SEQ ID NO: 1957332 - RNA, 19 nt, Homo sapiens
  misc_RNA (1)...(19): siRNA sense strand
gaagcccagacguucguuu

SEQ ID NO: 1957333 - RNA, 19 nt, Homo sapiens
  misc_RNA (1)...(19): siRNA sense strand
gacccagacccuucucuuc

SEQ ID NO: 1957334 - RNA, 19 nt, Homo sapiens
  misc_RNA (1)...(19): siRNA sense strand
cggacucacuggguucuga

SEQ ID NO: 1957335 - RNA, 19 nt, Homo sapiens
  misc_RNA (1)...(19): siRNA sense strand
cgcaaaugcugacccuaca

SEQ ID NO: 1957336 - RNA, 19 nt, Homo sapiens
  misc_RNA (1)...(19): siRNA sense strand
cccaggaacucagaaccuu

SEQ ID NO: 1957337 - RNA, 19 nt, Homo sapiens
  misc_RNA (1)...(19): siRNA sense strand
gagaagcccagacguucgu

SEQ ID NO: 1957338 - RNA, 19 nt, Homo sapiens
  misc_RNA (1)...(19): siRNA sense strand
gggaagacauguaaagaua

SEQ ID NO: 1957339 - RNA, 19 nt, Homo sapiens
  misc_RNA (1)...(19): siRNA sense strand
gaacauaccagccugaauu

SEQ ID NO: 1957340 - RNA, 19 nt, Homo sapiens
  misc_RNA (1)...(19): siRNA sense strand
ggacaaguguaaccuuuaa

SEQ ID NO: 1957341 - RNA, 19 nt, Homo sapiens
  misc_RNA (1)...(19): siRNA sense strand
ggccugagcugcaugaaua

SEQ ID NO: 1957342 - RNA, 19 nt, Homo sapiens
  misc_RNA (1)...(19): siRNA sense strand
gaccugagcugcaucguaa

SEQ ID NO: 1957343 - RNA, 19 nt, Homo sapiens
  misc_RNA (1)...(19): siRNA sense strand
gaugagugcucuuuggaua

SEQ ID NO: 1957344 - RNA, 19 nt, Homo sapiens
  misc_RNA (1)...(19): siRNA sense strand
gaaggcaaguguaguuuga

SEQ ID NO: 1957345 - RNA, 19 nt, Homo sapiens
  misc_RNA (1)...(19): siRNA sense strand
caaagaagcuguggauuca

SEQ ID NO: 1957346 - RNA, 19 nt, Homo sapiens
  misc_RNA (1)...(19): siRNA sense strand
ccaauucugugacaacaua

SEQ ID NO: 1957347 - RNA, 19 nt, Homo sapiens
  misc_RNA (1)...(19): siRNA sense strand
caaccacccuggcacauuu

SEQ ID NO: 1957348 - RNA, 19 nt, Homo sapiens
  misc_RNA (1)...(19): siRNA sense strand
ggaacucauugaagacaua

SEQ ID NO: 1957349 - RNA, 19 nt, Homo sapiens
  misc_RNA (1)...(19): siRNA sense strand
guccaugacuguuugaaua

SEQ ID NO: 1957350 - RNA, 19 nt, Homo sapiens
  misc_RNA (1)...(19): siRNA sense strand
gaccgcaccuguaaggaua

SEQ ID NO: 1957351 - RNA, 19 nt, Homo sapiens
  misc_RNA (1)...(19): siRNA sense strand
ggucauaauugucuugaug

SEQ ID NO: 1957352 - RNA, 19 nt, Homo sapiens
  misc_RNA (1)...(19): siRNA sense strand
ucagggagcuacuuccuuu

SEQ ID NO: 1957353 - RNA, 19 nt, Homo sapiens
  misc_RNA (1)...(19): siRNA sense strand
gaucacggcuguagucaca

SEQ ID NO: 1957354 - RNA, 19 nt, Homo sapiens
  misc_RNA (1)...(19): siRNA sense strand
gcagauggcuuugcaccuu

SEQ ID NO: 1957355 - RNA, 19 nt, Homo sapiens
  misc_RNA (1)...(19): siRNA sense strand
gagaagcacagcucaguaa

SEQ ID NO: 1957356 - RNA, 19 nt, Homo sapiens
  misc_RNA (1)...(19): siRNA sense strand
gcauucaccucucuucaga

SEQ ID NO: 1957357 - RNA, 19 nt, Homo sapiens
  misc_RNA (1)...(19): siRNA sense strand
cgagagauguuuccaagau

SEQ ID NO: 1957358 - RNA, 19 nt, Homo sapiens
  misc_RNA (1)...(19): siRNA sense strand
caaacuacccaggcaauua

SEQ ID NO: 1957359 - RNA, 19 nt, Homo sapiens
  misc_RNA (1)...(19): siRNA sense strand
guuuaucacuguugaguuu

SEQ ID NO: 1957360 - RNA, 19 nt, Homo sapiens
  misc_RNA (1)...(19): siRNA sense strand
ugagaaccaucaggaaaua

SEQ ID NO: 1957361 - RNA, 19 nt, Homo sapiens
  misc_RNA (1)...(19): siRNA sense strand
ggaaauguuuaucacuguu

SEQ ID NO: 1957362 - RNA, 19 nt, Homo sapiens
  misc_RNA (1)...(19): siRNA sense strand
gcacgagaacgcugcauuu

SEQ ID NO: 1957363 - RNA, 19 nt, Homo sapiens
  misc_RNA (1)...(19): siRNA sense strand
ccagagagacugcaucuug

SEQ ID NO: 1957364 - RNA, 19 nt, Homo sapiens
  misc_RNA (1)...(19): siRNA sense strand
gcagggcugggaccuauua

SEQ ID NO: 1957365 - RNA, 19 nt, Homo sapiens
  misc_RNA (1)...(19): siRNA sense strand
uaacagaugagaagucuug

SEQ ID NO: 1957366 - RNA, 19 nt, Homo sapiens
  misc_RNA (1)...(19): siRNA sense strand
cagagagacugcaucuuga

SEQ ID NO: 1957367 - RNA, 19 nt, Homo sapiens
  misc_RNA (1)...(19): siRNA sense strand
gaccagcacuaccagagaa

SEQ ID NO: 1957368 - RNA, 19 nt, Homo sapiens
  misc_RNA (1)...(19): siRNA sense strand
gaggaggccuugccaccaa

SEQ ID NO: 1957369 - RNA, 19 nt, Homo sapiens
  misc_RNA (1)...(19): siRNA sense strand
caggaaauacuuaaggaua

SEQ ID NO: 1957370 - RNA, 19 nt, Homo sapiens
  misc_RNA (1)...(19): siRNA sense strand
caggacaaguguaaccuuu

SEQ ID NO: 1957371 - RNA, 19 nt, Homo sapiens
  misc_RNA (1)...(19): siRNA sense strand
aaacauaacccaguguaaa

SEQ ID NO: 1957372 - RNA, 19 nt, Homo sapiens
  misc_RNA (1)...(19): siRNA sense strand
gaaaccagaguucaauguu

SEQ ID NO: 1957373 - RNA, 19 nt, Homo sapiens
  misc_RNA (1)...(19): siRNA sense strand
gcugggaccuauuaugaug

SEQ ID NO: 1957374 - RNA, 19 nt, Homo sapiens
  misc_RNA (1)...(19): siRNA sense strand
gcaguuguccuguuggauu

SEQ ID NO: 1957375 - RNA, 19 nt, Homo sapiens
  misc_RNA (1)...(19): siRNA sense strand
gaagacauaguucgagaug

SEQ ID NO: 1957376 - RNA, 19 nt, Homo sapiens
  misc_RNA (1)...(19): siRNA sense strand
aguguaaccuuuaagcuaa

SEQ ID NO: 1957377 - RNA, 19 nt, Homo sapiens
  misc_RNA (1)...(19): siRNA sense strand
gaacacagugggcagcuau

SEQ ID NO: 1957378 - RNA, 19 nt, Homo sapiens
  misc_RNA (1)...(19): siRNA sense strand
gaaaaccucuucauccaau

SEQ ID NO: 1957379 - RNA, 19 nt, Homo sapiens
  misc_RNA (1)...(19): siRNA sense strand
gggcugggaccuauuauga

SEQ ID NO: 1957380 - RNA, 19 nt, Homo sapiens
  misc_RNA (1)...(19): siRNA sense strand
ccagaagcuuggaauaugu

SEQ ID NO: 1957381 - RNA, 19 nt, Homo sapiens
  misc_RNA (1)...(19): siRNA sense strand
gugaggacaucgaugaaug

SEQ ID NO: 1957382 - RNA, 19 nt, Homo sapiens
  misc_RNA (1)...(19): siRNA sense strand
ccagaacuauuucaaguac

SEQ ID NO: 1957383 - RNA, 19 nt, Homo sapiens
  misc_RNA (1)...(19): siRNA sense strand
gcaggaggauguagaugag

SEQ ID NO: 1957384 - RNA, 19 nt, Homo sapiens
  misc_RNA (1)...(19): siRNA sense strand
gaauauuccaggcaauuau

SEQ ID NO: 1957385 - RNA, 19 nt, Homo sapiens
  misc_RNA (1)...(19): siRNA sense strand
ucaaagaagcuguggauuc

SEQ ID NO: 1957386 - RNA, 19 nt, Homo sapiens
  misc_RNA (1)...(19): siRNA sense strand
cgagaacgcugcauuuuau

SEQ ID NO: 1957387 - RNA, 19 nt, Homo sapiens
  misc_RNA (1)...(19): siRNA sense strand
caauggagguugugaucau

SEQ ID NO: 1957388 - RNA, 19 nt, Homo sapiens
  misc_RNA (1)...(19): siRNA sense strand
ggacuaccaggaacucauu

SEQ ID NO: 1957389 - RNA, 19 nt, Homo sapiens
  misc_RNA (1)...(19): siRNA sense strand
ggauucaguucaaguccaa

SEQ ID NO: 1957390 - RNA, 19 nt, Homo sapiens
  misc_RNA (1)...(19): siRNA sense strand
gcacuccugugacgauaca

SEQ ID NO: 1957391 - RNA, 19 nt, Homo sapiens
  misc_RNA (1)...(19): siRNA sense strand
ugacauaugaugaggacua

SEQ ID NO: 1957392 - RNA, 19 nt, Homo sapiens
  misc_RNA (1)...(19): siRNA sense strand
gaguguacguggaccauca

SEQ ID NO: 1957393 - RNA, 19 nt, Homo sapiens
  misc_RNA (1)...(19): siRNA sense strand
gagaagcggcuccguaaag

SEQ ID NO: 1957394 - RNA, 19 nt, Homo sapiens
  misc_RNA (1)...(19): siRNA sense strand
ggaaacgugugcugucaac

SEQ ID NO: 1957395 - RNA, 19 nt, Homo sapiens
  misc_RNA (1)...(19): siRNA sense strand
gacugcaucuugaccugua

SEQ ID NO: 1957396 - RNA, 19 nt, Homo sapiens
  misc_RNA (1)...(19): siRNA sense strand
gcugugaccgcaccuguaa

SEQ ID NO: 1957397 - RNA, 19 nt, Homo sapiens
  misc_RNA (1)...(19): siRNA sense strand
aaaccagaguucaauguuc

SEQ ID NO: 1957398 - RNA, 19 nt, Homo sapiens
  misc_RNA (1)...(19): siRNA sense strand
gugucaaccuggugaauau

SEQ ID NO: 1957399 - RNA, 19 nt, Homo sapiens
  misc_RNA (1)...(19): siRNA sense strand
ggaagacauguaaagauau

SEQ ID NO: 1957400 - RNA, 19 nt, Homo sapiens
  misc_RNA (1)...(19): siRNA sense strand
ccacugcaguuguccuguu

SEQ ID NO: 1957401 - RNA, 19 nt, Homo sapiens
  misc_RNA (1)...(19): siRNA sense strand
gaggggagcugggagauuu

SEQ ID NO: 1957402 - RNA, 19 nt, Homo sapiens
  misc_RNA (1)...(19): siRNA sense strand
gaaauguuuaucacuguug

SEQ ID NO: 1957403 - RNA, 19 nt, Homo sapiens
  misc_RNA (1)...(19): siRNA sense strand
gagagauguuuccaagauc

SEQ ID NO: 1957404 - RNA, 19 nt, Homo sapiens
  misc_RNA (1)...(19): siRNA sense strand
ugaauauuccaggcaauua

SEQ ID NO: 1957405 - RNA, 19 nt, Homo sapiens
  misc_RNA (1)...(19): siRNA sense strand
gggccagggucaugcagaa

SEQ ID NO: 1957406 - RNA, 19 nt, Homo sapiens
  misc_RNA (1)...(19): siRNA sense strand
ugacugcggcugcaagaaa

SEQ ID NO: 1957407 - RNA, 19 nt, Homo sapiens
  misc_RNA (1)...(19): siRNA sense strand
caaacauaacccaguguaa

SEQ ID NO: 1957408 - RNA, 19 nt, Homo sapiens
  misc_RNA (1)...(19): siRNA sense strand
cccagaagcuuggaauaug

SEQ ID NO: 1957409 - RNA, 19 nt, Homo sapiens
  misc_RNA (1)...(19): siRNA sense strand
uaaaugaaggcaaguguag

SEQ ID NO: 1957410 - RNA, 19 nt, Homo sapiens
  misc_RNA (1)...(19): siRNA sense strand
gaaccucgacguggcuaaa

SEQ ID NO: 1957411 - RNA, 19 nt, Homo sapiens
  misc_RNA (1)...(19): siRNA sense strand
guuccaaaguguccagguu

SEQ ID NO: 1957412 - RNA, 19 nt, Homo sapiens
  misc_RNA (1)...(19): siRNA sense strand
ggucaaagaagcuguggau

SEQ ID NO: 1957413 - RNA, 19 nt, Homo sapiens
  misc_RNA (1)...(19): siRNA sense strand
gcagcugccauccacagua

SEQ ID NO: 1957414 - RNA, 19 nt, Homo sapiens
  misc_RNA (1)...(19): siRNA sense strand
cagcaggucugugugaaca

SEQ ID NO: 1957415 - RNA, 19 nt, Homo sapiens
  misc_RNA (1)...(19): siRNA sense strand
accaggaacucauugaaga

SEQ ID NO: 1957416 - RNA, 19 nt, Homo sapiens
  misc_RNA (1)...(19): siRNA sense strand
caaaugacuugugaaccau

SEQ ID NO: 1957417 - RNA, 19 nt, Homo sapiens
  misc_RNA (1)...(19): siRNA sense strand
ccgagaagcggcuccguaa

SEQ ID NO: 1957418 - RNA, 19 nt, Homo sapiens
  misc_RNA (1)...(19): siRNA sense strand
gagcuugaaacuaaccaaa

SEQ ID NO: 1957419 - RNA, 19 nt, Homo sapiens
  misc_RNA (1)...(19): siRNA sense strand
guagucacaucugcaagga

SEQ ID NO: 1957420 - RNA, 19 nt, Homo sapiens
  misc_RNA (1)...(19): siRNA sense strand
caugacuguuugaauauuc

SEQ ID NO: 1957421 - RNA, 19 nt, Homo sapiens
  misc_RNA (1)...(19): siRNA sense strand
aaccagaguucaauguuca

SEQ ID NO: 1957422 - RNA, 19 nt, Homo sapiens
  misc_RNA (1)...(19): siRNA sense strand
gaaaaccaaugugucaguu

SEQ ID NO: 1957423 - RNA, 19 nt, Homo sapiens
  misc_RNA (1)...(19): siRNA sense strand
aguacaagaugcacacaga

SEQ ID NO: 1957424 - RNA, 19 nt, Homo sapiens
  misc_RNA (1)...(19): siRNA sense strand
ccaugacuguuugaauauu

SEQ ID NO: 1957425 - RNA, 19 nt, Homo sapiens
  misc_RNA (1)...(19): siRNA sense strand
cagcacuccugugacgaua

SEQ ID NO: 1957426 - RNA, 19 nt, Homo sapiens
  misc_RNA (1)...(19): siRNA sense strand
gaggaaggacaaaugacuu

SEQ ID NO: 1957427 - RNA, 19 nt, Homo sapiens
  misc_RNA (1)...(19): siRNA sense strand
ucaccucucuucagauguc

SEQ ID NO: 1957428 - RNA, 19 nt, Homo sapiens
  misc_RNA (1)...(19): siRNA sense strand
gcaauuacccagccaacac

SEQ ID NO: 1957429 - RNA, 19 nt, Homo sapiens
  misc_RNA (1)...(19): siRNA sense strand
caccaccacucaccgaugu

SEQ ID NO: 1957430 - RNA, 19 nt, Homo sapiens
  misc_RNA (1)...(19): siRNA sense strand
gagagcuuccgcuacguaa

SEQ ID NO: 1957431 - RNA, 19 nt, Homo sapiens
  misc_RNA (1)...(19): siRNA sense strand
aggcaaguguaguuugaaa

SEQ ID NO: 1957432 - RNA, 19 nt, Homo sapiens
  misc_RNA (1)...(19): siRNA sense strand
cuaaaugaaggcaagugua

SEQ ID NO: 1957433 - RNA, 19 nt, Homo sapiens
  misc_RNA (1)...(19): siRNA sense strand
gcagaaaaccaauguguca

SEQ ID NO: 1957434 - RNA, 19 nt, Homo sapiens
  misc_RNA (1)...(19): siRNA sense strand
gaaccaucaggaaauacuu

SEQ ID NO: 1957435 - RNA, 19 nt, Homo sapiens
  misc_RNA (1)...(19): siRNA sense strand
cgagauggcaggcucuaug

SEQ ID NO: 1957436 - RNA, 19 nt, Homo sapiens
  misc_RNA (1)...(19): siRNA sense strand
acucaccgauguauucguu

SEQ ID NO: 1957437 - RNA, 19 nt, Homo sapiens
  misc_RNA (1)...(19): siRNA sense strand
cuuggaauaugucugaaug

SEQ ID NO: 1957438 - RNA, 19 nt, Homo sapiens
  misc_RNA (1)...(19): siRNA sense strand
aagcaaaguucaagcgaua

SEQ ID NO: 1957439 - RNA, 19 nt, Homo sapiens
  misc_RNA (1)...(19): siRNA sense strand
ccaaaauucuucaguguua

SEQ ID NO: 1957440 - RNA, 19 nt, Homo sapiens
  misc_RNA (1)...(19): siRNA sense strand
aaacagagcaugcuugaga

SEQ ID NO: 1957441 - RNA, 19 nt, Homo sapiens
  misc_RNA (1)...(19): siRNA sense strand
gaagaucagaaacgacuaa

SEQ ID NO: 1957442 - RNA, 19 nt, Homo sapiens
  misc_RNA (1)...(19): siRNA sense strand
gcucagaguucuacagagu

SEQ ID NO: 1957443 - RNA, 19 nt, Homo sapiens
  misc_RNA (1)...(19): siRNA sense strand
gaaagaauccgaagaucag

SEQ ID NO: 1957444 - RNA, 19 nt, Homo sapiens
  misc_RNA (1)...(19): siRNA sense strand
caagaaagaauccgaagau

SEQ ID NO: 1957445 - RNA, 19 nt, Homo sapiens
  misc_RNA (1)...(19): siRNA sense strand
cuaggcagcuggaagagaa

SEQ ID NO: 1957446 - RNA, 19 nt, Homo sapiens
  misc_RNA (1)...(19): siRNA sense strand
cugaagagguggaagcaaa

SEQ ID NO: 1957447 - RNA, 19 nt, Homo sapiens
  misc_RNA (1)...(19): siRNA sense strand
gagaggagcucagaguucu

SEQ ID NO: 1957448 - RNA, 19 nt, Homo sapiens
  misc_RNA (1)...(19): siRNA sense strand
gagaaagaccgagugcuaa

SEQ ID NO: 1957449 - RNA, 19 nt, Homo sapiens
  misc_RNA (1)...(19): siRNA sense strand
gcaggaugcauucuacaaa

SEQ ID NO: 1957450 - RNA, 19 nt, Homo sapiens
  misc_RNA (1)...(19): siRNA sense strand
ggacgagaaugagaacauc

SEQ ID NO: 1957451 - RNA, 19 nt, Homo sapiens
  misc_RNA (1)...(19): siRNA sense strand
agucaccacugaacaauau

SEQ ID NO: 1957452 - RNA, 19 nt, Homo sapiens
  misc_RNA (1)...(19): siRNA sense strand
ggagcaagccaagaaagaa

SEQ ID NO: 1957453 - RNA, 19 nt, Homo sapiens
  misc_RNA (1)...(19): siRNA sense strand
ccaaacagagcaugcuuga

SEQ ID NO: 1957454 - RNA, 19 nt, Homo sapiens
  misc_RNA (1)...(19): siRNA sense strand
agagaaagaccgagugcua

SEQ ID NO: 1957455 - RNA, 19 nt, Homo sapiens
  misc_RNA (1)...(19): siRNA sense strand
agagagggcugcugccaau

SEQ ID NO: 1957456 - RNA, 19 nt, Homo sapiens
  misc_RNA (1)...(19): siRNA sense strand
gaucagaaacgacuaaagc

SEQ ID NO: 1957457 - RNA, 19 nt, Homo sapiens
  misc_RNA (1)...(19): siRNA sense strand
ggagaggagcucagaguuc

SEQ ID NO: 1957458 - RNA, 19 nt, Homo sapiens
  misc_RNA (1)...(19): siRNA sense strand
cugaggagcuggcauugga

SEQ ID NO: 1957459 - RNA, 19 nt, Homo sapiens
  misc_RNA (1)...(19): siRNA sense strand
gagcucagaguucuacaga

SEQ ID NO: 1957460 - RNA, 19 nt, Homo sapiens
  misc_RNA (1)...(19): siRNA sense strand
gacuaaagcaagccaaaga

SEQ ID NO: 1957461 - RNA, 19 nt, Homo sapiens
  misc_RNA (1)...(19): siRNA sense strand
gugaagggcauccggcuuu

SEQ ID NO: 1957462 - RNA, 19 nt, Homo sapiens
  misc_RNA (1)...(19): siRNA sense strand
aagaacagcuggcuagacu

SEQ ID NO: 1957463 - RNA, 19 nt, Homo sapiens
  misc_RNA (1)...(19): siRNA sense strand
gcaaaguucaagcgauaug

SEQ ID NO: 1957464 - RNA, 19 nt, Homo sapiens
  misc_RNA (1)...(19): siRNA sense strand
gagcaagccaagaaagaau

SEQ ID NO: 1957465 - RNA, 19 nt, Homo sapiens
  misc_RNA (1)...(19): siRNA sense strand
ggaacgcgcuaaggcaaag

SEQ ID NO: 1957466 - RNA, 19 nt, Homo sapiens
  misc_RNA (1)...(19): siRNA sense strand
gcgguauucuggugcuuau

SEQ ID NO: 1957467 - RNA, 19 nt, Homo sapiens
  misc_RNA (1)...(19): siRNA sense strand
ucagaguucuacagaguca

SEQ ID NO: 1957468 - RNA, 19 nt, Homo sapiens
  misc_RNA (1)...(19): siRNA sense strand
caggaugcauucuacaaag

SEQ ID NO: 1957469 - RNA, 19 nt, Homo sapiens
  misc_RNA (1)...(19): siRNA sense strand
agaaagaauccgaagauca

SEQ ID NO: 1957470 - RNA, 19 nt, Homo sapiens
  misc_RNA (1)...(19): siRNA sense strand
agaaagaccgagugcuaaa

SEQ ID NO: 1957471 - RNA, 19 nt, Homo sapiens
  misc_RNA (1)...(19): siRNA sense strand
gaggagaggagcucagagu

SEQ ID NO: 1957472 - RNA, 19 nt, Homo sapiens
  misc_RNA (1)...(19): siRNA sense strand
uauaugcacugugucaauc

SEQ ID NO: 1957473 - RNA, 19 nt, Homo sapiens
  misc_RNA (1)...(19): siRNA sense strand
gagucaccacugaacaaua

SEQ ID NO: 1957474 - RNA, 19 nt, Homo sapiens
  misc_RNA (1)...(19): siRNA sense strand
aaaugugauugaucgaaug

SEQ ID NO: 1957475 - RNA, 19 nt, Homo sapiens
  misc_RNA (1)...(19): siRNA sense strand
guauaugcacugugucaau

SEQ ID NO: 1957476 - RNA, 19 nt, Homo sapiens
  misc_RNA (1)...(19): siRNA sense strand
ccaagaaagaauccgaaga

SEQ ID NO: 1957477 - RNA, 19 nt, Homo sapiens
  misc_RNA (1)...(19): siRNA sense strand
ucagaaacgacuaaagcaa

SEQ ID NO: 1957478 - RNA, 19 nt, Homo sapiens
  misc_RNA (1)...(19): siRNA sense strand
caaaguucaagcgauauga

SEQ ID NO: 1957479 - RNA, 19 nt, Homo sapiens
  misc_RNA (1)...(19): siRNA sense strand
gcuuauggugccucaguuu

SEQ ID NO: 1957480 - RNA, 19 nt, Homo sapiens
  misc_RNA (1)...(19): siRNA sense strand
ucuacagagucaccacuga

SEQ ID NO: 1957481 - RNA, 19 nt, Homo sapiens
  misc_RNA (1)...(19): siRNA sense strand
aggaugcauucuacaaaga

SEQ ID NO: 1957482 - RNA, 19 nt, Homo sapiens
  misc_RNA (1)...(19): siRNA sense strand
cgaagucucagcgguauuc

SEQ ID NO: 1957483 - RNA, 19 nt, Homo sapiens
  misc_RNA (1)...(19): siRNA sense strand
cagagucaccacugaacaa

SEQ ID NO: 1957484 - RNA, 19 nt, Homo sapiens
  misc_RNA (1)...(19): siRNA sense strand
cuacagagucaccacugaa

SEQ ID NO: 1957485 - RNA, 19 nt, Homo sapiens
  misc_RNA (1)...(19): siRNA sense strand
agaauccgaagaucagaaa

SEQ ID NO: 1957486 - RNA, 19 nt, Homo sapiens
  misc_RNA (1)...(19): siRNA sense strand
aacagagcaugcuugagaa

SEQ ID NO: 1957487 - RNA, 19 nt, Homo sapiens
  misc_RNA (1)...(19): siRNA sense strand
caaagaacagcuggcuaga

SEQ ID NO: 1957488 - RNA, 19 nt, Homo sapiens
  misc_RNA (1)...(19): siRNA sense strand
aagaaagaauccgaagauc

SEQ ID NO: 1957489 - RNA, 19 nt, Homo sapiens
  misc_RNA (1)...(19): siRNA sense strand
gaaaaugugauugaucgaa

SEQ ID NO: 1957490 - RNA, 19 nt, Homo sapiens
  misc_RNA (1)...(19): siRNA sense strand
ugaacaauaucagaaagcu

SEQ ID NO: 1957491 - RNA, 19 nt, Homo sapiens
  misc_RNA (1)...(19): siRNA sense strand
gagggcugcugccaaugag

SEQ ID NO: 1957492 - RNA, 19 nt, Homo sapiens
  misc_RNA (1)...(19): siRNA sense strand
ugugauugaucgaaugaag

SEQ ID NO: 1957493 - RNA, 19 nt, Homo sapiens
  misc_RNA (1)...(19): siRNA sense strand
gaagagguggaagcaaagu

SEQ ID NO: 1957494 - RNA, 19 nt, Homo sapiens
  misc_RNA (1)...(19): siRNA sense strand
agagggcugcugccaauga

SEQ ID NO: 1957495 - RNA, 19 nt, Homo sapiens
  misc_RNA (1)...(19): siRNA sense strand
gguauucuggugcuuaugg

SEQ ID NO: 1957496 - RNA, 19 nt, Homo sapiens
  misc_RNA (1)...(19): siRNA sense strand
cauccagucugugcugauc

SEQ ID NO: 1957497 - RNA, 19 nt, Homo sapiens
  misc_RNA (1)...(19): siRNA sense strand
ugauugaucgaaugaagga

SEQ ID NO: 1957498 - RNA, 19 nt, Homo sapiens
  misc_RNA (1)...(19): siRNA sense strand
gcuugagaagggaggauaa

SEQ ID NO: 1957499 - RNA, 19 nt, Homo sapiens
  misc_RNA (1)...(19): siRNA sense strand
ugaagggcauccggcuuuc

SEQ ID NO: 1957500 - RNA, 19 nt, Homo sapiens
  misc_RNA (1)...(19): siRNA sense strand
ccaccagacccucaaaugc

SEQ ID NO: 1957501 - RNA, 19 nt, Homo sapiens
  misc_RNA (1)...(19): siRNA sense strand
ggccaaaauucuucagugu

SEQ ID NO: 1957502 - RNA, 19 nt, Homo sapiens
  misc_RNA (1)...(19): siRNA sense strand
ucgaggcggacgagaauga

SEQ ID NO: 1957503 - RNA, 19 nt, Homo sapiens
  misc_RNA (1)...(19): siRNA sense strand
ggaaaccagacuacaauua

SEQ ID NO: 1957504 - RNA, 19 nt, Homo sapiens
  misc_RNA (1)...(19): siRNA sense strand
cagaggaucuucgaaagua

SEQ ID NO: 1957505 - RNA, 19 nt, Homo sapiens
  misc_RNA (1)...(19): siRNA sense strand
gaaaccagacuacaauuau

SEQ ID NO: 1957506 - RNA, 19 nt, Homo sapiens
  misc_RNA (1)...(19): siRNA sense strand
ggauauaugugcugguaau

SEQ ID NO: 1957507 - RNA, 19 nt, Homo sapiens
  misc_RNA (1)...(19): siRNA sense strand
gauggugguucaaauguga

SEQ ID NO: 1957508 - RNA, 19 nt, Homo sapiens
  misc_RNA (1)...(19): siRNA sense strand
ucaaacaggucgcucuuca

SEQ ID NO: 1957509 - RNA, 19 nt, Homo sapiens
  misc_RNA (1)...(19): siRNA sense strand
gcaacguccuccacgagaa

SEQ ID NO: 1957510 - RNA, 19 nt, Homo sapiens
  misc_RNA (1)...(19): siRNA sense strand
aaagacaggacauaaauga

SEQ ID NO: 1957511 - RNA, 19 nt, Homo sapiens
  misc_RNA (1)...(19): siRNA sense strand
ggaugugccugauaagagu

SEQ ID NO: 1957512 - RNA, 19 nt, Homo sapiens
  misc_RNA (1)...(19): siRNA sense strand
gcauaugacuacccugagu

SEQ ID NO: 1957513 - RNA, 19 nt, Homo sapiens
  misc_RNA (1)...(19): siRNA sense strand
gaaaagacaggacauaaau

SEQ ID NO: 1957514 - RNA, 19 nt, Homo sapiens
  misc_RNA (1)...(19): siRNA sense strand
ucacuacuauggugugugu

SEQ ID NO: 1957515 - RNA, 19 nt, Homo sapiens
  misc_RNA (1)...(19): siRNA sense strand
gguagauggugguucaaau

SEQ ID NO: 1957516 - RNA, 19 nt, Homo sapiens
  misc_RNA (1)...(19): siRNA sense strand
gcguccagauuaauacuga

SEQ ID NO: 1957517 - RNA, 19 nt, Homo sapiens
  misc_RNA (1)...(19): siRNA sense strand
gcagaaaguguuacugucu

SEQ ID NO: 1957518 - RNA, 19 nt, Homo sapiens
  misc_RNA (1)...(19): siRNA sense strand
aaacaggucgcucuucaga

SEQ ID NO: 1957519 - RNA, 19 nt, Homo sapiens
  misc_RNA (1)...(19): siRNA sense strand
ggugcugguuauaaaguuu

SEQ ID NO: 1957520 - RNA, 19 nt, Homo sapiens
  misc_RNA (1)...(19): siRNA sense strand
aaaccagacuacaauuauc

SEQ ID NO: 1957521 - RNA, 19 nt, Homo sapiens
  misc_RNA (1)...(19): siRNA sense strand
guagauggugguucaaaug

SEQ ID NO: 1957522 - RNA, 19 nt, Homo sapiens
  misc_RNA (1)...(19): siRNA sense strand
ccagauuaauacugaggaa

SEQ ID NO: 1957523 - RNA, 19 nt, Homo sapiens
  misc_RNA (1)...(19): siRNA sense strand
ugggauauaugugcuggua

SEQ ID NO: 1957524 - RNA, 19 nt, Homo sapiens
  misc_RNA (1)...(19): siRNA sense strand
cuugugggaucauaagauu

SEQ ID NO: 1957525 - RNA, 19 nt, Homo sapiens
  misc_RNA (1)...(19): siRNA sense strand
guaccagcagaaaguguua

SEQ ID NO: 1957526 - RNA, 19 nt, Homo sapiens
  misc_RNA (1)...(19): siRNA sense strand
aaugguagauggugguuca

SEQ ID NO: 1957527 - RNA, 19 nt, Homo sapiens
  misc_RNA (1)...(19): siRNA sense strand
auacagaggaucuucgaaa

SEQ ID NO: 1957528 - RNA, 19 nt, Homo sapiens
  misc_RNA (1)...(19): siRNA sense strand
cagcagaaaguguuacugu

SEQ ID NO: 1957529 - RNA, 19 nt, Homo sapiens
  misc_RNA (1)...(19): siRNA sense strand
guggugaagaaaucaguua

SEQ ID NO: 1957530 - RNA, 19 nt, Homo sapiens
  misc_RNA (1)...(19): siRNA sense strand
cagcugaucaggagguuau

SEQ ID NO: 1957531 - RNA, 19 nt, Homo sapiens
  misc_RNA (1)...(19): siRNA sense strand
aaacccaugcuaggaguua

SEQ ID NO: 1957532 - RNA, 19 nt, Homo sapiens
  misc_RNA (1)...(19): siRNA sense strand
gaucaggagguuaucuugu

SEQ ID NO: 1957533 - RNA, 19 nt, Homo sapiens
  misc_RNA (1)...(19): siRNA sense strand
gaauauacagaggaucuuc

SEQ ID NO: 1957534 - RNA, 19 nt, Homo sapiens
  misc_RNA (1)...(19): siRNA sense strand
ccugaguggugaagaaauc

SEQ ID NO: 1957535 - RNA, 19 nt, Homo sapiens
  misc_RNA (1)...(19): siRNA sense strand
uaaagagguaccagcagaa

SEQ ID NO: 1957536 - RNA, 19 nt, Homo sapiens
  misc_RNA (1)...(19): siRNA sense strand
ccugauaagagucaagaaa

SEQ ID NO: 1957537 - RNA, 19 nt, Homo sapiens
  misc_RNA (1)...(19): siRNA sense strand
acaggucgcucuucagacu

SEQ ID NO: 1957538 - RNA, 19 nt, Homo sapiens
  misc_RNA (1)...(19): siRNA sense strand
acacguggaugcagcugau

SEQ ID NO: 1957539 - RNA, 19 nt, Homo sapiens
  misc_RNA (1)...(19): siRNA sense strand
auucagggauggucaaaca

SEQ ID NO: 1957540 - RNA, 19 nt, Homo sapiens
  misc_RNA (1)...(19): siRNA sense strand
gaugcuacacaggaauaua

SEQ ID NO: 1957541 - RNA, 19 nt, Homo sapiens
  misc_RNA (1)...(19): siRNA sense strand
cuacacaggaauauacaga

SEQ ID NO: 1957542 - RNA, 19 nt, Homo sapiens
  misc_RNA (1)...(19): siRNA sense strand
ucagaaaacucccagaucu

SEQ ID NO: 1957543 - RNA, 19 nt, Homo sapiens
  misc_RNA (1)...(19): siRNA sense strand
auauacagcuugggcaaug

SEQ ID NO: 1957544 - RNA, 19 nt, Homo sapiens
  misc_RNA (1)...(19): siRNA sense strand
uacagaggaucuucgaaag

SEQ ID NO: 1957545 - RNA, 19 nt, Homo sapiens
  misc_RNA (1)...(19): siRNA sense strand
acaggaauauacagaggau

SEQ ID NO: 1957546 - RNA, 19 nt, Homo sapiens
  misc_RNA (1)...(19): siRNA sense strand
ugguggugcugguuauaaa

SEQ ID NO: 1957547 - RNA, 19 nt, Homo sapiens
  misc_RNA (1)...(19): siRNA sense strand
guuaucuugugggaucaua

SEQ ID NO: 1957548 - RNA, 19 nt, Homo sapiens
  misc_RNA (1)...(19): siRNA sense strand
gcugguaaugccaucuuaa

SEQ ID NO: 1957549 - RNA, 19 nt, Homo sapiens
  misc_RNA (1)...(19): siRNA sense strand
aaagagguaccagcagaaa

SEQ ID NO: 1957550 - RNA, 19 nt, Homo sapiens
  misc_RNA (1)...(19): siRNA sense strand
cuugcuagcaucagaauga

SEQ ID NO: 1957551 - RNA, 19 nt, Homo sapiens
  misc_RNA (1)...(19): siRNA sense strand
gugaagaaaucaguuacac

SEQ ID NO: 1957552 - RNA, 19 nt, Homo sapiens
  misc_RNA (1)...(19): siRNA sense strand
gguaccagcagaaaguguu

SEQ ID NO: 1957553 - RNA, 19 nt, Homo sapiens
  misc_RNA (1)...(19): siRNA sense strand
guguguggcuguaaauggu

SEQ ID NO: 1957554 - RNA, 19 nt, Homo sapiens
  misc_RNA (1)...(19): siRNA sense strand
ggucaaacaggucgcucuu

SEQ ID NO: 1957555 - RNA, 19 nt, Homo sapiens
  misc_RNA (1)...(19): siRNA sense strand
ggaauauacagaggaucuu

SEQ ID NO: 1957556 - RNA, 19 nt, Homo sapiens
  misc_RNA (1)...(19): siRNA sense strand
uacccugaguggugaagaa

SEQ ID NO: 1957557 - RNA, 19 nt, Homo sapiens
  misc_RNA (1)...(19): siRNA sense strand
guguggcuguaaaugguaa

SEQ ID NO: 1957558 - RNA, 19 nt, Homo sapiens
  misc_RNA (1)...(19): siRNA sense strand
agagguaccagcagaaagu

SEQ ID NO: 1957559 - RNA, 19 nt, Homo sapiens
  misc_RNA (1)...(19): siRNA sense strand
cccagcguccagauuaaua

SEQ ID NO: 1957560 - RNA, 19 nt, Homo sapiens
  misc_RNA (1)...(19): siRNA sense strand
ccucuacucgggcuucuug

SEQ ID NO: 1957561 - RNA, 19 nt, Homo sapiens
  misc_RNA (1)...(19): siRNA sense strand
uggauugacccacuugaug

SEQ ID NO: 1957562 - RNA, 19 nt, Homo sapiens
  misc_RNA (1)...(19): siRNA sense strand
augcuaggaguuauacaua

SEQ ID NO: 1957563 - RNA, 19 nt, Homo sapiens
  misc_RNA (1)...(19): siRNA sense strand
ggugaagaaaucaguuaca

SEQ ID NO: 1957564 - RNA, 19 nt, Homo sapiens
  misc_RNA (1)...(19): siRNA sense strand
cugguaaugccaucuuaaa

SEQ ID NO: 1957565 - RNA, 19 nt, Homo sapiens
  misc_RNA (1)...(19): siRNA sense strand
uaugguguguguggcugua

SEQ ID NO: 1957566 - RNA, 19 nt, Homo sapiens
  misc_RNA (1)...(19): siRNA sense strand
ggacuccuugcuagcauca

SEQ ID NO: 1957567 - RNA, 19 nt, Homo sapiens
  misc_RNA (1)...(19): siRNA sense strand
aggucgcucuucagacuuu

SEQ ID NO: 1957568 - RNA, 19 nt, Homo sapiens
  misc_RNA (1)...(19): siRNA sense strand
uagauggugguucaaaugu

SEQ ID NO: 1957569 - RNA, 19 nt, Homo sapiens
  misc_RNA (1)...(19): siRNA sense strand
aaguguuacugucuggauu

SEQ ID NO: 1957570 - RNA, 19 nt, Homo sapiens
  misc_RNA (1)...(19): siRNA sense strand
gauauaugugcugguaaug

SEQ ID NO: 1957571 - RNA, 19 nt, Homo sapiens
  misc_RNA (1)...(19): siRNA sense strand
caacguccuccacgagaag

SEQ ID NO: 1957572 - RNA, 19 nt, Homo sapiens
  misc_RNA (1)...(19): siRNA sense strand
gcucuuccuacaaugagaa

SEQ ID NO: 1957573 - RNA, 19 nt, Homo sapiens
  misc_RNA (1)...(19): siRNA sense strand
gcaaugguagauggugguu

SEQ ID NO: 1957574 - RNA, 19 nt, Homo sapiens
  misc_RNA (1)...(19): siRNA sense strand
cauaagccauuuuccgaau

SEQ ID NO: 1957575 - RNA, 19 nt, Homo sapiens
  misc_RNA (1)...(19): siRNA sense strand
cuucgaaaguacgucacua

SEQ ID NO: 1957576 - RNA, 19 nt, Homo sapiens
  misc_RNA (1)...(19): siRNA sense strand
guguuacugucuggauuga

SEQ ID NO: 1957577 - RNA, 19 nt, Homo sapiens
  misc_RNA (1)...(19): siRNA sense strand
caaauucgauugcaugaaa

SEQ ID NO: 1957578 - RNA, 19 nt, Homo sapiens
  misc_RNA (1)...(19): siRNA sense strand
gaaagaaacccuaugaaug

SEQ ID NO: 1957579 - RNA, 19 nt, Homo sapiens
  misc_RNA (1)...(19): siRNA sense strand
gagaaacccuaucgaugua

SEQ ID NO: 1957580 - RNA, 19 nt, Homo sapiens
  misc_RNA (1)...(19): siRNA sense strand
ugaaagaacucauauugga

SEQ ID NO: 1957581 - RNA, 19 nt, Homo sapiens
  misc_RNA (1)...(19): siRNA sense strand
gagaaaccguaucaaugua

SEQ ID NO: 1957582 - RNA, 19 nt, Homo sapiens
  misc_RNA (1)...(19): siRNA sense strand
caaaugaguaucaggaaua

SEQ ID NO: 1957583 - RNA, 19 nt, Homo sapiens
  misc_RNA (1)...(19): siRNA sense strand
gagaaacccuaugaaugua

SEQ ID NO: 1957584 - RNA, 19 nt, Homo sapiens
  misc_RNA (1)...(19): siRNA sense strand
gagaaacccuaugaaugua

SEQ ID NO: 1957585 - RNA, 19 nt, Homo sapiens
  misc_RNA (1)...(19): siRNA sense strand
gagaaacccuaugaaugua

SEQ ID NO: 1957586 - RNA, 19 nt, Homo sapiens
  misc_RNA (1)...(19): siRNA sense strand
gagaaacccuaugaaugua

SEQ ID NO: 1957587 - RNA, 19 nt, Homo sapiens
  misc_RNA (1)...(19): siRNA sense strand
gagaaacccuaugaaugua

SEQ ID NO: 1957588 - RNA, 19 nt, Homo sapiens
  misc_RNA (1)...(19): siRNA sense strand
gagaaacccuaugaaugua

SEQ ID NO: 1957589 - RNA, 19 nt, Homo sapiens
  misc_RNA (1)...(19): siRNA sense strand
ggaaagaaacccuaugaau

SEQ ID NO: 1957590 - RNA, 19 nt, Homo sapiens
  misc_RNA (1)...(19): siRNA sense strand
caucauucgucccuuaaua

SEQ ID NO: 1957591 - RNA, 19 nt, Homo sapiens
  misc_RNA (1)...(19): siRNA sense strand
ggaaagccuucaacucuuc

SEQ ID NO: 1957592 - RNA, 19 nt, Homo sapiens
  misc_RNA (1)...(19): siRNA sense strand
gaagaugucauaugguuga

SEQ ID NO: 1957593 - RNA, 19 nt, Homo sapiens
  misc_RNA (1)...(19): siRNA sense strand
gagagaaaccuuaugaaug

SEQ ID NO: 1957594 - RNA, 19 nt, Homo sapiens
  misc_RNA (1)...(19): siRNA sense strand
ggacagaaacccuaugaau

SEQ ID NO: 1957595 - RNA, 19 nt, Homo sapiens
  misc_RNA (1)...(19): siRNA sense strand
gaaacccuaugaauguaaa

SEQ ID NO: 1957596 - RNA, 19 nt, Homo sapiens
  misc_RNA (1)...(19): siRNA sense strand
gaaaccguaucaauguaaa

SEQ ID NO: 1957597 - RNA, 19 nt, Homo sapiens
  misc_RNA (1)...(19): siRNA sense strand
gaaacccuaugaauguaaa

SEQ ID NO: 1957598 - RNA, 19 nt, Homo sapiens
  misc_RNA (1)...(19): siRNA sense strand
gaaacccuaugaauguaaa

SEQ ID NO: 1957599 - RNA, 19 nt, Homo sapiens
  misc_RNA (1)...(19): siRNA sense strand
gaaacccuaugaauguaaa

SEQ ID NO: 1957600 - RNA, 19 nt, Homo sapiens
  misc_RNA (1)...(19): siRNA sense strand
gaaacccuaugaauguaaa

SEQ ID NO: 1957601 - RNA, 19 nt, Homo sapiens
  misc_RNA (1)...(19): siRNA sense strand
uaaacgauguggcaaauca

SEQ ID NO: 1957602 - RNA, 19 nt, Homo sapiens
  misc_RNA (1)...(19): siRNA sense strand
gaaacccuaugaauguaaa

SEQ ID NO: 1957603 - RNA, 19 nt, Homo sapiens
  misc_RNA (1)...(19): siRNA sense strand
agagaaaccuuaugagugu

SEQ ID NO: 1957604 - RNA, 19 nt, Homo sapiens
  misc_RNA (1)...(19): siRNA sense strand
gagagaaacccuaugaaug

SEQ ID NO: 1957605 - RNA, 19 nt, Homo sapiens
  misc_RNA (1)...(19): siRNA sense strand
gagagaaaccguaucaaug

SEQ ID NO: 1957606 - RNA, 19 nt, Homo sapiens
  misc_RNA (1)...(19): siRNA sense strand
gagagaaacccuaugaaug

SEQ ID NO: 1957607 - RNA, 19 nt, Homo sapiens
  misc_RNA (1)...(19): siRNA sense strand
gagagaaacccuaugaaug

SEQ ID NO: 1957608 - RNA, 19 nt, Homo sapiens
  misc_RNA (1)...(19): siRNA sense strand
gagagaaacccuaugaaug

SEQ ID NO: 1957609 - RNA, 19 nt, Homo sapiens
  misc_RNA (1)...(19): siRNA sense strand
gagagaaacccuaugaaug

SEQ ID NO: 1957610 - RNA, 19 nt, Homo sapiens
  misc_RNA (1)...(19): siRNA sense strand
uagaagagguagcaaaugu

SEQ ID NO: 1957611 - RNA, 19 nt, Homo sapiens
  misc_RNA (1)...(19): siRNA sense strand
gaaacccuaucgauguaaa

SEQ ID NO: 1957612 - RNA, 19 nt, Homo sapiens
  misc_RNA (1)...(19): siRNA sense strand
aaagaaacccuaugaaugu

SEQ ID NO: 1957613 - RNA, 19 nt, Homo sapiens
  misc_RNA (1)...(19): siRNA sense strand
ggagagaaaccuuaugaau

SEQ ID NO: 1957614 - RNA, 19 nt, Homo sapiens
  misc_RNA (1)...(19): siRNA sense strand
ggacagaaaccaaaugagu

SEQ ID NO: 1957615 - RNA, 19 nt, Homo sapiens
  misc_RNA (1)...(19): siRNA sense strand
ucgagcacauguaauaaua

SEQ ID NO: 1957616 - RNA, 19 nt, Homo sapiens
  misc_RNA (1)...(19): siRNA sense strand
gaauguaaacaauguggua

SEQ ID NO: 1957617 - RNA, 19 nt, Homo sapiens
  misc_RNA (1)...(19): siRNA sense strand
gggaaagccuucagguguu

SEQ ID NO: 1957618 - RNA, 19 nt, Homo sapiens
  misc_RNA (1)...(19): siRNA sense strand
caaguucccuucaaagaca

SEQ ID NO: 1957619 - RNA, 19 nt, Homo sapiens
  misc_RNA (1)...(19): siRNA sense strand
ggagagaaacccuaugaau

SEQ ID NO: 1957620 - RNA, 19 nt, Homo sapiens
  misc_RNA (1)...(19): siRNA sense strand
ggagagaaaccguaucaau

SEQ ID NO: 1957621 - RNA, 19 nt, Homo sapiens
  misc_RNA (1)...(19): siRNA sense strand
ggagagaaacccuaugaau

SEQ ID NO: 1957622 - RNA, 19 nt, Homo sapiens
  misc_RNA (1)...(19): siRNA sense strand
ggagagaaacccuaugaau

SEQ ID NO: 1957623 - RNA, 19 nt, Homo sapiens
  misc_RNA (1)...(19): siRNA sense strand
gcagagaaacccuaugaau

SEQ ID NO: 1957624 - RNA, 19 nt, Homo sapiens
  misc_RNA (1)...(19): siRNA sense strand
ggagagaaacccuaugaau

SEQ ID NO: 1957625 - RNA, 19 nt, Homo sapiens
  misc_RNA (1)...(19): siRNA sense strand
ggagagaaacccuaugaau

SEQ ID NO: 1957626 - RNA, 19 nt, Homo sapiens
  misc_RNA (1)...(19): siRNA sense strand
gacagaaaccaaaugagua

SEQ ID NO: 1957627 - RNA, 19 nt, Homo sapiens
  misc_RNA (1)...(19): siRNA sense strand
agagaaaccuuaugaaugc

SEQ ID NO: 1957628 - RNA, 19 nt, Homo sapiens
  misc_RNA (1)...(19): siRNA sense strand
gcaaccauguaaauguaaa

SEQ ID NO: 1957629 - RNA, 19 nt, Homo sapiens
  misc_RNA (1)...(19): siRNA sense strand
aagcaaccauguaaaugua

SEQ ID NO: 1957630 - RNA, 19 nt, Homo sapiens
  misc_RNA (1)...(19): siRNA sense strand
gaauguaagcaauguggua

SEQ ID NO: 1957631 - RNA, 19 nt, Homo sapiens
  misc_RNA (1)...(19): siRNA sense strand
gggaagaccaggacauuga

SEQ ID NO: 1957632 - RNA, 19 nt, Homo sapiens
  misc_RNA (1)...(19): siRNA sense strand
ggacucauaugggagagaa

SEQ ID NO: 1957633 - RNA, 19 nt, Homo sapiens
  misc_RNA (1)...(19): siRNA sense strand
ugggaaagccuucagauuu

SEQ ID NO: 1957634 - RNA, 19 nt, Homo sapiens
  misc_RNA (1)...(19): siRNA sense strand
gggcuuugcuggauucuuc

SEQ ID NO: 1957635 - RNA, 19 nt, Homo sapiens
  misc_RNA (1)...(19): siRNA sense strand
gggaaagccuucaacucuu

SEQ ID NO: 1957636 - RNA, 19 nt, Homo sapiens
  misc_RNA (1)...(19): siRNA sense strand
gaagcccuaugaauguaaa

SEQ ID NO: 1957637 - RNA, 19 nt, Homo sapiens
  misc_RNA (1)...(19): siRNA sense strand
gaaaccuuaugaaugcaaa

SEQ ID NO: 1957638 - RNA, 19 nt, Homo sapiens
  misc_RNA (1)...(19): siRNA sense strand
gggaaagccuucagauuuu

SEQ ID NO: 1957639 - RNA, 19 nt, Homo sapiens
  misc_RNA (1)...(19): siRNA sense strand
cagaaacccuaugaaugua

SEQ ID NO: 1957640 - RNA, 19 nt, Homo sapiens
  misc_RNA (1)...(19): siRNA sense strand
gacagaaacccuaugaaug

SEQ ID NO: 1957641 - RNA, 19 nt, Homo sapiens
  misc_RNA (1)...(19): siRNA sense strand
ugaaaggacucacaaugca

SEQ ID NO: 1957642 - RNA, 19 nt, Homo sapiens
  misc_RNA (1)...(19): siRNA sense strand
gaaugcagcuuuuguggaa

SEQ ID NO: 1957643 - RNA, 19 nt, Homo sapiens
  misc_RNA (1)...(19): siRNA sense strand
ucgaagaugucauaugguu

SEQ ID NO: 1957644 - RNA, 19 nt, Homo sapiens
  misc_RNA (1)...(19): siRNA sense strand
gaacacacacuggagagaa

SEQ ID NO: 1957645 - RNA, 19 nt, Homo sapiens
  misc_RNA (1)...(19): siRNA sense strand
ggagagaaaccuuaugagu

SEQ ID NO: 1957646 - RNA, 19 nt, Homo sapiens
  misc_RNA (1)...(19): siRNA sense strand
aaucgaagaugucauaugg

SEQ ID NO: 1957647 - RNA, 19 nt, Homo sapiens
  misc_RNA (1)...(19): siRNA sense strand
gagugaagcccuaugaaug

SEQ ID NO: 1957648 - RNA, 19 nt, Homo sapiens
  misc_RNA (1)...(19): siRNA sense strand
agagaaacccuaugaaugu

SEQ ID NO: 1957649 - RNA, 19 nt, Homo sapiens
  misc_RNA (1)...(19): siRNA sense strand
agagaaacccuaugaaugu

SEQ ID NO: 1957650 - RNA, 19 nt, Homo sapiens
  misc_RNA (1)...(19): siRNA sense strand
agagaaacccuaugaaugu

SEQ ID NO: 1957651 - RNA, 19 nt, Homo sapiens
  misc_RNA (1)...(19): siRNA sense strand
agagaaacccuaugaaugu

SEQ ID NO: 1957652 - RNA, 19 nt, Homo sapiens
  misc_RNA (1)...(19): siRNA sense strand
gccuucaacucuucuaauu

SEQ ID NO: 1957653 - RNA, 19 nt, Homo sapiens
  misc_RNA (1)...(19): siRNA sense strand
agagaaacccuaugaaugu

SEQ ID NO: 1957654 - RNA, 19 nt, Homo sapiens
  misc_RNA (1)...(19): siRNA sense strand
agagaaacccuaugaaugu

SEQ ID NO: 1957655 - RNA, 19 nt, Homo sapiens
  misc_RNA (1)...(19): siRNA sense strand
acagaaacccuaugaaugu

SEQ ID NO: 1957656 - RNA, 19 nt, Homo sapiens
  misc_RNA (1)...(19): siRNA sense strand
ccacauacuuucgaacuca

SEQ ID NO: 1957657 - RNA, 19 nt, Homo sapiens
  misc_RNA (1)...(19): siRNA sense strand
ggaaagccuucagguguuc

SEQ ID NO: 1957658 - RNA, 19 nt, Homo sapiens
  misc_RNA (1)...(19): siRNA sense strand
ucucuucgauugcaugaaa

SEQ ID NO: 1957659 - RNA, 19 nt, Homo sapiens
  misc_RNA (1)...(19): siRNA sense strand
ggagugggcuuugcuggau

SEQ ID NO: 1957660 - RNA, 19 nt, Homo sapiens
  misc_RNA (1)...(19): siRNA sense strand
ggagagaaacccuaucgau

SEQ ID NO: 1957661 - RNA, 19 nt, Homo sapiens
  misc_RNA (1)...(19): siRNA sense strand
gaacucauauuggagaaaa

SEQ ID NO: 1957662 - RNA, 19 nt, Homo sapiens
  misc_RNA (1)...(19): siRNA sense strand
gaaaguagaagagguagca

SEQ ID NO: 1957663 - RNA, 19 nt, Homo sapiens
  misc_RNA (1)...(19): siRNA sense strand
cauugaagaugaccacaga

SEQ ID NO: 1957664 - RNA, 19 nt, Homo sapiens
  misc_RNA (1)...(19): siRNA sense strand
cagagaaacccuaugaaug

SEQ ID NO: 1957665 - RNA, 19 nt, Homo sapiens
  misc_RNA (1)...(19): siRNA sense strand
ccaaaugaguaucaggaau

SEQ ID NO: 1957666 - RNA, 19 nt, Homo sapiens
  misc_RNA (1)...(19): siRNA sense strand
gaacucauacuggagagaa

SEQ ID NO: 1957667 - RNA, 19 nt, Homo sapiens
  misc_RNA (1)...(19): siRNA sense strand
ucauucaguugguccauuu

SEQ ID NO: 1957668 - RNA, 19 nt, Homo sapiens
  misc_RNA (1)...(19): siRNA sense strand
gcucgaccuuauaaaugua

SEQ ID NO: 1957669 - RNA, 19 nt, Homo sapiens
  misc_RNA (1)...(19): siRNA sense strand
gugaagcccuaugaaugua

SEQ ID NO: 1957670 - RNA, 19 nt, Homo sapiens
  misc_RNA (1)...(19): siRNA sense strand
ggagugaagcccuaugaau

SEQ ID NO: 1957671 - RNA, 19 nt, Homo sapiens
  misc_RNA (1)...(19): siRNA sense strand
gaaaagcaaccauguaaau

SEQ ID NO: 1957672 - RNA, 19 nt, Homo sapiens
  misc_RNA (1)...(19): siRNA sense strand
gaauguaaacaguguggaa

SEQ ID NO: 1957673 - RNA, 19 nt, Homo sapiens
  misc_RNA (1)...(19): siRNA sense strand
gguagcaaauguggagaaa

SEQ ID NO: 1957674 - RNA, 19 nt, Homo sapiens
  misc_RNA (1)...(19): siRNA sense strand
guccauuucucuucgauug

SEQ ID NO: 1957675 - RNA, 19 nt, Homo sapiens
  misc_RNA (1)...(19): siRNA sense strand
gaauguaagcaauguggaa

SEQ ID NO: 1957676 - RNA, 19 nt, Homo sapiens
  misc_RNA (1)...(19): siRNA sense strand
gagacucugugaaaguaga

SEQ ID NO: 1957677 - RNA, 19 nt, Homo sapiens
  misc_RNA (1)...(19): siRNA sense strand
ucacagaggccuacuacua

SEQ ID NO: 1957678 - RNA, 19 nt, Homo sapiens
  misc_RNA (1)...(19): siRNA sense strand
gggcccagcuccucuacua

SEQ ID NO: 1957679 - RNA, 19 nt, Homo sapiens
  misc_RNA (1)...(19): siRNA sense strand
gauacaagcacccgucuga

SEQ ID NO: 1957680 - RNA, 19 nt, Homo sapiens
  misc_RNA (1)...(19): siRNA sense strand
gaacuuagagccacuucug

SEQ ID NO: 1957681 - RNA, 19 nt, Homo sapiens
  misc_RNA (1)...(19): siRNA sense strand
cagcaugacccagaacuua

SEQ ID NO: 1957682 - RNA, 19 nt, Homo sapiens
  misc_RNA (1)...(19): siRNA sense strand
acagugaccuucuccauca

SEQ ID NO: 1957683 - RNA, 19 nt, Homo sapiens
  misc_RNA (1)...(19): siRNA sense strand
gcguguaccucuucacaga

SEQ ID NO: 1957684 - RNA, 19 nt, Homo sapiens
  misc_RNA (1)...(19): siRNA sense strand
caucgaagcccgugaaauc

SEQ ID NO: 1957685 - RNA, 19 nt, Homo sapiens
  misc_RNA (1)...(19): siRNA sense strand
gcacacuucugcucaagac

SEQ ID NO: 1957686 - RNA, 19 nt, Homo sapiens
  misc_RNA (1)...(19): siRNA sense strand
cgagucuacugcuauguga

SEQ ID NO: 1957687 - RNA, 19 nt, Homo sapiens
  misc_RNA (1)...(19): siRNA sense strand
gaccagccaaggagacuaa

SEQ ID NO: 1957688 - RNA, 19 nt, Homo sapiens
  misc_RNA (1)...(19): siRNA sense strand
aaagagcggugggccaaug

SEQ ID NO: 1957689 - RNA, 19 nt, Homo sapiens
  misc_RNA (1)...(19): siRNA sense strand
ugacacggcuguacuucag

SEQ ID NO: 1957690 - RNA, 19 nt, Homo sapiens
  misc_RNA (1)...(19): siRNA sense strand
ccaaggagacuaacauugc

SEQ ID NO: 1957691 - RNA, 19 nt, Homo sapiens
  misc_RNA (1)...(19): siRNA sense strand
ccagugguuuguggacuuu

SEQ ID NO: 1957692 - RNA, 19 nt, Homo sapiens
  misc_RNA (1)...(19): siRNA sense strand
gcaugacccagaacuuaga

SEQ ID NO: 1957693 - RNA, 19 nt, Homo sapiens
  misc_RNA (1)...(19): siRNA sense strand
cgcgcuggcugcucuguaa

SEQ ID NO: 1957694 - RNA, 19 nt, Homo sapiens
  misc_RNA (1)...(19): siRNA sense strand
caaggagacuaacauugcu

SEQ ID NO: 1957695 - RNA, 19 nt, Homo sapiens
  misc_RNA (1)...(19): siRNA sense strand
gcacaccagcuuccugucu

SEQ ID NO: 1957696 - RNA, 19 nt, Homo sapiens
  misc_RNA (1)...(19): siRNA sense strand
gggacgcacugaccauguc

SEQ ID NO: 1957697 - RNA, 19 nt, Homo sapiens
  misc_RNA (1)...(19): siRNA sense strand
gccaaggagacuaacauug

SEQ ID NO: 1957698 - RNA, 19 nt, Homo sapiens
  misc_RNA (1)...(19): siRNA sense strand
acagacccaugcugcaguu

SEQ ID NO: 1957699 - RNA, 19 nt, Homo sapiens
  misc_RNA (1)...(19): siRNA sense strand
ucaagauguuccugacagu

SEQ ID NO: 1957700 - RNA, 19 nt, Homo sapiens
  misc_RNA (1)...(19): siRNA sense strand
gagacuaacauugcugugu

SEQ ID NO: 1957701 - RNA, 19 nt, Homo sapiens
  misc_RNA (1)...(19): siRNA sense strand
acagaggccuacuacuaca

SEQ ID NO: 1957702 - RNA, 19 nt, Homo sapiens
  misc_RNA (1)...(19): siRNA sense strand
gguccgagucuacugcuau

SEQ ID NO: 1957703 - RNA, 19 nt, Homo sapiens
  misc_RNA (1)...(19): siRNA sense strand
cacagaggccuacuacuac

SEQ ID NO: 1957704 - RNA, 19 nt, Homo sapiens
  misc_RNA (1)...(19): siRNA sense strand
aagauguuccugacaguga

SEQ ID NO: 1957705 - RNA, 19 nt, Homo sapiens
  misc_RNA (1)...(19): siRNA sense strand
guccgagucuacugcuaug

SEQ ID NO: 1957706 - RNA, 19 nt, Homo sapiens
  misc_RNA (1)...(19): siRNA sense strand
gcccagcuccucuacuauc

SEQ ID NO: 1957707 - RNA, 19 nt, Homo sapiens
  misc_RNA (1)...(19): siRNA sense strand
acccucaacugcacacuuc

SEQ ID NO: 1957708 - RNA, 19 nt, Homo sapiens
  misc_RNA (1)...(19): siRNA sense strand
ggcaguuuguuccgauaca

SEQ ID NO: 1957709 - RNA, 19 nt, Homo sapiens
  misc_RNA (1)...(19): siRNA sense strand
caccuuugccuuccucuuc

SEQ ID NO: 1957710 - RNA, 19 nt, Homo sapiens
  misc_RNA (1)...(19): siRNA sense strand
gaaagagcggugggccaau

SEQ ID NO: 1957711 - RNA, 19 nt, Homo sapiens
  misc_RNA (1)...(19): siRNA sense strand
gugaccuucuccaucaaga

SEQ ID NO: 1957712 - RNA, 19 nt, Homo sapiens
  misc_RNA (1)...(19): siRNA sense strand
gcucacugccacccucaug

SEQ ID NO: 1957713 - RNA, 19 nt, Homo sapiens
  misc_RNA (1)...(19): siRNA sense strand
aggagaagccacugucugu

SEQ ID NO: 1957714 - RNA, 19 nt, Homo sapiens
  misc_RNA (1)...(19): siRNA sense strand
gaaguuaauucgagucuua

SEQ ID NO: 1957715 - RNA, 19 nt, Homo sapiens
  misc_RNA (1)...(19): siRNA sense strand
gaagggagguucagagaaa

SEQ ID NO: 1957716 - RNA, 19 nt, Homo sapiens
  misc_RNA (1)...(19): siRNA sense strand
gaacuuggaucauauggaa

SEQ ID NO: 1957717 - RNA, 19 nt, Homo sapiens
  misc_RNA (1)...(19): siRNA sense strand
gaagaaaugucauguggau

SEQ ID NO: 1957718 - RNA, 19 nt, Homo sapiens
  misc_RNA (1)...(19): siRNA sense strand
gaaauucaacguccaagua

SEQ ID NO: 1957719 - RNA, 19 nt, Homo sapiens
  misc_RNA (1)...(19): siRNA sense strand
ggaaaucucucccacaaca

SEQ ID NO: 1957720 - RNA, 19 nt, Homo sapiens
  misc_RNA (1)...(19): siRNA sense strand
ggaaugaucuacauguuca

SEQ ID NO: 1957721 - RNA, 19 nt, Homo sapiens
  misc_RNA (1)...(19): siRNA sense strand
gcaauaaggucgucaaggu

SEQ ID NO: 1957722 - RNA, 19 nt, Homo sapiens
  misc_RNA (1)...(19): siRNA sense strand
ccgaagaacuuggaucaua

SEQ ID NO: 1957723 - RNA, 19 nt, Homo sapiens
  misc_RNA (1)...(19): siRNA sense strand
ggauugcaguauucucuua

SEQ ID NO: 1957724 - RNA, 19 nt, Homo sapiens
  misc_RNA (1)...(19): siRNA sense strand
caacaaagcaccaccauca

SEQ ID NO: 1957725 - RNA, 19 nt, Homo sapiens
  misc_RNA (1)...(19): siRNA sense strand
cagcacagauguugaaaug

SEQ ID NO: 1957726 - RNA, 19 nt, Homo sapiens
  misc_RNA (1)...(19): siRNA sense strand
gcacagauguugaaaugac

SEQ ID NO: 1957727 - RNA, 19 nt, Homo sapiens
  misc_RNA (1)...(19): siRNA sense strand
gcacaggguuaccaucaga

SEQ ID NO: 1957728 - RNA, 19 nt, Homo sapiens
  misc_RNA (1)...(19): siRNA sense strand
cauuagcacugucucauuu

SEQ ID NO: 1957729 - RNA, 19 nt, Homo sapiens
  misc_RNA (1)...(19): siRNA sense strand
caagucacguuucugauug

SEQ ID NO: 1957730 - RNA, 19 nt, Homo sapiens
  misc_RNA (1)...(19): siRNA sense strand
cgaagaacuuggaucauau

SEQ ID NO: 1957731 - RNA, 19 nt, Homo sapiens
  misc_RNA (1)...(19): siRNA sense strand
gaaggcgagucugagaaua

SEQ ID NO: 1957732 - RNA, 19 nt, Homo sapiens
  misc_RNA (1)...(19): siRNA sense strand
gcaagucacguuucugauu

SEQ ID NO: 1957733 - RNA, 19 nt, Homo sapiens
  misc_RNA (1)...(19): siRNA sense strand
guucauagccuuagccauu

SEQ ID NO: 1957734 - RNA, 19 nt, Homo sapiens
  misc_RNA (1)...(19): siRNA sense strand
caaaugauaaaccgcaaua

SEQ ID NO: 1957735 - RNA, 19 nt, Homo sapiens
  misc_RNA (1)...(19): siRNA sense strand
ucacuucccuagagaaaug

SEQ ID NO: 1957736 - RNA, 19 nt, Homo sapiens
  misc_RNA (1)...(19): siRNA sense strand
gcaagcaagucacguuucu

SEQ ID NO: 1957737 - RNA, 19 nt, Homo sapiens
  misc_RNA (1)...(19): siRNA sense strand
gcagaagacauuauagugu

SEQ ID NO: 1957738 - RNA, 19 nt, Homo sapiens
  misc_RNA (1)...(19): siRNA sense strand
augacaagauucuggauua

SEQ ID NO: 1957739 - RNA, 19 nt, Homo sapiens
  misc_RNA (1)...(19): siRNA sense strand
gaucuuaucaccaguguca

SEQ ID NO: 1957740 - RNA, 19 nt, Homo sapiens
  misc_RNA (1)...(19): siRNA sense strand
ccaaggagacuacccgaaa

SEQ ID NO: 1957741 - RNA, 19 nt, Homo sapiens
  misc_RNA (1)...(19): siRNA sense strand
gcaaguggcgaaugaacaa

SEQ ID NO: 1957742 - RNA, 19 nt, Homo sapiens
  misc_RNA (1)...(19): siRNA sense strand
gacaagauucuggauuaua

SEQ ID NO: 1957743 - RNA, 19 nt, Homo sapiens
  misc_RNA (1)...(19): siRNA sense strand
aaauugagcuuccaaacag

SEQ ID NO: 1957744 - RNA, 19 nt, Homo sapiens
  misc_RNA (1)...(19): siRNA sense strand
uggcaugugugcucuguuu

SEQ ID NO: 1957745 - RNA, 19 nt, Homo sapiens
  misc_RNA (1)...(19): siRNA sense strand
ggagaggccaguguuguaa

SEQ ID NO: 1957746 - RNA, 19 nt, Homo sapiens
  misc_RNA (1)...(19): siRNA sense strand
gaaaugguguuuggaugag

SEQ ID NO: 1957747 - RNA, 19 nt, Homo sapiens
  misc_RNA (1)...(19): siRNA sense strand
caagaucgccaagaagaaa

SEQ ID NO: 1957748 - RNA, 19 nt, Homo sapiens
  misc_RNA (1)...(19): siRNA sense strand
aauuguagguucagcagua

SEQ ID NO: 1957749 - RNA, 19 nt, Homo sapiens
  misc_RNA (1)...(19): siRNA sense strand
ucacagcaacguuggcaua

SEQ ID NO: 1957750 - RNA, 19 nt, Homo sapiens
  misc_RNA (1)...(19): siRNA sense strand
aauagcaucuuccaacuca

SEQ ID NO: 1957751 - RNA, 19 nt, Homo sapiens
  misc_RNA (1)...(19): siRNA sense strand
cuagagaaaugguguuugg

SEQ ID NO: 1957752 - RNA, 19 nt, Homo sapiens
  misc_RNA (1)...(19): siRNA sense strand
uggcaucagugaagagauu

SEQ ID NO: 1957753 - RNA, 19 nt, Homo sapiens
  misc_RNA (1)...(19): siRNA sense strand
gaagaacuuggaucauaug

SEQ ID NO: 1957754 - RNA, 19 nt, Homo sapiens
  misc_RNA (1)...(19): siRNA sense strand
acaacagucucaugaggaa

SEQ ID NO: 1957755 - RNA, 19 nt, Homo sapiens
  misc_RNA (1)...(19): siRNA sense strand
acaagauucuggauuauac

SEQ ID NO: 1957756 - RNA, 19 nt, Homo sapiens
  misc_RNA (1)...(19): siRNA sense strand
gcaccagguuggagagaca

SEQ ID NO: 1957757 - RNA, 19 nt, Homo sapiens
  misc_RNA (1)...(19): siRNA sense strand
ggaaggcgagucugagaau

SEQ ID NO: 1957758 - RNA, 19 nt, Homo sapiens
  misc_RNA (1)...(19): siRNA sense strand
ugacaagauucuggauuau

SEQ ID NO: 1957759 - RNA, 19 nt, Homo sapiens
  misc_RNA (1)...(19): siRNA sense strand
caacauugaaggugcagaa

SEQ ID NO: 1957760 - RNA, 19 nt, Homo sapiens
  misc_RNA (1)...(19): siRNA sense strand
gaugaguucuuuguuccuu

SEQ ID NO: 1957761 - RNA, 19 nt, Homo sapiens
  misc_RNA (1)...(19): siRNA sense strand
ccacagccaccucuuucua

SEQ ID NO: 1957762 - RNA, 19 nt, Homo sapiens
  misc_RNA (1)...(19): siRNA sense strand
caaggagacuacccgaaag

SEQ ID NO: 1957763 - RNA, 19 nt, Homo sapiens
  misc_RNA (1)...(19): siRNA sense strand
cgagaugugucuuucuaca

SEQ ID NO: 1957764 - RNA, 19 nt, Homo sapiens
  misc_RNA (1)...(19): siRNA sense strand
ggaccuccaucccugaucu

SEQ ID NO: 1957765 - RNA, 19 nt, Homo sapiens
  misc_RNA (1)...(19): siRNA sense strand
caccaucacuucccuagag

SEQ ID NO: 1957766 - RNA, 19 nt, Homo sapiens
  misc_RNA (1)...(19): siRNA sense strand
uuaccuggauugcaguauu

SEQ ID NO: 1957767 - RNA, 19 nt, Homo sapiens
  misc_RNA (1)...(19): siRNA sense strand
uggcauaggcacaauugua

SEQ ID NO: 1957768 - RNA, 19 nt, Homo sapiens
  misc_RNA (1)...(19): siRNA sense strand
caucuuccaacucaugaua

SEQ ID NO: 1957769 - RNA, 19 nt, Homo sapiens
  misc_RNA (1)...(19): siRNA sense strand
cuacauuguugacuugauc

SEQ ID NO: 1957770 - RNA, 19 nt, Homo sapiens
  misc_RNA (1)...(19): siRNA sense strand
uaucaccagugucauagug

SEQ ID NO: 1957771 - RNA, 19 nt, Homo sapiens
  misc_RNA (1)...(19): siRNA sense strand
caaagcaccaccaucacuu

SEQ ID NO: 1957772 - RNA, 19 nt, Homo sapiens
  misc_RNA (1)...(19): siRNA sense strand
uggauaaugucaucaugug

SEQ ID NO: 1957773 - RNA, 19 nt, Homo sapiens
  misc_RNA (1)...(19): siRNA sense strand
gcacaggagaggccagugu

SEQ ID NO: 1957774 - RNA, 19 nt, Homo sapiens
  misc_RNA (1)...(19): siRNA sense strand
cacaagaucgccaagaaga

SEQ ID NO: 1957775 - RNA, 19 nt, Homo sapiens
  misc_RNA (1)...(19): siRNA sense strand
caugaggaauagcaucuuc

SEQ ID NO: 1957776 - RNA, 19 nt, Homo sapiens
  misc_RNA (1)...(19): siRNA sense strand
gggugaagcaaaugauaaa

SEQ ID NO: 1957777 - RNA, 19 nt, Homo sapiens
  misc_RNA (1)...(19): siRNA sense strand
cuacauguucauagccuua

SEQ ID NO: 1957778 - RNA, 19 nt, Homo sapiens
  misc_RNA (1)...(19): siRNA sense strand
cuagagaaaucuuaaaccu

SEQ ID NO: 1957779 - RNA, 19 nt, Homo sapiens
  misc_RNA (1)...(19): siRNA sense strand
ggagagacaauuggcauca

SEQ ID NO: 1957780 - RNA, 19 nt, Homo sapiens
  misc_RNA (1)...(19): siRNA sense strand
agaaaugguguuuggauga

SEQ ID NO: 1957781 - RNA, 19 nt, Homo sapiens
  misc_RNA (1)...(19): siRNA sense strand
ugugaugaguucuuuguuc

SEQ ID NO: 1957782 - RNA, 19 nt, Homo sapiens
  misc_RNA (1)...(19): siRNA sense strand
gaaacccgcaagcaaguca

SEQ ID NO: 1957783 - RNA, 19 nt, Homo sapiens
  misc_RNA (1)...(19): siRNA sense strand
uccacaagaucgccaagaa

SEQ ID NO: 1957784 - RNA, 19 nt, Homo sapiens
  misc_RNA (1)...(19): siRNA sense strand
gagacuacccgaaagacau

SEQ ID NO: 1957785 - RNA, 19 nt, Homo sapiens
  misc_RNA (1)...(19): siRNA sense strand
caauuggcaucagugaaga

SEQ ID NO: 1957786 - RNA, 19 nt, Homo sapiens
  misc_RNA (1)...(19): siRNA sense strand
cuucaauucuccacaagau

SEQ ID NO: 1957787 - RNA, 19 nt, Homo sapiens
  misc_RNA (1)...(19): siRNA sense strand
guucuuuguuccuucuuug

SEQ ID NO: 1957788 - RNA, 19 nt, Homo sapiens
  misc_RNA (1)...(19): siRNA sense strand
ccuuagccauugucuguga

SEQ ID NO: 1957789 - RNA, 19 nt, Homo sapiens
  misc_RNA (1)...(19): siRNA sense strand
guucagcaguauucaacau

SEQ ID NO: 1957790 - RNA, 19 nt, Homo sapiens
  misc_RNA (1)...(19): siRNA sense strand
caucauguuuggccucuac

SEQ ID NO: 1957791 - RNA, 19 nt, Homo sapiens
  misc_RNA (1)...(19): siRNA sense strand
aagcaagucacguuucuga

SEQ ID NO: 1957792 - RNA, 19 nt, Homo sapiens
  misc_RNA (1)...(19): siRNA sense strand
caagaagaaaugucaugug

SEQ ID NO: 1957793 - RNA, 19 nt, Homo sapiens
  misc_RNA (1)...(19): siRNA sense strand
caucacuucccuagagaaa

SEQ ID NO: 1957794 - RNA, 19 nt, Homo sapiens
  misc_RNA (1)...(19): siRNA sense strand
gagaacgagcggcagaaug

SEQ ID NO: 1957795 - RNA, 19 nt, Homo sapiens
  misc_RNA (1)...(19): siRNA sense strand
cuaaggaaggcgagucuga

SEQ ID NO: 1957796 - RNA, 19 nt, Homo sapiens
  misc_RNA (1)...(19): siRNA sense strand
ucacguuucugauuguuuu

SEQ ID NO: 1957797 - RNA, 19 nt, Homo sapiens
  misc_RNA (1)...(19): siRNA sense strand
caccagaagcccaagcaaa

SEQ ID NO: 1957798 - RNA, 19 nt, Homo sapiens
  misc_RNA (1)...(19): siRNA sense strand
gucaucauguggugggaaa

SEQ ID NO: 1957799 - RNA, 19 nt, Homo sapiens
  misc_RNA (1)...(19): siRNA sense strand
ugucugugaugaguucuuu

SEQ ID NO: 1957800 - RNA, 19 nt, Homo sapiens
  misc_RNA (1)...(19): siRNA sense strand
gaucauucugcaugucauu

SEQ ID NO: 1957801 - RNA, 19 nt, Homo sapiens
  misc_RNA (1)...(19): siRNA sense strand
cacagccaccucuuucuaa

SEQ ID NO: 1957802 - RNA, 19 nt, Homo sapiens
  misc_RNA (1)...(19): siRNA sense strand
cauguuuggccucuacuuu

SEQ ID NO: 1957803 - RNA, 19 nt, Homo sapiens
  misc_RNA (1)...(19): siRNA sense strand
gcaaaccuucaucgaggaa

SEQ ID NO: 1957804 - RNA, 19 nt, Homo sapiens
  misc_RNA (1)...(19): siRNA sense strand
auggaaaucucucccacaa

SEQ ID NO: 1957805 - RNA, 19 nt, Homo sapiens
  misc_RNA (1)...(19): siRNA sense strand
ggcauaggcacaauuguag

SEQ ID NO: 1957806 - RNA, 19 nt, Homo sapiens
  misc_RNA (1)...(19): siRNA sense strand
cauugucugugaugaguuc

SEQ ID NO: 1957807 - RNA, 19 nt, Homo sapiens
  misc_RNA (1)...(19): siRNA sense strand
aaacagcaccagcacagau

SEQ ID NO: 1957808 - RNA, 19 nt, Homo sapiens
  misc_RNA (1)...(19): siRNA sense strand
guauucaacauccucuuug

SEQ ID NO: 1957809 - RNA, 19 nt, Homo sapiens
  misc_RNA (1)...(19): siRNA sense strand
gaauagcaucuuccaacuc

SEQ ID NO: 1957810 - RNA, 19 nt, Homo sapiens
  misc_RNA (1)...(19): siRNA sense strand
caucguccuucucuucauc

SEQ ID NO: 1957811 - RNA, 19 nt, Homo sapiens
  misc_RNA (1)...(19): siRNA sense strand
acaccgucauucacagauu

SEQ ID NO: 1957812 - RNA, 19 nt, Homo sapiens
  misc_RNA (1)...(19): siRNA sense strand
guacaccgucauucacaga

SEQ ID NO: 1957813 - RNA, 19 nt, Homo sapiens
  misc_RNA (1)...(19): siRNA sense strand
gcaccagcacagauguuga

SEQ ID NO: 1957814 - RNA, 19 nt, Homo sapiens
  misc_RNA (1)...(19): siRNA sense strand
ggacuacuaugugaagaua

SEQ ID NO: 1957815 - RNA, 19 nt, Homo sapiens
  misc_RNA (1)...(19): siRNA sense strand
gaaguucaucgucugauua

SEQ ID NO: 1957816 - RNA, 19 nt, Homo sapiens
  misc_RNA (1)...(19): siRNA sense strand
gaaguucgacugcauaaga

SEQ ID NO: 1957817 - RNA, 19 nt, Homo sapiens
  misc_RNA (1)...(19): siRNA sense strand
gaguaaagaggaccuguua

SEQ ID NO: 1957818 - RNA, 19 nt, Homo sapiens
  misc_RNA (1)...(19): siRNA sense strand
acacaaauguaacuucuga

SEQ ID NO: 1957819 - RNA, 19 nt, Homo sapiens
  misc_RNA (1)...(19): siRNA sense strand
ggaaguucaucgucugauu

SEQ ID NO: 1957820 - RNA, 19 nt, Homo sapiens
  misc_RNA (1)...(19): siRNA sense strand
gaagauacaagacacaaau

SEQ ID NO: 1957821 - RNA, 19 nt, Homo sapiens
  misc_RNA (1)...(19): siRNA sense strand
gaaggaaguucgacugcau

SEQ ID NO: 1957822 - RNA, 19 nt, Homo sapiens
  misc_RNA (1)...(19): siRNA sense strand
gaagaagagugcugcuuac

SEQ ID NO: 1957823 - RNA, 19 nt, Homo sapiens
  misc_RNA (1)...(19): siRNA sense strand
ggagggagccauucaccua

SEQ ID NO: 1957824 - RNA, 19 nt, Homo sapiens
  misc_RNA (1)...(19): siRNA sense strand
gagaagggauggaaauacu

SEQ ID NO: 1957825 - RNA, 19 nt, Homo sapiens
  misc_RNA (1)...(19): siRNA sense strand
gcuuguaacugaacugaug

SEQ ID NO: 1957826 - RNA, 19 nt, Homo sapiens
  misc_RNA (1)...(19): siRNA sense strand
gaagucaagugcggugcua

SEQ ID NO: 1957827 - RNA, 19 nt, Homo sapiens
  misc_RNA (1)...(19): siRNA sense strand
gaacugaugcggcucuuag

SEQ ID NO: 1957828 - RNA, 19 nt, Homo sapiens
  misc_RNA (1)...(19): siRNA sense strand
gaaagcggaccuucuggaa

SEQ ID NO: 1957829 - RNA, 19 nt, Homo sapiens
  misc_RNA (1)...(19): siRNA sense strand
agaagaagagugcugcuua

SEQ ID NO: 1957830 - RNA, 19 nt, Homo sapiens
  misc_RNA (1)...(19): siRNA sense strand
caacaagugugcagcaaac

SEQ ID NO: 1957831 - RNA, 19 nt, Homo sapiens
  misc_RNA (1)...(19): siRNA sense strand
caagugcggugcuaugauc

SEQ ID NO: 1957832 - RNA, 19 nt, Homo sapiens
  misc_RNA (1)...(19): siRNA sense strand
gcaagcuucuccugaaucu

SEQ ID NO: 1957833 - RNA, 19 nt, Homo sapiens
  misc_RNA (1)...(19): siRNA sense strand
caagaacaccggcugaaga

SEQ ID NO: 1957834 - RNA, 19 nt, Homo sapiens
  misc_RNA (1)...(19): siRNA sense strand
gcggugcuaugauccuuaa

SEQ ID NO: 1957835 - RNA, 19 nt, Homo sapiens
  misc_RNA (1)...(19): siRNA sense strand
ggacauggagaacucaaga

SEQ ID NO: 1957836 - RNA, 19 nt, Homo sapiens
  misc_RNA (1)...(19): siRNA sense strand
ggauggaaauacuucaaca

SEQ ID NO: 1957837 - RNA, 19 nt, Homo sapiens
  misc_RNA (1)...(19): siRNA sense strand
gagcuagaccgcaucaaug

SEQ ID NO: 1957838 - RNA, 19 nt, Homo sapiens
  misc_RNA (1)...(19): siRNA sense strand
aagaguugcuuguggacua

SEQ ID NO: 1957839 - RNA, 19 nt, Homo sapiens
  misc_RNA (1)...(19): siRNA sense strand
gaacuccuaugagguccuu

SEQ ID NO: 1957840 - RNA, 19 nt, Homo sapiens
  misc_RNA (1)...(19): siRNA sense strand
cagagucauucaagaguug

SEQ ID NO: 1957841 - RNA, 19 nt, Homo sapiens
  misc_RNA (1)...(19): siRNA sense strand
uuacagaacccauacuuca

SEQ ID NO: 1957842 - RNA, 19 nt, Homo sapiens
  misc_RNA (1)...(19): siRNA sense strand
cagcaaagguguggaaacu

SEQ ID NO: 1957843 - RNA, 19 nt, Homo sapiens
  misc_RNA (1)...(19): siRNA sense strand
cuacuaugaucccaauuca

SEQ ID NO: 1957844 - RNA, 19 nt, Homo sapiens
  misc_RNA (1)...(19): siRNA sense strand
gggcucggcuacagcaaga

SEQ ID NO: 1957845 - RNA, 19 nt, Homo sapiens
  misc_RNA (1)...(19): siRNA sense strand
gauggaggagcuaaagauu

SEQ ID NO: 1957846 - RNA, 19 nt, Homo sapiens
  misc_RNA (1)...(19): siRNA sense strand
ucacucugcucugcuacua

SEQ ID NO: 1957847 - RNA, 19 nt, Homo sapiens
  misc_RNA (1)...(19): siRNA sense strand
gcagaaggagcagauguug

SEQ ID NO: 1957848 - RNA, 19 nt, Homo sapiens
  misc_RNA (1)...(19): siRNA sense strand
cacuuacacuguugagaaa

SEQ ID NO: 1957849 - RNA, 19 nt, Homo sapiens
  misc_RNA (1)...(19): siRNA sense strand
cagcaagcuucuccugaau

SEQ ID NO: 1957850 - RNA, 19 nt, Homo sapiens
  misc_RNA (1)...(19): siRNA sense strand
acacuuacacuguugagaa

SEQ ID NO: 1957851 - RNA, 19 nt, Homo sapiens
  misc_RNA (1)...(19): siRNA sense strand
gaugagggcucggcuacag

SEQ ID NO: 1957852 - RNA, 19 nt, Homo sapiens
  misc_RNA (1)...(19): siRNA sense strand
agacacaaauguaacuucu

SEQ ID NO: 1957853 - RNA, 19 nt, Homo sapiens
  misc_RNA (1)...(19): siRNA sense strand
ggauggaggagcuaaagau

SEQ ID NO: 1957854 - RNA, 19 nt, Homo sapiens
  misc_RNA (1)...(19): siRNA sense strand
cuuguaaccugaguaaaga

SEQ ID NO: 1957855 - RNA, 19 nt, Homo sapiens
  misc_RNA (1)...(19): siRNA sense strand
gaaaguggaaguucaucgu

SEQ ID NO: 1957856 - RNA, 19 nt, Homo sapiens
  misc_RNA (1)...(19): siRNA sense strand
uggaggagcuaaagauuuu

SEQ ID NO: 1957857 - RNA, 19 nt, Homo sapiens
  misc_RNA (1)...(19): siRNA sense strand
guugaggucugagauuuua

SEQ ID NO: 1957858 - RNA, 19 nt, Homo sapiens
  misc_RNA (1)...(19): siRNA sense strand
acagagucauucaagaguu

SEQ ID NO: 1957859 - RNA, 19 nt, Homo sapiens
  misc_RNA (1)...(19): siRNA sense strand
uugacaggcuggugaaaga

SEQ ID NO: 1957860 - RNA, 19 nt, Homo sapiens
  misc_RNA (1)...(19): siRNA sense strand
guccgacacuuacacuguu

SEQ ID NO: 1957861 - RNA, 19 nt, Homo sapiens
  misc_RNA (1)...(19): siRNA sense strand
gauggaaauacuucaacaa

SEQ ID NO: 1957862 - RNA, 19 nt, Homo sapiens
  misc_RNA (1)...(19): siRNA sense strand
ugguugaggucugagauuu

SEQ ID NO: 1957863 - RNA, 19 nt, Homo sapiens
  misc_RNA (1)...(19): siRNA sense strand
agauguugcugcuggagaa

SEQ ID NO: 1957864 - RNA, 19 nt, Homo sapiens
  misc_RNA (1)...(19): siRNA sense strand
ccaagagccagcagaagga

SEQ ID NO: 1957865 - RNA, 19 nt, Homo sapiens
  misc_RNA (1)...(19): siRNA sense strand
acuaugaucccaauucaga

SEQ ID NO: 1957866 - RNA, 19 nt, Homo sapiens
  misc_RNA (1)...(19): siRNA sense strand
gcuacuaugaucccaauuc

SEQ ID NO: 1957867 - RNA, 19 nt, Homo sapiens
  misc_RNA (1)...(19): siRNA sense strand
ggagaagggauggaaauac

SEQ ID NO: 1957868 - RNA, 19 nt, Homo sapiens
  misc_RNA (1)...(19): siRNA sense strand
ggaugagaguggcuuaagc

SEQ ID NO: 1957869 - RNA, 19 nt, Homo sapiens
  misc_RNA (1)...(19): siRNA sense strand
cagcaaggucuaccguuga

SEQ ID NO: 1957870 - RNA, 19 nt, Homo sapiens
  misc_RNA (1)...(19): siRNA sense strand
acaggcuggugaaagagua

SEQ ID NO: 1957871 - RNA, 19 nt, Homo sapiens
  misc_RNA (1)...(19): siRNA sense strand
gaagacucaauccgagcua

SEQ ID NO: 1957872 - RNA, 19 nt, Homo sapiens
  misc_RNA (1)...(19): siRNA sense strand
aagcggaccuucuggaacu

SEQ ID NO: 1957873 - RNA, 19 nt, Homo sapiens
  misc_RNA (1)...(19): siRNA sense strand
cuuguggacuacuauguga

SEQ ID NO: 1957874 - RNA, 19 nt, Homo sapiens
  misc_RNA (1)...(19): siRNA sense strand
cgagcuagaccgcaucaau

SEQ ID NO: 1957875 - RNA, 19 nt, Homo sapiens
  misc_RNA (1)...(19): siRNA sense strand
gagaagaagagugcugcuu

SEQ ID NO: 1957876 - RNA, 19 nt, Homo sapiens
  misc_RNA (1)...(19): siRNA sense strand
ucaagcaggcaacagagaa

SEQ ID NO: 1957877 - RNA, 19 nt, Homo sapiens
  misc_RNA (1)...(19): siRNA sense strand
guuucacucugcucugcua

SEQ ID NO: 1957878 - RNA, 19 nt, Homo sapiens
  misc_RNA (1)...(19): siRNA sense strand
acucugcucugcuacuaug

SEQ ID NO: 1957879 - RNA, 19 nt, Homo sapiens
  misc_RNA (1)...(19): siRNA sense strand
uugagaaaguggaaguuca

SEQ ID NO: 1957880 - RNA, 19 nt, Homo sapiens
  misc_RNA (1)...(19): siRNA sense strand
uguaacuucugaggacaaa

SEQ ID NO: 1957881 - RNA, 19 nt, Homo sapiens
  misc_RNA (1)...(19): siRNA sense strand
uacacagagucauucaaga

SEQ ID NO: 1957882 - RNA, 19 nt, Homo sapiens
  misc_RNA (1)...(19): siRNA sense strand
ucaacaagugugcagcaaa

SEQ ID NO: 1957883 - RNA, 19 nt, Homo sapiens
  misc_RNA (1)...(19): siRNA sense strand
ugaagauacaagacacaaa

SEQ ID NO: 1957884 - RNA, 19 nt, Homo sapiens
  misc_RNA (1)...(19): siRNA sense strand
acacagagucauucaagag

SEQ ID NO: 1957885 - RNA, 19 nt, Homo sapiens
  misc_RNA (1)...(19): siRNA sense strand
uggagaagggauggaaaua

SEQ ID NO: 1957886 - RNA, 19 nt, Homo sapiens
  misc_RNA (1)...(19): siRNA sense strand
acuacuaugugaagauaca

SEQ ID NO: 1957887 - RNA, 19 nt, Homo sapiens
  misc_RNA (1)...(19): siRNA sense strand
uuacacagagucauucaag

SEQ ID NO: 1957888 - RNA, 19 nt, Homo sapiens
  misc_RNA (1)...(19): siRNA sense strand
cuucuccgcugccucacuu

SEQ ID NO: 1957889 - RNA, 19 nt, Homo sapiens
  misc_RNA (1)...(19): siRNA sense strand
gugcuaugauccuuaagcu

SEQ ID NO: 1957890 - RNA, 19 nt, Homo sapiens
  misc_RNA (1)...(19): siRNA sense strand
cugcagaggcuucuucaag

SEQ ID NO: 1957891 - RNA, 19 nt, Homo sapiens
  misc_RNA (1)...(19): siRNA sense strand
uacaggagcaggacaugga

SEQ ID NO: 1957892 - RNA, 19 nt, Homo sapiens
  misc_RNA (1)...(19): siRNA sense strand
gaggauggaggagcuaaag

SEQ ID NO: 1957893 - RNA, 19 nt, Homo sapiens
  misc_RNA (1)...(19): siRNA sense strand
cagcagaaggagcagaugu

SEQ ID NO: 1957894 - RNA, 19 nt, Homo sapiens
  misc_RNA (1)...(19): siRNA sense strand
ccuuguaaccugaguaaag

SEQ ID NO: 1957895 - RNA, 19 nt, Homo sapiens
  misc_RNA (1)...(19): siRNA sense strand
caagacacaaauguaacuu

SEQ ID NO: 1957896 - RNA, 19 nt, Homo sapiens
  misc_RNA (1)...(19): siRNA sense strand
ugagaaaguggaaguucau

SEQ ID NO: 1957897 - RNA, 19 nt, Homo sapiens
  misc_RNA (1)...(19): siRNA sense strand
cugcuacuaugaucccaau

SEQ ID NO: 1957898 - RNA, 19 nt, Homo sapiens
  misc_RNA (1)...(19): siRNA sense strand
gcacauaugcggccaguca

SEQ ID NO: 1957899 - RNA, 19 nt, Homo sapiens
  misc_RNA (1)...(19): siRNA sense strand
ggagcuggcuguaccuaga

SEQ ID NO: 1957900 - RNA, 19 nt, Homo sapiens
  misc_RNA (1)...(19): siRNA sense strand
gcaggaagagccagcagua

SEQ ID NO: 1957901 - RNA, 19 nt, Homo sapiens
  misc_RNA (1)...(19): siRNA sense strand
ccacaacucccgugaagaa

SEQ ID NO: 1957902 - RNA, 19 nt, Homo sapiens
  misc_RNA (1)...(19): siRNA sense strand
ccacugcugucauaucaga

SEQ ID NO: 1957903 - RNA, 19 nt, Homo sapiens
  misc_RNA (1)...(19): siRNA sense strand
uagaagagauggucaacuc

SEQ ID NO: 1957904 - RNA, 19 nt, Homo sapiens
  misc_RNA (1)...(19): siRNA sense strand
gaacgcggcauccaucuca

SEQ ID NO: 1957905 - RNA, 19 nt, Homo sapiens
  misc_RNA (1)...(19): siRNA sense strand
caacucccgugaagaagga

SEQ ID NO: 1957906 - RNA, 19 nt, Homo sapiens
  misc_RNA (1)...(19): siRNA sense strand
ggccacugcugucauauca

SEQ ID NO: 1957907 - RNA, 19 nt, Homo sapiens
  misc_RNA (1)...(19): siRNA sense strand
gcggcacucuguacaagaa

SEQ ID NO: 1957908 - RNA, 19 nt, Homo sapiens
  misc_RNA (1)...(19): siRNA sense strand
ccacaaaccaggccaagau

SEQ ID NO: 1957909 - RNA, 19 nt, Homo sapiens
  misc_RNA (1)...(19): siRNA sense strand
agaggccacugcugucaua

SEQ ID NO: 1957910 - RNA, 19 nt, Homo sapiens
  misc_RNA (1)...(19): siRNA sense strand
guacagucccaccgaguuu

SEQ ID NO: 1957911 - RNA, 19 nt, Homo sapiens
  misc_RNA (1)...(19): siRNA sense strand
agaaugaacugcccacaac

SEQ ID NO: 1957912 - RNA, 19 nt, Homo sapiens
  misc_RNA (1)...(19): siRNA sense strand
gcaagaaggagaaugaacu

SEQ ID NO: 1957913 - RNA, 19 nt, Homo sapiens
  misc_RNA (1)...(19): siRNA sense strand
gcagaggugaccacaguga

SEQ ID NO: 1957914 - RNA, 19 nt, Homo sapiens
  misc_RNA (1)...(19): siRNA sense strand
ccgagaagcugccacaaac

SEQ ID NO: 1957915 - RNA, 19 nt, Homo sapiens
  misc_RNA (1)...(19): siRNA sense strand
gagaaugaacugcccacaa

SEQ ID NO: 1957916 - RNA, 19 nt, Homo sapiens
  misc_RNA (1)...(19): siRNA sense strand
ggaaggaucaccagcacau

SEQ ID NO: 1957917 - RNA, 19 nt, Homo sapiens
  misc_RNA (1)...(19): siRNA sense strand
gcccacaacucccgugaag

SEQ ID NO: 1957918 - RNA, 19 nt, Homo sapiens
  misc_RNA (1)...(19): siRNA sense strand
gaaggaucaccagcacaua

SEQ ID NO: 1957919 - RNA, 19 nt, Homo sapiens
  misc_RNA (1)...(19): siRNA sense strand
gaucgcaccguuuccagaa

SEQ ID NO: 1957920 - RNA, 19 nt, Homo sapiens
  misc_RNA (1)...(19): siRNA sense strand
ccaagaacaucacauugcu

SEQ ID NO: 1957921 - RNA, 19 nt, Homo sapiens
  misc_RNA (1)...(19): siRNA sense strand
guacggugccggaacauca

SEQ ID NO: 1957922 - RNA, 19 nt, Homo sapiens
  misc_RNA (1)...(19): siRNA sense strand
gccacaaggucaacuacug

SEQ ID NO: 1957923 - RNA, 19 nt, Homo sapiens
  misc_RNA (1)...(19): siRNA sense strand
ucgcagaggugaccacagu

SEQ ID NO: 1957924 - RNA, 19 nt, Homo sapiens
  misc_RNA (1)...(19): siRNA sense strand
gcaaggacuggaaggauca

SEQ ID NO: 1957925 - RNA, 19 nt, Homo sapiens
  misc_RNA (1)...(19): siRNA sense strand
gcgacgacaugaccuuaag

SEQ ID NO: 1957926 - RNA, 19 nt, Homo sapiens
  misc_RNA (1)...(19): siRNA sense strand
ggaagagccagcaguaagg

SEQ ID NO: 1957927 - RNA, 19 nt, Homo sapiens
  misc_RNA (1)...(19): siRNA sense strand
ggagaccaccgggcugaaa

SEQ ID NO: 1957928 - RNA, 19 nt, Homo sapiens
  misc_RNA (1)...(19): siRNA sense strand
gaacaucacauugcuucca

SEQ ID NO: 1957929 - RNA, 19 nt, Homo sapiens
  misc_RNA (1)...(19): siRNA sense strand
gcauccaucucaggacaug

SEQ ID NO: 1957930 - RNA, 19 nt, Homo sapiens
  misc_RNA (1)...(19): siRNA sense strand
gaagagccagcaguaagga

SEQ ID NO: 1957931 - RNA, 19 nt, Homo sapiens
  misc_RNA (1)...(19): siRNA sense strand
ggagaaggugaccguguga

SEQ ID NO: 1957932 - RNA, 19 nt, Homo sapiens
  misc_RNA (1)...(19): siRNA sense strand
cugaaagcgugauggagaa

SEQ ID NO: 1957933 - RNA, 19 nt, Homo sapiens
  misc_RNA (1)...(19): siRNA sense strand
gaaguccacguggcugaaa

SEQ ID NO: 1957934 - RNA, 19 nt, Homo sapiens
  misc_RNA (1)...(19): siRNA sense strand
caagaaggagaaugaacug

SEQ ID NO: 1957935 - RNA, 19 nt, Homo sapiens
  misc_RNA (1)...(19): siRNA sense strand
gagaagcugccacaaacca

SEQ ID NO: 1957936 - RNA, 19 nt, Homo sapiens
  misc_RNA (1)...(19): siRNA sense strand
gguccucagucuccuccaa

SEQ ID NO: 1957937 - RNA, 19 nt, Homo sapiens
  misc_RNA (1)...(19): siRNA sense strand
gguacagucccaccgaguu

SEQ ID NO: 1957938 - RNA, 19 nt, Homo sapiens
  misc_RNA (1)...(19): siRNA sense strand
gagcuggcuguaccuagaa

SEQ ID NO: 1957939 - RNA, 19 nt, Homo sapiens
  misc_RNA (1)...(19): siRNA sense strand
gguaggacggcccuucaga

SEQ ID NO: 1957940 - RNA, 19 nt, Homo sapiens
  misc_RNA (1)...(19): siRNA sense strand
cagcggcacucuguacaag

SEQ ID NO: 1957941 - RNA, 19 nt, Homo sapiens
  misc_RNA (1)...(19): siRNA sense strand
gaagacgcuguuugagcaa

SEQ ID NO: 1957942 - RNA, 19 nt, Homo sapiens
  misc_RNA (1)...(19): siRNA sense strand
ggcgcaagaaggagaauga

SEQ ID NO: 1957943 - RNA, 19 nt, Homo sapiens
  misc_RNA (1)...(19): siRNA sense strand
aguaaggacuggaaaagaa

SEQ ID NO: 1957944 - RNA, 19 nt, Homo sapiens
  misc_RNA (1)...(19): siRNA sense strand
ggcuguaccuagaagagau

SEQ ID NO: 1957945 - RNA, 19 nt, Homo sapiens
  misc_RNA (1)...(19): siRNA sense strand
guaggacggcccuucagau

SEQ ID NO: 1957946 - RNA, 19 nt, Homo sapiens
  misc_RNA (1)...(19): siRNA sense strand
aagagauggucaacuccuu

SEQ ID NO: 1957947 - RNA, 19 nt, Homo sapiens
  misc_RNA (1)...(19): siRNA sense strand
caagaacaucacauugcuu

SEQ ID NO: 1957948 - RNA, 19 nt, Homo sapiens
  misc_RNA (1)...(19): siRNA sense strand
cauguucugucugguagga

SEQ ID NO: 1957949 - RNA, 19 nt, Homo sapiens
  misc_RNA (1)...(19): siRNA sense strand
gccagcaccuaccgagaag

SEQ ID NO: 1957950 - RNA, 19 nt, Homo sapiens
  misc_RNA (1)...(19): siRNA sense strand
caggaagagccagcaguaa

SEQ ID NO: 1957951 - RNA, 19 nt, Homo sapiens
  misc_RNA (1)...(19): siRNA sense strand
aaagguggaacuaaauaca

SEQ ID NO: 1957952 - RNA, 19 nt, Homo sapiens
  misc_RNA (1)...(19): siRNA sense strand
gacgacaugaccuuaagug

SEQ ID NO: 1957953 - RNA, 19 nt, Homo sapiens
  misc_RNA (1)...(19): siRNA sense strand
guagaggccacugcuguca

SEQ ID NO: 1957954 - RNA, 19 nt, Homo sapiens
  misc_RNA (1)...(19): siRNA sense strand
caacgucacaucccaaaau

SEQ ID NO: 1957955 - RNA, 19 nt, Homo sapiens
  misc_RNA (1)...(19): siRNA sense strand
gccaacgucacaucccaaa

SEQ ID NO: 1957956 - RNA, 19 nt, Homo sapiens
  misc_RNA (1)...(19): siRNA sense strand
ccaaaauaguguugacauc

SEQ ID NO: 1957957 - RNA, 19 nt, Homo sapiens
  misc_RNA (1)...(19): siRNA sense strand
aaggaucaccagcacauau

SEQ ID NO: 1957958 - RNA, 19 nt, Homo sapiens
  misc_RNA (1)...(19): siRNA sense strand
ccaagcaugccagcaccua

SEQ ID NO: 1957959 - RNA, 19 nt, Homo sapiens
  misc_RNA (1)...(19): siRNA sense strand
gucaacuccuugcucaaca

SEQ ID NO: 1957960 - RNA, 19 nt, Homo sapiens
  misc_RNA (1)...(19): siRNA sense strand
acugggacccuucugugua

SEQ ID NO: 1957961 - RNA, 19 nt, Homo sapiens
  misc_RNA (1)...(19): siRNA sense strand
ugauugucguccacacaga

SEQ ID NO: 1957962 - RNA, 19 nt, Homo sapiens
  misc_RNA (1)...(19): siRNA sense strand
aaagcgugauggagaaggu

SEQ ID NO: 1957963 - RNA, 19 nt, Homo sapiens
  misc_RNA (1)...(19): siRNA sense strand
gcgcaagaaggagaaugaa

SEQ ID NO: 1957964 - RNA, 19 nt, Homo sapiens
  misc_RNA (1)...(19): siRNA sense strand
agaaagagauuccuauuga

SEQ ID NO: 1957965 - RNA, 19 nt, Homo sapiens
  misc_RNA (1)...(19): siRNA sense strand
gaaagagauuccuauugaa

SEQ ID NO: 1957966 - RNA, 19 nt, Homo sapiens
  misc_RNA (1)...(19): siRNA sense strand
gagaaagagauuccuauug

SEQ ID NO: 1957967 - RNA, 19 nt, Homo sapiens
  misc_RNA (1)...(19): siRNA sense strand
ggagaaagagauuccuauu

SEQ ID NO: 1957968 - RNA, 19 nt, Homo sapiens
  misc_RNA (1)...(19): siRNA sense strand
agaaagcaauaaaggagaa

SEQ ID NO: 1957969 - RNA, 19 nt, Homo sapiens
  misc_RNA (1)...(19): siRNA sense strand
gcaauaaaggagaaagaga

SEQ ID NO: 1957970 - RNA, 19 nt, Homo sapiens
  misc_RNA (1)...(19): siRNA sense strand
ccagcaguguguucagaaa

SEQ ID NO: 1957971 - RNA, 19 nt, Homo sapiens
  misc_RNA (1)...(19): siRNA sense strand
caauaaaggagaaagagau

SEQ ID NO: 1957972 - RNA, 19 nt, Homo sapiens
  misc_RNA (1)...(19): siRNA sense strand
gcaaagaaaagccugaaaa

SEQ ID NO: 1957973 - RNA, 19 nt, Homo sapiens
  misc_RNA (1)...(19): siRNA sense strand
aagaaaagccugaaaauuc

SEQ ID NO: 1957974 - RNA, 19 nt, Homo sapiens
  misc_RNA (1)...(19): siRNA sense strand
ggacaugaagcgcgaguac

SEQ ID NO: 1957975 - RNA, 19 nt, Homo sapiens
  misc_RNA (1)...(19): siRNA sense strand
gaaagcaauaaaggagaaa

SEQ ID NO: 1957976 - RNA, 19 nt, Homo sapiens
  misc_RNA (1)...(19): siRNA sense strand
aaagagauuccuauugaag

SEQ ID NO: 1957977 - RNA, 19 nt, Homo sapiens
  misc_RNA (1)...(19): siRNA sense strand
gcaguguguucagaaagca

SEQ ID NO: 1957978 - RNA, 19 nt, Homo sapiens
  misc_RNA (1)...(19): siRNA sense strand
guacgaccagugcuucaau

SEQ ID NO: 1957979 - RNA, 19 nt, Homo sapiens
  misc_RNA (1)...(19): siRNA sense strand
guucagaaagcaauaaagg

SEQ ID NO: 1957980 - RNA, 19 nt, Homo sapiens
  misc_RNA (1)...(19): siRNA sense strand
caaagaaaagccugaaaau

SEQ ID NO: 1957981 - RNA, 19 nt, Homo sapiens
  misc_RNA (1)...(19): siRNA sense strand
cugguucgccgagaaauuu

SEQ ID NO: 1957982 - RNA, 19 nt, Homo sapiens
  misc_RNA (1)...(19): siRNA sense strand
uaccagcaguguguucaga

SEQ ID NO: 1957983 - RNA, 19 nt, Homo sapiens
  misc_RNA (1)...(19): siRNA sense strand
gcugguucgccgagaaauu

SEQ ID NO: 1957984 - RNA, 19 nt, Homo sapiens
  misc_RNA (1)...(19): siRNA sense strand
gcgaguacgaccagugcuu

SEQ ID NO: 1957985 - RNA, 19 nt, Homo sapiens
  misc_RNA (1)...(19): siRNA sense strand
ccacaagucugaauuuaua

SEQ ID NO: 1957986 - RNA, 19 nt, Homo sapiens
  misc_RNA (1)...(19): siRNA sense strand
gaagagggcugaugaguca

SEQ ID NO: 1957987 - RNA, 19 nt, Homo sapiens
  misc_RNA (1)...(19): siRNA sense strand
gaucauggcuauauagaaa

SEQ ID NO: 1957988 - RNA, 19 nt, Homo sapiens
  misc_RNA (1)...(19): siRNA sense strand
gaagacaaguuuggacaua

SEQ ID NO: 1957989 - RNA, 19 nt, Homo sapiens
  misc_RNA (1)...(19): siRNA sense strand
gagaaagcaugaagaggua

SEQ ID NO: 1957990 - RNA, 19 nt, Homo sapiens
  misc_RNA (1)...(19): siRNA sense strand
gaagagguauucaucuguu

SEQ ID NO: 1957991 - RNA, 19 nt, Homo sapiens
  misc_RNA (1)...(19): siRNA sense strand
gcugaaagcuaggaaguuu

SEQ ID NO: 1957992 - RNA, 19 nt, Homo sapiens
  misc_RNA (1)...(19): siRNA sense strand
gcuaggaaguuucaagauu

SEQ ID NO: 1957993 - RNA, 19 nt, Homo sapiens
  misc_RNA (1)...(19): siRNA sense strand
gggcauacauuacuaagug

SEQ ID NO: 1957994 - RNA, 19 nt, Homo sapiens
  misc_RNA (1)...(19): siRNA sense strand
gcguauaccugcccuguuu

SEQ ID NO: 1957995 - RNA, 19 nt, Homo sapiens
  misc_RNA (1)...(19): siRNA sense strand
ggacauagcccagaaaaua

SEQ ID NO: 1957996 - RNA, 19 nt, Homo sapiens
  misc_RNA (1)...(19): siRNA sense strand
gaaacucauucuuacgaaa

SEQ ID NO: 1957997 - RNA, 19 nt, Homo sapiens
  misc_RNA (1)...(19): siRNA sense strand
ucacagcccuuaaguuguu

SEQ ID NO: 1957998 - RNA, 19 nt, Homo sapiens
  misc_RNA (1)...(19): siRNA sense strand
cgaaugagaagacaaguuu

SEQ ID NO: 1957999 - RNA, 19 nt, Homo sapiens
  misc_RNA (1)...(19): siRNA sense strand
ucuggaagcugagaaauuu

SEQ ID NO: 1958000 - RNA, 19 nt, Homo sapiens
  misc_RNA (1)...(19): siRNA sense strand
caaaaggugucucauauga

SEQ ID NO: 1958001 - RNA, 19 nt, Homo sapiens
  misc_RNA (1)...(19): siRNA sense strand
gaaauuuacaugcuggaaa

SEQ ID NO: 1958002 - RNA, 19 nt, Homo sapiens
  misc_RNA (1)...(19): siRNA sense strand
gaacaagccggaucagaag

SEQ ID NO: 1958003 - RNA, 19 nt, Homo sapiens
  misc_RNA (1)...(19): siRNA sense strand
gacagaugauuauuucguu

SEQ ID NO: 1958004 - RNA, 19 nt, Homo sapiens
  misc_RNA (1)...(19): siRNA sense strand
aaaggaucauggcuauaua

SEQ ID NO: 1958005 - RNA, 19 nt, Homo sapiens
  misc_RNA (1)...(19): siRNA sense strand
ccgagacccugcacaguuu

SEQ ID NO: 1958006 - RNA, 19 nt, Homo sapiens
  misc_RNA (1)...(19): siRNA sense strand
cggaagagcuaaagauucu

SEQ ID NO: 1958007 - RNA, 19 nt, Homo sapiens
  misc_RNA (1)...(19): siRNA sense strand
uaaaggaucauggcuauau

SEQ ID NO: 1958008 - RNA, 19 nt, Homo sapiens
  misc_RNA (1)...(19): siRNA sense strand
cuaggaaguuucaagauuc

SEQ ID NO: 1958009 - RNA, 19 nt, Homo sapiens
  misc_RNA (1)...(19): siRNA sense strand
uaacuuugguggaauccuu

SEQ ID NO: 1958010 - RNA, 19 nt, Homo sapiens
  misc_RNA (1)...(19): siRNA sense strand
caggagggacagaugauua

SEQ ID NO: 1958011 - RNA, 19 nt, Homo sapiens
  misc_RNA (1)...(19): siRNA sense strand
gauaaaccaacuaacuuug

SEQ ID NO: 1958012 - RNA, 19 nt, Homo sapiens
  misc_RNA (1)...(19): siRNA sense strand
aaaggugucucauaugaag

SEQ ID NO: 1958013 - RNA, 19 nt, Homo sapiens
  misc_RNA (1)...(19): siRNA sense strand
gagggacagaugauuauuu

SEQ ID NO: 1958014 - RNA, 19 nt, Homo sapiens
  misc_RNA (1)...(19): siRNA sense strand
cggaaguucugaaucaaga

SEQ ID NO: 1958015 - RNA, 19 nt, Homo sapiens
  misc_RNA (1)...(19): siRNA sense strand
ggacggaagagcuaaagau

SEQ ID NO: 1958016 - RNA, 19 nt, Homo sapiens
  misc_RNA (1)...(19): siRNA sense strand
ggaaguuucaagauucaaa

SEQ ID NO: 1958017 - RNA, 19 nt, Homo sapiens
  misc_RNA (1)...(19): siRNA sense strand
aagcagcguuuaaugaaga

SEQ ID NO: 1958018 - RNA, 19 nt, Homo sapiens
  misc_RNA (1)...(19): siRNA sense strand
gcccacauguccagguaaa

SEQ ID NO: 1958019 - RNA, 19 nt, Homo sapiens
  misc_RNA (1)...(19): siRNA sense strand
gggcaccgaucucuuugga

SEQ ID NO: 1958020 - RNA, 19 nt, Homo sapiens
  misc_RNA (1)...(19): siRNA sense strand
uuauagagcugaggaagug

SEQ ID NO: 1958021 - RNA, 19 nt, Homo sapiens
  misc_RNA (1)...(19): siRNA sense strand
caacuaacuuugguggaau

SEQ ID NO: 1958022 - RNA, 19 nt, Homo sapiens
  misc_RNA (1)...(19): siRNA sense strand
ggauuuguuucuguccaua

SEQ ID NO: 1958023 - RNA, 19 nt, Homo sapiens
  misc_RNA (1)...(19): siRNA sense strand
gacagcaucuucagcuaca

SEQ ID NO: 1958024 - RNA, 19 nt, Homo sapiens
  misc_RNA (1)...(19): siRNA sense strand
gagccacaagucugaauuu

SEQ ID NO: 1958025 - RNA, 19 nt, Homo sapiens
  misc_RNA (1)...(19): siRNA sense strand
gaagagcuaaagauucuca

SEQ ID NO: 1958026 - RNA, 19 nt, Homo sapiens
  misc_RNA (1)...(19): siRNA sense strand
gaauacggauuuguuucug

SEQ ID NO: 1958027 - RNA, 19 nt, Homo sapiens
  misc_RNA (1)...(19): siRNA sense strand
gaaagcaugaagagguauu

SEQ ID NO: 1958028 - RNA, 19 nt, Homo sapiens
  misc_RNA (1)...(19): siRNA sense strand
agaacaagccggaucagaa

SEQ ID NO: 1958029 - RNA, 19 nt, Homo sapiens
  misc_RNA (1)...(19): siRNA sense strand
ggaauacggauuuguuucu

SEQ ID NO: 1958030 - RNA, 19 nt, Homo sapiens
  misc_RNA (1)...(19): siRNA sense strand
aagagguauucaucuguua

SEQ ID NO: 1958031 - RNA, 19 nt, Homo sapiens
  misc_RNA (1)...(19): siRNA sense strand
gaaauuagaacgacuucac

SEQ ID NO: 1958032 - RNA, 19 nt, Homo sapiens
  misc_RNA (1)...(19): siRNA sense strand
gaaccuucuucccaaaucu

SEQ ID NO: 1958033 - RNA, 19 nt, Homo sapiens
  misc_RNA (1)...(19): siRNA sense strand
ggugaaccuucuucccaaa

SEQ ID NO: 1958034 - RNA, 19 nt, Homo sapiens
  misc_RNA (1)...(19): siRNA sense strand
aaacuuagcgccugcuugu

SEQ ID NO: 1958035 - RNA, 19 nt, Homo sapiens
  misc_RNA (1)...(19): siRNA sense strand
gacggaagagcuaaagauu

SEQ ID NO: 1958036 - RNA, 19 nt, Homo sapiens
  misc_RNA (1)...(19): siRNA sense strand
caacagauaaacagaugga

SEQ ID NO: 1958037 - RNA, 19 nt, Homo sapiens
  misc_RNA (1)...(19): siRNA sense strand
uuacggcccucacgauaau

SEQ ID NO: 1958038 - RNA, 19 nt, Homo sapiens
  misc_RNA (1)...(19): siRNA sense strand
gcugggcaccgaucucuuu

SEQ ID NO: 1958039 - RNA, 19 nt, Homo sapiens
  misc_RNA (1)...(19): siRNA sense strand
ggacagaugauuauuucgu

SEQ ID NO: 1958040 - RNA, 19 nt, Homo sapiens
  misc_RNA (1)...(19): siRNA sense strand
gcugagaaauuuacaugcu

SEQ ID NO: 1958041 - RNA, 19 nt, Homo sapiens
  misc_RNA (1)...(19): siRNA sense strand
uuuaaaggaucauggcuau

SEQ ID NO: 1958042 - RNA, 19 nt, Homo sapiens
  misc_RNA (1)...(19): siRNA sense strand
gugcaggaguucuuugcuu

SEQ ID NO: 1958043 - RNA, 19 nt, Homo sapiens
  misc_RNA (1)...(19): siRNA sense strand
gagcccacgugcaggaguu

SEQ ID NO: 1958044 - RNA, 19 nt, Homo sapiens
  misc_RNA (1)...(19): siRNA sense strand
cugcggaaguucugaauca

SEQ ID NO: 1958045 - RNA, 19 nt, Homo sapiens
  misc_RNA (1)...(19): siRNA sense strand
gcccuuaaguuguuauguc

SEQ ID NO: 1958046 - RNA, 19 nt, Homo sapiens
  misc_RNA (1)...(19): siRNA sense strand
acacagugauucgaagcua

SEQ ID NO: 1958047 - RNA, 19 nt, Homo sapiens
  misc_RNA (1)...(19): siRNA sense strand
ggagguaauuucagauacg

SEQ ID NO: 1958048 - RNA, 19 nt, Homo sapiens
  misc_RNA (1)...(19): siRNA sense strand
acucacagcccuuaaguug

SEQ ID NO: 1958049 - RNA, 19 nt, Homo sapiens
  misc_RNA (1)...(19): siRNA sense strand
uaccugcccuguuuguuug

SEQ ID NO: 1958050 - RNA, 19 nt, Homo sapiens
  misc_RNA (1)...(19): siRNA sense strand
gagguaauuucagauacga

SEQ ID NO: 1958051 - RNA, 19 nt, Homo sapiens
  misc_RNA (1)...(19): siRNA sense strand
agggacagaugauuauuuc

SEQ ID NO: 1958052 - RNA, 19 nt, Homo sapiens
  misc_RNA (1)...(19): siRNA sense strand
cagauaaacagauggacaa

SEQ ID NO: 1958053 - RNA, 19 nt, Homo sapiens
  misc_RNA (1)...(19): siRNA sense strand
agccacaagucugaauuua

SEQ ID NO: 1958054 - RNA, 19 nt, Homo sapiens
  misc_RNA (1)...(19): siRNA sense strand
ccauaauccucaugcuugu

SEQ ID NO: 1958055 - RNA, 19 nt, Homo sapiens
  misc_RNA (1)...(19): siRNA sense strand
uagcccacauguccaggua

SEQ ID NO: 1958056 - RNA, 19 nt, Homo sapiens
  misc_RNA (1)...(19): siRNA sense strand
uaggaaguuucaagauuca

SEQ ID NO: 1958057 - RNA, 19 nt, Homo sapiens
  misc_RNA (1)...(19): siRNA sense strand
gccgagacccugcacaguu

SEQ ID NO: 1958058 - RNA, 19 nt, Homo sapiens
  misc_RNA (1)...(19): siRNA sense strand
ucaagaggagugaaugaga

SEQ ID NO: 1958059 - RNA, 19 nt, Homo sapiens
  misc_RNA (1)...(19): siRNA sense strand
guuacggcccucacgauaa

SEQ ID NO: 1958060 - RNA, 19 nt, Homo sapiens
  misc_RNA (1)...(19): siRNA sense strand
gagaacaagccggaucaga

SEQ ID NO: 1958061 - RNA, 19 nt, Homo sapiens
  misc_RNA (1)...(19): siRNA sense strand
gggagguaauuucagauac

SEQ ID NO: 1958062 - RNA, 19 nt, Homo sapiens
  misc_RNA (1)...(19): siRNA sense strand
ggaucauggcuauauagaa

SEQ ID NO: 1958063 - RNA, 19 nt, Homo sapiens
  misc_RNA (1)...(19): siRNA sense strand
ugaaugagagccacaaguc

SEQ ID NO: 1958064 - RNA, 19 nt, Homo sapiens
  misc_RNA (1)...(19): siRNA sense strand
gcaggagggacagaugauu

SEQ ID NO: 1958065 - RNA, 19 nt, Homo sapiens
  misc_RNA (1)...(19): siRNA sense strand
cgacuucacguuggagaaa

SEQ ID NO: 1958066 - RNA, 19 nt, Homo sapiens
  misc_RNA (1)...(19): siRNA sense strand
acaggaagagggcugauga

SEQ ID NO: 1958067 - RNA, 19 nt, Homo sapiens
  misc_RNA (1)...(19): siRNA sense strand
gcccugauaaaccaacuaa

SEQ ID NO: 1958068 - RNA, 19 nt, Homo sapiens
  misc_RNA (1)...(19): siRNA sense strand
gaaucaagaggagugaaug

SEQ ID NO: 1958069 - RNA, 19 nt, Homo sapiens
  misc_RNA (1)...(19): siRNA sense strand
gccacaagucugaauuuau

SEQ ID NO: 1958070 - RNA, 19 nt, Homo sapiens
  misc_RNA (1)...(19): siRNA sense strand
gguaauuucagauacgaau

SEQ ID NO: 1958071 - RNA, 19 nt, Homo sapiens
  misc_RNA (1)...(19): siRNA sense strand
gacuaaugcugugcuucaa

SEQ ID NO: 1958072 - RNA, 19 nt, Homo sapiens
  misc_RNA (1)...(19): siRNA sense strand
ggagggacagaugauuauu

SEQ ID NO: 1958073 - RNA, 19 nt, Homo sapiens
  misc_RNA (1)...(19): siRNA sense strand
gaaugagagccacaagucu

SEQ ID NO: 1958074 - RNA, 19 nt, Homo sapiens
  misc_RNA (1)...(19): siRNA sense strand
gaaugagaagacaaguuug

SEQ ID NO: 1958075 - RNA, 19 nt, Homo sapiens
  misc_RNA (1)...(19): siRNA sense strand
ugaaccuucuucccaaauc

SEQ ID NO: 1958076 - RNA, 19 nt, Homo sapiens
  misc_RNA (1)...(19): siRNA sense strand
auaccugcccuguuuguuu

SEQ ID NO: 1958077 - RNA, 19 nt, Homo sapiens
  misc_RNA (1)...(19): siRNA sense strand
aaagcagcguuuaaugaag

SEQ ID NO: 1958078 - RNA, 19 nt, Homo sapiens
  misc_RNA (1)...(19): siRNA sense strand
aagaggcccugauaaacca

SEQ ID NO: 1958079 - RNA, 19 nt, Homo sapiens
  misc_RNA (1)...(19): siRNA sense strand
agacuaaugcugugcuuca

SEQ ID NO: 1958080 - RNA, 19 nt, Homo sapiens
  misc_RNA (1)...(19): siRNA sense strand
uuucagauacgaaugagaa

SEQ ID NO: 1958081 - RNA, 19 nt, Homo sapiens
  misc_RNA (1)...(19): siRNA sense strand
acuuagcgccugcuuguuu

SEQ ID NO: 1958082 - RNA, 19 nt, Homo sapiens
  misc_RNA (1)...(19): siRNA sense strand
gggagaacaagccggauca

SEQ ID NO: 1958083 - RNA, 19 nt, Homo sapiens
  misc_RNA (1)...(19): siRNA sense strand
cuaaugcugugcuucaaaa

SEQ ID NO: 1958084 - RNA, 19 nt, Homo sapiens
  misc_RNA (1)...(19): siRNA sense strand
cugauaaaccaacuaacuu

SEQ ID NO: 1958085 - RNA, 19 nt, Homo sapiens
  misc_RNA (1)...(19): siRNA sense strand
ggaaauagcuucuuuugga

SEQ ID NO: 1958086 - RNA, 19 nt, Homo sapiens
  misc_RNA (1)...(19): siRNA sense strand
gagauggaccuuauauaua

SEQ ID NO: 1958087 - RNA, 19 nt, Homo sapiens
  misc_RNA (1)...(19): siRNA sense strand
gaauccacauuaagaagua

SEQ ID NO: 1958088 - RNA, 19 nt, Homo sapiens
  misc_RNA (1)...(19): siRNA sense strand
ggaugaagaugacaaggaa

SEQ ID NO: 1958089 - RNA, 19 nt, Homo sapiens
  misc_RNA (1)...(19): siRNA sense strand
ccacugcgguacaucauuu

SEQ ID NO: 1958090 - RNA, 19 nt, Homo sapiens
  misc_RNA (1)...(19): siRNA sense strand
ugaugaagauggagauaaa

SEQ ID NO: 1958091 - RNA, 19 nt, Homo sapiens
  misc_RNA (1)...(19): siRNA sense strand
ggaguuauuuacuuagaga

SEQ ID NO: 1958092 - RNA, 19 nt, Homo sapiens
  misc_RNA (1)...(19): siRNA sense strand
gaaagacgucggcauucua

SEQ ID NO: 1958093 - RNA, 19 nt, Homo sapiens
  misc_RNA (1)...(19): siRNA sense strand
aaaggcagcagaucucuua

SEQ ID NO: 1958094 - RNA, 19 nt, Homo sapiens
  misc_RNA (1)...(19): siRNA sense strand
gauauuguuucaacuguuc

SEQ ID NO: 1958095 - RNA, 19 nt, Homo sapiens
  misc_RNA (1)...(19): siRNA sense strand
uuacagaacucccugaaag

SEQ ID NO: 1958096 - RNA, 19 nt, Homo sapiens
  misc_RNA (1)...(19): siRNA sense strand
gagaaaggauuaagaacac

SEQ ID NO: 1958097 - RNA, 19 nt, Homo sapiens
  misc_RNA (1)...(19): siRNA sense strand
ggagaaaggauuaagaaca

SEQ ID NO: 1958098 - RNA, 19 nt, Homo sapiens
  misc_RNA (1)...(19): siRNA sense strand
gcagauuucucagggaaga

SEQ ID NO: 1958099 - RNA, 19 nt, Homo sapiens
  misc_RNA (1)...(19): siRNA sense strand
gaagugacaguguuugaug

SEQ ID NO: 1958100 - RNA, 19 nt, Homo sapiens
  misc_RNA (1)...(19): siRNA sense strand
gaaucacuauggcaauaug

SEQ ID NO: 1958101 - RNA, 19 nt, Homo sapiens
  misc_RNA (1)...(19): siRNA sense strand
gcaguaugcagaauugaaa

SEQ ID NO: 1958102 - RNA, 19 nt, Homo sapiens
  misc_RNA (1)...(19): siRNA sense strand
uuucaucucuggccuguuu

SEQ ID NO: 1958103 - RNA, 19 nt, Homo sapiens
  misc_RNA (1)...(19): siRNA sense strand
aagaaucacuauggcaaua

SEQ ID NO: 1958104 - RNA, 19 nt, Homo sapiens
  misc_RNA (1)...(19): siRNA sense strand
auaaugagcuacuagacuu

SEQ ID NO: 1958105 - RNA, 19 nt, Homo sapiens
  misc_RNA (1)...(19): siRNA sense strand
cgacaauaaugagcuacua

SEQ ID NO: 1958106 - RNA, 19 nt, Homo sapiens
  misc_RNA (1)...(19): siRNA sense strand
ugacaguguuugaugaaga

SEQ ID NO: 1958107 - RNA, 19 nt, Homo sapiens
  misc_RNA (1)...(19): siRNA sense strand
caaccgaauuguuauguac

SEQ ID NO: 1958108 - RNA, 19 nt, Homo sapiens
  misc_RNA (1)...(19): siRNA sense strand
ggauauuguuucaacuguu

SEQ ID NO: 1958109 - RNA, 19 nt, Homo sapiens
  misc_RNA (1)...(19): siRNA sense strand
ugacaaggaaucugagaaa

SEQ ID NO: 1958110 - RNA, 19 nt, Homo sapiens
  misc_RNA (1)...(19): siRNA sense strand
agagauggaccuuauauau

SEQ ID NO: 1958111 - RNA, 19 nt, Homo sapiens
  misc_RNA (1)...(19): siRNA sense strand
ggagagcacagacauagau

SEQ ID NO: 1958112 - RNA, 19 nt, Homo sapiens
  misc_RNA (1)...(19): siRNA sense strand
uggaggaaauagcuucuuu

SEQ ID NO: 1958113 - RNA, 19 nt, Homo sapiens
  misc_RNA (1)...(19): siRNA sense strand
gagauggacaaccgaauug

SEQ ID NO: 1958114 - RNA, 19 nt, Homo sapiens
  misc_RNA (1)...(19): siRNA sense strand
cagauuacccagcgauauu

SEQ ID NO: 1958115 - RNA, 19 nt, Homo sapiens
  misc_RNA (1)...(19): siRNA sense strand
caucgacaauaaugagcua

SEQ ID NO: 1958116 - RNA, 19 nt, Homo sapiens
  misc_RNA (1)...(19): siRNA sense strand
gcagcagccaccaucauuu

SEQ ID NO: 1958117 - RNA, 19 nt, Homo sapiens
  misc_RNA (1)...(19): siRNA sense strand
gguacaggauauuguuuca

SEQ ID NO: 1958118 - RNA, 19 nt, Homo sapiens
  misc_RNA (1)...(19): siRNA sense strand
ccggugaaagcaaguauua

SEQ ID NO: 1958119 - RNA, 19 nt, Homo sapiens
  misc_RNA (1)...(19): siRNA sense strand
cuaagaagcuucgaaaucc

SEQ ID NO: 1958120 - RNA, 19 nt, Homo sapiens
  misc_RNA (1)...(19): siRNA sense strand
agaacucccugaaagaugu

SEQ ID NO: 1958121 - RNA, 19 nt, Homo sapiens
  misc_RNA (1)...(19): siRNA sense strand
gacaguguuugaugaagau

SEQ ID NO: 1958122 - RNA, 19 nt, Homo sapiens
  misc_RNA (1)...(19): siRNA sense strand
ucucuggccuguuugauuc

SEQ ID NO: 1958123 - RNA, 19 nt, Homo sapiens
  misc_RNA (1)...(19): siRNA sense strand
uagcagaccucagcgaaag

SEQ ID NO: 1958124 - RNA, 19 nt, Homo sapiens
  misc_RNA (1)...(19): siRNA sense strand
ugucuacaauuucaucaga

SEQ ID NO: 1958125 - RNA, 19 nt, Homo sapiens
  misc_RNA (1)...(19): siRNA sense strand
ggcaaugaccgacuucaga

SEQ ID NO: 1958126 - RNA, 19 nt, Homo sapiens
  misc_RNA (1)...(19): siRNA sense strand
cgauauugcuuacagaacu

SEQ ID NO: 1958127 - RNA, 19 nt, Homo sapiens
  misc_RNA (1)...(19): siRNA sense strand
gcagauuacccagcgauau

SEQ ID NO: 1958128 - RNA, 19 nt, Homo sapiens
  misc_RNA (1)...(19): siRNA sense strand
ggaauccacauuaagaagu

SEQ ID NO: 1958129 - RNA, 19 nt, Homo sapiens
  misc_RNA (1)...(19): siRNA sense strand
ugaaagacgucggcauucu

SEQ ID NO: 1958130 - RNA, 19 nt, Homo sapiens
  misc_RNA (1)...(19): siRNA sense strand
gcacguguaaaguggauau

SEQ ID NO: 1958131 - RNA, 19 nt, Homo sapiens
  misc_RNA (1)...(19): siRNA sense strand
uuacuaagaagcuucgaaa

SEQ ID NO: 1958132 - RNA, 19 nt, Homo sapiens
  misc_RNA (1)...(19): siRNA sense strand
agggaagagugacccauuu

SEQ ID NO: 1958133 - RNA, 19 nt, Homo sapiens
  misc_RNA (1)...(19): siRNA sense strand
cauuguugcugaucuuugu

SEQ ID NO: 1958134 - RNA, 19 nt, Homo sapiens
  misc_RNA (1)...(19): siRNA sense strand
ccauuaaagauauccauga

SEQ ID NO: 1958135 - RNA, 19 nt, Homo sapiens
  misc_RNA (1)...(19): siRNA sense strand
gguaccgucugauguucaa

SEQ ID NO: 1958136 - RNA, 19 nt, Homo sapiens
  misc_RNA (1)...(19): siRNA sense strand
acuuagagauggaccuuau

SEQ ID NO: 1958137 - RNA, 19 nt, Homo sapiens
  misc_RNA (1)...(19): siRNA sense strand
auacaaugcaguuccuuaa

SEQ ID NO: 1958138 - RNA, 19 nt, Homo sapiens
  misc_RNA (1)...(19): siRNA sense strand
guuaggcaaugaccgacuu

SEQ ID NO: 1958139 - RNA, 19 nt, Homo sapiens
  misc_RNA (1)...(19): siRNA sense strand
ucucuaggguaccgucuga

SEQ ID NO: 1958140 - RNA, 19 nt, Homo sapiens
  misc_RNA (1)...(19): siRNA sense strand
acaaugcaguuccuuaaaa

SEQ ID NO: 1958141 - RNA, 19 nt, Homo sapiens
  misc_RNA (1)...(19): siRNA sense strand
gauauugcuuacagaacuc

SEQ ID NO: 1958142 - RNA, 19 nt, Homo sapiens
  misc_RNA (1)...(19): siRNA sense strand
gcagaccucagcgaaagaa

SEQ ID NO: 1958143 - RNA, 19 nt, Homo sapiens
  misc_RNA (1)...(19): siRNA sense strand
ggcagcagccaccaucauu

SEQ ID NO: 1958144 - RNA, 19 nt, Homo sapiens
  misc_RNA (1)...(19): siRNA sense strand
gaaaggauuaagaacacau

SEQ ID NO: 1958145 - RNA, 19 nt, Homo sapiens
  misc_RNA (1)...(19): siRNA sense strand
ucucuuagcggcagauuuc

SEQ ID NO: 1958146 - RNA, 19 nt, Homo sapiens
  misc_RNA (1)...(19): siRNA sense strand
caaaacgucuuggaggaaa

SEQ ID NO: 1958147 - RNA, 19 nt, Homo sapiens
  misc_RNA (1)...(19): siRNA sense strand
ccaggagagcacagacaua

SEQ ID NO: 1958148 - RNA, 19 nt, Homo sapiens
  misc_RNA (1)...(19): siRNA sense strand
uagagauggaccuuauaua

SEQ ID NO: 1958149 - RNA, 19 nt, Homo sapiens
  misc_RNA (1)...(19): siRNA sense strand
ccgaauuguuauguacuaa

SEQ ID NO: 1958150 - RNA, 19 nt, Homo sapiens
  misc_RNA (1)...(19): siRNA sense strand
ggaagugacaguguuugau

SEQ ID NO: 1958151 - RNA, 19 nt, Homo sapiens
  misc_RNA (1)...(19): siRNA sense strand
ccaccaucauuuuguauuu

SEQ ID NO: 1958152 - RNA, 19 nt, Homo sapiens
  misc_RNA (1)...(19): siRNA sense strand
ugaucacugucuggaauuu

SEQ ID NO: 1958153 - RNA, 19 nt, Homo sapiens
  misc_RNA (1)...(19): siRNA sense strand
agagauggacaaccgaauu

SEQ ID NO: 1958154 - RNA, 19 nt, Homo sapiens
  misc_RNA (1)...(19): siRNA sense strand
ccagcgauauugcuuacag

SEQ ID NO: 1958155 - RNA, 19 nt, Homo sapiens
  misc_RNA (1)...(19): siRNA sense strand
gcuacuagacuuccucucu

SEQ ID NO: 1958156 - RNA, 19 nt, Homo sapiens
  misc_RNA (1)...(19): siRNA sense strand
uacaggauauuguuucaac

SEQ ID NO: 1958157 - RNA, 19 nt, Homo sapiens
  misc_RNA (1)...(19): siRNA sense strand
aauacaaugcaguuccuua

SEQ ID NO: 1958158 - RNA, 19 nt, Homo sapiens
  misc_RNA (1)...(19): siRNA sense strand
ggugaaagcaaguauuagg

SEQ ID NO: 1958159 - RNA, 19 nt, Homo sapiens
  misc_RNA (1)...(19): siRNA sense strand
ugugaaagacgucggcauu

SEQ ID NO: 1958160 - RNA, 19 nt, Homo sapiens
  misc_RNA (1)...(19): siRNA sense strand
ucucggcacucccucugaa

SEQ ID NO: 1958161 - RNA, 19 nt, Homo sapiens
  misc_RNA (1)...(19): siRNA sense strand
aaacgucuuggaggaaaua

SEQ ID NO: 1958162 - RNA, 19 nt, Homo sapiens
  misc_RNA (1)...(19): siRNA sense strand
cgaggaggaugaagaugac

SEQ ID NO: 1958163 - RNA, 19 nt, Homo sapiens
  misc_RNA (1)...(19): siRNA sense strand
ggcaauauggaauacaaug

SEQ ID NO: 1958164 - RNA, 19 nt, Homo sapiens
  misc_RNA (1)...(19): siRNA sense strand
uauauaauccggugaaagc

SEQ ID NO: 1958165 - RNA, 19 nt, Homo sapiens
  misc_RNA (1)...(19): siRNA sense strand
ccugaaagaugugaaagac

SEQ ID NO: 1958166 - RNA, 19 nt, Homo sapiens
  misc_RNA (1)...(19): siRNA sense strand
acuaagaagcuucgaaauc

SEQ ID NO: 1958167 - RNA, 19 nt, Homo sapiens
  misc_RNA (1)...(19): siRNA sense strand
uagaugacgaggaggauga

SEQ ID NO: 1958168 - RNA, 19 nt, Homo sapiens
  misc_RNA (1)...(19): siRNA sense strand
acaauagcauucgcgguau

SEQ ID NO: 1958169 - RNA, 19 nt, Homo sapiens
  misc_RNA (1)...(19): siRNA sense strand
caauauggaauacaaugca

SEQ ID NO: 1958170 - RNA, 19 nt, Homo sapiens
  misc_RNA (1)...(19): siRNA sense strand
gugaaagcaaguauuagga

SEQ ID NO: 1958171 - RNA, 19 nt, Homo sapiens
  misc_RNA (1)...(19): siRNA sense strand
uuagagauggaccuuauau

SEQ ID NO: 1958172 - RNA, 19 nt, Homo sapiens
  misc_RNA (1)...(19): siRNA sense strand
aagugacaguguuugauga

SEQ ID NO: 1958173 - RNA, 19 nt, Homo sapiens
  misc_RNA (1)...(19): siRNA sense strand
cagcgauauugcuuacaga

SEQ ID NO: 1958174 - RNA, 19 nt, Homo sapiens
  misc_RNA (1)...(19): siRNA sense strand
caggagagcacagacauag

SEQ ID NO: 1958175 - RNA, 19 nt, Homo sapiens
  misc_RNA (1)...(19): siRNA sense strand
gggcacguguaaaguggau

SEQ ID NO: 1958176 - RNA, 19 nt, Homo sapiens
  misc_RNA (1)...(19): siRNA sense strand
acaauaaugagcuacuaga

SEQ ID NO: 1958177 - RNA, 19 nt, Homo sapiens
  misc_RNA (1)...(19): siRNA sense strand
gacaaggaaucugagaaaa

SEQ ID NO: 1958178 - RNA, 19 nt, Homo sapiens
  misc_RNA (1)...(19): siRNA sense strand
gaugacaaggaaucugaga

SEQ ID NO: 1958179 - RNA, 19 nt, Homo sapiens
  misc_RNA (1)...(19): siRNA sense strand
cagggaagagugacccauu

SEQ ID NO: 1958180 - RNA, 19 nt, Homo sapiens
  misc_RNA (1)...(19): siRNA sense strand
ugacgaggaggaugaagau

SEQ ID NO: 1958181 - RNA, 19 nt, Homo sapiens
  misc_RNA (1)...(19): siRNA sense strand
uuugaucacugucuggaau

SEQ ID NO: 1958182 - RNA, 19 nt, Homo sapiens
  misc_RNA (1)...(19): siRNA sense strand
agcgaaagaaagcagauua

SEQ ID NO: 1958183 - RNA, 19 nt, Homo sapiens
  misc_RNA (1)...(19): siRNA sense strand
gacaauaaugagcuacuag

SEQ ID NO: 1958184 - RNA, 19 nt, Homo sapiens
  misc_RNA (1)...(19): siRNA sense strand
gaggaaauagcuucuuuug

SEQ ID NO: 1958185 - RNA, 19 nt, Homo sapiens
  misc_RNA (1)...(19): siRNA sense strand
gaacagaugauugcacaua

SEQ ID NO: 1958186 - RNA, 19 nt, Homo sapiens
  misc_RNA (1)...(19): siRNA sense strand
gaaaaucacuugaagaguu

SEQ ID NO: 1958187 - RNA, 19 nt, Homo sapiens
  misc_RNA (1)...(19): siRNA sense strand
gaaagugucuggagaagcu

SEQ ID NO: 1958188 - RNA, 19 nt, Homo sapiens
  misc_RNA (1)...(19): siRNA sense strand
guuuauagcucacugcaaa

SEQ ID NO: 1958189 - RNA, 19 nt, Homo sapiens
  misc_RNA (1)...(19): siRNA sense strand
ggauuggacuguaucagaa

SEQ ID NO: 1958190 - RNA, 19 nt, Homo sapiens
  misc_RNA (1)...(19): siRNA sense strand
gaacuucaccguuaagcuu

SEQ ID NO: 1958191 - RNA, 19 nt, Homo sapiens
  misc_RNA (1)...(19): siRNA sense strand
uggagaagcuggacacuga

SEQ ID NO: 1958192 - RNA, 19 nt, Homo sapiens
  misc_RNA (1)...(19): siRNA sense strand
ccguuaagcuuauuucuga

SEQ ID NO: 1958193 - RNA, 19 nt, Homo sapiens
  misc_RNA (1)...(19): siRNA sense strand
ucgaaaccguucacaauuu

SEQ ID NO: 1958194 - RNA, 19 nt, Homo sapiens
  misc_RNA (1)...(19): siRNA sense strand
guugagaccuggaagaaga

SEQ ID NO: 1958195 - RNA, 19 nt, Homo sapiens
  misc_RNA (1)...(19): siRNA sense strand
cgaaaccguucacaauuug

SEQ ID NO: 1958196 - RNA, 19 nt, Homo sapiens
  misc_RNA (1)...(19): siRNA sense strand
acaaauacauccacaucuu

SEQ ID NO: 1958197 - RNA, 19 nt, Homo sapiens
  misc_RNA (1)...(19): siRNA sense strand
gaauugagcacacuuuauc

SEQ ID NO: 1958198 - RNA, 19 nt, Homo sapiens
  misc_RNA (1)...(19): siRNA sense strand
ggaccucucuagcuacaau

SEQ ID NO: 1958199 - RNA, 19 nt, Homo sapiens
  misc_RNA (1)...(19): siRNA sense strand
gagcugaagucaacgucaa

SEQ ID NO: 1958200 - RNA, 19 nt, Homo sapiens
  misc_RNA (1)...(19): siRNA sense strand
gagcacacguaccuguuug

SEQ ID NO: 1958201 - RNA, 19 nt, Homo sapiens
  misc_RNA (1)...(19): siRNA sense strand
gagugagcaucaauaaaga

SEQ ID NO: 1958202 - RNA, 19 nt, Homo sapiens
  misc_RNA (1)...(19): siRNA sense strand
gcacaaauacauccacauc

SEQ ID NO: 1958203 - RNA, 19 nt, Homo sapiens
  misc_RNA (1)...(19): siRNA sense strand
caauaaagaugagcugaag

SEQ ID NO: 1958204 - RNA, 19 nt, Homo sapiens
  misc_RNA (1)...(19): siRNA sense strand
gagucgagguuauguacuu

SEQ ID NO: 1958205 - RNA, 19 nt, Homo sapiens
  misc_RNA (1)...(19): siRNA sense strand
gcuggacacugacauuuca

SEQ ID NO: 1958206 - RNA, 19 nt, Homo sapiens
  misc_RNA (1)...(19): siRNA sense strand
caucgcagguaccaucaaa

SEQ ID NO: 1958207 - RNA, 19 nt, Homo sapiens
  misc_RNA (1)...(19): siRNA sense strand
uggagcagcuugaguugaa

SEQ ID NO: 1958208 - RNA, 19 nt, Homo sapiens
  misc_RNA (1)...(19): siRNA sense strand
ccgcaaagcagauucuauu

SEQ ID NO: 1958209 - RNA, 19 nt, Homo sapiens
  misc_RNA (1)...(19): siRNA sense strand
cgucauugcuccuccuuau

SEQ ID NO: 1958210 - RNA, 19 nt, Homo sapiens
  misc_RNA (1)...(19): siRNA sense strand
cagcuugaguugaagaaga

SEQ ID NO: 1958211 - RNA, 19 nt, Homo sapiens
  misc_RNA (1)...(19): siRNA sense strand
caaauacauccacaucuug

SEQ ID NO: 1958212 - RNA, 19 nt, Homo sapiens
  misc_RNA (1)...(19): siRNA sense strand
aagaugagcugaagucaac

SEQ ID NO: 1958213 - RNA, 19 nt, Homo sapiens
  misc_RNA (1)...(19): siRNA sense strand
cgagugagcaucaauaaag

SEQ ID NO: 1958214 - RNA, 19 nt, Homo sapiens
  misc_RNA (1)...(19): siRNA sense strand
gaacuaguggcagaauuga

SEQ ID NO: 1958215 - RNA, 19 nt, Homo sapiens
  misc_RNA (1)...(19): siRNA sense strand
ggagcacacguaccuguuu

SEQ ID NO: 1958216 - RNA, 19 nt, Homo sapiens
  misc_RNA (1)...(19): siRNA sense strand
gaagcuggacacugacauu

SEQ ID NO: 1958217 - RNA, 19 nt, Homo sapiens
  misc_RNA (1)...(19): siRNA sense strand
cagaauugagcacacuuua

SEQ ID NO: 1958218 - RNA, 19 nt, Homo sapiens
  misc_RNA (1)...(19): siRNA sense strand
gcagaauugagcacacuuu

SEQ ID NO: 1958219 - RNA, 19 nt, Homo sapiens
  misc_RNA (1)...(19): siRNA sense strand
ugacaucaccguccuguuc

SEQ ID NO: 1958220 - RNA, 19 nt, Homo sapiens
  misc_RNA (1)...(19): siRNA sense strand
cugcaaaucuaacuucauc

SEQ ID NO: 1958221 - RNA, 19 nt, Homo sapiens
  misc_RNA (1)...(19): siRNA sense strand
uuauccagcucuuaucuga

SEQ ID NO: 1958222 - RNA, 19 nt, Homo sapiens
  misc_RNA (1)...(19): siRNA sense strand
uugaagaguuugcugauca

SEQ ID NO: 1958223 - RNA, 19 nt, Homo sapiens
  misc_RNA (1)...(19): siRNA sense strand
caaugggugugcugaagug

SEQ ID NO: 1958224 - RNA, 19 nt, Homo sapiens
  misc_RNA (1)...(19): siRNA sense strand
gccagcagcuagaaguguu

SEQ ID NO: 1958225 - RNA, 19 nt, Homo sapiens
  misc_RNA (1)...(19): siRNA sense strand
gcaaagcagauucuauuuu

SEQ ID NO: 1958226 - RNA, 19 nt, Homo sapiens
  misc_RNA (1)...(19): siRNA sense strand
gcaaaucuaacuucaucau

SEQ ID NO: 1958227 - RNA, 19 nt, Homo sapiens
  misc_RNA (1)...(19): siRNA sense strand
caaaggggccucugaacua

SEQ ID NO: 1958228 - RNA, 19 nt, Homo sapiens
  misc_RNA (1)...(19): siRNA sense strand
gcucuuaucugaaaacuac

SEQ ID NO: 1958229 - RNA, 19 nt, Homo sapiens
  misc_RNA (1)...(19): siRNA sense strand
ucaguuacauccgaaagug

SEQ ID NO: 1958230 - RNA, 19 nt, Homo sapiens
  misc_RNA (1)...(19): siRNA sense strand
gaacaaaggggccucugaa

SEQ ID NO: 1958231 - RNA, 19 nt, Homo sapiens
  misc_RNA (1)...(19): siRNA sense strand
ugaagaguuugcugaucaa

SEQ ID NO: 1958232 - RNA, 19 nt, Homo sapiens
  misc_RNA (1)...(19): siRNA sense strand
aaacggaaggcgagcauga

SEQ ID NO: 1958233 - RNA, 19 nt, Homo sapiens
  misc_RNA (1)...(19): siRNA sense strand
guucaugcagucacucuuu

SEQ ID NO: 1958234 - RNA, 19 nt, Homo sapiens
  misc_RNA (1)...(19): siRNA sense strand
ugaacuaguggcagaauug

SEQ ID NO: 1958235 - RNA, 19 nt, Homo sapiens
  misc_RNA (1)...(19): siRNA sense strand
gagaagaaaaccuugaaaa

SEQ ID NO: 1958236 - RNA, 19 nt, Homo sapiens
  misc_RNA (1)...(19): siRNA sense strand
guuauguacuuccuguugu

SEQ ID NO: 1958237 - RNA, 19 nt, Homo sapiens
  misc_RNA (1)...(19): siRNA sense strand
uauuagguuuccaguggua

SEQ ID NO: 1958238 - RNA, 19 nt, Homo sapiens
  misc_RNA (1)...(19): siRNA sense strand
gaauguuauccagcucuua

SEQ ID NO: 1958239 - RNA, 19 nt, Homo sapiens
  misc_RNA (1)...(19): siRNA sense strand
gcagcaagcgugguugaga

SEQ ID NO: 1958240 - RNA, 19 nt, Homo sapiens
  misc_RNA (1)...(19): siRNA sense strand
auccagcucuuaucugaaa

SEQ ID NO: 1958241 - RNA, 19 nt, Homo sapiens
  misc_RNA (1)...(19): siRNA sense strand
agacacugcuggacaggau

SEQ ID NO: 1958242 - RNA, 19 nt, Homo sapiens
  misc_RNA (1)...(19): siRNA sense strand
ccugaacccugcugacauc

SEQ ID NO: 1958243 - RNA, 19 nt, Homo sapiens
  misc_RNA (1)...(19): siRNA sense strand
cuccggaccucucuagcua

SEQ ID NO: 1958244 - RNA, 19 nt, Homo sapiens
  misc_RNA (1)...(19): siRNA sense strand
aagaagaacaagcgaguga

SEQ ID NO: 1958245 - RNA, 19 nt, Homo sapiens
  misc_RNA (1)...(19): siRNA sense strand
acacugacauuucacucau

SEQ ID NO: 1958246 - RNA, 19 nt, Homo sapiens
  misc_RNA (1)...(19): siRNA sense strand
cacccgggauuauaucaug

SEQ ID NO: 1958247 - RNA, 19 nt, Homo sapiens
  misc_RNA (1)...(19): siRNA sense strand
gugcugaaguggguggauu

SEQ ID NO: 1958248 - RNA, 19 nt, Homo sapiens
  misc_RNA (1)...(19): siRNA sense strand
gucgaaaccguucacaauu

SEQ ID NO: 1958249 - RNA, 19 nt, Homo sapiens
  misc_RNA (1)...(19): siRNA sense strand
ucaccguccuguucaagau

SEQ ID NO: 1958250 - RNA, 19 nt, Homo sapiens
  misc_RNA (1)...(19): siRNA sense strand
auagcucacugcaaaucua

SEQ ID NO: 1958251 - RNA, 19 nt, Homo sapiens
  misc_RNA (1)...(19): siRNA sense strand
gguuauguacuuccuguug

SEQ ID NO: 1958252 - RNA, 19 nt, Homo sapiens
  misc_RNA (1)...(19): siRNA sense strand
guccugcagcugcuuguua

SEQ ID NO: 1958253 - RNA, 19 nt, Homo sapiens
  misc_RNA (1)...(19): siRNA sense strand
ucaauaaagaugagcugaa

SEQ ID NO: 1958254 - RNA, 19 nt, Homo sapiens
  misc_RNA (1)...(19): siRNA sense strand
ugaagcccauccagacugu

SEQ ID NO: 1958255 - RNA, 19 nt, Homo sapiens
  misc_RNA (1)...(19): siRNA sense strand
ugauggagcagcuugaguu

SEQ ID NO: 1958256 - RNA, 19 nt, Homo sapiens
  misc_RNA (1)...(19): siRNA sense strand
gcgagugagcaucaauaaa

SEQ ID NO: 1958257 - RNA, 19 nt, Homo sapiens
  misc_RNA (1)...(19): siRNA sense strand
uucaugcagucacucuuua

SEQ ID NO: 1958258 - RNA, 19 nt, Homo sapiens
  misc_RNA (1)...(19): siRNA sense strand
gggccaugcuguccaaagg

SEQ ID NO: 1958259 - RNA, 19 nt, Homo sapiens
  misc_RNA (1)...(19): siRNA sense strand
caaaucuaacuucaucaug

SEQ ID NO: 1958260 - RNA, 19 nt, Homo sapiens
  misc_RNA (1)...(19): siRNA sense strand
ugucgaaaccguucacaau

SEQ ID NO: 1958261 - RNA, 19 nt, Homo sapiens
  misc_RNA (1)...(19): siRNA sense strand
ccacaagcacaaauacauc

SEQ ID NO: 1958262 - RNA, 19 nt, Homo sapiens
  misc_RNA (1)...(19): siRNA sense strand
uacuuccuguugucaguua

SEQ ID NO: 1958263 - RNA, 19 nt, Homo sapiens
  misc_RNA (1)...(19): siRNA sense strand
gcaaugggugugcugaagu

SEQ ID NO: 1958264 - RNA, 19 nt, Homo sapiens
  misc_RNA (1)...(19): siRNA sense strand
augcggagguucagcaaga

SEQ ID NO: 1958265 - RNA, 19 nt, Homo sapiens
  misc_RNA (1)...(19): siRNA sense strand
ggaccacaagcacaaauac

SEQ ID NO: 1958266 - RNA, 19 nt, Homo sapiens
  misc_RNA (1)...(19): siRNA sense strand
gauggagcagcuugaguug

SEQ ID NO: 1958267 - RNA, 19 nt, Homo sapiens
  misc_RNA (1)...(19): siRNA sense strand
uccugcagcugcuuguuaa

SEQ ID NO: 1958268 - RNA, 19 nt, Homo sapiens
  misc_RNA (1)...(19): siRNA sense strand
uaucagaaccaagguacuu

SEQ ID NO: 1958269 - RNA, 19 nt, Homo sapiens
  misc_RNA (1)...(19): siRNA sense strand
guggguggauuggacugua

SEQ ID NO: 1958270 - RNA, 19 nt, Homo sapiens
  misc_RNA (1)...(19): siRNA sense strand
gcgcuuugcccaggagaaa

SEQ ID NO: 1958271 - RNA, 19 nt, Homo sapiens
  misc_RNA (1)...(19): siRNA sense strand
gaucaaccaggaccacaag

SEQ ID NO: 1958272 - RNA, 19 nt, Homo sapiens
  misc_RNA (1)...(19): siRNA sense strand
ucccugaguuugccaagau

SEQ ID NO: 1958273 - RNA, 19 nt, Homo sapiens
  misc_RNA (1)...(19): siRNA sense strand
ucacugcaaaucuaacuuc

SEQ ID NO: 1958274 - RNA, 19 nt, Homo sapiens
  misc_RNA (1)...(19): siRNA sense strand
ggaucaaccaggaccacaa

SEQ ID NO: 1958275 - RNA, 19 nt, Homo sapiens
  misc_RNA (1)...(19): siRNA sense strand
ggacccuccuccgguugaa

SEQ ID NO: 1958276 - RNA, 19 nt, Homo sapiens
  misc_RNA (1)...(19): siRNA sense strand
gcuguggcccagacuguga

SEQ ID NO: 1958277 - RNA, 19 nt, Homo sapiens
  misc_RNA (1)...(19): siRNA sense strand
aaucuaacuucaucauggu

SEQ ID NO: 1958278 - RNA, 19 nt, Homo sapiens
  misc_RNA (1)...(19): siRNA sense strand
gacacugacauuucacuca

SEQ ID NO: 1958279 - RNA, 19 nt, Homo sapiens
  misc_RNA (1)...(19): siRNA sense strand
uggcguugcuggaugagau

SEQ ID NO: 1958280 - RNA, 19 nt, Homo sapiens
  misc_RNA (1)...(19): siRNA sense strand
ucaggaaacuguggaaaau

SEQ ID NO: 1958281 - RNA, 19 nt, Homo sapiens
  misc_RNA (1)...(19): siRNA sense strand
ggagaaggagaggaugaug

SEQ ID NO: 1958282 - RNA, 19 nt, Homo sapiens
  misc_RNA (1)...(19): siRNA sense strand
ucaagauguucacaagcau

SEQ ID NO: 1958283 - RNA, 19 nt, Homo sapiens
  misc_RNA (1)...(19): siRNA sense strand
uucaagauguucacaagca

SEQ ID NO: 1958284 - RNA, 19 nt, Homo sapiens
  misc_RNA (1)...(19): siRNA sense strand
uggauuggacuguaucaga

SEQ ID NO: 1958285 - RNA, 19 nt, Homo sapiens
  misc_RNA (1)...(19): siRNA sense strand
gaacagaugauugcacaua

SEQ ID NO: 1958286 - RNA, 19 nt, Homo sapiens
  misc_RNA (1)...(19): siRNA sense strand
gaaaaucacuugaagaguu

SEQ ID NO: 1958287 - RNA, 19 nt, Homo sapiens
  misc_RNA (1)...(19): siRNA sense strand
gaaagugucuggagaagcu

SEQ ID NO: 1958288 - RNA, 19 nt, Homo sapiens
  misc_RNA (1)...(19): siRNA sense strand
guuuauagcucacugcaaa

SEQ ID NO: 1958289 - RNA, 19 nt, Homo sapiens
  misc_RNA (1)...(19): siRNA sense strand
ggauuggacuguaucagaa

SEQ ID NO: 1958290 - RNA, 19 nt, Homo sapiens
  misc_RNA (1)...(19): siRNA sense strand
gaacuucaccguuaagcuu

SEQ ID NO: 1958291 - RNA, 19 nt, Homo sapiens
  misc_RNA (1)...(19): siRNA sense strand
uggagaagcuggacacuga

SEQ ID NO: 1958292 - RNA, 19 nt, Homo sapiens
  misc_RNA (1)...(19): siRNA sense strand
ccguuaagcuuauuucuga

SEQ ID NO: 1958293 - RNA, 19 nt, Homo sapiens
  misc_RNA (1)...(19): siRNA sense strand
ucgaaaccguucacaauuu

SEQ ID NO: 1958294 - RNA, 19 nt, Homo sapiens
  misc_RNA (1)...(19): siRNA sense strand
guugagaccuggaagaaga

SEQ ID NO: 1958295 - RNA, 19 nt, Homo sapiens
  misc_RNA (1)...(19): siRNA sense strand
cgaaaccguucacaauuug

SEQ ID NO: 1958296 - RNA, 19 nt, Homo sapiens
  misc_RNA (1)...(19): siRNA sense strand
acaaauacauccacaucuu

SEQ ID NO: 1958297 - RNA, 19 nt, Homo sapiens
  misc_RNA (1)...(19): siRNA sense strand
gaauugagcacacuuuauc

SEQ ID NO: 1958298 - RNA, 19 nt, Homo sapiens
  misc_RNA (1)...(19): siRNA sense strand
ggaccucucuagcuacaau

SEQ ID NO: 1958299 - RNA, 19 nt, Homo sapiens
  misc_RNA (1)...(19): siRNA sense strand
gagcugaagucaacgucaa

SEQ ID NO: 1958300 - RNA, 19 nt, Homo sapiens
  misc_RNA (1)...(19): siRNA sense strand
gagcacacguaccuguuug

SEQ ID NO: 1958301 - RNA, 19 nt, Homo sapiens
  misc_RNA (1)...(19): siRNA sense strand
gagugagcaucaauaaaga

SEQ ID NO: 1958302 - RNA, 19 nt, Homo sapiens
  misc_RNA (1)...(19): siRNA sense strand
gcacaaauacauccacauc

SEQ ID NO: 1958303 - RNA, 19 nt, Homo sapiens
  misc_RNA (1)...(19): siRNA sense strand
caauaaagaugagcugaag

SEQ ID NO: 1958304 - RNA, 19 nt, Homo sapiens
  misc_RNA (1)...(19): siRNA sense strand
gagucgagguuauguacuu

SEQ ID NO: 1958305 - RNA, 19 nt, Homo sapiens
  misc_RNA (1)...(19): siRNA sense strand
gcuggacacugacauuuca

SEQ ID NO: 1958306 - RNA, 19 nt, Homo sapiens
  misc_RNA (1)...(19): siRNA sense strand
caucgcagguaccaucaaa

SEQ ID NO: 1958307 - RNA, 19 nt, Homo sapiens
  misc_RNA (1)...(19): siRNA sense strand
uggagcagcuugaguugaa

SEQ ID NO: 1958308 - RNA, 19 nt, Homo sapiens
  misc_RNA (1)...(19): siRNA sense strand
ccgcaaagcagauucuauu

SEQ ID NO: 1958309 - RNA, 19 nt, Homo sapiens
  misc_RNA (1)...(19): siRNA sense strand
cgucauugcuccuccuuau

SEQ ID NO: 1958310 - RNA, 19 nt, Homo sapiens
  misc_RNA (1)...(19): siRNA sense strand
cagcuugaguugaagaaga

SEQ ID NO: 1958311 - RNA, 19 nt, Homo sapiens
  misc_RNA (1)...(19): siRNA sense strand
caaauacauccacaucuug

SEQ ID NO: 1958312 - RNA, 19 nt, Homo sapiens
  misc_RNA (1)...(19): siRNA sense strand
aagaugagcugaagucaac

SEQ ID NO: 1958313 - RNA, 19 nt, Homo sapiens
  misc_RNA (1)...(19): siRNA sense strand
cgagugagcaucaauaaag

SEQ ID NO: 1958314 - RNA, 19 nt, Homo sapiens
  misc_RNA (1)...(19): siRNA sense strand
gaacuaguggcagaauuga

SEQ ID NO: 1958315 - RNA, 19 nt, Homo sapiens
  misc_RNA (1)...(19): siRNA sense strand
ggagcacacguaccuguuu

SEQ ID NO: 1958316 - RNA, 19 nt, Homo sapiens
  misc_RNA (1)...(19): siRNA sense strand
gaagcuggacacugacauu

SEQ ID NO: 1958317 - RNA, 19 nt, Homo sapiens
  misc_RNA (1)...(19): siRNA sense strand
cagaauugagcacacuuua

SEQ ID NO: 1958318 - RNA, 19 nt, Homo sapiens
  misc_RNA (1)...(19): siRNA sense strand
gcagaauugagcacacuuu

SEQ ID NO: 1958319 - RNA, 19 nt, Homo sapiens
  misc_RNA (1)...(19): siRNA sense strand
ugacaucaccguccuguuc

SEQ ID NO: 1958320 - RNA, 19 nt, Homo sapiens
  misc_RNA (1)...(19): siRNA sense strand
cugcaaaucuaacuucauc

SEQ ID NO: 1958321 - RNA, 19 nt, Homo sapiens
  misc_RNA (1)...(19): siRNA sense strand
uuauccagcucuuaucuga

SEQ ID NO: 1958322 - RNA, 19 nt, Homo sapiens
  misc_RNA (1)...(19): siRNA sense strand
uugaagaguuugcugauca

SEQ ID NO: 1958323 - RNA, 19 nt, Homo sapiens
  misc_RNA (1)...(19): siRNA sense strand
caaugggugugcugaagug

SEQ ID NO: 1958324 - RNA, 19 nt, Homo sapiens
  misc_RNA (1)...(19): siRNA sense strand
gccagcagcuagaaguguu

SEQ ID NO: 1958325 - RNA, 19 nt, Homo sapiens
  misc_RNA (1)...(19): siRNA sense strand
gcaaagcagauucuauuuu

SEQ ID NO: 1958326 - RNA, 19 nt, Homo sapiens
  misc_RNA (1)...(19): siRNA sense strand
gcaaaucuaacuucaucau

SEQ ID NO: 1958327 - RNA, 19 nt, Homo sapiens
  misc_RNA (1)...(19): siRNA sense strand
caaaggggccucugaacua

SEQ ID NO: 1958328 - RNA, 19 nt, Homo sapiens
  misc_RNA (1)...(19): siRNA sense strand
gcucuuaucugaaaacuac

SEQ ID NO: 1958329 - RNA, 19 nt, Homo sapiens
  misc_RNA (1)...(19): siRNA sense strand
ucaguuacauccgaaagug

SEQ ID NO: 1958330 - RNA, 19 nt, Homo sapiens
  misc_RNA (1)...(19): siRNA sense strand
gaacaaaggggccucugaa

SEQ ID NO: 1958331 - RNA, 19 nt, Homo sapiens
  misc_RNA (1)...(19): siRNA sense strand
ugaagaguuugcugaucaa

SEQ ID NO: 1958332 - RNA, 19 nt, Homo sapiens
  misc_RNA (1)...(19): siRNA sense strand
aaacggaaggcgagcauga

SEQ ID NO: 1958333 - RNA, 19 nt, Homo sapiens
  misc_RNA (1)...(19): siRNA sense strand
guucaugcagucacucuuu

SEQ ID NO: 1958334 - RNA, 19 nt, Homo sapiens
  misc_RNA (1)...(19): siRNA sense strand
ugaacuaguggcagaauug

SEQ ID NO: 1958335 - RNA, 19 nt, Homo sapiens
  misc_RNA (1)...(19): siRNA sense strand
gagaagaaaaccuugaaaa

SEQ ID NO: 1958336 - RNA, 19 nt, Homo sapiens
  misc_RNA (1)...(19): siRNA sense strand
guuauguacuuccuguugu

SEQ ID NO: 1958337 - RNA, 19 nt, Homo sapiens
  misc_RNA (1)...(19): siRNA sense strand
uauuagguuuccaguggua

SEQ ID NO: 1958338 - RNA, 19 nt, Homo sapiens
  misc_RNA (1)...(19): siRNA sense strand
gaauguuauccagcucuua

SEQ ID NO: 1958339 - RNA, 19 nt, Homo sapiens
  misc_RNA (1)...(19): siRNA sense strand
gcagcaagcgugguugaga

SEQ ID NO: 1958340 - RNA, 19 nt, Homo sapiens
  misc_RNA (1)...(19): siRNA sense strand
auccagcucuuaucugaaa

SEQ ID NO: 1958341 - RNA, 19 nt, Homo sapiens
  misc_RNA (1)...(19): siRNA sense strand
agacacugcuggacaggau

SEQ ID NO: 1958342 - RNA, 19 nt, Homo sapiens
  misc_RNA (1)...(19): siRNA sense strand
ccugaacccugcugacauc

SEQ ID NO: 1958343 - RNA, 19 nt, Homo sapiens
  misc_RNA (1)...(19): siRNA sense strand
cuccggaccucucuagcua

SEQ ID NO: 1958344 - RNA, 19 nt, Homo sapiens
  misc_RNA (1)...(19): siRNA sense strand
aagaagaacaagcgaguga

SEQ ID NO: 1958345 - RNA, 19 nt, Homo sapiens
  misc_RNA (1)...(19): siRNA sense strand
acacugacauuucacucau

SEQ ID NO: 1958346 - RNA, 19 nt, Homo sapiens
  misc_RNA (1)...(19): siRNA sense strand
cacccgggauuauaucaug

SEQ ID NO: 1958347 - RNA, 19 nt, Homo sapiens
  misc_RNA (1)...(19): siRNA sense strand
gugcugaaguggguggauu

SEQ ID NO: 1958348 - RNA, 19 nt, Homo sapiens
  misc_RNA (1)...(19): siRNA sense strand
gucgaaaccguucacaauu

SEQ ID NO: 1958349 - RNA, 19 nt, Homo sapiens
  misc_RNA (1)...(19): siRNA sense strand
ucaccguccuguucaagau

SEQ ID NO: 1958350 - RNA, 19 nt, Homo sapiens
  misc_RNA (1)...(19): siRNA sense strand
auagcucacugcaaaucua

SEQ ID NO: 1958351 - RNA, 19 nt, Homo sapiens
  misc_RNA (1)...(19): siRNA sense strand
gguuauguacuuccuguug

SEQ ID NO: 1958352 - RNA, 19 nt, Homo sapiens
  misc_RNA (1)...(19): siRNA sense strand
guccugcagcugcuuguua

SEQ ID NO: 1958353 - RNA, 19 nt, Homo sapiens
  misc_RNA (1)...(19): siRNA sense strand
ucaauaaagaugagcugaa

SEQ ID NO: 1958354 - RNA, 19 nt, Homo sapiens
  misc_RNA (1)...(19): siRNA sense strand
ugaagcccauccagacugu

SEQ ID NO: 1958355 - RNA, 19 nt, Homo sapiens
  misc_RNA (1)...(19): siRNA sense strand
ugauggagcagcuugaguu

SEQ ID NO: 1958356 - RNA, 19 nt, Homo sapiens
  misc_RNA (1)...(19): siRNA sense strand
gcgagugagcaucaauaaa

SEQ ID NO: 1958357 - RNA, 19 nt, Homo sapiens
  misc_RNA (1)...(19): siRNA sense strand
uucaugcagucacucuuua

SEQ ID NO: 1958358 - RNA, 19 nt, Homo sapiens
  misc_RNA (1)...(19): siRNA sense strand
gggccaugcuguccaaagg

SEQ ID NO: 1958359 - RNA, 19 nt, Homo sapiens
  misc_RNA (1)...(19): siRNA sense strand
caaaucuaacuucaucaug

SEQ ID NO: 1958360 - RNA, 19 nt, Homo sapiens
  misc_RNA (1)...(19): siRNA sense strand
ugucgaaaccguucacaau

SEQ ID NO: 1958361 - RNA, 19 nt, Homo sapiens
  misc_RNA (1)...(19): siRNA sense strand
ccacaagcacaaauacauc

SEQ ID NO: 1958362 - RNA, 19 nt, Homo sapiens
  misc_RNA (1)...(19): siRNA sense strand
uacuuccuguugucaguua

SEQ ID NO: 1958363 - RNA, 19 nt, Homo sapiens
  misc_RNA (1)...(19): siRNA sense strand
gcaaugggugugcugaagu

SEQ ID NO: 1958364 - RNA, 19 nt, Homo sapiens
  misc_RNA (1)...(19): siRNA sense strand
augcggagguucagcaaga

SEQ ID NO: 1958365 - RNA, 19 nt, Homo sapiens
  misc_RNA (1)...(19): siRNA sense strand
ggaccacaagcacaaauac

SEQ ID NO: 1958366 - RNA, 19 nt, Homo sapiens
  misc_RNA (1)...(19): siRNA sense strand
gauggagcagcuugaguug

SEQ ID NO: 1958367 - RNA, 19 nt, Homo sapiens
  misc_RNA (1)...(19): siRNA sense strand
uccugcagcugcuuguuaa

SEQ ID NO: 1958368 - RNA, 19 nt, Homo sapiens
  misc_RNA (1)...(19): siRNA sense strand
uaucagaaccaagguacuu

SEQ ID NO: 1958369 - RNA, 19 nt, Homo sapiens
  misc_RNA (1)...(19): siRNA sense strand
guggguggauuggacugua

SEQ ID NO: 1958370 - RNA, 19 nt, Homo sapiens
  misc_RNA (1)...(19): siRNA sense strand
gcgcuuugcccaggagaaa

SEQ ID NO: 1958371 - RNA, 19 nt, Homo sapiens
  misc_RNA (1)...(19): siRNA sense strand
gaucaaccaggaccacaag

SEQ ID NO: 1958372 - RNA, 19 nt, Homo sapiens
  misc_RNA (1)...(19): siRNA sense strand
ucccugaguuugccaagau

SEQ ID NO: 1958373 - RNA, 19 nt, Homo sapiens
  misc_RNA (1)...(19): siRNA sense strand
ucacugcaaaucuaacuuc

SEQ ID NO: 1958374 - RNA, 19 nt, Homo sapiens
  misc_RNA (1)...(19): siRNA sense strand
ggaucaaccaggaccacaa

SEQ ID NO: 1958375 - RNA, 19 nt, Homo sapiens
  misc_RNA (1)...(19): siRNA sense strand
ggacccuccuccgguugaa

SEQ ID NO: 1958376 - RNA, 19 nt, Homo sapiens
  misc_RNA (1)...(19): siRNA sense strand
gcuguggcccagacuguga

SEQ ID NO: 1958377 - RNA, 19 nt, Homo sapiens
  misc_RNA (1)...(19): siRNA sense strand
aaucuaacuucaucauggu

SEQ ID NO: 1958378 - RNA, 19 nt, Homo sapiens
  misc_RNA (1)...(19): siRNA sense strand
gacacugacauuucacuca

SEQ ID NO: 1958379 - RNA, 19 nt, Homo sapiens
  misc_RNA (1)...(19): siRNA sense strand
uggcguugcuggaugagau

SEQ ID NO: 1958380 - RNA, 19 nt, Homo sapiens
  misc_RNA (1)...(19): siRNA sense strand
ucaggaaacuguggaaaau

SEQ ID NO: 1958381 - RNA, 19 nt, Homo sapiens
  misc_RNA (1)...(19): siRNA sense strand
ggagaaggagaggaugaug

SEQ ID NO: 1958382 - RNA, 19 nt, Homo sapiens
  misc_RNA (1)...(19): siRNA sense strand
ucaagauguucacaagcau

SEQ ID NO: 1958383 - RNA, 19 nt, Homo sapiens
  misc_RNA (1)...(19): siRNA sense strand
uucaagauguucacaagca

SEQ ID NO: 1958384 - RNA, 19 nt, Homo sapiens
  misc_RNA (1)...(19): siRNA sense strand
uggauuggacuguaucaga

SEQ ID NO: 1958385 - RNA, 19 nt, Homo sapiens
  misc_RNA (1)...(19): siRNA sense strand
gaaaguugguuuauggaua

SEQ ID NO: 1958386 - RNA, 19 nt, Homo sapiens
  misc_RNA (1)...(19): siRNA sense strand
aaacagauaucucgaguaa

SEQ ID NO: 1958387 - RNA, 19 nt, Homo sapiens
  misc_RNA (1)...(19): siRNA sense strand
gaacgaaugucucagaugu

SEQ ID NO: 1958388 - RNA, 19 nt, Homo sapiens
  misc_RNA (1)...(19): siRNA sense strand
uguggaagcugaagaaaua

SEQ ID NO: 1958389 - RNA, 19 nt, Homo sapiens
  misc_RNA (1)...(19): siRNA sense strand
gaagaagacugggaaguau

SEQ ID NO: 1958390 - RNA, 19 nt, Homo sapiens
  misc_RNA (1)...(19): siRNA sense strand
gaggaaauauucagagguu

SEQ ID NO: 1958391 - RNA, 19 nt, Homo sapiens
  misc_RNA (1)...(19): siRNA sense strand
acagauaucucgaguaaga

SEQ ID NO: 1958392 - RNA, 19 nt, Homo sapiens
  misc_RNA (1)...(19): siRNA sense strand
uggagaagcuugguaguua

SEQ ID NO: 1958393 - RNA, 19 nt, Homo sapiens
  misc_RNA (1)...(19): siRNA sense strand
ggacuuaaauauucuugga

SEQ ID NO: 1958394 - RNA, 19 nt, Homo sapiens
  misc_RNA (1)...(19): siRNA sense strand
gagcaaagaggaaauauuc

SEQ ID NO: 1958395 - RNA, 19 nt, Homo sapiens
  misc_RNA (1)...(19): siRNA sense strand
gaaugaaaccggcuuguug

SEQ ID NO: 1958396 - RNA, 19 nt, Homo sapiens
  misc_RNA (1)...(19): siRNA sense strand
gaagaacaacuaaauagga

SEQ ID NO: 1958397 - RNA, 19 nt, Homo sapiens
  misc_RNA (1)...(19): siRNA sense strand
cauaucagcuuucuaaugg

SEQ ID NO: 1958398 - RNA, 19 nt, Homo sapiens
  misc_RNA (1)...(19): siRNA sense strand
gaugagaucacuaccagua

SEQ ID NO: 1958399 - RNA, 19 nt, Homo sapiens
  misc_RNA (1)...(19): siRNA sense strand
gcagacaaguuacugaaca

SEQ ID NO: 1958400 - RNA, 19 nt, Homo sapiens
  misc_RNA (1)...(19): siRNA sense strand
caaggaaacuauauaaagg

SEQ ID NO: 1958401 - RNA, 19 nt, Homo sapiens
  misc_RNA (1)...(19): siRNA sense strand
gaacauacuagacccuaaa

SEQ ID NO: 1958402 - RNA, 19 nt, Homo sapiens
  misc_RNA (1)...(19): siRNA sense strand
caaaucaaauccaaacaca

SEQ ID NO: 1958403 - RNA, 19 nt, Homo sapiens
  misc_RNA (1)...(19): siRNA sense strand
gcuagaagaugcagcacuu

SEQ ID NO: 1958404 - RNA, 19 nt, Homo sapiens
  misc_RNA (1)...(19): siRNA sense strand
gaaaccggcuuguugucuu

SEQ ID NO: 1958405 - RNA, 19 nt, Homo sapiens
  misc_RNA (1)...(19): siRNA sense strand
gaauugaacgugauauaga

SEQ ID NO: 1958406 - RNA, 19 nt, Homo sapiens
  misc_RNA (1)...(19): siRNA sense strand
gaaugucucagauguauga

SEQ ID NO: 1958407 - RNA, 19 nt, Homo sapiens
  misc_RNA (1)...(19): siRNA sense strand
gcagucaaaucaaauccaa

SEQ ID NO: 1958408 - RNA, 19 nt, Homo sapiens
  misc_RNA (1)...(19): siRNA sense strand
ggaauucucccuaguuuua

SEQ ID NO: 1958409 - RNA, 19 nt, Homo sapiens
  misc_RNA (1)...(19): siRNA sense strand
agacuuggaugaaacacua

SEQ ID NO: 1958410 - RNA, 19 nt, Homo sapiens
  misc_RNA (1)...(19): siRNA sense strand
ggagaagcuugguaguuau

SEQ ID NO: 1958411 - RNA, 19 nt, Homo sapiens
  misc_RNA (1)...(19): siRNA sense strand
gaagguguaugcagacaag

SEQ ID NO: 1958412 - RNA, 19 nt, Homo sapiens
  misc_RNA (1)...(19): siRNA sense strand
gaaaugacaaaucaacaug

SEQ ID NO: 1958413 - RNA, 19 nt, Homo sapiens
  misc_RNA (1)...(19): siRNA sense strand
ggaaauauucagagguuga

SEQ ID NO: 1958414 - RNA, 19 nt, Homo sapiens
  misc_RNA (1)...(19): siRNA sense strand
gaaacacuagugcauugua

SEQ ID NO: 1958415 - RNA, 19 nt, Homo sapiens
  misc_RNA (1)...(19): siRNA sense strand
caacuaauggagcagcuua

SEQ ID NO: 1958416 - RNA, 19 nt, Homo sapiens
  misc_RNA (1)...(19): siRNA sense strand
gagagaaaauccuucaaaa

SEQ ID NO: 1958417 - RNA, 19 nt, Homo sapiens
  misc_RNA (1)...(19): siRNA sense strand
agauuucgcuugcaugauu

SEQ ID NO: 1958418 - RNA, 19 nt, Homo sapiens
  misc_RNA (1)...(19): siRNA sense strand
aaacaugucccgccacuga

SEQ ID NO: 1958419 - RNA, 19 nt, Homo sapiens
  misc_RNA (1)...(19): siRNA sense strand
ugaagaagacugggaagua

SEQ ID NO: 1958420 - RNA, 19 nt, Homo sapiens
  misc_RNA (1)...(19): siRNA sense strand
ggagaagcuuguagaacug

SEQ ID NO: 1958421 - RNA, 19 nt, Homo sapiens
  misc_RNA (1)...(19): siRNA sense strand
gaagcacaccuaaggaaga

SEQ ID NO: 1958422 - RNA, 19 nt, Homo sapiens
  misc_RNA (1)...(19): siRNA sense strand
gcauaucagcuuucuaaug

SEQ ID NO: 1958423 - RNA, 19 nt, Homo sapiens
  misc_RNA (1)...(19): siRNA sense strand
caacucaccacaagccuuu

SEQ ID NO: 1958424 - RNA, 19 nt, Homo sapiens
  misc_RNA (1)...(19): siRNA sense strand
gaagaugcagcacuuacuu

SEQ ID NO: 1958425 - RNA, 19 nt, Homo sapiens
  misc_RNA (1)...(19): siRNA sense strand
gaagcagaagaaacaguua

SEQ ID NO: 1958426 - RNA, 19 nt, Homo sapiens
  misc_RNA (1)...(19): siRNA sense strand
guacuacuacaucaacuaa

SEQ ID NO: 1958427 - RNA, 19 nt, Homo sapiens
  misc_RNA (1)...(19): siRNA sense strand
gaagcuugguaguuaugaa

SEQ ID NO: 1958428 - RNA, 19 nt, Homo sapiens
  misc_RNA (1)...(19): siRNA sense strand
ggaagcugaagaaauagua

SEQ ID NO: 1958429 - RNA, 19 nt, Homo sapiens
  misc_RNA (1)...(19): siRNA sense strand
ccacaagccuuugcauauc

SEQ ID NO: 1958430 - RNA, 19 nt, Homo sapiens
  misc_RNA (1)...(19): siRNA sense strand
uccaagaugucauuuauca

SEQ ID NO: 1958431 - RNA, 19 nt, Homo sapiens
  misc_RNA (1)...(19): siRNA sense strand
gacagaagaacaacuaaau

SEQ ID NO: 1958432 - RNA, 19 nt, Homo sapiens
  misc_RNA (1)...(19): siRNA sense strand
ucaagcaguucaagugaga

SEQ ID NO: 1958433 - RNA, 19 nt, Homo sapiens
  misc_RNA (1)...(19): siRNA sense strand
gaaagcuucucagcaguca

SEQ ID NO: 1958434 - RNA, 19 nt, Homo sapiens
  misc_RNA (1)...(19): siRNA sense strand
ucucagcagucaaaucaaa

SEQ ID NO: 1958435 - RNA, 19 nt, Homo sapiens
  misc_RNA (1)...(19): siRNA sense strand
gguguaugcagacaaguua

SEQ ID NO: 1958436 - RNA, 19 nt, Homo sapiens
  misc_RNA (1)...(19): siRNA sense strand
cuaauggaaucccuauaga

SEQ ID NO: 1958437 - RNA, 19 nt, Homo sapiens
  misc_RNA (1)...(19): siRNA sense strand
uggagcagcuuacucaaau

SEQ ID NO: 1958438 - RNA, 19 nt, Homo sapiens
  misc_RNA (1)...(19): siRNA sense strand
gaugucauuuaucagguuu

SEQ ID NO: 1958439 - RNA, 19 nt, Homo sapiens
  misc_RNA (1)...(19): siRNA sense strand
ccggaauucucccuaguuu

SEQ ID NO: 1958440 - RNA, 19 nt, Homo sapiens
  misc_RNA (1)...(19): siRNA sense strand
gcaccaguaacuccagaua

SEQ ID NO: 1958441 - RNA, 19 nt, Homo sapiens
  misc_RNA (1)...(19): siRNA sense strand
ggcuuguugucuucaauua

SEQ ID NO: 1958442 - RNA, 19 nt, Homo sapiens
  misc_RNA (1)...(19): siRNA sense strand
cagaagaacaacuaaauag

SEQ ID NO: 1958443 - RNA, 19 nt, Homo sapiens
  misc_RNA (1)...(19): siRNA sense strand
ggaggccaccuaugaagaa

SEQ ID NO: 1958444 - RNA, 19 nt, Homo sapiens
  misc_RNA (1)...(19): siRNA sense strand
agaagaagcagaagaaaca

SEQ ID NO: 1958445 - RNA, 19 nt, Homo sapiens
  misc_RNA (1)...(19): siRNA sense strand
gaaacaguuaaucgugaua

SEQ ID NO: 1958446 - RNA, 19 nt, Homo sapiens
  misc_RNA (1)...(19): siRNA sense strand
auagaaaguugguuuaugg

SEQ ID NO: 1958447 - RNA, 19 nt, Homo sapiens
  misc_RNA (1)...(19): siRNA sense strand
uaucagcuuucuaauggaa

SEQ ID NO: 1958448 - RNA, 19 nt, Homo sapiens
  misc_RNA (1)...(19): siRNA sense strand
ucagguuuaugugagauua

SEQ ID NO: 1958449 - RNA, 19 nt, Homo sapiens
  misc_RNA (1)...(19): siRNA sense strand
cuagugcauuguagucuaa

SEQ ID NO: 1958450 - RNA, 19 nt, Homo sapiens
  misc_RNA (1)...(19): siRNA sense strand
gaacacggaaagcuucuca

SEQ ID NO: 1958451 - RNA, 19 nt, Homo sapiens
  misc_RNA (1)...(19): siRNA sense strand
uuacucaaaucaagcaguu

SEQ ID NO: 1958452 - RNA, 19 nt, Homo sapiens
  misc_RNA (1)...(19): siRNA sense strand
gaagcugaagaaauaguaa

SEQ ID NO: 1958453 - RNA, 19 nt, Homo sapiens
  misc_RNA (1)...(19): siRNA sense strand
aaaugacaaugaacuccua

SEQ ID NO: 1958454 - RNA, 19 nt, Homo sapiens
  misc_RNA (1)...(19): siRNA sense strand
gcagcuuacucaaaucaag

SEQ ID NO: 1958455 - RNA, 19 nt, Homo sapiens
  misc_RNA (1)...(19): siRNA sense strand
uggagaagcuuguagaacu

SEQ ID NO: 1958456 - RNA, 19 nt, Homo sapiens
  misc_RNA (1)...(19): siRNA sense strand
caaagaggaaauauucaga

SEQ ID NO: 1958457 - RNA, 19 nt, Homo sapiens
  misc_RNA (1)...(19): siRNA sense strand
auucagagguugaugauag

SEQ ID NO: 1958458 - RNA, 19 nt, Homo sapiens
  misc_RNA (1)...(19): siRNA sense strand
gaaucccuauagaaaguug

SEQ ID NO: 1958459 - RNA, 19 nt, Homo sapiens
  misc_RNA (1)...(19): siRNA sense strand
uugcauaucagcuuucuaa

SEQ ID NO: 1958460 - RNA, 19 nt, Homo sapiens
  misc_RNA (1)...(19): siRNA sense strand
gaugaaacacuagugcauu

SEQ ID NO: 1958461 - RNA, 19 nt, Homo sapiens
  misc_RNA (1)...(19): siRNA sense strand
aaagucaaguaauggagaa

SEQ ID NO: 1958462 - RNA, 19 nt, Homo sapiens
  misc_RNA (1)...(19): siRNA sense strand
gauuucgcuugcaugauuu

SEQ ID NO: 1958463 - RNA, 19 nt, Homo sapiens
  misc_RNA (1)...(19): siRNA sense strand
gaagauguucgaccacaca

SEQ ID NO: 1958464 - RNA, 19 nt, Homo sapiens
  misc_RNA (1)...(19): siRNA sense strand
aauggaaucccuauagaaa

SEQ ID NO: 1958465 - RNA, 19 nt, Homo sapiens
  misc_RNA (1)...(19): siRNA sense strand
cacaagccuuugcauauca

SEQ ID NO: 1958466 - RNA, 19 nt, Homo sapiens
  misc_RNA (1)...(19): siRNA sense strand
uaauggagcagcuuacuca

SEQ ID NO: 1958467 - RNA, 19 nt, Homo sapiens
  misc_RNA (1)...(19): siRNA sense strand
gaacgucaggaucagauuc

SEQ ID NO: 1958468 - RNA, 19 nt, Homo sapiens
  misc_RNA (1)...(19): siRNA sense strand
acacaucagagacagauuu

SEQ ID NO: 1958469 - RNA, 19 nt, Homo sapiens
  misc_RNA (1)...(19): siRNA sense strand
uggaaucccuauagaaagu

SEQ ID NO: 1958470 - RNA, 19 nt, Homo sapiens
  misc_RNA (1)...(19): siRNA sense strand
ugaacauacuagacccuaa

SEQ ID NO: 1958471 - RNA, 19 nt, Homo sapiens
  misc_RNA (1)...(19): siRNA sense strand
uaugugagauuaagaccau

SEQ ID NO: 1958472 - RNA, 19 nt, Homo sapiens
  misc_RNA (1)...(19): siRNA sense strand
gcaaagaggaaauauucag

SEQ ID NO: 1958473 - RNA, 19 nt, Homo sapiens
  misc_RNA (1)...(19): siRNA sense strand
ggaaguauuugaccccuau

SEQ ID NO: 1958474 - RNA, 19 nt, Homo sapiens
  misc_RNA (1)...(19): siRNA sense strand
gaguagaauugaacgugau

SEQ ID NO: 1958475 - RNA, 19 nt, Homo sapiens
  misc_RNA (1)...(19): siRNA sense strand
agaacugaaugaagauguu

SEQ ID NO: 1958476 - RNA, 19 nt, Homo sapiens
  misc_RNA (1)...(19): siRNA sense strand
uuguagaacugaaugaaga

SEQ ID NO: 1958477 - RNA, 19 nt, Homo sapiens
  misc_RNA (1)...(19): siRNA sense strand
caagaagcacaccggaauu

SEQ ID NO: 1958478 - RNA, 19 nt, Homo sapiens
  misc_RNA (1)...(19): siRNA sense strand
gaacaacuaaauaggaaac

SEQ ID NO: 1958479 - RNA, 19 nt, Homo sapiens
  misc_RNA (1)...(19): siRNA sense strand
agaagacugggaaguauuu

SEQ ID NO: 1958480 - RNA, 19 nt, Homo sapiens
  misc_RNA (1)...(19): siRNA sense strand
uccaaggacuacuuuguug

SEQ ID NO: 1958481 - RNA, 19 nt, Homo sapiens
  misc_RNA (1)...(19): siRNA sense strand
aaacacuagugcauuguag

SEQ ID NO: 1958482 - RNA, 19 nt, Homo sapiens
  misc_RNA (1)...(19): siRNA sense strand
ccagagcaaagaggaaaua

SEQ ID NO: 1958483 - RNA, 19 nt, Homo sapiens
  misc_RNA (1)...(19): siRNA sense strand
gagcagcuuacucaaauca

SEQ ID NO: 1958484 - RNA, 19 nt, Homo sapiens
  misc_RNA (1)...(19): siRNA sense strand
acuacuacaucaacuaaug

SEQ ID NO: 1958485 - RNA, 19 nt, Homo sapiens
  misc_RNA (1)...(19): siRNA sense strand
gcaaagcuccuacagcaaa

SEQ ID NO: 1958486 - RNA, 19 nt, Homo sapiens
  misc_RNA (1)...(19): siRNA sense strand
gaacgaagaggagcaguuu

SEQ ID NO: 1958487 - RNA, 19 nt, Homo sapiens
  misc_RNA (1)...(19): siRNA sense strand
guaagaagauaaacuggau

SEQ ID NO: 1958488 - RNA, 19 nt, Homo sapiens
  misc_RNA (1)...(19): siRNA sense strand
gaagaggagcaguuuguaa

SEQ ID NO: 1958489 - RNA, 19 nt, Homo sapiens
  misc_RNA (1)...(19): siRNA sense strand
gguggcaucucuaacugua

SEQ ID NO: 1958490 - RNA, 19 nt, Homo sapiens
  misc_RNA (1)...(19): siRNA sense strand
uagagcaacugaaugcaaa

SEQ ID NO: 1958491 - RNA, 19 nt, Homo sapiens
  misc_RNA (1)...(19): siRNA sense strand
gaagauaaacuggauugug

SEQ ID NO: 1958492 - RNA, 19 nt, Homo sapiens
  misc_RNA (1)...(19): siRNA sense strand
agauucaggugccacuuua

SEQ ID NO: 1958493 - RNA, 19 nt, Homo sapiens
  misc_RNA (1)...(19): siRNA sense strand
gaagucgcaccuacccaua

SEQ ID NO: 1958494 - RNA, 19 nt, Homo sapiens
  misc_RNA (1)...(19): siRNA sense strand
agacccagcauccacauua

SEQ ID NO: 1958495 - RNA, 19 nt, Homo sapiens
  misc_RNA (1)...(19): siRNA sense strand
cagcaucaucuguuuaauu

SEQ ID NO: 1958496 - RNA, 19 nt, Homo sapiens
  misc_RNA (1)...(19): siRNA sense strand
gaacagacaaagaaacacu

SEQ ID NO: 1958497 - RNA, 19 nt, Homo sapiens
  misc_RNA (1)...(19): siRNA sense strand
cagcagagaggaauugaau

SEQ ID NO: 1958498 - RNA, 19 nt, Homo sapiens
  misc_RNA (1)...(19): siRNA sense strand
accaaagucugaucucuug

SEQ ID NO: 1958499 - RNA, 19 nt, Homo sapiens
  misc_RNA (1)...(19): siRNA sense strand
caaguagggcgaacaggaa

SEQ ID NO: 1958500 - RNA, 19 nt, Homo sapiens
  misc_RNA (1)...(19): siRNA sense strand
aaauaaggaucuggauuca

SEQ ID NO: 1958501 - RNA, 19 nt, Homo sapiens
  misc_RNA (1)...(19): siRNA sense strand
gacuuucuauguuacaaga

SEQ ID NO: 1958502 - RNA, 19 nt, Homo sapiens
  misc_RNA (1)...(19): siRNA sense strand
cuuuggacuuucuauguua

SEQ ID NO: 1958503 - RNA, 19 nt, Homo sapiens
  misc_RNA (1)...(19): siRNA sense strand
gagggaaaauacagacuuu

SEQ ID NO: 1958504 - RNA, 19 nt, Homo sapiens
  misc_RNA (1)...(19): siRNA sense strand
uaaguuaccaugucugcaa

SEQ ID NO: 1958505 - RNA, 19 nt, Homo sapiens
  misc_RNA (1)...(19): siRNA sense strand
caaagcuccuacagcaaau

SEQ ID NO: 1958506 - RNA, 19 nt, Homo sapiens
  misc_RNA (1)...(19): siRNA sense strand
aauacagacuuuggacuuu

SEQ ID NO: 1958507 - RNA, 19 nt, Homo sapiens
  misc_RNA (1)...(19): siRNA sense strand
gggaacagacaaagaaaca

SEQ ID NO: 1958508 - RNA, 19 nt, Homo sapiens
  misc_RNA (1)...(19): siRNA sense strand
gaugacucuuggugaggua

SEQ ID NO: 1958509 - RNA, 19 nt, Homo sapiens
  misc_RNA (1)...(19): siRNA sense strand
aagaggagcaguuuguaaa

SEQ ID NO: 1958510 - RNA, 19 nt, Homo sapiens
  misc_RNA (1)...(19): siRNA sense strand
uguccucgaucuaagcuuu

SEQ ID NO: 1958511 - RNA, 19 nt, Homo sapiens
  misc_RNA (1)...(19): siRNA sense strand
gcagguggcaucucuaacu

SEQ ID NO: 1958512 - RNA, 19 nt, Homo sapiens
  misc_RNA (1)...(19): siRNA sense strand
guagagcaacugaaugcaa

SEQ ID NO: 1958513 - RNA, 19 nt, Homo sapiens
  misc_RNA (1)...(19): siRNA sense strand
guuaccaugucugcaagua

SEQ ID NO: 1958514 - RNA, 19 nt, Homo sapiens
  misc_RNA (1)...(19): siRNA sense strand
guaccaaagucugaucucu

SEQ ID NO: 1958515 - RNA, 19 nt, Homo sapiens
  misc_RNA (1)...(19): siRNA sense strand
ucacaaccaggcacagaaa

SEQ ID NO: 1958516 - RNA, 19 nt, Homo sapiens
  misc_RNA (1)...(19): siRNA sense strand
ggugccacuuuaugucgua

SEQ ID NO: 1958517 - RNA, 19 nt, Homo sapiens
  misc_RNA (1)...(19): siRNA sense strand
cauuugcaguguuuguaaa

SEQ ID NO: 1958518 - RNA, 19 nt, Homo sapiens
  misc_RNA (1)...(19): siRNA sense strand
guucuaaguuaccaugucu

SEQ ID NO: 1958519 - RNA, 19 nt, Homo sapiens
  misc_RNA (1)...(19): siRNA sense strand
gcaccuacccauaaacaac

SEQ ID NO: 1958520 - RNA, 19 nt, Homo sapiens
  misc_RNA (1)...(19): siRNA sense strand
cuacagcaaauccagguuu

SEQ ID NO: 1958521 - RNA, 19 nt, Homo sapiens
  misc_RNA (1)...(19): siRNA sense strand
gcacaccaaaucauuaagg

SEQ ID NO: 1958522 - RNA, 19 nt, Homo sapiens
  misc_RNA (1)...(19): siRNA sense strand
uaacucaccaagugcaaga

SEQ ID NO: 1958523 - RNA, 19 nt, Homo sapiens
  misc_RNA (1)...(19): siRNA sense strand
cgaagaggagcaguuugua

SEQ ID NO: 1958524 - RNA, 19 nt, Homo sapiens
  misc_RNA (1)...(19): siRNA sense strand
gugcagguggcaucucuaa

SEQ ID NO: 1958525 - RNA, 19 nt, Homo sapiens
  misc_RNA (1)...(19): siRNA sense strand
ugaguaagaagauaaacug

SEQ ID NO: 1958526 - RNA, 19 nt, Homo sapiens
  misc_RNA (1)...(19): siRNA sense strand
aaauacagacuuuggacuu

SEQ ID NO: 1958527 - RNA, 19 nt, Homo sapiens
  misc_RNA (1)...(19): siRNA sense strand
gacuuuggacuuucuaugu

SEQ ID NO: 1958528 - RNA, 19 nt, Homo sapiens
  misc_RNA (1)...(19): siRNA sense strand
agucgcaccuacccauaaa

SEQ ID NO: 1958529 - RNA, 19 nt, Homo sapiens
  misc_RNA (1)...(19): siRNA sense strand
ccacauuuguuuugagcua

SEQ ID NO: 1958530 - RNA, 19 nt, Homo sapiens
  misc_RNA (1)...(19): siRNA sense strand
ugagguagagcaacugaau

SEQ ID NO: 1958531 - RNA, 19 nt, Homo sapiens
  misc_RNA (1)...(19): siRNA sense strand
aaauuacucccacaguuug

SEQ ID NO: 1958532 - RNA, 19 nt, Homo sapiens
  misc_RNA (1)...(19): siRNA sense strand
uaaacugggaacagacaaa

SEQ ID NO: 1958533 - RNA, 19 nt, Homo sapiens
  misc_RNA (1)...(19): siRNA sense strand
acaaagaaacacucuccuu

SEQ ID NO: 1958534 - RNA, 19 nt, Homo sapiens
  misc_RNA (1)...(19): siRNA sense strand
cuguuuaauuucaggcaua

SEQ ID NO: 1958535 - RNA, 19 nt, Homo sapiens
  misc_RNA (1)...(19): siRNA sense strand
guagggcgaacaggaauga

SEQ ID NO: 1958536 - RNA, 19 nt, Homo sapiens
  misc_RNA (1)...(19): siRNA sense strand
aagaagauaaacuggauug

SEQ ID NO: 1958537 - RNA, 19 nt, Homo sapiens
  misc_RNA (1)...(19): siRNA sense strand
cagguggcaucucuaacug

SEQ ID NO: 1958538 - RNA, 19 nt, Homo sapiens
  misc_RNA (1)...(19): siRNA sense strand
uggcaucucuaacuguaca

SEQ ID NO: 1958539 - RNA, 19 nt, Homo sapiens
  misc_RNA (1)...(19): siRNA sense strand
cccagcaucaucuguuuaa

SEQ ID NO: 1958540 - RNA, 19 nt, Homo sapiens
  misc_RNA (1)...(19): siRNA sense strand
gacccagcauccacauuac

SEQ ID NO: 1958541 - RNA, 19 nt, Homo sapiens
  misc_RNA (1)...(19): siRNA sense strand
uuuguaaacugggaacaga

SEQ ID NO: 1958542 - RNA, 19 nt, Homo sapiens
  misc_RNA (1)...(19): siRNA sense strand
acuuuggacuuucuauguu

SEQ ID NO: 1958543 - RNA, 19 nt, Homo sapiens
  misc_RNA (1)...(19): siRNA sense strand
auacagacuuuggacuuuc

SEQ ID NO: 1958544 - RNA, 19 nt, Homo sapiens
  misc_RNA (1)...(19): siRNA sense strand
aaaauuacucccacaguuu

SEQ ID NO: 1958545 - RNA, 19 nt, Homo sapiens
  misc_RNA (1)...(19): siRNA sense strand
aguguauuguggccucaua

SEQ ID NO: 1958546 - RNA, 19 nt, Homo sapiens
  misc_RNA (1)...(19): siRNA sense strand
acaguuugagucccaagua

SEQ ID NO: 1958547 - RNA, 19 nt, Homo sapiens
  misc_RNA (1)...(19): siRNA sense strand
caaaauaaggaucuggauu

SEQ ID NO: 1958548 - RNA, 19 nt, Homo sapiens
  misc_RNA (1)...(19): siRNA sense strand
gagguagagcaacugaaug

SEQ ID NO: 1958549 - RNA, 19 nt, Homo sapiens
  misc_RNA (1)...(19): siRNA sense strand
caaagucugaucucuugca

SEQ ID NO: 1958550 - RNA, 19 nt, Homo sapiens
  misc_RNA (1)...(19): siRNA sense strand
uauuguggccucauaguca

SEQ ID NO: 1958551 - RNA, 19 nt, Homo sapiens
  misc_RNA (1)...(19): siRNA sense strand
cacuuuaugucguaacagu

SEQ ID NO: 1958552 - RNA, 19 nt, Homo sapiens
  misc_RNA (1)...(19): siRNA sense strand
ggcauaagccagaagaaaa

SEQ ID NO: 1958553 - RNA, 19 nt, Homo sapiens
  misc_RNA (1)...(19): siRNA sense strand
ugauuugaaugaugacaac

SEQ ID NO: 1958554 - RNA, 19 nt, Homo sapiens
  misc_RNA (1)...(19): siRNA sense strand
gggcgaacaggaaugaagu

SEQ ID NO: 1958555 - RNA, 19 nt, Homo sapiens
  misc_RNA (1)...(19): siRNA sense strand
uugcacaccaaaucauuaa

SEQ ID NO: 1958556 - RNA, 19 nt, Homo sapiens
  misc_RNA (1)...(19): siRNA sense strand
guaccaaaauauucugcaa

SEQ ID NO: 1958557 - RNA, 19 nt, Homo sapiens
  misc_RNA (1)...(19): siRNA sense strand
aagauucaggugccacuuu

SEQ ID NO: 1958558 - RNA, 19 nt, Homo sapiens
  misc_RNA (1)...(19): siRNA sense strand
gccacuuuaugucguaaca

SEQ ID NO: 1958559 - RNA, 19 nt, Homo sapiens
  misc_RNA (1)...(19): siRNA sense strand
aaaauaaggaucuggauuc

SEQ ID NO: 1958560 - RNA, 19 nt, Homo sapiens
  misc_RNA (1)...(19): siRNA sense strand
ggugagguagagcaacuga

SEQ ID NO: 1958561 - RNA, 19 nt, Homo sapiens
  misc_RNA (1)...(19): siRNA sense strand
acauuugcaguguuuguaa

SEQ ID NO: 1958562 - RNA, 19 nt, Homo sapiens
  misc_RNA (1)...(19): siRNA sense strand
cuugcacaccaaaucauua

SEQ ID NO: 1958563 - RNA, 19 nt, Homo sapiens
  misc_RNA (1)...(19): siRNA sense strand
acgaagaggagcaguuugu

SEQ ID NO: 1958564 - RNA, 19 nt, Homo sapiens
  misc_RNA (1)...(19): siRNA sense strand
uaccaaagucugaucucuu

SEQ ID NO: 1958565 - RNA, 19 nt, Homo sapiens
  misc_RNA (1)...(19): siRNA sense strand
ccgccacguugccaucgaa

SEQ ID NO: 1958566 - RNA, 19 nt, Homo sapiens
  misc_RNA (1)...(19): siRNA sense strand
uuacagcagagaggaauug

SEQ ID NO: 1958567 - RNA, 19 nt, Homo sapiens
  misc_RNA (1)...(19): siRNA sense strand
ggaaaauacagacuuugga

SEQ ID NO: 1958568 - RNA, 19 nt, Homo sapiens
  misc_RNA (1)...(19): siRNA sense strand
aggcauaagccagaagaaa

SEQ ID NO: 1958569 - RNA, 19 nt, Homo sapiens
  misc_RNA (1)...(19): siRNA sense strand
acugggaacagacaaagaa

SEQ ID NO: 1958570 - RNA, 19 nt, Homo sapiens
  misc_RNA (1)...(19): siRNA sense strand
gaagaaauguugauccuuu

SEQ ID NO: 1958571 - RNA, 19 nt, Homo sapiens
  misc_RNA (1)...(19): siRNA sense strand
gcacagagaguuaguuaaa

SEQ ID NO: 1958572 - RNA, 19 nt, Homo sapiens
  misc_RNA (1)...(19): siRNA sense strand
uaaagaaggcaaagacuua

SEQ ID NO: 1958573 - RNA, 19 nt, Homo sapiens
  misc_RNA (1)...(19): siRNA sense strand
gcaauucguucccaagaga

SEQ ID NO: 1958574 - RNA, 19 nt, Homo sapiens
  misc_RNA (1)...(19): siRNA sense strand
ugaggaagauaaacagaaa

SEQ ID NO: 1958575 - RNA, 19 nt, Homo sapiens
  misc_RNA (1)...(19): siRNA sense strand
ccaauguuaugacuacuuu

SEQ ID NO: 1958576 - RNA, 19 nt, Homo sapiens
  misc_RNA (1)...(19): siRNA sense strand
guuaaacgguaucaagaaa

SEQ ID NO: 1958577 - RNA, 19 nt, Homo sapiens
  misc_RNA (1)...(19): siRNA sense strand
gaaaagaauugcagaauac

SEQ ID NO: 1958578 - RNA, 19 nt, Homo sapiens
  misc_RNA (1)...(19): siRNA sense strand
guugauccuuuccauauuu

SEQ ID NO: 1958579 - RNA, 19 nt, Homo sapiens
  misc_RNA (1)...(19): siRNA sense strand
cgaaaagaauugcagaaua

SEQ ID NO: 1958580 - RNA, 19 nt, Homo sapiens
  misc_RNA (1)...(19): siRNA sense strand
caaaggacaguauuaucua

SEQ ID NO: 1958581 - RNA, 19 nt, Homo sapiens
  misc_RNA (1)...(19): siRNA sense strand
gcagauucucccaauguua

SEQ ID NO: 1958582 - RNA, 19 nt, Homo sapiens
  misc_RNA (1)...(19): siRNA sense strand
ugacauggcuuacgaaaau

SEQ ID NO: 1958583 - RNA, 19 nt, Homo sapiens
  misc_RNA (1)...(19): siRNA sense strand
ggauggaacagaagaaaug

SEQ ID NO: 1958584 - RNA, 19 nt, Homo sapiens
  misc_RNA (1)...(19): siRNA sense strand
guaauugggucuuuuguug

SEQ ID NO: 1958585 - RNA, 19 nt, Homo sapiens
  misc_RNA (1)...(19): siRNA sense strand
ucagcauucucaagaguuu

SEQ ID NO: 1958586 - RNA, 19 nt, Homo sapiens
  misc_RNA (1)...(19): siRNA sense strand
gaguuuaucaacagacuaa

SEQ ID NO: 1958587 - RNA, 19 nt, Homo sapiens
  misc_RNA (1)...(19): siRNA sense strand
ggcugaaccuggcaacuga

SEQ ID NO: 1958588 - RNA, 19 nt, Homo sapiens
  misc_RNA (1)...(19): siRNA sense strand
gaaagugaaggauggaaca

SEQ ID NO: 1958589 - RNA, 19 nt, Homo sapiens
  misc_RNA (1)...(19): siRNA sense strand
ccaaaggacaguauuaucu

SEQ ID NO: 1958590 - RNA, 19 nt, Homo sapiens
  misc_RNA (1)...(19): siRNA sense strand
guagauuuauuuccaaagg

SEQ ID NO: 1958591 - RNA, 19 nt, Homo sapiens
  misc_RNA (1)...(19): siRNA sense strand
gcuagaaaccacugaggaa

SEQ ID NO: 1958592 - RNA, 19 nt, Homo sapiens
  misc_RNA (1)...(19): siRNA sense strand
gaauugcagaauacuguuu

SEQ ID NO: 1958593 - RNA, 19 nt, Homo sapiens
  misc_RNA (1)...(19): siRNA sense strand
cuauuuaacugcagauucu

SEQ ID NO: 1958594 - RNA, 19 nt, Homo sapiens
  misc_RNA (1)...(19): siRNA sense strand
gcaacugaaugccuuccau

SEQ ID NO: 1958595 - RNA, 19 nt, Homo sapiens
  misc_RNA (1)...(19): siRNA sense strand
gcaugacaaaguuuaugua

SEQ ID NO: 1958596 - RNA, 19 nt, Homo sapiens
  misc_RNA (1)...(19): siRNA sense strand
gaauacuguuucccagcuu

SEQ ID NO: 1958597 - RNA, 19 nt, Homo sapiens
  misc_RNA (1)...(19): siRNA sense strand
agaguuaguuaaacgguau

SEQ ID NO: 1958598 - RNA, 19 nt, Homo sapiens
  misc_RNA (1)...(19): siRNA sense strand
gaaggauggaacagaagaa

SEQ ID NO: 1958599 - RNA, 19 nt, Homo sapiens
  misc_RNA (1)...(19): siRNA sense strand
ucaagaguuuaucaacaga

SEQ ID NO: 1958600 - RNA, 19 nt, Homo sapiens
  misc_RNA (1)...(19): siRNA sense strand
ucucaagaguuuaucaaca

SEQ ID NO: 1958601 - RNA, 19 nt, Homo sapiens
  misc_RNA (1)...(19): siRNA sense strand
uuucaggcaugacaaaguu

SEQ ID NO: 1958602 - RNA, 19 nt, Homo sapiens
  misc_RNA (1)...(19): siRNA sense strand
cagauucucccaauguuau

SEQ ID NO: 1958603 - RNA, 19 nt, Homo sapiens
  misc_RNA (1)...(19): siRNA sense strand
agugaaggauggaacagaa

SEQ ID NO: 1958604 - RNA, 19 nt, Homo sapiens
  misc_RNA (1)...(19): siRNA sense strand
gaaccuggcaacugaaugc

SEQ ID NO: 1958605 - RNA, 19 nt, Homo sapiens
  misc_RNA (1)...(19): siRNA sense strand
ccacugaggaagauaaaca

SEQ ID NO: 1958606 - RNA, 19 nt, Homo sapiens
  misc_RNA (1)...(19): siRNA sense strand
cagaagaaauguugauccu

SEQ ID NO: 1958607 - RNA, 19 nt, Homo sapiens
  misc_RNA (1)...(19): siRNA sense strand
agaaaccacugaggaagau

SEQ ID NO: 1958608 - RNA, 19 nt, Homo sapiens
  misc_RNA (1)...(19): siRNA sense strand
ugacuacuuucaggcauga

SEQ ID NO: 1958609 - RNA, 19 nt, Homo sapiens
  misc_RNA (1)...(19): siRNA sense strand
agaaaagucucauguagau

SEQ ID NO: 1958610 - RNA, 19 nt, Homo sapiens
  misc_RNA (1)...(19): siRNA sense strand
cgacuuugggauaggaaua

SEQ ID NO: 1958611 - RNA, 19 nt, Homo sapiens
  misc_RNA (1)...(19): siRNA sense strand
ucaggcaugacaaaguuua

SEQ ID NO: 1958612 - RNA, 19 nt, Homo sapiens
  misc_RNA (1)...(19): siRNA sense strand
cuaaagaaggcaaagacuu

SEQ ID NO: 1958613 - RNA, 19 nt, Homo sapiens
  misc_RNA (1)...(19): siRNA sense strand
aaagaaggcaaagacuuaa

SEQ ID NO: 1958614 - RNA, 19 nt, Homo sapiens
  misc_RNA (1)...(19): siRNA sense strand
aaaccacugaggaagauaa

SEQ ID NO: 1958615 - RNA, 19 nt, Homo sapiens
  misc_RNA (1)...(19): siRNA sense strand
gcaguuuggacaaccuuug

SEQ ID NO: 1958616 - RNA, 19 nt, Homo sapiens
  misc_RNA (1)...(19): siRNA sense strand
uagaaaccacugaggaaga

SEQ ID NO: 1958617 - RNA, 19 nt, Homo sapiens
  misc_RNA (1)...(19): siRNA sense strand
aauaucaagcugcuagaaa

SEQ ID NO: 1958618 - RNA, 19 nt, Homo sapiens
  misc_RNA (1)...(19): siRNA sense strand
aaugggaaauugguaacaa

SEQ ID NO: 1958619 - RNA, 19 nt, Homo sapiens
  misc_RNA (1)...(19): siRNA sense strand
ggacaaauugcuuuuaaca

SEQ ID NO: 1958620 - RNA, 19 nt, Homo sapiens
  misc_RNA (1)...(19): siRNA sense strand
acagagaguuaguuaaacg

SEQ ID NO: 1958621 - RNA, 19 nt, Homo sapiens
  misc_RNA (1)...(19): siRNA sense strand
uugcacagagaguuaguua

SEQ ID NO: 1958622 - RNA, 19 nt, Homo sapiens
  misc_RNA (1)...(19): siRNA sense strand
gaaaccacugaggaagaua

SEQ ID NO: 1958623 - RNA, 19 nt, Homo sapiens
  misc_RNA (1)...(19): siRNA sense strand
gccuuccauuagauaaaua

SEQ ID NO: 1958624 - RNA, 19 nt, Homo sapiens
  misc_RNA (1)...(19): siRNA sense strand
aagaauugcagaauacugu

SEQ ID NO: 1958625 - RNA, 19 nt, Homo sapiens
  misc_RNA (1)...(19): siRNA sense strand
caacagaaaagucucaugu

SEQ ID NO: 1958626 - RNA, 19 nt, Homo sapiens
  misc_RNA (1)...(19): siRNA sense strand
aauacuguuucccagcuuu

SEQ ID NO: 1958627 - RNA, 19 nt, Homo sapiens
  misc_RNA (1)...(19): siRNA sense strand
ugaaggauggaacagaaga

SEQ ID NO: 1958628 - RNA, 19 nt, Homo sapiens
  misc_RNA (1)...(19): siRNA sense strand
cagcaagggaagaagcaaa

SEQ ID NO: 1958629 - RNA, 19 nt, Homo sapiens
  misc_RNA (1)...(19): siRNA sense strand
acagaaaagucucauguag

SEQ ID NO: 1958630 - RNA, 19 nt, Homo sapiens
  misc_RNA (1)...(19): siRNA sense strand
uguugauccuuuccauauu

SEQ ID NO: 1958631 - RNA, 19 nt, Homo sapiens
  misc_RNA (1)...(19): siRNA sense strand
gcccaggccaugcaguuug

SEQ ID NO: 1958632 - RNA, 19 nt, Homo sapiens
  misc_RNA (1)...(19): siRNA sense strand
uaguuaaacgguaucaaga

SEQ ID NO: 1958633 - RNA, 19 nt, Homo sapiens
  misc_RNA (1)...(19): siRNA sense strand
ggcaugacaaaguuuaugu

SEQ ID NO: 1958634 - RNA, 19 nt, Homo sapiens
  misc_RNA (1)...(19): siRNA sense strand
cucaagaguuuaucaacag

SEQ ID NO: 1958635 - RNA, 19 nt, Homo sapiens
  misc_RNA (1)...(19): siRNA sense strand
ugggacaaauugcuuuuaa

SEQ ID NO: 1958636 - RNA, 19 nt, Homo sapiens
  misc_RNA (1)...(19): siRNA sense strand
ucucagcauucucaagagu

SEQ ID NO: 1958637 - RNA, 19 nt, Homo sapiens
  misc_RNA (1)...(19): siRNA sense strand
augggaaauugguaacaaa

SEQ ID NO: 1958638 - RNA, 19 nt, Homo sapiens
  misc_RNA (1)...(19): siRNA sense strand
auaucaagcugcuagaaac

SEQ ID NO: 1958639 - RNA, 19 nt, Homo sapiens
  misc_RNA (1)...(19): siRNA sense strand
aaauguugauccuuuccau

SEQ ID NO: 1958640 - RNA, 19 nt, Homo sapiens
  misc_RNA (1)...(19): siRNA sense strand
ugcagauucucccaauguu

SEQ ID NO: 1958641 - RNA, 19 nt, Homo sapiens
  misc_RNA (1)...(19): siRNA sense strand
uuuccaaaggacaguauua

SEQ ID NO: 1958642 - RNA, 19 nt, Homo sapiens
  misc_RNA (1)...(19): siRNA sense strand
aaaugggacaaauugcuuu

SEQ ID NO: 1958643 - RNA, 19 nt, Homo sapiens
  misc_RNA (1)...(19): siRNA sense strand
gauggaacagaagaaaugu

SEQ ID NO: 1958644 - RNA, 19 nt, Homo sapiens
  misc_RNA (1)...(19): siRNA sense strand
uuaguuaaacgguaucaag

SEQ ID NO: 1958645 - RNA, 19 nt, Homo sapiens
  misc_RNA (1)...(19): siRNA sense strand
gggauaggaauauggacau

SEQ ID NO: 1958646 - RNA, 19 nt, Homo sapiens
  misc_RNA (1)...(19): siRNA sense strand
cugcagauucucccaaugu

SEQ ID NO: 1958647 - RNA, 19 nt, Homo sapiens
  misc_RNA (1)...(19): siRNA sense strand
acauagcaaugggcuggaa

SEQ ID NO: 1958648 - RNA, 19 nt, Homo sapiens
  misc_RNA (1)...(19): siRNA sense strand
gcaaggccaugaccagaug

SEQ ID NO: 1958649 - RNA, 19 nt, Homo sapiens
  misc_RNA (1)...(19): siRNA sense strand
ggaaggaggagaaggagaa

SEQ ID NO: 1958650 - RNA, 19 nt, Homo sapiens
  misc_RNA (1)...(19): siRNA sense strand
aggagaaggugauucagua

SEQ ID NO: 1958651 - RNA, 19 nt, Homo sapiens
  misc_RNA (1)...(19): siRNA sense strand
caucauagccacugagauc

SEQ ID NO: 1958652 - RNA, 19 nt, Homo sapiens
  misc_RNA (1)...(19): siRNA sense strand
gcucccaucacccagauua

SEQ ID NO: 1958653 - RNA, 19 nt, Homo sapiens
  misc_RNA (1)...(19): siRNA sense strand
aagcaggccucgcagaaga

SEQ ID NO: 1958654 - RNA, 19 nt, Homo sapiens
  misc_RNA (1)...(19): siRNA sense strand
ccaaggagcaggagcugaa

SEQ ID NO: 1958655 - RNA, 19 nt, Homo sapiens
  misc_RNA (1)...(19): siRNA sense strand
agagcuacguggccaugua

SEQ ID NO: 1958656 - RNA, 19 nt, Homo sapiens
  misc_RNA (1)...(19): siRNA sense strand
cauagccacugagaucuga

SEQ ID NO: 1958657 - RNA, 19 nt, Homo sapiens
  misc_RNA (1)...(19): siRNA sense strand
gcucaugcccuucuccaau

SEQ ID NO: 1958658 - RNA, 19 nt, Homo sapiens
  misc_RNA (1)...(19): siRNA sense strand
ucgagagccucaugaagga

SEQ ID NO: 1958659 - RNA, 19 nt, Homo sapiens
  misc_RNA (1)...(19): siRNA sense strand
gcaacaugaugagccugaa

SEQ ID NO: 1958660 - RNA, 19 nt, Homo sapiens
  misc_RNA (1)...(19): siRNA sense strand
gagcugcagcgcaagaaga

SEQ ID NO: 1958661 - RNA, 19 nt, Homo sapiens
  misc_RNA (1)...(19): siRNA sense strand
caggacagcaacaugauga

SEQ ID NO: 1958662 - RNA, 19 nt, Homo sapiens
  misc_RNA (1)...(19): siRNA sense strand
ggagaaggagaaggugauu

SEQ ID NO: 1958663 - RNA, 19 nt, Homo sapiens
  misc_RNA (1)...(19): siRNA sense strand
agaaggagaaggugauuca

SEQ ID NO: 1958664 - RNA, 19 nt, Homo sapiens
  misc_RNA (1)...(19): siRNA sense strand
ucaagcaggccucgcagaa

SEQ ID NO: 1958665 - RNA, 19 nt, Homo sapiens
  misc_RNA (1)...(19): siRNA sense strand
caucaaggucagccagaaa

SEQ ID NO: 1958666 - RNA, 19 nt, Homo sapiens
  misc_RNA (1)...(19): siRNA sense strand
cgagaucucccuccugaag

SEQ ID NO: 1958667 - RNA, 19 nt, Homo sapiens
  misc_RNA (1)...(19): siRNA sense strand
gcccaaaggcggcaacaag

SEQ ID NO: 1958668 - RNA, 19 nt, Homo sapiens
  misc_RNA (1)...(19): siRNA sense strand
cgccaaggcuagcgagauc

SEQ ID NO: 1958669 - RNA, 19 nt, Homo sapiens
  misc_RNA (1)...(19): siRNA sense strand
ucaaggcacagcugaagga

SEQ ID NO: 1958670 - RNA, 19 nt, Homo sapiens
  misc_RNA (1)...(19): siRNA sense strand
gagcuggaggucugugaga

SEQ ID NO: 1958671 - RNA, 19 nt, Homo sapiens
  misc_RNA (1)...(19): siRNA sense strand
ggaggucugugagaaugag

SEQ ID NO: 1958672 - RNA, 19 nt, Homo sapiens
  misc_RNA (1)...(19): siRNA sense strand
agaaaugggcuccgagaag

SEQ ID NO: 1958673 - RNA, 19 nt, Homo sapiens
  misc_RNA (1)...(19): siRNA sense strand
agaaggugauucaguacca

SEQ ID NO: 1958674 - RNA, 19 nt, Homo sapiens
  misc_RNA (1)...(19): siRNA sense strand
ccucgggcuuccagcauga

SEQ ID NO: 1958675 - RNA, 19 nt, Homo sapiens
  misc_RNA (1)...(19): siRNA sense strand
gcccuucuccaaucagcua

SEQ ID NO: 1958676 - RNA, 19 nt, Homo sapiens
  misc_RNA (1)...(19): siRNA sense strand
gggagcccuuggagguuga

SEQ ID NO: 1958677 - RNA, 19 nt, Homo sapiens
  misc_RNA (1)...(19): siRNA sense strand
ccagaagucaggcgagauc

SEQ ID NO: 1958678 - RNA, 19 nt, Homo sapiens
  misc_RNA (1)...(19): siRNA sense strand
gacaucauagccacugaga

SEQ ID NO: 1958679 - RNA, 19 nt, Homo sapiens
  misc_RNA (1)...(19): siRNA sense strand
gggcucccaucacccagau

SEQ ID NO: 1958680 - RNA, 19 nt, Homo sapiens
  misc_RNA (1)...(19): siRNA sense strand
ggugauucaguaccagaaa

SEQ ID NO: 1958681 - RNA, 19 nt, Homo sapiens
  misc_RNA (1)...(19): siRNA sense strand
ggagaaggugauucaguac

SEQ ID NO: 1958682 - RNA, 19 nt, Homo sapiens
  misc_RNA (1)...(19): siRNA sense strand
gcaaguccucccaccucaa

SEQ ID NO: 1958683 - RNA, 19 nt, Homo sapiens
  misc_RNA (1)...(19): siRNA sense strand
gcaagcugggccacucgaa

SEQ ID NO: 1958684 - RNA, 19 nt, Homo sapiens
  misc_RNA (1)...(19): siRNA sense strand
cggcaaguccagcuccaaa

SEQ ID NO: 1958685 - RNA, 19 nt, Homo sapiens
  misc_RNA (1)...(19): siRNA sense strand
cagcgucaguagccucauc

SEQ ID NO: 1958686 - RNA, 19 nt, Homo sapiens
  misc_RNA (1)...(19): siRNA sense strand
ggaggugugccagaaguca

SEQ ID NO: 1958687 - RNA, 19 nt, Homo sapiens
  misc_RNA (1)...(19): siRNA sense strand
caagaagcucaaccgguau

SEQ ID NO: 1958688 - RNA, 19 nt, Homo sapiens
  misc_RNA (1)...(19): siRNA sense strand
caaguccucccaccucaag

SEQ ID NO: 1958689 - RNA, 19 nt, Homo sapiens
  misc_RNA (1)...(19): siRNA sense strand
gcgcagcuuugaggagaag

SEQ ID NO: 1958690 - RNA, 19 nt, Homo sapiens
  misc_RNA (1)...(19): siRNA sense strand
acaucaaggucagccagaa

SEQ ID NO: 1958691 - RNA, 19 nt, Homo sapiens
  misc_RNA (1)...(19): siRNA sense strand
cuggaggucugugagaaug

SEQ ID NO: 1958692 - RNA, 19 nt, Homo sapiens
  misc_RNA (1)...(19): siRNA sense strand
aguacaagcugcgcaaguc

SEQ ID NO: 1958693 - RNA, 19 nt, Homo sapiens
  misc_RNA (1)...(19): siRNA sense strand
gcaaauggcugaagagaaa

SEQ ID NO: 1958694 - RNA, 19 nt, Homo sapiens
  misc_RNA (1)...(19): siRNA sense strand
ggaagaagcuggaauuugu

SEQ ID NO: 1958695 - RNA, 19 nt, Homo sapiens
  misc_RNA (1)...(19): siRNA sense strand
gaacagggauuuagcaaca

SEQ ID NO: 1958696 - RNA, 19 nt, Homo sapiens
  misc_RNA (1)...(19): siRNA sense strand
gauaagguguucaaacgua

SEQ ID NO: 1958697 - RNA, 19 nt, Homo sapiens
  misc_RNA (1)...(19): siRNA sense strand
uaaagaagcucaucgaaca

SEQ ID NO: 1958698 - RNA, 19 nt, Homo sapiens
  misc_RNA (1)...(19): siRNA sense strand
gcacaaauacgaacaaaug

SEQ ID NO: 1958699 - RNA, 19 nt, Homo sapiens
  misc_RNA (1)...(19): siRNA sense strand
gcaaugaacuguuuacaac

SEQ ID NO: 1958700 - RNA, 19 nt, Homo sapiens
  misc_RNA (1)...(19): siRNA sense strand
gaacuucagcgucacaaua

SEQ ID NO: 1958701 - RNA, 19 nt, Homo sapiens
  misc_RNA (1)...(19): siRNA sense strand
gggaagagcacauugauaa

SEQ ID NO: 1958702 - RNA, 19 nt, Homo sapiens
  misc_RNA (1)...(19): siRNA sense strand
gaaauaugcugaucuucug

SEQ ID NO: 1958703 - RNA, 19 nt, Homo sapiens
  misc_RNA (1)...(19): siRNA sense strand
uaacaagcauucauuggaa

SEQ ID NO: 1958704 - RNA, 19 nt, Homo sapiens
  misc_RNA (1)...(19): siRNA sense strand
aagcagauauguuguguaa

SEQ ID NO: 1958705 - RNA, 19 nt, Homo sapiens
  misc_RNA (1)...(19): siRNA sense strand
gcagauauguuguguaacu

SEQ ID NO: 1958706 - RNA, 19 nt, Homo sapiens
  misc_RNA (1)...(19): siRNA sense strand
acaaggagcugaacacuuc

SEQ ID NO: 1958707 - RNA, 19 nt, Homo sapiens
  misc_RNA (1)...(19): siRNA sense strand
gaagcaagcuagaaucucu

SEQ ID NO: 1958708 - RNA, 19 nt, Homo sapiens
  misc_RNA (1)...(19): siRNA sense strand
gcagggcucuucaaacaga

SEQ ID NO: 1958709 - RNA, 19 nt, Homo sapiens
  misc_RNA (1)...(19): siRNA sense strand
gcaaacgacacaacugaua

SEQ ID NO: 1958710 - RNA, 19 nt, Homo sapiens
  misc_RNA (1)...(19): siRNA sense strand
ugaaggcagugacuuuaua

SEQ ID NO: 1958711 - RNA, 19 nt, Homo sapiens
  misc_RNA (1)...(19): siRNA sense strand
gcagugacuuuauaacaga

SEQ ID NO: 1958712 - RNA, 19 nt, Homo sapiens
  misc_RNA (1)...(19): siRNA sense strand
caucaaggcucaaauugug

SEQ ID NO: 1958713 - RNA, 19 nt, Homo sapiens
  misc_RNA (1)...(19): siRNA sense strand
gggagaagcucgaacagau

SEQ ID NO: 1958714 - RNA, 19 nt, Homo sapiens
  misc_RNA (1)...(19): siRNA sense strand
uaacagagaacaggaauuu

SEQ ID NO: 1958715 - RNA, 19 nt, Homo sapiens
  misc_RNA (1)...(19): siRNA sense strand
cagauuaccuuagaugaaa

SEQ ID NO: 1958716 - RNA, 19 nt, Homo sapiens
  misc_RNA (1)...(19): siRNA sense strand
gaaagcagauauguugugu

SEQ ID NO: 1958717 - RNA, 19 nt, Homo sapiens
  misc_RNA (1)...(19): siRNA sense strand
guacugcccuggauucuca

SEQ ID NO: 1958718 - RNA, 19 nt, Homo sapiens
  misc_RNA (1)...(19): siRNA sense strand
ggauaaguuugaagaauuc

SEQ ID NO: 1958719 - RNA, 19 nt, Homo sapiens
  misc_RNA (1)...(19): siRNA sense strand
cagcagcuuucucuuuaua

SEQ ID NO: 1958720 - RNA, 19 nt, Homo sapiens
  misc_RNA (1)...(19): siRNA sense strand
aacagcagcuuucucuuua

SEQ ID NO: 1958721 - RNA, 19 nt, Homo sapiens
  misc_RNA (1)...(19): siRNA sense strand
ggaagaagaacgacguaaa

SEQ ID NO: 1958722 - RNA, 19 nt, Homo sapiens
  misc_RNA (1)...(19): siRNA sense strand
gcugaacacuuccucgaaa

SEQ ID NO: 1958723 - RNA, 19 nt, Homo sapiens
  misc_RNA (1)...(19): siRNA sense strand
gugcagggcucuucaaaca

SEQ ID NO: 1958724 - RNA, 19 nt, Homo sapiens
  misc_RNA (1)...(19): siRNA sense strand
ggugaaagcagauauguug

SEQ ID NO: 1958725 - RNA, 19 nt, Homo sapiens
  misc_RNA (1)...(19): siRNA sense strand
caucaaagcggccaucaaa

SEQ ID NO: 1958726 - RNA, 19 nt, Homo sapiens
  misc_RNA (1)...(19): siRNA sense strand
caacaucaaggcucaaauu

SEQ ID NO: 1958727 - RNA, 19 nt, Homo sapiens
  misc_RNA (1)...(19): siRNA sense strand
gcagcucucuguaagaaau

SEQ ID NO: 1958728 - RNA, 19 nt, Homo sapiens
  misc_RNA (1)...(19): siRNA sense strand
gcaagaagcaagcuagaau

SEQ ID NO: 1958729 - RNA, 19 nt, Homo sapiens
  misc_RNA (1)...(19): siRNA sense strand
cagaaucgaggcacaaaua

SEQ ID NO: 1958730 - RNA, 19 nt, Homo sapiens
  misc_RNA (1)...(19): siRNA sense strand
gaagaacgacguaaagaag

SEQ ID NO: 1958731 - RNA, 19 nt, Homo sapiens
  misc_RNA (1)...(19): siRNA sense strand
gaaggcagugacuuuauaa

SEQ ID NO: 1958732 - RNA, 19 nt, Homo sapiens
  misc_RNA (1)...(19): siRNA sense strand
gaugaaggcagugacuuua

SEQ ID NO: 1958733 - RNA, 19 nt, Homo sapiens
  misc_RNA (1)...(19): siRNA sense strand
gagcagguauccaucaaag

SEQ ID NO: 1958734 - RNA, 19 nt, Homo sapiens
  misc_RNA (1)...(19): siRNA sense strand
gaagguggaaguccugaaa

SEQ ID NO: 1958735 - RNA, 19 nt, Homo sapiens
  misc_RNA (1)...(19): siRNA sense strand
aaacagcagcuuucucuuu

SEQ ID NO: 1958736 - RNA, 19 nt, Homo sapiens
  misc_RNA (1)...(19): siRNA sense strand
gaagaagaacgacguaaag

SEQ ID NO: 1958737 - RNA, 19 nt, Homo sapiens
  misc_RNA (1)...(19): siRNA sense strand
aaaugaagauccugcagaa

SEQ ID NO: 1958738 - RNA, 19 nt, Homo sapiens
  misc_RNA (1)...(19): siRNA sense strand
gcaagaaucaagagaggaa

SEQ ID NO: 1958739 - RNA, 19 nt, Homo sapiens
  misc_RNA (1)...(19): siRNA sense strand
cggcagaaguuugaaauug

SEQ ID NO: 1958740 - RNA, 19 nt, Homo sapiens
  misc_RNA (1)...(19): siRNA sense strand
cgacacaacugauaaaaga

SEQ ID NO: 1958741 - RNA, 19 nt, Homo sapiens
  misc_RNA (1)...(19): siRNA sense strand
ugaagauccugcagaagaa

SEQ ID NO: 1958742 - RNA, 19 nt, Homo sapiens
  misc_RNA (1)...(19): siRNA sense strand
gaggagagcaggaguguuc

SEQ ID NO: 1958743 - RNA, 19 nt, Homo sapiens
  misc_RNA (1)...(19): siRNA sense strand
gcagcuuucucuuuauaug

SEQ ID NO: 1958744 - RNA, 19 nt, Homo sapiens
  misc_RNA (1)...(19): siRNA sense strand
gaagaagcaagcccagauu

SEQ ID NO: 1958745 - RNA, 19 nt, Homo sapiens
  misc_RNA (1)...(19): siRNA sense strand
ggaugaaggcagugacuuu

SEQ ID NO: 1958746 - RNA, 19 nt, Homo sapiens
  misc_RNA (1)...(19): siRNA sense strand
auaaagcacuucugcaaau

SEQ ID NO: 1958747 - RNA, 19 nt, Homo sapiens
  misc_RNA (1)...(19): siRNA sense strand
agaagcaacugcacauuuc

SEQ ID NO: 1958748 - RNA, 19 nt, Homo sapiens
  misc_RNA (1)...(19): siRNA sense strand
gagcaggaguguucagaag

SEQ ID NO: 1958749 - RNA, 19 nt, Homo sapiens
  misc_RNA (1)...(19): siRNA sense strand
gcacauugauaagguguuc

SEQ ID NO: 1958750 - RNA, 19 nt, Homo sapiens
  misc_RNA (1)...(19): siRNA sense strand
caaacgacacaacugauaa

SEQ ID NO: 1958751 - RNA, 19 nt, Homo sapiens
  misc_RNA (1)...(19): siRNA sense strand
gcacaaguaacaagcauuc

SEQ ID NO: 1958752 - RNA, 19 nt, Homo sapiens
  misc_RNA (1)...(19): siRNA sense strand
caaguaacaagcauucauu

SEQ ID NO: 1958753 - RNA, 19 nt, Homo sapiens
  misc_RNA (1)...(19): siRNA sense strand
acaauaagacguuaaagga

SEQ ID NO: 1958754 - RNA, 19 nt, Homo sapiens
  misc_RNA (1)...(19): siRNA sense strand
guaacaagcauucauugga

SEQ ID NO: 1958755 - RNA, 19 nt, Homo sapiens
  misc_RNA (1)...(19): siRNA sense strand
uaauaaagcacuucugcaa

SEQ ID NO: 1958756 - RNA, 19 nt, Homo sapiens
  misc_RNA (1)...(19): siRNA sense strand
gcaggaguguucagaagca

SEQ ID NO: 1958757 - RNA, 19 nt, Homo sapiens
  misc_RNA (1)...(19): siRNA sense strand
gaaaacaguccgugauaaa

SEQ ID NO: 1958758 - RNA, 19 nt, Homo sapiens
  misc_RNA (1)...(19): siRNA sense strand
gcucguggaugccaaacug

SEQ ID NO: 1958759 - RNA, 19 nt, Homo sapiens
  misc_RNA (1)...(19): siRNA sense strand
gaagcaagcccagauugug

SEQ ID NO: 1958760 - RNA, 19 nt, Homo sapiens
  misc_RNA (1)...(19): siRNA sense strand
guguaacucucaaucaaau

SEQ ID NO: 1958761 - RNA, 19 nt, Homo sapiens
  misc_RNA (1)...(19): siRNA sense strand
ucagagagagagagaguuu

SEQ ID NO: 1958762 - RNA, 19 nt, Homo sapiens
  misc_RNA (1)...(19): siRNA sense strand
guaacucucaaucaaauga

SEQ ID NO: 1958763 - RNA, 19 nt, Homo sapiens
  misc_RNA (1)...(19): siRNA sense strand
gaaaggaaugagcucaaug

SEQ ID NO: 1958764 - RNA, 19 nt, Homo sapiens
  misc_RNA (1)...(19): siRNA sense strand
uaaagcacuucugcaaaug

SEQ ID NO: 1958765 - RNA, 19 nt, Homo sapiens
  misc_RNA (1)...(19): siRNA sense strand
ggcagaaguuugaaauugg

SEQ ID NO: 1958766 - RNA, 19 nt, Homo sapiens
  misc_RNA (1)...(19): siRNA sense strand
gaaacagcaggaaguacaa

SEQ ID NO: 1958767 - RNA, 19 nt, Homo sapiens
  misc_RNA (1)...(19): siRNA sense strand
ugaaagagcagguauccau

SEQ ID NO: 1958768 - RNA, 19 nt, Homo sapiens
  misc_RNA (1)...(19): siRNA sense strand
aaaggaaugagcucaauga

SEQ ID NO: 1958769 - RNA, 19 nt, Homo sapiens
  misc_RNA (1)...(19): siRNA sense strand
cagcaaacgacacaacuga

SEQ ID NO: 1958770 - RNA, 19 nt, Homo sapiens
  misc_RNA (1)...(19): siRNA sense strand
aaacaguccgugauaaaga

SEQ ID NO: 1958771 - RNA, 19 nt, Homo sapiens
  misc_RNA (1)...(19): siRNA sense strand
uggaaaagaugacaaagaa

SEQ ID NO: 1958772 - RNA, 19 nt, Homo sapiens
  misc_RNA (1)...(19): siRNA sense strand
cagcaggaaguacaacuaa

SEQ ID NO: 1958773 - RNA, 19 nt, Homo sapiens
  misc_RNA (1)...(19): siRNA sense strand
uggcagcucucuguaagaa

SEQ ID NO: 1958774 - RNA, 19 nt, Homo sapiens
  misc_RNA (1)...(19): siRNA sense strand
aagcccagauugugaaaga

SEQ ID NO: 1958775 - RNA, 19 nt, Homo sapiens
  misc_RNA (1)...(19): siRNA sense strand
gagaaaacaguccgugaua

SEQ ID NO: 1958776 - RNA, 19 nt, Homo sapiens
  misc_RNA (1)...(19): siRNA sense strand
ccagauuaccuuagaugaa

SEQ ID NO: 1958777 - RNA, 19 nt, Homo sapiens
  misc_RNA (1)...(19): siRNA sense strand
aagaagcaacugcacauuu

SEQ ID NO: 1958778 - RNA, 19 nt, Homo sapiens
  misc_RNA (1)...(19): siRNA sense strand
gaagagcacauugauaagg

SEQ ID NO: 1958779 - RNA, 19 nt, Homo sapiens
  misc_RNA (1)...(19): siRNA sense strand
gccaaacuccgacaggaaa

SEQ ID NO: 1958780 - RNA, 19 nt, Homo sapiens
  misc_RNA (1)...(19): siRNA sense strand
caacugcacauuuccagau

SEQ ID NO: 1958781 - RNA, 19 nt, Homo sapiens
  misc_RNA (1)...(19): siRNA sense strand
ggcagugacuuuauaacag

SEQ ID NO: 1958782 - RNA, 19 nt, Homo sapiens
  misc_RNA (1)...(19): siRNA sense strand
aaacgacacaacugauaaa

SEQ ID NO: 1958783 - RNA, 19 nt, Homo sapiens
  misc_RNA (1)...(19): siRNA sense strand
agaaaggaaugagcucaau

SEQ ID NO: 1958784 - RNA, 19 nt, Homo sapiens
  misc_RNA (1)...(19): siRNA sense strand
gaagaagcuggaauuugug

SEQ ID NO: 1958785 - RNA, 19 nt, Homo sapiens
  misc_RNA (1)...(19): siRNA sense strand
gauaaaagaagcugaugaa

SEQ ID NO: 1958786 - RNA, 19 nt, Homo sapiens
  misc_RNA (1)...(19): siRNA sense strand
agaagaacgacguaaagaa

SEQ ID NO: 1958787 - RNA, 19 nt, Homo sapiens
  misc_RNA (1)...(19): siRNA sense strand
gagaagcgcugugcaaaag

SEQ ID NO: 1958788 - RNA, 19 nt, Homo sapiens
  misc_RNA (1)...(19): siRNA sense strand
gcuaaagaagcucaucgaa

SEQ ID NO: 1958789 - RNA, 19 nt, Homo sapiens
  misc_RNA (1)...(19): siRNA sense strand
uaaagaagcaacugcacau

SEQ ID NO: 1958790 - RNA, 19 nt, Homo sapiens
  misc_RNA (1)...(19): siRNA sense strand
auaagguguucaaacguaa

SEQ ID NO: 1958791 - RNA, 19 nt, Homo sapiens
  misc_RNA (1)...(19): siRNA sense strand
gaagaauuccagacuacca

SEQ ID NO: 1958792 - RNA, 19 nt, Homo sapiens
  misc_RNA (1)...(19): siRNA sense strand
ugaaacagcaggaaguaca

SEQ ID NO: 1958793 - RNA, 19 nt, Homo sapiens
  misc_RNA (1)...(19): siRNA sense strand
gaagaagcgccgauacuua

SEQ ID NO: 1958794 - RNA, 19 nt, Homo sapiens
  misc_RNA (1)...(19): siRNA sense strand
ggagaaugcuggccacaga

SEQ ID NO: 1958795 - RNA, 19 nt, Homo sapiens
  misc_RNA (1)...(19): siRNA sense strand
ggagacagcacucgacuga

SEQ ID NO: 1958796 - RNA, 19 nt, Homo sapiens
  misc_RNA (1)...(19): siRNA sense strand
guggaagccuuacugcaua

SEQ ID NO: 1958797 - RNA, 19 nt, Homo sapiens
  misc_RNA (1)...(19): siRNA sense strand
caaagaacgagagaacuua

SEQ ID NO: 1958798 - RNA, 19 nt, Homo sapiens
  misc_RNA (1)...(19): siRNA sense strand
ggugaccuguuaacucuuu

SEQ ID NO: 1958799 - RNA, 19 nt, Homo sapiens
  misc_RNA (1)...(19): siRNA sense strand
gagagaacuuaaagcgauu

SEQ ID NO: 1958800 - RNA, 19 nt, Homo sapiens
  misc_RNA (1)...(19): siRNA sense strand
gugaaaagcuaauucguuu

SEQ ID NO: 1958801 - RNA, 19 nt, Homo sapiens
  misc_RNA (1)...(19): siRNA sense strand
ccuguuaacucuuuacugu

SEQ ID NO: 1958802 - RNA, 19 nt, Homo sapiens
  misc_RNA (1)...(19): siRNA sense strand
ccaaagaacgagagaacuu

SEQ ID NO: 1958803 - RNA, 19 nt, Homo sapiens
  misc_RNA (1)...(19): siRNA sense strand
ugccauuggugaccuguua

SEQ ID NO: 1958804 - RNA, 19 nt, Homo sapiens
  misc_RNA (1)...(19): siRNA sense strand
gaaagaugcgacugccauu

SEQ ID NO: 1958805 - RNA, 19 nt, Homo sapiens
  misc_RNA (1)...(19): siRNA sense strand
gacacugccuuacccagaa

SEQ ID NO: 1958806 - RNA, 19 nt, Homo sapiens
  misc_RNA (1)...(19): siRNA sense strand
caaucagucucuuccaaug

SEQ ID NO: 1958807 - RNA, 19 nt, Homo sapiens
  misc_RNA (1)...(19): siRNA sense strand
uaaaaugucugcgacgaua

SEQ ID NO: 1958808 - RNA, 19 nt, Homo sapiens
  misc_RNA (1)...(19): siRNA sense strand
gauguucguuguuccaauc

SEQ ID NO: 1958809 - RNA, 19 nt, Homo sapiens
  misc_RNA (1)...(19): siRNA sense strand
aagcgccgauacuuacaua

SEQ ID NO: 1958810 - RNA, 19 nt, Homo sapiens
  misc_RNA (1)...(19): siRNA sense strand
uuaaacgacuucagcaucu

SEQ ID NO: 1958811 - RNA, 19 nt, Homo sapiens
  misc_RNA (1)...(19): siRNA sense strand
cguuguauauugaucaguu

SEQ ID NO: 1958812 - RNA, 19 nt, Homo sapiens
  misc_RNA (1)...(19): siRNA sense strand
aaagaacgagagaacuuaa

SEQ ID NO: 1958813 - RNA, 19 nt, Homo sapiens
  misc_RNA (1)...(19): siRNA sense strand
gagaagaagcgccgauacu

SEQ ID NO: 1958814 - RNA, 19 nt, Homo sapiens
  misc_RNA (1)...(19): siRNA sense strand
uugcagucguuguauauug

SEQ ID NO: 1958815 - RNA, 19 nt, Homo sapiens
  misc_RNA (1)...(19): siRNA sense strand
cagaggugcuuggccuuug

SEQ ID NO: 1958816 - RNA, 19 nt, Homo sapiens
  misc_RNA (1)...(19): siRNA sense strand
ugcagucguuguauauuga

SEQ ID NO: 1958817 - RNA, 19 nt, Homo sapiens
  misc_RNA (1)...(19): siRNA sense strand
ccagcgcuauggaguggaa

SEQ ID NO: 1958818 - RNA, 19 nt, Homo sapiens
  misc_RNA (1)...(19): siRNA sense strand
cguuugcagucguuguaua

SEQ ID NO: 1958819 - RNA, 19 nt, Homo sapiens
  misc_RNA (1)...(19): siRNA sense strand
gcgccgauacuuacauaau

SEQ ID NO: 1958820 - RNA, 19 nt, Homo sapiens
  misc_RNA (1)...(19): siRNA sense strand
agaagaagcgccgauacuu

SEQ ID NO: 1958821 - RNA, 19 nt, Homo sapiens
  misc_RNA (1)...(19): siRNA sense strand
acacugccuuacccagaaa

SEQ ID NO: 1958822 - RNA, 19 nt, Homo sapiens
  misc_RNA (1)...(19): siRNA sense strand
gcuuggccuuuguggauga

SEQ ID NO: 1958823 - RNA, 19 nt, Homo sapiens
  misc_RNA (1)...(19): siRNA sense strand
gugcuuggccuuuguggau

SEQ ID NO: 1958824 - RNA, 19 nt, Homo sapiens
  misc_RNA (1)...(19): siRNA sense strand
acucuuuacuguggucuaa

SEQ ID NO: 1958825 - RNA, 19 nt, Homo sapiens
  misc_RNA (1)...(19): siRNA sense strand
ccaaucagucucuuccaau

SEQ ID NO: 1958826 - RNA, 19 nt, Homo sapiens
  misc_RNA (1)...(19): siRNA sense strand
uggaugauguucguuguuc

SEQ ID NO: 1958827 - RNA, 19 nt, Homo sapiens
  misc_RNA (1)...(19): siRNA sense strand
cgccgauacuuacauaauc

SEQ ID NO: 1958828 - RNA, 19 nt, Homo sapiens
  misc_RNA (1)...(19): siRNA sense strand
caaaguggaacaugaagcu

SEQ ID NO: 1958829 - RNA, 19 nt, Homo sapiens
  misc_RNA (1)...(19): siRNA sense strand
cuauggaguggaagccuua

SEQ ID NO: 1958830 - RNA, 19 nt, Homo sapiens
  misc_RNA (1)...(19): siRNA sense strand
ggagaagaagcgccgauac

SEQ ID NO: 1958831 - RNA, 19 nt, Homo sapiens
  misc_RNA (1)...(19): siRNA sense strand
aguggaacaugaagcucua

SEQ ID NO: 1958832 - RNA, 19 nt, Homo sapiens
  misc_RNA (1)...(19): siRNA sense strand
gaacgagagaacuuaaagc

SEQ ID NO: 1958833 - RNA, 19 nt, Homo sapiens
  misc_RNA (1)...(19): siRNA sense strand
uaauucguuugcagucguu

SEQ ID NO: 1958834 - RNA, 19 nt, Homo sapiens
  misc_RNA (1)...(19): siRNA sense strand
uccaaucagucucuuccaa

SEQ ID NO: 1958835 - RNA, 19 nt, Homo sapiens
  misc_RNA (1)...(19): siRNA sense strand
ucgcaaaguggaacaugaa

SEQ ID NO: 1958836 - RNA, 19 nt, Homo sapiens
  misc_RNA (1)...(19): siRNA sense strand
ucuuuacuguggucuaaug

SEQ ID NO: 1958837 - RNA, 19 nt, Homo sapiens
  misc_RNA (1)...(19): siRNA sense strand
aagaagcgccgauacuuac

SEQ ID NO: 1958838 - RNA, 19 nt, Homo sapiens
  misc_RNA (1)...(19): siRNA sense strand
gaagcucuaggcaguaguc

SEQ ID NO: 1958839 - RNA, 19 nt, Homo sapiens
  misc_RNA (1)...(19): siRNA sense strand
uuggugaccuguuaacucu

SEQ ID NO: 1958840 - RNA, 19 nt, Homo sapiens
  misc_RNA (1)...(19): siRNA sense strand
guucguuguuccaaucagu

SEQ ID NO: 1958841 - RNA, 19 nt, Homo sapiens
  misc_RNA (1)...(19): siRNA sense strand
gugaccuguuaacucuuua

SEQ ID NO: 1958842 - RNA, 19 nt, Homo sapiens
  misc_RNA (1)...(19): siRNA sense strand
uaaacgacuucagcaucug

SEQ ID NO: 1958843 - RNA, 19 nt, Homo sapiens
  misc_RNA (1)...(19): siRNA sense strand
gaagcgccgauacuuacau

SEQ ID NO: 1958844 - RNA, 19 nt, Homo sapiens
  misc_RNA (1)...(19): siRNA sense strand
ggccaaagaacgagagaac

SEQ ID NO: 1958845 - RNA, 19 nt, Homo sapiens
  misc_RNA (1)...(19): siRNA sense strand
gcauaggcaguugaaggaa

SEQ ID NO: 1958846 - RNA, 19 nt, Homo sapiens
  misc_RNA (1)...(19): siRNA sense strand
aaucagucucuuccaauga

SEQ ID NO: 1958847 - RNA, 19 nt, Homo sapiens
  misc_RNA (1)...(19): siRNA sense strand
gagaaugcuggccacagau

SEQ ID NO: 1958848 - RNA, 19 nt, Homo sapiens
  misc_RNA (1)...(19): siRNA sense strand
guuugcagucguuguauau

SEQ ID NO: 1958849 - RNA, 19 nt, Homo sapiens
  misc_RNA (1)...(19): siRNA sense strand
ucagaggugcuuggccuuu

SEQ ID NO: 1958850 - RNA, 19 nt, Homo sapiens
  misc_RNA (1)...(19): siRNA sense strand
gaaggcugcugucaguuua

SEQ ID NO: 1958851 - RNA, 19 nt, Homo sapiens
  misc_RNA (1)...(19): siRNA sense strand
cagaggagaugcugaagaa

SEQ ID NO: 1958852 - RNA, 19 nt, Homo sapiens
  misc_RNA (1)...(19): siRNA sense strand
ggaaggcugcugucaguuu

SEQ ID NO: 1958853 - RNA, 19 nt, Homo sapiens
  misc_RNA (1)...(19): siRNA sense strand
gagcacagcagcuuguuug

SEQ ID NO: 1958854 - RNA, 19 nt, Homo sapiens
  misc_RNA (1)...(19): siRNA sense strand
gcugucaguuuacuuguga

SEQ ID NO: 1958855 - RNA, 19 nt, Homo sapiens
  misc_RNA (1)...(19): siRNA sense strand
gacccaagcucaacuaucg

SEQ ID NO: 1958856 - RNA, 19 nt, Homo sapiens
  misc_RNA (1)...(19): siRNA sense strand
gaacuucuaaagcauauca

SEQ ID NO: 1958857 - RNA, 19 nt, Homo sapiens
  misc_RNA (1)...(19): siRNA sense strand
uggcagaacuggagagugu

SEQ ID NO: 1958858 - RNA, 19 nt, Homo sapiens
  misc_RNA (1)...(19): siRNA sense strand
gaggagaugcugaagaaga

SEQ ID NO: 1958859 - RNA, 19 nt, Homo sapiens
  misc_RNA (1)...(19): siRNA sense strand
auucauggcugaugccuuu

SEQ ID NO: 1958860 - RNA, 19 nt, Homo sapiens
  misc_RNA (1)...(19): siRNA sense strand
caggaaggcugcugucagu

SEQ ID NO: 1958861 - RNA, 19 nt, Homo sapiens
  misc_RNA (1)...(19): siRNA sense strand
ggccauaaacugacuguga

SEQ ID NO: 1958862 - RNA, 19 nt, Homo sapiens
  misc_RNA (1)...(19): siRNA sense strand
uaugagaaguccgaagaaa

SEQ ID NO: 1958863 - RNA, 19 nt, Homo sapiens
  misc_RNA (1)...(19): siRNA sense strand
gaggugagcagcaggaaau

SEQ ID NO: 1958864 - RNA, 19 nt, Homo sapiens
  misc_RNA (1)...(19): siRNA sense strand
gauuuggagugguaugaga

SEQ ID NO: 1958865 - RNA, 19 nt, Homo sapiens
  misc_RNA (1)...(19): siRNA sense strand
gguaugagaaguccgaaga

SEQ ID NO: 1958866 - RNA, 19 nt, Homo sapiens
  misc_RNA (1)...(19): siRNA sense strand
gacaagcucuacgcaggaa

SEQ ID NO: 1958867 - RNA, 19 nt, Homo sapiens
  misc_RNA (1)...(19): siRNA sense strand
cccaagagacugcauggua

SEQ ID NO: 1958868 - RNA, 19 nt, Homo sapiens
  misc_RNA (1)...(19): siRNA sense strand
cagccgcagucccugauuu

SEQ ID NO: 1958869 - RNA, 19 nt, Homo sapiens
  misc_RNA (1)...(19): siRNA sense strand
aggagaugcugaagaagaa

SEQ ID NO: 1958870 - RNA, 19 nt, Homo sapiens
  misc_RNA (1)...(19): siRNA sense strand
gugaacuucuaaagcauau

SEQ ID NO: 1958871 - RNA, 19 nt, Homo sapiens
  misc_RNA (1)...(19): siRNA sense strand
ucuaugaacucgacuuguc

SEQ ID NO: 1958872 - RNA, 19 nt, Homo sapiens
  misc_RNA (1)...(19): siRNA sense strand
gcagaggagaugcugaaga

SEQ ID NO: 1958873 - RNA, 19 nt, Homo sapiens
  misc_RNA (1)...(19): siRNA sense strand
augaacagcuuaagcacuu

SEQ ID NO: 1958874 - RNA, 19 nt, Homo sapiens
  misc_RNA (1)...(19): siRNA sense strand
gaaccacggcuugggaaga

SEQ ID NO: 1958875 - RNA, 19 nt, Homo sapiens
  misc_RNA (1)...(19): siRNA sense strand
ccgcaacuguggagaagau

SEQ ID NO: 1958876 - RNA, 19 nt, Homo sapiens
  misc_RNA (1)...(19): siRNA sense strand
aggcaccagugacauuuaa

SEQ ID NO: 1958877 - RNA, 19 nt, Homo sapiens
  misc_RNA (1)...(19): siRNA sense strand
cuugugaacuucuaaagca

SEQ ID NO: 1958878 - RNA, 19 nt, Homo sapiens
  misc_RNA (1)...(19): siRNA sense strand
ccaccuggaggacuucuuu

SEQ ID NO: 1958879 - RNA, 19 nt, Homo sapiens
  misc_RNA (1)...(19): siRNA sense strand
ccaacaagcccuggcagaa

SEQ ID NO: 1958880 - RNA, 19 nt, Homo sapiens
  misc_RNA (1)...(19): siRNA sense strand
gggaagacuacauuugguu

SEQ ID NO: 1958881 - RNA, 19 nt, Homo sapiens
  misc_RNA (1)...(19): siRNA sense strand
cagauagaacuacuugaga

SEQ ID NO: 1958882 - RNA, 19 nt, Homo sapiens
  misc_RNA (1)...(19): siRNA sense strand
uaaaggcuuccgcgaguga

SEQ ID NO: 1958883 - RNA, 19 nt, Homo sapiens
  misc_RNA (1)...(19): siRNA sense strand
ccagauagaacuacuugag

SEQ ID NO: 1958884 - RNA, 19 nt, Homo sapiens
  misc_RNA (1)...(19): siRNA sense strand
ucccugauuuggaguggua

SEQ ID NO: 1958885 - RNA, 19 nt, Homo sapiens
  misc_RNA (1)...(19): siRNA sense strand
gauagaacuacuugagaca

SEQ ID NO: 1958886 - RNA, 19 nt, Homo sapiens
  misc_RNA (1)...(19): siRNA sense strand
gcaccagugacauuuaaag

SEQ ID NO: 1958887 - RNA, 19 nt, Homo sapiens
  misc_RNA (1)...(19): siRNA sense strand
ugagaaguccgaagaaacu

SEQ ID NO: 1958888 - RNA, 19 nt, Homo sapiens
  misc_RNA (1)...(19): siRNA sense strand
gcaacuguggagaagauug

SEQ ID NO: 1958889 - RNA, 19 nt, Homo sapiens
  misc_RNA (1)...(19): siRNA sense strand
gcacagggacaccgcaacu

SEQ ID NO: 1958890 - RNA, 19 nt, Homo sapiens
  misc_RNA (1)...(19): siRNA sense strand
ucagccaccuggaggacuu

SEQ ID NO: 1958891 - RNA, 19 nt, Homo sapiens
  misc_RNA (1)...(19): siRNA sense strand
caacaagcccuggcagaac

SEQ ID NO: 1958892 - RNA, 19 nt, Homo sapiens
  misc_RNA (1)...(19): siRNA sense strand
ccaggcaccagugacauuu

SEQ ID NO: 1958893 - RNA, 19 nt, Homo sapiens
  misc_RNA (1)...(19): siRNA sense strand
aagcauaucauguaucaac

SEQ ID NO: 1958894 - RNA, 19 nt, Homo sapiens
  misc_RNA (1)...(19): siRNA sense strand
uggagaagauugguuucga

SEQ ID NO: 1958895 - RNA, 19 nt, Homo sapiens
  misc_RNA (1)...(19): siRNA sense strand
guaccgcgagugcugauuc

SEQ ID NO: 1958896 - RNA, 19 nt, Homo sapiens
  misc_RNA (1)...(19): siRNA sense strand
cagcaggaaaugccaacaa

SEQ ID NO: 1958897 - RNA, 19 nt, Homo sapiens
  misc_RNA (1)...(19): siRNA sense strand
ccuaugaacagcuuaagca

SEQ ID NO: 1958898 - RNA, 19 nt, Homo sapiens
  misc_RNA (1)...(19): siRNA sense strand
gcugcugucaguuuacuug

SEQ ID NO: 1958899 - RNA, 19 nt, Homo sapiens
  misc_RNA (1)...(19): siRNA sense strand
guaugagaaguccgaagaa

SEQ ID NO: 1958900 - RNA, 19 nt, Homo sapiens
  misc_RNA (1)...(19): siRNA sense strand
ugaacagcuuaagcacuuu

SEQ ID NO: 1958901 - RNA, 19 nt, Homo sapiens
  misc_RNA (1)...(19): siRNA sense strand
acucacgccucccagauag

SEQ ID NO: 1958902 - RNA, 19 nt, Homo sapiens
  misc_RNA (1)...(19): siRNA sense strand
ucaggcuccuccacucaug

SEQ ID NO: 1958903 - RNA, 19 nt, Homo sapiens
  misc_RNA (1)...(19): siRNA sense strand
caggcaccagugacauuua

SEQ ID NO: 1958904 - RNA, 19 nt, Homo sapiens
  misc_RNA (1)...(19): siRNA sense strand
ugugaacuucuaaagcaua

SEQ ID NO: 1958905 - RNA, 19 nt, Homo sapiens
  misc_RNA (1)...(19): siRNA sense strand
caacuguggagaagauugg

SEQ ID NO: 1958906 - RNA, 19 nt, Homo sapiens
  misc_RNA (1)...(19): siRNA sense strand
guuuacuugugaacuucua

SEQ ID NO: 1958907 - RNA, 19 nt, Homo sapiens
  misc_RNA (1)...(19): siRNA sense strand
gaacagcuuaagcacuuuu

SEQ ID NO: 1958908 - RNA, 19 nt, Homo sapiens
  misc_RNA (1)...(19): siRNA sense strand
ggagaugcugaagaagaaa

SEQ ID NO: 1958909 - RNA, 19 nt, Homo sapiens
  misc_RNA (1)...(19): siRNA sense strand
ucacgccucccagauagaa

SEQ ID NO: 1958910 - RNA, 19 nt, Homo sapiens
  misc_RNA (1)...(19): siRNA sense strand
aacaagcccuggcagaacu

SEQ ID NO: 1958911 - RNA, 19 nt, Homo sapiens
  misc_RNA (1)...(19): siRNA sense strand
gcacagacaccucaagaaa

SEQ ID NO: 1958912 - RNA, 19 nt, Homo sapiens
  misc_RNA (1)...(19): siRNA sense strand
acagacaccucaagaaaga

SEQ ID NO: 1958913 - RNA, 19 nt, Homo sapiens
  misc_RNA (1)...(19): siRNA sense strand
cgcagaagguggagaagaa

SEQ ID NO: 1958914 - RNA, 19 nt, Homo sapiens
  misc_RNA (1)...(19): siRNA sense strand
gccaggagaagcacuuuaa

SEQ ID NO: 1958915 - RNA, 19 nt, Homo sapiens
  misc_RNA (1)...(19): siRNA sense strand
ucaccgcgcucauggacuu

SEQ ID NO: 1958916 - RNA, 19 nt, Homo sapiens
  misc_RNA (1)...(19): siRNA sense strand
gagccaaggccuuccagaa

SEQ ID NO: 1958917 - RNA, 19 nt, Homo sapiens
  misc_RNA (1)...(19): siRNA sense strand
acaagggcgucauggacua

SEQ ID NO: 1958918 - RNA, 19 nt, Homo sapiens
  misc_RNA (1)...(19): siRNA sense strand
ggaccuuguagaucaaauu

SEQ ID NO: 1958919 - RNA, 19 nt, Homo sapiens
  misc_RNA (1)...(19): siRNA sense strand
aggaguaccucgaguucuu

SEQ ID NO: 1958920 - RNA, 19 nt, Homo sapiens
  misc_RNA (1)...(19): siRNA sense strand
gcagcuggaccuuguagau

SEQ ID NO: 1958921 - RNA, 19 nt, Homo sapiens
  misc_RNA (1)...(19): siRNA sense strand
ccaaggaguaccucgaguu

SEQ ID NO: 1958922 - RNA, 19 nt, Homo sapiens
  misc_RNA (1)...(19): siRNA sense strand
gcagaacguguacgagauc

SEQ ID NO: 1958923 - RNA, 19 nt, Homo sapiens
  misc_RNA (1)...(19): siRNA sense strand
caaggaguaccucgaguuc

SEQ ID NO: 1958924 - RNA, 19 nt, Homo sapiens
  misc_RNA (1)...(19): siRNA sense strand
gaccuuguagaucaaauug

SEQ ID NO: 1958925 - RNA, 19 nt, Homo sapiens
  misc_RNA (1)...(19): siRNA sense strand
gggcgacugcaacggcuua

SEQ ID NO: 1958926 - RNA, 19 nt, Homo sapiens
  misc_RNA (1)...(19): siRNA sense strand
gcagccaguacuucaagaa

SEQ ID NO: 1958927 - RNA, 19 nt, Homo sapiens
  misc_RNA (1)...(19): siRNA sense strand
ccacaacuacgaccugaag

SEQ ID NO: 1958928 - RNA, 19 nt, Homo sapiens
  misc_RNA (1)...(19): siRNA sense strand
aggagaagcacuuuaagga

SEQ ID NO: 1958929 - RNA, 19 nt, Homo sapiens
  misc_RNA (1)...(19): siRNA sense strand
ggaagcacacgggcgagaa

SEQ ID NO: 1958930 - RNA, 19 nt, Homo sapiens
  misc_RNA (1)...(19): siRNA sense strand
gcuggaccuuguagaucaa

SEQ ID NO: 1958931 - RNA, 19 nt, Homo sapiens
  misc_RNA (1)...(19): siRNA sense strand
ggucgcagaagguggagaa

SEQ ID NO: 1958932 - RNA, 19 nt, Homo sapiens
  misc_RNA (1)...(19): siRNA sense strand
gcaacggccaggagaagca

SEQ ID NO: 1958933 - RNA, 19 nt, Homo sapiens
  misc_RNA (1)...(19): siRNA sense strand
ggccaggagaagcacuuua

SEQ ID NO: 1958934 - RNA, 19 nt, Homo sapiens
  misc_RNA (1)...(19): siRNA sense strand
gaagcacacgggcgagaag

SEQ ID NO: 1958935 - RNA, 19 nt, Homo sapiens
  misc_RNA (1)...(19): siRNA sense strand
acaacuacgaccugaagaa

SEQ ID NO: 1958936 - RNA, 19 nt, Homo sapiens
  misc_RNA (1)...(19): siRNA sense strand
caacuacgaccugaagaac

SEQ ID NO: 1958937 - RNA, 19 nt, Homo sapiens
  misc_RNA (1)...(19): siRNA sense strand
cugcaacggcuuagacuuc

SEQ ID NO: 1958938 - RNA, 19 nt, Homo sapiens
  misc_RNA (1)...(19): siRNA sense strand
ccgaccaccugcacagaca

SEQ ID NO: 1958939 - RNA, 19 nt, Homo sapiens
  misc_RNA (1)...(19): siRNA sense strand
gaagguggagaagaagauc

SEQ ID NO: 1958940 - RNA, 19 nt, Homo sapiens
  misc_RNA (1)...(19): siRNA sense strand
acuacgaccugaagaacca

SEQ ID NO: 1958941 - RNA, 19 nt, Homo sapiens
  misc_RNA (1)...(19): siRNA sense strand
ggauggaccugguuuaaua

SEQ ID NO: 1958942 - RNA, 19 nt, Homo sapiens
  misc_RNA (1)...(19): siRNA sense strand
cgaagagccuugaacauaa

SEQ ID NO: 1958943 - RNA, 19 nt, Homo sapiens
  misc_RNA (1)...(19): siRNA sense strand
gaagagccuugaacauaaa

SEQ ID NO: 1958944 - RNA, 19 nt, Homo sapiens
  misc_RNA (1)...(19): siRNA sense strand
gaaccagaguuuacuucuu

SEQ ID NO: 1958945 - RNA, 19 nt, Homo sapiens
  misc_RNA (1)...(19): siRNA sense strand
uuagugaccuggaaauuug

SEQ ID NO: 1958946 - RNA, 19 nt, Homo sapiens
  misc_RNA (1)...(19): siRNA sense strand
ggaccugguuuaauaaugg

SEQ ID NO: 1958947 - RNA, 19 nt, Homo sapiens
  misc_RNA (1)...(19): siRNA sense strand
ugagaucaaugcccacaaa

SEQ ID NO: 1958948 - RNA, 19 nt, Homo sapiens
  misc_RNA (1)...(19): siRNA sense strand
gaucaaugcccacaaauac

SEQ ID NO: 1958949 - RNA, 19 nt, Homo sapiens
  misc_RNA (1)...(19): siRNA sense strand
ucgaagagccuugaacaua

SEQ ID NO: 1958950 - RNA, 19 nt, Homo sapiens
  misc_RNA (1)...(19): siRNA sense strand
ccaggacucuuuguuuauu

SEQ ID NO: 1958951 - RNA, 19 nt, Homo sapiens
  misc_RNA (1)...(19): siRNA sense strand
aaacacagucuuuccaauu

SEQ ID NO: 1958952 - RNA, 19 nt, Homo sapiens
  misc_RNA (1)...(19): siRNA sense strand
ggagaacaagagugaagua

SEQ ID NO: 1958953 - RNA, 19 nt, Homo sapiens
  misc_RNA (1)...(19): siRNA sense strand
gugaugaagagaagaguua

SEQ ID NO: 1958954 - RNA, 19 nt, Homo sapiens
  misc_RNA (1)...(19): siRNA sense strand
acccaggacucuuuguuua

SEQ ID NO: 1958955 - RNA, 19 nt, Homo sapiens
  misc_RNA (1)...(19): siRNA sense strand
ggaaugacuucuacaaaau

SEQ ID NO: 1958956 - RNA, 19 nt, Homo sapiens
  misc_RNA (1)...(19): siRNA sense strand
ggaaauuugugcugaugag

SEQ ID NO: 1958957 - RNA, 19 nt, Homo sapiens
  misc_RNA (1)...(19): siRNA sense strand
gaaaauuagugaccuggaa

SEQ ID NO: 1958958 - RNA, 19 nt, Homo sapiens
  misc_RNA (1)...(19): siRNA sense strand
aacacagucuuuccaauuu

SEQ ID NO: 1958959 - RNA, 19 nt, Homo sapiens
  misc_RNA (1)...(19): siRNA sense strand
ggaagaacagcacaagugu

SEQ ID NO: 1958960 - RNA, 19 nt, Homo sapiens
  misc_RNA (1)...(19): siRNA sense strand
gaggauggaccugguuuaa

SEQ ID NO: 1958961 - RNA, 19 nt, Homo sapiens
  misc_RNA (1)...(19): siRNA sense strand
uggcucagcuucgguuuaa

SEQ ID NO: 1958962 - RNA, 19 nt, Homo sapiens
  misc_RNA (1)...(19): siRNA sense strand
ggugauggaaccagaguuu

SEQ ID NO: 1958963 - RNA, 19 nt, Homo sapiens
  misc_RNA (1)...(19): siRNA sense strand
aaccagaguuuacuucuuc

SEQ ID NO: 1958964 - RNA, 19 nt, Homo sapiens
  misc_RNA (1)...(19): siRNA sense strand
aauuugugcugaugaguuu

SEQ ID NO: 1958965 - RNA, 19 nt, Homo sapiens
  misc_RNA (1)...(19): siRNA sense strand
gacccaggacucuuuguuu

SEQ ID NO: 1958966 - RNA, 19 nt, Homo sapiens
  misc_RNA (1)...(19): siRNA sense strand
gauggaccugguuuaauaa

SEQ ID NO: 1958967 - RNA, 19 nt, Homo sapiens
  misc_RNA (1)...(19): siRNA sense strand
gcugaugaguuuccuggau

SEQ ID NO: 1958968 - RNA, 19 nt, Homo sapiens
  misc_RNA (1)...(19): siRNA sense strand
gcaccuagccaaaaucaaa

SEQ ID NO: 1958969 - RNA, 19 nt, Homo sapiens
  misc_RNA (1)...(19): siRNA sense strand
gaguuuacuucuucacaca

SEQ ID NO: 1958970 - RNA, 19 nt, Homo sapiens
  misc_RNA (1)...(19): siRNA sense strand
caaugacccaggacucuuu

SEQ ID NO: 1958971 - RNA, 19 nt, Homo sapiens
  misc_RNA (1)...(19): siRNA sense strand
cagcacaaguguucuucga

SEQ ID NO: 1958972 - RNA, 19 nt, Homo sapiens
  misc_RNA (1)...(19): siRNA sense strand
gcccacaaauacuggaaug

SEQ ID NO: 1958973 - RNA, 19 nt, Homo sapiens
  misc_RNA (1)...(19): siRNA sense strand
gugucuaucuggaaauuuc

SEQ ID NO: 1958974 - RNA, 19 nt, Homo sapiens
  misc_RNA (1)...(19): siRNA sense strand
gaggagaauguaacucaga

SEQ ID NO: 1958975 - RNA, 19 nt, Homo sapiens
  misc_RNA (1)...(19): siRNA sense strand
ggguuuggauucagugcaa

SEQ ID NO: 1958976 - RNA, 19 nt, Homo sapiens
  misc_RNA (1)...(19): siRNA sense strand
gucagugucuaucuggaaa

SEQ ID NO: 1958977 - RNA, 19 nt, Homo sapiens
  misc_RNA (1)...(19): siRNA sense strand
caccacugcuggacuggaa

SEQ ID NO: 1958978 - RNA, 19 nt, Homo sapiens
  misc_RNA (1)...(19): siRNA sense strand
gagaacaagagugaaguau

SEQ ID NO: 1958979 - RNA, 19 nt, Homo sapiens
  misc_RNA (1)...(19): siRNA sense strand
uggaaugacuucuacaaaa

SEQ ID NO: 1958980 - RNA, 19 nt, Homo sapiens
  misc_RNA (1)...(19): siRNA sense strand
aaggauagacauuggcuuu

SEQ ID NO: 1958981 - RNA, 19 nt, Homo sapiens
  misc_RNA (1)...(19): siRNA sense strand
agaucaaugcccacaaaua

SEQ ID NO: 1958982 - RNA, 19 nt, Homo sapiens
  misc_RNA (1)...(19): siRNA sense strand
ggagaauguaacucagaaa

SEQ ID NO: 1958983 - RNA, 19 nt, Homo sapiens
  misc_RNA (1)...(19): siRNA sense strand
caggacucuuuguuuauug

SEQ ID NO: 1958984 - RNA, 19 nt, Homo sapiens
  misc_RNA (1)...(19): siRNA sense strand
uagaaacaaugaggaugga

SEQ ID NO: 1958985 - RNA, 19 nt, Homo sapiens
  misc_RNA (1)...(19): siRNA sense strand
cgaccugugugaugaagag

SEQ ID NO: 1958986 - RNA, 19 nt, Homo sapiens
  misc_RNA (1)...(19): siRNA sense strand
caaauacuggaaugacuuc

SEQ ID NO: 1958987 - RNA, 19 nt, Homo sapiens
  misc_RNA (1)...(19): siRNA sense strand
gaccugguuuaauaaugga

SEQ ID NO: 1958988 - RNA, 19 nt, Homo sapiens
  misc_RNA (1)...(19): siRNA sense strand
cagugucuaucuggaaauu

SEQ ID NO: 1958989 - RNA, 19 nt, Homo sapiens
  misc_RNA (1)...(19): siRNA sense strand
aaaggucagugucuaucug

SEQ ID NO: 1958990 - RNA, 19 nt, Homo sapiens
  misc_RNA (1)...(19): siRNA sense strand
aggagaauguaacucagaa

SEQ ID NO: 1958991 - RNA, 19 nt, Homo sapiens
  misc_RNA (1)...(19): siRNA sense strand
uggaagaacagcacaagug

SEQ ID NO: 1958992 - RNA, 19 nt, Homo sapiens
  misc_RNA (1)...(19): siRNA sense strand
ggucagugucuaucuggaa

SEQ ID NO: 1958993 - RNA, 19 nt, Homo sapiens
  misc_RNA (1)...(19): siRNA sense strand
gcugagcaggcuucugaaa

SEQ ID NO: 1958994 - RNA, 19 nt, Homo sapiens
  misc_RNA (1)...(19): siRNA sense strand
caauguaccggguuuggau

SEQ ID NO: 1958995 - RNA, 19 nt, Homo sapiens
  misc_RNA (1)...(19): siRNA sense strand
gaacuggacacgcuuuuca

SEQ ID NO: 1958996 - RNA, 19 nt, Homo sapiens
  misc_RNA (1)...(19): siRNA sense strand
cacaaauacuggaaugacu

SEQ ID NO: 1958997 - RNA, 19 nt, Homo sapiens
  misc_RNA (1)...(19): siRNA sense strand
cacagucuuuccaauuuua

SEQ ID NO: 1958998 - RNA, 19 nt, Homo sapiens
  misc_RNA (1)...(19): siRNA sense strand
gugauggaaccagaguuua

SEQ ID NO: 1958999 - RNA, 19 nt, Homo sapiens
  misc_RNA (1)...(19): siRNA sense strand
aggcugagcaggcuucuga

SEQ ID NO: 1959000 - RNA, 19 nt, Homo sapiens
  misc_RNA (1)...(19): siRNA sense strand
ucaaugcccacaaauacug

SEQ ID NO: 1959001 - RNA, 19 nt, Homo sapiens
  misc_RNA (1)...(19): siRNA sense strand
gaggaacuggacacgcuuu

SEQ ID NO: 1959002 - RNA, 19 nt, Homo sapiens
  misc_RNA (1)...(19): siRNA sense strand
aagggcagucuugauauua

SEQ ID NO: 1959003 - RNA, 19 nt, Homo sapiens
  misc_RNA (1)...(19): siRNA sense strand
auacuggaaugacuucuac

SEQ ID NO: 1959004 - RNA, 19 nt, Homo sapiens
  misc_RNA (1)...(19): siRNA sense strand
gagaauguaacucagaaaa

SEQ ID NO: 1959005 - RNA, 19 nt, Homo sapiens
  misc_RNA (1)...(19): siRNA sense strand
ggaaccagaguuuacuucu

SEQ ID NO: 1959006 - RNA, 19 nt, Homo sapiens
  misc_RNA (1)...(19): siRNA sense strand
ugaggauggaccugguuua

SEQ ID NO: 1959007 - RNA, 19 nt, Homo sapiens
  misc_RNA (1)...(19): siRNA sense strand
acaaauacuggaaugacuu

SEQ ID NO: 1959008 - RNA, 19 nt, Homo sapiens
  misc_RNA (1)...(19): siRNA sense strand
uaugauccuucucgguguu

SEQ ID NO: 1959009 - RNA, 19 nt, Homo sapiens
  misc_RNA (1)...(19): siRNA sense strand
agggcagucuugauauuau

SEQ ID NO: 1959010 - RNA, 19 nt, Homo sapiens
  misc_RNA (1)...(19): siRNA sense strand
ucagccaccuaccgaauac

SEQ ID NO: 1959011 - RNA, 19 nt, Homo sapiens
  misc_RNA (1)...(19): siRNA sense strand
uggaggagaauguaacuca

SEQ ID NO: 1959012 - RNA, 19 nt, Homo sapiens
  misc_RNA (1)...(19): siRNA sense strand
cugacaauguaccggguuu

SEQ ID NO: 1959013 - RNA, 19 nt, Homo sapiens
  misc_RNA (1)...(19): siRNA sense strand
gagaucaaugcccacaaau

SEQ ID NO: 1959014 - RNA, 19 nt, Homo sapiens
  misc_RNA (1)...(19): siRNA sense strand
uuccacagcuauagaacug

SEQ ID NO: 1959015 - RNA, 19 nt, Homo sapiens
  misc_RNA (1)...(19): siRNA sense strand
aaauuugugcugaugaguu

SEQ ID NO: 1959016 - RNA, 19 nt, Homo sapiens
  misc_RNA (1)...(19): siRNA sense strand
uuucaaggauagacauugg

SEQ ID NO: 1959017 - RNA, 19 nt, Homo sapiens
  misc_RNA (1)...(19): siRNA sense strand
acaagaugcagaaggcuau

SEQ ID NO: 1959018 - RNA, 19 nt, Homo sapiens
  misc_RNA (1)...(19): siRNA sense strand
gaaauuugugcugaugagu

SEQ ID NO: 1959019 - RNA, 19 nt, Homo sapiens
  misc_RNA (1)...(19): siRNA sense strand
ugagcaggcuucugaaacc

SEQ ID NO: 1959020 - RNA, 19 nt, Homo sapiens
  misc_RNA (1)...(19): siRNA sense strand
acacagucuuuccaauuuu

SEQ ID NO: 1959021 - RNA, 19 nt, Homo sapiens
  misc_RNA (1)...(19): siRNA sense strand
auuagugaccuggaaauuu

SEQ ID NO: 1959022 - RNA, 19 nt, Homo sapiens
  misc_RNA (1)...(19): siRNA sense strand
uggaccugguuuaauaaug

SEQ ID NO: 1959023 - RNA, 19 nt, Homo sapiens
  misc_RNA (1)...(19): siRNA sense strand
gguccagacaaauucagaa

SEQ ID NO: 1959024 - RNA, 19 nt, Homo sapiens
  misc_RNA (1)...(19): siRNA sense strand
ccacaaauacuggaaugac

SEQ ID NO: 1959025 - RNA, 19 nt, Homo sapiens
  misc_RNA (1)...(19): siRNA sense strand
gaagaagagcgccuaaaua

SEQ ID NO: 1959026 - RNA, 19 nt, Homo sapiens
  misc_RNA (1)...(19): siRNA sense strand
gaacaaagcugugguuuuc

SEQ ID NO: 1959027 - RNA, 19 nt, Homo sapiens
  misc_RNA (1)...(19): siRNA sense strand
aaggauaccuguuuaugua

SEQ ID NO: 1959028 - RNA, 19 nt, Homo sapiens
  misc_RNA (1)...(19): siRNA sense strand
gaagagcgccuaaauaaac

SEQ ID NO: 1959029 - RNA, 19 nt, Homo sapiens
  misc_RNA (1)...(19): siRNA sense strand
aagaagagcgccuaaauaa

SEQ ID NO: 1959030 - RNA, 19 nt, Homo sapiens
  misc_RNA (1)...(19): siRNA sense strand
ggaagaagagcgccuaaau

SEQ ID NO: 1959031 - RNA, 19 nt, Homo sapiens
  misc_RNA (1)...(19): siRNA sense strand
gaaaggauaccuguuuaug

SEQ ID NO: 1959032 - RNA, 19 nt, Homo sapiens
  misc_RNA (1)...(19): siRNA sense strand
ucaaggacauggugccaaa

SEQ ID NO: 1959033 - RNA, 19 nt, Homo sapiens
  misc_RNA (1)...(19): siRNA sense strand
gaagcugucucagugauuc

SEQ ID NO: 1959034 - RNA, 19 nt, Homo sapiens
  misc_RNA (1)...(19): siRNA sense strand
agauuuagauggcuucuug

SEQ ID NO: 1959035 - RNA, 19 nt, Homo sapiens
  misc_RNA (1)...(19): siRNA sense strand
gaagaaaugcagaacaaag

SEQ ID NO: 1959036 - RNA, 19 nt, Homo sapiens
  misc_RNA (1)...(19): siRNA sense strand
guucuuagaccuugugaaa

SEQ ID NO: 1959037 - RNA, 19 nt, Homo sapiens
  misc_RNA (1)...(19): siRNA sense strand
uggaagaaaugcagaacaa

SEQ ID NO: 1959038 - RNA, 19 nt, Homo sapiens
  misc_RNA (1)...(19): siRNA sense strand
aggaaaggauaccuguuua

SEQ ID NO: 1959039 - RNA, 19 nt, Homo sapiens
  misc_RNA (1)...(19): siRNA sense strand
cugaaacucuuacaaacuu

SEQ ID NO: 1959040 - RNA, 19 nt, Homo sapiens
  misc_RNA (1)...(19): siRNA sense strand
gggagagacucacaaagca

SEQ ID NO: 1959041 - RNA, 19 nt, Homo sapiens
  misc_RNA (1)...(19): siRNA sense strand
guacagaacccugccauca

SEQ ID NO: 1959042 - RNA, 19 nt, Homo sapiens
  misc_RNA (1)...(19): siRNA sense strand
cagguacucuuucuacaug

SEQ ID NO: 1959043 - RNA, 19 nt, Homo sapiens
  misc_RNA (1)...(19): siRNA sense strand
cgaaggcucuccugaaacu

SEQ ID NO: 1959044 - RNA, 19 nt, Homo sapiens
  misc_RNA (1)...(19): siRNA sense strand
ggaaaggauaccuguuuau

SEQ ID NO: 1959045 - RNA, 19 nt, Homo sapiens
  misc_RNA (1)...(19): siRNA sense strand
gcagacggcgcuauggaaa

SEQ ID NO: 1959046 - RNA, 19 nt, Homo sapiens
  misc_RNA (1)...(19): siRNA sense strand
caaccugacugugcgauuc

SEQ ID NO: 1959047 - RNA, 19 nt, Homo sapiens
  misc_RNA (1)...(19): siRNA sense strand
uuucaaagcucaaggacau

SEQ ID NO: 1959048 - RNA, 19 nt, Homo sapiens
  misc_RNA (1)...(19): siRNA sense strand
cagaggcagguaaacauua

SEQ ID NO: 1959049 - RNA, 19 nt, Homo sapiens
  misc_RNA (1)...(19): siRNA sense strand
aaccagagccuguuuacaa

SEQ ID NO: 1959050 - RNA, 19 nt, Homo sapiens
  misc_RNA (1)...(19): siRNA sense strand
gggauucuccuggaucuuu

SEQ ID NO: 1959051 - RNA, 19 nt, Homo sapiens
  misc_RNA (1)...(19): siRNA sense strand
ggaagaaaugcagaacaaa

SEQ ID NO: 1959052 - RNA, 19 nt, Homo sapiens
  misc_RNA (1)...(19): siRNA sense strand
aaggaaaggauaccuguuu

SEQ ID NO: 1959053 - RNA, 19 nt, Homo sapiens
  misc_RNA (1)...(19): siRNA sense strand
gcagaacaaagcugugguu

SEQ ID NO: 1959054 - RNA, 19 nt, Homo sapiens
  misc_RNA (1)...(19): siRNA sense strand
ggauucuccuggaucuuug

SEQ ID NO: 1959055 - RNA, 19 nt, Homo sapiens
  misc_RNA (1)...(19): siRNA sense strand
gcuccugacuuugaucguu

SEQ ID NO: 1959056 - RNA, 19 nt, Homo sapiens
  misc_RNA (1)...(19): siRNA sense strand
gauucuguaucuugggaaa

SEQ ID NO: 1959057 - RNA, 19 nt, Homo sapiens
  misc_RNA (1)...(19): siRNA sense strand
aauaaacuccgacuggaaa

SEQ ID NO: 1959058 - RNA, 19 nt, Homo sapiens
  misc_RNA (1)...(19): siRNA sense strand
agcgaaggcucuccugaaa

SEQ ID NO: 1959059 - RNA, 19 nt, Homo sapiens
  misc_RNA (1)...(19): siRNA sense strand
gugauucaguccauuccaa

SEQ ID NO: 1959060 - RNA, 19 nt, Homo sapiens
  misc_RNA (1)...(19): siRNA sense strand
ucacauggcuucguuacac

SEQ ID NO: 1959061 - RNA, 19 nt, Homo sapiens
  misc_RNA (1)...(19): siRNA sense strand
gugcucacauggcuucguu

SEQ ID NO: 1959062 - RNA, 19 nt, Homo sapiens
  misc_RNA (1)...(19): siRNA sense strand
gaaacuaucaaugcagcaa

SEQ ID NO: 1959063 - RNA, 19 nt, Homo sapiens
  misc_RNA (1)...(19): siRNA sense strand
acgauucaguuucacauug

SEQ ID NO: 1959064 - RNA, 19 nt, Homo sapiens
  misc_RNA (1)...(19): siRNA sense strand
gauucaguccauuccaaua

SEQ ID NO: 1959065 - RNA, 19 nt, Homo sapiens
  misc_RNA (1)...(19): siRNA sense strand
accagagccuguuuacaaa

SEQ ID NO: 1959066 - RNA, 19 nt, Homo sapiens
  misc_RNA (1)...(19): siRNA sense strand
ggaagcugucucagugauu

SEQ ID NO: 1959067 - RNA, 19 nt, Homo sapiens
  misc_RNA (1)...(19): siRNA sense strand
gcaauuggagucacuacgu

SEQ ID NO: 1959068 - RNA, 19 nt, Homo sapiens
  misc_RNA (1)...(19): siRNA sense strand
agaagagcgccuaaauaaa

SEQ ID NO: 1959069 - RNA, 19 nt, Homo sapiens
  misc_RNA (1)...(19): siRNA sense strand
ccagaggcagguaaacauu

SEQ ID NO: 1959070 - RNA, 19 nt, Homo sapiens
  misc_RNA (1)...(19): siRNA sense strand
caaugagaccggacgauuc

SEQ ID NO: 1959071 - RNA, 19 nt, Homo sapiens
  misc_RNA (1)...(19): siRNA sense strand
ucaaugagaccggacgauu

SEQ ID NO: 1959072 - RNA, 19 nt, Homo sapiens
  misc_RNA (1)...(19): siRNA sense strand
aaaggauaccuguuuaugu

SEQ ID NO: 1959073 - RNA, 19 nt, Homo sapiens
  misc_RNA (1)...(19): siRNA sense strand
caaacuuaaggaaaggaua

SEQ ID NO: 1959074 - RNA, 19 nt, Homo sapiens
  misc_RNA (1)...(19): siRNA sense strand
ggaaaagcgaccacuguuu

SEQ ID NO: 1959075 - RNA, 19 nt, Homo sapiens
  misc_RNA (1)...(19): siRNA sense strand
ucaguccauuccaauauuc

SEQ ID NO: 1959076 - RNA, 19 nt, Homo sapiens
  misc_RNA (1)...(19): siRNA sense strand
gaugcuggcaguuguggaa

SEQ ID NO: 1959077 - RNA, 19 nt, Homo sapiens
  misc_RNA (1)...(19): siRNA sense strand
ccagugaaaaucaaaguua

SEQ ID NO: 1959078 - RNA, 19 nt, Homo sapiens
  misc_RNA (1)...(19): siRNA sense strand
ggugcugccuucucugauc

SEQ ID NO: 1959079 - RNA, 19 nt, Homo sapiens
  misc_RNA (1)...(19): siRNA sense strand
acauuacaguacagaagaa

SEQ ID NO: 1959080 - RNA, 19 nt, Homo sapiens
  misc_RNA (1)...(19): siRNA sense strand
uacuguggcugacaugaug

SEQ ID NO: 1959081 - RNA, 19 nt, Homo sapiens
  misc_RNA (1)...(19): siRNA sense strand
cugaaaacgugcugcauuu

SEQ ID NO: 1959082 - RNA, 19 nt, Homo sapiens
  misc_RNA (1)...(19): siRNA sense strand
ugaaucugaugcggaaaug

SEQ ID NO: 1959083 - RNA, 19 nt, Homo sapiens
  misc_RNA (1)...(19): siRNA sense strand
ggugggagagacucacaaa

SEQ ID NO: 1959084 - RNA, 19 nt, Homo sapiens
  misc_RNA (1)...(19): siRNA sense strand
cagaagaaagugagucagu

SEQ ID NO: 1959085 - RNA, 19 nt, Homo sapiens
  misc_RNA (1)...(19): siRNA sense strand
ucucugauccagcuucuug

SEQ ID NO: 1959086 - RNA, 19 nt, Homo sapiens
  misc_RNA (1)...(19): siRNA sense strand
guauaaucuugugcaauuc

SEQ ID NO: 1959087 - RNA, 19 nt, Homo sapiens
  misc_RNA (1)...(19): siRNA sense strand
ggagcugagugacguacag

SEQ ID NO: 1959088 - RNA, 19 nt, Homo sapiens
  misc_RNA (1)...(19): siRNA sense strand
aaauaaacuccgacuggaa

SEQ ID NO: 1959089 - RNA, 19 nt, Homo sapiens
  misc_RNA (1)...(19): siRNA sense strand
aaacauuacaguacagaag

SEQ ID NO: 1959090 - RNA, 19 nt, Homo sapiens
  misc_RNA (1)...(19): siRNA sense strand
gcauuucaaagcucaagga

SEQ ID NO: 1959091 - RNA, 19 nt, Homo sapiens
  misc_RNA (1)...(19): siRNA sense strand
ucuguggauucccuuauau

SEQ ID NO: 1959092 - RNA, 19 nt, Homo sapiens
  misc_RNA (1)...(19): siRNA sense strand
aaacgugcugcauuucaaa

SEQ ID NO: 1959093 - RNA, 19 nt, Homo sapiens
  misc_RNA (1)...(19): siRNA sense strand
ggacgauucaguuucacau

SEQ ID NO: 1959094 - RNA, 19 nt, Homo sapiens
  misc_RNA (1)...(19): siRNA sense strand
gagaccggacgauucaguu

SEQ ID NO: 1959095 - RNA, 19 nt, Homo sapiens
  misc_RNA (1)...(19): siRNA sense strand
aacuaucaaugcagcaauu

SEQ ID NO: 1959096 - RNA, 19 nt, Homo sapiens
  misc_RNA (1)...(19): siRNA sense strand
cucuguggauucccuuaua

SEQ ID NO: 1959097 - RNA, 19 nt, Homo sapiens
  misc_RNA (1)...(19): siRNA sense strand
ugacugugcgauucuguau

SEQ ID NO: 1959098 - RNA, 19 nt, Homo sapiens
  misc_RNA (1)...(19): siRNA sense strand
acauugccauauccaguga

SEQ ID NO: 1959099 - RNA, 19 nt, Homo sapiens
  misc_RNA (1)...(19): siRNA sense strand
ucagagcuaaggaagaaga

SEQ ID NO: 1959100 - RNA, 19 nt, Homo sapiens
  misc_RNA (1)...(19): siRNA sense strand
aaugagaccggacgauuca

SEQ ID NO: 1959101 - RNA, 19 nt, Homo sapiens
  misc_RNA (1)...(19): siRNA sense strand
auuggaaggugcucacaug

SEQ ID NO: 1959102 - RNA, 19 nt, Homo sapiens
  misc_RNA (1)...(19): siRNA sense strand
uguggaaacuaucaaugca

SEQ ID NO: 1959103 - RNA, 19 nt, Homo sapiens
  misc_RNA (1)...(19): siRNA sense strand
gugcaauucuugggauucu

SEQ ID NO: 1959104 - RNA, 19 nt, Homo sapiens
  misc_RNA (1)...(19): siRNA sense strand
aagcgaaggcucuccugaa

SEQ ID NO: 1959105 - RNA, 19 nt, Homo sapiens
  misc_RNA (1)...(19): siRNA sense strand
cgauucaguuucacauugc

SEQ ID NO: 1959106 - RNA, 19 nt, Homo sapiens
  misc_RNA (1)...(19): siRNA sense strand
gacgauucaguuucacauu

SEQ ID NO: 1959107 - RNA, 19 nt, Homo sapiens
  misc_RNA (1)...(19): siRNA sense strand
uucaguccauuccaauauu

SEQ ID NO: 1959108 - RNA, 19 nt, Homo sapiens
  misc_RNA (1)...(19): siRNA sense strand
aauuucaccuggaguucuu

SEQ ID NO: 1959109 - RNA, 19 nt, Homo sapiens
  misc_RNA (1)...(19): siRNA sense strand
aaacuuaaggaaaggauac

SEQ ID NO: 1959110 - RNA, 19 nt, Homo sapiens
  misc_RNA (1)...(19): siRNA sense strand
gaauuucaccuggaguucu

SEQ ID NO: 1959111 - RNA, 19 nt, Homo sapiens
  misc_RNA (1)...(19): siRNA sense strand
gaccggacgauucaguuuc

SEQ ID NO: 1959112 - RNA, 19 nt, Homo sapiens
  misc_RNA (1)...(19): siRNA sense strand
cagaacaaagcugugguuu

SEQ ID NO: 1959113 - RNA, 19 nt, Homo sapiens
  misc_RNA (1)...(19): siRNA sense strand
cgacaccgcgagcuauauc

SEQ ID NO: 1959114 - RNA, 19 nt, Homo sapiens
  misc_RNA (1)...(19): siRNA sense strand
caccggugcugccuucucu

SEQ ID NO: 1959115 - RNA, 19 nt, Homo sapiens
  misc_RNA (1)...(19): siRNA sense strand
acugugcgauucuguaucu

SEQ ID NO: 1959116 - RNA, 19 nt, Homo sapiens
  misc_RNA (1)...(19): siRNA sense strand
uuacaaacuuaaggaaagg

SEQ ID NO: 1959117 - RNA, 19 nt, Homo sapiens
  misc_RNA (1)...(19): siRNA sense strand
ucucagugauucaguccau

SEQ ID NO: 1959118 - RNA, 19 nt, Homo sapiens
  misc_RNA (1)...(19): siRNA sense strand
uggaagcugucucagugau

SEQ ID NO: 1959119 - RNA, 19 nt, Homo sapiens
  misc_RNA (1)...(19): siRNA sense strand
uuacaguacagaagaaagu

SEQ ID NO: 1959120 - RNA, 19 nt, Homo sapiens
  misc_RNA (1)...(19): siRNA sense strand
gaucguuggcuggaugaau

SEQ ID NO: 1959121 - RNA, 19 nt, Homo sapiens
  misc_RNA (1)...(19): siRNA sense strand
uaaggaaaggauaccuguu

SEQ ID NO: 1959122 - RNA, 19 nt, Homo sapiens
  misc_RNA (1)...(19): siRNA sense strand
cuccugaaacucuuacaaa

SEQ ID NO: 1959123 - RNA, 19 nt, Homo sapiens
  misc_RNA (1)...(19): siRNA sense strand
aaucugaugcggaaaugga

SEQ ID NO: 1959124 - RNA, 19 nt, Homo sapiens
  misc_RNA (1)...(19): siRNA sense strand
uucgucaccuuuauaaaca

SEQ ID NO: 1959125 - RNA, 19 nt, Homo sapiens
  misc_RNA (1)...(19): siRNA sense strand
gagcaacccuacagagcaa

SEQ ID NO: 1959126 - RNA, 19 nt, Homo sapiens
  misc_RNA (1)...(19): siRNA sense strand
gaagacgagccacguauga

SEQ ID NO: 1959127 - RNA, 19 nt, Homo sapiens
  misc_RNA (1)...(19): siRNA sense strand
ggugggcucuggcuucaaa

SEQ ID NO: 1959128 - RNA, 19 nt, Homo sapiens
  misc_RNA (1)...(19): siRNA sense strand
gaggagagccgcuacaagu

SEQ ID NO: 1959129 - RNA, 19 nt, Homo sapiens
  misc_RNA (1)...(19): siRNA sense strand
gagcacuacucuucacugu

SEQ ID NO: 1959130 - RNA, 19 nt, Homo sapiens
  misc_RNA (1)...(19): siRNA sense strand
gucaaggccuucaauguca

SEQ ID NO: 1959131 - RNA, 19 nt, Homo sapiens
  misc_RNA (1)...(19): siRNA sense strand
ggagagcaccaucaaguuc

SEQ ID NO: 1959132 - RNA, 19 nt, Homo sapiens
  misc_RNA (1)...(19): siRNA sense strand
ggagagccgcuacaaguuc

SEQ ID NO: 1959133 - RNA, 19 nt, Homo sapiens
  misc_RNA (1)...(19): siRNA sense strand
ggucaaggccuucaauguc

SEQ ID NO: 1959134 - RNA, 19 nt, Homo sapiens
  misc_RNA (1)...(19): siRNA sense strand
gagaagacgagccacguau

SEQ ID NO: 1959135 - RNA, 19 nt, Homo sapiens
  misc_RNA (1)...(19): siRNA sense strand
guaccuggccucccucuuc

SEQ ID NO: 1959136 - RNA, 19 nt, Homo sapiens
  misc_RNA (1)...(19): siRNA sense strand
ucacugccguccauugcaa

SEQ ID NO: 1959137 - RNA, 19 nt, Homo sapiens
  misc_RNA (1)...(19): siRNA sense strand
gagauggacaagccacuga

SEQ ID NO: 1959138 - RNA, 19 nt, Homo sapiens
  misc_RNA (1)...(19): siRNA sense strand
gagagccgcuacaaguucu

SEQ ID NO: 1959139 - RNA, 19 nt, Homo sapiens
  misc_RNA (1)...(19): siRNA sense strand
gaguucagcuucguucagu

SEQ ID NO: 1959140 - RNA, 19 nt, Homo sapiens
  misc_RNA (1)...(19): siRNA sense strand
caggaaagccagaacaagu

SEQ ID NO: 1959141 - RNA, 19 nt, Homo sapiens
  misc_RNA (1)...(19): siRNA sense strand
gggagagcaccaucaaguu

SEQ ID NO: 1959142 - RNA, 19 nt, Homo sapiens
  misc_RNA (1)...(19): siRNA sense strand
gagagcaccaucaaguuca

SEQ ID NO: 1959143 - RNA, 19 nt, Homo sapiens
  misc_RNA (1)...(19): siRNA sense strand
cgagaagacgagccacgua

SEQ ID NO: 1959144 - RNA, 19 nt, Homo sapiens
  misc_RNA (1)...(19): siRNA sense strand
gcaagagcaccuucagcau

SEQ ID NO: 1959145 - RNA, 19 nt, Homo sapiens
  misc_RNA (1)...(19): siRNA sense strand
ggccuucaaugucaucucu

SEQ ID NO: 1959146 - RNA, 19 nt, Homo sapiens
  misc_RNA (1)...(19): siRNA sense strand
ggagggaguucagcuucgu

SEQ ID NO: 1959147 - RNA, 19 nt, Homo sapiens
  misc_RNA (1)...(19): siRNA sense strand
gcaggaaagccagaacaag

SEQ ID NO: 1959148 - RNA, 19 nt, Homo sapiens
  misc_RNA (1)...(19): siRNA sense strand
ugaccucacugccguccau

SEQ ID NO: 1959149 - RNA, 19 nt, Homo sapiens
  misc_RNA (1)...(19): siRNA sense strand
aagcaggucuuggccaaca

SEQ ID NO: 1959150 - RNA, 19 nt, Homo sapiens
  misc_RNA (1)...(19): siRNA sense strand
gagagggagagcaccauca

SEQ ID NO: 1959151 - RNA, 19 nt, Homo sapiens
  misc_RNA (1)...(19): siRNA sense strand
gaugugagcaacccuacag

SEQ ID NO: 1959152 - RNA, 19 nt, Homo sapiens
  misc_RNA (1)...(19): siRNA sense strand
aggaaagccagaacaaguu

SEQ ID NO: 1959153 - RNA, 19 nt, Homo sapiens
  misc_RNA (1)...(19): siRNA sense strand
gugaguccaaugcugagua

SEQ ID NO: 1959154 - RNA, 19 nt, Homo sapiens
  misc_RNA (1)...(19): siRNA sense strand
gcagcccuaugugcaggaa

SEQ ID NO: 1959155 - RNA, 19 nt, Homo sapiens
  misc_RNA (1)...(19): siRNA sense strand
ucuggcggauggagaucua

SEQ ID NO: 1959156 - RNA, 19 nt, Homo sapiens
  misc_RNA (1)...(19): siRNA sense strand
ugaguccaaugcugaguac

SEQ ID NO: 1959157 - RNA, 19 nt, Homo sapiens
  misc_RNA (1)...(19): siRNA sense strand
ggccaaagcccuguuucuc

SEQ ID NO: 1959158 - RNA, 19 nt, Homo sapiens
  misc_RNA (1)...(19): siRNA sense strand
gcaacccuacagagcaaga

SEQ ID NO: 1959159 - RNA, 19 nt, Homo sapiens
  misc_RNA (1)...(19): siRNA sense strand
ggaaacagaauacucauuu

SEQ ID NO: 1959160 - RNA, 19 nt, Homo sapiens
  misc_RNA (1)...(19): siRNA sense strand
gggcuuggcuuugguuaua

SEQ ID NO: 1959161 - RNA, 19 nt, Homo sapiens
  misc_RNA (1)...(19): siRNA sense strand
gcaacuacaugcaauagau

SEQ ID NO: 1959162 - RNA, 19 nt, Homo sapiens
  misc_RNA (1)...(19): siRNA sense strand
ggauggagaugagcaacua

SEQ ID NO: 1959163 - RNA, 19 nt, Homo sapiens
  misc_RNA (1)...(19): siRNA sense strand
gaagacacaccaauuuaug

SEQ ID NO: 1959164 - RNA, 19 nt, Homo sapiens
  misc_RNA (1)...(19): siRNA sense strand
gaaaagcaacgacaagaua

SEQ ID NO: 1959165 - RNA, 19 nt, Homo sapiens
  misc_RNA (1)...(19): siRNA sense strand
gcacaggcaaccaaugaaa

SEQ ID NO: 1959166 - RNA, 19 nt, Homo sapiens
  misc_RNA (1)...(19): siRNA sense strand
guagaaagcccaggaaaca

SEQ ID NO: 1959167 - RNA, 19 nt, Homo sapiens
  misc_RNA (1)...(19): siRNA sense strand
acaccaggguugaugagua

SEQ ID NO: 1959168 - RNA, 19 nt, Homo sapiens
  misc_RNA (1)...(19): siRNA sense strand
gauaugauuucagaaccaa

SEQ ID NO: 1959169 - RNA, 19 nt, Homo sapiens
  misc_RNA (1)...(19): siRNA sense strand
caccaggguugaugaguau

SEQ ID NO: 1959170 - RNA, 19 nt, Homo sapiens
  misc_RNA (1)...(19): siRNA sense strand
guagaggaaacauucauga

SEQ ID NO: 1959171 - RNA, 19 nt, Homo sapiens
  misc_RNA (1)...(19): siRNA sense strand
gaaagcccgaccagagaaa

SEQ ID NO: 1959172 - RNA, 19 nt, Homo sapiens
  misc_RNA (1)...(19): siRNA sense strand
ugaagacacaccaauuuau

SEQ ID NO: 1959173 - RNA, 19 nt, Homo sapiens
  misc_RNA (1)...(19): siRNA sense strand
gaugccagcguuucuaaga

SEQ ID NO: 1959174 - RNA, 19 nt, Homo sapiens
  misc_RNA (1)...(19): siRNA sense strand
agacaaggauggagaugag

SEQ ID NO: 1959175 - RNA, 19 nt, Homo sapiens
  misc_RNA (1)...(19): siRNA sense strand
ccaggaaacagaauacuca

SEQ ID NO: 1959176 - RNA, 19 nt, Homo sapiens
  misc_RNA (1)...(19): siRNA sense strand
gaaagcccaggaaacagaa

SEQ ID NO: 1959177 - RNA, 19 nt, Homo sapiens
  misc_RNA (1)...(19): siRNA sense strand
ggaugaaaauugcuaugaa

SEQ ID NO: 1959178 - RNA, 19 nt, Homo sapiens
  misc_RNA (1)...(19): siRNA sense strand
ccaucagacuguuuggauu

SEQ ID NO: 1959179 - RNA, 19 nt, Homo sapiens
  misc_RNA (1)...(19): siRNA sense strand
gcaauagaugccagcguuu

SEQ ID NO: 1959180 - RNA, 19 nt, Homo sapiens
  misc_RNA (1)...(19): siRNA sense strand
ggagaugagcaacuacaug

SEQ ID NO: 1959181 - RNA, 19 nt, Homo sapiens
  misc_RNA (1)...(19): siRNA sense strand
ccaggguugaugaguauua

SEQ ID NO: 1959182 - RNA, 19 nt, Homo sapiens
  misc_RNA (1)...(19): siRNA sense strand
uugaagacacaccaauuua

SEQ ID NO: 1959183 - RNA, 19 nt, Homo sapiens
  misc_RNA (1)...(19): siRNA sense strand
ccaccuuaguagacaguuu

SEQ ID NO: 1959184 - RNA, 19 nt, Homo sapiens
  misc_RNA (1)...(19): siRNA sense strand
gaugagcaacuacaugcaa

SEQ ID NO: 1959185 - RNA, 19 nt, Homo sapiens
  misc_RNA (1)...(19): siRNA sense strand
caucagacuguuuggauug

SEQ ID NO: 1959186 - RNA, 19 nt, Homo sapiens
  misc_RNA (1)...(19): siRNA sense strand
ggguugaugaguauuauau

SEQ ID NO: 1959187 - RNA, 19 nt, Homo sapiens
  misc_RNA (1)...(19): siRNA sense strand
ggcaguagaggaaacauuc

SEQ ID NO: 1959188 - RNA, 19 nt, Homo sapiens
  misc_RNA (1)...(19): siRNA sense strand
agaaagcccaggaaacaga

SEQ ID NO: 1959189 - RNA, 19 nt, Homo sapiens
  misc_RNA (1)...(19): siRNA sense strand
gaugauaugauuucagaac

SEQ ID NO: 1959190 - RNA, 19 nt, Homo sapiens
  misc_RNA (1)...(19): siRNA sense strand
uuucagaaccaauggauga

SEQ ID NO: 1959191 - RNA, 19 nt, Homo sapiens
  misc_RNA (1)...(19): siRNA sense strand
gaucccaucagacuguuug

SEQ ID NO: 1959192 - RNA, 19 nt, Homo sapiens
  misc_RNA (1)...(19): siRNA sense strand
agaggaaacauucaugaug

SEQ ID NO: 1959193 - RNA, 19 nt, Homo sapiens
  misc_RNA (1)...(19): siRNA sense strand
ccagaaagccaggcaguag

SEQ ID NO: 1959194 - RNA, 19 nt, Homo sapiens
  misc_RNA (1)...(19): siRNA sense strand
caacuacaugcaauagaug

SEQ ID NO: 1959195 - RNA, 19 nt, Homo sapiens
  misc_RNA (1)...(19): siRNA sense strand
caauauuucccacuaugug

SEQ ID NO: 1959196 - RNA, 19 nt, Homo sapiens
  misc_RNA (1)...(19): siRNA sense strand
ucacuugaucacagcguua

SEQ ID NO: 1959197 - RNA, 19 nt, Homo sapiens
  misc_RNA (1)...(19): siRNA sense strand
gagcaacuacaugcaauag

SEQ ID NO: 1959198 - RNA, 19 nt, Homo sapiens
  misc_RNA (1)...(19): siRNA sense strand
aaagcaacgacaagauaaa

SEQ ID NO: 1959199 - RNA, 19 nt, Homo sapiens
  misc_RNA (1)...(19): siRNA sense strand
caggguugaugaguauuau

SEQ ID NO: 1959200 - RNA, 19 nt, Homo sapiens
  misc_RNA (1)...(19): siRNA sense strand
gugcuacgccucacuugau

SEQ ID NO: 1959201 - RNA, 19 nt, Homo sapiens
  misc_RNA (1)...(19): siRNA sense strand
ugaaagcccgaccagagaa

SEQ ID NO: 1959202 - RNA, 19 nt, Homo sapiens
  misc_RNA (1)...(19): siRNA sense strand
cagaaagccaggcaguaga

SEQ ID NO: 1959203 - RNA, 19 nt, Homo sapiens
  misc_RNA (1)...(19): siRNA sense strand
cagaaccaauggaugaaaa

SEQ ID NO: 1959204 - RNA, 19 nt, Homo sapiens
  misc_RNA (1)...(19): siRNA sense strand
gcaguagaggaaacauuca

SEQ ID NO: 1959205 - RNA, 19 nt, Homo sapiens
  misc_RNA (1)...(19): siRNA sense strand
ugagcaacuacaugcaaua

SEQ ID NO: 1959206 - RNA, 19 nt, Homo sapiens
  misc_RNA (1)...(19): siRNA sense strand
cuucaauauuucccacuau

SEQ ID NO: 1959207 - RNA, 19 nt, Homo sapiens
  misc_RNA (1)...(19): siRNA sense strand
auacucauuucucagacaa

SEQ ID NO: 1959208 - RNA, 19 nt, Homo sapiens
  misc_RNA (1)...(19): siRNA sense strand
ucuucaauauuucccacua

SEQ ID NO: 1959209 - RNA, 19 nt, Homo sapiens
  misc_RNA (1)...(19): siRNA sense strand
cugcacaggcaaccaauga

SEQ ID NO: 1959210 - RNA, 19 nt, Homo sapiens
  misc_RNA (1)...(19): siRNA sense strand
gcuaugaacaaaugaaagc

SEQ ID NO: 1959211 - RNA, 19 nt, Homo sapiens
  misc_RNA (1)...(19): siRNA sense strand
gcaacgacaagauaaaaug

SEQ ID NO: 1959212 - RNA, 19 nt, Homo sapiens
  misc_RNA (1)...(19): siRNA sense strand
ugauaugauuucagaacca

SEQ ID NO: 1959213 - RNA, 19 nt, Homo sapiens
  misc_RNA (1)...(19): siRNA sense strand
caauagaugccagcguuuc

SEQ ID NO: 1959214 - RNA, 19 nt, Homo sapiens
  misc_RNA (1)...(19): siRNA sense strand
gcguagaaagcccaggaaa

SEQ ID NO: 1959215 - RNA, 19 nt, Homo sapiens
  misc_RNA (1)...(19): siRNA sense strand
gaugugcuacgccucacuu

SEQ ID NO: 1959216 - RNA, 19 nt, Homo sapiens
  misc_RNA (1)...(19): siRNA sense strand
gaugaaaauugcuaugaac

SEQ ID NO: 1959217 - RNA, 19 nt, Homo sapiens
  misc_RNA (1)...(19): siRNA sense strand
caaccaaugaaacacagau

SEQ ID NO: 1959218 - RNA, 19 nt, Homo sapiens
  misc_RNA (1)...(19): siRNA sense strand
gaccacaccaggguugaug

SEQ ID NO: 1959219 - RNA, 19 nt, Homo sapiens
  misc_RNA (1)...(19): siRNA sense strand
gauaaaauguacagcuacu

SEQ ID NO: 1959220 - RNA, 19 nt, Homo sapiens
  misc_RNA (1)...(19): siRNA sense strand
uucaauauuucccacuaug

SEQ ID NO: 1959221 - RNA, 19 nt, Homo sapiens
  misc_RNA (1)...(19): siRNA sense strand
ucaauauuucccacuaugu

SEQ ID NO: 1959222 - RNA, 19 nt, Homo sapiens
  misc_RNA (1)...(19): siRNA sense strand
cagacaaggauggagauga

SEQ ID NO: 1959223 - RNA, 19 nt, Homo sapiens
  misc_RNA (1)...(19): siRNA sense strand
gcuuggcuuugguuauauc

SEQ ID NO: 1959224 - RNA, 19 nt, Homo sapiens
  misc_RNA (1)...(19): siRNA sense strand
gauuucagaaccaauggau

SEQ ID NO: 1959225 - RNA, 19 nt, Homo sapiens
  misc_RNA (1)...(19): siRNA sense strand
ggaaaagcaacgacaagau

SEQ ID NO: 1959226 - RNA, 19 nt, Homo sapiens
  misc_RNA (1)...(19): siRNA sense strand
caucugcacaggcaaccaa

SEQ ID NO: 1959227 - RNA, 19 nt, Homo sapiens
  misc_RNA (1)...(19): siRNA sense strand
ucagaaccaauggaugaaa

SEQ ID NO: 1959228 - RNA, 19 nt, Homo sapiens
  misc_RNA (1)...(19): siRNA sense strand
gcaccaugcuggccuguua

SEQ ID NO: 1959229 - RNA, 19 nt, Homo sapiens
  misc_RNA (1)...(19): siRNA sense strand
gagaugccauugcugaaau

SEQ ID NO: 1959230 - RNA, 19 nt, Homo sapiens
  misc_RNA (1)...(19): siRNA sense strand
gaaagcagucuuccaguuc

SEQ ID NO: 1959231 - RNA, 19 nt, Homo sapiens
  misc_RNA (1)...(19): siRNA sense strand
gggcuuggcugcaggagau

SEQ ID NO: 1959232 - RNA, 19 nt, Homo sapiens
  misc_RNA (1)...(19): siRNA sense strand
agaaagcagucuuccaguu

SEQ ID NO: 1959233 - RNA, 19 nt, Homo sapiens
  misc_RNA (1)...(19): siRNA sense strand
ccuguuaccuggugaagga

SEQ ID NO: 1959234 - RNA, 19 nt, Homo sapiens
  misc_RNA (1)...(19): siRNA sense strand
ggagaugccauugcugaaa

SEQ ID NO: 1959235 - RNA, 19 nt, Homo sapiens
  misc_RNA (1)...(19): siRNA sense strand
gcugaaauccgacgacuac

SEQ ID NO: 1959236 - RNA, 19 nt, Homo sapiens
  misc_RNA (1)...(19): siRNA sense strand
ccacuaccaguuccuguug

SEQ ID NO: 1959237 - RNA, 19 nt, Homo sapiens
  misc_RNA (1)...(19): siRNA sense strand
caacuucuccugggugcuu

SEQ ID NO: 1959238 - RNA, 19 nt, Homo sapiens
  misc_RNA (1)...(19): siRNA sense strand
gcaggagaaagcagucuuc

SEQ ID NO: 1959239 - RNA, 19 nt, Homo sapiens
  misc_RNA (1)...(19): siRNA sense strand
ucuaccagcgaacgaaaua

SEQ ID NO: 1959240 - RNA, 19 nt, Homo sapiens
  misc_RNA (1)...(19): siRNA sense strand
aaagcagucuuccaguucu

SEQ ID NO: 1959241 - RNA, 19 nt, Homo sapiens
  misc_RNA (1)...(19): siRNA sense strand
aagcagucuuccaguucua

SEQ ID NO: 1959242 - RNA, 19 nt, Homo sapiens
  misc_RNA (1)...(19): siRNA sense strand
ugaaauccgacgacuacga

SEQ ID NO: 1959243 - RNA, 19 nt, Homo sapiens
  misc_RNA (1)...(19): siRNA sense strand
ccuaugagcaggagaaagc

SEQ ID NO: 1959244 - RNA, 19 nt, Homo sapiens
  misc_RNA (1)...(19): siRNA sense strand
ggacauggcucacagauuu

SEQ ID NO: 1959245 - RNA, 19 nt, Homo sapiens
  misc_RNA (1)...(19): siRNA sense strand
ccaaaggacucucauuuau

SEQ ID NO: 1959246 - RNA, 19 nt, Homo sapiens
  misc_RNA (1)...(19): siRNA sense strand
ggacagaagccuuguacua

SEQ ID NO: 1959247 - RNA, 19 nt, Homo sapiens
  misc_RNA (1)...(19): siRNA sense strand
aaaggacucucauuuauuc

SEQ ID NO: 1959248 - RNA, 19 nt, Homo sapiens
  misc_RNA (1)...(19): siRNA sense strand
gaagaagauuggagagcuu

SEQ ID NO: 1959249 - RNA, 19 nt, Homo sapiens
  misc_RNA (1)...(19): siRNA sense strand
gggaggaaguggugucuga

SEQ ID NO: 1959250 - RNA, 19 nt, Homo sapiens
  misc_RNA (1)...(19): siRNA sense strand
gaaaggcuccuauggcaau

SEQ ID NO: 1959251 - RNA, 19 nt, Homo sapiens
  misc_RNA (1)...(19): siRNA sense strand
caaaggacucucauuuauu

SEQ ID NO: 1959252 - RNA, 19 nt, Homo sapiens
  misc_RNA (1)...(19): siRNA sense strand
gggcuauggugcuggagua

SEQ ID NO: 1959253 - RNA, 19 nt, Homo sapiens
  misc_RNA (1)...(19): siRNA sense strand
gcaucucccuggccuauag

SEQ ID NO: 1959254 - RNA, 19 nt, Homo sapiens
  misc_RNA (1)...(19): siRNA sense strand
caaaugucgcgaugucuuu

SEQ ID NO: 1959255 - RNA, 19 nt, Homo sapiens
  misc_RNA (1)...(19): siRNA sense strand
uccaaaggacucucauuua

SEQ ID NO: 1959256 - RNA, 19 nt, Homo sapiens
  misc_RNA (1)...(19): siRNA sense strand
ggaaguggugucugagcua

SEQ ID NO: 1959257 - RNA, 19 nt, Homo sapiens
  misc_RNA (1)...(19): siRNA sense strand
gcucaggaguacaagaaag

SEQ ID NO: 1959258 - RNA, 19 nt, Homo sapiens
  misc_RNA (1)...(19): siRNA sense strand
gacagaagccuuguacuac

SEQ ID NO: 1959259 - RNA, 19 nt, Homo sapiens
  misc_RNA (1)...(19): siRNA sense strand
ggacucucauuuauuccau

SEQ ID NO: 1959260 - RNA, 19 nt, Homo sapiens
  misc_RNA (1)...(19): siRNA sense strand
guacuacacagaugacaca

SEQ ID NO: 1959261 - RNA, 19 nt, Homo sapiens
  misc_RNA (1)...(19): siRNA sense strand
uccaggaugugcagaaguu

SEQ ID NO: 1959262 - RNA, 19 nt, Homo sapiens
  misc_RNA (1)...(19): siRNA sense strand
gaucccuucugccuucaau

SEQ ID NO: 1959263 - RNA, 19 nt, Homo sapiens
  misc_RNA (1)...(19): siRNA sense strand
ucucauuuauuccaucuca

SEQ ID NO: 1959264 - RNA, 19 nt, Homo sapiens
  misc_RNA (1)...(19): siRNA sense strand
ccaaaugucgcgaugucuu

SEQ ID NO: 1959265 - RNA, 19 nt, Homo sapiens
  misc_RNA (1)...(19): siRNA sense strand
gcgagcacuuucucaagca

SEQ ID NO: 1959266 - RNA, 19 nt, Homo sapiens
  misc_RNA (1)...(19): siRNA sense strand
uucaauagccuccaaagga

SEQ ID NO: 1959267 - RNA, 19 nt, Homo sapiens
  misc_RNA (1)...(19): siRNA sense strand
ccaccgccaucuacugcuu

SEQ ID NO: 1959268 - RNA, 19 nt, Homo sapiens
  misc_RNA (1)...(19): siRNA sense strand
cuccaaaggacucucauuu

SEQ ID NO: 1959269 - RNA, 19 nt, Homo sapiens
  misc_RNA (1)...(19): siRNA sense strand
ugucugagcuagggaaugg

SEQ ID NO: 1959270 - RNA, 19 nt, Homo sapiens
  misc_RNA (1)...(19): siRNA sense strand
cagauuugcucaggaguac

SEQ ID NO: 1959271 - RNA, 19 nt, Homo sapiens
  misc_RNA (1)...(19): siRNA sense strand
gauuugcucaggaguacaa

SEQ ID NO: 1959272 - RNA, 19 nt, Homo sapiens
  misc_RNA (1)...(19): siRNA sense strand
ccagccgccugaagaagau

SEQ ID NO: 1959273 - RNA, 19 nt, Homo sapiens
  misc_RNA (1)...(19): siRNA sense strand
ccagggaguugggcaugga

SEQ ID NO: 1959274 - RNA, 19 nt, Homo sapiens
  misc_RNA (1)...(19): siRNA sense strand
aguagucacugucuucaag

SEQ ID NO: 1959275 - RNA, 19 nt, Homo sapiens
  misc_RNA (1)...(19): siRNA sense strand
ggagccagacccugagauc

SEQ ID NO: 1959276 - RNA, 19 nt, Homo sapiens
  misc_RNA (1)...(19): siRNA sense strand
gugcuggaguagucacugu

SEQ ID NO: 1959277 - RNA, 19 nt, Homo sapiens
  misc_RNA (1)...(19): siRNA sense strand
uaacgggaaaggcuccuau

SEQ ID NO: 1959278 - RNA, 19 nt, Homo sapiens
  misc_RNA (1)...(19): siRNA sense strand
acagauuugcucaggagua

SEQ ID NO: 1959279 - RNA, 19 nt, Homo sapiens
  misc_RNA (1)...(19): siRNA sense strand
cuauggugcuggaguaguc

SEQ ID NO: 1959280 - RNA, 19 nt, Homo sapiens
  misc_RNA (1)...(19): siRNA sense strand
cuauagcaguguccaggau

SEQ ID NO: 1959281 - RNA, 19 nt, Homo sapiens
  misc_RNA (1)...(19): siRNA sense strand
ggaguagucacugucuuca

SEQ ID NO: 1959282 - RNA, 19 nt, Homo sapiens
  misc_RNA (1)...(19): siRNA sense strand
ccagcgagcacuuucucaa

SEQ ID NO: 1959283 - RNA, 19 nt, Homo sapiens
  misc_RNA (1)...(19): siRNA sense strand
cgagcacuuucucaagcaa

SEQ ID NO: 1959284 - RNA, 19 nt, Homo sapiens
  misc_RNA (1)...(19): siRNA sense strand
cgucaguccugcgucaugu

SEQ ID NO: 1959285 - RNA, 19 nt, Homo sapiens
  misc_RNA (1)...(19): siRNA sense strand
gucaugaaguccuuuauua

SEQ ID NO: 1959286 - RNA, 19 nt, Homo sapiens
  misc_RNA (1)...(19): siRNA sense strand
ccacgaugcugacuaagaa

SEQ ID NO: 1959287 - RNA, 19 nt, Homo sapiens
  misc_RNA (1)...(19): siRNA sense strand
cuaagaagcccgaggauaa

SEQ ID NO: 1959288 - RNA, 19 nt, Homo sapiens
  misc_RNA (1)...(19): siRNA sense strand
gaugaggaaucaacaccua

SEQ ID NO: 1959289 - RNA, 19 nt, Homo sapiens
  misc_RNA (1)...(19): siRNA sense strand
caagaagacugccgaagag

SEQ ID NO: 1959290 - RNA, 19 nt, Homo sapiens
  misc_RNA (1)...(19): siRNA sense strand
ccacuggacuuggaggaua

SEQ ID NO: 1959291 - RNA, 19 nt, Homo sapiens
  misc_RNA (1)...(19): siRNA sense strand
gcaaagagccagagcugau

SEQ ID NO: 1959292 - RNA, 19 nt, Homo sapiens
  misc_RNA (1)...(19): siRNA sense strand
uagagaagcuggcuacagu

SEQ ID NO: 1959293 - RNA, 19 nt, Homo sapiens
  misc_RNA (1)...(19): siRNA sense strand
gagaggcuccugaauguug

SEQ ID NO: 1959294 - RNA, 19 nt, Homo sapiens
  misc_RNA (1)...(19): siRNA sense strand
agaagcagauugagcagaa

SEQ ID NO: 1959295 - RNA, 19 nt, Homo sapiens
  misc_RNA (1)...(19): siRNA sense strand
gcaaggacaguguagagaa

SEQ ID NO: 1959296 - RNA, 19 nt, Homo sapiens
  misc_RNA (1)...(19): siRNA sense strand
gcagaaguuugcucagauc

SEQ ID NO: 1959297 - RNA, 19 nt, Homo sapiens
  misc_RNA (1)...(19): siRNA sense strand
cagaagaaccgacggaaga

SEQ ID NO: 1959298 - RNA, 19 nt, Homo sapiens
  misc_RNA (1)...(19): siRNA sense strand
agagggaacuggaggagaa

SEQ ID NO: 1959299 - RNA, 19 nt, Homo sapiens
  misc_RNA (1)...(19): siRNA sense strand
ccaagaagacugccgaaga

SEQ ID NO: 1959300 - RNA, 19 nt, Homo sapiens
  misc_RNA (1)...(19): siRNA sense strand
ccagagaauucagcaaaga

SEQ ID NO: 1959301 - RNA, 19 nt, Homo sapiens
  misc_RNA (1)...(19): siRNA sense strand
ggacuuggaggauaucuuc

SEQ ID NO: 1959302 - RNA, 19 nt, Homo sapiens
  misc_RNA (1)...(19): siRNA sense strand
ucugcaacauggauaauaa

SEQ ID NO: 1959303 - RNA, 19 nt, Homo sapiens
  misc_RNA (1)...(19): siRNA sense strand
agagacggauuucuuaugu

SEQ ID NO: 1959304 - RNA, 19 nt, Homo sapiens
  misc_RNA (1)...(19): siRNA sense strand
gagaagaagaagcagauug

SEQ ID NO: 1959305 - RNA, 19 nt, Homo sapiens
  misc_RNA (1)...(19): siRNA sense strand
agacggauuucuuauguuc

SEQ ID NO: 1959306 - RNA, 19 nt, Homo sapiens
  misc_RNA (1)...(19): siRNA sense strand
ugaaggaggagaagaagaa

SEQ ID NO: 1959307 - RNA, 19 nt, Homo sapiens
  misc_RNA (1)...(19): siRNA sense strand
ggagcuaugugaccagaag

SEQ ID NO: 1959308 - RNA, 19 nt, Homo sapiens
  misc_RNA (1)...(19): siRNA sense strand
gagacggauuucuuauguu

SEQ ID NO: 1959309 - RNA, 19 nt, Homo sapiens
  misc_RNA (1)...(19): siRNA sense strand
agaagaagaagcagauuga

SEQ ID NO: 1959310 - RNA, 19 nt, Homo sapiens
  misc_RNA (1)...(19): siRNA sense strand
ggaccuuucugcacacagu

SEQ ID NO: 1959311 - RNA, 19 nt, Homo sapiens
  misc_RNA (1)...(19): siRNA sense strand
ggaaucaacaccuaagaag

SEQ ID NO: 1959312 - RNA, 19 nt, Homo sapiens
  misc_RNA (1)...(19): siRNA sense strand
uuucuuauguucaggauga

SEQ ID NO: 1959313 - RNA, 19 nt, Homo sapiens
  misc_RNA (1)...(19): siRNA sense strand
caaggacaguguagagaag

SEQ ID NO: 1959314 - RNA, 19 nt, Homo sapiens
  misc_RNA (1)...(19): siRNA sense strand
ggaggaagcgcagcuacaa

SEQ ID NO: 1959315 - RNA, 19 nt, Homo sapiens
  misc_RNA (1)...(19): siRNA sense strand
gagaacaacggaaauaacu

SEQ ID NO: 1959316 - RNA, 19 nt, Homo sapiens
  misc_RNA (1)...(19): siRNA sense strand
accagaagcucauggaguu

SEQ ID NO: 1959317 - RNA, 19 nt, Homo sapiens
  misc_RNA (1)...(19): siRNA sense strand
gaagauggaggagguggaa

SEQ ID NO: 1959318 - RNA, 19 nt, Homo sapiens
  misc_RNA (1)...(19): siRNA sense strand
ggagcucuuuggaaccauu

SEQ ID NO: 1959319 - RNA, 19 nt, Homo sapiens
  misc_RNA (1)...(19): siRNA sense strand
ggaaccagaugcucaugac

SEQ ID NO: 1959320 - RNA, 19 nt, Homo sapiens
  misc_RNA (1)...(19): siRNA sense strand
gaacuggaggagaagaaga

SEQ ID NO: 1959321 - RNA, 19 nt, Homo sapiens
  misc_RNA (1)...(19): siRNA sense strand
gcagauugagcagaaguuu

SEQ ID NO: 1959322 - RNA, 19 nt, Homo sapiens
  misc_RNA (1)...(19): siRNA sense strand
gaagucgaaggccaggaua

SEQ ID NO: 1959323 - RNA, 19 nt, Homo sapiens
  misc_RNA (1)...(19): siRNA sense strand
acacggagauugccaacag

SEQ ID NO: 1959324 - RNA, 19 nt, Homo sapiens
  misc_RNA (1)...(19): siRNA sense strand
cggaagaagagacggauuu

SEQ ID NO: 1959325 - RNA, 19 nt, Homo sapiens
  misc_RNA (1)...(19): siRNA sense strand
agaagaagaagaaggaaga

SEQ ID NO: 1959326 - RNA, 19 nt, Homo sapiens
  misc_RNA (1)...(19): siRNA sense strand
cagaggagaaggccaagaa

SEQ ID NO: 1959327 - RNA, 19 nt, Homo sapiens
  misc_RNA (1)...(19): siRNA sense strand
uggaggaggugaagcugaa

SEQ ID NO: 1959328 - RNA, 19 nt, Homo sapiens
  misc_RNA (1)...(19): siRNA sense strand
caccagagaauucagcaaa

SEQ ID NO: 1959329 - RNA, 19 nt, Homo sapiens
  misc_RNA (1)...(19): siRNA sense strand
ucauggaguuucucugcaa

SEQ ID NO: 1959330 - RNA, 19 nt, Homo sapiens
  misc_RNA (1)...(19): siRNA sense strand
caacaccuaagaagucgaa

SEQ ID NO: 1959331 - RNA, 19 nt, Homo sapiens
  misc_RNA (1)...(19): siRNA sense strand
gaaucaacaccuaagaagu

SEQ ID NO: 1959332 - RNA, 19 nt, Homo sapiens
  misc_RNA (1)...(19): siRNA sense strand
ggcauuggcugcaccuucu

SEQ ID NO: 1959333 - RNA, 19 nt, Homo sapiens
  misc_RNA (1)...(19): siRNA sense strand
ggaagaagagacggauuuc

SEQ ID NO: 1959334 - RNA, 19 nt, Homo sapiens
  misc_RNA (1)...(19): siRNA sense strand
agccagaggucccugagaa

SEQ ID NO: 1959335 - RNA, 19 nt, Homo sapiens
  misc_RNA (1)...(19): siRNA sense strand
gcaacauggauaauaagga

SEQ ID NO: 1959336 - RNA, 19 nt, Homo sapiens
  misc_RNA (1)...(19): siRNA sense strand
caugaaguccuuuauuaag

SEQ ID NO: 1959337 - RNA, 19 nt, Homo sapiens
  misc_RNA (1)...(19): siRNA sense strand
ucgccagccuuuccagauu

SEQ ID NO: 1959338 - RNA, 19 nt, Homo sapiens
  misc_RNA (1)...(19): siRNA sense strand
ccagcaaggcccugaaugu

SEQ ID NO: 1959339 - RNA, 19 nt, Homo sapiens
  misc_RNA (1)...(19): siRNA sense strand
acaagcaggccgugaguga

SEQ ID NO: 1959340 - RNA, 19 nt, Homo sapiens
  misc_RNA (1)...(19): siRNA sense strand
cgucuaagcucaggauugc

SEQ ID NO: 1959341 - RNA, 19 nt, Homo sapiens
  misc_RNA (1)...(19): siRNA sense strand
ccugagaacaacggaaaua

SEQ ID NO: 1959342 - RNA, 19 nt, Homo sapiens
  misc_RNA (1)...(19): siRNA sense strand
agaagguuaucccgcagaa

SEQ ID NO: 1959343 - RNA, 19 nt, Homo sapiens
  misc_RNA (1)...(19): siRNA sense strand
uggaggagaagaagaagaa

SEQ ID NO: 1959344 - RNA, 19 nt, Homo sapiens
  misc_RNA (1)...(19): siRNA sense strand
agacugagaaggccaagga

SEQ ID NO: 1959345 - RNA, 19 nt, Homo sapiens
  misc_RNA (1)...(19): siRNA sense strand
ggguggagcagaugaagga

SEQ ID NO: 1959346 - RNA, 19 nt, Homo sapiens
  misc_RNA (1)...(19): siRNA sense strand
gaagcugaagcgugaggaa

SEQ ID NO: 1959347 - RNA, 19 nt, Homo sapiens
  misc_RNA (1)...(19): siRNA sense strand
aaucaacaccuaagaaguc

SEQ ID NO: 1959348 - RNA, 19 nt, Homo sapiens
  misc_RNA (1)...(19): siRNA sense strand
gaaaacagagaucccauca

SEQ ID NO: 1959349 - RNA, 19 nt, Homo sapiens
  misc_RNA (1)...(19): siRNA sense strand
gcagcgucaugaaguccuu

SEQ ID NO: 1959350 - RNA, 19 nt, Homo sapiens
  misc_RNA (1)...(19): siRNA sense strand
caagacggaccaagcagau

SEQ ID NO: 1959351 - RNA, 19 nt, Homo sapiens
  misc_RNA (1)...(19): siRNA sense strand
gaggaaucaacaccuaaga

SEQ ID NO: 1959352 - RNA, 19 nt, Homo sapiens
  misc_RNA (1)...(19): siRNA sense strand
caaagagccagagcugaug

SEQ ID NO: 1959353 - RNA, 19 nt, Homo sapiens
  misc_RNA (1)...(19): siRNA sense strand
gacgugcagucuccagcuu

SEQ ID NO: 1959354 - RNA, 19 nt, Homo sapiens
  misc_RNA (1)...(19): siRNA sense strand
uugcucagaucgacgagaa

SEQ ID NO: 1959355 - RNA, 19 nt, Homo sapiens
  misc_RNA (1)...(19): siRNA sense strand
cgucaugaaguccuuuauu

SEQ ID NO: 1959356 - RNA, 19 nt, Homo sapiens
  misc_RNA (1)...(19): siRNA sense strand
cauguucaccagagaauuc

SEQ ID NO: 1959357 - RNA, 19 nt, Homo sapiens
  misc_RNA (1)...(19): siRNA sense strand
gcaggaggagcaagagaag

SEQ ID NO: 1959358 - RNA, 19 nt, Homo sapiens
  misc_RNA (1)...(19): siRNA sense strand
gcucagaucgacgagaaga

SEQ ID NO: 1959359 - RNA, 19 nt, Homo sapiens
  misc_RNA (1)...(19): siRNA sense strand
ggagaagaagaagcagauu

SEQ ID NO: 1959360 - RNA, 19 nt, Homo sapiens
  misc_RNA (1)...(19): siRNA sense strand
ggcagcgccuggagaaucu

SEQ ID NO: 1959361 - RNA, 19 nt, Homo sapiens
  misc_RNA (1)...(19): siRNA sense strand
ucagugagcgccagaaugc

SEQ ID NO: 1959362 - RNA, 19 nt, Homo sapiens
  misc_RNA (1)...(19): siRNA sense strand
ccuacagccugaagaagca

SEQ ID NO: 1959363 - RNA, 19 nt, Homo sapiens
  misc_RNA (1)...(19): siRNA sense strand
cagcaaggcccugaaugug

SEQ ID NO: 1959364 - RNA, 19 nt, Homo sapiens
  misc_RNA (1)...(19): siRNA sense strand
ggaggagcaagagaagaaa

SEQ ID NO: 1959365 - RNA, 19 nt, Homo sapiens
  misc_RNA (1)...(19): siRNA sense strand
gaagcagauugagcagaag

SEQ ID NO: 1959366 - RNA, 19 nt, Homo sapiens
  misc_RNA (1)...(19): siRNA sense strand
agcagcaccuggaggauga

SEQ ID NO: 1959367 - RNA, 19 nt, Homo sapiens
  misc_RNA (1)...(19): siRNA sense strand
agagaucccaucaggagaa

SEQ ID NO: 1959368 - RNA, 19 nt, Homo sapiens
  misc_RNA (1)...(19): siRNA sense strand
aggcuaucauucaccagua

SEQ ID NO: 1959369 - RNA, 19 nt, Homo sapiens
  misc_RNA (1)...(19): siRNA sense strand
cucccacgaugcugacuaa

SEQ ID NO: 1959370 - RNA, 19 nt, Homo sapiens
  misc_RNA (1)...(19): siRNA sense strand
agaugaaggaggagaagaa

SEQ ID NO: 1959371 - RNA, 19 nt, Homo sapiens
  misc_RNA (1)...(19): siRNA sense strand
gaaccgacggaagaagaga

SEQ ID NO: 1959372 - RNA, 19 nt, Homo sapiens
  misc_RNA (1)...(19): siRNA sense strand
agaggcuccugaauguuga

SEQ ID NO: 1959373 - RNA, 19 nt, Homo sapiens
  misc_RNA (1)...(19): siRNA sense strand
gaagguuaucccgcagaaa

SEQ ID NO: 1959374 - RNA, 19 nt, Homo sapiens
  misc_RNA (1)...(19): siRNA sense strand
gcgacgacuccaccgauga

SEQ ID NO: 1959375 - RNA, 19 nt, Homo sapiens
  misc_RNA (1)...(19): siRNA sense strand
aggaggagcaagagaagaa

SEQ ID NO: 1959376 - RNA, 19 nt, Homo sapiens
  misc_RNA (1)...(19): siRNA sense strand
ggagaagaagaagaaggaa

SEQ ID NO: 1959377 - RNA, 19 nt, Homo sapiens
  misc_RNA (1)...(19): siRNA sense strand
gggaacuggaggagaagaa

SEQ ID NO: 1959378 - RNA, 19 nt, Homo sapiens
  misc_RNA (1)...(19): siRNA sense strand
gaagaaccgacggaagaag

SEQ ID NO: 1959379 - RNA, 19 nt, Homo sapiens
  misc_RNA (1)...(19): siRNA sense strand
gaagaagaagcagauugag

SEQ ID NO: 1959380 - RNA, 19 nt, Homo sapiens
  misc_RNA (1)...(19): siRNA sense strand
ccacaaugacacggagauu

SEQ ID NO: 1959381 - RNA, 19 nt, Homo sapiens
  misc_RNA (1)...(19): siRNA sense strand
gagaucccaucaggagaag

SEQ ID NO: 1959382 - RNA, 19 nt, Homo sapiens
  misc_RNA (1)...(19): siRNA sense strand
cagaggucccugagaacaa

SEQ ID NO: 1959383 - RNA, 19 nt, Homo sapiens
  misc_RNA (1)...(19): siRNA sense strand
gagcggguggagcagauga

SEQ ID NO: 1959384 - RNA, 19 nt, Homo sapiens
  misc_RNA (1)...(19): siRNA sense strand
gaagguggaggaggacaag

SEQ ID NO: 1959385 - RNA, 19 nt, Homo sapiens
  misc_RNA (1)...(19): siRNA sense strand
gcaaugggcuugaauuaaa

SEQ ID NO: 1959386 - RNA, 19 nt, Homo sapiens
  misc_RNA (1)...(19): siRNA sense strand
gggaaagaaucaaauauug

SEQ ID NO: 1959387 - RNA, 19 nt, Homo sapiens
  misc_RNA (1)...(19): siRNA sense strand
gcgaacaccugggauauuu

SEQ ID NO: 1959388 - RNA, 19 nt, Homo sapiens
  misc_RNA (1)...(19): siRNA sense strand
gaagggaaagaaucaaaua

SEQ ID NO: 1959389 - RNA, 19 nt, Homo sapiens
  misc_RNA (1)...(19): siRNA sense strand
gaagccaucaaguuaauua

SEQ ID NO: 1959390 - RNA, 19 nt, Homo sapiens
  misc_RNA (1)...(19): siRNA sense strand
ggauauugcuuuaacugaa

SEQ ID NO: 1959391 - RNA, 19 nt, Homo sapiens
  misc_RNA (1)...(19): siRNA sense strand
gcuaauacgugcuggaaug

SEQ ID NO: 1959392 - RNA, 19 nt, Homo sapiens
  misc_RNA (1)...(19): siRNA sense strand
gcuggaagccaucaaguua

SEQ ID NO: 1959393 - RNA, 19 nt, Homo sapiens
  misc_RNA (1)...(19): siRNA sense strand
ggaugaagcugugagaguu

SEQ ID NO: 1959394 - RNA, 19 nt, Homo sapiens
  misc_RNA (1)...(19): siRNA sense strand
caacaugguucucuugaag

SEQ ID NO: 1959395 - RNA, 19 nt, Homo sapiens
  misc_RNA (1)...(19): siRNA sense strand
caacugcuguaacaaauca

SEQ ID NO: 1959396 - RNA, 19 nt, Homo sapiens
  misc_RNA (1)...(19): siRNA sense strand
uggaauggauauugcuuua

SEQ ID NO: 1959397 - RNA, 19 nt, Homo sapiens
  misc_RNA (1)...(19): siRNA sense strand
guacagaaacuauuugcaa

SEQ ID NO: 1959398 - RNA, 19 nt, Homo sapiens
  misc_RNA (1)...(19): siRNA sense strand
gaauggauauugcuuuaac

SEQ ID NO: 1959399 - RNA, 19 nt, Homo sapiens
  misc_RNA (1)...(19): siRNA sense strand
ugaaauauauccgggagaa

SEQ ID NO: 1959400 - RNA, 19 nt, Homo sapiens
  misc_RNA (1)...(19): siRNA sense strand
cuaccuggcugauacugua

SEQ ID NO: 1959401 - RNA, 19 nt, Homo sapiens
  misc_RNA (1)...(19): siRNA sense strand
gugcagcgcugucucugaa

SEQ ID NO: 1959402 - RNA, 19 nt, Homo sapiens
  misc_RNA (1)...(19): siRNA sense strand
gcagcgcugucucugaauu

SEQ ID NO: 1959403 - RNA, 19 nt, Homo sapiens
  misc_RNA (1)...(19): siRNA sense strand
gaagucaccaucaccauca

SEQ ID NO: 1959404 - RNA, 19 nt, Homo sapiens
  misc_RNA (1)...(19): siRNA sense strand
ugccugcucugaaucuuua

SEQ ID NO: 1959405 - RNA, 19 nt, Homo sapiens
  misc_RNA (1)...(19): siRNA sense strand
gggcuugaauuaaaugcuu

SEQ ID NO: 1959406 - RNA, 19 nt, Homo sapiens
  misc_RNA (1)...(19): siRNA sense strand
uaacugaaccacugacaau

SEQ ID NO: 1959407 - RNA, 19 nt, Homo sapiens
  misc_RNA (1)...(19): siRNA sense strand
gcacuucagagcaacauga

SEQ ID NO: 1959408 - RNA, 19 nt, Homo sapiens
  misc_RNA (1)...(19): siRNA sense strand
cagcagcgcuuuuggauga

SEQ ID NO: 1959409 - RNA, 19 nt, Homo sapiens
  misc_RNA (1)...(19): siRNA sense strand
ucucugaauuccuugcaua

SEQ ID NO: 1959410 - RNA, 19 nt, Homo sapiens
  misc_RNA (1)...(19): siRNA sense strand
gccaucaaguuaauuagau

SEQ ID NO: 1959411 - RNA, 19 nt, Homo sapiens
  misc_RNA (1)...(19): siRNA sense strand
caaugggcuugaauuaaau

SEQ ID NO: 1959412 - RNA, 19 nt, Homo sapiens
  misc_RNA (1)...(19): siRNA sense strand
cagaaacuauuugcaaaca

SEQ ID NO: 1959413 - RNA, 19 nt, Homo sapiens
  misc_RNA (1)...(19): siRNA sense strand
cgaugcaacugcuguaaca

SEQ ID NO: 1959414 - RNA, 19 nt, Homo sapiens
  misc_RNA (1)...(19): siRNA sense strand
gaaacaacaaacacccauu

SEQ ID NO: 1959415 - RNA, 19 nt, Homo sapiens
  misc_RNA (1)...(19): siRNA sense strand
gaauggcaaugggcuugaa

SEQ ID NO: 1959416 - RNA, 19 nt, Homo sapiens
  misc_RNA (1)...(19): siRNA sense strand
ugcauacugucagauauua

SEQ ID NO: 1959417 - RNA, 19 nt, Homo sapiens
  misc_RNA (1)...(19): siRNA sense strand
gaaccacugacaauggaaa

SEQ ID NO: 1959418 - RNA, 19 nt, Homo sapiens
  misc_RNA (1)...(19): siRNA sense strand
gauauugcuuuaacugaac

SEQ ID NO: 1959419 - RNA, 19 nt, Homo sapiens
  misc_RNA (1)...(19): siRNA sense strand
gcacuacacaucccaacug

SEQ ID NO: 1959420 - RNA, 19 nt, Homo sapiens
  misc_RNA (1)...(19): siRNA sense strand
ugagagagggcuccaauuc

SEQ ID NO: 1959421 - RNA, 19 nt, Homo sapiens
  misc_RNA (1)...(19): siRNA sense strand
aaacaacaaacacccauug

SEQ ID NO: 1959422 - RNA, 19 nt, Homo sapiens
  misc_RNA (1)...(19): siRNA sense strand
gcagcugcguacucucuug

SEQ ID NO: 1959423 - RNA, 19 nt, Homo sapiens
  misc_RNA (1)...(19): siRNA sense strand
caacugggccugaagaacu

SEQ ID NO: 1959424 - RNA, 19 nt, Homo sapiens
  misc_RNA (1)...(19): siRNA sense strand
ugaauuccuugcauacugu

SEQ ID NO: 1959425 - RNA, 19 nt, Homo sapiens
  misc_RNA (1)...(19): siRNA sense strand
ggaaagaaucaaauauugc

SEQ ID NO: 1959426 - RNA, 19 nt, Homo sapiens
  misc_RNA (1)...(19): siRNA sense strand
ggcaaugggcuugaauuaa

SEQ ID NO: 1959427 - RNA, 19 nt, Homo sapiens
  misc_RNA (1)...(19): siRNA sense strand
gaugauugcauauucaaca

SEQ ID NO: 1959428 - RNA, 19 nt, Homo sapiens
  misc_RNA (1)...(19): siRNA sense strand
gaaugaugcggcuucaguu

SEQ ID NO: 1959429 - RNA, 19 nt, Homo sapiens
  misc_RNA (1)...(19): siRNA sense strand
uggcaaugggcuugaauua

SEQ ID NO: 1959430 - RNA, 19 nt, Homo sapiens
  misc_RNA (1)...(19): siRNA sense strand
gcucugaaucuuuaaggaa

SEQ ID NO: 1959431 - RNA, 19 nt, Homo sapiens
  misc_RNA (1)...(19): siRNA sense strand
ggaauggauauugcuuuaa

SEQ ID NO: 1959432 - RNA, 19 nt, Homo sapiens
  misc_RNA (1)...(19): siRNA sense strand
acacauucacuguuuguuu

SEQ ID NO: 1959433 - RNA, 19 nt, Homo sapiens
  misc_RNA (1)...(19): siRNA sense strand
gggcauggaauggauauug

SEQ ID NO: 1959434 - RNA, 19 nt, Homo sapiens
  misc_RNA (1)...(19): siRNA sense strand
uggaagccaucaaguuaau

SEQ ID NO: 1959435 - RNA, 19 nt, Homo sapiens
  misc_RNA (1)...(19): siRNA sense strand
gcaaacauagcagaaguca

SEQ ID NO: 1959436 - RNA, 19 nt, Homo sapiens
  misc_RNA (1)...(19): siRNA sense strand
caacaugucccucaaacac

SEQ ID NO: 1959437 - RNA, 19 nt, Homo sapiens
  misc_RNA (1)...(19): siRNA sense strand
aaacgcaacugggccugaa

SEQ ID NO: 1959438 - RNA, 19 nt, Homo sapiens
  misc_RNA (1)...(19): siRNA sense strand
gccguuauggcccagauua

SEQ ID NO: 1959439 - RNA, 19 nt, Homo sapiens
  misc_RNA (1)...(19): siRNA sense strand
caggagcacugccagaucu

SEQ ID NO: 1959440 - RNA, 19 nt, Homo sapiens
  misc_RNA (1)...(19): siRNA sense strand
cuaagaagggaaagaauca

SEQ ID NO: 1959441 - RNA, 19 nt, Homo sapiens
  misc_RNA (1)...(19): siRNA sense strand
gcuauuggugauccauaua

SEQ ID NO: 1959442 - RNA, 19 nt, Homo sapiens
  misc_RNA (1)...(19): siRNA sense strand
gaaauauauccgggagaaa

SEQ ID NO: 1959443 - RNA, 19 nt, Homo sapiens
  misc_RNA (1)...(19): siRNA sense strand
cuauuugccugcucugaau

SEQ ID NO: 1959444 - RNA, 19 nt, Homo sapiens
  misc_RNA (1)...(19): siRNA sense strand
uaaaugcuucguugucaga

SEQ ID NO: 1959445 - RNA, 19 nt, Homo sapiens
  misc_RNA (1)...(19): siRNA sense strand
guaaaauacuggacaacau

SEQ ID NO: 1959446 - RNA, 19 nt, Homo sapiens
  misc_RNA (1)...(19): siRNA sense strand
gauacuguacagaaacuau

SEQ ID NO: 1959447 - RNA, 19 nt, Homo sapiens
  misc_RNA (1)...(19): siRNA sense strand
gaucucucuucuucauuca

SEQ ID NO: 1959448 - RNA, 19 nt, Homo sapiens
  misc_RNA (1)...(19): siRNA sense strand
gaauuaaaugcuucguugu

SEQ ID NO: 1959449 - RNA, 19 nt, Homo sapiens
  misc_RNA (1)...(19): siRNA sense strand
ggcugauacuguacagaaa

SEQ ID NO: 1959450 - RNA, 19 nt, Homo sapiens
  misc_RNA (1)...(19): siRNA sense strand
ugaugcggcuucaguucuu

SEQ ID NO: 1959451 - RNA, 19 nt, Homo sapiens
  misc_RNA (1)...(19): siRNA sense strand
cuacacaucccaacugucu

SEQ ID NO: 1959452 - RNA, 19 nt, Homo sapiens
  misc_RNA (1)...(19): siRNA sense strand
cacauucacuguuuguuuu

SEQ ID NO: 1959453 - RNA, 19 nt, Homo sapiens
  misc_RNA (1)...(19): siRNA sense strand
guacucucuugccguaugu

SEQ ID NO: 1959454 - RNA, 19 nt, Homo sapiens
  misc_RNA (1)...(19): siRNA sense strand
gagcagcugcguacucucu

SEQ ID NO: 1959455 - RNA, 19 nt, Homo sapiens
  misc_RNA (1)...(19): siRNA sense strand
agaucucucuucuucauuc

SEQ ID NO: 1959456 - RNA, 19 nt, Homo sapiens
  misc_RNA (1)...(19): siRNA sense strand
gcuuuuggaugauugcaua

SEQ ID NO: 1959457 - RNA, 19 nt, Homo sapiens
  misc_RNA (1)...(19): siRNA sense strand
cugaaccacugacaaugga

SEQ ID NO: 1959458 - RNA, 19 nt, Homo sapiens
  misc_RNA (1)...(19): siRNA sense strand
cugaauuccuugcauacug

SEQ ID NO: 1959459 - RNA, 19 nt, Homo sapiens
  misc_RNA (1)...(19): siRNA sense strand
agagaaugcuauuggugau

SEQ ID NO: 1959460 - RNA, 19 nt, Homo sapiens
  misc_RNA (1)...(19): siRNA sense strand
gcugugagaguuccaucaa

SEQ ID NO: 1959461 - RNA, 19 nt, Homo sapiens
  misc_RNA (1)...(19): siRNA sense strand
aaagggagaaagaaugaug

SEQ ID NO: 1959462 - RNA, 19 nt, Homo sapiens
  misc_RNA (1)...(19): siRNA sense strand
uaaaagggagaaagaauga

SEQ ID NO: 1959463 - RNA, 19 nt, Homo sapiens
  misc_RNA (1)...(19): siRNA sense strand
gugagcagcugcguacucu

SEQ ID NO: 1959464 - RNA, 19 nt, Homo sapiens
  misc_RNA (1)...(19): siRNA sense strand
cguacucucuugccguaug

SEQ ID NO: 1959465 - RNA, 19 nt, Homo sapiens
  misc_RNA (1)...(19): siRNA sense strand
ugcaacugcuguaacaaau

SEQ ID NO: 1959466 - RNA, 19 nt, Homo sapiens
  misc_RNA (1)...(19): siRNA sense strand
cuuauuaguuggagauguc

SEQ ID NO: 1959467 - RNA, 19 nt, Homo sapiens
  misc_RNA (1)...(19): siRNA sense strand
aaagaaugaugcggcuuca

SEQ ID NO: 1959468 - RNA, 19 nt, Homo sapiens
  misc_RNA (1)...(19): siRNA sense strand
aagaagggaaagaaucaaa

SEQ ID NO: 1959469 - RNA, 19 nt, Homo sapiens
  misc_RNA (1)...(19): siRNA sense strand
ggccagacgugcacuacac

SEQ ID NO: 1959470 - RNA, 19 nt, Homo sapiens
  misc_RNA (1)...(19): siRNA sense strand
cuauuggugauccauauaa

SEQ ID NO: 1959471 - RNA, 19 nt, Homo sapiens
  misc_RNA (1)...(19): siRNA sense strand
aacaugagguuuuguaaga

SEQ ID NO: 1959472 - RNA, 19 nt, Homo sapiens
  misc_RNA (1)...(19): siRNA sense strand
ggaauggcaaugggcuuga

SEQ ID NO: 1959473 - RNA, 19 nt, Homo sapiens
  misc_RNA (1)...(19): siRNA sense strand
gcaacugcuguaacaaauc

SEQ ID NO: 1959474 - RNA, 19 nt, Homo sapiens
  misc_RNA (1)...(19): siRNA sense strand
ccucagagaaugcuauugg

SEQ ID NO: 1959475 - RNA, 19 nt, Homo sapiens
  misc_RNA (1)...(19): siRNA sense strand
uccaauuccuggcuaauac

SEQ ID NO: 1959476 - RNA, 19 nt, Homo sapiens
  misc_RNA (1)...(19): siRNA sense strand
agagagggcuccaauuccu

SEQ ID NO: 1959477 - RNA, 19 nt, Homo sapiens
  misc_RNA (1)...(19): siRNA sense strand
ggaagccaucaaguuaauu

SEQ ID NO: 1959478 - RNA, 19 nt, Homo sapiens
  misc_RNA (1)...(19): siRNA sense strand
gaaucaaauauugcuguga

SEQ ID NO: 1959479 - RNA, 19 nt, Homo sapiens
  misc_RNA (1)...(19): siRNA sense strand
ggcauggaauggauauugc

SEQ ID NO: 1959480 - RNA, 19 nt, Homo sapiens
  misc_RNA (1)...(19): siRNA sense strand
uggcugauacuguacagaa

SEQ ID NO: 1959481 - RNA, 19 nt, Homo sapiens
  misc_RNA (1)...(19): siRNA sense strand
gaaaaccuaagaagggaaa

SEQ ID NO: 1959482 - RNA, 19 nt, Homo sapiens
  misc_RNA (1)...(19): siRNA sense strand
guugucagaguucgagaaa

SEQ ID NO: 1959483 - RNA, 19 nt, Homo sapiens
  misc_RNA (1)...(19): siRNA sense strand
uagcagaagucaccaucac

SEQ ID NO: 1959484 - RNA, 19 nt, Homo sapiens
  misc_RNA (1)...(19): siRNA sense strand
acagcgaacaccugggaua

SEQ ID NO: 1959485 - RNA, 19 nt, Homo sapiens
  misc_RNA (1)...(19): siRNA sense strand
gcaaagguuucagagauua

SEQ ID NO: 1959486 - RNA, 19 nt, Homo sapiens
  misc_RNA (1)...(19): siRNA sense strand
ucaauccucugaucaaaua

SEQ ID NO: 1959487 - RNA, 19 nt, Homo sapiens
  misc_RNA (1)...(19): siRNA sense strand
cuacagcucuuccaaauau

SEQ ID NO: 1959488 - RNA, 19 nt, Homo sapiens
  misc_RNA (1)...(19): siRNA sense strand
gaagauggaccuagaugaa

SEQ ID NO: 1959489 - RNA, 19 nt, Homo sapiens
  misc_RNA (1)...(19): siRNA sense strand
ccaaggaacuuaagcaaag

SEQ ID NO: 1959490 - RNA, 19 nt, Homo sapiens
  misc_RNA (1)...(19): siRNA sense strand
ggaauucugccuccguuua

SEQ ID NO: 1959491 - RNA, 19 nt, Homo sapiens
  misc_RNA (1)...(19): siRNA sense strand
gaucaugccuaauccacaa

SEQ ID NO: 1959492 - RNA, 19 nt, Homo sapiens
  misc_RNA (1)...(19): siRNA sense strand
ggaccuagaugaagacacu

SEQ ID NO: 1959493 - RNA, 19 nt, Homo sapiens
  misc_RNA (1)...(19): siRNA sense strand
gaacuuaagcaaagguuuc

SEQ ID NO: 1959494 - RNA, 19 nt, Homo sapiens
  misc_RNA (1)...(19): siRNA sense strand
aagcaaagguuucagagau

SEQ ID NO: 1959495 - RNA, 19 nt, Homo sapiens
  misc_RNA (1)...(19): siRNA sense strand
gcagugcaaggaaaucuaa

SEQ ID NO: 1959496 - RNA, 19 nt, Homo sapiens
  misc_RNA (1)...(19): siRNA sense strand
ccuaauccacaacuaaaua

SEQ ID NO: 1959497 - RNA, 19 nt, Homo sapiens
  misc_RNA (1)...(19): siRNA sense strand
gcacagcaaaggcaaggaa

SEQ ID NO: 1959498 - RNA, 19 nt, Homo sapiens
  misc_RNA (1)...(19): siRNA sense strand
uuucagagauuagacugua

SEQ ID NO: 1959499 - RNA, 19 nt, Homo sapiens
  misc_RNA (1)...(19): siRNA sense strand
ucacuuugacaccauauaa

SEQ ID NO: 1959500 - RNA, 19 nt, Homo sapiens
  misc_RNA (1)...(19): siRNA sense strand
gaacaugagcaaggcagaa

SEQ ID NO: 1959501 - RNA, 19 nt, Homo sapiens
  misc_RNA (1)...(19): siRNA sense strand
gaauucugccuccguuuau

SEQ ID NO: 1959502 - RNA, 19 nt, Homo sapiens
  misc_RNA (1)...(19): siRNA sense strand
ggcggaagaugaugagcuu

SEQ ID NO: 1959503 - RNA, 19 nt, Homo sapiens
  misc_RNA (1)...(19): siRNA sense strand
ugaccaauuugacauaugg

SEQ ID NO: 1959504 - RNA, 19 nt, Homo sapiens
  misc_RNA (1)...(19): siRNA sense strand
ggacuuccagcacagcaaa

SEQ ID NO: 1959505 - RNA, 19 nt, Homo sapiens
  misc_RNA (1)...(19): siRNA sense strand
gcacauuagggucacuauu

SEQ ID NO: 1959506 - RNA, 19 nt, Homo sapiens
  misc_RNA (1)...(19): siRNA sense strand
ucagagauuagacuguaua

SEQ ID NO: 1959507 - RNA, 19 nt, Homo sapiens
  misc_RNA (1)...(19): siRNA sense strand
gaacuggaaaagcacauua

SEQ ID NO: 1959508 - RNA, 19 nt, Homo sapiens
  misc_RNA (1)...(19): siRNA sense strand
ccacuggcuuuggaagaaa

SEQ ID NO: 1959509 - RNA, 19 nt, Homo sapiens
  misc_RNA (1)...(19): siRNA sense strand
gaugaagacacugcugaaa

SEQ ID NO: 1959510 - RNA, 19 nt, Homo sapiens
  misc_RNA (1)...(19): siRNA sense strand
agauggaccuagaugaaga

SEQ ID NO: 1959511 - RNA, 19 nt, Homo sapiens
  misc_RNA (1)...(19): siRNA sense strand
cagcucaucuggacaucau

SEQ ID NO: 1959512 - RNA, 19 nt, Homo sapiens
  misc_RNA (1)...(19): siRNA sense strand
guugaugccggcaauauug

SEQ ID NO: 1959513 - RNA, 19 nt, Homo sapiens
  misc_RNA (1)...(19): siRNA sense strand
cagggucucuauuccaaug

SEQ ID NO: 1959514 - RNA, 19 nt, Homo sapiens
  misc_RNA (1)...(19): siRNA sense strand
caaauaugccacugaccuu

SEQ ID NO: 1959515 - RNA, 19 nt, Homo sapiens
  misc_RNA (1)...(19): siRNA sense strand
cugcugaggucaccauugu

SEQ ID NO: 1959516 - RNA, 19 nt, Homo sapiens
  misc_RNA (1)...(19): siRNA sense strand
cccagaagauggaccuaga

SEQ ID NO: 1959517 - RNA, 19 nt, Homo sapiens
  misc_RNA (1)...(19): siRNA sense strand
acauuagggucacuauuca

SEQ ID NO: 1959518 - RNA, 19 nt, Homo sapiens
  misc_RNA (1)...(19): siRNA sense strand
ucucaauccucugaucaaa

SEQ ID NO: 1959519 - RNA, 19 nt, Homo sapiens
  misc_RNA (1)...(19): siRNA sense strand
cacauuagggucacuauuc

SEQ ID NO: 1959520 - RNA, 19 nt, Homo sapiens
  misc_RNA (1)...(19): siRNA sense strand
ucuaaaugcugggaucaug

SEQ ID NO: 1959521 - RNA, 19 nt, Homo sapiens
  misc_RNA (1)...(19): siRNA sense strand
ggaacuuaagcaaagguuu

SEQ ID NO: 1959522 - RNA, 19 nt, Homo sapiens
  misc_RNA (1)...(19): siRNA sense strand
ccucugaucaaauaucuga

SEQ ID NO: 1959523 - RNA, 19 nt, Homo sapiens
  misc_RNA (1)...(19): siRNA sense strand
gaaucucucaauccucuga

SEQ ID NO: 1959524 - RNA, 19 nt, Homo sapiens
  misc_RNA (1)...(19): siRNA sense strand
agcaaagguuucagagauu

SEQ ID NO: 1959525 - RNA, 19 nt, Homo sapiens
  misc_RNA (1)...(19): siRNA sense strand
gcugggaucaugccuaauc

SEQ ID NO: 1959526 - RNA, 19 nt, Homo sapiens
  misc_RNA (1)...(19): siRNA sense strand
cccuacagcucuuccaaau

SEQ ID NO: 1959527 - RNA, 19 nt, Homo sapiens
  misc_RNA (1)...(19): siRNA sense strand
augcugggaucaugccuaa

SEQ ID NO: 1959528 - RNA, 19 nt, Homo sapiens
  misc_RNA (1)...(19): siRNA sense strand
caguggcucaugccuauaa

SEQ ID NO: 1959529 - RNA, 19 nt, Homo sapiens
  misc_RNA (1)...(19): siRNA sense strand
cucaguggcucaugccuau

SEQ ID NO: 1959530 - RNA, 19 nt, Homo sapiens
  misc_RNA (1)...(19): siRNA sense strand
uauauuaugacccagaaga

SEQ ID NO: 1959531 - RNA, 19 nt, Homo sapiens
  misc_RNA (1)...(19): siRNA sense strand
ggcuuuggaagaaauuaua

SEQ ID NO: 1959532 - RNA, 19 nt, Homo sapiens
  misc_RNA (1)...(19): siRNA sense strand
ggagguguuugagaccaau

SEQ ID NO: 1959533 - RNA, 19 nt, Homo sapiens
  misc_RNA (1)...(19): siRNA sense strand
gcauucacuuugacaccau

SEQ ID NO: 1959534 - RNA, 19 nt, Homo sapiens
  misc_RNA (1)...(19): siRNA sense strand
uaagcaaagguuucagaga

SEQ ID NO: 1959535 - RNA, 19 nt, Homo sapiens
  misc_RNA (1)...(19): siRNA sense strand
gagccucuccucugucaca

SEQ ID NO: 1959536 - RNA, 19 nt, Homo sapiens
  misc_RNA (1)...(19): siRNA sense strand
caaccagcagggucucuau

SEQ ID NO: 1959537 - RNA, 19 nt, Homo sapiens
  misc_RNA (1)...(19): siRNA sense strand
cagaagauggaccuagaug

SEQ ID NO: 1959538 - RNA, 19 nt, Homo sapiens
  misc_RNA (1)...(19): siRNA sense strand
caauccaucucagcucauc

SEQ ID NO: 1959539 - RNA, 19 nt, Homo sapiens
  misc_RNA (1)...(19): siRNA sense strand
cauucacuuugacaccaua

SEQ ID NO: 1959540 - RNA, 19 nt, Homo sapiens
  misc_RNA (1)...(19): siRNA sense strand
ccuacagcucuuccaaaua

SEQ ID NO: 1959541 - RNA, 19 nt, Homo sapiens
  misc_RNA (1)...(19): siRNA sense strand
caaggaacuuaagcaaagg

SEQ ID NO: 1959542 - RNA, 19 nt, Homo sapiens
  misc_RNA (1)...(19): siRNA sense strand
ccacaacuaaauaucaaag

SEQ ID NO: 1959543 - RNA, 19 nt, Homo sapiens
  misc_RNA (1)...(19): siRNA sense strand
aauucugccuccguuuaua

SEQ ID NO: 1959544 - RNA, 19 nt, Homo sapiens
  misc_RNA (1)...(19): siRNA sense strand
aaauaugccacugaccuuu

SEQ ID NO: 1959545 - RNA, 19 nt, Homo sapiens
  misc_RNA (1)...(19): siRNA sense strand
agaagauggaccuagauga

SEQ ID NO: 1959546 - RNA, 19 nt, Homo sapiens
  misc_RNA (1)...(19): siRNA sense strand
gagcuucaucuguguuugg

SEQ ID NO: 1959547 - RNA, 19 nt, Homo sapiens
  misc_RNA (1)...(19): siRNA sense strand
ccaauuugacauauggaau

SEQ ID NO: 1959548 - RNA, 19 nt, Homo sapiens
  misc_RNA (1)...(19): siRNA sense strand
gacuucaggagguguuuga

SEQ ID NO: 1959549 - RNA, 19 nt, Homo sapiens
  misc_RNA (1)...(19): siRNA sense strand
aaggaacccuacagcucuu

SEQ ID NO: 1959550 - RNA, 19 nt, Homo sapiens
  misc_RNA (1)...(19): siRNA sense strand
agcagggucucuauuccaa

SEQ ID NO: 1959551 - RNA, 19 nt, Homo sapiens
  misc_RNA (1)...(19): siRNA sense strand
gaaggaaucccaguucuaa

SEQ ID NO: 1959552 - RNA, 19 nt, Homo sapiens
  misc_RNA (1)...(19): siRNA sense strand
gguccaagauguauaauuc

SEQ ID NO: 1959553 - RNA, 19 nt, Homo sapiens
  misc_RNA (1)...(19): siRNA sense strand
ggaagcaacuagcagagaa

SEQ ID NO: 1959554 - RNA, 19 nt, Homo sapiens
  misc_RNA (1)...(19): siRNA sense strand
ggagaggccuuuaccaagu

SEQ ID NO: 1959555 - RNA, 19 nt, Homo sapiens
  misc_RNA (1)...(19): siRNA sense strand
gguccuagauuguggauau

SEQ ID NO: 1959556 - RNA, 19 nt, Homo sapiens
  misc_RNA (1)...(19): siRNA sense strand
gcgcguacuugcuuuguaa

SEQ ID NO: 1959557 - RNA, 19 nt, Homo sapiens
  misc_RNA (1)...(19): siRNA sense strand
ucagaguuguucaguauaa

SEQ ID NO: 1959558 - RNA, 19 nt, Homo sapiens
  misc_RNA (1)...(19): siRNA sense strand
cagauugcuugcagaaaua

SEQ ID NO: 1959559 - RNA, 19 nt, Homo sapiens
  misc_RNA (1)...(19): siRNA sense strand
gaaacugguccaagaugua

SEQ ID NO: 1959560 - RNA, 19 nt, Homo sapiens
  misc_RNA (1)...(19): siRNA sense strand
gagauucaguuguggaaau

SEQ ID NO: 1959561 - RNA, 19 nt, Homo sapiens
  misc_RNA (1)...(19): siRNA sense strand
gaaucccaguucuaaauug

SEQ ID NO: 1959562 - RNA, 19 nt, Homo sapiens
  misc_RNA (1)...(19): siRNA sense strand
gcagagaauuugguaguca

SEQ ID NO: 1959563 - RNA, 19 nt, Homo sapiens
  misc_RNA (1)...(19): siRNA sense strand
ggaauucauccacauacua

SEQ ID NO: 1959564 - RNA, 19 nt, Homo sapiens
  misc_RNA (1)...(19): siRNA sense strand
ugucagaguuguucaguau

SEQ ID NO: 1959565 - RNA, 19 nt, Homo sapiens
  misc_RNA (1)...(19): siRNA sense strand
gcaacuagcagagaauuug

SEQ ID NO: 1959566 - RNA, 19 nt, Homo sapiens
  misc_RNA (1)...(19): siRNA sense strand
gaauucauccacauacuau

SEQ ID NO: 1959567 - RNA, 19 nt, Homo sapiens
  misc_RNA (1)...(19): siRNA sense strand
caggauuucuccacagauu

SEQ ID NO: 1959568 - RNA, 19 nt, Homo sapiens
  misc_RNA (1)...(19): siRNA sense strand
gauguuugaugucgggaaa

SEQ ID NO: 1959569 - RNA, 19 nt, Homo sapiens
  misc_RNA (1)...(19): siRNA sense strand
aaacucaacuauuggaaca

SEQ ID NO: 1959570 - RNA, 19 nt, Homo sapiens
  misc_RNA (1)...(19): siRNA sense strand
uaacccaccuuuggaaaug

SEQ ID NO: 1959571 - RNA, 19 nt, Homo sapiens
  misc_RNA (1)...(19): siRNA sense strand
acagauugcuugcagaaau

SEQ ID NO: 1959572 - RNA, 19 nt, Homo sapiens
  misc_RNA (1)...(19): siRNA sense strand
ggaaucccaguucuaaauu

SEQ ID NO: 1959573 - RNA, 19 nt, Homo sapiens
  misc_RNA (1)...(19): siRNA sense strand
gaucugaagcgaggacuaa

SEQ ID NO: 1959574 - RNA, 19 nt, Homo sapiens
  misc_RNA (1)...(19): siRNA sense strand
uaaaggaauucauccacau

SEQ ID NO: 1959575 - RNA, 19 nt, Homo sapiens
  misc_RNA (1)...(19): siRNA sense strand
gaaucgguauuauguccuu

SEQ ID NO: 1959576 - RNA, 19 nt, Homo sapiens
  misc_RNA (1)...(19): siRNA sense strand
gauuguggauauagggaaa

SEQ ID NO: 1959577 - RNA, 19 nt, Homo sapiens
  misc_RNA (1)...(19): siRNA sense strand
gagaggccuuuaccaagug

SEQ ID NO: 1959578 - RNA, 19 nt, Homo sapiens
  misc_RNA (1)...(19): siRNA sense strand
ggagagaagauuuuacaua

SEQ ID NO: 1959579 - RNA, 19 nt, Homo sapiens
  misc_RNA (1)...(19): siRNA sense strand
gauguauaauuccuagugu

SEQ ID NO: 1959580 - RNA, 19 nt, Homo sapiens
  misc_RNA (1)...(19): siRNA sense strand
ugaacaagauaaugaagag

SEQ ID NO: 1959581 - RNA, 19 nt, Homo sapiens
  misc_RNA (1)...(19): siRNA sense strand
gaagacggcggucgugauc

SEQ ID NO: 1959582 - RNA, 19 nt, Homo sapiens
  misc_RNA (1)...(19): siRNA sense strand
gcacuuggcacuaagacau

SEQ ID NO: 1959583 - RNA, 19 nt, Homo sapiens
  misc_RNA (1)...(19): siRNA sense strand
aggaaaagcucuucacaaa

SEQ ID NO: 1959584 - RNA, 19 nt, Homo sapiens
  misc_RNA (1)...(19): siRNA sense strand
uaucgaaucgguauuaugu

SEQ ID NO: 1959585 - RNA, 19 nt, Homo sapiens
  misc_RNA (1)...(19): siRNA sense strand
cuaauuguguggccugguu

SEQ ID NO: 1959586 - RNA, 19 nt, Homo sapiens
  misc_RNA (1)...(19): siRNA sense strand
cacaaguguugcuaaagaa

SEQ ID NO: 1959587 - RNA, 19 nt, Homo sapiens
  misc_RNA (1)...(19): siRNA sense strand
gguguuacccauauaugaa

SEQ ID NO: 1959588 - RNA, 19 nt, Homo sapiens
  misc_RNA (1)...(19): siRNA sense strand
ccacuuuaauauuggauuc

SEQ ID NO: 1959589 - RNA, 19 nt, Homo sapiens
  misc_RNA (1)...(19): siRNA sense strand
gagaaacugguccaagaug

SEQ ID NO: 1959590 - RNA, 19 nt, Homo sapiens
  misc_RNA (1)...(19): siRNA sense strand
uggaaaugauguuugaugu

SEQ ID NO: 1959591 - RNA, 19 nt, Homo sapiens
  misc_RNA (1)...(19): siRNA sense strand
gccaggauuucuccacaga

SEQ ID NO: 1959592 - RNA, 19 nt, Homo sapiens
  misc_RNA (1)...(19): siRNA sense strand
ucaguugccacuuuaauau

SEQ ID NO: 1959593 - RNA, 19 nt, Homo sapiens
  misc_RNA (1)...(19): siRNA sense strand
gccuaagccugucagaguu

SEQ ID NO: 1959594 - RNA, 19 nt, Homo sapiens
  misc_RNA (1)...(19): siRNA sense strand
caauaacccaccuuuggaa

SEQ ID NO: 1959595 - RNA, 19 nt, Homo sapiens
  misc_RNA (1)...(19): siRNA sense strand
ggagaaacugguccaagau

SEQ ID NO: 1959596 - RNA, 19 nt, Homo sapiens
  misc_RNA (1)...(19): siRNA sense strand
aaaggaauucauccacaua

SEQ ID NO: 1959597 - RNA, 19 nt, Homo sapiens
  misc_RNA (1)...(19): siRNA sense strand
caucuaauggcucuucuga

SEQ ID NO: 1959598 - RNA, 19 nt, Homo sapiens
  misc_RNA (1)...(19): siRNA sense strand
gagccguucuguuucaaag

SEQ ID NO: 1959599 - RNA, 19 nt, Homo sapiens
  misc_RNA (1)...(19): siRNA sense strand
cuugggagccguucuguuu

SEQ ID NO: 1959600 - RNA, 19 nt, Homo sapiens
  misc_RNA (1)...(19): siRNA sense strand
uaaugaagagcaaucaguu

SEQ ID NO: 1959601 - RNA, 19 nt, Homo sapiens
  misc_RNA (1)...(19): siRNA sense strand
acaauguacuguugacaca

SEQ ID NO: 1959602 - RNA, 19 nt, Homo sapiens
  misc_RNA (1)...(19): siRNA sense strand
ucaggcaucuauuggugaa

SEQ ID NO: 1959603 - RNA, 19 nt, Homo sapiens
  misc_RNA (1)...(19): siRNA sense strand
ccacagauugcuugcagaa

SEQ ID NO: 1959604 - RNA, 19 nt, Homo sapiens
  misc_RNA (1)...(19): siRNA sense strand
agaaacugguccaagaugu

SEQ ID NO: 1959605 - RNA, 19 nt, Homo sapiens
  misc_RNA (1)...(19): siRNA sense strand
ucaauaacccaccuuugga

SEQ ID NO: 1959606 - RNA, 19 nt, Homo sapiens
  misc_RNA (1)...(19): siRNA sense strand
uuuggagcauuacaagaua

SEQ ID NO: 1959607 - RNA, 19 nt, Homo sapiens
  misc_RNA (1)...(19): siRNA sense strand
cuucugacgcuuggaauua

SEQ ID NO: 1959608 - RNA, 19 nt, Homo sapiens
  misc_RNA (1)...(19): siRNA sense strand
ugaaggaaucccaguucua

SEQ ID NO: 1959609 - RNA, 19 nt, Homo sapiens
  misc_RNA (1)...(19): siRNA sense strand
ggaaacucaacuauuggaa

SEQ ID NO: 1959610 - RNA, 19 nt, Homo sapiens
  misc_RNA (1)...(19): siRNA sense strand
gccguucuguuucaaagga

SEQ ID NO: 1959611 - RNA, 19 nt, Homo sapiens
  misc_RNA (1)...(19): siRNA sense strand
gacauuaaagcgcguacuu

SEQ ID NO: 1959612 - RNA, 19 nt, Homo sapiens
  misc_RNA (1)...(19): siRNA sense strand
cuuuggaaaugauguuuga

SEQ ID NO: 1959613 - RNA, 19 nt, Homo sapiens
  misc_RNA (1)...(19): siRNA sense strand
ggaaaugauguuugauguc

SEQ ID NO: 1959614 - RNA, 19 nt, Homo sapiens
  misc_RNA (1)...(19): siRNA sense strand
acaagauaaugaagagcaa

SEQ ID NO: 1959615 - RNA, 19 nt, Homo sapiens
  misc_RNA (1)...(19): siRNA sense strand
ccugauugguguucucuca

SEQ ID NO: 1959616 - RNA, 19 nt, Homo sapiens
  misc_RNA (1)...(19): siRNA sense strand
gggaaagccugguguuacc

SEQ ID NO: 1959617 - RNA, 19 nt, Homo sapiens
  misc_RNA (1)...(19): siRNA sense strand
agucauagguggcacuucu

SEQ ID NO: 1959618 - RNA, 19 nt, Homo sapiens
  misc_RNA (1)...(19): siRNA sense strand
gaagcaacuagcagagaau

SEQ ID NO: 1959619 - RNA, 19 nt, Homo sapiens
  misc_RNA (1)...(19): siRNA sense strand
uagggaaagccugguguua

SEQ ID NO: 1959620 - RNA, 19 nt, Homo sapiens
  misc_RNA (1)...(19): siRNA sense strand
aaagagcugggaugccuaa

SEQ ID NO: 1959621 - RNA, 19 nt, Homo sapiens
  misc_RNA (1)...(19): siRNA sense strand
agauucaguuguggaaauu

SEQ ID NO: 1959622 - RNA, 19 nt, Homo sapiens
  misc_RNA (1)...(19): siRNA sense strand
uuagauggagagaagauuu

SEQ ID NO: 1959623 - RNA, 19 nt, Homo sapiens
  misc_RNA (1)...(19): siRNA sense strand
acccauauaugaaggaauc

SEQ ID NO: 1959624 - RNA, 19 nt, Homo sapiens
  misc_RNA (1)...(19): siRNA sense strand
guccuagauuguggauaua

SEQ ID NO: 1959625 - RNA, 19 nt, Homo sapiens
  misc_RNA (1)...(19): siRNA sense strand
ucccaguucuaaauuguug

SEQ ID NO: 1959626 - RNA, 19 nt, Homo sapiens
  misc_RNA (1)...(19): siRNA sense strand
gaccgccgaguugugauua

SEQ ID NO: 1959627 - RNA, 19 nt, Homo sapiens
  misc_RNA (1)...(19): siRNA sense strand
uguauaauuccuaguguga

SEQ ID NO: 1959628 - RNA, 19 nt, Homo sapiens
  misc_RNA (1)...(19): siRNA sense strand
agacggcggucgugaucga

SEQ ID NO: 1959629 - RNA, 19 nt, Homo sapiens
  misc_RNA (1)...(19): siRNA sense strand
aguugccacuuuaauauug

SEQ ID NO: 1959630 - RNA, 19 nt, Homo sapiens
  misc_RNA (1)...(19): siRNA sense strand
gagaagauuuuacauaucc

SEQ ID NO: 1959631 - RNA, 19 nt, Homo sapiens
  misc_RNA (1)...(19): siRNA sense strand
ccaagauguauaauuccua

SEQ ID NO: 1959632 - RNA, 19 nt, Homo sapiens
  misc_RNA (1)...(19): siRNA sense strand
gaauuugguagucauaggu

SEQ ID NO: 1959633 - RNA, 19 nt, Homo sapiens
  misc_RNA (1)...(19): siRNA sense strand
cagagaauuugguagucau

SEQ ID NO: 1959634 - RNA, 19 nt, Homo sapiens
  misc_RNA (1)...(19): siRNA sense strand
uggauuugcuggagaaacu

SEQ ID NO: 1959635 - RNA, 19 nt, Homo sapiens
  misc_RNA (1)...(19): siRNA sense strand
gguuccaucugucuugcuu

SEQ ID NO: 1959636 - RNA, 19 nt, Homo sapiens
  misc_RNA (1)...(19): siRNA sense strand
aaacugguccaagauguau

SEQ ID NO: 1959637 - RNA, 19 nt, Homo sapiens
  misc_RNA (1)...(19): siRNA sense strand
aaucccaguucuaaauugu

SEQ ID NO: 1959638 - RNA, 19 nt, Homo sapiens
  misc_RNA (1)...(19): siRNA sense strand
cuuauacaguguccgauag

SEQ ID NO: 1959639 - RNA, 19 nt, Homo sapiens
  misc_RNA (1)...(19): siRNA sense strand
caaccaccucugaugaaga

SEQ ID NO: 1959640 - RNA, 19 nt, Homo sapiens
  misc_RNA (1)...(19): siRNA sense strand
uagcagagaauuugguagu

SEQ ID NO: 1959641 - RNA, 19 nt, Homo sapiens
  misc_RNA (1)...(19): siRNA sense strand
ucaguuguggaaauucuuu

SEQ ID NO: 1959642 - RNA, 19 nt, Homo sapiens
  misc_RNA (1)...(19): siRNA sense strand
ucaaccaccucugaugaag

SEQ ID NO: 1959643 - RNA, 19 nt, Homo sapiens
  misc_RNA (1)...(19): siRNA sense strand
guguggauuugcuggagaa

SEQ ID NO: 1959644 - RNA, 19 nt, Homo sapiens
  misc_RNA (1)...(19): siRNA sense strand
ugggagccguucuguuuca

SEQ ID NO: 1959645 - RNA, 19 nt, Homo sapiens
  misc_RNA (1)...(19): siRNA sense strand
gagccuucccucagugaug

SEQ ID NO: 1959646 - RNA, 19 nt, Homo sapiens
  misc_RNA (1)...(19): siRNA sense strand
agguggcacuucuauguug

SEQ ID NO: 1959647 - RNA, 19 nt, Homo sapiens
  misc_RNA (1)...(19): siRNA sense strand
ccuuauacaguguccgaua

SEQ ID NO: 1959648 - RNA, 19 nt, Homo sapiens
  misc_RNA (1)...(19): siRNA sense strand
ucagugauggguucaguuc

SEQ ID NO: 1959649 - RNA, 19 nt, Homo sapiens
  misc_RNA (1)...(19): siRNA sense strand
cagaguuguucaguauaau

SEQ ID NO: 1959650 - RNA, 19 nt, Homo sapiens
  misc_RNA (1)...(19): siRNA sense strand
ggauucccuuauacagugu

SEQ ID NO: 1959651 - RNA, 19 nt, Homo sapiens
  misc_RNA (1)...(19): siRNA sense strand
gaacagagagucauaugaa

SEQ ID NO: 1959652 - RNA, 19 nt, Homo sapiens
  misc_RNA (1)...(19): siRNA sense strand
guaaacaaguauggagaua

SEQ ID NO: 1959653 - RNA, 19 nt, Homo sapiens
  misc_RNA (1)...(19): siRNA sense strand
aaauaugacucaaguguga

SEQ ID NO: 1959654 - RNA, 19 nt, Homo sapiens
  misc_RNA (1)...(19): siRNA sense strand
cauagggccugauuacauu

SEQ ID NO: 1959655 - RNA, 19 nt, Homo sapiens
  misc_RNA (1)...(19): siRNA sense strand
caagagaaauucaagaaac

SEQ ID NO: 1959656 - RNA, 19 nt, Homo sapiens
  misc_RNA (1)...(19): siRNA sense strand
uggagaagcuuuacgauca

SEQ ID NO: 1959657 - RNA, 19 nt, Homo sapiens
  misc_RNA (1)...(19): siRNA sense strand
ccauucaguucuucuauga

SEQ ID NO: 1959658 - RNA, 19 nt, Homo sapiens
  misc_RNA (1)...(19): siRNA sense strand
ccacugguauuacugauca

SEQ ID NO: 1959659 - RNA, 19 nt, Homo sapiens
  misc_RNA (1)...(19): siRNA sense strand
guucagaucugugccuuug

SEQ ID NO: 1959660 - RNA, 19 nt, Homo sapiens
  misc_RNA (1)...(19): siRNA sense strand
gaagaaaguccuaaaagaa

SEQ ID NO: 1959661 - RNA, 19 nt, Homo sapiens
  misc_RNA (1)...(19): siRNA sense strand
ccaauuccauucaguucuu

SEQ ID NO: 1959662 - RNA, 19 nt, Homo sapiens
  misc_RNA (1)...(19): siRNA sense strand
cagagagucauaugaagua

SEQ ID NO: 1959663 - RNA, 19 nt, Homo sapiens
  misc_RNA (1)...(19): siRNA sense strand
gaccugaucccaaccuuga

SEQ ID NO: 1959664 - RNA, 19 nt, Homo sapiens
  misc_RNA (1)...(19): siRNA sense strand
ggacaagcacgacgaucuu

SEQ ID NO: 1959665 - RNA, 19 nt, Homo sapiens
  misc_RNA (1)...(19): siRNA sense strand
caagucaucccaaauaugg

SEQ ID NO: 1959666 - RNA, 19 nt, Homo sapiens
  misc_RNA (1)...(19): siRNA sense strand
ggagauacuugggaugagu

SEQ ID NO: 1959667 - RNA, 19 nt, Homo sapiens
  misc_RNA (1)...(19): siRNA sense strand
ggagagucuucgcagaaug

SEQ ID NO: 1959668 - RNA, 19 nt, Homo sapiens
  misc_RNA (1)...(19): siRNA sense strand
gccaagagaaauucaagaa

SEQ ID NO: 1959669 - RNA, 19 nt, Homo sapiens
  misc_RNA (1)...(19): siRNA sense strand
gaauaagaacagagaguca

SEQ ID NO: 1959670 - RNA, 19 nt, Homo sapiens
  misc_RNA (1)...(19): siRNA sense strand
ugaagaaaguccuaaaaga

SEQ ID NO: 1959671 - RNA, 19 nt, Homo sapiens
  misc_RNA (1)...(19): siRNA sense strand
cugauuacauuccaacaga

SEQ ID NO: 1959672 - RNA, 19 nt, Homo sapiens
  misc_RNA (1)...(19): siRNA sense strand
guucuucuaugaaugaauc

SEQ ID NO: 1959673 - RNA, 19 nt, Homo sapiens
  misc_RNA (1)...(19): siRNA sense strand
gaaugcagagguuccaaga

SEQ ID NO: 1959674 - RNA, 19 nt, Homo sapiens
  misc_RNA (1)...(19): siRNA sense strand
ccaagagaaauucaagaaa

SEQ ID NO: 1959675 - RNA, 19 nt, Homo sapiens
  misc_RNA (1)...(19): siRNA sense strand
uuccaucccuaaacuuaua

SEQ ID NO: 1959676 - RNA, 19 nt, Homo sapiens
  misc_RNA (1)...(19): siRNA sense strand
gguuccaucccuaaacuua

SEQ ID NO: 1959677 - RNA, 19 nt, Homo sapiens
  misc_RNA (1)...(19): siRNA sense strand
uuucaagucaucccaaaua

SEQ ID NO: 1959678 - RNA, 19 nt, Homo sapiens
  misc_RNA (1)...(19): siRNA sense strand
gaagucaaaguaaacaagu

SEQ ID NO: 1959679 - RNA, 19 nt, Homo sapiens
  misc_RNA (1)...(19): siRNA sense strand
ccacauagggccugauuac

SEQ ID NO: 1959680 - RNA, 19 nt, Homo sapiens
  misc_RNA (1)...(19): siRNA sense strand
ccugggcacuauuaucaaa

SEQ ID NO: 1959681 - RNA, 19 nt, Homo sapiens
  misc_RNA (1)...(19): siRNA sense strand
uaaggaauaagaacagaga

SEQ ID NO: 1959682 - RNA, 19 nt, Homo sapiens
  misc_RNA (1)...(19): siRNA sense strand
gcagaaugcaaugaugaaa

SEQ ID NO: 1959683 - RNA, 19 nt, Homo sapiens
  misc_RNA (1)...(19): siRNA sense strand
gguauuacugaucauauug

SEQ ID NO: 1959684 - RNA, 19 nt, Homo sapiens
  misc_RNA (1)...(19): siRNA sense strand
gaucccaaccuugaagaaa

SEQ ID NO: 1959685 - RNA, 19 nt, Homo sapiens
  misc_RNA (1)...(19): siRNA sense strand
ggagaagcuuuacgaucag

SEQ ID NO: 1959686 - RNA, 19 nt, Homo sapiens
  misc_RNA (1)...(19): siRNA sense strand
agagucauaugaaguaucu

SEQ ID NO: 1959687 - RNA, 19 nt, Homo sapiens
  misc_RNA (1)...(19): siRNA sense strand
cagcagacaacauagaaau

SEQ ID NO: 1959688 - RNA, 19 nt, Homo sapiens
  misc_RNA (1)...(19): siRNA sense strand
gcacuauuaucaaaaguca

SEQ ID NO: 1959689 - RNA, 19 nt, Homo sapiens
  misc_RNA (1)...(19): siRNA sense strand
gaggaauuaaggaauaaga

SEQ ID NO: 1959690 - RNA, 19 nt, Homo sapiens
  misc_RNA (1)...(19): siRNA sense strand
cauaugaggaauuaaggaa

SEQ ID NO: 1959691 - RNA, 19 nt, Homo sapiens
  misc_RNA (1)...(19): siRNA sense strand
ugggauacuuugcuggaaa

SEQ ID NO: 1959692 - RNA, 19 nt, Homo sapiens
  misc_RNA (1)...(19): siRNA sense strand
ggaauuaaggaauaagaac

SEQ ID NO: 1959693 - RNA, 19 nt, Homo sapiens
  misc_RNA (1)...(19): siRNA sense strand
ucaguucuucuaugaauga

SEQ ID NO: 1959694 - RNA, 19 nt, Homo sapiens
  misc_RNA (1)...(19): siRNA sense strand
gagccaauuccauucaguu

SEQ ID NO: 1959695 - RNA, 19 nt, Homo sapiens
  misc_RNA (1)...(19): siRNA sense strand
gcagcagacaacauagaaa

SEQ ID NO: 1959696 - RNA, 19 nt, Homo sapiens
  misc_RNA (1)...(19): siRNA sense strand
caccaccugggcacuauua

SEQ ID NO: 1959697 - RNA, 19 nt, Homo sapiens
  misc_RNA (1)...(19): siRNA sense strand
caaaguaaacaaguaugga

SEQ ID NO: 1959698 - RNA, 19 nt, Homo sapiens
  misc_RNA (1)...(19): siRNA sense strand
gcagagguuccaagaccaa

SEQ ID NO: 1959699 - RNA, 19 nt, Homo sapiens
  misc_RNA (1)...(19): siRNA sense strand
cccagcagcagacaacaua

SEQ ID NO: 1959700 - RNA, 19 nt, Homo sapiens
  misc_RNA (1)...(19): siRNA sense strand
caccugggcacuauuauca

SEQ ID NO: 1959701 - RNA, 19 nt, Homo sapiens
  misc_RNA (1)...(19): siRNA sense strand
gcagacaacauagaaaugc

SEQ ID NO: 1959702 - RNA, 19 nt, Homo sapiens
  misc_RNA (1)...(19): siRNA sense strand
ggucaaucaucuuuuguga

SEQ ID NO: 1959703 - RNA, 19 nt, Homo sapiens
  misc_RNA (1)...(19): siRNA sense strand
ugaguggucaaucaucuuu

SEQ ID NO: 1959704 - RNA, 19 nt, Homo sapiens
  misc_RNA (1)...(19): siRNA sense strand
gccuuuggcugcaacaagu

SEQ ID NO: 1959705 - RNA, 19 nt, Homo sapiens
  misc_RNA (1)...(19): siRNA sense strand
agaaugcaaugaugaaagc

SEQ ID NO: 1959706 - RNA, 19 nt, Homo sapiens
  misc_RNA (1)...(19): siRNA sense strand
ucaaucaucuuuugugaca

SEQ ID NO: 1959707 - RNA, 19 nt, Homo sapiens
  misc_RNA (1)...(19): siRNA sense strand
auaagaacagagagucaua

SEQ ID NO: 1959708 - RNA, 19 nt, Homo sapiens
  misc_RNA (1)...(19): siRNA sense strand
gagguuccaagaccaauuc

SEQ ID NO: 1959709 - RNA, 19 nt, Homo sapiens
  misc_RNA (1)...(19): siRNA sense strand
gaaucugcucccacuggua

SEQ ID NO: 1959710 - RNA, 19 nt, Homo sapiens
  misc_RNA (1)...(19): siRNA sense strand
caaaauaugacucaagugu

SEQ ID NO: 1959711 - RNA, 19 nt, Homo sapiens
  misc_RNA (1)...(19): siRNA sense strand
uaagaacagagagucauau

SEQ ID NO: 1959712 - RNA, 19 nt, Homo sapiens
  misc_RNA (1)...(19): siRNA sense strand
ucaagucaucccaaauaug

SEQ ID NO: 1959713 - RNA, 19 nt, Homo sapiens
  misc_RNA (1)...(19): siRNA sense strand
cagcagcagacaacauaga

SEQ ID NO: 1959714 - RNA, 19 nt, Homo sapiens
  misc_RNA (1)...(19): siRNA sense strand
acauagggccugauuacau

SEQ ID NO: 1959715 - RNA, 19 nt, Homo sapiens
  misc_RNA (1)...(19): siRNA sense strand
aaggagagucuucgcagaa

SEQ ID NO: 1959716 - RNA, 19 nt, Homo sapiens
  misc_RNA (1)...(19): siRNA sense strand
agaacagagagucauauga

SEQ ID NO: 1959717 - RNA, 19 nt, Homo sapiens
  misc_RNA (1)...(19): siRNA sense strand
uucaagucaucccaaauau

SEQ ID NO: 1959718 - RNA, 19 nt, Homo sapiens
  misc_RNA (1)...(19): siRNA sense strand
cagucaggccuaugcauga

SEQ ID NO: 1959719 - RNA, 19 nt, Homo sapiens
  misc_RNA (1)...(19): siRNA sense strand
auuaugagccaauuccauu

SEQ ID NO: 1959720 - RNA, 19 nt, Homo sapiens
  misc_RNA (1)...(19): siRNA sense strand
ucgcagaaugcaaugauga

SEQ ID NO: 1959721 - RNA, 19 nt, Homo sapiens
  misc_RNA (1)...(19): siRNA sense strand
gggauacuuugcuggaaaa

SEQ ID NO: 1959722 - RNA, 19 nt, Homo sapiens
  misc_RNA (1)...(19): siRNA sense strand
aagugugaguggucaauca

SEQ ID NO: 1959723 - RNA, 19 nt, Homo sapiens
  misc_RNA (1)...(19): siRNA sense strand
ucaaaguaaacaaguaugg

SEQ ID NO: 1959724 - RNA, 19 nt, Homo sapiens
  misc_RNA (1)...(19): siRNA sense strand
cagaaugcaaugaugaaag

SEQ ID NO: 1959725 - RNA, 19 nt, Homo sapiens
  misc_RNA (1)...(19): siRNA sense strand
aaucugcucccacugguau

SEQ ID NO: 1959726 - RNA, 19 nt, Homo sapiens
  misc_RNA (1)...(19): siRNA sense strand
gaggaagaaaggagagucu

SEQ ID NO: 1959727 - RNA, 19 nt, Homo sapiens
  misc_RNA (1)...(19): siRNA sense strand
ucaggccuaugcaugaaag

SEQ ID NO: 1959728 - RNA, 19 nt, Homo sapiens
  misc_RNA (1)...(19): siRNA sense strand
gcuuuacgaucaggacaag

SEQ ID NO: 1959729 - RNA, 19 nt, Homo sapiens
  misc_RNA (1)...(19): siRNA sense strand
agucaggccuaugcaugaa

SEQ ID NO: 1959730 - RNA, 19 nt, Homo sapiens
  misc_RNA (1)...(19): siRNA sense strand
acagagagucauaugaagu

SEQ ID NO: 1959731 - RNA, 19 nt, Homo sapiens
  misc_RNA (1)...(19): siRNA sense strand
uccauucaguucuucuaug

SEQ ID NO: 1959732 - RNA, 19 nt, Homo sapiens
  misc_RNA (1)...(19): siRNA sense strand
gagagucuucgcagaaugc

SEQ ID NO: 1959733 - RNA, 19 nt, Homo sapiens
  misc_RNA (1)...(19): siRNA sense strand
gcauacagcucauguugga

SEQ ID NO: 1959734 - RNA, 19 nt, Homo sapiens
  misc_RNA (1)...(19): siRNA sense strand
ucaguuagcuccauucaga

SEQ ID NO: 1959735 - RNA, 19 nt, Homo sapiens
  misc_RNA (1)...(19): siRNA sense strand
cagaacagccucagccuaa

SEQ ID NO: 1959736 - RNA, 19 nt, Homo sapiens
  misc_RNA (1)...(19): siRNA sense strand
ggagaccuguucaguggaa

SEQ ID NO: 1959737 - RNA, 19 nt, Homo sapiens
  misc_RNA (1)...(19): siRNA sense strand
gaauucaguuagcuccauu

SEQ ID NO: 1959738 - RNA, 19 nt, Homo sapiens
  misc_RNA (1)...(19): siRNA sense strand
gaauucugguuguguuuca

SEQ ID NO: 1959739 - RNA, 19 nt, Homo sapiens
  misc_RNA (1)...(19): siRNA sense strand
uguuucaacugcuguauug

SEQ ID NO: 1959740 - RNA, 19 nt, Homo sapiens
  misc_RNA (1)...(19): siRNA sense strand
ugacagaaguaugauugga

SEQ ID NO: 1959741 - RNA, 19 nt, Homo sapiens
  misc_RNA (1)...(19): siRNA sense strand
gugcauacagcucauguug

SEQ ID NO: 1959742 - RNA, 19 nt, Homo sapiens
  misc_RNA (1)...(19): siRNA sense strand
cggauugacagaaguauga

SEQ ID NO: 1959743 - RNA, 19 nt, Homo sapiens
  misc_RNA (1)...(19): siRNA sense strand
uggaaugccugccaauguc

SEQ ID NO: 1959744 - RNA, 19 nt, Homo sapiens
  misc_RNA (1)...(19): siRNA sense strand
gaacagccucagccuaaaa

SEQ ID NO: 1959745 - RNA, 19 nt, Homo sapiens
  misc_RNA (1)...(19): siRNA sense strand
agaugcagcucguggauac

SEQ ID NO: 1959746 - RNA, 19 nt, Homo sapiens
  misc_RNA (1)...(19): siRNA sense strand
guggaaugccugccaaugu

SEQ ID NO: 1959747 - RNA, 19 nt, Homo sapiens
  misc_RNA (1)...(19): siRNA sense strand
uuggagagcccacaaacuu

SEQ ID NO: 1959748 - RNA, 19 nt, Homo sapiens
  misc_RNA (1)...(19): siRNA sense strand
agaacagccucagccuaaa

SEQ ID NO: 1959749 - RNA, 19 nt, Homo sapiens
  misc_RNA (1)...(19): siRNA sense strand
agaaccaaaugcaguccaa

SEQ ID NO: 1959750 - RNA, 19 nt, Homo sapiens
  misc_RNA (1)...(19): siRNA sense strand
gacggcggauugacagaag

SEQ ID NO: 1959751 - RNA, 19 nt, Homo sapiens
  misc_RNA (1)...(19): siRNA sense strand
uggagagcccacaaacuuu

SEQ ID NO: 1959752 - RNA, 19 nt, Homo sapiens
  misc_RNA (1)...(19): siRNA sense strand
ugaauucaguuagcuccau

SEQ ID NO: 1959753 - RNA, 19 nt, Homo sapiens
  misc_RNA (1)...(19): siRNA sense strand
agugaauucugguuguguu

SEQ ID NO: 1959754 - RNA, 19 nt, Homo sapiens
  misc_RNA (1)...(19): siRNA sense strand
gaccuguucaguggaauga

SEQ ID NO: 1959755 - RNA, 19 nt, Homo sapiens
  misc_RNA (1)...(19): siRNA sense strand
gugaauucugguuguguuu

SEQ ID NO: 1959756 - RNA, 19 nt, Homo sapiens
  misc_RNA (1)...(19): siRNA sense strand
cagaugcagcucguggaua

SEQ ID NO: 1959757 - RNA, 19 nt, Homo sapiens
  misc_RNA (1)...(19): siRNA sense strand
gauugacagaaguaugauu

SEQ ID NO: 1959758 - RNA, 19 nt, Homo sapiens
  misc_RNA (1)...(19): siRNA sense strand
uggauacgaaggcgggaua

SEQ ID NO: 1959759 - RNA, 19 nt, Homo sapiens
  misc_RNA (1)...(19): siRNA sense strand
gcaagaaauucagguauua

SEQ ID NO: 1959760 - RNA, 19 nt, Homo sapiens
  misc_RNA (1)...(19): siRNA sense strand
gagaguagauguucaagaa

SEQ ID NO: 1959761 - RNA, 19 nt, Homo sapiens
  misc_RNA (1)...(19): siRNA sense strand
ugaagaagcuggacacaaa

SEQ ID NO: 1959762 - RNA, 19 nt, Homo sapiens
  misc_RNA (1)...(19): siRNA sense strand
gagaaugcuugaaguauuu

SEQ ID NO: 1959763 - RNA, 19 nt, Homo sapiens
  misc_RNA (1)...(19): siRNA sense strand
uagaagagcugauaauguu

SEQ ID NO: 1959764 - RNA, 19 nt, Homo sapiens
  misc_RNA (1)...(19): siRNA sense strand
gaagaaaggcgaagguuga

SEQ ID NO: 1959765 - RNA, 19 nt, Homo sapiens
  misc_RNA (1)...(19): siRNA sense strand
caaguuggcuuauccagaa

SEQ ID NO: 1959766 - RNA, 19 nt, Homo sapiens
  misc_RNA (1)...(19): siRNA sense strand
ggaguuguaucccgcauuu

SEQ ID NO: 1959767 - RNA, 19 nt, Homo sapiens
  misc_RNA (1)...(19): siRNA sense strand
gaugacaguuugaauguug

SEQ ID NO: 1959768 - RNA, 19 nt, Homo sapiens
  misc_RNA (1)...(19): siRNA sense strand
gcaagaaguucaaggagau

SEQ ID NO: 1959769 - RNA, 19 nt, Homo sapiens
  misc_RNA (1)...(19): siRNA sense strand
gcauacagauggaacagaa

SEQ ID NO: 1959770 - RNA, 19 nt, Homo sapiens
  misc_RNA (1)...(19): siRNA sense strand
ugaagaugcuuaugacaaa

SEQ ID NO: 1959771 - RNA, 19 nt, Homo sapiens
  misc_RNA (1)...(19): siRNA sense strand
ggaugaagcuggcauugau

SEQ ID NO: 1959772 - RNA, 19 nt, Homo sapiens
  misc_RNA (1)...(19): siRNA sense strand
uaaaugaacuacugaaguc

SEQ ID NO: 1959773 - RNA, 19 nt, Homo sapiens
  misc_RNA (1)...(19): siRNA sense strand
ucuaauaucuuccauguca

SEQ ID NO: 1959774 - RNA, 19 nt, Homo sapiens
  misc_RNA (1)...(19): siRNA sense strand
gcacuguuguuaauagaga

SEQ ID NO: 1959775 - RNA, 19 nt, Homo sapiens
  misc_RNA (1)...(19): siRNA sense strand
gcucugaaaugcaacaaug

SEQ ID NO: 1959776 - RNA, 19 nt, Homo sapiens
  misc_RNA (1)...(19): siRNA sense strand
gaagaaagagagaggaaga

SEQ ID NO: 1959777 - RNA, 19 nt, Homo sapiens
  misc_RNA (1)...(19): siRNA sense strand
agacaucuuugguuucuaa

SEQ ID NO: 1959778 - RNA, 19 nt, Homo sapiens
  misc_RNA (1)...(19): siRNA sense strand
ugagaaugcuugaaguauu

SEQ ID NO: 1959779 - RNA, 19 nt, Homo sapiens
  misc_RNA (1)...(19): siRNA sense strand
ugagagacuuacaugcuua

SEQ ID NO: 1959780 - RNA, 19 nt, Homo sapiens
  misc_RNA (1)...(19): siRNA sense strand
ugaaugcacuguuguuaau

SEQ ID NO: 1959781 - RNA, 19 nt, Homo sapiens
  misc_RNA (1)...(19): siRNA sense strand
gaaaagauggauucaguua

SEQ ID NO: 1959782 - RNA, 19 nt, Homo sapiens
  misc_RNA (1)...(19): siRNA sense strand
gaucacagggucuauggua

SEQ ID NO: 1959783 - RNA, 19 nt, Homo sapiens
  misc_RNA (1)...(19): siRNA sense strand
agacuuacaugcuuauuuc

SEQ ID NO: 1959784 - RNA, 19 nt, Homo sapiens
  misc_RNA (1)...(19): siRNA sense strand
gccagaaguucgagaagaa

SEQ ID NO: 1959785 - RNA, 19 nt, Homo sapiens
  misc_RNA (1)...(19): siRNA sense strand
ucacuaauuuccauacaug

SEQ ID NO: 1959786 - RNA, 19 nt, Homo sapiens
  misc_RNA (1)...(19): siRNA sense strand
gaguagauguucaagaaag

SEQ ID NO: 1959787 - RNA, 19 nt, Homo sapiens
  misc_RNA (1)...(19): siRNA sense strand
uuucagagguugauuuaug

SEQ ID NO: 1959788 - RNA, 19 nt, Homo sapiens
  misc_RNA (1)...(19): siRNA sense strand
caacccggcugcucagaug

SEQ ID NO: 1959789 - RNA, 19 nt, Homo sapiens
  misc_RNA (1)...(19): siRNA sense strand
gcaauauuccauccaaaga

SEQ ID NO: 1959790 - RNA, 19 nt, Homo sapiens
  misc_RNA (1)...(19): siRNA sense strand
gaaguucgagaagaauaua

SEQ ID NO: 1959791 - RNA, 19 nt, Homo sapiens
  misc_RNA (1)...(19): siRNA sense strand
ucugagacaucuuugguuu

SEQ ID NO: 1959792 - RNA, 19 nt, Homo sapiens
  misc_RNA (1)...(19): siRNA sense strand
ggauggaucugagagacuu

SEQ ID NO: 1959793 - RNA, 19 nt, Homo sapiens
  misc_RNA (1)...(19): siRNA sense strand
aagcuuccaucaaguauug

SEQ ID NO: 1959794 - RNA, 19 nt, Homo sapiens
  misc_RNA (1)...(19): siRNA sense strand
gcaugaaccugcugaagcu

SEQ ID NO: 1959795 - RNA, 19 nt, Homo sapiens
  misc_RNA (1)...(19): siRNA sense strand
gcagaccauccuguuauua

SEQ ID NO: 1959796 - RNA, 19 nt, Homo sapiens
  misc_RNA (1)...(19): siRNA sense strand
uaaggucacucagcucuau

SEQ ID NO: 1959797 - RNA, 19 nt, Homo sapiens
  misc_RNA (1)...(19): siRNA sense strand
aggaagggcugcuggugua

SEQ ID NO: 1959798 - RNA, 19 nt, Homo sapiens
  misc_RNA (1)...(19): siRNA sense strand
aaacuucucuaugcgauug

SEQ ID NO: 1959799 - RNA, 19 nt, Homo sapiens
  misc_RNA (1)...(19): siRNA sense strand
gagacuuacaugcuuauuu

SEQ ID NO: 1959800 - RNA, 19 nt, Homo sapiens
  misc_RNA (1)...(19): siRNA sense strand
gaagagcuacgaagacgau

SEQ ID NO: 1959801 - RNA, 19 nt, Homo sapiens
  misc_RNA (1)...(19): siRNA sense strand
ggaagaaagaagaaagaga

SEQ ID NO: 1959802 - RNA, 19 nt, Homo sapiens
  misc_RNA (1)...(19): siRNA sense strand
ggucaaagacaaucaucaa

SEQ ID NO: 1959803 - RNA, 19 nt, Homo sapiens
  misc_RNA (1)...(19): siRNA sense strand
cauagaaguuguaggucaa

SEQ ID NO: 1959804 - RNA, 19 nt, Homo sapiens
  misc_RNA (1)...(19): siRNA sense strand
uuacagcauuucagaguau

SEQ ID NO: 1959805 - RNA, 19 nt, Homo sapiens
  misc_RNA (1)...(19): siRNA sense strand
ucaaagacaaucaucaaug

SEQ ID NO: 1959806 - RNA, 19 nt, Homo sapiens
  misc_RNA (1)...(19): siRNA sense strand
guggaaggguucacugaug

SEQ ID NO: 1959807 - RNA, 19 nt, Homo sapiens
  misc_RNA (1)...(19): siRNA sense strand
gccagggccuugccaaugu

SEQ ID NO: 1959808 - RNA, 19 nt, Homo sapiens
  misc_RNA (1)...(19): siRNA sense strand
gagaggcgcagguaguuga

SEQ ID NO: 1959809 - RNA, 19 nt, Homo sapiens
  misc_RNA (1)...(19): siRNA sense strand
gcuaauggccccaaccuua

SEQ ID NO: 1959810 - RNA, 19 nt, Homo sapiens
  misc_RNA (1)...(19): siRNA sense strand
uggaaggguucacugauga

SEQ ID NO: 1959811 - RNA, 19 nt, Homo sapiens
  misc_RNA (1)...(19): siRNA sense strand
cagaccauccuguuauuaa

SEQ ID NO: 1959812 - RNA, 19 nt, Homo sapiens
  misc_RNA (1)...(19): siRNA sense strand
gaagagcugauaauguugu

SEQ ID NO: 1959813 - RNA, 19 nt, Homo sapiens
  misc_RNA (1)...(19): siRNA sense strand
acacaaagcagcagaccaa

SEQ ID NO: 1959814 - RNA, 19 nt, Homo sapiens
  misc_RNA (1)...(19): siRNA sense strand
gaccuuccucucucaguua

SEQ ID NO: 1959815 - RNA, 19 nt, Homo sapiens
  misc_RNA (1)...(19): siRNA sense strand
gguaaggcagcuucuguuu

SEQ ID NO: 1959816 - RNA, 19 nt, Homo sapiens
  misc_RNA (1)...(19): siRNA sense strand
gaucugagagacuuacaug

SEQ ID NO: 1959817 - RNA, 19 nt, Homo sapiens
  misc_RNA (1)...(19): siRNA sense strand
ucaggcuucucuacaguuu

SEQ ID NO: 1959818 - RNA, 19 nt, Homo sapiens
  misc_RNA (1)...(19): siRNA sense strand
ccauugcacuuuacuuaca

SEQ ID NO: 1959819 - RNA, 19 nt, Homo sapiens
  misc_RNA (1)...(19): siRNA sense strand
acagcaagcuuccaucaag

SEQ ID NO: 1959820 - RNA, 19 nt, Homo sapiens
  misc_RNA (1)...(19): siRNA sense strand
gaacagaaaagauggauuc

SEQ ID NO: 1959821 - RNA, 19 nt, Homo sapiens
  misc_RNA (1)...(19): siRNA sense strand
gcaacaaugcauacagaug

SEQ ID NO: 1959822 - RNA, 19 nt, Homo sapiens
  misc_RNA (1)...(19): siRNA sense strand
guauuggaguuacuacuag

SEQ ID NO: 1959823 - RNA, 19 nt, Homo sapiens
  misc_RNA (1)...(19): siRNA sense strand
gaauguugcacuuccaaug

SEQ ID NO: 1959824 - RNA, 19 nt, Homo sapiens
  misc_RNA (1)...(19): siRNA sense strand
gaaagagagaggaagaaag

SEQ ID NO: 1959825 - RNA, 19 nt, Homo sapiens
  misc_RNA (1)...(19): siRNA sense strand
acccugagguguauaagaa

SEQ ID NO: 1959826 - RNA, 19 nt, Homo sapiens
  misc_RNA (1)...(19): siRNA sense strand
ucucuacaguuuagccuuu

SEQ ID NO: 1959827 - RNA, 19 nt, Homo sapiens
  misc_RNA (1)...(19): siRNA sense strand
acagaggaaugccugaaga

SEQ ID NO: 1959828 - RNA, 19 nt, Homo sapiens
  misc_RNA (1)...(19): siRNA sense strand
aaccauugcacuuuacuua

SEQ ID NO: 1959829 - RNA, 19 nt, Homo sapiens
  misc_RNA (1)...(19): siRNA sense strand
gucagugauugaacaaauu

SEQ ID NO: 1959830 - RNA, 19 nt, Homo sapiens
  misc_RNA (1)...(19): siRNA sense strand
aauacuuacuugccuguuu

SEQ ID NO: 1959831 - RNA, 19 nt, Homo sapiens
  misc_RNA (1)...(19): siRNA sense strand
gcagaugcgcagaccguuu

SEQ ID NO: 1959832 - RNA, 19 nt, Homo sapiens
  misc_RNA (1)...(19): siRNA sense strand
gaaugcacuguuguuaaua

SEQ ID NO: 1959833 - RNA, 19 nt, Homo sapiens
  misc_RNA (1)...(19): siRNA sense strand
caaacaaaaugaagacuca

SEQ ID NO: 1959834 - RNA, 19 nt, Homo sapiens
  misc_RNA (1)...(19): siRNA sense strand
ugaaugugccgcuggcuuu

SEQ ID NO: 1959835 - RNA, 19 nt, Homo sapiens
  misc_RNA (1)...(19): siRNA sense strand
uggaaaggcucucuaugag

SEQ ID NO: 1959836 - RNA, 19 nt, Homo sapiens
  misc_RNA (1)...(19): siRNA sense strand
ugccagacauuacuacuuc

SEQ ID NO: 1959837 - RNA, 19 nt, Homo sapiens
  misc_RNA (1)...(19): siRNA sense strand
ggauggaauuaaugucaca

SEQ ID NO: 1959838 - RNA, 19 nt, Homo sapiens
  misc_RNA (1)...(19): siRNA sense strand
ggauucaguuauuuaaggu

SEQ ID NO: 1959839 - RNA, 19 nt, Homo sapiens
  misc_RNA (1)...(19): siRNA sense strand
aagggcugcugguguauuu

SEQ ID NO: 1959840 - RNA, 19 nt, Homo sapiens
  misc_RNA (1)...(19): siRNA sense strand
caaugagaaugcuugaagu

SEQ ID NO: 1959841 - RNA, 19 nt, Homo sapiens
  misc_RNA (1)...(19): siRNA sense strand
ugucagugauugaacaaau

SEQ ID NO: 1959842 - RNA, 19 nt, Homo sapiens
  misc_RNA (1)...(19): siRNA sense strand
agcaagaaauucagguauu

SEQ ID NO: 1959843 - RNA, 19 nt, Homo sapiens
  misc_RNA (1)...(19): siRNA sense strand
uuugcaggcuucuuucuuu

SEQ ID NO: 1959844 - RNA, 19 nt, Homo sapiens
  misc_RNA (1)...(19): siRNA sense strand
caauauuccauccaaagaa

SEQ ID NO: 1959845 - RNA, 19 nt, Homo sapiens
  misc_RNA (1)...(19): siRNA sense strand
gcagauaagcaagaaguuc

SEQ ID NO: 1959846 - RNA, 19 nt, Homo sapiens
  misc_RNA (1)...(19): siRNA sense strand
gagacacgaggagaaauuu

SEQ ID NO: 1959847 - RNA, 19 nt, Homo sapiens
  misc_RNA (1)...(19): siRNA sense strand
ccaaugagaaugcuugaag

SEQ ID NO: 1959848 - RNA, 19 nt, Homo sapiens
  misc_RNA (1)...(19): siRNA sense strand
cgaguucuaugacgagaca

SEQ ID NO: 1959849 - RNA, 19 nt, Homo sapiens
  misc_RNA (1)...(19): siRNA sense strand
ccugagguguauaagaauu

SEQ ID NO: 1959850 - RNA, 19 nt, Homo sapiens
  misc_RNA (1)...(19): siRNA sense strand
gagguugauuuaugcagau

SEQ ID NO: 1959851 - RNA, 19 nt, Homo sapiens
  misc_RNA (1)...(19): siRNA sense strand
gaaaggcgaagguugaaaa

SEQ ID NO: 1959852 - RNA, 19 nt, Homo sapiens
  misc_RNA (1)...(19): siRNA sense strand
cagcaauauuccauccaaa

SEQ ID NO: 1959853 - RNA, 19 nt, Homo sapiens
  misc_RNA (1)...(19): siRNA sense strand
uacgagcccuuucugaaug

SEQ ID NO: 1959854 - RNA, 19 nt, Homo sapiens
  misc_RNA (1)...(19): siRNA sense strand
uaacagcaagcuuccauca

SEQ ID NO: 1959855 - RNA, 19 nt, Homo sapiens
  misc_RNA (1)...(19): siRNA sense strand
cagaaguucgagaagaaua

SEQ ID NO: 1959856 - RNA, 19 nt, Homo sapiens
  misc_RNA (1)...(19): siRNA sense strand
gugcacaaguucccauaag

SEQ ID NO: 1959857 - RNA, 19 nt, Homo sapiens
  misc_RNA (1)...(19): siRNA sense strand
ccagacauguguggagguu

SEQ ID NO: 1959858 - RNA, 19 nt, Homo sapiens
  misc_RNA (1)...(19): siRNA sense strand
cagaaaagauggauucagu

SEQ ID NO: 1959859 - RNA, 19 nt, Homo sapiens
  misc_RNA (1)...(19): siRNA sense strand
gcaaagagcuggagaacuu

SEQ ID NO: 1959860 - RNA, 19 nt, Homo sapiens
  misc_RNA (1)...(19): siRNA sense strand
gggagugccucuucaguua

SEQ ID NO: 1959861 - RNA, 19 nt, Homo sapiens
  misc_RNA (1)...(19): siRNA sense strand
ggagaacuuugauguuuau

SEQ ID NO: 1959862 - RNA, 19 nt, Homo sapiens
  misc_RNA (1)...(19): siRNA sense strand
gaaccugcauauacauuau

SEQ ID NO: 1959863 - RNA, 19 nt, Homo sapiens
  misc_RNA (1)...(19): siRNA sense strand
ccacagcccuuccuucaau

SEQ ID NO: 1959864 - RNA, 19 nt, Homo sapiens
  misc_RNA (1)...(19): siRNA sense strand
ccagaacccugcucgauug

SEQ ID NO: 1959865 - RNA, 19 nt, Homo sapiens
  misc_RNA (1)...(19): siRNA sense strand
ggagaaagaggaaggagaa

SEQ ID NO: 1959866 - RNA, 19 nt, Homo sapiens
  misc_RNA (1)...(19): siRNA sense strand
acaagaaccugcauauaca

SEQ ID NO: 1959867 - RNA, 19 nt, Homo sapiens
  misc_RNA (1)...(19): siRNA sense strand
gggaucagcugaccaugug

SEQ ID NO: 1959868 - RNA, 19 nt, Homo sapiens
  misc_RNA (1)...(19): siRNA sense strand
ggaaggagaagcagucaga

SEQ ID NO: 1959869 - RNA, 19 nt, Homo sapiens
  misc_RNA (1)...(19): siRNA sense strand
acgaggagguugacauuaa

SEQ ID NO: 1959870 - RNA, 19 nt, Homo sapiens
  misc_RNA (1)...(19): siRNA sense strand
uaauggcacucacacauau

SEQ ID NO: 1959871 - RNA, 19 nt, Homo sapiens
  misc_RNA (1)...(19): siRNA sense strand
gaacuuugauguuuauucc

SEQ ID NO: 1959872 - RNA, 19 nt, Homo sapiens
  misc_RNA (1)...(19): siRNA sense strand
ggaaagagucaaccuaaag

SEQ ID NO: 1959873 - RNA, 19 nt, Homo sapiens
  misc_RNA (1)...(19): siRNA sense strand
uggagaacuuugauguuua

SEQ ID NO: 1959874 - RNA, 19 nt, Homo sapiens
  misc_RNA (1)...(19): siRNA sense strand
gcaaguggucacccucaua

SEQ ID NO: 1959875 - RNA, 19 nt, Homo sapiens
  misc_RNA (1)...(19): siRNA sense strand
ggagcaccaucuacucuau

SEQ ID NO: 1959876 - RNA, 19 nt, Homo sapiens
  misc_RNA (1)...(19): siRNA sense strand
ggacgaggagguugacauu

SEQ ID NO: 1959877 - RNA, 19 nt, Homo sapiens
  misc_RNA (1)...(19): siRNA sense strand
uccaauacuuccaaugaua

SEQ ID NO: 1959878 - RNA, 19 nt, Homo sapiens
  misc_RNA (1)...(19): siRNA sense strand
uuacgaagaugucaaggau

SEQ ID NO: 1959879 - RNA, 19 nt, Homo sapiens
  misc_RNA (1)...(19): siRNA sense strand
cuggagaacuuugauguuu

SEQ ID NO: 1959880 - RNA, 19 nt, Homo sapiens
  misc_RNA (1)...(19): siRNA sense strand
gcauacagacgaagguuga

SEQ ID NO: 1959881 - RNA, 19 nt, Homo sapiens
  misc_RNA (1)...(19): siRNA sense strand
gaaagaggaaggagaagca

SEQ ID NO: 1959882 - RNA, 19 nt, Homo sapiens
  misc_RNA (1)...(19): siRNA sense strand
caaccaaacagcauacaga

SEQ ID NO: 1959883 - RNA, 19 nt, Homo sapiens
  misc_RNA (1)...(19): siRNA sense strand
ucuaugaagugauuggaaa

SEQ ID NO: 1959884 - RNA, 19 nt, Homo sapiens
  misc_RNA (1)...(19): siRNA sense strand
ccaaugauagauucaguuu

SEQ ID NO: 1959885 - RNA, 19 nt, Homo sapiens
  misc_RNA (1)...(19): siRNA sense strand
gacgaagguugacagcauu

SEQ ID NO: 1959886 - RNA, 19 nt, Homo sapiens
  misc_RNA (1)...(19): siRNA sense strand
caaacagcauacagacgaa

SEQ ID NO: 1959887 - RNA, 19 nt, Homo sapiens
  misc_RNA (1)...(19): siRNA sense strand
cgaggagguugacauuaau

SEQ ID NO: 1959888 - RNA, 19 nt, Homo sapiens
  misc_RNA (1)...(19): siRNA sense strand
ucacaagaaccugcauaua

SEQ ID NO: 1959889 - RNA, 19 nt, Homo sapiens
  misc_RNA (1)...(19): siRNA sense strand
agacgaagguugacagcau

SEQ ID NO: 1959890 - RNA, 19 nt, Homo sapiens
  misc_RNA (1)...(19): siRNA sense strand
uggaaagagucaaccuaaa

SEQ ID NO: 1959891 - RNA, 19 nt, Homo sapiens
  misc_RNA (1)...(19): siRNA sense strand
cacaagaaccugcauauac

SEQ ID NO: 1959892 - RNA, 19 nt, Homo sapiens
  misc_RNA (1)...(19): siRNA sense strand
caucaggaauucagauuuu

SEQ ID NO: 1959893 - RNA, 19 nt, Homo sapiens
  misc_RNA (1)...(19): siRNA sense strand
gaaucucacucaggacugu

SEQ ID NO: 1959894 - RNA, 19 nt, Homo sapiens
  misc_RNA (1)...(19): siRNA sense strand
gcaggacaguggccucuac

SEQ ID NO: 1959895 - RNA, 19 nt, Homo sapiens
  misc_RNA (1)...(19): siRNA sense strand
acucaggacugucagaaug

SEQ ID NO: 1959896 - RNA, 19 nt, Homo sapiens
  misc_RNA (1)...(19): siRNA sense strand
ggcaauguguccuaugcuu

SEQ ID NO: 1959897 - RNA, 19 nt, Homo sapiens
  misc_RNA (1)...(19): siRNA sense strand
caagguguaucagggcaaa

SEQ ID NO: 1959898 - RNA, 19 nt, Homo sapiens
  misc_RNA (1)...(19): siRNA sense strand
ggaaagccacacccugaau

SEQ ID NO: 1959899 - RNA, 19 nt, Homo sapiens
  misc_RNA (1)...(19): siRNA sense strand
ucacacauauaccugcaau

SEQ ID NO: 1959900 - RNA, 19 nt, Homo sapiens
  misc_RNA (1)...(19): siRNA sense strand
caguauaucuggaaaaguu

SEQ ID NO: 1959901 - RNA, 19 nt, Homo sapiens
  misc_RNA (1)...(19): siRNA sense strand
gaaagccacacccugaauc

SEQ ID NO: 1959902 - RNA, 19 nt, Homo sapiens
  misc_RNA (1)...(19): siRNA sense strand
uuaauggcacucacacaua

SEQ ID NO: 1959903 - RNA, 19 nt, Homo sapiens
  misc_RNA (1)...(19): siRNA sense strand
uggauuucaucacauauug

SEQ ID NO: 1959904 - RNA, 19 nt, Homo sapiens
  misc_RNA (1)...(19): siRNA sense strand
agaaguugcugcccucaca

SEQ ID NO: 1959905 - RNA, 19 nt, Homo sapiens
  misc_RNA (1)...(19): siRNA sense strand
ggaggucaccaguauaucu

SEQ ID NO: 1959906 - RNA, 19 nt, Homo sapiens
  misc_RNA (1)...(19): siRNA sense strand
ucagaaugcccaucaggaa

SEQ ID NO: 1959907 - RNA, 19 nt, Homo sapiens
  misc_RNA (1)...(19): siRNA sense strand
gcucuuugccuuccaauac

SEQ ID NO: 1959908 - RNA, 19 nt, Homo sapiens
  misc_RNA (1)...(19): siRNA sense strand
gaaagagucaaccuaaagc

SEQ ID NO: 1959909 - RNA, 19 nt, Homo sapiens
  misc_RNA (1)...(19): siRNA sense strand
caaaggaugccagggauca

SEQ ID NO: 1959910 - RNA, 19 nt, Homo sapiens
  misc_RNA (1)...(19): siRNA sense strand
aaugucagcaauccuguua

SEQ ID NO: 1959911 - RNA, 19 nt, Homo sapiens
  misc_RNA (1)...(19): siRNA sense strand
ggauggcaauguguccuau

SEQ ID NO: 1959912 - RNA, 19 nt, Homo sapiens
  misc_RNA (1)...(19): siRNA sense strand
ugaagugauuggaaagagu

SEQ ID NO: 1959913 - RNA, 19 nt, Homo sapiens
  misc_RNA (1)...(19): siRNA sense strand
agaaccugcauauacauua

SEQ ID NO: 1959914 - RNA, 19 nt, Homo sapiens
  misc_RNA (1)...(19): siRNA sense strand
ccucuucaguuacaaccaa

SEQ ID NO: 1959915 - RNA, 19 nt, Homo sapiens
  misc_RNA (1)...(19): siRNA sense strand
gagugccucuucaguuaca

SEQ ID NO: 1959916 - RNA, 19 nt, Homo sapiens
  misc_RNA (1)...(19): siRNA sense strand
agaaugcccaucaggaauu

SEQ ID NO: 1959917 - RNA, 19 nt, Homo sapiens
  misc_RNA (1)...(19): siRNA sense strand
gacgaggagguugacauua

SEQ ID NO: 1959918 - RNA, 19 nt, Homo sapiens
  misc_RNA (1)...(19): siRNA sense strand
cacagcccuuccuucaaua

SEQ ID NO: 1959919 - RNA, 19 nt, Homo sapiens
  misc_RNA (1)...(19): siRNA sense strand
gaccagucccaaggaauuu

SEQ ID NO: 1959920 - RNA, 19 nt, Homo sapiens
  misc_RNA (1)...(19): siRNA sense strand
cagcagggaaccucaccua

SEQ ID NO: 1959921 - RNA, 19 nt, Homo sapiens
  misc_RNA (1)...(19): siRNA sense strand
gggaaagccacacccugaa

SEQ ID NO: 1959922 - RNA, 19 nt, Homo sapiens
  misc_RNA (1)...(19): siRNA sense strand
guuacaaccaaacagcaua

SEQ ID NO: 1959923 - RNA, 19 nt, Homo sapiens
  misc_RNA (1)...(19): siRNA sense strand
ggauuucaucacauauuga

SEQ ID NO: 1959924 - RNA, 19 nt, Homo sapiens
  misc_RNA (1)...(19): siRNA sense strand
agaccagucccaaggaauu

SEQ ID NO: 1959925 - RNA, 19 nt, Homo sapiens
  misc_RNA (1)...(19): siRNA sense strand
agagaccagucccaaggaa

SEQ ID NO: 1959926 - RNA, 19 nt, Homo sapiens
  misc_RNA (1)...(19): siRNA sense strand
ccaauacuuccaaugauag

SEQ ID NO: 1959927 - RNA, 19 nt, Homo sapiens
  misc_RNA (1)...(19): siRNA sense strand
gugggagaauggcucuuug

SEQ ID NO: 1959928 - RNA, 19 nt, Homo sapiens
  misc_RNA (1)...(19): siRNA sense strand
gggagcaccaucuacucua

SEQ ID NO: 1959929 - RNA, 19 nt, Homo sapiens
  misc_RNA (1)...(19): siRNA sense strand
acagccacguuccagguuu

SEQ ID NO: 1959930 - RNA, 19 nt, Homo sapiens
  misc_RNA (1)...(19): siRNA sense strand
cuuccaauacuuccaauga

SEQ ID NO: 1959931 - RNA, 19 nt, Homo sapiens
  misc_RNA (1)...(19): siRNA sense strand
gcuggagaacuuugauguu

SEQ ID NO: 1959932 - RNA, 19 nt, Homo sapiens
  misc_RNA (1)...(19): siRNA sense strand
ccaucaggaauucagauuu

SEQ ID NO: 1959933 - RNA, 19 nt, Homo sapiens
  misc_RNA (1)...(19): siRNA sense strand
guccuaugcuugguacaga

SEQ ID NO: 1959934 - RNA, 19 nt, Homo sapiens
  misc_RNA (1)...(19): siRNA sense strand
cagggaaccucaccuaccu

SEQ ID NO: 1959935 - RNA, 19 nt, Homo sapiens
  misc_RNA (1)...(19): siRNA sense strand
gggauggcaauguguccua

SEQ ID NO: 1959936 - RNA, 19 nt, Homo sapiens
  misc_RNA (1)...(19): siRNA sense strand
caaguggucacccucauac

SEQ ID NO: 1959937 - RNA, 19 nt, Homo sapiens
  misc_RNA (1)...(19): siRNA sense strand
uuggaaagagucaaccuaa

SEQ ID NO: 1959938 - RNA, 19 nt, Homo sapiens
  misc_RNA (1)...(19): siRNA sense strand
gcauugcauggaagaaguu

SEQ ID NO: 1959939 - RNA, 19 nt, Homo sapiens
  misc_RNA (1)...(19): siRNA sense strand
gaaguugcugcccucacaa

SEQ ID NO: 1959940 - RNA, 19 nt, Homo sapiens
  misc_RNA (1)...(19): siRNA sense strand
cagaaugcccaucaggaau

SEQ ID NO: 1959941 - RNA, 19 nt, Homo sapiens
  misc_RNA (1)...(19): siRNA sense strand
gaggagguugacauuaaug

SEQ ID NO: 1959942 - RNA, 19 nt, Homo sapiens
  misc_RNA (1)...(19): siRNA sense strand
cccagaacccugcucgauu

SEQ ID NO: 1959943 - RNA, 19 nt, Homo sapiens
  misc_RNA (1)...(19): siRNA sense strand
gagcaccaucuacucuaug

SEQ ID NO: 1959944 - RNA, 19 nt, Homo sapiens
  misc_RNA (1)...(19): siRNA sense strand
gauucuaagcgcacuguuc

SEQ ID NO: 1959945 - RNA, 19 nt, Homo sapiens
  misc_RNA (1)...(19): siRNA sense strand
gaagguugacagcauugca

SEQ ID NO: 1959946 - RNA, 19 nt, Homo sapiens
  misc_RNA (1)...(19): siRNA sense strand
caauacuuccaaugauaga

SEQ ID NO: 1959947 - RNA, 19 nt, Homo sapiens
  misc_RNA (1)...(19): siRNA sense strand
gagcuggagaacuuugaug

SEQ ID NO: 1959948 - RNA, 19 nt, Homo sapiens
  misc_RNA (1)...(19): siRNA sense strand
caagaaccugcauauacau

SEQ ID NO: 1959949 - RNA, 19 nt, Homo sapiens
  misc_RNA (1)...(19): siRNA sense strand
agcaccaucuacucuauga

SEQ ID NO: 1959950 - RNA, 19 nt, Homo sapiens
  misc_RNA (1)...(19): siRNA sense strand
gaggucaccaguauaucug

SEQ ID NO: 1959951 - RNA, 19 nt, Homo sapiens
  misc_RNA (1)...(19): siRNA sense strand
uaccugcaaugucagcaau

SEQ ID NO: 1959952 - RNA, 19 nt, Homo sapiens
  misc_RNA (1)...(19): siRNA sense strand
cuccagggauggcaaugug

SEQ ID NO: 1959953 - RNA, 19 nt, Homo sapiens
  misc_RNA (1)...(19): siRNA sense strand
aaccacagcccuuccuuca

SEQ ID NO: 1959954 - RNA, 19 nt, Homo sapiens
  misc_RNA (1)...(19): siRNA sense strand
cgggagugccucuucaguu

SEQ ID NO: 1959955 - RNA, 19 nt, Homo sapiens
  misc_RNA (1)...(19): siRNA sense strand
caccaucuacucuaugauc

SEQ ID NO: 1959956 - RNA, 19 nt, Homo sapiens
  misc_RNA (1)...(19): siRNA sense strand
gacauuaauggcacucaca

SEQ ID NO: 1959957 - RNA, 19 nt, Homo sapiens
  misc_RNA (1)...(19): siRNA sense strand
gcccagaacccugcucgau

SEQ ID NO: 1959958 - RNA, 19 nt, Homo sapiens
  misc_RNA (1)...(19): siRNA sense strand
gcucccacgucacaagaac

SEQ ID NO: 1959959 - RNA, 19 nt, Homo sapiens
  misc_RNA (1)...(19): siRNA sense strand
gaacauggauccaagaaau

SEQ ID NO: 1959960 - RNA, 19 nt, Homo sapiens
  misc_RNA (1)...(19): siRNA sense strand
caagaaaucucacucuaaa

SEQ ID NO: 1959961 - RNA, 19 nt, Homo sapiens
  misc_RNA (1)...(19): siRNA sense strand
ggaugaagcuauagacaug

SEQ ID NO: 1959962 - RNA, 19 nt, Homo sapiens
  misc_RNA (1)...(19): siRNA sense strand
gaaagcacccucagcauug

SEQ ID NO: 1959963 - RNA, 19 nt, Homo sapiens
  misc_RNA (1)...(19): siRNA sense strand
agaagaagcuggaggcauu

SEQ ID NO: 1959964 - RNA, 19 nt, Homo sapiens
  misc_RNA (1)...(19): siRNA sense strand
gcuauuggcaguucuguua

SEQ ID NO: 1959965 - RNA, 19 nt, Homo sapiens
  misc_RNA (1)...(19): siRNA sense strand
ucaaugguuugccuacuua

SEQ ID NO: 1959966 - RNA, 19 nt, Homo sapiens
  misc_RNA (1)...(19): siRNA sense strand
caaagacuaugagcaguuu

SEQ ID NO: 1959967 - RNA, 19 nt, Homo sapiens
  misc_RNA (1)...(19): siRNA sense strand
gaucagagagugacaguga

SEQ ID NO: 1959968 - RNA, 19 nt, Homo sapiens
  misc_RNA (1)...(19): siRNA sense strand
gcauugauaucugcaguuu

SEQ ID NO: 1959969 - RNA, 19 nt, Homo sapiens
  misc_RNA (1)...(19): siRNA sense strand
ggaaguacuccgcagcuua

SEQ ID NO: 1959970 - RNA, 19 nt, Homo sapiens
  misc_RNA (1)...(19): siRNA sense strand
gaacuuggaagccacugua

SEQ ID NO: 1959971 - RNA, 19 nt, Homo sapiens
  misc_RNA (1)...(19): siRNA sense strand
gcaguucuguuaucaaugg

SEQ ID NO: 1959972 - RNA, 19 nt, Homo sapiens
  misc_RNA (1)...(19): siRNA sense strand
ugacuguucuucugauauu

SEQ ID NO: 1959973 - RNA, 19 nt, Homo sapiens
  misc_RNA (1)...(19): siRNA sense strand
ggaagccacuguauccaau

SEQ ID NO: 1959974 - RNA, 19 nt, Homo sapiens
  misc_RNA (1)...(19): siRNA sense strand
auaaugggcuuucaauaga

SEQ ID NO: 1959975 - RNA, 19 nt, Homo sapiens
  misc_RNA (1)...(19): siRNA sense strand
gcaagaaaaugaugaugaa

SEQ ID NO: 1959976 - RNA, 19 nt, Homo sapiens
  misc_RNA (1)...(19): siRNA sense strand
gcaccaguguaauaaaugu

SEQ ID NO: 1959977 - RNA, 19 nt, Homo sapiens
  misc_RNA (1)...(19): siRNA sense strand
agacaaagcaguaaaggaa

SEQ ID NO: 1959978 - RNA, 19 nt, Homo sapiens
  misc_RNA (1)...(19): siRNA sense strand
cuacugcucucuacauuuc

SEQ ID NO: 1959979 - RNA, 19 nt, Homo sapiens
  misc_RNA (1)...(19): siRNA sense strand
cugcuuagauuguauaugu

SEQ ID NO: 1959980 - RNA, 19 nt, Homo sapiens
  misc_RNA (1)...(19): siRNA sense strand
ccaagaaaucucacucuaa

SEQ ID NO: 1959981 - RNA, 19 nt, Homo sapiens
  misc_RNA (1)...(19): siRNA sense strand
caagccagguauucuuaaa

SEQ ID NO: 1959982 - RNA, 19 nt, Homo sapiens
  misc_RNA (1)...(19): siRNA sense strand
caagcuaguuuaucuccaa

SEQ ID NO: 1959983 - RNA, 19 nt, Homo sapiens
  misc_RNA (1)...(19): siRNA sense strand
gcaaagacuaugagcaguu

SEQ ID NO: 1959984 - RNA, 19 nt, Homo sapiens
  misc_RNA (1)...(19): siRNA sense strand
aaagaaaggguguaaaugu

SEQ ID NO: 1959985 - RNA, 19 nt, Homo sapiens
  misc_RNA (1)...(19): siRNA sense strand
ucucuuagccauaauguuu

SEQ ID NO: 1959986 - RNA, 19 nt, Homo sapiens
  misc_RNA (1)...(19): siRNA sense strand
gaacauucaaauacgauug

SEQ ID NO: 1959987 - RNA, 19 nt, Homo sapiens
  misc_RNA (1)...(19): siRNA sense strand
guucagccacuuccaauuu

SEQ ID NO: 1959988 - RNA, 19 nt, Homo sapiens
  misc_RNA (1)...(19): siRNA sense strand
aaacugaggaucugucuga

SEQ ID NO: 1959989 - RNA, 19 nt, Homo sapiens
  misc_RNA (1)...(19): siRNA sense strand
cagcaccaguguaauaaau

SEQ ID NO: 1959990 - RNA, 19 nt, Homo sapiens
  misc_RNA (1)...(19): siRNA sense strand
gacaugagauucgacuguu

SEQ ID NO: 1959991 - RNA, 19 nt, Homo sapiens
  misc_RNA (1)...(19): siRNA sense strand
cuuccaauuucuaccauua

SEQ ID NO: 1959992 - RNA, 19 nt, Homo sapiens
  misc_RNA (1)...(19): siRNA sense strand
caguacacaugaugauaaa

SEQ ID NO: 1959993 - RNA, 19 nt, Homo sapiens
  misc_RNA (1)...(19): siRNA sense strand
ccaguacacaugaugauaa

SEQ ID NO: 1959994 - RNA, 19 nt, Homo sapiens
  misc_RNA (1)...(19): siRNA sense strand
gaaaagaaaggguguaaau

SEQ ID NO: 1959995 - RNA, 19 nt, Homo sapiens
  misc_RNA (1)...(19): siRNA sense strand
gcuacaagauccuauugca

SEQ ID NO: 1959996 - RNA, 19 nt, Homo sapiens
  misc_RNA (1)...(19): siRNA sense strand
gaaguacuccgcagcuuag

SEQ ID NO: 1959997 - RNA, 19 nt, Homo sapiens
  misc_RNA (1)...(19): siRNA sense strand
ccacaggcauugauaucug

SEQ ID NO: 1959998 - RNA, 19 nt, Homo sapiens
  misc_RNA (1)...(19): siRNA sense strand
gcuaguuuaucuccaaugu

SEQ ID NO: 1959999 - RNA, 19 nt, Homo sapiens
  misc_RNA (1)...(19): siRNA sense strand
ugaaagcacccucagcauu

SEQ ID NO: 1960000 - RNA, 19 nt, Homo sapiens
  misc_RNA (1)...(19): siRNA sense strand
gcauuaacgugacuagcau

SEQ ID NO: 1960001 - RNA, 19 nt, Homo sapiens
  misc_RNA (1)...(19): siRNA sense strand
aagaaaggguguaaaugug

SEQ ID NO: 1960002 - RNA, 19 nt, Homo sapiens
  misc_RNA (1)...(19): siRNA sense strand
guacuccgcagcuuagaaa

SEQ ID NO: 1960003 - RNA, 19 nt, Homo sapiens
  misc_RNA (1)...(19): siRNA sense strand
uauaaugggcuuucaauag

SEQ ID NO: 1960004 - RNA, 19 nt, Homo sapiens
  misc_RNA (1)...(19): siRNA sense strand
uaccaagacuguguacaaa

SEQ ID NO: 1960005 - RNA, 19 nt, Homo sapiens
  misc_RNA (1)...(19): siRNA sense strand
gaguauauaacacagacua

SEQ ID NO: 1960006 - RNA, 19 nt, Homo sapiens
  misc_RNA (1)...(19): siRNA sense strand
acaugagauucgacuguua

SEQ ID NO: 1960007 - RNA, 19 nt, Homo sapiens
  misc_RNA (1)...(19): siRNA sense strand
ccaaggcguuuacugagau

SEQ ID NO: 1960008 - RNA, 19 nt, Homo sapiens
  misc_RNA (1)...(19): siRNA sense strand
uauagcaacuguucccaau

SEQ ID NO: 1960009 - RNA, 19 nt, Homo sapiens
  misc_RNA (1)...(19): siRNA sense strand
guucuguuaucaaugguuu

SEQ ID NO: 1960010 - RNA, 19 nt, Homo sapiens
  misc_RNA (1)...(19): siRNA sense strand
ucagauucauccuuuacuu

SEQ ID NO: 1960011 - RNA, 19 nt, Homo sapiens
  misc_RNA (1)...(19): siRNA sense strand
uaccagcaccaguguaaua

SEQ ID NO: 1960012 - RNA, 19 nt, Homo sapiens
  misc_RNA (1)...(19): siRNA sense strand
gcggacauuugcuacaaga

SEQ ID NO: 1960013 - RNA, 19 nt, Homo sapiens
  misc_RNA (1)...(19): siRNA sense strand
gcaguuaagcauccuagug

SEQ ID NO: 1960014 - RNA, 19 nt, Homo sapiens
  misc_RNA (1)...(19): siRNA sense strand
ggacauuugcuacaagauc

SEQ ID NO: 1960015 - RNA, 19 nt, Homo sapiens
  misc_RNA (1)...(19): siRNA sense strand
uagcaacuguucccaaugg

SEQ ID NO: 1960016 - RNA, 19 nt, Homo sapiens
  misc_RNA (1)...(19): siRNA sense strand
ggauauaauagaagcaguu

SEQ ID NO: 1960017 - RNA, 19 nt, Homo sapiens
  misc_RNA (1)...(19): siRNA sense strand
aaguuuggaugaagcuaua

SEQ ID NO: 1960018 - RNA, 19 nt, Homo sapiens
  misc_RNA (1)...(19): siRNA sense strand
gaggucuguugcccuaauu

SEQ ID NO: 1960019 - RNA, 19 nt, Homo sapiens
  misc_RNA (1)...(19): siRNA sense strand
guugacuguucuucugaua

SEQ ID NO: 1960020 - RNA, 19 nt, Homo sapiens
  misc_RNA (1)...(19): siRNA sense strand
ggcacgggauauaauagaa

SEQ ID NO: 1960021 - RNA, 19 nt, Homo sapiens
  misc_RNA (1)...(19): siRNA sense strand
gaagaagcuggaggcauuu

SEQ ID NO: 1960022 - RNA, 19 nt, Homo sapiens
  misc_RNA (1)...(19): siRNA sense strand
uccaagaaaucucacucua

SEQ ID NO: 1960023 - RNA, 19 nt, Homo sapiens
  misc_RNA (1)...(19): siRNA sense strand
gagcaaaauuucucuucaa

SEQ ID NO: 1960024 - RNA, 19 nt, Homo sapiens
  misc_RNA (1)...(19): siRNA sense strand
auugauaucugcaguuuca

SEQ ID NO: 1960025 - RNA, 19 nt, Homo sapiens
  misc_RNA (1)...(19): siRNA sense strand
aaugggcuuucaauagaua

SEQ ID NO: 1960026 - RNA, 19 nt, Homo sapiens
  misc_RNA (1)...(19): siRNA sense strand
caguuaagcauccuaguga

SEQ ID NO: 1960027 - RNA, 19 nt, Homo sapiens
  misc_RNA (1)...(19): siRNA sense strand
caugagauucgacuguuaa

SEQ ID NO: 1960028 - RNA, 19 nt, Homo sapiens
  misc_RNA (1)...(19): siRNA sense strand
gcauuugccgugccagaaa

SEQ ID NO: 1960029 - RNA, 19 nt, Homo sapiens
  misc_RNA (1)...(19): siRNA sense strand
acgauugacguauguaaua

SEQ ID NO: 1960030 - RNA, 19 nt, Homo sapiens
  misc_RNA (1)...(19): siRNA sense strand
cuagugaacugcuacaaaa

SEQ ID NO: 1960031 - RNA, 19 nt, Homo sapiens
  misc_RNA (1)...(19): siRNA sense strand
cagauucauccuuuacuuu

SEQ ID NO: 1960032 - RNA, 19 nt, Homo sapiens
  misc_RNA (1)...(19): siRNA sense strand
gaaugcuacugcucucuac

SEQ ID NO: 1960033 - RNA, 19 nt, Homo sapiens
  misc_RNA (1)...(19): siRNA sense strand
caaccuauagcaacuguuc

SEQ ID NO: 1960034 - RNA, 19 nt, Homo sapiens
  misc_RNA (1)...(19): siRNA sense strand
uggcaguucuguuaucaau

SEQ ID NO: 1960035 - RNA, 19 nt, Homo sapiens
  misc_RNA (1)...(19): siRNA sense strand
uaguuuaucuccaaugucu

SEQ ID NO: 1960036 - RNA, 19 nt, Homo sapiens
  misc_RNA (1)...(19): siRNA sense strand
gacaaagcaguaaaggaaa

SEQ ID NO: 1960037 - RNA, 19 nt, Homo sapiens
  misc_RNA (1)...(19): siRNA sense strand
caacuccgaagauagcaaa

SEQ ID NO: 1960038 - RNA, 19 nt, Homo sapiens
  misc_RNA (1)...(19): siRNA sense strand
cccagucucuuagccauaa

SEQ ID NO: 1960039 - RNA, 19 nt, Homo sapiens
  misc_RNA (1)...(19): siRNA sense strand
gcauugcuauuggcaguuc

SEQ ID NO: 1960040 - RNA, 19 nt, Homo sapiens
  misc_RNA (1)...(19): siRNA sense strand
gagugacagugagaaaguu

SEQ ID NO: 1960041 - RNA, 19 nt, Homo sapiens
  misc_RNA (1)...(19): siRNA sense strand
cuaccaagacuguguacaa

SEQ ID NO: 1960042 - RNA, 19 nt, Homo sapiens
  misc_RNA (1)...(19): siRNA sense strand
gaaaagauuccuagucauc

SEQ ID NO: 1960043 - RNA, 19 nt, Homo sapiens
  misc_RNA (1)...(19): siRNA sense strand
gauucauccuuuacuuugu

SEQ ID NO: 1960044 - RNA, 19 nt, Homo sapiens
  misc_RNA (1)...(19): siRNA sense strand
gcagcuuucuucccagucu

SEQ ID NO: 1960045 - RNA, 19 nt, Homo sapiens
  misc_RNA (1)...(19): siRNA sense strand
gauauaauagaagcaguug

SEQ ID NO: 1960046 - RNA, 19 nt, Homo sapiens
  misc_RNA (1)...(19): siRNA sense strand
caaggcguuuacugagauu

SEQ ID NO: 1960047 - RNA, 19 nt, Homo sapiens
  misc_RNA (1)...(19): siRNA sense strand
guuacugaguguugaggaa

SEQ ID NO: 1960048 - RNA, 19 nt, Homo sapiens
  misc_RNA (1)...(19): siRNA sense strand
uaaugggcuuucaauagau

SEQ ID NO: 1960049 - RNA, 19 nt, Homo sapiens
  misc_RNA (1)...(19): siRNA sense strand
acccucagauucauccuuu

SEQ ID NO: 1960050 - RNA, 19 nt, Homo sapiens
  misc_RNA (1)...(19): siRNA sense strand
gauaaaaguuuggaugaag

SEQ ID NO: 1960051 - RNA, 19 nt, Homo sapiens
  misc_RNA (1)...(19): siRNA sense strand
cccaaggcguuuacugaga

SEQ ID NO: 1960052 - RNA, 19 nt, Homo sapiens
  misc_RNA (1)...(19): siRNA sense strand
ugaugaaaccuuccuguag

SEQ ID NO: 1960053 - RNA, 19 nt, Homo sapiens
  misc_RNA (1)...(19): siRNA sense strand
caaaauccaaguguucuua

SEQ ID NO: 1960054 - RNA, 19 nt, Homo sapiens
  misc_RNA (1)...(19): siRNA sense strand
uaugagcaguuugaggaaa

SEQ ID NO: 1960055 - RNA, 19 nt, Homo sapiens
  misc_RNA (1)...(19): siRNA sense strand
caacuccaccugccaacau

SEQ ID NO: 1960056 - RNA, 19 nt, Homo sapiens
  misc_RNA (1)...(19): siRNA sense strand
uauaaaaccuggagacucu

SEQ ID NO: 1960057 - RNA, 19 nt, Homo sapiens
  misc_RNA (1)...(19): siRNA sense strand
aguagccacugacuuaugu

SEQ ID NO: 1960058 - RNA, 19 nt, Homo sapiens
  misc_RNA (1)...(19): siRNA sense strand
gauccucaagcuaguuuau

SEQ ID NO: 1960059 - RNA, 19 nt, Homo sapiens
  misc_RNA (1)...(19): siRNA sense strand
gcaaagaggcagcgaagua

SEQ ID NO: 1960060 - RNA, 19 nt, Homo sapiens
  misc_RNA (1)...(19): siRNA sense strand
aaacugagcgcuuccauua

SEQ ID NO: 1960061 - RNA, 19 nt, Homo sapiens
  misc_RNA (1)...(19): siRNA sense strand
gguauuagcaugcaaauga

SEQ ID NO: 1960062 - RNA, 19 nt, Homo sapiens
  misc_RNA (1)...(19): siRNA sense strand
cuaccacgcuagaguugua

SEQ ID NO: 1960063 - RNA, 19 nt, Homo sapiens
  misc_RNA (1)...(19): siRNA sense strand
cgaaguauguguuccaaac

SEQ ID NO: 1960064 - RNA, 19 nt, Homo sapiens
  misc_RNA (1)...(19): siRNA sense strand
guauuagcaugcaaaugaa

SEQ ID NO: 1960065 - RNA, 19 nt, Homo sapiens
  misc_RNA (1)...(19): siRNA sense strand
ggaaaagcauucuggguau

SEQ ID NO: 1960066 - RNA, 19 nt, Homo sapiens
  misc_RNA (1)...(19): siRNA sense strand
caaagaggcagcgaaguau

SEQ ID NO: 1960067 - RNA, 19 nt, Homo sapiens
  misc_RNA (1)...(19): siRNA sense strand
gaaaagcauucuggguauu

SEQ ID NO: 1960068 - RNA, 19 nt, Homo sapiens
  misc_RNA (1)...(19): siRNA sense strand
aguauguguuccaaacuuu

SEQ ID NO: 1960069 - RNA, 19 nt, Homo sapiens
  misc_RNA (1)...(19): siRNA sense strand
caaacugagcgcuuccauu

SEQ ID NO: 1960070 - RNA, 19 nt, Homo sapiens
  misc_RNA (1)...(19): siRNA sense strand
gaaguucccacaguugcaa

SEQ ID NO: 1960071 - RNA, 19 nt, Homo sapiens
  misc_RNA (1)...(19): siRNA sense strand
acugagcgcuuccauuaag

SEQ ID NO: 1960072 - RNA, 19 nt, Homo sapiens
  misc_RNA (1)...(19): siRNA sense strand
gaaguauguguuccaaacu

SEQ ID NO: 1960073 - RNA, 19 nt, Homo sapiens
  misc_RNA (1)...(19): siRNA sense strand
caacuccgcucgggauucc

SEQ ID NO: 1960074 - RNA, 19 nt, Homo sapiens
  misc_RNA (1)...(19): siRNA sense strand
gaguuguacaccaagguuu

SEQ ID NO: 1960075 - RNA, 19 nt, Homo sapiens
  misc_RNA (1)...(19): siRNA sense strand
gaugcuaccacgcuagagu

SEQ ID NO: 1960076 - RNA, 19 nt, Homo sapiens
  misc_RNA (1)...(19): siRNA sense strand
gggaugcuaccacgcuaga

SEQ ID NO: 1960077 - RNA, 19 nt, Homo sapiens
  misc_RNA (1)...(19): siRNA sense strand
gagcgcuuccauuaagaga

SEQ ID NO: 1960078 - RNA, 19 nt, Homo sapiens
  misc_RNA (1)...(19): siRNA sense strand
cgcuagaguuguacaccaa

SEQ ID NO: 1960079 - RNA, 19 nt, Homo sapiens
  misc_RNA (1)...(19): siRNA sense strand
guacaccaagguuugucuu

SEQ ID NO: 1960080 - RNA, 19 nt, Homo sapiens
  misc_RNA (1)...(19): siRNA sense strand
aaagcauucuggguauuag

SEQ ID NO: 1960081 - RNA, 19 nt, Homo sapiens
  misc_RNA (1)...(19): siRNA sense strand
gcguuucuccgaagcaugu

SEQ ID NO: 1960082 - RNA, 19 nt, Homo sapiens
  misc_RNA (1)...(19): siRNA sense strand
gcguuucuccgaagcaugu

SEQ ID NO: 1960083 - RNA, 19 nt, Homo sapiens
  misc_RNA (1)...(19): siRNA sense strand
gcucagaaauggaagaauu

SEQ ID NO: 1960084 - RNA, 19 nt, Homo sapiens
  misc_RNA (1)...(19): siRNA sense strand
cagcggaggugcaguguuu

SEQ ID NO: 1960085 - RNA, 19 nt, Homo sapiens
  misc_RNA (1)...(19): siRNA sense strand
gcauauuucucccuccuaa

SEQ ID NO: 1960086 - RNA, 19 nt, Homo sapiens
  misc_RNA (1)...(19): siRNA sense strand
gcgcggugaugauuguuua

SEQ ID NO: 1960087 - RNA, 19 nt, Homo sapiens
  misc_RNA (1)...(19): siRNA sense strand
ggaagccggugucuguguu

SEQ ID NO: 1960088 - RNA, 19 nt, Homo sapiens
  misc_RNA (1)...(19): siRNA sense strand
gaaauugaaggaugaaugg

SEQ ID NO: 1960089 - RNA, 19 nt, Homo sapiens
  misc_RNA (1)...(19): siRNA sense strand
gauauuggacgaaggaaug

SEQ ID NO: 1960090 - RNA, 19 nt, Homo sapiens
  misc_RNA (1)...(19): siRNA sense strand
agccgaacauggcauauuu

SEQ ID NO: 1960091 - RNA, 19 nt, Homo sapiens
  misc_RNA (1)...(19): siRNA sense strand
ugcaaggacugaccgauga

SEQ ID NO: 1960092 - RNA, 19 nt, Homo sapiens
  misc_RNA (1)...(19): siRNA sense strand
gaagccggugucuguguua

SEQ ID NO: 1960093 - RNA, 19 nt, Homo sapiens
  misc_RNA (1)...(19): siRNA sense strand
gaugauauuggacgaagga

SEQ ID NO: 1960094 - RNA, 19 nt, Homo sapiens
  misc_RNA (1)...(19): siRNA sense strand
gaccgaugaucagauugaa

SEQ ID NO: 1960095 - RNA, 19 nt, Homo sapiens
  misc_RNA (1)...(19): siRNA sense strand
ggaagaauuagccgaacau

SEQ ID NO: 1960096 - RNA, 19 nt, Homo sapiens
  misc_RNA (1)...(19): siRNA sense strand
ccgaugaucagauugaaga

SEQ ID NO: 1960097 - RNA, 19 nt, Homo sapiens
  misc_RNA (1)...(19): siRNA sense strand
ugaaauugaaggaugaaug

SEQ ID NO: 1960098 - RNA, 19 nt, Homo sapiens
  misc_RNA (1)...(19): siRNA sense strand
gaucagauugaagaauuga

SEQ ID NO: 1960099 - RNA, 19 nt, Homo sapiens
  misc_RNA (1)...(19): siRNA sense strand
ugaucagauugaagaauug

SEQ ID NO: 1960100 - RNA, 19 nt, Homo sapiens
  misc_RNA (1)...(19): siRNA sense strand
gcggaggugcaguguuuaa

SEQ ID NO: 1960101 - RNA, 19 nt, Homo sapiens
  misc_RNA (1)...(19): siRNA sense strand
ugaccgaugaucagauuga

SEQ ID NO: 1960102 - RNA, 19 nt, Homo sapiens
  misc_RNA (1)...(19): siRNA sense strand
cucagaaauggaagaauua

SEQ ID NO: 1960103 - RNA, 19 nt, Homo sapiens
  misc_RNA (1)...(19): siRNA sense strand
gaagaauuagccgaacaug

SEQ ID NO: 1960104 - RNA, 19 nt, Homo sapiens
  misc_RNA (1)...(19): siRNA sense strand
uggaagaauuagccgaaca

SEQ ID NO: 1960105 - RNA, 19 nt, Homo sapiens
  misc_RNA (1)...(19): siRNA sense strand
ccuaauaugcaaggacuga

SEQ ID NO: 1960106 - RNA, 19 nt, Homo sapiens
  misc_RNA (1)...(19): siRNA sense strand
gaugaucagauugaagaau

SEQ ID NO: 1960107 - RNA, 19 nt, Homo sapiens
  misc_RNA (1)...(19): siRNA sense strand
ggaggugcaguguuuaaaa

SEQ ID NO: 1960108 - RNA, 19 nt, Homo sapiens
  misc_RNA (1)...(19): siRNA sense strand
gcaaggacugaccgaugau

SEQ ID NO: 1960109 - RNA, 19 nt, Homo sapiens
  misc_RNA (1)...(19): siRNA sense strand
cgaagaagcuuucagacua

SEQ ID NO: 1960110 - RNA, 19 nt, Homo sapiens
  misc_RNA (1)...(19): siRNA sense strand
ggauaacacugcuuugaaa

SEQ ID NO: 1960111 - RNA, 19 nt, Homo sapiens
  misc_RNA (1)...(19): siRNA sense strand
gcucagaaauggaagaauu

SEQ ID NO: 1960112 - RNA, 19 nt, Homo sapiens
  misc_RNA (1)...(19): siRNA sense strand
gaacgaagaagcuuucaga

SEQ ID NO: 1960113 - RNA, 19 nt, Homo sapiens
  misc_RNA (1)...(19): siRNA sense strand
cagcggaggugcaguguuu

SEQ ID NO: 1960114 - RNA, 19 nt, Homo sapiens
  misc_RNA (1)...(19): siRNA sense strand
aagaggagcucaagagauu

SEQ ID NO: 1960115 - RNA, 19 nt, Homo sapiens
  misc_RNA (1)...(19): siRNA sense strand
gcauauuucucccuccuaa

SEQ ID NO: 1960116 - RNA, 19 nt, Homo sapiens
  misc_RNA (1)...(19): siRNA sense strand
gcgcggugaugauuguuua

SEQ ID NO: 1960117 - RNA, 19 nt, Homo sapiens
  misc_RNA (1)...(19): siRNA sense strand
gaagaagcuuucagacuac

SEQ ID NO: 1960118 - RNA, 19 nt, Homo sapiens
  misc_RNA (1)...(19): siRNA sense strand
gcauggaguuugaaaauaa

SEQ ID NO: 1960119 - RNA, 19 nt, Homo sapiens
  misc_RNA (1)...(19): siRNA sense strand
ugaugaugaugccuauuua

SEQ ID NO: 1960120 - RNA, 19 nt, Homo sapiens
  misc_RNA (1)...(19): siRNA sense strand
gaugaugccuauuuaaacu

SEQ ID NO: 1960121 - RNA, 19 nt, Homo sapiens
  misc_RNA (1)...(19): siRNA sense strand
gacauaaaguggagaccaa

SEQ ID NO: 1960122 - RNA, 19 nt, Homo sapiens
  misc_RNA (1)...(19): siRNA sense strand
ggaagccggugucuguguu

SEQ ID NO: 1960123 - RNA, 19 nt, Homo sapiens
  misc_RNA (1)...(19): siRNA sense strand
gaagaacgaagaagcuuuc

SEQ ID NO: 1960124 - RNA, 19 nt, Homo sapiens
  misc_RNA (1)...(19): siRNA sense strand
gaaauugaaggaugaaugg

SEQ ID NO: 1960125 - RNA, 19 nt, Homo sapiens
  misc_RNA (1)...(19): siRNA sense strand
gauauuggacgaaggaaug

SEQ ID NO: 1960126 - RNA, 19 nt, Homo sapiens
  misc_RNA (1)...(19): siRNA sense strand
gcccgagagccuauuauua

SEQ ID NO: 1960127 - RNA, 19 nt, Homo sapiens
  misc_RNA (1)...(19): siRNA sense strand
gagcugagaagaacgaaga

SEQ ID NO: 1960128 - RNA, 19 nt, Homo sapiens
  misc_RNA (1)...(19): siRNA sense strand
ccaaggagcugagaagaac

SEQ ID NO: 1960129 - RNA, 19 nt, Homo sapiens
  misc_RNA (1)...(19): siRNA sense strand
ggaagaaaaugaugaugau

SEQ ID NO: 1960130 - RNA, 19 nt, Homo sapiens
  misc_RNA (1)...(19): siRNA sense strand
agccgaacauggcauauuu

SEQ ID NO: 1960131 - RNA, 19 nt, Homo sapiens
  misc_RNA (1)...(19): siRNA sense strand
gaugaugaugccuauuuaa

SEQ ID NO: 1960132 - RNA, 19 nt, Homo sapiens
  misc_RNA (1)...(19): siRNA sense strand
ugcaaggacugaccgauga

SEQ ID NO: 1960133 - RNA, 19 nt, Homo sapiens
  misc_RNA (1)...(19): siRNA sense strand
gaagccggugucuguguua

SEQ ID NO: 1960134 - RNA, 19 nt, Homo sapiens
  misc_RNA (1)...(19): siRNA sense strand
gcagggcucaacgucauua

SEQ ID NO: 1960135 - RNA, 19 nt, Homo sapiens
  misc_RNA (1)...(19): siRNA sense strand
cucaagagauuggaagaaa

SEQ ID NO: 1960136 - RNA, 19 nt, Homo sapiens
  misc_RNA (1)...(19): siRNA sense strand
gcagugaggagcagaagca

SEQ ID NO: 1960137 - RNA, 19 nt, Homo sapiens
  misc_RNA (1)...(19): siRNA sense strand
gaugauauuggacgaagga

SEQ ID NO: 1960138 - RNA, 19 nt, Homo sapiens
  misc_RNA (1)...(19): siRNA sense strand
gcggauaacacugcuuuga

SEQ ID NO: 1960139 - RNA, 19 nt, Homo sapiens
  misc_RNA (1)...(19): siRNA sense strand
gggcggauaacacugcuuu

SEQ ID NO: 1960140 - RNA, 19 nt, Homo sapiens
  misc_RNA (1)...(19): siRNA sense strand
gaagacaagaggagcucaa

SEQ ID NO: 1960141 - RNA, 19 nt, Homo sapiens
  misc_RNA (1)...(19): siRNA sense strand
ggagugaaagacauaaagu

SEQ ID NO: 1960142 - RNA, 19 nt, Homo sapiens
  misc_RNA (1)...(19): siRNA sense strand
gacaagaggagcucaagag

SEQ ID NO: 1960143 - RNA, 19 nt, Homo sapiens
  misc_RNA (1)...(19): siRNA sense strand
gaccgaugaucagauugaa

SEQ ID NO: 1960144 - RNA, 19 nt, Homo sapiens
  misc_RNA (1)...(19): siRNA sense strand
ggaagaauuagccgaacau

SEQ ID NO: 1960145 - RNA, 19 nt, Homo sapiens
  misc_RNA (1)...(19): siRNA sense strand
aaaugaugaugaugccuau

SEQ ID NO: 1960146 - RNA, 19 nt, Homo sapiens
  misc_RNA (1)...(19): siRNA sense strand
gccaaggagcugagaagaa

SEQ ID NO: 1960147 - RNA, 19 nt, Homo sapiens
  misc_RNA (1)...(19): siRNA sense strand
gaucagauugaagaauuga

SEQ ID NO: 1960148 - RNA, 19 nt, Homo sapiens
  misc_RNA (1)...(19): siRNA sense strand
ccgaugaucagauugaaga

SEQ ID NO: 1960149 - RNA, 19 nt, Homo sapiens
  misc_RNA (1)...(19): siRNA sense strand
ugaaauugaaggaugaaug

SEQ ID NO: 1960150 - RNA, 19 nt, Homo sapiens
  misc_RNA (1)...(19): siRNA sense strand
caagaggagcucaagagau

SEQ ID NO: 1960151 - RNA, 19 nt, Homo sapiens
  misc_RNA (1)...(19): siRNA sense strand
cccgagagccuauuauuag

SEQ ID NO: 1960152 - RNA, 19 nt, Homo sapiens
  misc_RNA (1)...(19): siRNA sense strand
gagaagaacgaagaagcuu

SEQ ID NO: 1960153 - RNA, 19 nt, Homo sapiens
  misc_RNA (1)...(19): siRNA sense strand
ggcucaacgucauuaaaga

SEQ ID NO: 1960154 - RNA, 19 nt, Homo sapiens
  misc_RNA (1)...(19): siRNA sense strand
gcggaggugcaguguuuaa

SEQ ID NO: 1960155 - RNA, 19 nt, Homo sapiens
  misc_RNA (1)...(19): siRNA sense strand
ugaucagauugaagaauug

SEQ ID NO: 1960156 - RNA, 19 nt, Homo sapiens
  misc_RNA (1)...(19): siRNA sense strand
gaacacaggcagggcucaa

SEQ ID NO: 1960157 - RNA, 19 nt, Homo sapiens
  misc_RNA (1)...(19): siRNA sense strand
gggcucaacgucauuaaag

SEQ ID NO: 1960158 - RNA, 19 nt, Homo sapiens
  misc_RNA (1)...(19): siRNA sense strand
cggauaacacugcuuugaa

SEQ ID NO: 1960159 - RNA, 19 nt, Homo sapiens
  misc_RNA (1)...(19): siRNA sense strand
uaaaguggagaccaagaug

SEQ ID NO: 1960160 - RNA, 19 nt, Homo sapiens
  misc_RNA (1)...(19): siRNA sense strand
ugaccgaugaucagauuga

SEQ ID NO: 1960161 - RNA, 19 nt, Homo sapiens
  misc_RNA (1)...(19): siRNA sense strand
gagugaaagacauaaagug

SEQ ID NO: 1960162 - RNA, 19 nt, Homo sapiens
  misc_RNA (1)...(19): siRNA sense strand
cucagaaauggaagaauua

SEQ ID NO: 1960163 - RNA, 19 nt, Homo sapiens
  misc_RNA (1)...(19): siRNA sense strand
ucgccaagauucagcaaag

SEQ ID NO: 1960164 - RNA, 19 nt, Homo sapiens
  misc_RNA (1)...(19): siRNA sense strand
gcucaagagauuggaagaa

SEQ ID NO: 1960165 - RNA, 19 nt, Homo sapiens
  misc_RNA (1)...(19): siRNA sense strand
ugaugccuauuuaaacuca

SEQ ID NO: 1960166 - RNA, 19 nt, Homo sapiens
  misc_RNA (1)...(19): siRNA sense strand
gaagaauuagccgaacaug

SEQ ID NO: 1960167 - RNA, 19 nt, Homo sapiens
  misc_RNA (1)...(19): siRNA sense strand
agaagaacgaagaagcuuu

SEQ ID NO: 1960168 - RNA, 19 nt, Homo sapiens
  misc_RNA (1)...(19): siRNA sense strand
ucauggagugaaagacaua

SEQ ID NO: 1960169 - RNA, 19 nt, Homo sapiens
  misc_RNA (1)...(19): siRNA sense strand
acaagaggagcucaagaga

SEQ ID NO: 1960170 - RNA, 19 nt, Homo sapiens
  misc_RNA (1)...(19): siRNA sense strand
aaaguggagaccaagauga

SEQ ID NO: 1960171 - RNA, 19 nt, Homo sapiens
  misc_RNA (1)...(19): siRNA sense strand
ucaagagauuggaagaaaa

SEQ ID NO: 1960172 - RNA, 19 nt, Homo sapiens
  misc_RNA (1)...(19): siRNA sense strand
gcucaacgucauuaaagag

SEQ ID NO: 1960173 - RNA, 19 nt, Homo sapiens
  misc_RNA (1)...(19): siRNA sense strand
uggaagaauuagccgaaca

SEQ ID NO: 1960174 - RNA, 19 nt, Homo sapiens
  misc_RNA (1)...(19): siRNA sense strand
ccaaaauuaucgccaagau

SEQ ID NO: 1960175 - RNA, 19 nt, Homo sapiens
  misc_RNA (1)...(19): siRNA sense strand
augaugaugaugccuauuu

SEQ ID NO: 1960176 - RNA, 19 nt, Homo sapiens
  misc_RNA (1)...(19): siRNA sense strand
gaugaucagauugaagaau

SEQ ID NO: 1960177 - RNA, 19 nt, Homo sapiens
  misc_RNA (1)...(19): siRNA sense strand
ccuaauaugcaaggacuga

SEQ ID NO: 1960178 - RNA, 19 nt, Homo sapiens
  misc_RNA (1)...(19): siRNA sense strand
ccagcccgagagccuauua

SEQ ID NO: 1960179 - RNA, 19 nt, Homo sapiens
  misc_RNA (1)...(19): siRNA sense strand
aaaauuaucgccaagauuc

SEQ ID NO: 1960180 - RNA, 19 nt, Homo sapiens
  misc_RNA (1)...(19): siRNA sense strand
aggcagggcucaacgucau

SEQ ID NO: 1960181 - RNA, 19 nt, Homo sapiens
  misc_RNA (1)...(19): siRNA sense strand
ggaggugcaguguuuaaaa

SEQ ID NO: 1960182 - RNA, 19 nt, Homo sapiens
  misc_RNA (1)...(19): siRNA sense strand
gcaaggacugaccgaugau

SEQ ID NO: 1960183 - RNA, 19 nt, Homo sapiens
  misc_RNA (1)...(19): siRNA sense strand
cauaaaguggagaccaaga

SEQ ID NO: 1960184 - RNA, 19 nt, Homo sapiens
  misc_RNA (1)...(19): siRNA sense strand
gaggagcucaagagauugg

SEQ ID NO: 1960185 - RNA, 19 nt, Homo sapiens
  misc_RNA (1)...(19): siRNA sense strand
gcaaggauauacauucauu

SEQ ID NO: 1960186 - RNA, 19 nt, Homo sapiens
  misc_RNA (1)...(19): siRNA sense strand
caaacaagcuggauacugu

SEQ ID NO: 1960187 - RNA, 19 nt, Homo sapiens
  misc_RNA (1)...(19): siRNA sense strand
gaagaguucuccaccauuc

SEQ ID NO: 1960188 - RNA, 19 nt, Homo sapiens
  misc_RNA (1)...(19): siRNA sense strand
ccaauaaaguccggaauuu

SEQ ID NO: 1960189 - RNA, 19 nt, Homo sapiens
  misc_RNA (1)...(19): siRNA sense strand
guaagcauuuggaugaaua

SEQ ID NO: 1960190 - RNA, 19 nt, Homo sapiens
  misc_RNA (1)...(19): siRNA sense strand
gcacaagucccucugauug

SEQ ID NO: 1960191 - RNA, 19 nt, Homo sapiens
  misc_RNA (1)...(19): siRNA sense strand
ucaaugggauuuauaguug

SEQ ID NO: 1960192 - RNA, 19 nt, Homo sapiens
  misc_RNA (1)...(19): siRNA sense strand
guacuaaucguuccuguuu

SEQ ID NO: 1960193 - RNA, 19 nt, Homo sapiens
  misc_RNA (1)...(19): siRNA sense strand
gaaauuagauugggauggu

SEQ ID NO: 1960194 - RNA, 19 nt, Homo sapiens
  misc_RNA (1)...(19): siRNA sense strand
ucacaaagguagaaguuga

SEQ ID NO: 1960195 - RNA, 19 nt, Homo sapiens
  misc_RNA (1)...(19): siRNA sense strand
gaaaugagaaugcacaagu

SEQ ID NO: 1960196 - RNA, 19 nt, Homo sapiens
  misc_RNA (1)...(19): siRNA sense strand
ggaauugccuguguuguag

SEQ ID NO: 1960197 - RNA, 19 nt, Homo sapiens
  misc_RNA (1)...(19): siRNA sense strand
uaugaagacugcagauuga

SEQ ID NO: 1960198 - RNA, 19 nt, Homo sapiens
  misc_RNA (1)...(19): siRNA sense strand
gacugcagauugaugauuu

SEQ ID NO: 1960199 - RNA, 19 nt, Homo sapiens
  misc_RNA (1)...(19): siRNA sense strand
gaagacugcagauugauga

SEQ ID NO: 1960200 - RNA, 19 nt, Homo sapiens
  misc_RNA (1)...(19): siRNA sense strand
gggacucaauuuccuauga

SEQ ID NO: 1960201 - RNA, 19 nt, Homo sapiens
  misc_RNA (1)...(19): siRNA sense strand
ugaugaggauggcuacaua

SEQ ID NO: 1960202 - RNA, 19 nt, Homo sapiens
  misc_RNA (1)...(19): siRNA sense strand
uccagaauaugcuaagaua

SEQ ID NO: 1960203 - RNA, 19 nt, Homo sapiens
  misc_RNA (1)...(19): siRNA sense strand
aaagguagaaguugaguuu

SEQ ID NO: 1960204 - RNA, 19 nt, Homo sapiens
  misc_RNA (1)...(19): siRNA sense strand
gaagaauucgccaaguauu

SEQ ID NO: 1960205 - RNA, 19 nt, Homo sapiens
  misc_RNA (1)...(19): siRNA sense strand
aagcugggcugguggaauu

SEQ ID NO: 1960206 - RNA, 19 nt, Homo sapiens
  misc_RNA (1)...(19): siRNA sense strand
guagcuggguuaccuucua

SEQ ID NO: 1960207 - RNA, 19 nt, Homo sapiens
  misc_RNA (1)...(19): siRNA sense strand
gaauaccaguaacagauca

SEQ ID NO: 1960208 - RNA, 19 nt, Homo sapiens
  misc_RNA (1)...(19): siRNA sense strand
gguagaaguugaguuuaug

SEQ ID NO: 1960209 - RNA, 19 nt, Homo sapiens
  misc_RNA (1)...(19): siRNA sense strand
cagcuaacauugccuaugg

SEQ ID NO: 1960210 - RNA, 19 nt, Homo sapiens
  misc_RNA (1)...(19): siRNA sense strand
gaagagaguaccucagaca

SEQ ID NO: 1960211 - RNA, 19 nt, Homo sapiens
  misc_RNA (1)...(19): siRNA sense strand
cuuaaagcauccagaauau

SEQ ID NO: 1960212 - RNA, 19 nt, Homo sapiens
  misc_RNA (1)...(19): siRNA sense strand
ccuuaaagcauccagaaua

SEQ ID NO: 1960213 - RNA, 19 nt, Homo sapiens
  misc_RNA (1)...(19): siRNA sense strand
uaaaguugccuguuucaga

SEQ ID NO: 1960214 - RNA, 19 nt, Homo sapiens
  misc_RNA (1)...(19): siRNA sense strand
uugaagaauucgccaagua

SEQ ID NO: 1960215 - RNA, 19 nt, Homo sapiens
  misc_RNA (1)...(19): siRNA sense strand
agaauucgccaaguauuua

SEQ ID NO: 1960216 - RNA, 19 nt, Homo sapiens
  misc_RNA (1)...(19): siRNA sense strand
gcauugacuuccgagagua

SEQ ID NO: 1960217 - RNA, 19 nt, Homo sapiens
  misc_RNA (1)...(19): siRNA sense strand
aaaguugccuguuucagau

SEQ ID NO: 1960218 - RNA, 19 nt, Homo sapiens
  misc_RNA (1)...(19): siRNA sense strand
gugcaacccuuccaacaca

SEQ ID NO: 1960219 - RNA, 19 nt, Homo sapiens
  misc_RNA (1)...(19): siRNA sense strand
ggaaagauugcaaguccuu

SEQ ID NO: 1960220 - RNA, 19 nt, Homo sapiens
  misc_RNA (1)...(19): siRNA sense strand
cgccaaguauuuaaaguug

SEQ ID NO: 1960221 - RNA, 19 nt, Homo sapiens
  misc_RNA (1)...(19): siRNA sense strand
aguaacagaucauaccuau

SEQ ID NO: 1960222 - RNA, 19 nt, Homo sapiens
  misc_RNA (1)...(19): siRNA sense strand
gagaguaccucagacaaaa

SEQ ID NO: 1960223 - RNA, 19 nt, Homo sapiens
  misc_RNA (1)...(19): siRNA sense strand
gauugcaaguccuuuggaa

SEQ ID NO: 1960224 - RNA, 19 nt, Homo sapiens
  misc_RNA (1)...(19): siRNA sense strand
gggaauaccaguaacagau

SEQ ID NO: 1960225 - RNA, 19 nt, Homo sapiens
  misc_RNA (1)...(19): siRNA sense strand
acuaaucguuccuguuuga

SEQ ID NO: 1960226 - RNA, 19 nt, Homo sapiens
  misc_RNA (1)...(19): siRNA sense strand
ucauccagguggcauuuaa

SEQ ID NO: 1960227 - RNA, 19 nt, Homo sapiens
  misc_RNA (1)...(19): siRNA sense strand
gaauucgccaaguauuuaa

SEQ ID NO: 1960228 - RNA, 19 nt, Homo sapiens
  misc_RNA (1)...(19): siRNA sense strand
guuccuguuugauuacuuu

SEQ ID NO: 1960229 - RNA, 19 nt, Homo sapiens
  misc_RNA (1)...(19): siRNA sense strand
ggauuuauaguugcuguaa

SEQ ID NO: 1960230 - RNA, 19 nt, Homo sapiens
  misc_RNA (1)...(19): siRNA sense strand
ucuaugguaucucgaaaug

SEQ ID NO: 1960231 - RNA, 19 nt, Homo sapiens
  misc_RNA (1)...(19): siRNA sense strand
ggaagaguucuccaccauu

SEQ ID NO: 1960232 - RNA, 19 nt, Homo sapiens
  misc_RNA (1)...(19): siRNA sense strand
cagcaggacagcuaacauu

SEQ ID NO: 1960233 - RNA, 19 nt, Homo sapiens
  misc_RNA (1)...(19): siRNA sense strand
gccaauaaaguccggaauu

SEQ ID NO: 1960234 - RNA, 19 nt, Homo sapiens
  misc_RNA (1)...(19): siRNA sense strand
ggacauggcaaggauauac

SEQ ID NO: 1960235 - RNA, 19 nt, Homo sapiens
  misc_RNA (1)...(19): siRNA sense strand
uaauaaagcgaacaacauc

SEQ ID NO: 1960236 - RNA, 19 nt, Homo sapiens
  misc_RNA (1)...(19): siRNA sense strand
gaugaggauggcuacauaa

SEQ ID NO: 1960237 - RNA, 19 nt, Homo sapiens
  misc_RNA (1)...(19): siRNA sense strand
uggcaaggauauacauuca

SEQ ID NO: 1960238 - RNA, 19 nt, Homo sapiens
  misc_RNA (1)...(19): siRNA sense strand
uaugguaucucgaaaugag

SEQ ID NO: 1960239 - RNA, 19 nt, Homo sapiens
  misc_RNA (1)...(19): siRNA sense strand
uggaauugccuguguugua

SEQ ID NO: 1960240 - RNA, 19 nt, Homo sapiens
  misc_RNA (1)...(19): siRNA sense strand
gaucauccagguggcauuu

SEQ ID NO: 1960241 - RNA, 19 nt, Homo sapiens
  misc_RNA (1)...(19): siRNA sense strand
ucaaguaccaaaugaugaa

SEQ ID NO: 1960242 - RNA, 19 nt, Homo sapiens
  misc_RNA (1)...(19): siRNA sense strand
auucagcuuuguaugcuua

SEQ ID NO: 1960243 - RNA, 19 nt, Homo sapiens
  misc_RNA (1)...(19): siRNA sense strand
ugaagaauucgccaaguau

SEQ ID NO: 1960244 - RNA, 19 nt, Homo sapiens
  misc_RNA (1)...(19): siRNA sense strand
ggaauaccaguaacagauc

SEQ ID NO: 1960245 - RNA, 19 nt, Homo sapiens
  misc_RNA (1)...(19): siRNA sense strand
ucugccagcucuucacaaa

SEQ ID NO: 1960246 - RNA, 19 nt, Homo sapiens
  misc_RNA (1)...(19): siRNA sense strand
gauuucagcaggacagcua

SEQ ID NO: 1960247 - RNA, 19 nt, Homo sapiens
  misc_RNA (1)...(19): siRNA sense strand
gauacuaguuuucccagaa

SEQ ID NO: 1960248 - RNA, 19 nt, Homo sapiens
  misc_RNA (1)...(19): siRNA sense strand
ucuggucucuucaaggaaa

SEQ ID NO: 1960249 - RNA, 19 nt, Homo sapiens
  misc_RNA (1)...(19): siRNA sense strand
aagaauucgccaaguauuu

SEQ ID NO: 1960250 - RNA, 19 nt, Homo sapiens
  misc_RNA (1)...(19): siRNA sense strand
caguucaaguaccaaauga

SEQ ID NO: 1960251 - RNA, 19 nt, Homo sapiens
  misc_RNA (1)...(19): siRNA sense strand
guuuaugccaguucaagua

SEQ ID NO: 1960252 - RNA, 19 nt, Homo sapiens
  misc_RNA (1)...(19): siRNA sense strand
uaaaccaggagccuucauu

SEQ ID NO: 1960253 - RNA, 19 nt, Homo sapiens
  misc_RNA (1)...(19): siRNA sense strand
ccagacgugccauguguuu

SEQ ID NO: 1960254 - RNA, 19 nt, Homo sapiens
  misc_RNA (1)...(19): siRNA sense strand
cuaugaagacugcagauug

SEQ ID NO: 1960255 - RNA, 19 nt, Homo sapiens
  misc_RNA (1)...(19): siRNA sense strand
guucaaguaccaaaugaug

SEQ ID NO: 1960256 - RNA, 19 nt, Homo sapiens
  misc_RNA (1)...(19): siRNA sense strand
auacauucauucagcuuug

SEQ ID NO: 1960257 - RNA, 19 nt, Homo sapiens
  misc_RNA (1)...(19): siRNA sense strand
agccaguccuccucagaua

SEQ ID NO: 1960258 - RNA, 19 nt, Homo sapiens
  misc_RNA (1)...(19): siRNA sense strand
agguagaaguugaguuuau

SEQ ID NO: 1960259 - RNA, 19 nt, Homo sapiens
  misc_RNA (1)...(19): siRNA sense strand
uagcuggguuaccuucuau

SEQ ID NO: 1960260 - RNA, 19 nt, Homo sapiens
  misc_RNA (1)...(19): siRNA sense strand
uuucuggucucuucaagga

SEQ ID NO: 1960261 - RNA, 19 nt, Homo sapiens
  misc_RNA (1)...(19): siRNA sense strand
ugccugaccuugauguuuc

SEQ ID NO: 1960262 - RNA, 19 nt, Homo sapiens
  misc_RNA (1)...(19): siRNA sense strand
gauggaauugccuguguug

SEQ ID NO: 1960263 - RNA, 19 nt, Homo sapiens
  misc_RNA (1)...(19): siRNA sense strand
caacacagaggagaucauc

SEQ ID NO: 1960264 - RNA, 19 nt, Homo sapiens
  misc_RNA (1)...(19): siRNA sense strand
agagaguaccucagacaaa

SEQ ID NO: 1960265 - RNA, 19 nt, Homo sapiens
  misc_RNA (1)...(19): siRNA sense strand
ugauguuucuggucucuuc

SEQ ID NO: 1960266 - RNA, 19 nt, Homo sapiens
  misc_RNA (1)...(19): siRNA sense strand
aaaugagaaugcacaaguc

SEQ ID NO: 1960267 - RNA, 19 nt, Homo sapiens
  misc_RNA (1)...(19): siRNA sense strand
ucuacaggcuucccuugga

SEQ ID NO: 1960268 - RNA, 19 nt, Homo sapiens
  misc_RNA (1)...(19): siRNA sense strand
aguaccaaaugaugaagaa

SEQ ID NO: 1960269 - RNA, 19 nt, Homo sapiens
  misc_RNA (1)...(19): siRNA sense strand
aaaggaggaagaauuggaa

SEQ ID NO: 1960270 - RNA, 19 nt, Homo sapiens
  misc_RNA (1)...(19): siRNA sense strand
ccaguucaaguaccaaaug

SEQ ID NO: 1960271 - RNA, 19 nt, Homo sapiens
  misc_RNA (1)...(19): siRNA sense strand
gcuaacauugccuauggaa

SEQ ID NO: 1960272 - RNA, 19 nt, Homo sapiens
  misc_RNA (1)...(19): siRNA sense strand
uguuucagaugucuugaga

SEQ ID NO: 1960273 - RNA, 19 nt, Homo sapiens
  misc_RNA (1)...(19): siRNA sense strand
ugauggaauugccuguguu

SEQ ID NO: 1960274 - RNA, 19 nt, Homo sapiens
  misc_RNA (1)...(19): siRNA sense strand
uggagugccugaccuugau

SEQ ID NO: 1960275 - RNA, 19 nt, Homo sapiens
  misc_RNA (1)...(19): siRNA sense strand
gguggcauuuaagcuguuu

SEQ ID NO: 1960276 - RNA, 19 nt, Homo sapiens
  misc_RNA (1)...(19): siRNA sense strand
ucaaaaggaggaagaauug

SEQ ID NO: 1960277 - RNA, 19 nt, Homo sapiens
  misc_RNA (1)...(19): siRNA sense strand
gaugguguucguaagcauu

SEQ ID NO: 1960278 - RNA, 19 nt, Homo sapiens
  misc_RNA (1)...(19): siRNA sense strand
gggaugguguucguaagca

SEQ ID NO: 1960279 - RNA, 19 nt, Homo sapiens
  misc_RNA (1)...(19): siRNA sense strand
ccucagauacccaaacaag

SEQ ID NO: 1960280 - RNA, 19 nt, Homo sapiens
  misc_RNA (1)...(19): siRNA sense strand
ugccagcucuucacaaagg

SEQ ID NO: 1960281 - RNA, 19 nt, Homo sapiens
  misc_RNA (1)...(19): siRNA sense strand
uauaguugcuguaaaagga

SEQ ID NO: 1960282 - RNA, 19 nt, Homo sapiens
  misc_RNA (1)...(19): siRNA sense strand
cauaacggaggaagaguuc

SEQ ID NO: 1960283 - RNA, 19 nt, Homo sapiens
  misc_RNA (1)...(19): siRNA sense strand
cuccagacgugccaugugu

SEQ ID NO: 1960284 - RNA, 19 nt, Homo sapiens
  misc_RNA (1)...(19): siRNA sense strand
aggaagaguucuccaccau

SEQ ID NO: 1960285 - RNA, 19 nt, Homo sapiens
  misc_RNA (1)...(19): siRNA sense strand
gaggacaacuccaauuuaa

SEQ ID NO: 1960286 - RNA, 19 nt, Homo sapiens
  misc_RNA (1)...(19): siRNA sense strand
aaacugaucucuacacuga

SEQ ID NO: 1960287 - RNA, 19 nt, Homo sapiens
  misc_RNA (1)...(19): siRNA sense strand
gcaagaagcugcugagaac

SEQ ID NO: 1960288 - RNA, 19 nt, Homo sapiens
  misc_RNA (1)...(19): siRNA sense strand
gaucuucugucuuucuaaa

SEQ ID NO: 1960289 - RNA, 19 nt, Homo sapiens
  misc_RNA (1)...(19): siRNA sense strand
uaacaccucugaucacaug

SEQ ID NO: 1960290 - RNA, 19 nt, Homo sapiens
  misc_RNA (1)...(19): siRNA sense strand
ggaugaaacugaucucuac

SEQ ID NO: 1960291 - RNA, 19 nt, Homo sapiens
  misc_RNA (1)...(19): siRNA sense strand
ggacaacuccaauuuaaca

SEQ ID NO: 1960292 - RNA, 19 nt, Homo sapiens
  misc_RNA (1)...(19): siRNA sense strand
cuacaugccugacuacuca

SEQ ID NO: 1960293 - RNA, 19 nt, Homo sapiens
  misc_RNA (1)...(19): siRNA sense strand
gagcugaaguuugaugaga

SEQ ID NO: 1960294 - RNA, 19 nt, Homo sapiens
  misc_RNA (1)...(19): siRNA sense strand
gaagaggucaccagaagga

SEQ ID NO: 1960295 - RNA, 19 nt, Homo sapiens
  misc_RNA (1)...(19): siRNA sense strand
ggcuggaucuucugucuuu

SEQ ID NO: 1960296 - RNA, 19 nt, Homo sapiens
  misc_RNA (1)...(19): siRNA sense strand
caugacuucuccuuguuua

SEQ ID NO: 1960297 - RNA, 19 nt, Homo sapiens
  misc_RNA (1)...(19): siRNA sense strand
uccaggagcugaaguuuga

SEQ ID NO: 1960298 - RNA, 19 nt, Homo sapiens
  misc_RNA (1)...(19): siRNA sense strand
uagaggagauuaucaaguc

SEQ ID NO: 1960299 - RNA, 19 nt, Homo sapiens
  misc_RNA (1)...(19): siRNA sense strand
gaagaucucaccacagcuu

SEQ ID NO: 1960300 - RNA, 19 nt, Homo sapiens
  misc_RNA (1)...(19): siRNA sense strand
acagugaccuggugaagga

SEQ ID NO: 1960301 - RNA, 19 nt, Homo sapiens
  misc_RNA (1)...(19): siRNA sense strand
agaaguugcuggagacguu

SEQ ID NO: 1960302 - RNA, 19 nt, Homo sapiens
  misc_RNA (1)...(19): siRNA sense strand
ugaggacaacuccaauuua

SEQ ID NO: 1960303 - RNA, 19 nt, Homo sapiens
  misc_RNA (1)...(19): siRNA sense strand
ccucagcgaugugcaguuu

SEQ ID NO: 1960304 - RNA, 19 nt, Homo sapiens
  misc_RNA (1)...(19): siRNA sense strand
gagauaagcaccuucuaca

SEQ ID NO: 1960305 - RNA, 19 nt, Homo sapiens
  misc_RNA (1)...(19): siRNA sense strand
caucagauagugaauguug

SEQ ID NO: 1960306 - RNA, 19 nt, Homo sapiens
  misc_RNA (1)...(19): siRNA sense strand
gaaguggagcccuuuaagu

SEQ ID NO: 1960307 - RNA, 19 nt, Homo sapiens
  misc_RNA (1)...(19): siRNA sense strand
uuaagucucuguaccuuuc

SEQ ID NO: 1960308 - RNA, 19 nt, Homo sapiens
  misc_RNA (1)...(19): siRNA sense strand
ccaucacgcuccucaacaa

SEQ ID NO: 1960309 - RNA, 19 nt, Homo sapiens
  misc_RNA (1)...(19): siRNA sense strand
cggcaugacuucuccuugu

SEQ ID NO: 1960310 - RNA, 19 nt, Homo sapiens
  misc_RNA (1)...(19): siRNA sense strand
ucacacggcagcaauauca

SEQ ID NO: 1960311 - RNA, 19 nt, Homo sapiens
  misc_RNA (1)...(19): siRNA sense strand
gaccacugcuugcucagau

SEQ ID NO: 1960312 - RNA, 19 nt, Homo sapiens
  misc_RNA (1)...(19): siRNA sense strand
gaaaauggagccuuuacuu

SEQ ID NO: 1960313 - RNA, 19 nt, Homo sapiens
  misc_RNA (1)...(19): siRNA sense strand
gauaucauagaggagauua

SEQ ID NO: 1960314 - RNA, 19 nt, Homo sapiens
  misc_RNA (1)...(19): siRNA sense strand
gaugugcaguuugugaaga

SEQ ID NO: 1960315 - RNA, 19 nt, Homo sapiens
  misc_RNA (1)...(19): siRNA sense strand
gguggagguugguaaggaa

SEQ ID NO: 1960316 - RNA, 19 nt, Homo sapiens
  misc_RNA (1)...(19): siRNA sense strand
gaaguuugaugagaagaac

SEQ ID NO: 1960317 - RNA, 19 nt, Homo sapiens
  misc_RNA (1)...(19): siRNA sense strand
gaaggaggagcucaacauc

SEQ ID NO: 1960318 - RNA, 19 nt, Homo sapiens
  misc_RNA (1)...(19): siRNA sense strand
ggcaugacuucuccuuguu

SEQ ID NO: 1960319 - RNA, 19 nt, Homo sapiens
  misc_RNA (1)...(19): siRNA sense strand
ggaggagcucaacaucaua

SEQ ID NO: 1960320 - RNA, 19 nt, Homo sapiens
  misc_RNA (1)...(19): siRNA sense strand
ggagauaagcaccuucuac

SEQ ID NO: 1960321 - RNA, 19 nt, Homo sapiens
  misc_RNA (1)...(19): siRNA sense strand
gagagcagcaucagauagu

SEQ ID NO: 1960322 - RNA, 19 nt, Homo sapiens
  misc_RNA (1)...(19): siRNA sense strand
aggaagaaaugacugacuu

SEQ ID NO: 1960323 - RNA, 19 nt, Homo sapiens
  misc_RNA (1)...(19): siRNA sense strand
gcaugacuucuccuuguuu

SEQ ID NO: 1960324 - RNA, 19 nt, Homo sapiens
  misc_RNA (1)...(19): siRNA sense strand
ucagauagugaauguugua

SEQ ID NO: 1960325 - RNA, 19 nt, Homo sapiens
  misc_RNA (1)...(19): siRNA sense strand
ggacuacuuugugcugcuu

SEQ ID NO: 1960326 - RNA, 19 nt, Homo sapiens
  misc_RNA (1)...(19): siRNA sense strand
gaccagcggcacaacauug

SEQ ID NO: 1960327 - RNA, 19 nt, Homo sapiens
  misc_RNA (1)...(19): siRNA sense strand
ggcaagaagcugcugagaa

SEQ ID NO: 1960328 - RNA, 19 nt, Homo sapiens
  misc_RNA (1)...(19): siRNA sense strand
acaucaaccuggauacaga

SEQ ID NO: 1960329 - RNA, 19 nt, Homo sapiens
  misc_RNA (1)...(19): siRNA sense strand
aaucucaccuggccauugu

SEQ ID NO: 1960330 - RNA, 19 nt, Homo sapiens
  misc_RNA (1)...(19): siRNA sense strand
acacgguucuggaggaguu

SEQ ID NO: 1960331 - RNA, 19 nt, Homo sapiens
  misc_RNA (1)...(19): siRNA sense strand
aggaagaggucaccagaag

SEQ ID NO: 1960332 - RNA, 19 nt, Homo sapiens
  misc_RNA (1)...(19): siRNA sense strand
gagcagcaucagauaguga

SEQ ID NO: 1960333 - RNA, 19 nt, Homo sapiens
  misc_RNA (1)...(19): siRNA sense strand
gaagaucacacggcagcaa

SEQ ID NO: 1960334 - RNA, 19 nt, Homo sapiens
  misc_RNA (1)...(19): siRNA sense strand
gcaaccgcccuguggacua

SEQ ID NO: 1960335 - RNA, 19 nt, Homo sapiens
  misc_RNA (1)...(19): siRNA sense strand
caauuuaacaccucugauc

SEQ ID NO: 1960336 - RNA, 19 nt, Homo sapiens
  misc_RNA (1)...(19): siRNA sense strand
gcugaaguuugaugagaag

SEQ ID NO: 1960337 - RNA, 19 nt, Homo sapiens
  misc_RNA (1)...(19): siRNA sense strand
aggaggagcucaacaucau

SEQ ID NO: 1960338 - RNA, 19 nt, Homo sapiens
  misc_RNA (1)...(19): siRNA sense strand
gaucacacggcagcaauau

SEQ ID NO: 1960339 - RNA, 19 nt, Homo sapiens
  misc_RNA (1)...(19): siRNA sense strand
ucagcgaugugcaguuugu

SEQ ID NO: 1960340 - RNA, 19 nt, Homo sapiens
  misc_RNA (1)...(19): siRNA sense strand
acacggagaugcgggugaa

SEQ ID NO: 1960341 - RNA, 19 nt, Homo sapiens
  misc_RNA (1)...(19): siRNA sense strand
cagaaguggagcccuuuaa

SEQ ID NO: 1960342 - RNA, 19 nt, Homo sapiens
  misc_RNA (1)...(19): siRNA sense strand
ugaaacaucccaacgugau

SEQ ID NO: 1960343 - RNA, 19 nt, Homo sapiens
  misc_RNA (1)...(19): siRNA sense strand
caacauuguggacauuuua

SEQ ID NO: 1960344 - RNA, 19 nt, Homo sapiens
  misc_RNA (1)...(19): siRNA sense strand
cagcaacaaccucuacaug

SEQ ID NO: 1960345 - RNA, 19 nt, Homo sapiens
  misc_RNA (1)...(19): siRNA sense strand
aaaauggagccuuuacuua

SEQ ID NO: 1960346 - RNA, 19 nt, Homo sapiens
  misc_RNA (1)...(19): siRNA sense strand
uccagcgggugaauaauga

SEQ ID NO: 1960347 - RNA, 19 nt, Homo sapiens
  misc_RNA (1)...(19): siRNA sense strand
ccacugcuugcucagauaa

SEQ ID NO: 1960348 - RNA, 19 nt, Homo sapiens
  misc_RNA (1)...(19): siRNA sense strand
gcuggaggauaucauagag

SEQ ID NO: 1960349 - RNA, 19 nt, Homo sapiens
  misc_RNA (1)...(19): siRNA sense strand
aaauggagccuuuacuuac

SEQ ID NO: 1960350 - RNA, 19 nt, Homo sapiens
  misc_RNA (1)...(19): siRNA sense strand
gaggugaugggcauuguca

SEQ ID NO: 1960351 - RNA, 19 nt, Homo sapiens
  misc_RNA (1)...(19): siRNA sense strand
caaccgcccuguggacuac

SEQ ID NO: 1960352 - RNA, 19 nt, Homo sapiens
  misc_RNA (1)...(19): siRNA sense strand
gauccaggagcugaaguuu

SEQ ID NO: 1960353 - RNA, 19 nt, Homo sapiens
  misc_RNA (1)...(19): siRNA sense strand
gaaacaucccaacgugauc

SEQ ID NO: 1960354 - RNA, 19 nt, Homo sapiens
  misc_RNA (1)...(19): siRNA sense strand
ucauagaggagauuaucaa

SEQ ID NO: 1960355 - RNA, 19 nt, Homo sapiens
  misc_RNA (1)...(19): siRNA sense strand
ggugaauaaugagggagaa

SEQ ID NO: 1960356 - RNA, 19 nt, Homo sapiens
  misc_RNA (1)...(19): siRNA sense strand
cugaggacaacuccaauuu

SEQ ID NO: 1960357 - RNA, 19 nt, Homo sapiens
  misc_RNA (1)...(19): siRNA sense strand
ugaaacugaucucuacacu

SEQ ID NO: 1960358 - RNA, 19 nt, Homo sapiens
  misc_RNA (1)...(19): siRNA sense strand
uggaucuucugucuuucua

SEQ ID NO: 1960359 - RNA, 19 nt, Homo sapiens
  misc_RNA (1)...(19): siRNA sense strand
uaacaucaaccuggauaca

SEQ ID NO: 1960360 - RNA, 19 nt, Homo sapiens
  misc_RNA (1)...(19): siRNA sense strand
uguaacaucaaccuggaua

SEQ ID NO: 1960361 - RNA, 19 nt, Homo sapiens
  misc_RNA (1)...(19): siRNA sense strand
ugaaggaggagcucaacau

SEQ ID NO: 1960362 - RNA, 19 nt, Homo sapiens
  misc_RNA (1)...(19): siRNA sense strand
cagacgcggugcucgacuu

SEQ ID NO: 1960363 - RNA, 19 nt, Homo sapiens
  misc_RNA (1)...(19): siRNA sense strand
gccaggagauaagcaccuu

SEQ ID NO: 1960364 - RNA, 19 nt, Homo sapiens
  misc_RNA (1)...(19): siRNA sense strand
ugacauggaggccuucaca

SEQ ID NO: 1960365 - RNA, 19 nt, Homo sapiens
  misc_RNA (1)...(19): siRNA sense strand
cgagagcgcagugacuuug

SEQ ID NO: 1960366 - RNA, 19 nt, Homo sapiens
  misc_RNA (1)...(19): siRNA sense strand
uugaugagaagaacaagaa

SEQ ID NO: 1960367 - RNA, 19 nt, Homo sapiens
  misc_RNA (1)...(19): siRNA sense strand
gcgaugugcaguuugugaa

SEQ ID NO: 1960368 - RNA, 19 nt, Homo sapiens
  misc_RNA (1)...(19): siRNA sense strand
uaucauagaggagauuauc

SEQ ID NO: 1960369 - RNA, 19 nt, Homo sapiens
  misc_RNA (1)...(19): siRNA sense strand
uggaugaaacugaucucua

SEQ ID NO: 1960370 - RNA, 19 nt, Homo sapiens
  misc_RNA (1)...(19): siRNA sense strand
cacgagagcagcaucagau

SEQ ID NO: 1960371 - RNA, 19 nt, Homo sapiens
  misc_RNA (1)...(19): siRNA sense strand
guccagcgggugaauaaug

SEQ ID NO: 1960372 - RNA, 19 nt, Homo sapiens
  misc_RNA (1)...(19): siRNA sense strand
ggccuucgcuuugaaaaug

SEQ ID NO: 1960373 - RNA, 19 nt, Homo sapiens
  misc_RNA (1)...(19): siRNA sense strand
uaaaguggagguggagguu

SEQ ID NO: 1960374 - RNA, 19 nt, Homo sapiens
  misc_RNA (1)...(19): siRNA sense strand
ugaaguuugaugagaagaa

SEQ ID NO: 1960375 - RNA, 19 nt, Homo sapiens
  misc_RNA (1)...(19): siRNA sense strand
ccugggagacugcuucaug

SEQ ID NO: 1960376 - RNA, 19 nt, Homo sapiens
  misc_RNA (1)...(19): siRNA sense strand
gagaccagccccugcagua

SEQ ID NO: 1960377 - RNA, 19 nt, Homo sapiens
  misc_RNA (1)...(19): siRNA sense strand
gcagcaacaaccucuacau

SEQ ID NO: 1960378 - RNA, 19 nt, Homo sapiens
  misc_RNA (1)...(19): siRNA sense strand
gaggagcucaacaucauac

SEQ ID NO: 1960379 - RNA, 19 nt, Homo sapiens
  misc_RNA (1)...(19): siRNA sense strand
gagcggaagcggcaugacu

SEQ ID NO: 1960380 - RNA, 19 nt, Homo sapiens
  misc_RNA (1)...(19): siRNA sense strand
acagaaguggagcccuuua

SEQ ID NO: 1960381 - RNA, 19 nt, Homo sapiens
  misc_RNA (1)...(19): siRNA sense strand
uuuaacaccucugaucaca

SEQ ID NO: 1960382 - RNA, 19 nt, Homo sapiens
  misc_RNA (1)...(19): siRNA sense strand
agcaucagauagugaaugu

SEQ ID NO: 1960383 - RNA, 19 nt, Homo sapiens
  misc_RNA (1)...(19): siRNA sense strand
gagaagccccagcgaggua

SEQ ID NO: 1960384 - RNA, 19 nt, Homo sapiens
  misc_RNA (1)...(19): siRNA sense strand
acauggaggccuucacaga

SEQ ID NO: 1960385 - RNA, 19 nt, Homo sapiens
  misc_RNA (1)...(19): siRNA sense strand
gaaagcagcugaagaaaca

SEQ ID NO: 1960386 - RNA, 19 nt, Homo sapiens
  misc_RNA (1)...(19): siRNA sense strand
ggaaucaucuccauuuaau

SEQ ID NO: 1960387 - RNA, 19 nt, Homo sapiens
  misc_RNA (1)...(19): siRNA sense strand
aaacaaacauggagaagaa

SEQ ID NO: 1960388 - RNA, 19 nt, Homo sapiens
  misc_RNA (1)...(19): siRNA sense strand
gaacccaagucucugaauu

SEQ ID NO: 1960389 - RNA, 19 nt, Homo sapiens
  misc_RNA (1)...(19): siRNA sense strand
gaaugagaaucuuguagaa

SEQ ID NO: 1960390 - RNA, 19 nt, Homo sapiens
  misc_RNA (1)...(19): siRNA sense strand
ccaaagcaaugaagaaguu

SEQ ID NO: 1960391 - RNA, 19 nt, Homo sapiens
  misc_RNA (1)...(19): siRNA sense strand
gauaacagcuuccucaaac

SEQ ID NO: 1960392 - RNA, 19 nt, Homo sapiens
  misc_RNA (1)...(19): siRNA sense strand
caacuaugaugaaggcuuu

SEQ ID NO: 1960393 - RNA, 19 nt, Homo sapiens
  misc_RNA (1)...(19): siRNA sense strand
uaaggaaggucauaguuug

SEQ ID NO: 1960394 - RNA, 19 nt, Homo sapiens
  misc_RNA (1)...(19): siRNA sense strand
gaaggaagaucucugaaaa

SEQ ID NO: 1960395 - RNA, 19 nt, Homo sapiens
  misc_RNA (1)...(19): siRNA sense strand
ggaagaaucuauuguaagc

SEQ ID NO: 1960396 - RNA, 19 nt, Homo sapiens
  misc_RNA (1)...(19): siRNA sense strand
ucacuucaaucaacucuuu

SEQ ID NO: 1960397 - RNA, 19 nt, Homo sapiens
  misc_RNA (1)...(19): siRNA sense strand
gaaaacagcuauucucuag

SEQ ID NO: 1960398 - RNA, 19 nt, Homo sapiens
  misc_RNA (1)...(19): siRNA sense strand
ggaugaggaugaagaguga

SEQ ID NO: 1960399 - RNA, 19 nt, Homo sapiens
  misc_RNA (1)...(19): siRNA sense strand
gcaauggaccucacuauca

SEQ ID NO: 1960400 - RNA, 19 nt, Homo sapiens
  misc_RNA (1)...(19): siRNA sense strand
gaacauaugcaucuuuaca

SEQ ID NO: 1960401 - RNA, 19 nt, Homo sapiens
  misc_RNA (1)...(19): siRNA sense strand
gaagaugacucccgugacu

SEQ ID NO: 1960402 - RNA, 19 nt, Homo sapiens
  misc_RNA (1)...(19): siRNA sense strand
guugucaucuucuacauuu

SEQ ID NO: 1960403 - RNA, 19 nt, Homo sapiens
  misc_RNA (1)...(19): siRNA sense strand
gaacagauaaagagaaauc

SEQ ID NO: 1960404 - RNA, 19 nt, Homo sapiens
  misc_RNA (1)...(19): siRNA sense strand
acaacaaucuccacaagaa

SEQ ID NO: 1960405 - RNA, 19 nt, Homo sapiens
  misc_RNA (1)...(19): siRNA sense strand
ucagaaaccucuauaaagg

SEQ ID NO: 1960406 - RNA, 19 nt, Homo sapiens
  misc_RNA (1)...(19): siRNA sense strand
ccagaaagcagcugaagaa

SEQ ID NO: 1960407 - RNA, 19 nt, Homo sapiens
  misc_RNA (1)...(19): siRNA sense strand
caaagcagcucaaccaacu

SEQ ID NO: 1960408 - RNA, 19 nt, Homo sapiens
  misc_RNA (1)...(19): siRNA sense strand
aaagaccacucaacagaaa

SEQ ID NO: 1960409 - RNA, 19 nt, Homo sapiens
  misc_RNA (1)...(19): siRNA sense strand
gaacagcagcacugagauu

SEQ ID NO: 1960410 - RNA, 19 nt, Homo sapiens
  misc_RNA (1)...(19): siRNA sense strand
aaacagcuauucucuagau

SEQ ID NO: 1960411 - RNA, 19 nt, Homo sapiens
  misc_RNA (1)...(19): siRNA sense strand
ggaaggaagaucucugaaa

SEQ ID NO: 1960412 - RNA, 19 nt, Homo sapiens
  misc_RNA (1)...(19): siRNA sense strand
caacaccuuugcugaagaa

SEQ ID NO: 1960413 - RNA, 19 nt, Homo sapiens
  misc_RNA (1)...(19): siRNA sense strand
ccaaauggccuccugaaga

SEQ ID NO: 1960414 - RNA, 19 nt, Homo sapiens
  misc_RNA (1)...(19): siRNA sense strand
caaagcaccucugucaaga

SEQ ID NO: 1960415 - RNA, 19 nt, Homo sapiens
  misc_RNA (1)...(19): siRNA sense strand
guaaggaaggucauaguuu

SEQ ID NO: 1960416 - RNA, 19 nt, Homo sapiens
  misc_RNA (1)...(19): siRNA sense strand
gaagaacagauaaagagaa

SEQ ID NO: 1960417 - RNA, 19 nt, Homo sapiens
  misc_RNA (1)...(19): siRNA sense strand
agccaaagcugaccaagaa

SEQ ID NO: 1960418 - RNA, 19 nt, Homo sapiens
  misc_RNA (1)...(19): siRNA sense strand
agagaaaucgguauuauga

SEQ ID NO: 1960419 - RNA, 19 nt, Homo sapiens
  misc_RNA (1)...(19): siRNA sense strand
guuuggagauggagaauga

SEQ ID NO: 1960420 - RNA, 19 nt, Homo sapiens
  misc_RNA (1)...(19): siRNA sense strand
ugaaaguucuccucccaaa

SEQ ID NO: 1960421 - RNA, 19 nt, Homo sapiens
  misc_RNA (1)...(19): siRNA sense strand
gcagcuguguccaaacaaa

SEQ ID NO: 1960422 - RNA, 19 nt, Homo sapiens
  misc_RNA (1)...(19): siRNA sense strand
aggaacauaugcaucuuua

SEQ ID NO: 1960423 - RNA, 19 nt, Homo sapiens
  misc_RNA (1)...(19): siRNA sense strand
agaaaucgguauuaugaug

SEQ ID NO: 1960424 - RNA, 19 nt, Homo sapiens
  misc_RNA (1)...(19): siRNA sense strand
gcacagaccacacaaggau

SEQ ID NO: 1960425 - RNA, 19 nt, Homo sapiens
  misc_RNA (1)...(19): siRNA sense strand
gagcagagucucacacaga

SEQ ID NO: 1960426 - RNA, 19 nt, Homo sapiens
  misc_RNA (1)...(19): siRNA sense strand
gaaaucgguauuaugauga

SEQ ID NO: 1960427 - RNA, 19 nt, Homo sapiens
  misc_RNA (1)...(19): siRNA sense strand
gaacaagucaucggcuauu

SEQ ID NO: 1960428 - RNA, 19 nt, Homo sapiens
  misc_RNA (1)...(19): siRNA sense strand
gaagagaaguaaggaaggu

SEQ ID NO: 1960429 - RNA, 19 nt, Homo sapiens
  misc_RNA (1)...(19): siRNA sense strand
gaacaggcuuaagaugaug

SEQ ID NO: 1960430 - RNA, 19 nt, Homo sapiens
  misc_RNA (1)...(19): siRNA sense strand
gaagaauucacuacucaga

SEQ ID NO: 1960431 - RNA, 19 nt, Homo sapiens
  misc_RNA (1)...(19): siRNA sense strand
ggaaauauucuccaaguac

SEQ ID NO: 1960432 - RNA, 19 nt, Homo sapiens
  misc_RNA (1)...(19): siRNA sense strand
ggcuuaagaugauguuuga

SEQ ID NO: 1960433 - RNA, 19 nt, Homo sapiens
  misc_RNA (1)...(19): siRNA sense strand
gaaacaaacauggagaaga

SEQ ID NO: 1960434 - RNA, 19 nt, Homo sapiens
  misc_RNA (1)...(19): siRNA sense strand
aaacaacaaucuccacaag

SEQ ID NO: 1960435 - RNA, 19 nt, Homo sapiens
  misc_RNA (1)...(19): siRNA sense strand
caaauggccuccugaagac

SEQ ID NO: 1960436 - RNA, 19 nt, Homo sapiens
  misc_RNA (1)...(19): siRNA sense strand
ucaaccaacuauacaaaug

SEQ ID NO: 1960437 - RNA, 19 nt, Homo sapiens
  misc_RNA (1)...(19): siRNA sense strand
ggucaguugucaucuucua

SEQ ID NO: 1960438 - RNA, 19 nt, Homo sapiens
  misc_RNA (1)...(19): siRNA sense strand
gagaagaagagaaguaaca

SEQ ID NO: 1960439 - RNA, 19 nt, Homo sapiens
  misc_RNA (1)...(19): siRNA sense strand
ugaacaggcuuaagaugau

SEQ ID NO: 1960440 - RNA, 19 nt, Homo sapiens
  misc_RNA (1)...(19): siRNA sense strand
gguaacagccaaagaacuu

SEQ ID NO: 1960441 - RNA, 19 nt, Homo sapiens
  misc_RNA (1)...(19): siRNA sense strand
gaaccaacucaaacuaaga

SEQ ID NO: 1960442 - RNA, 19 nt, Homo sapiens
  misc_RNA (1)...(19): siRNA sense strand
gaaauaggcccaggucagu

SEQ ID NO: 1960443 - RNA, 19 nt, Homo sapiens
  misc_RNA (1)...(19): siRNA sense strand
caccuuugcugaagaauuc

SEQ ID NO: 1960444 - RNA, 19 nt, Homo sapiens
  misc_RNA (1)...(19): siRNA sense strand
gaaaggaaacaaguggaaa

SEQ ID NO: 1960445 - RNA, 19 nt, Homo sapiens
  misc_RNA (1)...(19): siRNA sense strand
gaagacaagccagcugaaa

SEQ ID NO: 1960446 - RNA, 19 nt, Homo sapiens
  misc_RNA (1)...(19): siRNA sense strand
cagcagguguuucacauca

SEQ ID NO: 1960447 - RNA, 19 nt, Homo sapiens
  misc_RNA (1)...(19): siRNA sense strand
gaggguaacagccaaagaa

SEQ ID NO: 1960448 - RNA, 19 nt, Homo sapiens
  misc_RNA (1)...(19): siRNA sense strand
ugagaaaggugaaccaacu

SEQ ID NO: 1960449 - RNA, 19 nt, Homo sapiens
  misc_RNA (1)...(19): siRNA sense strand
ggagagacagggaagagaa

SEQ ID NO: 1960450 - RNA, 19 nt, Homo sapiens
  misc_RNA (1)...(19): siRNA sense strand
caauggaccucacuaucau

SEQ ID NO: 1960451 - RNA, 19 nt, Homo sapiens
  misc_RNA (1)...(19): siRNA sense strand
ucacuaucauugaggguaa

SEQ ID NO: 1960452 - RNA, 19 nt, Homo sapiens
  misc_RNA (1)...(19): siRNA sense strand
ggaagaacagauaaagaga

SEQ ID NO: 1960453 - RNA, 19 nt, Homo sapiens
  misc_RNA (1)...(19): siRNA sense strand
gcccaaagccgaagugcaa

SEQ ID NO: 1960454 - RNA, 19 nt, Homo sapiens
  misc_RNA (1)...(19): siRNA sense strand
uguagcagcuucauuucaa

SEQ ID NO: 1960455 - RNA, 19 nt, Homo sapiens
  misc_RNA (1)...(19): siRNA sense strand
caaccaacuauacaaauga

SEQ ID NO: 1960456 - RNA, 19 nt, Homo sapiens
  misc_RNA (1)...(19): siRNA sense strand
ccaggcagcuguguccaaa

SEQ ID NO: 1960457 - RNA, 19 nt, Homo sapiens
  misc_RNA (1)...(19): siRNA sense strand
gguauuaugaugaggauga

SEQ ID NO: 1960458 - RNA, 19 nt, Homo sapiens
  misc_RNA (1)...(19): siRNA sense strand
caaacucagucuaggaaca

SEQ ID NO: 1960459 - RNA, 19 nt, Homo sapiens
  misc_RNA (1)...(19): siRNA sense strand
aaacaaagcagcucaacca

SEQ ID NO: 1960460 - RNA, 19 nt, Homo sapiens
  misc_RNA (1)...(19): siRNA sense strand
caacaaacucagucuagga

SEQ ID NO: 1960461 - RNA, 19 nt, Homo sapiens
  misc_RNA (1)...(19): siRNA sense strand
ggagagaccagcccagcuu

SEQ ID NO: 1960462 - RNA, 19 nt, Homo sapiens
  misc_RNA (1)...(19): siRNA sense strand
cauggaagaaucuauugua

SEQ ID NO: 1960463 - RNA, 19 nt, Homo sapiens
  misc_RNA (1)...(19): siRNA sense strand
ggacggugaggaucuuaaa

SEQ ID NO: 1960464 - RNA, 19 nt, Homo sapiens
  misc_RNA (1)...(19): siRNA sense strand
ggagaaugagaaucuugua

SEQ ID NO: 1960465 - RNA, 19 nt, Homo sapiens
  misc_RNA (1)...(19): siRNA sense strand
aggaaaggcuggagcaugu

SEQ ID NO: 1960466 - RNA, 19 nt, Homo sapiens
  misc_RNA (1)...(19): siRNA sense strand
caacaacaaacucagucua

SEQ ID NO: 1960467 - RNA, 19 nt, Homo sapiens
  misc_RNA (1)...(19): siRNA sense strand
uuaaagaccacucaacaga

SEQ ID NO: 1960468 - RNA, 19 nt, Homo sapiens
  misc_RNA (1)...(19): siRNA sense strand
gacaacaccuuugcugaag

SEQ ID NO: 1960469 - RNA, 19 nt, Homo sapiens
  misc_RNA (1)...(19): siRNA sense strand
guagcagcuucauuucaaa

SEQ ID NO: 1960470 - RNA, 19 nt, Homo sapiens
  misc_RNA (1)...(19): siRNA sense strand
gcucaaccaacuauacaaa

SEQ ID NO: 1960471 - RNA, 19 nt, Homo sapiens
  misc_RNA (1)...(19): siRNA sense strand
uagaugaccuggaaauagg

SEQ ID NO: 1960472 - RNA, 19 nt, Homo sapiens
  misc_RNA (1)...(19): siRNA sense strand
aauauaauguuccgcugaa

SEQ ID NO: 1960473 - RNA, 19 nt, Homo sapiens
  misc_RNA (1)...(19): siRNA sense strand
uaaagaccacucaacagaa

SEQ ID NO: 1960474 - RNA, 19 nt, Homo sapiens
  misc_RNA (1)...(19): siRNA sense strand
caagaacccaagucucuga

SEQ ID NO: 1960475 - RNA, 19 nt, Homo sapiens
  misc_RNA (1)...(19): siRNA sense strand
gaagaugccccuauugcua

SEQ ID NO: 1960476 - RNA, 19 nt, Homo sapiens
  misc_RNA (1)...(19): siRNA sense strand
aaucuaagggcaacuauga

SEQ ID NO: 1960477 - RNA, 19 nt, Homo sapiens
  misc_RNA (1)...(19): siRNA sense strand
caucggcuauuguggaaau

SEQ ID NO: 1960478 - RNA, 19 nt, Homo sapiens
  misc_RNA (1)...(19): siRNA sense strand
ucucagaaaccucuauaaa

SEQ ID NO: 1960479 - RNA, 19 nt, Homo sapiens
  misc_RNA (1)...(19): siRNA sense strand
ccacucaacagaaaguaaa

SEQ ID NO: 1960480 - RNA, 19 nt, Homo sapiens
  misc_RNA (1)...(19): siRNA sense strand
ggaaaauugucuaggagaa

SEQ ID NO: 1960481 - RNA, 19 nt, Homo sapiens
  misc_RNA (1)...(19): siRNA sense strand
ggagggagaaguggucaaa

SEQ ID NO: 1960482 - RNA, 19 nt, Homo sapiens
  misc_RNA (1)...(19): siRNA sense strand
ucccgugacucccagguua

SEQ ID NO: 1960483 - RNA, 19 nt, Homo sapiens
  misc_RNA (1)...(19): siRNA sense strand
ugacuguguuaaagaagaa

SEQ ID NO: 1960484 - RNA, 19 nt, Homo sapiens
  misc_RNA (1)...(19): siRNA sense strand
uaacagcuuccucaaacaa

SEQ ID NO: 1960485 - RNA, 19 nt, Homo sapiens
  misc_RNA (1)...(19): siRNA sense strand
gcaucaaccuccgcuucaa

SEQ ID NO: 1960486 - RNA, 19 nt, Homo sapiens
  misc_RNA (1)...(19): siRNA sense strand
uagcaaggaaggucaacga

SEQ ID NO: 1960487 - RNA, 19 nt, Homo sapiens
  misc_RNA (1)...(19): siRNA sense strand
gcaucaaccuccgcuucaa

SEQ ID NO: 1960488 - RNA, 19 nt, Homo sapiens
  misc_RNA (1)...(19): siRNA sense strand
gggugcagcuggucuggau

SEQ ID NO: 1960489 - RNA, 19 nt, Homo sapiens
  misc_RNA (1)...(19): siRNA sense strand
uagcaaggaaggucaacga

SEQ ID NO: 1960490 - RNA, 19 nt, Homo sapiens
  misc_RNA (1)...(19): siRNA sense strand
gagagaagcuguacaaaug

SEQ ID NO: 1960491 - RNA, 19 nt, Homo sapiens
  misc_RNA (1)...(19): siRNA sense strand
guacaaaugugaagaaugu

SEQ ID NO: 1960492 - RNA, 19 nt, Homo sapiens
  misc_RNA (1)...(19): siRNA sense strand
gaagagacaugagauggua

SEQ ID NO: 1960493 - RNA, 19 nt, Homo sapiens
  misc_RNA (1)...(19): siRNA sense strand
gacaugagaugguagcuaa

SEQ ID NO: 1960494 - RNA, 19 nt, Homo sapiens
  misc_RNA (1)...(19): siRNA sense strand
gaaauucccuacaaaugug

SEQ ID NO: 1960495 - RNA, 19 nt, Homo sapiens
  misc_RNA (1)...(19): siRNA sense strand
gagagaagcccuacaaaug

SEQ ID NO: 1960496 - RNA, 19 nt, Homo sapiens
  misc_RNA (1)...(19): siRNA sense strand
ggacuuaaccaauguuuga

SEQ ID NO: 1960497 - RNA, 19 nt, Homo sapiens
  misc_RNA (1)...(19): siRNA sense strand
gaaagugacccuaagaaga

SEQ ID NO: 1960498 - RNA, 19 nt, Homo sapiens
  misc_RNA (1)...(19): siRNA sense strand
cuacaaaugugaagaaugu

SEQ ID NO: 1960499 - RNA, 19 nt, Homo sapiens
  misc_RNA (1)...(19): siRNA sense strand
cuacaaaugugaagaaugu

SEQ ID NO: 1960500 - RNA, 19 nt, Homo sapiens
  misc_RNA (1)...(19): siRNA sense strand
cuacaaaugugaagaaugu

SEQ ID NO: 1960501 - RNA, 19 nt, Homo sapiens
  misc_RNA (1)...(19): siRNA sense strand
cuacaaaugugaagcauau

SEQ ID NO: 1960502 - RNA, 19 nt, Homo sapiens
  misc_RNA (1)...(19): siRNA sense strand
gagcagaacauaagagauu

SEQ ID NO: 1960503 - RNA, 19 nt, Homo sapiens
  misc_RNA (1)...(19): siRNA sense strand
gaagagaaacccuacaaau

SEQ ID NO: 1960504 - RNA, 19 nt, Homo sapiens
  misc_RNA (1)...(19): siRNA sense strand
uagagaaucuggcaaaguu

SEQ ID NO: 1960505 - RNA, 19 nt, Homo sapiens
  misc_RNA (1)...(19): siRNA sense strand
cuacaaauguggagaaugu

SEQ ID NO: 1960506 - RNA, 19 nt, Homo sapiens
  misc_RNA (1)...(19): siRNA sense strand
gagagaaacccuacaaaug

SEQ ID NO: 1960507 - RNA, 19 nt, Homo sapiens
  misc_RNA (1)...(19): siRNA sense strand
gagagaaacccuacaaaug

SEQ ID NO: 1960508 - RNA, 19 nt, Homo sapiens
  misc_RNA (1)...(19): siRNA sense strand
ccucaaagcuuacugaaca

SEQ ID NO: 1960509 - RNA, 19 nt, Homo sapiens
  misc_RNA (1)...(19): siRNA sense strand
aaccagaccucacaccuua

SEQ ID NO: 1960510 - RNA, 19 nt, Homo sapiens
  misc_RNA (1)...(19): siRNA sense strand
acaccuaacucaacauaaa

SEQ ID NO: 1960511 - RNA, 19 nt, Homo sapiens
  misc_RNA (1)...(19): siRNA sense strand
gagaaacucuacaaaugug

SEQ ID NO: 1960512 - RNA, 19 nt, Homo sapiens
  misc_RNA (1)...(19): siRNA sense strand
gagaaacccuacaaaugug

SEQ ID NO: 1960513 - RNA, 19 nt, Homo sapiens
  misc_RNA (1)...(19): siRNA sense strand
gagaaacccuacaaaugug

SEQ ID NO: 1960514 - RNA, 19 nt, Homo sapiens
  misc_RNA (1)...(19): siRNA sense strand
aaccaacucucaaaccuua

SEQ ID NO: 1960515 - RNA, 19 nt, Homo sapiens
  misc_RNA (1)...(19): siRNA sense strand
gagaaacccuacaaaugug

SEQ ID NO: 1960516 - RNA, 19 nt, Homo sapiens
  misc_RNA (1)...(19): siRNA sense strand
gcacaaaggagauuauagu

SEQ ID NO: 1960517 - RNA, 19 nt, Homo sapiens
  misc_RNA (1)...(19): siRNA sense strand
agagaaacguuaugaaugu

SEQ ID NO: 1960518 - RNA, 19 nt, Homo sapiens
  misc_RNA (1)...(19): siRNA sense strand
ucaaauagacacaagauga

SEQ ID NO: 1960519 - RNA, 19 nt, Homo sapiens
  misc_RNA (1)...(19): siRNA sense strand
ccacaaauguagagaaucu

SEQ ID NO: 1960520 - RNA, 19 nt, Homo sapiens
  misc_RNA (1)...(19): siRNA sense strand
ggagagaaacguuaugaau

SEQ ID NO: 1960521 - RNA, 19 nt, Homo sapiens
  misc_RNA (1)...(19): siRNA sense strand
gagaagcccuacaaaugug

SEQ ID NO: 1960522 - RNA, 19 nt, Homo sapiens
  misc_RNA (1)...(19): siRNA sense strand
ccucaacccuuaauaaaca

SEQ ID NO: 1960523 - RNA, 19 nt, Homo sapiens
  misc_RNA (1)...(19): siRNA sense strand
ggagagaaacccuacaaau

SEQ ID NO: 1960524 - RNA, 19 nt, Homo sapiens
  misc_RNA (1)...(19): siRNA sense strand
ggagagaaacccuacaaau

SEQ ID NO: 1960525 - RNA, 19 nt, Homo sapiens
  misc_RNA (1)...(19): siRNA sense strand
ggagagaagcuguacaaau

SEQ ID NO: 1960526 - RNA, 19 nt, Homo sapiens
  misc_RNA (1)...(19): siRNA sense strand
gagagaaacguuaugaaug

SEQ ID NO: 1960527 - RNA, 19 nt, Homo sapiens
  misc_RNA (1)...(19): siRNA sense strand
cuacaaaugugagaaaugu

SEQ ID NO: 1960528 - RNA, 19 nt, Homo sapiens
  misc_RNA (1)...(19): siRNA sense strand
aaagugugguugaguguaa

SEQ ID NO: 1960529 - RNA, 19 nt, Homo sapiens
  misc_RNA (1)...(19): siRNA sense strand
gaaacguuaugaaugugaa

SEQ ID NO: 1960530 - RNA, 19 nt, Homo sapiens
  misc_RNA (1)...(19): siRNA sense strand
gacauaagguaauucauac

SEQ ID NO: 1960531 - RNA, 19 nt, Homo sapiens
  misc_RNA (1)...(19): siRNA sense strand
ggagagaagcccuacaaau

SEQ ID NO: 1960532 - RNA, 19 nt, Homo sapiens
  misc_RNA (1)...(19): siRNA sense strand
ucucaaaccuuacuagaca

SEQ ID NO: 1960533 - RNA, 19 nt, Homo sapiens
  misc_RNA (1)...(19): siRNA sense strand
cuacaaaugugaggaaugu

SEQ ID NO: 1960534 - RNA, 19 nt, Homo sapiens
  misc_RNA (1)...(19): siRNA sense strand
gagaagcuguacaaaugug

SEQ ID NO: 1960535 - RNA, 19 nt, Homo sapiens
  misc_RNA (1)...(19): siRNA sense strand
gagaauucauacuggagaa

SEQ ID NO: 1960536 - RNA, 19 nt, Homo sapiens
  misc_RNA (1)...(19): siRNA sense strand
agagaaacccuacaaaugu

SEQ ID NO: 1960537 - RNA, 19 nt, Homo sapiens
  misc_RNA (1)...(19): siRNA sense strand
agagaaacccuacaaaugu

SEQ ID NO: 1960538 - RNA, 19 nt, Homo sapiens
  misc_RNA (1)...(19): siRNA sense strand
cauaagagaauucauagug

SEQ ID NO: 1960539 - RNA, 19 nt, Homo sapiens
  misc_RNA (1)...(19): siRNA sense strand
agagaaacccuacaaaugu

SEQ ID NO: 1960540 - RNA, 19 nt, Homo sapiens
  misc_RNA (1)...(19): siRNA sense strand
agaaauguguuagagcuuu

SEQ ID NO: 1960541 - RNA, 19 nt, Homo sapiens
  misc_RNA (1)...(19): siRNA sense strand
gaagaaugcggcaaagcuu

SEQ ID NO: 1960542 - RNA, 19 nt, Homo sapiens
  misc_RNA (1)...(19): siRNA sense strand
ccucacaccuuauuagaca

SEQ ID NO: 1960543 - RNA, 19 nt, Homo sapiens
  misc_RNA (1)...(19): siRNA sense strand
caucgacccuuacuacaca

SEQ ID NO: 1960544 - RNA, 19 nt, Homo sapiens
  misc_RNA (1)...(19): siRNA sense strand
ccucagcccuuaauacaca

SEQ ID NO: 1960545 - RNA, 19 nt, Homo sapiens
  misc_RNA (1)...(19): siRNA sense strand
ccucaacccuuacuacaca

SEQ ID NO: 1960546 - RNA, 19 nt, Homo sapiens
  misc_RNA (1)...(19): siRNA sense strand
aaaacuaccuugagcaaaa

SEQ ID NO: 1960547 - RNA, 19 nt, Homo sapiens
  misc_RNA (1)...(19): siRNA sense strand
uggcaaagcuuuuaaacaa

SEQ ID NO: 1960548 - RNA, 19 nt, Homo sapiens
  misc_RNA (1)...(19): siRNA sense strand
aaccaguccucaacccuua

SEQ ID NO: 1960549 - RNA, 19 nt, Homo sapiens
  misc_RNA (1)...(19): siRNA sense strand
gcauauggaagagccuuua

SEQ ID NO: 1960550 - RNA, 19 nt, Homo sapiens
  misc_RNA (1)...(19): siRNA sense strand
gguccucaacccuuaauaa

SEQ ID NO: 1960551 - RNA, 19 nt, Homo sapiens
  misc_RNA (1)...(19): siRNA sense strand
agaaaaggcuguaaaagug

SEQ ID NO: 1960552 - RNA, 19 nt, Homo sapiens
  misc_RNA (1)...(19): siRNA sense strand
aaagugacccuaagaagau

SEQ ID NO: 1960553 - RNA, 19 nt, Homo sapiens
  misc_RNA (1)...(19): siRNA sense strand
aagagaaacccuacaaaug

SEQ ID NO: 1960554 - RNA, 19 nt, Homo sapiens
  misc_RNA (1)...(19): siRNA sense strand
cauaagagaauucauacug

SEQ ID NO: 1960555 - RNA, 19 nt, Homo sapiens
  misc_RNA (1)...(19): siRNA sense strand
cauaagagaauucauacug

SEQ ID NO: 1960556 - RNA, 19 nt, Homo sapiens
  misc_RNA (1)...(19): siRNA sense strand
gagauuauaguggacuuaa

SEQ ID NO: 1960557 - RNA, 19 nt, Homo sapiens
  misc_RNA (1)...(19): siRNA sense strand
caaaucuuacugaccauaa

SEQ ID NO: 1960558 - RNA, 19 nt, Homo sapiens
  misc_RNA (1)...(19): siRNA sense strand
gagaugguagcuaaacauu

SEQ ID NO: 1960559 - RNA, 19 nt, Homo sapiens
  misc_RNA (1)...(19): siRNA sense strand
caaagcuuacugaacauaa

SEQ ID NO: 1960560 - RNA, 19 nt, Homo sapiens
  misc_RNA (1)...(19): siRNA sense strand
agacacaagaugagacaua

SEQ ID NO: 1960561 - RNA, 19 nt, Homo sapiens
  misc_RNA (1)...(19): siRNA sense strand
uaaagaaugucgcaaaaca

SEQ ID NO: 1960562 - RNA, 19 nt, Homo sapiens
  misc_RNA (1)...(19): siRNA sense strand
cacauaagauaauccauac

SEQ ID NO: 1960563 - RNA, 19 nt, Homo sapiens
  misc_RNA (1)...(19): siRNA sense strand
gagaaacguuaugaaugug

SEQ ID NO: 1960564 - RNA, 19 nt, Homo sapiens
  misc_RNA (1)...(19): siRNA sense strand
ugaagaauguggcaaagcu

SEQ ID NO: 1960565 - RNA, 19 nt, Homo sapiens
  misc_RNA (1)...(19): siRNA sense strand
gaaacucuacaaaugugaa

SEQ ID NO: 1960566 - RNA, 19 nt, Homo sapiens
  misc_RNA (1)...(19): siRNA sense strand
gaugagacauacugaaaau

SEQ ID NO: 1960567 - RNA, 19 nt, Homo sapiens
  misc_RNA (1)...(19): siRNA sense strand
gaaauguguuagagcuuuu

SEQ ID NO: 1960568 - RNA, 19 nt, Homo sapiens
  misc_RNA (1)...(19): siRNA sense strand
caaacuagagugaauuucu

SEQ ID NO: 1960569 - RNA, 19 nt, Homo sapiens
  misc_RNA (1)...(19): siRNA sense strand
ucacaccuaacucaacaua

SEQ ID NO: 1960570 - RNA, 19 nt, Homo sapiens
  misc_RNA (1)...(19): siRNA sense strand
auaguggacuuaaccaaug

SEQ ID NO: 1960571 - RNA, 19 nt, Homo sapiens
  misc_RNA (1)...(19): siRNA sense strand
agagaagcccuacaaaugu

SEQ ID NO: 1960572 - RNA, 19 nt, Homo sapiens
  misc_RNA (1)...(19): siRNA sense strand
gacacaagaugagacauac

SEQ ID NO: 1960573 - RNA, 19 nt, Homo sapiens
  misc_RNA (1)...(19): siRNA sense strand
ggccagagcagaacauaag

SEQ ID NO: 1960574 - RNA, 19 nt, Homo sapiens
  misc_RNA (1)...(19): siRNA sense strand
gagagaauccccacaaaug

SEQ ID NO: 1960575 - RNA, 19 nt, Homo sapiens
  misc_RNA (1)...(19): siRNA sense strand
uggcaaagcuuuuaaccaa

SEQ ID NO: 1960576 - RNA, 19 nt, Homo sapiens
  misc_RNA (1)...(19): siRNA sense strand
aauccaaacuagagugaau

SEQ ID NO: 1960577 - RNA, 19 nt, Homo sapiens
  misc_RNA (1)...(19): siRNA sense strand
aagaugagacauacugaaa

SEQ ID NO: 1960578 - RNA, 19 nt, Homo sapiens
  misc_RNA (1)...(19): siRNA sense strand
ggagauuauaguggacuua

SEQ ID NO: 1960579 - RNA, 19 nt, Homo sapiens
  misc_RNA (1)...(19): siRNA sense strand
cauaagauaauccauacug

SEQ ID NO: 1960580 - RNA, 19 nt, Homo sapiens
  misc_RNA (1)...(19): siRNA sense strand
aaccagucaucgacccuua

SEQ ID NO: 1960581 - RNA, 19 nt, Homo sapiens
  misc_RNA (1)...(19): siRNA sense strand
cagaaagugacccuaagaa

SEQ ID NO: 1960582 - RNA, 19 nt, Homo sapiens
  misc_RNA (1)...(19): siRNA sense strand
ucaaaccuuacuagacaua

SEQ ID NO: 1960583 - RNA, 19 nt, Homo sapiens
  misc_RNA (1)...(19): siRNA sense strand
gaagaauguggcaaagcuu

SEQ ID NO: 1960584 - RNA, 19 nt, Homo sapiens
  misc_RNA (1)...(19): siRNA sense strand
ccagaaagugacccuaaga

SEQ ID NO: 1960585 - RNA, 19 nt, Homo sapiens
  misc_RNA (1)...(19): siRNA sense strand
ucacaccuuauuagacaua

SEQ ID NO: 1960586 - RNA, 19 nt, Homo sapiens
  misc_RNA (1)...(19): siRNA sense strand
guccucaacccuuaauaaa

SEQ ID NO: 1960587 - RNA, 19 nt, Homo sapiens
  misc_RNA (1)...(19): siRNA sense strand
caagaugagacauacugaa

SEQ ID NO: 1960588 - RNA, 19 nt, Homo sapiens
  misc_RNA (1)...(19): siRNA sense strand
caaauagacacaagaugag

SEQ ID NO: 1960589 - RNA, 19 nt, Homo sapiens
  misc_RNA (1)...(19): siRNA sense strand
caccuauccucaaaacuua

SEQ ID NO: 1960590 - RNA, 19 nt, Homo sapiens
  misc_RNA (1)...(19): siRNA sense strand
gcaugaaucugacuccuuu

SEQ ID NO: 1960591 - RNA, 19 nt, Homo sapiens
  misc_RNA (1)...(19): siRNA sense strand
gagaaugugucccaggauu

SEQ ID NO: 1960592 - RNA, 19 nt, Homo sapiens
  misc_RNA (1)...(19): siRNA sense strand
gagagaggcugcagguuca

SEQ ID NO: 1960593 - RNA, 19 nt, Homo sapiens
  misc_RNA (1)...(19): siRNA sense strand
aaacagggcucugaugaga

SEQ ID NO: 1960594 - RNA, 19 nt, Homo sapiens
  misc_RNA (1)...(19): siRNA sense strand
gcucaaagaggguaccaua

SEQ ID NO: 1960595 - RNA, 19 nt, Homo sapiens
  misc_RNA (1)...(19): siRNA sense strand
ggaaggagaccagcauaaa

SEQ ID NO: 1960596 - RNA, 19 nt, Homo sapiens
  misc_RNA (1)...(19): siRNA sense strand
gaaaggauggagugugaaa

SEQ ID NO: 1960597 - RNA, 19 nt, Homo sapiens
  misc_RNA (1)...(19): siRNA sense strand
aagaaaggauggaguguga

SEQ ID NO: 1960598 - RNA, 19 nt, Homo sapiens
  misc_RNA (1)...(19): siRNA sense strand
gcgacaaggugaugacgaa

SEQ ID NO: 1960599 - RNA, 19 nt, Homo sapiens
  misc_RNA (1)...(19): siRNA sense strand
gaaucugacuccuuuacug

SEQ ID NO: 1960600 - RNA, 19 nt, Homo sapiens
  misc_RNA (1)...(19): siRNA sense strand
acacugggcucuuuaccaa

SEQ ID NO: 1960601 - RNA, 19 nt, Homo sapiens
  misc_RNA (1)...(19): siRNA sense strand
gcagcucgaugccucagaa

SEQ ID NO: 1960602 - RNA, 19 nt, Homo sapiens
  misc_RNA (1)...(19): siRNA sense strand
gaauaagcuuggugaacug

SEQ ID NO: 1960603 - RNA, 19 nt, Homo sapiens
  misc_RNA (1)...(19): siRNA sense strand
uaagccauaucauuaguga

SEQ ID NO: 1960604 - RNA, 19 nt, Homo sapiens
  misc_RNA (1)...(19): siRNA sense strand
gaugagaacaugucagaau

SEQ ID NO: 1960605 - RNA, 19 nt, Homo sapiens
  misc_RNA (1)...(19): siRNA sense strand
caagugggcuccugaucau

SEQ ID NO: 1960606 - RNA, 19 nt, Homo sapiens
  misc_RNA (1)...(19): siRNA sense strand
guucaagucugcuaagaag

SEQ ID NO: 1960607 - RNA, 19 nt, Homo sapiens
  misc_RNA (1)...(19): siRNA sense strand
gaaguagaaagaauggauu

SEQ ID NO: 1960608 - RNA, 19 nt, Homo sapiens
  misc_RNA (1)...(19): siRNA sense strand
gaaaccagcagugugugua

SEQ ID NO: 1960609 - RNA, 19 nt, Homo sapiens
  misc_RNA (1)...(19): siRNA sense strand
uaaggacugucgagaagug

SEQ ID NO: 1960610 - RNA, 19 nt, Homo sapiens
  misc_RNA (1)...(19): siRNA sense strand
caaagaggguaccauacuc

SEQ ID NO: 1960611 - RNA, 19 nt, Homo sapiens
  misc_RNA (1)...(19): siRNA sense strand
gcaacauucuuggcaugaa

SEQ ID NO: 1960612 - RNA, 19 nt, Homo sapiens
  misc_RNA (1)...(19): siRNA sense strand
guaccauacucgcuugaau

SEQ ID NO: 1960613 - RNA, 19 nt, Homo sapiens
  misc_RNA (1)...(19): siRNA sense strand
ccaaaucacccagcucuga

SEQ ID NO: 1960614 - RNA, 19 nt, Homo sapiens
  misc_RNA (1)...(19): siRNA sense strand
uggcuccggugaccaauuu

SEQ ID NO: 1960615 - RNA, 19 nt, Homo sapiens
  misc_RNA (1)...(19): siRNA sense strand
agaauaagcuuggugaacu

SEQ ID NO: 1960616 - RNA, 19 nt, Homo sapiens
  misc_RNA (1)...(19): siRNA sense strand
gaucauuguucugaaguag

SEQ ID NO: 1960617 - RNA, 19 nt, Homo sapiens
  misc_RNA (1)...(19): siRNA sense strand
gauggagugugaaacagau

SEQ ID NO: 1960618 - RNA, 19 nt, Homo sapiens
  misc_RNA (1)...(19): siRNA sense strand
gaaaagagcccuggauaca

SEQ ID NO: 1960619 - RNA, 19 nt, Homo sapiens
  misc_RNA (1)...(19): siRNA sense strand
gggaaggagaccagcauaa

SEQ ID NO: 1960620 - RNA, 19 nt, Homo sapiens
  misc_RNA (1)...(19): siRNA sense strand
ggccacggauugugugaau

SEQ ID NO: 1960621 - RNA, 19 nt, Homo sapiens
  misc_RNA (1)...(19): siRNA sense strand
gaaggagaccagcauaaac

SEQ ID NO: 1960622 - RNA, 19 nt, Homo sapiens
  misc_RNA (1)...(19): siRNA sense strand
agaccagcauaaacacuuu

SEQ ID NO: 1960623 - RNA, 19 nt, Homo sapiens
  misc_RNA (1)...(19): siRNA sense strand
cgcaacuacugcuacauuu

SEQ ID NO: 1960624 - RNA, 19 nt, Homo sapiens
  misc_RNA (1)...(19): siRNA sense strand
agaguaagcaacauucuug

SEQ ID NO: 1960625 - RNA, 19 nt, Homo sapiens
  misc_RNA (1)...(19): siRNA sense strand
ugaagcgagugacaucaga

SEQ ID NO: 1960626 - RNA, 19 nt, Homo sapiens
  misc_RNA (1)...(19): siRNA sense strand
ugacucugaugacacaaug

SEQ ID NO: 1960627 - RNA, 19 nt, Homo sapiens
  misc_RNA (1)...(19): siRNA sense strand
ccagugcaguucacaugga

SEQ ID NO: 1960628 - RNA, 19 nt, Homo sapiens
  misc_RNA (1)...(19): siRNA sense strand
cacgugacaucaagaggaa

SEQ ID NO: 1960629 - RNA, 19 nt, Homo sapiens
  misc_RNA (1)...(19): siRNA sense strand
gagaccagcauaaacacuu

SEQ ID NO: 1960630 - RNA, 19 nt, Homo sapiens
  misc_RNA (1)...(19): siRNA sense strand
gaaggcugguugggaagga

SEQ ID NO: 1960631 - RNA, 19 nt, Homo sapiens
  misc_RNA (1)...(19): siRNA sense strand
gauucuggauuggauaaau

SEQ ID NO: 1960632 - RNA, 19 nt, Homo sapiens
  misc_RNA (1)...(19): siRNA sense strand
ccaagugggcuccugauca

SEQ ID NO: 1960633 - RNA, 19 nt, Homo sapiens
  misc_RNA (1)...(19): siRNA sense strand
gaaagaaaggauggagugu

SEQ ID NO: 1960634 - RNA, 19 nt, Homo sapiens
  misc_RNA (1)...(19): siRNA sense strand
ggugucagauuggagcuau

SEQ ID NO: 1960635 - RNA, 19 nt, Homo sapiens
  misc_RNA (1)...(19): siRNA sense strand
cagcgaggccucugaguca

SEQ ID NO: 1960636 - RNA, 19 nt, Homo sapiens
  misc_RNA (1)...(19): siRNA sense strand
ggauggagugugaaacaga

SEQ ID NO: 1960637 - RNA, 19 nt, Homo sapiens
  misc_RNA (1)...(19): siRNA sense strand
gcuaagaagcagcgucugu

SEQ ID NO: 1960638 - RNA, 19 nt, Homo sapiens
  misc_RNA (1)...(19): siRNA sense strand
acagagugauugguucuau

SEQ ID NO: 1960639 - RNA, 19 nt, Homo sapiens
  misc_RNA (1)...(19): siRNA sense strand
ggaagcgucguucugacuu

SEQ ID NO: 1960640 - RNA, 19 nt, Homo sapiens
  misc_RNA (1)...(19): siRNA sense strand
ugaucauuguucugaagua

SEQ ID NO: 1960641 - RNA, 19 nt, Homo sapiens
  misc_RNA (1)...(19): siRNA sense strand
acuaaggacugucgagaag

SEQ ID NO: 1960642 - RNA, 19 nt, Homo sapiens
  misc_RNA (1)...(19): siRNA sense strand
cuaaucuucugcccaagug

SEQ ID NO: 1960643 - RNA, 19 nt, Homo sapiens
  misc_RNA (1)...(19): siRNA sense strand
ucugacuccuuuacugaaa

SEQ ID NO: 1960644 - RNA, 19 nt, Homo sapiens
  misc_RNA (1)...(19): siRNA sense strand
cagcagagaaagccacaga

SEQ ID NO: 1960645 - RNA, 19 nt, Homo sapiens
  misc_RNA (1)...(19): siRNA sense strand
ccacagcaucuuugucuag

SEQ ID NO: 1960646 - RNA, 19 nt, Homo sapiens
  misc_RNA (1)...(19): siRNA sense strand
ucagauuccacauuccuuu

SEQ ID NO: 1960647 - RNA, 19 nt, Homo sapiens
  misc_RNA (1)...(19): siRNA sense strand
cagagugauugguucuaug

SEQ ID NO: 1960648 - RNA, 19 nt, Homo sapiens
  misc_RNA (1)...(19): siRNA sense strand
gaaggugaagcgagugaca

SEQ ID NO: 1960649 - RNA, 19 nt, Homo sapiens
  misc_RNA (1)...(19): siRNA sense strand
ucaaagaggguaccauacu

SEQ ID NO: 1960650 - RNA, 19 nt, Homo sapiens
  misc_RNA (1)...(19): siRNA sense strand
gaagggcgacaaggugaug

SEQ ID NO: 1960651 - RNA, 19 nt, Homo sapiens
  misc_RNA (1)...(19): siRNA sense strand
gaugacgaacagagugauu

SEQ ID NO: 1960652 - RNA, 19 nt, Homo sapiens
  misc_RNA (1)...(19): siRNA sense strand
augagaacaugucagaaug

SEQ ID NO: 1960653 - RNA, 19 nt, Homo sapiens
  misc_RNA (1)...(19): siRNA sense strand
gaaagccacagacgcaacu

SEQ ID NO: 1960654 - RNA, 19 nt, Homo sapiens
  misc_RNA (1)...(19): siRNA sense strand
gccacagcaucuuugucua

SEQ ID NO: 1960655 - RNA, 19 nt, Homo sapiens
  misc_RNA (1)...(19): siRNA sense strand
acugagaggauaagccaua

SEQ ID NO: 1960656 - RNA, 19 nt, Homo sapiens
  misc_RNA (1)...(19): siRNA sense strand
aaucugacuccuuuacuga

SEQ ID NO: 1960657 - RNA, 19 nt, Homo sapiens
  misc_RNA (1)...(19): siRNA sense strand
agacgcaacuacugcuaca

SEQ ID NO: 1960658 - RNA, 19 nt, Homo sapiens
  misc_RNA (1)...(19): siRNA sense strand
gcagaauaagcuuggugaa

SEQ ID NO: 1960659 - RNA, 19 nt, Homo sapiens
  misc_RNA (1)...(19): siRNA sense strand
ugaaguagaaagaauggau

SEQ ID NO: 1960660 - RNA, 19 nt, Homo sapiens
  misc_RNA (1)...(19): siRNA sense strand
agagugauugguucuauga

SEQ ID NO: 1960661 - RNA, 19 nt, Homo sapiens
  misc_RNA (1)...(19): siRNA sense strand
uggaugaggccacuaagga

SEQ ID NO: 1960662 - RNA, 19 nt, Homo sapiens
  misc_RNA (1)...(19): siRNA sense strand
gcucuuuaccaaugaugaa

SEQ ID NO: 1960663 - RNA, 19 nt, Homo sapiens
  misc_RNA (1)...(19): siRNA sense strand
aaacaggaaggaaagaaag

SEQ ID NO: 1960664 - RNA, 19 nt, Homo sapiens
  misc_RNA (1)...(19): siRNA sense strand
ggccacagcaucuuugucu

SEQ ID NO: 1960665 - RNA, 19 nt, Homo sapiens
  misc_RNA (1)...(19): siRNA sense strand
aggauucacugucccuaau

SEQ ID NO: 1960666 - RNA, 19 nt, Homo sapiens
  misc_RNA (1)...(19): siRNA sense strand
acugggcucuuuaccaaug

SEQ ID NO: 1960667 - RNA, 19 nt, Homo sapiens
  misc_RNA (1)...(19): siRNA sense strand
ucaagaguaagcaacauuc

SEQ ID NO: 1960668 - RNA, 19 nt, Homo sapiens
  misc_RNA (1)...(19): siRNA sense strand
aaggagaccagcauaaaca

SEQ ID NO: 1960669 - RNA, 19 nt, Homo sapiens
  misc_RNA (1)...(19): siRNA sense strand
uagugacucugaugacaca

SEQ ID NO: 1960670 - RNA, 19 nt, Homo sapiens
  misc_RNA (1)...(19): siRNA sense strand
ugagcugguacacgacuua

SEQ ID NO: 1960671 - RNA, 19 nt, Homo sapiens
  misc_RNA (1)...(19): siRNA sense strand
gguucaagucugcuaagaa

SEQ ID NO: 1960672 - RNA, 19 nt, Homo sapiens
  misc_RNA (1)...(19): siRNA sense strand
gcucgaugccucagaaagg

SEQ ID NO: 1960673 - RNA, 19 nt, Homo sapiens
  misc_RNA (1)...(19): siRNA sense strand
acagggcucugaugagaac

SEQ ID NO: 1960674 - RNA, 19 nt, Homo sapiens
  misc_RNA (1)...(19): siRNA sense strand
gaaggaaagaaaggaugga

SEQ ID NO: 1960675 - RNA, 19 nt, Homo sapiens
  misc_RNA (1)...(19): siRNA sense strand
ggagugugaaacagaugaa

SEQ ID NO: 1960676 - RNA, 19 nt, Homo sapiens
  misc_RNA (1)...(19): siRNA sense strand
caaccacaccagcaucaca

SEQ ID NO: 1960677 - RNA, 19 nt, Homo sapiens
  misc_RNA (1)...(19): siRNA sense strand
aaacgacacccagcucuca

SEQ ID NO: 1960678 - RNA, 19 nt, Homo sapiens
  misc_RNA (1)...(19): siRNA sense strand
ugacacaaugguagccaaa

SEQ ID NO: 1960679 - RNA, 19 nt, Homo sapiens
  misc_RNA (1)...(19): siRNA sense strand
gucaagaguaagcaacauu

SEQ ID NO: 1960680 - RNA, 19 nt, Homo sapiens
  misc_RNA (1)...(19): siRNA sense strand
gcaccuugucgaccacuca

SEQ ID NO: 1960681 - RNA, 19 nt, Homo sapiens
  misc_RNA (1)...(19): siRNA sense strand
uaaaaugccacaagaaaag

SEQ ID NO: 1960682 - RNA, 19 nt, Homo sapiens
  misc_RNA (1)...(19): siRNA sense strand
gcaacuacugcuacauuuu

SEQ ID NO: 1960683 - RNA, 19 nt, Homo sapiens
  misc_RNA (1)...(19): siRNA sense strand
acgcaacuacugcuacauu

SEQ ID NO: 1960684 - RNA, 19 nt, Homo sapiens
  misc_RNA (1)...(19): siRNA sense strand
ccaccauguucacgugaca

SEQ ID NO: 1960685 - RNA, 19 nt, Homo sapiens
  misc_RNA (1)...(19): siRNA sense strand
caggauucacugucccuaa

SEQ ID NO: 1960686 - RNA, 19 nt, Homo sapiens
  misc_RNA (1)...(19): siRNA sense strand
acaaggugaugacgaacag

SEQ ID NO: 1960687 - RNA, 19 nt, Homo sapiens
  misc_RNA (1)...(19): siRNA sense strand
gacaaggugaugacgaaca

SEQ ID NO: 1960688 - RNA, 19 nt, Homo sapiens
  misc_RNA (1)...(19): siRNA sense strand
gggcucugaugagaacaug

SEQ ID NO: 1960689 - RNA, 19 nt, Homo sapiens
  misc_RNA (1)...(19): siRNA sense strand
gugugaaacagaugaacaa

SEQ ID NO: 1960690 - RNA, 19 nt, Homo sapiens
  misc_RNA (1)...(19): siRNA sense strand
gcaugaaucugacuccuuu

SEQ ID NO: 1960691 - RNA, 19 nt, Homo sapiens
  misc_RNA (1)...(19): siRNA sense strand
gagaaugugucccaggauu

SEQ ID NO: 1960692 - RNA, 19 nt, Homo sapiens
  misc_RNA (1)...(19): siRNA sense strand
gagagaggcugcagguuca

SEQ ID NO: 1960693 - RNA, 19 nt, Homo sapiens
  misc_RNA (1)...(19): siRNA sense strand
aaacagggcucugaugaga

SEQ ID NO: 1960694 - RNA, 19 nt, Homo sapiens
  misc_RNA (1)...(19): siRNA sense strand
gcucaaagaggguaccaua

SEQ ID NO: 1960695 - RNA, 19 nt, Homo sapiens
  misc_RNA (1)...(19): siRNA sense strand
ggaaggagaccagcauaaa

SEQ ID NO: 1960696 - RNA, 19 nt, Homo sapiens
  misc_RNA (1)...(19): siRNA sense strand
gaaaggauggagugugaaa

SEQ ID NO: 1960697 - RNA, 19 nt, Homo sapiens
  misc_RNA (1)...(19): siRNA sense strand
aagaaaggauggaguguga

SEQ ID NO: 1960698 - RNA, 19 nt, Homo sapiens
  misc_RNA (1)...(19): siRNA sense strand
gcgacaaggugaugacgaa

SEQ ID NO: 1960699 - RNA, 19 nt, Homo sapiens
  misc_RNA (1)...(19): siRNA sense strand
gaaucugacuccuuuacug

SEQ ID NO: 1960700 - RNA, 19 nt, Homo sapiens
  misc_RNA (1)...(19): siRNA sense strand
acacugggcucuuuaccaa

SEQ ID NO: 1960701 - RNA, 19 nt, Homo sapiens
  misc_RNA (1)...(19): siRNA sense strand
gcagcucgaugccucagaa

SEQ ID NO: 1960702 - RNA, 19 nt, Homo sapiens
  misc_RNA (1)...(19): siRNA sense strand
gaauaagcuuggugaacug

SEQ ID NO: 1960703 - RNA, 19 nt, Homo sapiens
  misc_RNA (1)...(19): siRNA sense strand
uaagccauaucauuaguga

SEQ ID NO: 1960704 - RNA, 19 nt, Homo sapiens
  misc_RNA (1)...(19): siRNA sense strand
gaugagaacaugucagaau

SEQ ID NO: 1960705 - RNA, 19 nt, Homo sapiens
  misc_RNA (1)...(19): siRNA sense strand
caagugggcuccugaucau

SEQ ID NO: 1960706 - RNA, 19 nt, Homo sapiens
  misc_RNA (1)...(19): siRNA sense strand
guucaagucugcuaagaag

SEQ ID NO: 1960707 - RNA, 19 nt, Homo sapiens
  misc_RNA (1)...(19): siRNA sense strand
gaaguagaaagaauggauu

SEQ ID NO: 1960708 - RNA, 19 nt, Homo sapiens
  misc_RNA (1)...(19): siRNA sense strand
gaaaccagcagugugugua

SEQ ID NO: 1960709 - RNA, 19 nt, Homo sapiens
  misc_RNA (1)...(19): siRNA sense strand
uaaggacugucgagaagug

SEQ ID NO: 1960710 - RNA, 19 nt, Homo sapiens
  misc_RNA (1)...(19): siRNA sense strand
caaagaggguaccauacuc

SEQ ID NO: 1960711 - RNA, 19 nt, Homo sapiens
  misc_RNA (1)...(19): siRNA sense strand
gcaacauucuuggcaugaa

SEQ ID NO: 1960712 - RNA, 19 nt, Homo sapiens
  misc_RNA (1)...(19): siRNA sense strand
guaccauacucgcuugaau

SEQ ID NO: 1960713 - RNA, 19 nt, Homo sapiens
  misc_RNA (1)...(19): siRNA sense strand
ccaaaucacccagcucuga

SEQ ID NO: 1960714 - RNA, 19 nt, Homo sapiens
  misc_RNA (1)...(19): siRNA sense strand
uggcuccggugaccaauuu

SEQ ID NO: 1960715 - RNA, 19 nt, Homo sapiens
  misc_RNA (1)...(19): siRNA sense strand
agaauaagcuuggugaacu

SEQ ID NO: 1960716 - RNA, 19 nt, Homo sapiens
  misc_RNA (1)...(19): siRNA sense strand
gaucauuguucugaaguag

SEQ ID NO: 1960717 - RNA, 19 nt, Homo sapiens
  misc_RNA (1)...(19): siRNA sense strand
gauggagugugaaacagau

SEQ ID NO: 1960718 - RNA, 19 nt, Homo sapiens
  misc_RNA (1)...(19): siRNA sense strand
gaaaagagcccuggauaca

SEQ ID NO: 1960719 - RNA, 19 nt, Homo sapiens
  misc_RNA (1)...(19): siRNA sense strand
gggaaggagaccagcauaa

SEQ ID NO: 1960720 - RNA, 19 nt, Homo sapiens
  misc_RNA (1)...(19): siRNA sense strand
ggccacggauugugugaau

SEQ ID NO: 1960721 - RNA, 19 nt, Homo sapiens
  misc_RNA (1)...(19): siRNA sense strand
gaaggagaccagcauaaac

SEQ ID NO: 1960722 - RNA, 19 nt, Homo sapiens
  misc_RNA (1)...(19): siRNA sense strand
agaccagcauaaacacuuu

SEQ ID NO: 1960723 - RNA, 19 nt, Homo sapiens
  misc_RNA (1)...(19): siRNA sense strand
cgcaacuacugcuacauuu

SEQ ID NO: 1960724 - RNA, 19 nt, Homo sapiens
  misc_RNA (1)...(19): siRNA sense strand
agaguaagcaacauucuug

SEQ ID NO: 1960725 - RNA, 19 nt, Homo sapiens
  misc_RNA (1)...(19): siRNA sense strand
ugaagcgagugacaucaga

SEQ ID NO: 1960726 - RNA, 19 nt, Homo sapiens
  misc_RNA (1)...(19): siRNA sense strand
ugacucugaugacacaaug

SEQ ID NO: 1960727 - RNA, 19 nt, Homo sapiens
  misc_RNA (1)...(19): siRNA sense strand
ccagugcaguucacaugga

SEQ ID NO: 1960728 - RNA, 19 nt, Homo sapiens
  misc_RNA (1)...(19): siRNA sense strand
cacgugacaucaagaggaa

SEQ ID NO: 1960729 - RNA, 19 nt, Homo sapiens
  misc_RNA (1)...(19): siRNA sense strand
gagaccagcauaaacacuu

SEQ ID NO: 1960730 - RNA, 19 nt, Homo sapiens
  misc_RNA (1)...(19): siRNA sense strand
gaaggcugguugggaagga

SEQ ID NO: 1960731 - RNA, 19 nt, Homo sapiens
  misc_RNA (1)...(19): siRNA sense strand
gauucuggauuggauaaau

SEQ ID NO: 1960732 - RNA, 19 nt, Homo sapiens
  misc_RNA (1)...(19): siRNA sense strand
ccaagugggcuccugauca

SEQ ID NO: 1960733 - RNA, 19 nt, Homo sapiens
  misc_RNA (1)...(19): siRNA sense strand
gaaagaaaggauggagugu

SEQ ID NO: 1960734 - RNA, 19 nt, Homo sapiens
  misc_RNA (1)...(19): siRNA sense strand
ggugucagauuggagcuau

SEQ ID NO: 1960735 - RNA, 19 nt, Homo sapiens
  misc_RNA (1)...(19): siRNA sense strand
cagcgaggccucugaguca

SEQ ID NO: 1960736 - RNA, 19 nt, Homo sapiens
  misc_RNA (1)...(19): siRNA sense strand
ggauggagugugaaacaga

SEQ ID NO: 1960737 - RNA, 19 nt, Homo sapiens
  misc_RNA (1)...(19): siRNA sense strand
gcuaagaagcagcgucugu

SEQ ID NO: 1960738 - RNA, 19 nt, Homo sapiens
  misc_RNA (1)...(19): siRNA sense strand
acagagugauugguucuau

SEQ ID NO: 1960739 - RNA, 19 nt, Homo sapiens
  misc_RNA (1)...(19): siRNA sense strand
ggaagcgucguucugacuu

SEQ ID NO: 1960740 - RNA, 19 nt, Homo sapiens
  misc_RNA (1)...(19): siRNA sense strand
ugaucauuguucugaagua

SEQ ID NO: 1960741 - RNA, 19 nt, Homo sapiens
  misc_RNA (1)...(19): siRNA sense strand
acuaaggacugucgagaag

SEQ ID NO: 1960742 - RNA, 19 nt, Homo sapiens
  misc_RNA (1)...(19): siRNA sense strand
cuaaucuucugcccaagug

SEQ ID NO: 1960743 - RNA, 19 nt, Homo sapiens
  misc_RNA (1)...(19): siRNA sense strand
ucugacuccuuuacugaaa

SEQ ID NO: 1960744 - RNA, 19 nt, Homo sapiens
  misc_RNA (1)...(19): siRNA sense strand
cagcagagaaagccacaga

SEQ ID NO: 1960745 - RNA, 19 nt, Homo sapiens
  misc_RNA (1)...(19): siRNA sense strand
ccacagcaucuuugucuag

SEQ ID NO: 1960746 - RNA, 19 nt, Homo sapiens
  misc_RNA (1)...(19): siRNA sense strand
ucagauuccacauuccuuu

SEQ ID NO: 1960747 - RNA, 19 nt, Homo sapiens
  misc_RNA (1)...(19): siRNA sense strand
cagagugauugguucuaug

SEQ ID NO: 1960748 - RNA, 19 nt, Homo sapiens
  misc_RNA (1)...(19): siRNA sense strand
gaaggugaagcgagugaca

SEQ ID NO: 1960749 - RNA, 19 nt, Homo sapiens
  misc_RNA (1)...(19): siRNA sense strand
ucaaagaggguaccauacu

SEQ ID NO: 1960750 - RNA, 19 nt, Homo sapiens
  misc_RNA (1)...(19): siRNA sense strand
gaagggcgacaaggugaug

SEQ ID NO: 1960751 - RNA, 19 nt, Homo sapiens
  misc_RNA (1)...(19): siRNA sense strand
gaugacgaacagagugauu

SEQ ID NO: 1960752 - RNA, 19 nt, Homo sapiens
  misc_RNA (1)...(19): siRNA sense strand
augagaacaugucagaaug

SEQ ID NO: 1960753 - RNA, 19 nt, Homo sapiens
  misc_RNA (1)...(19): siRNA sense strand
gaaagccacagacgcaacu

SEQ ID NO: 1960754 - RNA, 19 nt, Homo sapiens
  misc_RNA (1)...(19): siRNA sense strand
gccacagcaucuuugucua

SEQ ID NO: 1960755 - RNA, 19 nt, Homo sapiens
  misc_RNA (1)...(19): siRNA sense strand
acugagaggauaagccaua

SEQ ID NO: 1960756 - RNA, 19 nt, Homo sapiens
  misc_RNA (1)...(19): siRNA sense strand
aaucugacuccuuuacuga

SEQ ID NO: 1960757 - RNA, 19 nt, Homo sapiens
  misc_RNA (1)...(19): siRNA sense strand
agacgcaacuacugcuaca

SEQ ID NO: 1960758 - RNA, 19 nt, Homo sapiens
  misc_RNA (1)...(19): siRNA sense strand
gcagaauaagcuuggugaa

SEQ ID NO: 1960759 - RNA, 19 nt, Homo sapiens
  misc_RNA (1)...(19): siRNA sense strand
ugaaguagaaagaauggau

SEQ ID NO: 1960760 - RNA, 19 nt, Homo sapiens
  misc_RNA (1)...(19): siRNA sense strand
agagugauugguucuauga

SEQ ID NO: 1960761 - RNA, 19 nt, Homo sapiens
  misc_RNA (1)...(19): siRNA sense strand
uggaugaggccacuaagga

SEQ ID NO: 1960762 - RNA, 19 nt, Homo sapiens
  misc_RNA (1)...(19): siRNA sense strand
gcucuuuaccaaugaugaa

SEQ ID NO: 1960763 - RNA, 19 nt, Homo sapiens
  misc_RNA (1)...(19): siRNA sense strand
aaacaggaaggaaagaaag

SEQ ID NO: 1960764 - RNA, 19 nt, Homo sapiens
  misc_RNA (1)...(19): siRNA sense strand
ggccacagcaucuuugucu

SEQ ID NO: 1960765 - RNA, 19 nt, Homo sapiens
  misc_RNA (1)...(19): siRNA sense strand
aggauucacugucccuaau

SEQ ID NO: 1960766 - RNA, 19 nt, Homo sapiens
  misc_RNA (1)...(19): siRNA sense strand
acugggcucuuuaccaaug

SEQ ID NO: 1960767 - RNA, 19 nt, Homo sapiens
  misc_RNA (1)...(19): siRNA sense strand
ucaagaguaagcaacauuc

SEQ ID NO: 1960768 - RNA, 19 nt, Homo sapiens
  misc_RNA (1)...(19): siRNA sense strand
aaggagaccagcauaaaca

SEQ ID NO: 1960769 - RNA, 19 nt, Homo sapiens
  misc_RNA (1)...(19): siRNA sense strand
uagugacucugaugacaca

SEQ ID NO: 1960770 - RNA, 19 nt, Homo sapiens
  misc_RNA (1)...(19): siRNA sense strand
ugagcugguacacgacuua

SEQ ID NO: 1960771 - RNA, 19 nt, Homo sapiens
  misc_RNA (1)...(19): siRNA sense strand
gguucaagucugcuaagaa

SEQ ID NO: 1960772 - RNA, 19 nt, Homo sapiens
  misc_RNA (1)...(19): siRNA sense strand
gcucgaugccucagaaagg

SEQ ID NO: 1960773 - RNA, 19 nt, Homo sapiens
  misc_RNA (1)...(19): siRNA sense strand
acagggcucugaugagaac

SEQ ID NO: 1960774 - RNA, 19 nt, Homo sapiens
  misc_RNA (1)...(19): siRNA sense strand
gaaggaaagaaaggaugga

SEQ ID NO: 1960775 - RNA, 19 nt, Homo sapiens
  misc_RNA (1)...(19): siRNA sense strand
ggagugugaaacagaugaa

SEQ ID NO: 1960776 - RNA, 19 nt, Homo sapiens
  misc_RNA (1)...(19): siRNA sense strand
caaccacaccagcaucaca

SEQ ID NO: 1960777 - RNA, 19 nt, Homo sapiens
  misc_RNA (1)...(19): siRNA sense strand
aaacgacacccagcucuca

SEQ ID NO: 1960778 - RNA, 19 nt, Homo sapiens
  misc_RNA (1)...(19): siRNA sense strand
ugacacaaugguagccaaa

SEQ ID NO: 1960779 - RNA, 19 nt, Homo sapiens
  misc_RNA (1)...(19): siRNA sense strand
gucaagaguaagcaacauu

SEQ ID NO: 1960780 - RNA, 19 nt, Homo sapiens
  misc_RNA (1)...(19): siRNA sense strand
gcaccuugucgaccacuca

SEQ ID NO: 1960781 - RNA, 19 nt, Homo sapiens
  misc_RNA (1)...(19): siRNA sense strand
uaaaaugccacaagaaaag

SEQ ID NO: 1960782 - RNA, 19 nt, Homo sapiens
  misc_RNA (1)...(19): siRNA sense strand
gcaacuacugcuacauuuu

SEQ ID NO: 1960783 - RNA, 19 nt, Homo sapiens
  misc_RNA (1)...(19): siRNA sense strand
acgcaacuacugcuacauu

SEQ ID NO: 1960784 - RNA, 19 nt, Homo sapiens
  misc_RNA (1)...(19): siRNA sense strand
ccaccauguucacgugaca

SEQ ID NO: 1960785 - RNA, 19 nt, Homo sapiens
  misc_RNA (1)...(19): siRNA sense strand
caggauucacugucccuaa

SEQ ID NO: 1960786 - RNA, 19 nt, Homo sapiens
  misc_RNA (1)...(19): siRNA sense strand
acaaggugaugacgaacag

SEQ ID NO: 1960787 - RNA, 19 nt, Homo sapiens
  misc_RNA (1)...(19): siRNA sense strand
gacaaggugaugacgaaca

SEQ ID NO: 1960788 - RNA, 19 nt, Homo sapiens
  misc_RNA (1)...(19): siRNA sense strand
gggcucugaugagaacaug

SEQ ID NO: 1960789 - RNA, 19 nt, Homo sapiens
  misc_RNA (1)...(19): siRNA sense strand
gugugaaacagaugaacaa

SEQ ID NO: 1960790 - RNA, 19 nt, Homo sapiens
  misc_RNA (1)...(19): siRNA sense strand
ggaaguugcugaaguuaua

SEQ ID NO: 1960791 - RNA, 19 nt, Homo sapiens
  misc_RNA (1)...(19): siRNA sense strand
ggagaugacuugggccuua

SEQ ID NO: 1960792 - RNA, 19 nt, Homo sapiens
  misc_RNA (1)...(19): siRNA sense strand
cacauuacauuaccacuua

SEQ ID NO: 1960793 - RNA, 19 nt, Homo sapiens
  misc_RNA (1)...(19): siRNA sense strand
gaacaacaguaaccaucuu

SEQ ID NO: 1960794 - RNA, 19 nt, Homo sapiens
  misc_RNA (1)...(19): siRNA sense strand
ggaaagccaucugaagaaa

SEQ ID NO: 1960795 - RNA, 19 nt, Homo sapiens
  misc_RNA (1)...(19): siRNA sense strand
ggcaaaaucuucaucaaua

SEQ ID NO: 1960796 - RNA, 19 nt, Homo sapiens
  misc_RNA (1)...(19): siRNA sense strand
gaccaugucuggacgaaga

SEQ ID NO: 1960797 - RNA, 19 nt, Homo sapiens
  misc_RNA (1)...(19): siRNA sense strand
caauagcacuugucccauu

SEQ ID NO: 1960798 - RNA, 19 nt, Homo sapiens
  misc_RNA (1)...(19): siRNA sense strand
ugaacagacugcagaguaa

SEQ ID NO: 1960799 - RNA, 19 nt, Homo sapiens
  misc_RNA (1)...(19): siRNA sense strand
ccuggaaucuacagaauaa

SEQ ID NO: 1960800 - RNA, 19 nt, Homo sapiens
  misc_RNA (1)...(19): siRNA sense strand
gaagagcauugacauagca

SEQ ID NO: 1960801 - RNA, 19 nt, Homo sapiens
  misc_RNA (1)...(19): siRNA sense strand
aaagccaucugaagaaauu

SEQ ID NO: 1960802 - RNA, 19 nt, Homo sapiens
  misc_RNA (1)...(19): siRNA sense strand
ugacagcacacaaauuaua

SEQ ID NO: 1960803 - RNA, 19 nt, Homo sapiens
  misc_RNA (1)...(19): siRNA sense strand
gaagaacaaaggauaucua

SEQ ID NO: 1960804 - RNA, 19 nt, Homo sapiens
  misc_RNA (1)...(19): siRNA sense strand
gaacuucaguggcuaccau

SEQ ID NO: 1960805 - RNA, 19 nt, Homo sapiens
  misc_RNA (1)...(19): siRNA sense strand
gaggcagcaucgacaauuu

SEQ ID NO: 1960806 - RNA, 19 nt, Homo sapiens
  misc_RNA (1)...(19): siRNA sense strand
cagaagagauaaugucauc

SEQ ID NO: 1960807 - RNA, 19 nt, Homo sapiens
  misc_RNA (1)...(19): siRNA sense strand
ugacauagcacacacaaau

SEQ ID NO: 1960808 - RNA, 19 nt, Homo sapiens
  misc_RNA (1)...(19): siRNA sense strand
cgcauuaucugcuuacauu

SEQ ID NO: 1960809 - RNA, 19 nt, Homo sapiens
  misc_RNA (1)...(19): siRNA sense strand
ucugaagccugcugucaua

SEQ ID NO: 1960810 - RNA, 19 nt, Homo sapiens
  misc_RNA (1)...(19): siRNA sense strand
guaaauauggcucccugua

SEQ ID NO: 1960811 - RNA, 19 nt, Homo sapiens
  misc_RNA (1)...(19): siRNA sense strand
gaagccugcugucauacuu

SEQ ID NO: 1960812 - RNA, 19 nt, Homo sapiens
  misc_RNA (1)...(19): siRNA sense strand
acauucagcucuucagaaa

SEQ ID NO: 1960813 - RNA, 19 nt, Homo sapiens
  misc_RNA (1)...(19): siRNA sense strand
gaacaaaggauaucuaccu

SEQ ID NO: 1960814 - RNA, 19 nt, Homo sapiens
  misc_RNA (1)...(19): siRNA sense strand
gcaggauauuuccaguaua

SEQ ID NO: 1960815 - RNA, 19 nt, Homo sapiens
  misc_RNA (1)...(19): siRNA sense strand
caacaguaaccaucuugua

SEQ ID NO: 1960816 - RNA, 19 nt, Homo sapiens
  misc_RNA (1)...(19): siRNA sense strand
cauggucacugguaucuug

SEQ ID NO: 1960817 - RNA, 19 nt, Homo sapiens
  misc_RNA (1)...(19): siRNA sense strand
gacaaggaaaugauaguuu

SEQ ID NO: 1960818 - RNA, 19 nt, Homo sapiens
  misc_RNA (1)...(19): siRNA sense strand
cauuaccacuuaugaagaa

SEQ ID NO: 1960819 - RNA, 19 nt, Homo sapiens
  misc_RNA (1)...(19): siRNA sense strand
cagauaguguguaaugaug

SEQ ID NO: 1960820 - RNA, 19 nt, Homo sapiens
  misc_RNA (1)...(19): siRNA sense strand
gacauagcacacacaaaua

SEQ ID NO: 1960821 - RNA, 19 nt, Homo sapiens
  misc_RNA (1)...(19): siRNA sense strand
gggaaagccaucugaagaa

SEQ ID NO: 1960822 - RNA, 19 nt, Homo sapiens
  misc_RNA (1)...(19): siRNA sense strand
acaaguagcagauaucaau

SEQ ID NO: 1960823 - RNA, 19 nt, Homo sapiens
  misc_RNA (1)...(19): siRNA sense strand
gugcuaacccgaagaauuc

SEQ ID NO: 1960824 - RNA, 19 nt, Homo sapiens
  misc_RNA (1)...(19): siRNA sense strand
guaaccaucuuguaaacag

SEQ ID NO: 1960825 - RNA, 19 nt, Homo sapiens
  misc_RNA (1)...(19): siRNA sense strand
caguauaccguguuuguaa

SEQ ID NO: 1960826 - RNA, 19 nt, Homo sapiens
  misc_RNA (1)...(19): siRNA sense strand
gaacagacugcagaguaaa

SEQ ID NO: 1960827 - RNA, 19 nt, Homo sapiens
  misc_RNA (1)...(19): siRNA sense strand
ugacugcacaggacaagua

SEQ ID NO: 1960828 - RNA, 19 nt, Homo sapiens
  misc_RNA (1)...(19): siRNA sense strand
gcagauaguguguaaugau

SEQ ID NO: 1960829 - RNA, 19 nt, Homo sapiens
  misc_RNA (1)...(19): siRNA sense strand
caacgucuauacacauuac

SEQ ID NO: 1960830 - RNA, 19 nt, Homo sapiens
  misc_RNA (1)...(19): siRNA sense strand
gugacugucuggcucaauu

SEQ ID NO: 1960831 - RNA, 19 nt, Homo sapiens
  misc_RNA (1)...(19): siRNA sense strand
ggacgggccauguaucaga

SEQ ID NO: 1960832 - RNA, 19 nt, Homo sapiens
  misc_RNA (1)...(19): siRNA sense strand
caggauauuuccaguauac

SEQ ID NO: 1960833 - RNA, 19 nt, Homo sapiens
  misc_RNA (1)...(19): siRNA sense strand
aaauauggcucccuguaca

SEQ ID NO: 1960834 - RNA, 19 nt, Homo sapiens
  misc_RNA (1)...(19): siRNA sense strand
ggaguuggaggccucaauu

SEQ ID NO: 1960835 - RNA, 19 nt, Homo sapiens
  misc_RNA (1)...(19): siRNA sense strand
cuucucagccucuuguuua

SEQ ID NO: 1960836 - RNA, 19 nt, Homo sapiens
  misc_RNA (1)...(19): siRNA sense strand
aagcagaauuugcaucuca

SEQ ID NO: 1960837 - RNA, 19 nt, Homo sapiens
  misc_RNA (1)...(19): siRNA sense strand
gaaauaugaggcuacuuca

SEQ ID NO: 1960838 - RNA, 19 nt, Homo sapiens
  misc_RNA (1)...(19): siRNA sense strand
ggacaaguagcagauauca

SEQ ID NO: 1960839 - RNA, 19 nt, Homo sapiens
  misc_RNA (1)...(19): siRNA sense strand
ggaagcaggacauucugaa

SEQ ID NO: 1960840 - RNA, 19 nt, Homo sapiens
  misc_RNA (1)...(19): siRNA sense strand
ccgaagaauucaguacaaa

SEQ ID NO: 1960841 - RNA, 19 nt, Homo sapiens
  misc_RNA (1)...(19): siRNA sense strand
caaagcccauccuucuuca

SEQ ID NO: 1960842 - RNA, 19 nt, Homo sapiens
  misc_RNA (1)...(19): siRNA sense strand
gggccuagcaugugcauug

SEQ ID NO: 1960843 - RNA, 19 nt, Homo sapiens
  misc_RNA (1)...(19): siRNA sense strand
ccugauggguccaaucgaa

SEQ ID NO: 1960844 - RNA, 19 nt, Homo sapiens
  misc_RNA (1)...(19): siRNA sense strand
cgacauaggcaugguauca

SEQ ID NO: 1960845 - RNA, 19 nt, Homo sapiens
  misc_RNA (1)...(19): siRNA sense strand
gagaugacuugggccuuau

SEQ ID NO: 1960846 - RNA, 19 nt, Homo sapiens
  misc_RNA (1)...(19): siRNA sense strand
ggagaaauaugaggcuacu

SEQ ID NO: 1960847 - RNA, 19 nt, Homo sapiens
  misc_RNA (1)...(19): siRNA sense strand
ccaaagcccauccuucuuc

SEQ ID NO: 1960848 - RNA, 19 nt, Homo sapiens
  misc_RNA (1)...(19): siRNA sense strand
aagagaagaacaaaggaua

SEQ ID NO: 1960849 - RNA, 19 nt, Homo sapiens
  misc_RNA (1)...(19): siRNA sense strand
gaaagccaucugaagaaau

SEQ ID NO: 1960850 - RNA, 19 nt, Homo sapiens
  misc_RNA (1)...(19): siRNA sense strand
aaacuucuccagugccuuu

SEQ ID NO: 1960851 - RNA, 19 nt, Homo sapiens
  misc_RNA (1)...(19): siRNA sense strand
cguggcagauaguguguaa

SEQ ID NO: 1960852 - RNA, 19 nt, Homo sapiens
  misc_RNA (1)...(19): siRNA sense strand
ggugcuaacccgaagaauu

SEQ ID NO: 1960853 - RNA, 19 nt, Homo sapiens
  misc_RNA (1)...(19): siRNA sense strand
caggacaaguagcagauau

SEQ ID NO: 1960854 - RNA, 19 nt, Homo sapiens
  misc_RNA (1)...(19): siRNA sense strand
ccauuaauuccuaguauug

SEQ ID NO: 1960855 - RNA, 19 nt, Homo sapiens
  misc_RNA (1)...(19): siRNA sense strand
gcaacgucuauacacauua

SEQ ID NO: 1960856 - RNA, 19 nt, Homo sapiens
  misc_RNA (1)...(19): siRNA sense strand
ccacagccacucaaacuuc

SEQ ID NO: 1960857 - RNA, 19 nt, Homo sapiens
  misc_RNA (1)...(19): siRNA sense strand
ggguggauaugacagaugu

SEQ ID NO: 1960858 - RNA, 19 nt, Homo sapiens
  misc_RNA (1)...(19): siRNA sense strand
uaaaggaaauguggauggu

SEQ ID NO: 1960859 - RNA, 19 nt, Homo sapiens
  misc_RNA (1)...(19): siRNA sense strand
guacagaagagauaauguc

SEQ ID NO: 1960860 - RNA, 19 nt, Homo sapiens
  misc_RNA (1)...(19): siRNA sense strand
caaauacagacaaggaaau

SEQ ID NO: 1960861 - RNA, 19 nt, Homo sapiens
  misc_RNA (1)...(19): siRNA sense strand
ugcaggauauuuccaguau

SEQ ID NO: 1960862 - RNA, 19 nt, Homo sapiens
  misc_RNA (1)...(19): siRNA sense strand
cauuguugauguucagauu

SEQ ID NO: 1960863 - RNA, 19 nt, Homo sapiens
  misc_RNA (1)...(19): siRNA sense strand
gagcaaaggaacucuaugc

SEQ ID NO: 1960864 - RNA, 19 nt, Homo sapiens
  misc_RNA (1)...(19): siRNA sense strand
ucaaauacagacaaggaaa

SEQ ID NO: 1960865 - RNA, 19 nt, Homo sapiens
  misc_RNA (1)...(19): siRNA sense strand
aguagcagauaucaauuug

SEQ ID NO: 1960866 - RNA, 19 nt, Homo sapiens
  misc_RNA (1)...(19): siRNA sense strand
agaaauaugaggcuacuuc

SEQ ID NO: 1960867 - RNA, 19 nt, Homo sapiens
  misc_RNA (1)...(19): siRNA sense strand
gcauugggcuacaguuuug

SEQ ID NO: 1960868 - RNA, 19 nt, Homo sapiens
  misc_RNA (1)...(19): siRNA sense strand
aacaguaaccaucuuguaa

SEQ ID NO: 1960869 - RNA, 19 nt, Homo sapiens
  misc_RNA (1)...(19): siRNA sense strand
gcugucauacuuucauuug

SEQ ID NO: 1960870 - RNA, 19 nt, Homo sapiens
  misc_RNA (1)...(19): siRNA sense strand
ucacuguggagaaauauga

SEQ ID NO: 1960871 - RNA, 19 nt, Homo sapiens
  misc_RNA (1)...(19): siRNA sense strand
uuauggaccgcacgcauua

SEQ ID NO: 1960872 - RNA, 19 nt, Homo sapiens
  misc_RNA (1)...(19): siRNA sense strand
gcaagagaagaacaaagga

SEQ ID NO: 1960873 - RNA, 19 nt, Homo sapiens
  misc_RNA (1)...(19): siRNA sense strand
uguaaacagugacaaugug

SEQ ID NO: 1960874 - RNA, 19 nt, Homo sapiens
  misc_RNA (1)...(19): siRNA sense strand
acaguaaccaucuuguaaa

SEQ ID NO: 1960875 - RNA, 19 nt, Homo sapiens
  misc_RNA (1)...(19): siRNA sense strand
cagcauugggcuacaguuu

SEQ ID NO: 1960876 - RNA, 19 nt, Homo sapiens
  misc_RNA (1)...(19): siRNA sense strand
ggacaggauauguuugaca

SEQ ID NO: 1960877 - RNA, 19 nt, Homo sapiens
  misc_RNA (1)...(19): siRNA sense strand
gcaaauccggccagaaugc

SEQ ID NO: 1960878 - RNA, 19 nt, Homo sapiens
  misc_RNA (1)...(19): siRNA sense strand
uucaguggcuaccauauug

SEQ ID NO: 1960879 - RNA, 19 nt, Homo sapiens
  misc_RNA (1)...(19): siRNA sense strand
agaggcaguucaagcagaa

SEQ ID NO: 1960880 - RNA, 19 nt, Homo sapiens
  misc_RNA (1)...(19): siRNA sense strand
ccacagccacccagcauuc

SEQ ID NO: 1960881 - RNA, 19 nt, Homo sapiens
  misc_RNA (1)...(19): siRNA sense strand
gagaagaacaaaggauauc

SEQ ID NO: 1960882 - RNA, 19 nt, Homo sapiens
  misc_RNA (1)...(19): siRNA sense strand
cugaacagacugcagagua

SEQ ID NO: 1960883 - RNA, 19 nt, Homo sapiens
  misc_RNA (1)...(19): siRNA sense strand
cagcacauggucacuggua

SEQ ID NO: 1960884 - RNA, 19 nt, Homo sapiens
  misc_RNA (1)...(19): siRNA sense strand
gcaacaguggaauggcaua

SEQ ID NO: 1960885 - RNA, 19 nt, Homo sapiens
  misc_RNA (1)...(19): siRNA sense strand
gaguuggaggccucaauuu

SEQ ID NO: 1960886 - RNA, 19 nt, Homo sapiens
  misc_RNA (1)...(19): siRNA sense strand
cagcaucgacaauuuaugg

SEQ ID NO: 1960887 - RNA, 19 nt, Homo sapiens
  misc_RNA (1)...(19): siRNA sense strand
guaaugcaacaguggaaug

SEQ ID NO: 1960888 - RNA, 19 nt, Homo sapiens
  misc_RNA (1)...(19): siRNA sense strand
ggcagauaguguguaauga

SEQ ID NO: 1960889 - RNA, 19 nt, Homo sapiens
  misc_RNA (1)...(19): siRNA sense strand
caacaucguggcagauagu

SEQ ID NO: 1960890 - RNA, 19 nt, Homo sapiens
  misc_RNA (1)...(19): siRNA sense strand
uggaagagcugaugaguaa

SEQ ID NO: 1960891 - RNA, 19 nt, Homo sapiens
  misc_RNA (1)...(19): siRNA sense strand
caagagaaguggcuauuga

SEQ ID NO: 1960892 - RNA, 19 nt, Homo sapiens
  misc_RNA (1)...(19): siRNA sense strand
gcagaaggacuuacuguug

SEQ ID NO: 1960893 - RNA, 19 nt, Homo sapiens
  misc_RNA (1)...(19): siRNA sense strand
ggaauuagcaguguacaug

SEQ ID NO: 1960894 - RNA, 19 nt, Homo sapiens
  misc_RNA (1)...(19): siRNA sense strand
gcacaucugggaacuugua

SEQ ID NO: 1960895 - RNA, 19 nt, Homo sapiens
  misc_RNA (1)...(19): siRNA sense strand
ggucaucacggccaucaua

SEQ ID NO: 1960896 - RNA, 19 nt, Homo sapiens
  misc_RNA (1)...(19): siRNA sense strand
ggagaccgcugccauucug

SEQ ID NO: 1960897 - RNA, 19 nt, Homo sapiens
  misc_RNA (1)...(19): siRNA sense strand
ggaccaauguuaugucaac

SEQ ID NO: 1960898 - RNA, 19 nt, Homo sapiens
  misc_RNA (1)...(19): siRNA sense strand
agaaguggcuauugaagug

SEQ ID NO: 1960899 - RNA, 19 nt, Homo sapiens
  misc_RNA (1)...(19): siRNA sense strand
ggacaaagucuuaacaaaa

SEQ ID NO: 1960900 - RNA, 19 nt, Homo sapiens
  misc_RNA (1)...(19): siRNA sense strand
ucacggccaucauauucua

SEQ ID NO: 1960901 - RNA, 19 nt, Homo sapiens
  misc_RNA (1)...(19): siRNA sense strand
guaaguggaaagauuauug

SEQ ID NO: 1960902 - RNA, 19 nt, Homo sapiens
  misc_RNA (1)...(19): siRNA sense strand
gaggaccaauguuauguca

SEQ ID NO: 1960903 - RNA, 19 nt, Homo sapiens
  misc_RNA (1)...(19): siRNA sense strand
gaccacggacaaagucuua

SEQ ID NO: 1960904 - RNA, 19 nt, Homo sapiens
  misc_RNA (1)...(19): siRNA sense strand
gugcacaucugggaacuug

SEQ ID NO: 1960905 - RNA, 19 nt, Homo sapiens
  misc_RNA (1)...(19): siRNA sense strand
cggacaaagucuuaacaaa

SEQ ID NO: 1960906 - RNA, 19 nt, Homo sapiens
  misc_RNA (1)...(19): siRNA sense strand
uagaagagacgcaagagaa

SEQ ID NO: 1960907 - RNA, 19 nt, Homo sapiens
  misc_RNA (1)...(19): siRNA sense strand
gaauuagcaguguacauga

SEQ ID NO: 1960908 - RNA, 19 nt, Homo sapiens
  misc_RNA (1)...(19): siRNA sense strand
gaagugauggccucaguag

SEQ ID NO: 1960909 - RNA, 19 nt, Homo sapiens
  misc_RNA (1)...(19): siRNA sense strand
ggcccucucuagacacaua

SEQ ID NO: 1960910 - RNA, 19 nt, Homo sapiens
  misc_RNA (1)...(19): siRNA sense strand
ucaucugccuucccgcuua

SEQ ID NO: 1960911 - RNA, 19 nt, Homo sapiens
  misc_RNA (1)...(19): siRNA sense strand
caaugugaccauccaguuu

SEQ ID NO: 1960912 - RNA, 19 nt, Homo sapiens
  misc_RNA (1)...(19): siRNA sense strand
gaagagcugaugaguaaac

SEQ ID NO: 1960913 - RNA, 19 nt, Homo sapiens
  misc_RNA (1)...(19): siRNA sense strand
gcaagagaaguggcuauug

SEQ ID NO: 1960914 - RNA, 19 nt, Homo sapiens
  misc_RNA (1)...(19): siRNA sense strand
ggaagugauggccucagua

SEQ ID NO: 1960915 - RNA, 19 nt, Homo sapiens
  misc_RNA (1)...(19): siRNA sense strand
caaggagaccgcugccauu

SEQ ID NO: 1960916 - RNA, 19 nt, Homo sapiens
  misc_RNA (1)...(19): siRNA sense strand
cagccugacuguccucaug

SEQ ID NO: 1960917 - RNA, 19 nt, Homo sapiens
  misc_RNA (1)...(19): siRNA sense strand
caucacggccaucauauuc

SEQ ID NO: 1960918 - RNA, 19 nt, Homo sapiens
  misc_RNA (1)...(19): siRNA sense strand
gagaaguggcuauugaagu

SEQ ID NO: 1960919 - RNA, 19 nt, Homo sapiens
  misc_RNA (1)...(19): siRNA sense strand
caaaaggagucaacaugga

SEQ ID NO: 1960920 - RNA, 19 nt, Homo sapiens
  misc_RNA (1)...(19): siRNA sense strand
ggugggcccucucuagaca

SEQ ID NO: 1960921 - RNA, 19 nt, Homo sapiens
  misc_RNA (1)...(19): siRNA sense strand
gagcagaaggacuuacugu

SEQ ID NO: 1960922 - RNA, 19 nt, Homo sapiens
  misc_RNA (1)...(19): siRNA sense strand
caacauggaagagcugaug

SEQ ID NO: 1960923 - RNA, 19 nt, Homo sapiens
  misc_RNA (1)...(19): siRNA sense strand
gcacaucaaguauccuaag

SEQ ID NO: 1960924 - RNA, 19 nt, Homo sapiens
  misc_RNA (1)...(19): siRNA sense strand
gacaaagucuuaacaaaac

SEQ ID NO: 1960925 - RNA, 19 nt, Homo sapiens
  misc_RNA (1)...(19): siRNA sense strand
agagugaggacccguguaa

SEQ ID NO: 1960926 - RNA, 19 nt, Homo sapiens
  misc_RNA (1)...(19): siRNA sense strand
cuauugaagugucuuugga

SEQ ID NO: 1960927 - RNA, 19 nt, Homo sapiens
  misc_RNA (1)...(19): siRNA sense strand
gaagagacgcaagagaagu

SEQ ID NO: 1960928 - RNA, 19 nt, Homo sapiens
  misc_RNA (1)...(19): siRNA sense strand
cuuguaaguggaaagauua

SEQ ID NO: 1960929 - RNA, 19 nt, Homo sapiens
  misc_RNA (1)...(19): siRNA sense strand
auugaagugucuuuggaua

SEQ ID NO: 1960930 - RNA, 19 nt, Homo sapiens
  misc_RNA (1)...(19): siRNA sense strand
agugauggccucaguagaa

SEQ ID NO: 1960931 - RNA, 19 nt, Homo sapiens
  misc_RNA (1)...(19): siRNA sense strand
guagaagagacgcaagaga

SEQ ID NO: 1960932 - RNA, 19 nt, Homo sapiens
  misc_RNA (1)...(19): siRNA sense strand
aauuagcaguguacaugaa

SEQ ID NO: 1960933 - RNA, 19 nt, Homo sapiens
  misc_RNA (1)...(19): siRNA sense strand
cucaggaggaccaauguua

SEQ ID NO: 1960934 - RNA, 19 nt, Homo sapiens
  misc_RNA (1)...(19): siRNA sense strand
aaacucaggaggaccaaug

SEQ ID NO: 1960935 - RNA, 19 nt, Homo sapiens
  misc_RNA (1)...(19): siRNA sense strand
guacaugaagugcacaucu

SEQ ID NO: 1960936 - RNA, 19 nt, Homo sapiens
  misc_RNA (1)...(19): siRNA sense strand
ccacccugcacaucaagua

SEQ ID NO: 1960937 - RNA, 19 nt, Homo sapiens
  misc_RNA (1)...(19): siRNA sense strand
ucaggaggaccaauguuau

SEQ ID NO: 1960938 - RNA, 19 nt, Homo sapiens
  misc_RNA (1)...(19): siRNA sense strand
caucugccuucccgcuuau

SEQ ID NO: 1960939 - RNA, 19 nt, Homo sapiens
  misc_RNA (1)...(19): siRNA sense strand
uacaugaagugcacaucug

SEQ ID NO: 1960940 - RNA, 19 nt, Homo sapiens
  misc_RNA (1)...(19): siRNA sense strand
cggaagugauggccucagu

SEQ ID NO: 1960941 - RNA, 19 nt, Homo sapiens
  misc_RNA (1)...(19): siRNA sense strand
caggaggaccaauguuaug

SEQ ID NO: 1960942 - RNA, 19 nt, Homo sapiens
  misc_RNA (1)...(19): siRNA sense strand
ccucauggucaucaucauu

SEQ ID NO: 1960943 - RNA, 19 nt, Homo sapiens
  misc_RNA (1)...(19): siRNA sense strand
gugauggccucaguagaag

SEQ ID NO: 1960944 - RNA, 19 nt, Homo sapiens
  misc_RNA (1)...(19): siRNA sense strand
ggacaggggauaucaagau

SEQ ID NO: 1960945 - RNA, 19 nt, Homo sapiens
  misc_RNA (1)...(19): siRNA sense strand
gcuaagcagcuguguuguc

SEQ ID NO: 1960946 - RNA, 19 nt, Homo sapiens
  misc_RNA (1)...(19): siRNA sense strand
ugaagugucuuuggauagc

SEQ ID NO: 1960947 - RNA, 19 nt, Homo sapiens
  misc_RNA (1)...(19): siRNA sense strand
gccucuggcucacgucaau

SEQ ID NO: 1960948 - RNA, 19 nt, Homo sapiens
  misc_RNA (1)...(19): siRNA sense strand
acaaugugaccauccaguu

SEQ ID NO: 1960949 - RNA, 19 nt, Homo sapiens
  misc_RNA (1)...(19): siRNA sense strand
gugaccauccaguuugaaa

SEQ ID NO: 1960950 - RNA, 19 nt, Homo sapiens
  misc_RNA (1)...(19): siRNA sense strand
aagagaaguggcuauugaa

SEQ ID NO: 1960951 - RNA, 19 nt, Homo sapiens
  misc_RNA (1)...(19): siRNA sense strand
aaugugaccauccaguuug

SEQ ID NO: 1960952 - RNA, 19 nt, Homo sapiens
  misc_RNA (1)...(19): siRNA sense strand
ggaggaccaauguuauguc

SEQ ID NO: 1960953 - RNA, 19 nt, Homo sapiens
  misc_RNA (1)...(19): siRNA sense strand
ugcuacagauggucccaaa

SEQ ID NO: 1960954 - RNA, 19 nt, Homo sapiens
  misc_RNA (1)...(19): siRNA sense strand
cuagacacauacggaagug

SEQ ID NO: 1960955 - RNA, 19 nt, Homo sapiens
  misc_RNA (1)...(19): siRNA sense strand
gccuggaauuagcagugua

SEQ ID NO: 1960956 - RNA, 19 nt, Homo sapiens
  misc_RNA (1)...(19): siRNA sense strand
uaugucaacagaacgcauu

SEQ ID NO: 1960957 - RNA, 19 nt, Homo sapiens
  misc_RNA (1)...(19): siRNA sense strand
gaagugucuuuggauagcu

SEQ ID NO: 1960958 - RNA, 19 nt, Homo sapiens
  misc_RNA (1)...(19): siRNA sense strand
gaaguggcuauugaagugu

SEQ ID NO: 1960959 - RNA, 19 nt, Homo sapiens
  misc_RNA (1)...(19): siRNA sense strand
gacaggggauaucaagaug

SEQ ID NO: 1960960 - RNA, 19 nt, Homo sapiens
  misc_RNA (1)...(19): siRNA sense strand
ggagagaacugaugaaucc

SEQ ID NO: 1960961 - RNA, 19 nt, Homo sapiens
  misc_RNA (1)...(19): siRNA sense strand
gagaacugaugaauccaua

SEQ ID NO: 1960962 - RNA, 19 nt, Homo sapiens
  misc_RNA (1)...(19): siRNA sense strand
gaacaucugcagcacauga

SEQ ID NO: 1960963 - RNA, 19 nt, Homo sapiens
  misc_RNA (1)...(19): siRNA sense strand
guaaugacugggauauuua

SEQ ID NO: 1960964 - RNA, 19 nt, Homo sapiens
  misc_RNA (1)...(19): siRNA sense strand
gaaaacugcauucuucuua

SEQ ID NO: 1960965 - RNA, 19 nt, Homo sapiens
  misc_RNA (1)...(19): siRNA sense strand
aguaaugacugggauauuu

SEQ ID NO: 1960966 - RNA, 19 nt, Homo sapiens
  misc_RNA (1)...(19): siRNA sense strand
ggugacagcccaacagauu

SEQ ID NO: 1960967 - RNA, 19 nt, Homo sapiens
  misc_RNA (1)...(19): siRNA sense strand
gaacugaugaauccauaga

SEQ ID NO: 1960968 - RNA, 19 nt, Homo sapiens
  misc_RNA (1)...(19): siRNA sense strand
gcugagagacuuugcuaaa

SEQ ID NO: 1960969 - RNA, 19 nt, Homo sapiens
  misc_RNA (1)...(19): siRNA sense strand
gaucuugaguaccucuuug

SEQ ID NO: 1960970 - RNA, 19 nt, Homo sapiens
  misc_RNA (1)...(19): siRNA sense strand
uuaacgagccuaguaauga

SEQ ID NO: 1960971 - RNA, 19 nt, Homo sapiens
  misc_RNA (1)...(19): siRNA sense strand
ugacugggauauuuacuac

SEQ ID NO: 1960972 - RNA, 19 nt, Homo sapiens
  misc_RNA (1)...(19): siRNA sense strand
uaaaccagccccagaaaua

SEQ ID NO: 1960973 - RNA, 19 nt, Homo sapiens
  misc_RNA (1)...(19): siRNA sense strand
gaaaucccuuugccuccau

SEQ ID NO: 1960974 - RNA, 19 nt, Homo sapiens
  misc_RNA (1)...(19): siRNA sense strand
caaaaggacaugauugaaa

SEQ ID NO: 1960975 - RNA, 19 nt, Homo sapiens
  misc_RNA (1)...(19): siRNA sense strand
ucuaugaccgccugauuaa

SEQ ID NO: 1960976 - RNA, 19 nt, Homo sapiens
  misc_RNA (1)...(19): siRNA sense strand
aaaagcagcugaaccucua

SEQ ID NO: 1960977 - RNA, 19 nt, Homo sapiens
  misc_RNA (1)...(19): siRNA sense strand
cuacaguguucucgacuuc

SEQ ID NO: 1960978 - RNA, 19 nt, Homo sapiens
  misc_RNA (1)...(19): siRNA sense strand
acugaugaauccauagaaa

SEQ ID NO: 1960979 - RNA, 19 nt, Homo sapiens
  misc_RNA (1)...(19): siRNA sense strand
aaacugcauucuucuuagu

SEQ ID NO: 1960980 - RNA, 19 nt, Homo sapiens
  misc_RNA (1)...(19): siRNA sense strand
gcugaugcuugcucuguca

SEQ ID NO: 1960981 - RNA, 19 nt, Homo sapiens
  misc_RNA (1)...(19): siRNA sense strand
aagaacaucugcagcacau

SEQ ID NO: 1960982 - RNA, 19 nt, Homo sapiens
  misc_RNA (1)...(19): siRNA sense strand
uaacgagccuaguaaugac

SEQ ID NO: 1960983 - RNA, 19 nt, Homo sapiens
  misc_RNA (1)...(19): siRNA sense strand
ucauggcccugcugagaga

SEQ ID NO: 1960984 - RNA, 19 nt, Homo sapiens
  misc_RNA (1)...(19): siRNA sense strand
ugauuaacgagccuaguaa

SEQ ID NO: 1960985 - RNA, 19 nt, Homo sapiens
  misc_RNA (1)...(19): siRNA sense strand
gaggugacagcccaacaga

SEQ ID NO: 1960986 - RNA, 19 nt, Homo sapiens
  misc_RNA (1)...(19): siRNA sense strand
cugauuaacgagccuagua

SEQ ID NO: 1960987 - RNA, 19 nt, Homo sapiens
  misc_RNA (1)...(19): siRNA sense strand
ggcaggagagaacugauga

SEQ ID NO: 1960988 - RNA, 19 nt, Homo sapiens
  misc_RNA (1)...(19): siRNA sense strand
ggcggugucuacaguguuc

SEQ ID NO: 1960989 - RNA, 19 nt, Homo sapiens
  misc_RNA (1)...(19): siRNA sense strand
caacagauucccaaaagga

SEQ ID NO: 1960990 - RNA, 19 nt, Homo sapiens
  misc_RNA (1)...(19): siRNA sense strand
uugaguaccucuuugaaaa

SEQ ID NO: 1960991 - RNA, 19 nt, Homo sapiens
  misc_RNA (1)...(19): siRNA sense strand
acugggauauuuacuacug

SEQ ID NO: 1960992 - RNA, 19 nt, Homo sapiens
  misc_RNA (1)...(19): siRNA sense strand
gcaggagagaacugaugaa

SEQ ID NO: 1960993 - RNA, 19 nt, Homo sapiens
  misc_RNA (1)...(19): siRNA sense strand
cugcagcacaugacagaaa

SEQ ID NO: 1960994 - RNA, 19 nt, Homo sapiens
  misc_RNA (1)...(19): siRNA sense strand
cucuaugaccgccugauua

SEQ ID NO: 1960995 - RNA, 19 nt, Homo sapiens
  misc_RNA (1)...(19): siRNA sense strand
caggagagaacugaugaau

SEQ ID NO: 1960996 - RNA, 19 nt, Homo sapiens
  misc_RNA (1)...(19): siRNA sense strand
ccccagaaauauuugaaaa

SEQ ID NO: 1960997 - RNA, 19 nt, Homo sapiens
  misc_RNA (1)...(19): siRNA sense strand
cuugaguaccucuuugaaa

SEQ ID NO: 1960998 - RNA, 19 nt, Homo sapiens
  misc_RNA (1)...(19): siRNA sense strand
ggaccgaguuccacaagaa

SEQ ID NO: 1960999 - RNA, 19 nt, Homo sapiens
  misc_RNA (1)...(19): siRNA sense strand
ccagauggcuccaguuuca

SEQ ID NO: 1961000 - RNA, 19 nt, Homo sapiens
  misc_RNA (1)...(19): siRNA sense strand
caaauucccuucuucaagu

SEQ ID NO: 1961001 - RNA, 19 nt, Homo sapiens
  misc_RNA (1)...(19): siRNA sense strand
gaacaugaagcuuggauau

SEQ ID NO: 1961002 - RNA, 19 nt, Homo sapiens
  misc_RNA (1)...(19): siRNA sense strand
gcacagccguggacuaugg

SEQ ID NO: 1961003 - RNA, 19 nt, Homo sapiens
  misc_RNA (1)...(19): siRNA sense strand
gaguuuggguugaacauga

SEQ ID NO: 1961004 - RNA, 19 nt, Homo sapiens
  misc_RNA (1)...(19): siRNA sense strand
gagagaagaauuccaguga

SEQ ID NO: 1961005 - RNA, 19 nt, Homo sapiens
  misc_RNA (1)...(19): siRNA sense strand
acacaaaccuggagucucu

SEQ ID NO: 1961006 - RNA, 19 nt, Homo sapiens
  misc_RNA (1)...(19): siRNA sense strand
uggagucucuguacuauga

SEQ ID NO: 1961007 - RNA, 19 nt, Homo sapiens
  misc_RNA (1)...(19): siRNA sense strand
caucauuuauggacacaaa

SEQ ID NO: 1961008 - RNA, 19 nt, Homo sapiens
  misc_RNA (1)...(19): siRNA sense strand
ugacacaacuggagcaagu

SEQ ID NO: 1961009 - RNA, 19 nt, Homo sapiens
  misc_RNA (1)...(19): siRNA sense strand
gcuuggauauggcaaauuc

SEQ ID NO: 1961010 - RNA, 19 nt, Homo sapiens
  misc_RNA (1)...(19): siRNA sense strand
gugcugagacgaaauuuga

SEQ ID NO: 1961011 - RNA, 19 nt, Homo sapiens
  misc_RNA (1)...(19): siRNA sense strand
gcaaauucccuucuucaag

SEQ ID NO: 1961012 - RNA, 19 nt, Homo sapiens
  misc_RNA (1)...(19): siRNA sense strand
gugaacaagugcucagaug

SEQ ID NO: 1961013 - RNA, 19 nt, Homo sapiens
  misc_RNA (1)...(19): siRNA sense strand
ggacuauggcuacuucaga

SEQ ID NO: 1961014 - RNA, 19 nt, Homo sapiens
  misc_RNA (1)...(19): siRNA sense strand
gccacaggaugaagaagaa

SEQ ID NO: 1961015 - RNA, 19 nt, Homo sapiens
  misc_RNA (1)...(19): siRNA sense strand
cagcagagcgcgagacguu

SEQ ID NO: 1961016 - RNA, 19 nt, Homo sapiens
  misc_RNA (1)...(19): siRNA sense strand
gcagugcugagacgaaauu

SEQ ID NO: 1961017 - RNA, 19 nt, Homo sapiens
  misc_RNA (1)...(19): siRNA sense strand
ccaggaaccuccaaaauuc

SEQ ID NO: 1961018 - RNA, 19 nt, Homo sapiens
  misc_RNA (1)...(19): siRNA sense strand
guacaugggcuugcagcua

SEQ ID NO: 1961019 - RNA, 19 nt, Homo sapiens
  misc_RNA (1)...(19): siRNA sense strand
gggccgacgugaacaagug

SEQ ID NO: 1961020 - RNA, 19 nt, Homo sapiens
  misc_RNA (1)...(19): siRNA sense strand
gacuauggcuacuucagau

SEQ ID NO: 1961021 - RNA, 19 nt, Homo sapiens
  misc_RNA (1)...(19): siRNA sense strand
agacgaaauuugaguccaa

SEQ ID NO: 1961022 - RNA, 19 nt, Homo sapiens
  misc_RNA (1)...(19): siRNA sense strand
gugcagugcugagacgaaa

SEQ ID NO: 1961023 - RNA, 19 nt, Homo sapiens
  misc_RNA (1)...(19): siRNA sense strand
gggcacagccguggacuau

SEQ ID NO: 1961024 - RNA, 19 nt, Homo sapiens
  misc_RNA (1)...(19): siRNA sense strand
acaugaagcuuggauaugg

SEQ ID NO: 1961025 - RNA, 19 nt, Homo sapiens
  misc_RNA (1)...(19): siRNA sense strand
gcaagcuggcccugauuga

SEQ ID NO: 1961026 - RNA, 19 nt, Homo sapiens
  misc_RNA (1)...(19): siRNA sense strand
caagagagcggagcugauc

SEQ ID NO: 1961027 - RNA, 19 nt, Homo sapiens
  misc_RNA (1)...(19): siRNA sense strand
ccugugaccugaccuacga

SEQ ID NO: 1961028 - RNA, 19 nt, Homo sapiens
  misc_RNA (1)...(19): siRNA sense strand
gcaaguacugcaagaccaa

SEQ ID NO: 1961029 - RNA, 19 nt, Homo sapiens
  misc_RNA (1)...(19): siRNA sense strand
agaggaacauggacagcaa

SEQ ID NO: 1961030 - RNA, 19 nt, Homo sapiens
  misc_RNA (1)...(19): siRNA sense strand
ccgacgaggacgacacuua

SEQ ID NO: 1961031 - RNA, 19 nt, Homo sapiens
  misc_RNA (1)...(19): siRNA sense strand
gauauggcaaauucucuug

SEQ ID NO: 1961032 - RNA, 19 nt, Homo sapiens
  misc_RNA (1)...(19): siRNA sense strand
gccauggccuggguaccua

SEQ ID NO: 1961033 - RNA, 19 nt, Homo sapiens
  misc_RNA (1)...(19): siRNA sense strand
gggcaaauucccuucuuca

SEQ ID NO: 1961034 - RNA, 19 nt, Homo sapiens
  misc_RNA (1)...(19): siRNA sense strand
ggauauggcaaauucucuu

SEQ ID NO: 1961035 - RNA, 19 nt, Homo sapiens
  misc_RNA (1)...(19): siRNA sense strand
gaggaccgacaucugcuuu

SEQ ID NO: 1961036 - RNA, 19 nt, Homo sapiens
  misc_RNA (1)...(19): siRNA sense strand
gcacucagcauguguuucc

SEQ ID NO: 1961037 - RNA, 19 nt, Homo sapiens
  misc_RNA (1)...(19): siRNA sense strand
caaguucugcuaccagugu

SEQ ID NO: 1961038 - RNA, 19 nt, Homo sapiens
  misc_RNA (1)...(19): siRNA sense strand
gaagcuuggauauggcaaa

SEQ ID NO: 1961039 - RNA, 19 nt, Homo sapiens
  misc_RNA (1)...(19): siRNA sense strand
ugaacaagugcucagauga

SEQ ID NO: 1961040 - RNA, 19 nt, Homo sapiens
  misc_RNA (1)...(19): siRNA sense strand
ucacggcacucagcaugug

SEQ ID NO: 1961041 - RNA, 19 nt, Homo sapiens
  misc_RNA (1)...(19): siRNA sense strand
ggacacaaaccuggagucu

SEQ ID NO: 1961042 - RNA, 19 nt, Homo sapiens
  misc_RNA (1)...(19): siRNA sense strand
gucauaccaugggcaguuu

SEQ ID NO: 1961043 - RNA, 19 nt, Homo sapiens
  misc_RNA (1)...(19): siRNA sense strand
uugaggacguguugggaaa

SEQ ID NO: 1961044 - RNA, 19 nt, Homo sapiens
  misc_RNA (1)...(19): siRNA sense strand
caagcccaauguugcugaa

SEQ ID NO: 1961045 - RNA, 19 nt, Homo sapiens
  misc_RNA (1)...(19): siRNA sense strand
ccuggagucucuguacuau

SEQ ID NO: 1961046 - RNA, 19 nt, Homo sapiens
  misc_RNA (1)...(19): siRNA sense strand
ccaguuguuccaauccuuu

SEQ ID NO: 1961047 - RNA, 19 nt, Homo sapiens
  misc_RNA (1)...(19): siRNA sense strand
caccagcagcuucgacaaa

SEQ ID NO: 1961048 - RNA, 19 nt, Homo sapiens
  misc_RNA (1)...(19): siRNA sense strand
aaauucccuucuucaaguu

SEQ ID NO: 1961049 - RNA, 19 nt, Homo sapiens
  misc_RNA (1)...(19): siRNA sense strand
gcaagagagcggagcugau

SEQ ID NO: 1961050 - RNA, 19 nt, Homo sapiens
  misc_RNA (1)...(19): siRNA sense strand
cguggacuauggcuacuuc

SEQ ID NO: 1961051 - RNA, 19 nt, Homo sapiens
  misc_RNA (1)...(19): siRNA sense strand
ggcaaauucccuucuucaa

SEQ ID NO: 1961052 - RNA, 19 nt, Homo sapiens
  misc_RNA (1)...(19): siRNA sense strand
ucacugccacaacgacauu

SEQ ID NO: 1961053 - RNA, 19 nt, Homo sapiens
  misc_RNA (1)...(19): siRNA sense strand
ccaggaggagagaagaauu

SEQ ID NO: 1961054 - RNA, 19 nt, Homo sapiens
  misc_RNA (1)...(19): siRNA sense strand
uguguuuccuccuccacua

SEQ ID NO: 1961055 - RNA, 19 nt, Homo sapiens
  misc_RNA (1)...(19): siRNA sense strand
uccaauccuuucaucauca

SEQ ID NO: 1961056 - RNA, 19 nt, Homo sapiens
  misc_RNA (1)...(19): siRNA sense strand
caguuucacgggcacauuu

SEQ ID NO: 1961057 - RNA, 19 nt, Homo sapiens
  misc_RNA (1)...(19): siRNA sense strand
ccuacgagcaccagaggaa

SEQ ID NO: 1961058 - RNA, 19 nt, Homo sapiens
  misc_RNA (1)...(19): siRNA sense strand
ggaccgacaucugcuuucc

SEQ ID NO: 1961059 - RNA, 19 nt, Homo sapiens
  misc_RNA (1)...(19): siRNA sense strand
ugaacaugaagcuuggaua

SEQ ID NO: 1961060 - RNA, 19 nt, Homo sapiens
  misc_RNA (1)...(19): siRNA sense strand
ccaauccuuucaucaucau

SEQ ID NO: 1961061 - RNA, 19 nt, Homo sapiens
  misc_RNA (1)...(19): siRNA sense strand
gaaggcuacggcaccaugu

SEQ ID NO: 1961062 - RNA, 19 nt, Homo sapiens
  misc_RNA (1)...(19): siRNA sense strand
caggaggagagaagaauuc

SEQ ID NO: 1961063 - RNA, 19 nt, Homo sapiens
  misc_RNA (1)...(19): siRNA sense strand
cgacgaggacgacacuuac

SEQ ID NO: 1961064 - RNA, 19 nt, Homo sapiens
  misc_RNA (1)...(19): siRNA sense strand
gcuacggcaggcugucuuu

SEQ ID NO: 1961065 - RNA, 19 nt, Homo sapiens
  misc_RNA (1)...(19): siRNA sense strand
guuccaauccuuucaucau

SEQ ID NO: 1961066 - RNA, 19 nt, Homo sapiens
  misc_RNA (1)...(19): siRNA sense strand
gcaccagcagcuucgacaa

SEQ ID NO: 1961067 - RNA, 19 nt, Homo sapiens
  misc_RNA (1)...(19): siRNA sense strand
uacaugaagacacggcuuu

SEQ ID NO: 1961068 - RNA, 19 nt, Homo sapiens
  misc_RNA (1)...(19): siRNA sense strand
aagcuuggauauggcaaau

SEQ ID NO: 1961069 - RNA, 19 nt, Homo sapiens
  misc_RNA (1)...(19): siRNA sense strand
ggaccgaguuccacaagaa

SEQ ID NO: 1961070 - RNA, 19 nt, Homo sapiens
  misc_RNA (1)...(19): siRNA sense strand
ccagauggcuccaguuuca

SEQ ID NO: 1961071 - RNA, 19 nt, Homo sapiens
  misc_RNA (1)...(19): siRNA sense strand
caaauucccuucuucaagu

SEQ ID NO: 1961072 - RNA, 19 nt, Homo sapiens
  misc_RNA (1)...(19): siRNA sense strand
gaacaugaagcuuggauau

SEQ ID NO: 1961073 - RNA, 19 nt, Homo sapiens
  misc_RNA (1)...(19): siRNA sense strand
gcacagccguggacuaugg

SEQ ID NO: 1961074 - RNA, 19 nt, Homo sapiens
  misc_RNA (1)...(19): siRNA sense strand
gaguuuggguugaacauga

SEQ ID NO: 1961075 - RNA, 19 nt, Homo sapiens
  misc_RNA (1)...(19): siRNA sense strand
gagagaagaauuccaguga

SEQ ID NO: 1961076 - RNA, 19 nt, Homo sapiens
  misc_RNA (1)...(19): siRNA sense strand
acacaaaccuggagucucu

SEQ ID NO: 1961077 - RNA, 19 nt, Homo sapiens
  misc_RNA (1)...(19): siRNA sense strand
uggagucucuguacuauga

SEQ ID NO: 1961078 - RNA, 19 nt, Homo sapiens
  misc_RNA (1)...(19): siRNA sense strand
caucauuuauggacacaaa

SEQ ID NO: 1961079 - RNA, 19 nt, Homo sapiens
  misc_RNA (1)...(19): siRNA sense strand
ugacacaacuggagcaagu

SEQ ID NO: 1961080 - RNA, 19 nt, Homo sapiens
  misc_RNA (1)...(19): siRNA sense strand
gcuuggauauggcaaauuc

SEQ ID NO: 1961081 - RNA, 19 nt, Homo sapiens
  misc_RNA (1)...(19): siRNA sense strand
gugcugagacgaaauuuga

SEQ ID NO: 1961082 - RNA, 19 nt, Homo sapiens
  misc_RNA (1)...(19): siRNA sense strand
gcaaauucccuucuucaag

SEQ ID NO: 1961083 - RNA, 19 nt, Homo sapiens
  misc_RNA (1)...(19): siRNA sense strand
gugaacaagugcucagaug

SEQ ID NO: 1961084 - RNA, 19 nt, Homo sapiens
  misc_RNA (1)...(19): siRNA sense strand
ggacuauggcuacuucaga

SEQ ID NO: 1961085 - RNA, 19 nt, Homo sapiens
  misc_RNA (1)...(19): siRNA sense strand
gccacaggaugaagaagaa

SEQ ID NO: 1961086 - RNA, 19 nt, Homo sapiens
  misc_RNA (1)...(19): siRNA sense strand
cagcagagcgcgagacguu

SEQ ID NO: 1961087 - RNA, 19 nt, Homo sapiens
  misc_RNA (1)...(19): siRNA sense strand
gcagugcugagacgaaauu

SEQ ID NO: 1961088 - RNA, 19 nt, Homo sapiens
  misc_RNA (1)...(19): siRNA sense strand
gcaggaugguugcauguac

SEQ ID NO: 1961089 - RNA, 19 nt, Homo sapiens
  misc_RNA (1)...(19): siRNA sense strand
ccaggaaccuccaaaauuc

SEQ ID NO: 1961090 - RNA, 19 nt, Homo sapiens
  misc_RNA (1)...(19): siRNA sense strand
guacaugggcuugcagcua

SEQ ID NO: 1961091 - RNA, 19 nt, Homo sapiens
  misc_RNA (1)...(19): siRNA sense strand
gggccgacgugaacaagug

SEQ ID NO: 1961092 - RNA, 19 nt, Homo sapiens
  misc_RNA (1)...(19): siRNA sense strand
gacuauggcuacuucagau

SEQ ID NO: 1961093 - RNA, 19 nt, Homo sapiens
  misc_RNA (1)...(19): siRNA sense strand
agacgaaauuugaguccaa

SEQ ID NO: 1961094 - RNA, 19 nt, Homo sapiens
  misc_RNA (1)...(19): siRNA sense strand
gugcagugcugagacgaaa

SEQ ID NO: 1961095 - RNA, 19 nt, Homo sapiens
  misc_RNA (1)...(19): siRNA sense strand
gggcacagccguggacuau

SEQ ID NO: 1961096 - RNA, 19 nt, Homo sapiens
  misc_RNA (1)...(19): siRNA sense strand
acaugaagcuuggauaugg

SEQ ID NO: 1961097 - RNA, 19 nt, Homo sapiens
  misc_RNA (1)...(19): siRNA sense strand
gcaagcuggcccugauuga

SEQ ID NO: 1961098 - RNA, 19 nt, Homo sapiens
  misc_RNA (1)...(19): siRNA sense strand
caagagagcggagcugauc

SEQ ID NO: 1961099 - RNA, 19 nt, Homo sapiens
  misc_RNA (1)...(19): siRNA sense strand
ccugugaccugaccuacga

SEQ ID NO: 1961100 - RNA, 19 nt, Homo sapiens
  misc_RNA (1)...(19): siRNA sense strand
gcaaguacugcaagaccaa

SEQ ID NO: 1961101 - RNA, 19 nt, Homo sapiens
  misc_RNA (1)...(19): siRNA sense strand
agaggaacauggacagcaa

SEQ ID NO: 1961102 - RNA, 19 nt, Homo sapiens
  misc_RNA (1)...(19): siRNA sense strand
ccgacgaggacgacacuua

SEQ ID NO: 1961103 - RNA, 19 nt, Homo sapiens
  misc_RNA (1)...(19): siRNA sense strand
gauauggcaaauucucuug

SEQ ID NO: 1961104 - RNA, 19 nt, Homo sapiens
  misc_RNA (1)...(19): siRNA sense strand
ggauauggcaaauucucuu

SEQ ID NO: 1961105 - RNA, 19 nt, Homo sapiens
  misc_RNA (1)...(19): siRNA sense strand
gggcaaauucccuucuuca

SEQ ID NO: 1961106 - RNA, 19 nt, Homo sapiens
  misc_RNA (1)...(19): siRNA sense strand
gaggaccgacaucugcuuu

SEQ ID NO: 1961107 - RNA, 19 nt, Homo sapiens
  misc_RNA (1)...(19): siRNA sense strand
gccauggccuggguaccua

SEQ ID NO: 1961108 - RNA, 19 nt, Homo sapiens
  misc_RNA (1)...(19): siRNA sense strand
gcacucagcauguguuucc

SEQ ID NO: 1961109 - RNA, 19 nt, Homo sapiens
  misc_RNA (1)...(19): siRNA sense strand
caaguucugcuaccagugu

SEQ ID NO: 1961110 - RNA, 19 nt, Homo sapiens
  misc_RNA (1)...(19): siRNA sense strand
gaagcuuggauauggcaaa

SEQ ID NO: 1961111 - RNA, 19 nt, Homo sapiens
  misc_RNA (1)...(19): siRNA sense strand
ugaacaagugcucagauga

SEQ ID NO: 1961112 - RNA, 19 nt, Homo sapiens
  misc_RNA (1)...(19): siRNA sense strand
ucacggcacucagcaugug

SEQ ID NO: 1961113 - RNA, 19 nt, Homo sapiens
  misc_RNA (1)...(19): siRNA sense strand
gucauaccaugggcaguuu

SEQ ID NO: 1961114 - RNA, 19 nt, Homo sapiens
  misc_RNA (1)...(19): siRNA sense strand
uugaggacguguugggaaa

SEQ ID NO: 1961115 - RNA, 19 nt, Homo sapiens
  misc_RNA (1)...(19): siRNA sense strand
ggacacaaaccuggagucu

SEQ ID NO: 1961116 - RNA, 19 nt, Homo sapiens
  misc_RNA (1)...(19): siRNA sense strand
caagcccaauguugcugaa

SEQ ID NO: 1961117 - RNA, 19 nt, Homo sapiens
  misc_RNA (1)...(19): siRNA sense strand
ccuggagucucuguacuau

SEQ ID NO: 1961118 - RNA, 19 nt, Homo sapiens
  misc_RNA (1)...(19): siRNA sense strand
ccaguuguuccaauccuuu

SEQ ID NO: 1961119 - RNA, 19 nt, Homo sapiens
  misc_RNA (1)...(19): siRNA sense strand
caccagcagcuucgacaaa

SEQ ID NO: 1961120 - RNA, 19 nt, Homo sapiens
  misc_RNA (1)...(19): siRNA sense strand
aaauucccuucuucaaguu

SEQ ID NO: 1961121 - RNA, 19 nt, Homo sapiens
  misc_RNA (1)...(19): siRNA sense strand
gcaagagagcggagcugau

SEQ ID NO: 1961122 - RNA, 19 nt, Homo sapiens
  misc_RNA (1)...(19): siRNA sense strand
cguggacuauggcuacuuc

SEQ ID NO: 1961123 - RNA, 19 nt, Homo sapiens
  misc_RNA (1)...(19): siRNA sense strand
gaaggaagaggaggaagcu

SEQ ID NO: 1961124 - RNA, 19 nt, Homo sapiens
  misc_RNA (1)...(19): siRNA sense strand
ggcaaauucccuucuucaa

SEQ ID NO: 1961125 - RNA, 19 nt, Homo sapiens
  misc_RNA (1)...(19): siRNA sense strand
ucacugccacaacgacauu

SEQ ID NO: 1961126 - RNA, 19 nt, Homo sapiens
  misc_RNA (1)...(19): siRNA sense strand
ccaggaggagagaagaauu

SEQ ID NO: 1961127 - RNA, 19 nt, Homo sapiens
  misc_RNA (1)...(19): siRNA sense strand
uguguuuccuccuccacua

SEQ ID NO: 1961128 - RNA, 19 nt, Homo sapiens
  misc_RNA (1)...(19): siRNA sense strand
caguuucacgggcacauuu

SEQ ID NO: 1961129 - RNA, 19 nt, Homo sapiens
  misc_RNA (1)...(19): siRNA sense strand
ugaacaugaagcuuggaua

SEQ ID NO: 1961130 - RNA, 19 nt, Homo sapiens
  misc_RNA (1)...(19): siRNA sense strand
ccuacgagcaccagaggaa

SEQ ID NO: 1961131 - RNA, 19 nt, Homo sapiens
  misc_RNA (1)...(19): siRNA sense strand
ggaccgacaucugcuuucc

SEQ ID NO: 1961132 - RNA, 19 nt, Homo sapiens
  misc_RNA (1)...(19): siRNA sense strand
ccaauccuuucaucaucau

SEQ ID NO: 1961133 - RNA, 19 nt, Homo sapiens
  misc_RNA (1)...(19): siRNA sense strand
uccaauccuuucaucauca

SEQ ID NO: 1961134 - RNA, 19 nt, Homo sapiens
  misc_RNA (1)...(19): siRNA sense strand
gaaggcuacggcaccaugu

SEQ ID NO: 1961135 - RNA, 19 nt, Homo sapiens
  misc_RNA (1)...(19): siRNA sense strand
caggaggagagaagaauuc

SEQ ID NO: 1961136 - RNA, 19 nt, Homo sapiens
  misc_RNA (1)...(19): siRNA sense strand
cgacgaggacgacacuuac

SEQ ID NO: 1961137 - RNA, 19 nt, Homo sapiens
  misc_RNA (1)...(19): siRNA sense strand
gcuacggcaggcugucuuu

SEQ ID NO: 1961138 - RNA, 19 nt, Homo sapiens
  misc_RNA (1)...(19): siRNA sense strand
guuccaauccuuucaucau

SEQ ID NO: 1961139 - RNA, 19 nt, Homo sapiens
  misc_RNA (1)...(19): siRNA sense strand
gcaccagcagcuucgacaa

SEQ ID NO: 1961140 - RNA, 19 nt, Homo sapiens
  misc_RNA (1)...(19): siRNA sense strand
uacaugaagacacggcuuu

SEQ ID NO: 1961141 - RNA, 19 nt, Homo sapiens
  misc_RNA (1)...(19): siRNA sense strand
aagcuuggauauggcaaau

SEQ ID NO: 1961142 - RNA, 19 nt, Homo sapiens
  misc_RNA (1)...(19): siRNA sense strand
gaagagagcuugcuugcua

SEQ ID NO: 1961143 - RNA, 19 nt, Homo sapiens
  misc_RNA (1)...(19): siRNA sense strand
gaucaaagcuggaagaaau

SEQ ID NO: 1961144 - RNA, 19 nt, Homo sapiens
  misc_RNA (1)...(19): siRNA sense strand
gaaaagagcucaagaaaug

SEQ ID NO: 1961145 - RNA, 19 nt, Homo sapiens
  misc_RNA (1)...(19): siRNA sense strand
ggacauaaauugcaaauac

SEQ ID NO: 1961146 - RNA, 19 nt, Homo sapiens
  misc_RNA (1)...(19): siRNA sense strand
gaaggaagcagguaacaua

SEQ ID NO: 1961147 - RNA, 19 nt, Homo sapiens
  misc_RNA (1)...(19): siRNA sense strand
gggaagacauuuacuauga

SEQ ID NO: 1961148 - RNA, 19 nt, Homo sapiens
  misc_RNA (1)...(19): siRNA sense strand
aaucagagcuucagucuuu

SEQ ID NO: 1961149 - RNA, 19 nt, Homo sapiens
  misc_RNA (1)...(19): siRNA sense strand
gaaacccuaucaacacuua

SEQ ID NO: 1961150 - RNA, 19 nt, Homo sapiens
  misc_RNA (1)...(19): siRNA sense strand
uaagaaaucugaacaggaa

SEQ ID NO: 1961151 - RNA, 19 nt, Homo sapiens
  misc_RNA (1)...(19): siRNA sense strand
ucaaagaacuuacuaggaa

SEQ ID NO: 1961152 - RNA, 19 nt, Homo sapiens
  misc_RNA (1)...(19): siRNA sense strand
gaacaucauucuacccaaa

SEQ ID NO: 1961153 - RNA, 19 nt, Homo sapiens
  misc_RNA (1)...(19): siRNA sense strand
gaacaucggucugugagaa

SEQ ID NO: 1961154 - RNA, 19 nt, Homo sapiens
  misc_RNA (1)...(19): siRNA sense strand
gaaagagccauguuuguuu

SEQ ID NO: 1961155 - RNA, 19 nt, Homo sapiens
  misc_RNA (1)...(19): siRNA sense strand
caacaucaaugaacagaga

SEQ ID NO: 1961156 - RNA, 19 nt, Homo sapiens
  misc_RNA (1)...(19): siRNA sense strand
gaaagcagaccuagaagaa

SEQ ID NO: 1961157 - RNA, 19 nt, Homo sapiens
  misc_RNA (1)...(19): siRNA sense strand
ggaagcagguaacauaaau

SEQ ID NO: 1961158 - RNA, 19 nt, Homo sapiens
  misc_RNA (1)...(19): siRNA sense strand
ggagaaagaauucaacaaa

SEQ ID NO: 1961159 - RNA, 19 nt, Homo sapiens
  misc_RNA (1)...(19): siRNA sense strand
gcacaacuccugcaaauuc

SEQ ID NO: 1961160 - RNA, 19 nt, Homo sapiens
  misc_RNA (1)...(19): siRNA sense strand
gcugaaacacuuaagauua

SEQ ID NO: 1961161 - RNA, 19 nt, Homo sapiens
  misc_RNA (1)...(19): siRNA sense strand
ccgagaggaucaaauaaua

SEQ ID NO: 1961162 - RNA, 19 nt, Homo sapiens
  misc_RNA (1)...(19): siRNA sense strand
ggacagacaccaccagaaa

SEQ ID NO: 1961163 - RNA, 19 nt, Homo sapiens
  misc_RNA (1)...(19): siRNA sense strand
gcaaauacaacucugcuuu

SEQ ID NO: 1961164 - RNA, 19 nt, Homo sapiens
  misc_RNA (1)...(19): siRNA sense strand
gagcuucucucacaguuga

SEQ ID NO: 1961165 - RNA, 19 nt, Homo sapiens
  misc_RNA (1)...(19): siRNA sense strand
gaacugaaggacauaaauu

SEQ ID NO: 1961166 - RNA, 19 nt, Homo sapiens
  misc_RNA (1)...(19): siRNA sense strand
ggauuccuaugacaacuua

SEQ ID NO: 1961167 - RNA, 19 nt, Homo sapiens
  misc_RNA (1)...(19): siRNA sense strand
gcauguacagcuucaauua

SEQ ID NO: 1961168 - RNA, 19 nt, Homo sapiens
  misc_RNA (1)...(19): siRNA sense strand
ggaguaaucccacgaaguu

SEQ ID NO: 1961169 - RNA, 19 nt, Homo sapiens
  misc_RNA (1)...(19): siRNA sense strand
gagauggaaugccuuagaa

SEQ ID NO: 1961170 - RNA, 19 nt, Homo sapiens
  misc_RNA (1)...(19): siRNA sense strand
aaacuuaccuucuuacuac

SEQ ID NO: 1961171 - RNA, 19 nt, Homo sapiens
  misc_RNA (1)...(19): siRNA sense strand
uacagagacuccaaacuua

SEQ ID NO: 1961172 - RNA, 19 nt, Homo sapiens
  misc_RNA (1)...(19): siRNA sense strand
gaauagaagacugagauua

SEQ ID NO: 1961173 - RNA, 19 nt, Homo sapiens
  misc_RNA (1)...(19): siRNA sense strand
gaaaagaagucucugauag

SEQ ID NO: 1961174 - RNA, 19 nt, Homo sapiens
  misc_RNA (1)...(19): siRNA sense strand
gaagacauuuacuaugaug

SEQ ID NO: 1961175 - RNA, 19 nt, Homo sapiens
  misc_RNA (1)...(19): siRNA sense strand
gcagaguguugaucaagaa

SEQ ID NO: 1961176 - RNA, 19 nt, Homo sapiens
  misc_RNA (1)...(19): siRNA sense strand
ucaagagacucaaacuaaa

SEQ ID NO: 1961177 - RNA, 19 nt, Homo sapiens
  misc_RNA (1)...(19): siRNA sense strand
gauaaucucagguuagaaa

SEQ ID NO: 1961178 - RNA, 19 nt, Homo sapiens
  misc_RNA (1)...(19): siRNA sense strand
gaagagagcagaguguuga

SEQ ID NO: 1961179 - RNA, 19 nt, Homo sapiens
  misc_RNA (1)...(19): siRNA sense strand
gaacagugcaggaacaaau

SEQ ID NO: 1961180 - RNA, 19 nt, Homo sapiens
  misc_RNA (1)...(19): siRNA sense strand
gcugaagaaugaacaagaa

SEQ ID NO: 1961181 - RNA, 19 nt, Homo sapiens
  misc_RNA (1)...(19): siRNA sense strand
acaaggagcuuucuucagu

SEQ ID NO: 1961182 - RNA, 19 nt, Homo sapiens
  misc_RNA (1)...(19): siRNA sense strand
caugccgucuuuacaauua

SEQ ID NO: 1961183 - RNA, 19 nt, Homo sapiens
  misc_RNA (1)...(19): siRNA sense strand
gagcuucagucuuugcaaa

SEQ ID NO: 1961184 - RNA, 19 nt, Homo sapiens
  misc_RNA (1)...(19): siRNA sense strand
caaagaacuuacuaggaaa

SEQ ID NO: 1961185 - RNA, 19 nt, Homo sapiens
  misc_RNA (1)...(19): siRNA sense strand
caaauaauacgcuuggaaa

SEQ ID NO: 1961186 - RNA, 19 nt, Homo sapiens
  misc_RNA (1)...(19): siRNA sense strand
uaagggagcauaucaagaa

SEQ ID NO: 1961187 - RNA, 19 nt, Homo sapiens
  misc_RNA (1)...(19): siRNA sense strand
gaacaagaagaaaguauca

SEQ ID NO: 1961188 - RNA, 19 nt, Homo sapiens
  misc_RNA (1)...(19): siRNA sense strand
gaagaaugaacaagaagaa

SEQ ID NO: 1961189 - RNA, 19 nt, Homo sapiens
  misc_RNA (1)...(19): siRNA sense strand
gaucagaaucauccagaua

SEQ ID NO: 1961190 - RNA, 19 nt, Homo sapiens
  misc_RNA (1)...(19): siRNA sense strand
gcaguugcgugaaauggaa

SEQ ID NO: 1961191 - RNA, 19 nt, Homo sapiens
  misc_RNA (1)...(19): siRNA sense strand
gaacagaagaagaaugaau

SEQ ID NO: 1961192 - RNA, 19 nt, Homo sapiens
  misc_RNA (1)...(19): siRNA sense strand
aggaagaacugaccaagaa

SEQ ID NO: 1961193 - RNA, 19 nt, Homo sapiens
  misc_RNA (1)...(19): siRNA sense strand
aaagaagucucugauagaa

SEQ ID NO: 1961194 - RNA, 19 nt, Homo sapiens
  misc_RNA (1)...(19): siRNA sense strand
ugaagaggcucaaagaaca

SEQ ID NO: 1961195 - RNA, 19 nt, Homo sapiens
  misc_RNA (1)...(19): siRNA sense strand
caaagagccaagcugauua

SEQ ID NO: 1961196 - RNA, 19 nt, Homo sapiens
  misc_RNA (1)...(19): siRNA sense strand
gaauagacguguggcauca

SEQ ID NO: 1961197 - RNA, 19 nt, Homo sapiens
  misc_RNA (1)...(19): siRNA sense strand
gaagggagucuuuguuguu

SEQ ID NO: 1961198 - RNA, 19 nt, Homo sapiens
  misc_RNA (1)...(19): siRNA sense strand
ggaaguggauauucuggau

SEQ ID NO: 1961199 - RNA, 19 nt, Homo sapiens
  misc_RNA (1)...(19): siRNA sense strand
gaagaaaugcugaaaauga

SEQ ID NO: 1961200 - RNA, 19 nt, Homo sapiens
  misc_RNA (1)...(19): siRNA sense strand
aaacaaggcaguaguaaau

SEQ ID NO: 1961201 - RNA, 19 nt, Homo sapiens
  misc_RNA (1)...(19): siRNA sense strand
ggaagcagguggagugucu

SEQ ID NO: 1961202 - RNA, 19 nt, Homo sapiens
  misc_RNA (1)...(19): siRNA sense strand
aagcgaaccuuaaucuuga

SEQ ID NO: 1961203 - RNA, 19 nt, Homo sapiens
  misc_RNA (1)...(19): siRNA sense strand
ggaagaaauguaugaagaa

SEQ ID NO: 1961204 - RNA, 19 nt, Homo sapiens
  misc_RNA (1)...(19): siRNA sense strand
gaacuucagcacaagcuaa

SEQ ID NO: 1961205 - RNA, 19 nt, Homo sapiens
  misc_RNA (1)...(19): siRNA sense strand
gagaaagaauucaacaaac

SEQ ID NO: 1961206 - RNA, 19 nt, Homo sapiens
  misc_RNA (1)...(19): siRNA sense strand
ggaagacauuuacuaugau

SEQ ID NO: 1961207 - RNA, 19 nt, Homo sapiens
  misc_RNA (1)...(19): siRNA sense strand
caagaaaccuccaaaacuu

SEQ ID NO: 1961208 - RNA, 19 nt, Homo sapiens
  misc_RNA (1)...(19): siRNA sense strand
gcuccaagcugaagugaag

SEQ ID NO: 1961209 - RNA, 19 nt, Homo sapiens
  misc_RNA (1)...(19): siRNA sense strand
gcagaagggaugagauuga

SEQ ID NO: 1961210 - RNA, 19 nt, Homo sapiens
  misc_RNA (1)...(19): siRNA sense strand
uggaagaaauguaugaaga

SEQ ID NO: 1961211 - RNA, 19 nt, Homo sapiens
  misc_RNA (1)...(19): siRNA sense strand
gaaagucagcaguuaauag

SEQ ID NO: 1961212 - RNA, 19 nt, Homo sapiens
  misc_RNA (1)...(19): siRNA sense strand
aaagaaagaggaaguagaa

SEQ ID NO: 1961213 - RNA, 19 nt, Homo sapiens
  misc_RNA (1)...(19): siRNA sense strand
aaacagccauaauugcaaa

SEQ ID NO: 1961214 - RNA, 19 nt, Homo sapiens
  misc_RNA (1)...(19): siRNA sense strand
gaacaaaugagugcucuuc

SEQ ID NO: 1961215 - RNA, 19 nt, Homo sapiens
  misc_RNA (1)...(19): siRNA sense strand
gaucugaaagaaacccuua

SEQ ID NO: 1961216 - RNA, 19 nt, Homo sapiens
  misc_RNA (1)...(19): siRNA sense strand
ggaagcaauguuauucuuu

SEQ ID NO: 1961217 - RNA, 19 nt, Homo sapiens
  misc_RNA (1)...(19): siRNA sense strand
auacaacucugcuuugguu

SEQ ID NO: 1961218 - RNA, 19 nt, Homo sapiens
  misc_RNA (1)...(19): siRNA sense strand
gaaagagacggccaagugu

SEQ ID NO: 1961219 - RNA, 19 nt, Homo sapiens
  misc_RNA (1)...(19): siRNA sense strand
ucugaaaucugaucugaau

SEQ ID NO: 1961220 - RNA, 19 nt, Homo sapiens
  misc_RNA (1)...(19): siRNA sense strand
gagcaaagccugccuacag

SEQ ID NO: 1961221 - RNA, 19 nt, Homo sapiens
  misc_RNA (1)...(19): siRNA sense strand
aaacgaaucaggagaaaga

SEQ ID NO: 1961222 - RNA, 19 nt, Homo sapiens
  misc_RNA (1)...(19): siRNA sense strand
aaagagccauguuuguuug

SEQ ID NO: 1961223 - RNA, 19 nt, Homo sapiens
  misc_RNA (1)...(19): siRNA sense strand
ggagaaaaguaaugagauu

SEQ ID NO: 1961224 - RNA, 19 nt, Homo sapiens
  misc_RNA (1)...(19): siRNA sense strand
gaagaaagagagagaacau

SEQ ID NO: 1961225 - RNA, 19 nt, Homo sapiens
  misc_RNA (1)...(19): siRNA sense strand
uaagacaccaccucacuuu

SEQ ID NO: 1961226 - RNA, 19 nt, Homo sapiens
  misc_RNA (1)...(19): siRNA sense strand
guacagcuucaauuagaua

SEQ ID NO: 1961227 - RNA, 19 nt, Homo sapiens
  misc_RNA (1)...(19): siRNA sense strand
caaacuggaugaagaagag

SEQ ID NO: 1961228 - RNA, 19 nt, Homo sapiens
  misc_RNA (1)...(19): siRNA sense strand
ugcaaacacugagaaguua

SEQ ID NO: 1961229 - RNA, 19 nt, Homo sapiens
  misc_RNA (1)...(19): siRNA sense strand
gagaauagaagacugagau

SEQ ID NO: 1961230 - RNA, 19 nt, Homo sapiens
  misc_RNA (1)...(19): siRNA sense strand
acaacgagcagauauauga

SEQ ID NO: 1961231 - RNA, 19 nt, Homo sapiens
  misc_RNA (1)...(19): siRNA sense strand
ucagcuggaugauauuaaa

SEQ ID NO: 1961232 - RNA, 19 nt, Homo sapiens
  misc_RNA (1)...(19): siRNA sense strand
ggaaagucagcaguuaaua

SEQ ID NO: 1961233 - RNA, 19 nt, Homo sapiens
  misc_RNA (1)...(19): siRNA sense strand
gcaacuagaacaugugaug

SEQ ID NO: 1961234 - RNA, 19 nt, Homo sapiens
  misc_RNA (1)...(19): siRNA sense strand
uagaagaccucacccucaa

SEQ ID NO: 1961235 - RNA, 19 nt, Homo sapiens
  misc_RNA (1)...(19): siRNA sense strand
cuacagagacuccaaacuu

SEQ ID NO: 1961236 - RNA, 19 nt, Homo sapiens
  misc_RNA (1)...(19): siRNA sense strand
guacaugaccugcgaguag

SEQ ID NO: 1961237 - RNA, 19 nt, Homo sapiens
  misc_RNA (1)...(19): siRNA sense strand
aagaacaacugagaucaaa

SEQ ID NO: 1961238 - RNA, 19 nt, Homo sapiens
  misc_RNA (1)...(19): siRNA sense strand
cccaagaccuucacguuug

SEQ ID NO: 1961239 - RNA, 19 nt, Homo sapiens
  misc_RNA (1)...(19): siRNA sense strand
ccaagaccuucacguuuga

SEQ ID NO: 1961240 - RNA, 19 nt, Homo sapiens
  misc_RNA (1)...(19): siRNA sense strand
uagaacaugugauggauuc

SEQ ID NO: 1961241 - RNA, 19 nt, Homo sapiens
  misc_RNA (1)...(19): siRNA sense strand
aaagcuaaaugaagacaga

SEQ ID NO: 1961242 - RNA, 19 nt, Homo sapiens
  misc_RNA (1)...(19): siRNA sense strand
caagauauccuauugaaug

SEQ ID NO: 1961243 - RNA, 19 nt, Homo sapiens
  misc_RNA (1)...(19): siRNA sense strand
agucguaccugaagagaaa

SEQ ID NO: 1961244 - RNA, 19 nt, Homo sapiens
  misc_RNA (1)...(19): siRNA sense strand
ugagagacauuaucgaaag

SEQ ID NO: 1961245 - RNA, 19 nt, Homo sapiens
  misc_RNA (1)...(19): siRNA sense strand
gacauuaucgaaagucgua

SEQ ID NO: 1961246 - RNA, 19 nt, Homo sapiens
  misc_RNA (1)...(19): siRNA sense strand
uguacaagauauccuauug

SEQ ID NO: 1961247 - RNA, 19 nt, Homo sapiens
  misc_RNA (1)...(19): siRNA sense strand
uggcaaacauacaagcuuu

SEQ ID NO: 1961248 - RNA, 19 nt, Homo sapiens
  misc_RNA (1)...(19): siRNA sense strand
gcaacacgcagacacaguu

SEQ ID NO: 1961249 - RNA, 19 nt, Homo sapiens
  misc_RNA (1)...(19): siRNA sense strand
gcugguggcuggugacauc

SEQ ID NO: 1961250 - RNA, 19 nt, Homo sapiens
  misc_RNA (1)...(19): siRNA sense strand
gagcgaguguuucagaucu

SEQ ID NO: 1961251 - RNA, 19 nt, Homo sapiens
  misc_RNA (1)...(19): siRNA sense strand
guacaagauauccuauuga

SEQ ID NO: 1961252 - RNA, 19 nt, Homo sapiens
  misc_RNA (1)...(19): siRNA sense strand
uggaaugguugcaggauau

SEQ ID NO: 1961253 - RNA, 19 nt, Homo sapiens
  misc_RNA (1)...(19): siRNA sense strand
acaccaggaucuuguacaa

SEQ ID NO: 1961254 - RNA, 19 nt, Homo sapiens
  misc_RNA (1)...(19): siRNA sense strand
gagagacauuaucgaaagu

SEQ ID NO: 1961255 - RNA, 19 nt, Homo sapiens
  misc_RNA (1)...(19): siRNA sense strand
agacacaguuggcauugau

SEQ ID NO: 1961256 - RNA, 19 nt, Homo sapiens
  misc_RNA (1)...(19): siRNA sense strand
cgaaagucguaccugaaga

SEQ ID NO: 1961257 - RNA, 19 nt, Homo sapiens
  misc_RNA (1)...(19): siRNA sense strand
uggcugacauguuggaaug

SEQ ID NO: 1961258 - RNA, 19 nt, Homo sapiens
  misc_RNA (1)...(19): siRNA sense strand
gaaagucguaccugaagag

SEQ ID NO: 1961259 - RNA, 19 nt, Homo sapiens
  misc_RNA (1)...(19): siRNA sense strand
aggaggcgcugaagaagug

SEQ ID NO: 1961260 - RNA, 19 nt, Homo sapiens
  misc_RNA (1)...(19): siRNA sense strand
cuucgggccuucccagauu

SEQ ID NO: 1961261 - RNA, 19 nt, Homo sapiens
  misc_RNA (1)...(19): siRNA sense strand
ucagcaaccuggcggaaca

SEQ ID NO: 1961262 - RNA, 19 nt, Homo sapiens
  misc_RNA (1)...(19): siRNA sense strand
gcgaguguuucagaucuau

SEQ ID NO: 1961263 - RNA, 19 nt, Homo sapiens
  misc_RNA (1)...(19): siRNA sense strand
gaguguuucagaucuauga

SEQ ID NO: 1961264 - RNA, 19 nt, Homo sapiens
  misc_RNA (1)...(19): siRNA sense strand
gggagacuuggcaaacaua

SEQ ID NO: 1961265 - RNA, 19 nt, Homo sapiens
  misc_RNA (1)...(19): siRNA sense strand
gcagacacaguuggcauug

SEQ ID NO: 1961266 - RNA, 19 nt, Homo sapiens
  misc_RNA (1)...(19): siRNA sense strand
gggaaaggcuagccauccu

SEQ ID NO: 1961267 - RNA, 19 nt, Homo sapiens
  misc_RNA (1)...(19): siRNA sense strand
ggauauugagagacauuau

SEQ ID NO: 1961268 - RNA, 19 nt, Homo sapiens
  misc_RNA (1)...(19): siRNA sense strand
aagagcggcugaggcguaa

SEQ ID NO: 1961269 - RNA, 19 nt, Homo sapiens
  misc_RNA (1)...(19): siRNA sense strand
agacuuggcaaacauacaa

SEQ ID NO: 1961270 - RNA, 19 nt, Homo sapiens
  misc_RNA (1)...(19): siRNA sense strand
uuggaaugguugcaggaua

SEQ ID NO: 1961271 - RNA, 19 nt, Homo sapiens
  misc_RNA (1)...(19): siRNA sense strand
ccauguggagcgaguguuu

SEQ ID NO: 1961272 - RNA, 19 nt, Homo sapiens
  misc_RNA (1)...(19): siRNA sense strand
gaacaccaggaucuuguac

SEQ ID NO: 1961273 - RNA, 19 nt, Homo sapiens
  misc_RNA (1)...(19): siRNA sense strand
cagacacaguuggcauuga

SEQ ID NO: 1961274 - RNA, 19 nt, Homo sapiens
  misc_RNA (1)...(19): siRNA sense strand
cgaacaccaggaucuugua

SEQ ID NO: 1961275 - RNA, 19 nt, Homo sapiens
  misc_RNA (1)...(19): siRNA sense strand
ggaaugguugcaggauauu

SEQ ID NO: 1961276 - RNA, 19 nt, Homo sapiens
  misc_RNA (1)...(19): siRNA sense strand
guugcaggauauugagaga

SEQ ID NO: 1961277 - RNA, 19 nt, Homo sapiens
  misc_RNA (1)...(19): siRNA sense strand
ggagcgaguguuucagauc

SEQ ID NO: 1961278 - RNA, 19 nt, Homo sapiens
  misc_RNA (1)...(19): siRNA sense strand
aguaucuucuuucgucuau

SEQ ID NO: 1961279 - RNA, 19 nt, Homo sapiens
  misc_RNA (1)...(19): siRNA sense strand
ugcaggauauugagagaca

SEQ ID NO: 1961280 - RNA, 19 nt, Homo sapiens
  misc_RNA (1)...(19): siRNA sense strand
ggccugggaccgaauuuca

SEQ ID NO: 1961281 - RNA, 19 nt, Homo sapiens
  misc_RNA (1)...(19): siRNA sense strand
cucuguggcugacauguug

SEQ ID NO: 1961282 - RNA, 19 nt, Homo sapiens
  misc_RNA (1)...(19): siRNA sense strand
gcaggaggcgcugaagaag

SEQ ID NO: 1961283 - RNA, 19 nt, Homo sapiens
  misc_RNA (1)...(19): siRNA sense strand
gacgaacaccaggaucuug

SEQ ID NO: 1961284 - RNA, 19 nt, Homo sapiens
  misc_RNA (1)...(19): siRNA sense strand
guggagcgaguguuucaga

SEQ ID NO: 1961285 - RNA, 19 nt, Homo sapiens
  misc_RNA (1)...(19): siRNA sense strand
guaccugaagagaaaguau

SEQ ID NO: 1961286 - RNA, 19 nt, Homo sapiens
  misc_RNA (1)...(19): siRNA sense strand
ugcaggaggcgcugaagaa

SEQ ID NO: 1961287 - RNA, 19 nt, Homo sapiens
  misc_RNA (1)...(19): siRNA sense strand
caggauauugagagacauu

SEQ ID NO: 1961288 - RNA, 19 nt, Homo sapiens
  misc_RNA (1)...(19): siRNA sense strand
gaaugguugcaggauauug

SEQ ID NO: 1961289 - RNA, 19 nt, Homo sapiens
  misc_RNA (1)...(19): siRNA sense strand
gcugacauguuggaauggu

SEQ ID NO: 1961290 - RNA, 19 nt, Homo sapiens
  misc_RNA (1)...(19): siRNA sense strand
ccugggaccgaauuucaaa

SEQ ID NO: 1961291 - RNA, 19 nt, Homo sapiens
  misc_RNA (1)...(19): siRNA sense strand
ugaaguaccuccuggugua

SEQ ID NO: 1961292 - RNA, 19 nt, Homo sapiens
  misc_RNA (1)...(19): siRNA sense strand
gagcgagaaucaaacauag

SEQ ID NO: 1961293 - RNA, 19 nt, Homo sapiens
  misc_RNA (1)...(19): siRNA sense strand
caacuccucugcuuuccaa

SEQ ID NO: 1961294 - RNA, 19 nt, Homo sapiens
  misc_RNA (1)...(19): siRNA sense strand
cgagcgagaaucaaacaua

SEQ ID NO: 1961295 - RNA, 19 nt, Homo sapiens
  misc_RNA (1)...(19): siRNA sense strand
agacaucccucccaaguac

SEQ ID NO: 1961296 - RNA, 19 nt, Homo sapiens
  misc_RNA (1)...(19): siRNA sense strand
gaaggauuccaaggagaua

SEQ ID NO: 1961297 - RNA, 19 nt, Homo sapiens
  misc_RNA (1)...(19): siRNA sense strand
ucacagaagccacccaaga

SEQ ID NO: 1961298 - RNA, 19 nt, Homo sapiens
  misc_RNA (1)...(19): siRNA sense strand
gagacaucccucccaagua

SEQ ID NO: 1961299 - RNA, 19 nt, Homo sapiens
  misc_RNA (1)...(19): siRNA sense strand
ccaagaagaaggauuccaa

SEQ ID NO: 1961300 - RNA, 19 nt, Homo sapiens
  misc_RNA (1)...(19): siRNA sense strand
gagaaucaaacauagugaa

SEQ ID NO: 1961301 - RNA, 19 nt, Homo sapiens
  misc_RNA (1)...(19): siRNA sense strand
gagccuggcccucauauac

SEQ ID NO: 1961302 - RNA, 19 nt, Homo sapiens
  misc_RNA (1)...(19): siRNA sense strand
gcgagaaucaaacauagug

SEQ ID NO: 1961303 - RNA, 19 nt, Homo sapiens
  misc_RNA (1)...(19): siRNA sense strand
caucaacuccucugcuuuc

SEQ ID NO: 1961304 - RNA, 19 nt, Homo sapiens
  misc_RNA (1)...(19): siRNA sense strand
aaaccaagaagaaggauuc

SEQ ID NO: 1961305 - RNA, 19 nt, Homo sapiens
  misc_RNA (1)...(19): siRNA sense strand
agaagaaggauuccaagga

SEQ ID NO: 1961306 - RNA, 19 nt, Homo sapiens
  misc_RNA (1)...(19): siRNA sense strand
cagacgagcgagaaucaaa

SEQ ID NO: 1961307 - RNA, 19 nt, Homo sapiens
  misc_RNA (1)...(19): siRNA sense strand
gucaucaacuccucugcuu

SEQ ID NO: 1961308 - RNA, 19 nt, Homo sapiens
  misc_RNA (1)...(19): siRNA sense strand
ucaagugccaaaccaagaa

SEQ ID NO: 1961309 - RNA, 19 nt, Homo sapiens
  misc_RNA (1)...(19): siRNA sense strand
ggaaucgugcgaaaagaua

SEQ ID NO: 1961310 - RNA, 19 nt, Homo sapiens
  misc_RNA (1)...(19): siRNA sense strand
cauagugagugucaucaac

SEQ ID NO: 1961311 - RNA, 19 nt, Homo sapiens
  misc_RNA (1)...(19): siRNA sense strand
gaaguaccuccugguguau

SEQ ID NO: 1961312 - RNA, 19 nt, Homo sapiens
  misc_RNA (1)...(19): siRNA sense strand
uugaagcccugacauccuu

SEQ ID NO: 1961313 - RNA, 19 nt, Homo sapiens
  misc_RNA (1)...(19): siRNA sense strand
gguuuaccgucaugauauc

SEQ ID NO: 1961314 - RNA, 19 nt, Homo sapiens
  misc_RNA (1)...(19): siRNA sense strand
ggccgugugugaggucauu

SEQ ID NO: 1961315 - RNA, 19 nt, Homo sapiens
  misc_RNA (1)...(19): siRNA sense strand
ggacuuugaagcccugaca

SEQ ID NO: 1961316 - RNA, 19 nt, Homo sapiens
  misc_RNA (1)...(19): siRNA sense strand
gacgucaagugccaaacca

SEQ ID NO: 1961317 - RNA, 19 nt, Homo sapiens
  misc_RNA (1)...(19): siRNA sense strand
gccaaaccaagaagaagga

SEQ ID NO: 1961318 - RNA, 19 nt, Homo sapiens
  misc_RNA (1)...(19): siRNA sense strand
cggcgacuguaaggacuuu

SEQ ID NO: 1961319 - RNA, 19 nt, Homo sapiens
  misc_RNA (1)...(19): siRNA sense strand
gcuguguggccguguguga

SEQ ID NO: 1961320 - RNA, 19 nt, Homo sapiens
  misc_RNA (1)...(19): siRNA sense strand
ccucugcuuuccaacacuu

SEQ ID NO: 1961321 - RNA, 19 nt, Homo sapiens
  misc_RNA (1)...(19): siRNA sense strand
gcgacuguaaggacuuuga

SEQ ID NO: 1961322 - RNA, 19 nt, Homo sapiens
  misc_RNA (1)...(19): siRNA sense strand
caaaccaagaagaaggauu

SEQ ID NO: 1961323 - RNA, 19 nt, Homo sapiens
  misc_RNA (1)...(19): siRNA sense strand
gacgagcgagaaucaaaca

SEQ ID NO: 1961324 - RNA, 19 nt, Homo sapiens
  misc_RNA (1)...(19): siRNA sense strand
cacagaagccacccaagag

SEQ ID NO: 1961325 - RNA, 19 nt, Homo sapiens
  misc_RNA (1)...(19): siRNA sense strand
gucaagugccaaaccaaga

SEQ ID NO: 1961326 - RNA, 19 nt, Homo sapiens
  misc_RNA (1)...(19): siRNA sense strand
ccugguguauucacagaag

SEQ ID NO: 1961327 - RNA, 19 nt, Homo sapiens
  misc_RNA (1)...(19): siRNA sense strand
cgacuguaaggacuuugaa

SEQ ID NO: 1961328 - RNA, 19 nt, Homo sapiens
  misc_RNA (1)...(19): siRNA sense strand
cgagaaucaaacauaguga

SEQ ID NO: 1961329 - RNA, 19 nt, Homo sapiens
  misc_RNA (1)...(19): siRNA sense strand
ccagauagcuccucauaga

SEQ ID NO: 1961330 - RNA, 19 nt, Homo sapiens
  misc_RNA (1)...(19): siRNA sense strand
gaacauggcccucgagguu

SEQ ID NO: 1961331 - RNA, 19 nt, Homo sapiens
  misc_RNA (1)...(19): siRNA sense strand
uauggacgcuggugucuaa

SEQ ID NO: 1961332 - RNA, 19 nt, Homo sapiens
  misc_RNA (1)...(19): siRNA sense strand
gcacacugcccuucgagua

SEQ ID NO: 1961333 - RNA, 19 nt, Homo sapiens
  misc_RNA (1)...(19): siRNA sense strand
ggucugcaccuuauacuuu

SEQ ID NO: 1961334 - RNA, 19 nt, Homo sapiens
  misc_RNA (1)...(19): siRNA sense strand
ggacgcuggugucuaagga

SEQ ID NO: 1961335 - RNA, 19 nt, Homo sapiens
  misc_RNA (1)...(19): siRNA sense strand
ucaaggauguacccaacuu

SEQ ID NO: 1961336 - RNA, 19 nt, Homo sapiens
  misc_RNA (1)...(19): siRNA sense strand
gauggaaccuguccuucuc

SEQ ID NO: 1961337 - RNA, 19 nt, Homo sapiens
  misc_RNA (1)...(19): siRNA sense strand
gacguggacucaccaagga

SEQ ID NO: 1961338 - RNA, 19 nt, Homo sapiens
  misc_RNA (1)...(19): siRNA sense strand
gcaacuucuuggucacuga

SEQ ID NO: 1961339 - RNA, 19 nt, Homo sapiens
  misc_RNA (1)...(19): siRNA sense strand
caacuucagcuuccaaauc

SEQ ID NO: 1961340 - RNA, 19 nt, Homo sapiens
  misc_RNA (1)...(19): siRNA sense strand
gcuggaggcugcacugaag

SEQ ID NO: 1961341 - RNA, 19 nt, Homo sapiens
  misc_RNA (1)...(19): siRNA sense strand
gggcaugguugggcaguug

SEQ ID NO: 1961342 - RNA, 19 nt, Homo sapiens
  misc_RNA (1)...(19): siRNA sense strand
gcagauggaaccuguccuu

SEQ ID NO: 1961343 - RNA, 19 nt, Homo sapiens
  misc_RNA (1)...(19): siRNA sense strand
gcacugaagaaagcaugua

SEQ ID NO: 1961344 - RNA, 19 nt, Homo sapiens
  misc_RNA (1)...(19): siRNA sense strand
ccuuauacuuuccuuucua

SEQ ID NO: 1961345 - RNA, 19 nt, Homo sapiens
  misc_RNA (1)...(19): siRNA sense strand
cuggacaggugcugacgua

SEQ ID NO: 1961346 - RNA, 19 nt, Homo sapiens
  misc_RNA (1)...(19): siRNA sense strand
gccgacaacugcagacaag

SEQ ID NO: 1961347 - RNA, 19 nt, Homo sapiens
  misc_RNA (1)...(19): siRNA sense strand
ccaaggaaccagugcuaug

SEQ ID NO: 1961348 - RNA, 19 nt, Homo sapiens
  misc_RNA (1)...(19): siRNA sense strand
ugcaugagcugaacgucuu

SEQ ID NO: 1961349 - RNA, 19 nt, Homo sapiens
  misc_RNA (1)...(19): siRNA sense strand
ggccuuggucugcaccuua

SEQ ID NO: 1961350 - RNA, 19 nt, Homo sapiens
  misc_RNA (1)...(19): siRNA sense strand
ugacggacgcaacuucuug

SEQ ID NO: 1961351 - RNA, 19 nt, Homo sapiens
  misc_RNA (1)...(19): siRNA sense strand
gccugucucucaacuggaa

SEQ ID NO: 1961352 - RNA, 19 nt, Homo sapiens
  misc_RNA (1)...(19): siRNA sense strand
gcuuccaaaucuccacuga

SEQ ID NO: 1961353 - RNA, 19 nt, Homo sapiens
  misc_RNA (1)...(19): siRNA sense strand
gaaagugccccaugugcaa

SEQ ID NO: 1961354 - RNA, 19 nt, Homo sapiens
  misc_RNA (1)...(19): siRNA sense strand
caaggauguacccaacuuu

SEQ ID NO: 1961355 - RNA, 19 nt, Homo sapiens
  misc_RNA (1)...(19): siRNA sense strand
gccuuggucugcaccuuau

SEQ ID NO: 1961356 - RNA, 19 nt, Homo sapiens
  misc_RNA (1)...(19): siRNA sense strand
agauagcuccucauagaga

SEQ ID NO: 1961357 - RNA, 19 nt, Homo sapiens
  misc_RNA (1)...(19): siRNA sense strand
caaggaaccagugcuaugg

SEQ ID NO: 1961358 - RNA, 19 nt, Homo sapiens
  misc_RNA (1)...(19): siRNA sense strand
ggauguacccaacuuugag

SEQ ID NO: 1961359 - RNA, 19 nt, Homo sapiens
  misc_RNA (1)...(19): siRNA sense strand
caccuuauacuuuccuuuc

SEQ ID NO: 1961360 - RNA, 19 nt, Homo sapiens
  misc_RNA (1)...(19): siRNA sense strand
caccaaggaaccagugcua

SEQ ID NO: 1961361 - RNA, 19 nt, Homo sapiens
  misc_RNA (1)...(19): siRNA sense strand
gcaccuuauacuuuccuuu

SEQ ID NO: 1961362 - RNA, 19 nt, Homo sapiens
  misc_RNA (1)...(19): siRNA sense strand
aacuucagcuuccaaaucu

SEQ ID NO: 1961363 - RNA, 19 nt, Homo sapiens
  misc_RNA (1)...(19): siRNA sense strand
cagacaaggcuaccuggau

SEQ ID NO: 1961364 - RNA, 19 nt, Homo sapiens
  misc_RNA (1)...(19): siRNA sense strand
ggaggcugcacugaagaaa

SEQ ID NO: 1961365 - RNA, 19 nt, Homo sapiens
  misc_RNA (1)...(19): siRNA sense strand
acacugcccuucgaguaca

SEQ ID NO: 1961366 - RNA, 19 nt, Homo sapiens
  misc_RNA (1)...(19): siRNA sense strand
gucugcaccuuauacuuuc

SEQ ID NO: 1961367 - RNA, 19 nt, Homo sapiens
  misc_RNA (1)...(19): siRNA sense strand
ugguguggcugcccgaugu

SEQ ID NO: 1961368 - RNA, 19 nt, Homo sapiens
  misc_RNA (1)...(19): siRNA sense strand
caacaacuugcccuuugca

SEQ ID NO: 1961369 - RNA, 19 nt, Homo sapiens
  misc_RNA (1)...(19): siRNA sense strand
caaccugcaugagcugaac

SEQ ID NO: 1961370 - RNA, 19 nt, Homo sapiens
  misc_RNA (1)...(19): siRNA sense strand
ccacucgcguccuggaaac

SEQ ID NO: 1961371 - RNA, 19 nt, Homo sapiens
  misc_RNA (1)...(19): siRNA sense strand
gaaaguggauuauggaucu

SEQ ID NO: 1961372 - RNA, 19 nt, Homo sapiens
  misc_RNA (1)...(19): siRNA sense strand
gcagcuagaugauauucuu

SEQ ID NO: 1961373 - RNA, 19 nt, Homo sapiens
  misc_RNA (1)...(19): siRNA sense strand
aauaugaccuucucuauca

SEQ ID NO: 1961374 - RNA, 19 nt, Homo sapiens
  misc_RNA (1)...(19): siRNA sense strand
ggaaguagaccaggcgaua

SEQ ID NO: 1961375 - RNA, 19 nt, Homo sapiens
  misc_RNA (1)...(19): siRNA sense strand
uaaaauggcugcuauauac

SEQ ID NO: 1961376 - RNA, 19 nt, Homo sapiens
  misc_RNA (1)...(19): siRNA sense strand
caaacaagacuucauagau

SEQ ID NO: 1961377 - RNA, 19 nt, Homo sapiens
  misc_RNA (1)...(19): siRNA sense strand
cuauauaccugguggaugu

SEQ ID NO: 1961378 - RNA, 19 nt, Homo sapiens
  misc_RNA (1)...(19): siRNA sense strand
caaauaugaccuucucuau

SEQ ID NO: 1961379 - RNA, 19 nt, Homo sapiens
  misc_RNA (1)...(19): siRNA sense strand
gaaguagaccaggcgauaa

SEQ ID NO: 1961380 - RNA, 19 nt, Homo sapiens
  misc_RNA (1)...(19): siRNA sense strand
gguguugguucucagguuu

SEQ ID NO: 1961381 - RNA, 19 nt, Homo sapiens
  misc_RNA (1)...(19): siRNA sense strand
ucaguuauauuccaucuac

SEQ ID NO: 1961382 - RNA, 19 nt, Homo sapiens
  misc_RNA (1)...(19): siRNA sense strand
ccaaauaugaccuucucua

SEQ ID NO: 1961383 - RNA, 19 nt, Homo sapiens
  misc_RNA (1)...(19): siRNA sense strand
gaccuucucuaucaagaca

SEQ ID NO: 1961384 - RNA, 19 nt, Homo sapiens
  misc_RNA (1)...(19): siRNA sense strand
agaugaagauccugucugu

SEQ ID NO: 1961385 - RNA, 19 nt, Homo sapiens
  misc_RNA (1)...(19): siRNA sense strand
ucaaugggcagcauaugaa

SEQ ID NO: 1961386 - RNA, 19 nt, Homo sapiens
  misc_RNA (1)...(19): siRNA sense strand
ugacaucaguuauauucca

SEQ ID NO: 1961387 - RNA, 19 nt, Homo sapiens
  misc_RNA (1)...(19): siRNA sense strand
ccagaucacacuaaguuug

SEQ ID NO: 1961388 - RNA, 19 nt, Homo sapiens
  misc_RNA (1)...(19): siRNA sense strand
gaagcuuauuguccaaagu

SEQ ID NO: 1961389 - RNA, 19 nt, Homo sapiens
  misc_RNA (1)...(19): siRNA sense strand
ggaagcuuauuguccaaag

SEQ ID NO: 1961390 - RNA, 19 nt, Homo sapiens
  misc_RNA (1)...(19): siRNA sense strand
ccaaacaagacuucauaga

SEQ ID NO: 1961391 - RNA, 19 nt, Homo sapiens
  misc_RNA (1)...(19): siRNA sense strand
guaaaauggcugcuauaua

SEQ ID NO: 1961392 - RNA, 19 nt, Homo sapiens
  misc_RNA (1)...(19): siRNA sense strand
gaccucuucugacuuaagu

SEQ ID NO: 1961393 - RNA, 19 nt, Homo sapiens
  misc_RNA (1)...(19): siRNA sense strand
aaccaaacaagacuucaua

SEQ ID NO: 1961394 - RNA, 19 nt, Homo sapiens
  misc_RNA (1)...(19): siRNA sense strand
gcuagaugauauucuuucu

SEQ ID NO: 1961395 - RNA, 19 nt, Homo sapiens
  misc_RNA (1)...(19): siRNA sense strand
uauauuccaucuacugucu

SEQ ID NO: 1961396 - RNA, 19 nt, Homo sapiens
  misc_RNA (1)...(19): siRNA sense strand
uaaguaaaauggcugcuau

SEQ ID NO: 1961397 - RNA, 19 nt, Homo sapiens
  misc_RNA (1)...(19): siRNA sense strand
uauuccaucuacugucuuu

SEQ ID NO: 1961398 - RNA, 19 nt, Homo sapiens
  misc_RNA (1)...(19): siRNA sense strand
gacaucaguuauauuccau

SEQ ID NO: 1961399 - RNA, 19 nt, Homo sapiens
  misc_RNA (1)...(19): siRNA sense strand
ugcccaagcugacuagcaa

SEQ ID NO: 1961400 - RNA, 19 nt, Homo sapiens
  misc_RNA (1)...(19): siRNA sense strand
gucugcagcuagaugauau

SEQ ID NO: 1961401 - RNA, 19 nt, Homo sapiens
  misc_RNA (1)...(19): siRNA sense strand
auaugaaaguggauuaugg

SEQ ID NO: 1961402 - RNA, 19 nt, Homo sapiens
  misc_RNA (1)...(19): siRNA sense strand
gcauaugaaaguggauuau

SEQ ID NO: 1961403 - RNA, 19 nt, Homo sapiens
  misc_RNA (1)...(19): siRNA sense strand
ccucuucugacuuaaguaa

SEQ ID NO: 1961404 - RNA, 19 nt, Homo sapiens
  misc_RNA (1)...(19): siRNA sense strand
caucaguuauauuccaucu

SEQ ID NO: 1961405 - RNA, 19 nt, Homo sapiens
  misc_RNA (1)...(19): siRNA sense strand
cagaucacacuaaguuugu

SEQ ID NO: 1961406 - RNA, 19 nt, Homo sapiens
  misc_RNA (1)...(19): siRNA sense strand
caaugggcagcauaugaaa

SEQ ID NO: 1961407 - RNA, 19 nt, Homo sapiens
  misc_RNA (1)...(19): siRNA sense strand
aaauaugaccuucucuauc

SEQ ID NO: 1961408 - RNA, 19 nt, Homo sapiens
  misc_RNA (1)...(19): siRNA sense strand
cuccagaucacacuaaguu

SEQ ID NO: 1961409 - RNA, 19 nt, Homo sapiens
  misc_RNA (1)...(19): siRNA sense strand
guccaaaguccuauugauc

SEQ ID NO: 1961410 - RNA, 19 nt, Homo sapiens
  misc_RNA (1)...(19): siRNA sense strand
caagacuucauagauuuga

SEQ ID NO: 1961411 - RNA, 19 nt, Homo sapiens
  misc_RNA (1)...(19): siRNA sense strand
uguccaaaguccuauugau

SEQ ID NO: 1961412 - RNA, 19 nt, Homo sapiens
  misc_RNA (1)...(19): siRNA sense strand
ucccaagaauauucccaaa

SEQ ID NO: 1961413 - RNA, 19 nt, Homo sapiens
  misc_RNA (1)...(19): siRNA sense strand
uaugaaaguggauuaugga

SEQ ID NO: 1961414 - RNA, 19 nt, Homo sapiens
  misc_RNA (1)...(19): siRNA sense strand
guacugcugagaagguguu

SEQ ID NO: 1961415 - RNA, 19 nt, Homo sapiens
  misc_RNA (1)...(19): siRNA sense strand
aaguagaccaggcgauaaa

SEQ ID NO: 1961416 - RNA, 19 nt, Homo sapiens
  misc_RNA (1)...(19): siRNA sense strand
cagcuagaugauauucuuu

SEQ ID NO: 1961417 - RNA, 19 nt, Homo sapiens
  misc_RNA (1)...(19): siRNA sense strand
ccuucucuaucaagacauu

SEQ ID NO: 1961418 - RNA, 19 nt, Homo sapiens
  misc_RNA (1)...(19): siRNA sense strand
ucccaaauaugaccuucuc

SEQ ID NO: 1961419 - RNA, 19 nt, Homo sapiens
  misc_RNA (1)...(19): siRNA sense strand
acaagacuucauagauuug

SEQ ID NO: 1961420 - RNA, 19 nt, Homo sapiens
  misc_RNA (1)...(19): siRNA sense strand
gaacuagaaugcaucaaua

SEQ ID NO: 1961421 - RNA, 19 nt, Homo sapiens
  misc_RNA (1)...(19): siRNA sense strand
ggaaaucagugacgacgau

SEQ ID NO: 1961422 - RNA, 19 nt, Homo sapiens
  misc_RNA (1)...(19): siRNA sense strand
ggauucaaguaaagaagua

SEQ ID NO: 1961423 - RNA, 19 nt, Homo sapiens
  misc_RNA (1)...(19): siRNA sense strand
ggaagaaacuuuugaagau

SEQ ID NO: 1961424 - RNA, 19 nt, Homo sapiens
  misc_RNA (1)...(19): siRNA sense strand
gaaggucuccaucaagaaa

SEQ ID NO: 1961425 - RNA, 19 nt, Homo sapiens
  misc_RNA (1)...(19): siRNA sense strand
gauaauaacagccagauac

SEQ ID NO: 1961426 - RNA, 19 nt, Homo sapiens
  misc_RNA (1)...(19): siRNA sense strand
uagaaugcaucaauaagga

SEQ ID NO: 1961427 - RNA, 19 nt, Homo sapiens
  misc_RNA (1)...(19): siRNA sense strand
gauaagaaccguuugaaaa

SEQ ID NO: 1961428 - RNA, 19 nt, Homo sapiens
  misc_RNA (1)...(19): siRNA sense strand
ggaccaaacuagcacugau

SEQ ID NO: 1961429 - RNA, 19 nt, Homo sapiens
  misc_RNA (1)...(19): siRNA sense strand
ggaacuagaaugcaucaau

SEQ ID NO: 1961430 - RNA, 19 nt, Homo sapiens
  misc_RNA (1)...(19): siRNA sense strand
caaacuagcacugauaaug

SEQ ID NO: 1961431 - RNA, 19 nt, Homo sapiens
  misc_RNA (1)...(19): siRNA sense strand
ggagauaagaaccguuuga

SEQ ID NO: 1961432 - RNA, 19 nt, Homo sapiens
  misc_RNA (1)...(19): siRNA sense strand
cggaagagcuccaaaaguu

SEQ ID NO: 1961433 - RNA, 19 nt, Homo sapiens
  misc_RNA (1)...(19): siRNA sense strand
gaccaaacuagcacugaua

SEQ ID NO: 1961434 - RNA, 19 nt, Homo sapiens
  misc_RNA (1)...(19): siRNA sense strand
ucagugacgacgauaauaa

SEQ ID NO: 1961435 - RNA, 19 nt, Homo sapiens
  misc_RNA (1)...(19): siRNA sense strand
aaacuagcauugaguagca

SEQ ID NO: 1961436 - RNA, 19 nt, Homo sapiens
  misc_RNA (1)...(19): siRNA sense strand
gaacuucgaggaccaaacu

SEQ ID NO: 1961437 - RNA, 19 nt, Homo sapiens
  misc_RNA (1)...(19): siRNA sense strand
aagagaaugugcaggaaga

SEQ ID NO: 1961438 - RNA, 19 nt, Homo sapiens
  misc_RNA (1)...(19): siRNA sense strand
ggagaaaacacaagucaaa

SEQ ID NO: 1961439 - RNA, 19 nt, Homo sapiens
  misc_RNA (1)...(19): siRNA sense strand
acaaaggauucaaguaaag

SEQ ID NO: 1961440 - RNA, 19 nt, Homo sapiens
  misc_RNA (1)...(19): siRNA sense strand
aaacuagcacugauaaugu

SEQ ID NO: 1961441 - RNA, 19 nt, Homo sapiens
  misc_RNA (1)...(19): siRNA sense strand
gagauaagaaccguuugaa

SEQ ID NO: 1961442 - RNA, 19 nt, Homo sapiens
  misc_RNA (1)...(19): siRNA sense strand
ggaagauccuaaaacauug

SEQ ID NO: 1961443 - RNA, 19 nt, Homo sapiens
  misc_RNA (1)...(19): siRNA sense strand
gaaaucagugacgacgaua

SEQ ID NO: 1961444 - RNA, 19 nt, Homo sapiens
  misc_RNA (1)...(19): siRNA sense strand
caaaaccacuuucccugaa

SEQ ID NO: 1961445 - RNA, 19 nt, Homo sapiens
  misc_RNA (1)...(19): siRNA sense strand
ugaaauccgacacuacuga

SEQ ID NO: 1961446 - RNA, 19 nt, Homo sapiens
  misc_RNA (1)...(19): siRNA sense strand
gcagcuaccgacccaaaga

SEQ ID NO: 1961447 - RNA, 19 nt, Homo sapiens
  misc_RNA (1)...(19): siRNA sense strand
caggagauaagaaccguuu

SEQ ID NO: 1961448 - RNA, 19 nt, Homo sapiens
  misc_RNA (1)...(19): siRNA sense strand
caaaggauucaaguaaaga

SEQ ID NO: 1961449 - RNA, 19 nt, Homo sapiens
  misc_RNA (1)...(19): siRNA sense strand
ggaaggucuccaucaagaa

SEQ ID NO: 1961450 - RNA, 19 nt, Homo sapiens
  misc_RNA (1)...(19): siRNA sense strand
ggucucauccgccuucugu

SEQ ID NO: 1961451 - RNA, 19 nt, Homo sapiens
  misc_RNA (1)...(19): siRNA sense strand
uaaaaccacucaggcaaaa

SEQ ID NO: 1961452 - RNA, 19 nt, Homo sapiens
  misc_RNA (1)...(19): siRNA sense strand
gaaauccgacacuacugau

SEQ ID NO: 1961453 - RNA, 19 nt, Homo sapiens
  misc_RNA (1)...(19): siRNA sense strand
cgagcucacuguccgaaag

SEQ ID NO: 1961454 - RNA, 19 nt, Homo sapiens
  misc_RNA (1)...(19): siRNA sense strand
agaagagaaugugcaggaa

SEQ ID NO: 1961455 - RNA, 19 nt, Homo sapiens
  misc_RNA (1)...(19): siRNA sense strand
ggagcaggauccggguuca

SEQ ID NO: 1961456 - RNA, 19 nt, Homo sapiens
  misc_RNA (1)...(19): siRNA sense strand
cagcagcuaccgacccaaa

SEQ ID NO: 1961457 - RNA, 19 nt, Homo sapiens
  misc_RNA (1)...(19): siRNA sense strand
agauaagaaccguuugaaa

SEQ ID NO: 1961458 - RNA, 19 nt, Homo sapiens
  misc_RNA (1)...(19): siRNA sense strand
ggaagagcuccaaaaguuu

SEQ ID NO: 1961459 - RNA, 19 nt, Homo sapiens
  misc_RNA (1)...(19): siRNA sense strand
cgauaauaacagccagaua

SEQ ID NO: 1961460 - RNA, 19 nt, Homo sapiens
  misc_RNA (1)...(19): siRNA sense strand
gcauugaguagcaaagaag

SEQ ID NO: 1961461 - RNA, 19 nt, Homo sapiens
  misc_RNA (1)...(19): siRNA sense strand
ugaaaacuguguggaagaa

SEQ ID NO: 1961462 - RNA, 19 nt, Homo sapiens
  misc_RNA (1)...(19): siRNA sense strand
gaguagcaaagaagagaau

SEQ ID NO: 1961463 - RNA, 19 nt, Homo sapiens
  misc_RNA (1)...(19): siRNA sense strand
ugacuuuaccaggagauaa

SEQ ID NO: 1961464 - RNA, 19 nt, Homo sapiens
  misc_RNA (1)...(19): siRNA sense strand
gaaaacacaagucaaaacu

SEQ ID NO: 1961465 - RNA, 19 nt, Homo sapiens
  misc_RNA (1)...(19): siRNA sense strand
cuuggaccguuuccgcuuu

SEQ ID NO: 1961466 - RNA, 19 nt, Homo sapiens
  misc_RNA (1)...(19): siRNA sense strand
uagcaaagaagagaaugug

SEQ ID NO: 1961467 - RNA, 19 nt, Homo sapiens
  misc_RNA (1)...(19): siRNA sense strand
guagcaaagaagagaaugu

SEQ ID NO: 1961468 - RNA, 19 nt, Homo sapiens
  misc_RNA (1)...(19): siRNA sense strand
cgucaucguccucuucuca

SEQ ID NO: 1961469 - RNA, 19 nt, Homo sapiens
  misc_RNA (1)...(19): siRNA sense strand
ggguucagcagcagucaga

SEQ ID NO: 1961470 - RNA, 19 nt, Homo sapiens
  misc_RNA (1)...(19): siRNA sense strand
gagaaaacacaagucaaaa

SEQ ID NO: 1961471 - RNA, 19 nt, Homo sapiens
  misc_RNA (1)...(19): siRNA sense strand
cagcuaccgacccaaagaa

SEQ ID NO: 1961472 - RNA, 19 nt, Homo sapiens
  misc_RNA (1)...(19): siRNA sense strand
cuagaaugcaucaauaagg

SEQ ID NO: 1961473 - RNA, 19 nt, Homo sapiens
  misc_RNA (1)...(19): siRNA sense strand
ucccugaaauccgacacua

SEQ ID NO: 1961474 - RNA, 19 nt, Homo sapiens
  misc_RNA (1)...(19): siRNA sense strand
aaucagugacgacgauaau

SEQ ID NO: 1961475 - RNA, 19 nt, Homo sapiens
  misc_RNA (1)...(19): siRNA sense strand
aguuaaagauggagcaaaa

SEQ ID NO: 1961476 - RNA, 19 nt, Homo sapiens
  misc_RNA (1)...(19): siRNA sense strand
gaacuagaaugcaucaaua

SEQ ID NO: 1961477 - RNA, 19 nt, Homo sapiens
  misc_RNA (1)...(19): siRNA sense strand
ggaaaucagugacgacgau

SEQ ID NO: 1961478 - RNA, 19 nt, Homo sapiens
  misc_RNA (1)...(19): siRNA sense strand
ggauucaaguaaagaagua

SEQ ID NO: 1961479 - RNA, 19 nt, Homo sapiens
  misc_RNA (1)...(19): siRNA sense strand
ggaagaaacuuuugaagau

SEQ ID NO: 1961480 - RNA, 19 nt, Homo sapiens
  misc_RNA (1)...(19): siRNA sense strand
gaaggucuccaucaagaaa

SEQ ID NO: 1961481 - RNA, 19 nt, Homo sapiens
  misc_RNA (1)...(19): siRNA sense strand
gauaauaacagccagauac

SEQ ID NO: 1961482 - RNA, 19 nt, Homo sapiens
  misc_RNA (1)...(19): siRNA sense strand
uagaaugcaucaauaagga

SEQ ID NO: 1961483 - RNA, 19 nt, Homo sapiens
  misc_RNA (1)...(19): siRNA sense strand
gauaagaaccguuugaaaa

SEQ ID NO: 1961484 - RNA, 19 nt, Homo sapiens
  misc_RNA (1)...(19): siRNA sense strand
ggaccaaacuagcacugau

SEQ ID NO: 1961485 - RNA, 19 nt, Homo sapiens
  misc_RNA (1)...(19): siRNA sense strand
ggaacuagaaugcaucaau

SEQ ID NO: 1961486 - RNA, 19 nt, Homo sapiens
  misc_RNA (1)...(19): siRNA sense strand
caaacuagcacugauaaug

SEQ ID NO: 1961487 - RNA, 19 nt, Homo sapiens
  misc_RNA (1)...(19): siRNA sense strand
ggagauaagaaccguuuga

SEQ ID NO: 1961488 - RNA, 19 nt, Homo sapiens
  misc_RNA (1)...(19): siRNA sense strand
cggaagagcuccaaaaguu

SEQ ID NO: 1961489 - RNA, 19 nt, Homo sapiens
  misc_RNA (1)...(19): siRNA sense strand
gaccaaacuagcacugaua

SEQ ID NO: 1961490 - RNA, 19 nt, Homo sapiens
  misc_RNA (1)...(19): siRNA sense strand
ucagugacgacgauaauaa

SEQ ID NO: 1961491 - RNA, 19 nt, Homo sapiens
  misc_RNA (1)...(19): siRNA sense strand
aaacuagcauugaguagca

SEQ ID NO: 1961492 - RNA, 19 nt, Homo sapiens
  misc_RNA (1)...(19): siRNA sense strand
gaacuucgaggaccaaacu

SEQ ID NO: 1961493 - RNA, 19 nt, Homo sapiens
  misc_RNA (1)...(19): siRNA sense strand
aagagaaugugcaggaaga

SEQ ID NO: 1961494 - RNA, 19 nt, Homo sapiens
  misc_RNA (1)...(19): siRNA sense strand
ggagaaaacacaagucaaa

SEQ ID NO: 1961495 - RNA, 19 nt, Homo sapiens
  misc_RNA (1)...(19): siRNA sense strand
acaaaggauucaaguaaag

SEQ ID NO: 1961496 - RNA, 19 nt, Homo sapiens
  misc_RNA (1)...(19): siRNA sense strand
aaacuagcacugauaaugu

SEQ ID NO: 1961497 - RNA, 19 nt, Homo sapiens
  misc_RNA (1)...(19): siRNA sense strand
gagauaagaaccguuugaa

SEQ ID NO: 1961498 - RNA, 19 nt, Homo sapiens
  misc_RNA (1)...(19): siRNA sense strand
ggaagauccuaaaacauug

SEQ ID NO: 1961499 - RNA, 19 nt, Homo sapiens
  misc_RNA (1)...(19): siRNA sense strand
gaaaucagugacgacgaua

SEQ ID NO: 1961500 - RNA, 19 nt, Homo sapiens
  misc_RNA (1)...(19): siRNA sense strand
caaaaccacuuucccugaa

SEQ ID NO: 1961501 - RNA, 19 nt, Homo sapiens
  misc_RNA (1)...(19): siRNA sense strand
ugaaauccgacacuacuga

SEQ ID NO: 1961502 - RNA, 19 nt, Homo sapiens
  misc_RNA (1)...(19): siRNA sense strand
gcagcuaccgacccaaaga

SEQ ID NO: 1961503 - RNA, 19 nt, Homo sapiens
  misc_RNA (1)...(19): siRNA sense strand
caggagauaagaaccguuu

SEQ ID NO: 1961504 - RNA, 19 nt, Homo sapiens
  misc_RNA (1)...(19): siRNA sense strand
caaaggauucaaguaaaga

SEQ ID NO: 1961505 - RNA, 19 nt, Homo sapiens
  misc_RNA (1)...(19): siRNA sense strand
ggaaggucuccaucaagaa

SEQ ID NO: 1961506 - RNA, 19 nt, Homo sapiens
  misc_RNA (1)...(19): siRNA sense strand
ggucucauccgccuucugu

SEQ ID NO: 1961507 - RNA, 19 nt, Homo sapiens
  misc_RNA (1)...(19): siRNA sense strand
uaaaaccacucaggcaaaa

SEQ ID NO: 1961508 - RNA, 19 nt, Homo sapiens
  misc_RNA (1)...(19): siRNA sense strand
gaaauccgacacuacugau

SEQ ID NO: 1961509 - RNA, 19 nt, Homo sapiens
  misc_RNA (1)...(19): siRNA sense strand
cgagcucacuguccgaaag

SEQ ID NO: 1961510 - RNA, 19 nt, Homo sapiens
  misc_RNA (1)...(19): siRNA sense strand
agaagagaaugugcaggaa

SEQ ID NO: 1961511 - RNA, 19 nt, Homo sapiens
  misc_RNA (1)...(19): siRNA sense strand
ggagcaggauccggguuca

SEQ ID NO: 1961512 - RNA, 19 nt, Homo sapiens
  misc_RNA (1)...(19): siRNA sense strand
cagcagcuaccgacccaaa

SEQ ID NO: 1961513 - RNA, 19 nt, Homo sapiens
  misc_RNA (1)...(19): siRNA sense strand
agauaagaaccguuugaaa

SEQ ID NO: 1961514 - RNA, 19 nt, Homo sapiens
  misc_RNA (1)...(19): siRNA sense strand
ggaagagcuccaaaaguuu

SEQ ID NO: 1961515 - RNA, 19 nt, Homo sapiens
  misc_RNA (1)...(19): siRNA sense strand
cgauaauaacagccagaua

SEQ ID NO: 1961516 - RNA, 19 nt, Homo sapiens
  misc_RNA (1)...(19): siRNA sense strand
gcauugaguagcaaagaag

SEQ ID NO: 1961517 - RNA, 19 nt, Homo sapiens
  misc_RNA (1)...(19): siRNA sense strand
ugaaaacuguguggaagaa

SEQ ID NO: 1961518 - RNA, 19 nt, Homo sapiens
  misc_RNA (1)...(19): siRNA sense strand
gaguagcaaagaagagaau

SEQ ID NO: 1961519 - RNA, 19 nt, Homo sapiens
  misc_RNA (1)...(19): siRNA sense strand
ugacuuuaccaggagauaa

SEQ ID NO: 1961520 - RNA, 19 nt, Homo sapiens
  misc_RNA (1)...(19): siRNA sense strand
gaaaacacaagucaaaacu

SEQ ID NO: 1961521 - RNA, 19 nt, Homo sapiens
  misc_RNA (1)...(19): siRNA sense strand
cuuggaccguuuccgcuuu

SEQ ID NO: 1961522 - RNA, 19 nt, Homo sapiens
  misc_RNA (1)...(19): siRNA sense strand
uagcaaagaagagaaugug

SEQ ID NO: 1961523 - RNA, 19 nt, Homo sapiens
  misc_RNA (1)...(19): siRNA sense strand
guagcaaagaagagaaugu

SEQ ID NO: 1961524 - RNA, 19 nt, Homo sapiens
  misc_RNA (1)...(19): siRNA sense strand
cgucaucguccucuucuca

SEQ ID NO: 1961525 - RNA, 19 nt, Homo sapiens
  misc_RNA (1)...(19): siRNA sense strand
ggguucagcagcagucaga

SEQ ID NO: 1961526 - RNA, 19 nt, Homo sapiens
  misc_RNA (1)...(19): siRNA sense strand
gagaaaacacaagucaaaa

SEQ ID NO: 1961527 - RNA, 19 nt, Homo sapiens
  misc_RNA (1)...(19): siRNA sense strand
cagcuaccgacccaaagaa

SEQ ID NO: 1961528 - RNA, 19 nt, Homo sapiens
  misc_RNA (1)...(19): siRNA sense strand
cuagaaugcaucaauaagg

SEQ ID NO: 1961529 - RNA, 19 nt, Homo sapiens
  misc_RNA (1)...(19): siRNA sense strand
ucccugaaauccgacacua

SEQ ID NO: 1961530 - RNA, 19 nt, Homo sapiens
  misc_RNA (1)...(19): siRNA sense strand
aaucagugacgacgauaau

SEQ ID NO: 1961531 - RNA, 19 nt, Homo sapiens
  misc_RNA (1)...(19): siRNA sense strand
aguuaaagauggagcaaaa

SEQ ID NO: 1961532 - RNA, 19 nt, Homo sapiens
  misc_RNA (1)...(19): siRNA sense strand
ugacaugggucgggaagca

SEQ ID NO: 1961533 - RNA, 19 nt, Homo sapiens
  misc_RNA (1)...(19): siRNA sense strand
cagccuuccucuccugguu

SEQ ID NO: 1961534 - RNA, 19 nt, Homo sapiens
  misc_RNA (1)...(19): siRNA sense strand
acgccuggcuccuccgaaa

SEQ ID NO: 1961535 - RNA, 19 nt, Homo sapiens
  misc_RNA (1)...(19): siRNA sense strand
gcaaggaggccaacuacua

SEQ ID NO: 1961536 - RNA, 19 nt, Homo sapiens
  misc_RNA (1)...(19): siRNA sense strand
ccauguccaucgugaguua

SEQ ID NO: 1961537 - RNA, 19 nt, Homo sapiens
  misc_RNA (1)...(19): siRNA sense strand
gggcggagaugacuucaag

SEQ ID NO: 1961538 - RNA, 19 nt, Homo sapiens
  misc_RNA (1)...(19): siRNA sense strand
cuaaggagguguccaagag

SEQ ID NO: 1961539 - RNA, 19 nt, Homo sapiens
  misc_RNA (1)...(19): siRNA sense strand
gaacacggagcgcuucugu

SEQ ID NO: 1961540 - RNA, 19 nt, Homo sapiens
  misc_RNA (1)...(19): siRNA sense strand
acacggagcgcuucuguga

SEQ ID NO: 1961541 - RNA, 19 nt, Homo sapiens
  misc_RNA (1)...(19): siRNA sense strand
ccaccuacccuauguugaa

SEQ ID NO: 1961542 - RNA, 19 nt, Homo sapiens
  misc_RNA (1)...(19): siRNA sense strand
gcagggacauccgagacuu

SEQ ID NO: 1961543 - RNA, 19 nt, Homo sapiens
  misc_RNA (1)...(19): siRNA sense strand
gcaacccagugcucuauac

SEQ ID NO: 1961544 - RNA, 19 nt, Homo sapiens
  misc_RNA (1)...(19): siRNA sense strand
gcgcuucugugaggugauu

SEQ ID NO: 1961545 - RNA, 19 nt, Homo sapiens
  misc_RNA (1)...(19): siRNA sense strand
ucaaguaugugccguacgu

SEQ ID NO: 1961546 - RNA, 19 nt, Homo sapiens
  misc_RNA (1)...(19): siRNA sense strand
gcagcugcaucgagaacau

SEQ ID NO: 1961547 - RNA, 19 nt, Homo sapiens
  misc_RNA (1)...(19): siRNA sense strand
aacaacggcuccacacuca

SEQ ID NO: 1961548 - RNA, 19 nt, Homo sapiens
  misc_RNA (1)...(19): siRNA sense strand
cuuguggacuuccucauug

SEQ ID NO: 1961549 - RNA, 19 nt, Homo sapiens
  misc_RNA (1)...(19): siRNA sense strand
cugcucagcuuccucuuca

SEQ ID NO: 1961550 - RNA, 19 nt, Homo sapiens
  misc_RNA (1)...(19): siRNA sense strand
gcucuaaggagguguccaa

SEQ ID NO: 1961551 - RNA, 19 nt, Homo sapiens
  misc_RNA (1)...(19): siRNA sense strand
gcaacgugguggacgacau

SEQ ID NO: 1961552 - RNA, 19 nt, Homo sapiens
  misc_RNA (1)...(19): siRNA sense strand
gccaaucgacugcguuugu

SEQ ID NO: 1961553 - RNA, 19 nt, Homo sapiens
  misc_RNA (1)...(19): siRNA sense strand
caaggaggccaacuacuac

SEQ ID NO: 1961554 - RNA, 19 nt, Homo sapiens
  misc_RNA (1)...(19): siRNA sense strand
gcugccaccuacccuaugu

SEQ ID NO: 1961555 - RNA, 19 nt, Homo sapiens
  misc_RNA (1)...(19): siRNA sense strand
gggcugugccuuccucaau

SEQ ID NO: 1961556 - RNA, 19 nt, Homo sapiens
  misc_RNA (1)...(19): siRNA sense strand
ccauugcaguuccgcucua

SEQ ID NO: 1961557 - RNA, 19 nt, Homo sapiens
  misc_RNA (1)...(19): siRNA sense strand
gcuuguggacuuccucauu

SEQ ID NO: 1961558 - RNA, 19 nt, Homo sapiens
  misc_RNA (1)...(19): siRNA sense strand
gaaccacaugcuccuggaa

SEQ ID NO: 1961559 - RNA, 19 nt, Homo sapiens
  misc_RNA (1)...(19): siRNA sense strand
caacgugguggacgacaug

SEQ ID NO: 1961560 - RNA, 19 nt, Homo sapiens
  misc_RNA (1)...(19): siRNA sense strand
ggcugugccuuccucaaug

SEQ ID NO: 1961561 - RNA, 19 nt, Homo sapiens
  misc_RNA (1)...(19): siRNA sense strand
caaagucaaguccgugcuu

SEQ ID NO: 1961562 - RNA, 19 nt, Homo sapiens
  misc_RNA (1)...(19): siRNA sense strand
caagucaggccagaccaaa

SEQ ID NO: 1961563 - RNA, 19 nt, Homo sapiens
  misc_RNA (1)...(19): siRNA sense strand
gagcuucugcacugacaug

SEQ ID NO: 1961564 - RNA, 19 nt, Homo sapiens
  misc_RNA (1)...(19): siRNA sense strand
ucaaugggucuccgcagaa

SEQ ID NO: 1961565 - RNA, 19 nt, Homo sapiens
  misc_RNA (1)...(19): siRNA sense strand
cauugcaguuccgcucuaa

SEQ ID NO: 1961566 - RNA, 19 nt, Homo sapiens
  misc_RNA (1)...(19): siRNA sense strand
gaccauguccaucgugagu

SEQ ID NO: 1961567 - RNA, 19 nt, Homo sapiens
  misc_RNA (1)...(19): siRNA sense strand
gcuccggccucaagaccau

SEQ ID NO: 1961568 - RNA, 19 nt, Homo sapiens
  misc_RNA (1)...(19): siRNA sense strand
gaaccugcugcgcaccauu

SEQ ID NO: 1961569 - RNA, 19 nt, Homo sapiens
  misc_RNA (1)...(19): siRNA sense strand
acaaccaccugggcaacaa

SEQ ID NO: 1961570 - RNA, 19 nt, Homo sapiens
  misc_RNA (1)...(19): siRNA sense strand
gcugugccuuccucaaugg

SEQ ID NO: 1961571 - RNA, 19 nt, Homo sapiens
  misc_RNA (1)...(19): siRNA sense strand
ggacaucucgucgcugaac

SEQ ID NO: 1961572 - RNA, 19 nt, Homo sapiens
  misc_RNA (1)...(19): siRNA sense strand
ccaaucgacugcguuuguc

SEQ ID NO: 1961573 - RNA, 19 nt, Homo sapiens
  misc_RNA (1)...(19): siRNA sense strand
gcguggucaucaaguaugu

SEQ ID NO: 1961574 - RNA, 19 nt, Homo sapiens
  misc_RNA (1)...(19): siRNA sense strand
ucaagaccauguccaucgu

SEQ ID NO: 1961575 - RNA, 19 nt, Homo sapiens
  misc_RNA (1)...(19): siRNA sense strand
caacgacacagccgagaac

SEQ ID NO: 1961576 - RNA, 19 nt, Homo sapiens
  misc_RNA (1)...(19): siRNA sense strand
cuucaaggcgccacuagug

SEQ ID NO: 1961577 - RNA, 19 nt, Homo sapiens
  misc_RNA (1)...(19): siRNA sense strand
ucgaggcgcaauacgagua

SEQ ID NO: 1961578 - RNA, 19 nt, Homo sapiens
  misc_RNA (1)...(19): siRNA sense strand
gcaccggugaugccaaugg

SEQ ID NO: 1961579 - RNA, 19 nt, Homo sapiens
  misc_RNA (1)...(19): siRNA sense strand
acugcguggucaucaagua

SEQ ID NO: 1961580 - RNA, 19 nt, Homo sapiens
  misc_RNA (1)...(19): siRNA sense strand
caaugggucuccgcagaac

SEQ ID NO: 1961581 - RNA, 19 nt, Homo sapiens
  misc_RNA (1)...(19): siRNA sense strand
gcucagcuuccucuucaag

SEQ ID NO: 1961582 - RNA, 19 nt, Homo sapiens
  misc_RNA (1)...(19): siRNA sense strand
gugagcuucugcacugaca

SEQ ID NO: 1961583 - RNA, 19 nt, Homo sapiens
  misc_RNA (1)...(19): siRNA sense strand
gcaagauacuggcaacauu

SEQ ID NO: 1961584 - RNA, 19 nt, Homo sapiens
  misc_RNA (1)...(19): siRNA sense strand
ccaaagcucuuacgauaau

SEQ ID NO: 1961585 - RNA, 19 nt, Homo sapiens
  misc_RNA (1)...(19): siRNA sense strand
ggacagugcugccaagauc

SEQ ID NO: 1961586 - RNA, 19 nt, Homo sapiens
  misc_RNA (1)...(19): siRNA sense strand
gaaugugaccugagcaaua

SEQ ID NO: 1961587 - RNA, 19 nt, Homo sapiens
  misc_RNA (1)...(19): siRNA sense strand
gaaagcagcccaaguacug

SEQ ID NO: 1961588 - RNA, 19 nt, Homo sapiens
  misc_RNA (1)...(19): siRNA sense strand
caagauacuggcaacauua

SEQ ID NO: 1961589 - RNA, 19 nt, Homo sapiens
  misc_RNA (1)...(19): siRNA sense strand
gcaauggcuuggaugcaaa

SEQ ID NO: 1961590 - RNA, 19 nt, Homo sapiens
  misc_RNA (1)...(19): siRNA sense strand
ugagucagaugcagaggua

SEQ ID NO: 1961591 - RNA, 19 nt, Homo sapiens
  misc_RNA (1)...(19): siRNA sense strand
gcaucaacaucgaaagcua

SEQ ID NO: 1961592 - RNA, 19 nt, Homo sapiens
  misc_RNA (1)...(19): siRNA sense strand
gcagagaccgagaggcaua

SEQ ID NO: 1961593 - RNA, 19 nt, Homo sapiens
  misc_RNA (1)...(19): siRNA sense strand
aggaagagauggagacuga

SEQ ID NO: 1961594 - RNA, 19 nt, Homo sapiens
  misc_RNA (1)...(19): siRNA sense strand
ggaauccuguuucaaucuu

SEQ ID NO: 1961595 - RNA, 19 nt, Homo sapiens
  misc_RNA (1)...(19): siRNA sense strand
guaaaggcaucaacaucga

SEQ ID NO: 1961596 - RNA, 19 nt, Homo sapiens
  misc_RNA (1)...(19): siRNA sense strand
cugaagagcuccgccagua

SEQ ID NO: 1961597 - RNA, 19 nt, Homo sapiens
  misc_RNA (1)...(19): siRNA sense strand
cgagaggcauagagaagaa

SEQ ID NO: 1961598 - RNA, 19 nt, Homo sapiens
  misc_RNA (1)...(19): siRNA sense strand
guuucaaucuuccauggua

SEQ ID NO: 1961599 - RNA, 19 nt, Homo sapiens
  misc_RNA (1)...(19): siRNA sense strand
gguauucucauccgguaua

SEQ ID NO: 1961600 - RNA, 19 nt, Homo sapiens
  misc_RNA (1)...(19): siRNA sense strand
gcaacauuaucaucaagca

SEQ ID NO: 1961601 - RNA, 19 nt, Homo sapiens
  misc_RNA (1)...(19): siRNA sense strand
gaccugagcaauauggaaa

SEQ ID NO: 1961602 - RNA, 19 nt, Homo sapiens
  misc_RNA (1)...(19): siRNA sense strand
aaugugaccugagcaauau

SEQ ID NO: 1961603 - RNA, 19 nt, Homo sapiens
  misc_RNA (1)...(19): siRNA sense strand
ccccaaagcucuuacgaua

SEQ ID NO: 1961604 - RNA, 19 nt, Homo sapiens
  misc_RNA (1)...(19): siRNA sense strand
gcaauauggaaaucacuga

SEQ ID NO: 1961605 - RNA, 19 nt, Homo sapiens
  misc_RNA (1)...(19): siRNA sense strand
gaagagauggagacugagu

SEQ ID NO: 1961606 - RNA, 19 nt, Homo sapiens
  misc_RNA (1)...(19): siRNA sense strand
cagagcgccuggacagcua

SEQ ID NO: 1961607 - RNA, 19 nt, Homo sapiens
  misc_RNA (1)...(19): siRNA sense strand
augcagagguagaauguga

SEQ ID NO: 1961608 - RNA, 19 nt, Homo sapiens
  misc_RNA (1)...(19): siRNA sense strand
ccaaagaggaagagaugga

SEQ ID NO: 1961609 - RNA, 19 nt, Homo sapiens
  misc_RNA (1)...(19): siRNA sense strand
gaagagcuccgccaguacu

SEQ ID NO: 1961610 - RNA, 19 nt, Homo sapiens
  misc_RNA (1)...(19): siRNA sense strand
aggccgagaugaagcguuu

SEQ ID NO: 1961611 - RNA, 19 nt, Homo sapiens
  misc_RNA (1)...(19): siRNA sense strand
guggaauccuguuucaauc

SEQ ID NO: 1961612 - RNA, 19 nt, Homo sapiens
  misc_RNA (1)...(19): siRNA sense strand
cauccacguuacagcagua

SEQ ID NO: 1961613 - RNA, 19 nt, Homo sapiens
  misc_RNA (1)...(19): siRNA sense strand
cugcaguucuucacauuuc

SEQ ID NO: 1961614 - RNA, 19 nt, Homo sapiens
  misc_RNA (1)...(19): siRNA sense strand
gagcuccgccaguacuuug

SEQ ID NO: 1961615 - RNA, 19 nt, Homo sapiens
  misc_RNA (1)...(19): siRNA sense strand
gaauccuguuucaaucuuc

SEQ ID NO: 1961616 - RNA, 19 nt, Homo sapiens
  misc_RNA (1)...(19): siRNA sense strand
auauggaaaucacugaaga

SEQ ID NO: 1961617 - RNA, 19 nt, Homo sapiens
  misc_RNA (1)...(19): siRNA sense strand
caagcacugugaccgaaag

SEQ ID NO: 1961618 - RNA, 19 nt, Homo sapiens
  misc_RNA (1)...(19): siRNA sense strand
guccaaagaggaagagaug

SEQ ID NO: 1961619 - RNA, 19 nt, Homo sapiens
  misc_RNA (1)...(19): siRNA sense strand
cguggaauccuguuucaau

SEQ ID NO: 1961620 - RNA, 19 nt, Homo sapiens
  misc_RNA (1)...(19): siRNA sense strand
accgaaagcagcccaagua

SEQ ID NO: 1961621 - RNA, 19 nt, Homo sapiens
  misc_RNA (1)...(19): siRNA sense strand
gccguggaauccuguuuca

SEQ ID NO: 1961622 - RNA, 19 nt, Homo sapiens
  misc_RNA (1)...(19): siRNA sense strand
caauauggaaaucacugaa

SEQ ID NO: 1961623 - RNA, 19 nt, Homo sapiens
  misc_RNA (1)...(19): siRNA sense strand
augcaaagccaucacaaug

SEQ ID NO: 1961624 - RNA, 19 nt, Homo sapiens
  misc_RNA (1)...(19): siRNA sense strand
uaaaggcaucaacaucgaa

SEQ ID NO: 1961625 - RNA, 19 nt, Homo sapiens
  misc_RNA (1)...(19): siRNA sense strand
caacauuaucaucaagcaa

SEQ ID NO: 1961626 - RNA, 19 nt, Homo sapiens
  misc_RNA (1)...(19): siRNA sense strand
ccacguuacagcaguagga

SEQ ID NO: 1961627 - RNA, 19 nt, Homo sapiens
  misc_RNA (1)...(19): siRNA sense strand
uauccucaguccuucuaug

SEQ ID NO: 1961628 - RNA, 19 nt, Homo sapiens
  misc_RNA (1)...(19): siRNA sense strand
cccaaagcucuuacgauaa

SEQ ID NO: 1961629 - RNA, 19 nt, Homo sapiens
  misc_RNA (1)...(19): siRNA sense strand
caaucuuccaugguacuua

SEQ ID NO: 1961630 - RNA, 19 nt, Homo sapiens
  misc_RNA (1)...(19): siRNA sense strand
agaccgagaggcauagaga

SEQ ID NO: 1961631 - RNA, 19 nt, Homo sapiens
  misc_RNA (1)...(19): siRNA sense strand
aaaggcaucaacaucgaaa

SEQ ID NO: 1961632 - RNA, 19 nt, Homo sapiens
  misc_RNA (1)...(19): siRNA sense strand
agcaauggcuuggaugcaa

SEQ ID NO: 1961633 - RNA, 19 nt, Homo sapiens
  misc_RNA (1)...(19): siRNA sense strand
cugggcagcauccacguua

SEQ ID NO: 1961634 - RNA, 19 nt, Homo sapiens
  misc_RNA (1)...(19): siRNA sense strand
aaucuuccaugguacuuac

SEQ ID NO: 1961635 - RNA, 19 nt, Homo sapiens
  misc_RNA (1)...(19): siRNA sense strand
gaccgagaggcauagagaa

SEQ ID NO: 1961636 - RNA, 19 nt, Homo sapiens
  misc_RNA (1)...(19): siRNA sense strand
acaggaaggccguggaauc

SEQ ID NO: 1961637 - RNA, 19 nt, Homo sapiens
  misc_RNA (1)...(19): siRNA sense strand
guauucucauccgguauau

SEQ ID NO: 1961638 - RNA, 19 nt, Homo sapiens
  misc_RNA (1)...(19): siRNA sense strand
cuacaggaaggccguggaa

SEQ ID NO: 1961639 - RNA, 19 nt, Homo sapiens
  misc_RNA (1)...(19): siRNA sense strand
caaagcucuuacgauaaug

SEQ ID NO: 1961640 - RNA, 19 nt, Homo sapiens
  misc_RNA (1)...(19): siRNA sense strand
gauccaggcauccacaaaa

SEQ ID NO: 1961641 - RNA, 19 nt, Homo sapiens
  misc_RNA (1)...(19): siRNA sense strand
guagaagccccaacugaga

SEQ ID NO: 1961642 - RNA, 19 nt, Homo sapiens
  misc_RNA (1)...(19): siRNA sense strand
gaaaugacaucucgcugua

SEQ ID NO: 1961643 - RNA, 19 nt, Homo sapiens
  misc_RNA (1)...(19): siRNA sense strand
gaagacggcucccuaaaca

SEQ ID NO: 1961644 - RNA, 19 nt, Homo sapiens
  misc_RNA (1)...(19): siRNA sense strand
gaacauaacacuagagaca

SEQ ID NO: 1961645 - RNA, 19 nt, Homo sapiens
  misc_RNA (1)...(19): siRNA sense strand
guucagaagucgguuaaua

SEQ ID NO: 1961646 - RNA, 19 nt, Homo sapiens
  misc_RNA (1)...(19): siRNA sense strand
caaagugcauuaugaagga

SEQ ID NO: 1961647 - RNA, 19 nt, Homo sapiens
  misc_RNA (1)...(19): siRNA sense strand
caacaacggugcagucaag

SEQ ID NO: 1961648 - RNA, 19 nt, Homo sapiens
  misc_RNA (1)...(19): siRNA sense strand
ggagaaagaaugacgagaa

SEQ ID NO: 1961649 - RNA, 19 nt, Homo sapiens
  misc_RNA (1)...(19): siRNA sense strand
ccaauauccucgugaagaa

SEQ ID NO: 1961650 - RNA, 19 nt, Homo sapiens
  misc_RNA (1)...(19): siRNA sense strand
aaacaauacuggcugauca

SEQ ID NO: 1961651 - RNA, 19 nt, Homo sapiens
  misc_RNA (1)...(19): siRNA sense strand
gaccagaaauucccagcuu

SEQ ID NO: 1961652 - RNA, 19 nt, Homo sapiens
  misc_RNA (1)...(19): siRNA sense strand
gaauauaacaccagcaauc

SEQ ID NO: 1961653 - RNA, 19 nt, Homo sapiens
  misc_RNA (1)...(19): siRNA sense strand
cagcaauccugacuuguug

SEQ ID NO: 1961654 - RNA, 19 nt, Homo sapiens
  misc_RNA (1)...(19): siRNA sense strand
gaagaugaccgcucugaca

SEQ ID NO: 1961655 - RNA, 19 nt, Homo sapiens
  misc_RNA (1)...(19): siRNA sense strand
ggaagucuguguggcugua

SEQ ID NO: 1961656 - RNA, 19 nt, Homo sapiens
  misc_RNA (1)...(19): siRNA sense strand
caacggugcagucaaguuu

SEQ ID NO: 1961657 - RNA, 19 nt, Homo sapiens
  misc_RNA (1)...(19): siRNA sense strand
gucaagaucuuucccuaug

SEQ ID NO: 1961658 - RNA, 19 nt, Homo sapiens
  misc_RNA (1)...(19): siRNA sense strand
gaaagaaugacgagaacau

SEQ ID NO: 1961659 - RNA, 19 nt, Homo sapiens
  misc_RNA (1)...(19): siRNA sense strand
ccuaaacacuaccaaauag

SEQ ID NO: 1961660 - RNA, 19 nt, Homo sapiens
  misc_RNA (1)...(19): siRNA sense strand
ucagugagcuggagcaucu

SEQ ID NO: 1961661 - RNA, 19 nt, Homo sapiens
  misc_RNA (1)...(19): siRNA sense strand
gagaaagaaugacgagaac

SEQ ID NO: 1961662 - RNA, 19 nt, Homo sapiens
  misc_RNA (1)...(19): siRNA sense strand
ggugagacuuucuucaugu

SEQ ID NO: 1961663 - RNA, 19 nt, Homo sapiens
  misc_RNA (1)...(19): siRNA sense strand
cuagucauauuucaaguga

SEQ ID NO: 1961664 - RNA, 19 nt, Homo sapiens
  misc_RNA (1)...(19): siRNA sense strand
ccaacaacaucaaccacaa

SEQ ID NO: 1961665 - RNA, 19 nt, Homo sapiens
  misc_RNA (1)...(19): siRNA sense strand
auacauggcuccagaaguc

SEQ ID NO: 1961666 - RNA, 19 nt, Homo sapiens
  misc_RNA (1)...(19): siRNA sense strand
aaccagaaauccugcauga

SEQ ID NO: 1961667 - RNA, 19 nt, Homo sapiens
  misc_RNA (1)...(19): siRNA sense strand
gaucgagggcgaccagaaa

SEQ ID NO: 1961668 - RNA, 19 nt, Homo sapiens
  misc_RNA (1)...(19): siRNA sense strand
ucuccaaagugcauuauga

SEQ ID NO: 1961669 - RNA, 19 nt, Homo sapiens
  misc_RNA (1)...(19): siRNA sense strand
gaacacuucagagcaguuu

SEQ ID NO: 1961670 - RNA, 19 nt, Homo sapiens
  misc_RNA (1)...(19): siRNA sense strand
acaucaaucugaagcauga

SEQ ID NO: 1961671 - RNA, 19 nt, Homo sapiens
  misc_RNA (1)...(19): siRNA sense strand
gagacuuucuucauguguu

SEQ ID NO: 1961672 - RNA, 19 nt, Homo sapiens
  misc_RNA (1)...(19): siRNA sense strand
gagaacauaacacuagaga

SEQ ID NO: 1961673 - RNA, 19 nt, Homo sapiens
  misc_RNA (1)...(19): siRNA sense strand
ucaagaucuuucccuauga

SEQ ID NO: 1961674 - RNA, 19 nt, Homo sapiens
  misc_RNA (1)...(19): siRNA sense strand
caacaucaaccacaacaca

SEQ ID NO: 1961675 - RNA, 19 nt, Homo sapiens
  misc_RNA (1)...(19): siRNA sense strand
caccagcaauccugacuug

SEQ ID NO: 1961676 - RNA, 19 nt, Homo sapiens
  misc_RNA (1)...(19): siRNA sense strand
gcuccaauauccucgugaa

SEQ ID NO: 1961677 - RNA, 19 nt, Homo sapiens
  misc_RNA (1)...(19): siRNA sense strand
ggaugaauuuggagaaugc

SEQ ID NO: 1961678 - RNA, 19 nt, Homo sapiens
  misc_RNA (1)...(19): siRNA sense strand
ugccauaucugucaucauc

SEQ ID NO: 1961679 - RNA, 19 nt, Homo sapiens
  misc_RNA (1)...(19): siRNA sense strand
gcagucaaguuuccacaac

SEQ ID NO: 1961680 - RNA, 19 nt, Homo sapiens
  misc_RNA (1)...(19): siRNA sense strand
ggaguugccauaucuguca

SEQ ID NO: 1961681 - RNA, 19 nt, Homo sapiens
  misc_RNA (1)...(19): siRNA sense strand
ggagaagauuccugaagac

SEQ ID NO: 1961682 - RNA, 19 nt, Homo sapiens
  misc_RNA (1)...(19): siRNA sense strand
cagagcugcugcccauuga

SEQ ID NO: 1961683 - RNA, 19 nt, Homo sapiens
  misc_RNA (1)...(19): siRNA sense strand
gacgagaacauaacacuag

SEQ ID NO: 1961684 - RNA, 19 nt, Homo sapiens
  misc_RNA (1)...(19): siRNA sense strand
ggacaucuucucagacauc

SEQ ID NO: 1961685 - RNA, 19 nt, Homo sapiens
  misc_RNA (1)...(19): siRNA sense strand
cgcggaagcucauggaguu

SEQ ID NO: 1961686 - RNA, 19 nt, Homo sapiens
  misc_RNA (1)...(19): siRNA sense strand
aggccaagcugaagcagaa

SEQ ID NO: 1961687 - RNA, 19 nt, Homo sapiens
  misc_RNA (1)...(19): siRNA sense strand
gaaacaauacuggcugauc

SEQ ID NO: 1961688 - RNA, 19 nt, Homo sapiens
  misc_RNA (1)...(19): siRNA sense strand
aaagaaugacgagaacaua

SEQ ID NO: 1961689 - RNA, 19 nt, Homo sapiens
  misc_RNA (1)...(19): siRNA sense strand
gauuaugagccuccauuug

SEQ ID NO: 1961690 - RNA, 19 nt, Homo sapiens
  misc_RNA (1)...(19): siRNA sense strand
caagaucuuucccuaugag

SEQ ID NO: 1961691 - RNA, 19 nt, Homo sapiens
  misc_RNA (1)...(19): siRNA sense strand
cagcaucaccuccaucugu

SEQ ID NO: 1961692 - RNA, 19 nt, Homo sapiens
  misc_RNA (1)...(19): siRNA sense strand
gaccucaagagcuccaaua

SEQ ID NO: 1961693 - RNA, 19 nt, Homo sapiens
  misc_RNA (1)...(19): siRNA sense strand
ucugaagcaugagaacaua

SEQ ID NO: 1961694 - RNA, 19 nt, Homo sapiens
  misc_RNA (1)...(19): siRNA sense strand
ccagcaauccugacuuguu

SEQ ID NO: 1961695 - RNA, 19 nt, Homo sapiens
  misc_RNA (1)...(19): siRNA sense strand
aaugacaucucgcuguaau

SEQ ID NO: 1961696 - RNA, 19 nt, Homo sapiens
  misc_RNA (1)...(19): siRNA sense strand
aaggacaucuucucagaca

SEQ ID NO: 1961697 - RNA, 19 nt, Homo sapiens
  misc_RNA (1)...(19): siRNA sense strand
aagaaugacgagaacauaa

SEQ ID NO: 1961698 - RNA, 19 nt, Homo sapiens
  misc_RNA (1)...(19): siRNA sense strand
cccuaaacacuaccaaaua

SEQ ID NO: 1961699 - RNA, 19 nt, Homo sapiens
  misc_RNA (1)...(19): siRNA sense strand
uggcagaacgcuucaguga

SEQ ID NO: 1961700 - RNA, 19 nt, Homo sapiens
  misc_RNA (1)...(19): siRNA sense strand
gaaugacgagaacauaaca

SEQ ID NO: 1961701 - RNA, 19 nt, Homo sapiens
  misc_RNA (1)...(19): siRNA sense strand
gcaugaaggacaacguguu

SEQ ID NO: 1961702 - RNA, 19 nt, Homo sapiens
  misc_RNA (1)...(19): siRNA sense strand
agacagagaaggacaucuu

SEQ ID NO: 1961703 - RNA, 19 nt, Homo sapiens
  misc_RNA (1)...(19): siRNA sense strand
ugagugcaaugacaacauc

SEQ ID NO: 1961704 - RNA, 19 nt, Homo sapiens
  misc_RNA (1)...(19): siRNA sense strand
uagagacaguuugccauga

SEQ ID NO: 1961705 - RNA, 19 nt, Homo sapiens
  misc_RNA (1)...(19): siRNA sense strand
ucgaaagcaugaaggacaa

SEQ ID NO: 1961706 - RNA, 19 nt, Homo sapiens
  misc_RNA (1)...(19): siRNA sense strand
guaaugcagugggagaagu

SEQ ID NO: 1961707 - RNA, 19 nt, Homo sapiens
  misc_RNA (1)...(19): siRNA sense strand
cucaagagcuccaauaucc

SEQ ID NO: 1961708 - RNA, 19 nt, Homo sapiens
  misc_RNA (1)...(19): siRNA sense strand
cagagcaguuugagacagu

SEQ ID NO: 1961709 - RNA, 19 nt, Homo sapiens
  misc_RNA (1)...(19): siRNA sense strand
gcucugaugagugcaauga

SEQ ID NO: 1961710 - RNA, 19 nt, Homo sapiens
  misc_RNA (1)...(19): siRNA sense strand
ccauaucugucaucaucau

SEQ ID NO: 1961711 - RNA, 19 nt, Homo sapiens
  misc_RNA (1)...(19): siRNA sense strand
ugggagaaguaaaagauua

SEQ ID NO: 1961712 - RNA, 19 nt, Homo sapiens
  misc_RNA (1)...(19): siRNA sense strand
caggaugaauuuggagaau

SEQ ID NO: 1961713 - RNA, 19 nt, Homo sapiens
  misc_RNA (1)...(19): siRNA sense strand
gcaagacgcggaagcucau

SEQ ID NO: 1961714 - RNA, 19 nt, Homo sapiens
  misc_RNA (1)...(19): siRNA sense strand
gacaguggcagucaagauc

SEQ ID NO: 1961715 - RNA, 19 nt, Homo sapiens
  misc_RNA (1)...(19): siRNA sense strand
uggaugaccuggcuaacag

SEQ ID NO: 1961716 - RNA, 19 nt, Homo sapiens
  misc_RNA (1)...(19): siRNA sense strand
uaaugcagugggagaagua

SEQ ID NO: 1961717 - RNA, 19 nt, Homo sapiens
  misc_RNA (1)...(19): siRNA sense strand
guggcuguauggagaaaga

SEQ ID NO: 1961718 - RNA, 19 nt, Homo sapiens
  misc_RNA (1)...(19): siRNA sense strand
ugugagacguugacugagu

SEQ ID NO: 1961719 - RNA, 19 nt, Homo sapiens
  misc_RNA (1)...(19): siRNA sense strand
ugugugagacguugacuga

SEQ ID NO: 1961720 - RNA, 19 nt, Homo sapiens
  misc_RNA (1)...(19): siRNA sense strand
caucuucucagacaucaau

SEQ ID NO: 1961721 - RNA, 19 nt, Homo sapiens
  misc_RNA (1)...(19): siRNA sense strand
ugacgagaacauaacacua

SEQ ID NO: 1961722 - RNA, 19 nt, Homo sapiens
  misc_RNA (1)...(19): siRNA sense strand
gugagaagccacaggaagu

SEQ ID NO: 1961723 - RNA, 19 nt, Homo sapiens
  misc_RNA (1)...(19): siRNA sense strand
gaagacagagaaggacauc

SEQ ID NO: 1961724 - RNA, 19 nt, Homo sapiens
  misc_RNA (1)...(19): siRNA sense strand
gcuuugcugaggucuauaa

SEQ ID NO: 1961725 - RNA, 19 nt, Homo sapiens
  misc_RNA (1)...(19): siRNA sense strand
uucagaagucgguuaauaa

SEQ ID NO: 1961726 - RNA, 19 nt, Homo sapiens
  misc_RNA (1)...(19): siRNA sense strand
gaugcugcuucuccaaagu

SEQ ID NO: 1961727 - RNA, 19 nt, Homo sapiens
  misc_RNA (1)...(19): siRNA sense strand
acauaacacuagagacagu

SEQ ID NO: 1961728 - RNA, 19 nt, Homo sapiens
  misc_RNA (1)...(19): siRNA sense strand
gugagacuuucuucaugug

SEQ ID NO: 1961729 - RNA, 19 nt, Homo sapiens
  misc_RNA (1)...(19): siRNA sense strand
gcucuggugcucugggaaa

SEQ ID NO: 1961730 - RNA, 19 nt, Homo sapiens
  misc_RNA (1)...(19): siRNA sense strand
agacuuucuucauguguuc

SEQ ID NO: 1961731 - RNA, 19 nt, Homo sapiens
  misc_RNA (1)...(19): siRNA sense strand
cuccagaaguccuagaauc

SEQ ID NO: 1961732 - RNA, 19 nt, Homo sapiens
  misc_RNA (1)...(19): siRNA sense strand
gacaucuucucagacauca

SEQ ID NO: 1961733 - RNA, 19 nt, Homo sapiens
  misc_RNA (1)...(19): siRNA sense strand
ucuauaaggccaagcugaa

SEQ ID NO: 1961734 - RNA, 19 nt, Homo sapiens
  misc_RNA (1)...(19): siRNA sense strand
ucgcuuugcugaggucuau

SEQ ID NO: 1961735 - RNA, 19 nt, Homo sapiens
  misc_RNA (1)...(19): siRNA sense strand
uaucugucaucaucaucuu

SEQ ID NO: 1961736 - RNA, 19 nt, Homo sapiens
  misc_RNA (1)...(19): siRNA sense strand
acaacaucaucuucucaga

SEQ ID NO: 1961737 - RNA, 19 nt, Homo sapiens
  misc_RNA (1)...(19): siRNA sense strand
uggugagacuuucuucaug

SEQ ID NO: 1961738 - RNA, 19 nt, Homo sapiens
  misc_RNA (1)...(19): siRNA sense strand
cuggugcucugggaaauga

SEQ ID NO: 1961739 - RNA, 19 nt, Homo sapiens
  misc_RNA (1)...(19): siRNA sense strand
aagaauauaacaccagcaa

SEQ ID NO: 1961740 - RNA, 19 nt, Homo sapiens
  misc_RNA (1)...(19): siRNA sense strand
agacaucaaucugaagcau

SEQ ID NO: 1961741 - RNA, 19 nt, Homo sapiens
  misc_RNA (1)...(19): siRNA sense strand
ggaagacagagaaggacau

SEQ ID NO: 1961742 - RNA, 19 nt, Homo sapiens
  misc_RNA (1)...(19): siRNA sense strand
gcauauauacccagaaguu

SEQ ID NO: 1961743 - RNA, 19 nt, Homo sapiens
  misc_RNA (1)...(19): siRNA sense strand
caccuuccauggacauuua

SEQ ID NO: 1961744 - RNA, 19 nt, Homo sapiens
  misc_RNA (1)...(19): siRNA sense strand
cauauauacccagaaguua

SEQ ID NO: 1961745 - RNA, 19 nt, Homo sapiens
  misc_RNA (1)...(19): siRNA sense strand
acauuuagguuguuucuac

SEQ ID NO: 1961746 - RNA, 19 nt, Homo sapiens
  misc_RNA (1)...(19): siRNA sense strand
ccauggacauuuagguugu

SEQ ID NO: 1961747 - RNA, 19 nt, Homo sapiens
  misc_RNA (1)...(19): siRNA sense strand
cuucugcuuucaauucuuu

SEQ ID NO: 1961748 - RNA, 19 nt, Homo sapiens
  misc_RNA (1)...(19): siRNA sense strand
cagcuucugcuuucaauuc

SEQ ID NO: 1961749 - RNA, 19 nt, Homo sapiens
  misc_RNA (1)...(19): siRNA sense strand
ucaugcagccauaaacauu

SEQ ID NO: 1961750 - RNA, 19 nt, Homo sapiens
  misc_RNA (1)...(19): siRNA sense strand
ggacauuuagguuguuucu

SEQ ID NO: 1961751 - RNA, 19 nt, Homo sapiens
  misc_RNA (1)...(19): siRNA sense strand
ugugaaucaugcagccaua

SEQ ID NO: 1961752 - RNA, 19 nt, Homo sapiens
  misc_RNA (1)...(19): siRNA sense strand
ugaaucaugcagccauaaa

SEQ ID NO: 1961753 - RNA, 19 nt, Homo sapiens
  misc_RNA (1)...(19): siRNA sense strand
guagguacugugaaucaug

SEQ ID NO: 1961754 - RNA, 19 nt, Homo sapiens
  misc_RNA (1)...(19): siRNA sense strand
ccuuguagguacugugaau

SEQ ID NO: 1961755 - RNA, 19 nt, Homo sapiens
  misc_RNA (1)...(19): siRNA sense strand
gguguucaaauauauguuc

SEQ ID NO: 1961756 - RNA, 19 nt, Homo sapiens
  misc_RNA (1)...(19): siRNA sense strand
uugcauauauacccagaag

SEQ ID NO: 1961757 - RNA, 19 nt, Homo sapiens
  misc_RNA (1)...(19): siRNA sense strand
gaaucaugcagccauaaac

SEQ ID NO: 1961758 - RNA, 19 nt, Homo sapiens
  misc_RNA (1)...(19): siRNA sense strand
caugcagccauaaacauug

SEQ ID NO: 1961759 - RNA, 19 nt, Homo sapiens
  misc_RNA (1)...(19): siRNA sense strand
cauggacauuuagguuguu

SEQ ID NO: 1961760 - RNA, 19 nt, Homo sapiens
  misc_RNA (1)...(19): siRNA sense strand
gaacauggcuaucaaacuu

SEQ ID NO: 1961761 - RNA, 19 nt, Homo sapiens
  misc_RNA (1)...(19): siRNA sense strand
gcaagcacaugaagaaguu

SEQ ID NO: 1961762 - RNA, 19 nt, Homo sapiens
  misc_RNA (1)...(19): siRNA sense strand
caaccuggaugccuuugua

SEQ ID NO: 1961763 - RNA, 19 nt, Homo sapiens
  misc_RNA (1)...(19): siRNA sense strand
ggaaggcucuggcaaucaa

SEQ ID NO: 1961764 - RNA, 19 nt, Homo sapiens
  misc_RNA (1)...(19): siRNA sense strand
ggacauggagcggcauuua

SEQ ID NO: 1961765 - RNA, 19 nt, Homo sapiens
  misc_RNA (1)...(19): siRNA sense strand
gcaagcagcaguuuaacaa

SEQ ID NO: 1961766 - RNA, 19 nt, Homo sapiens
  misc_RNA (1)...(19): siRNA sense strand
gggagaagccuuucaagug

SEQ ID NO: 1961767 - RNA, 19 nt, Homo sapiens
  misc_RNA (1)...(19): siRNA sense strand
ggcaaucaaacuuucauua

SEQ ID NO: 1961768 - RNA, 19 nt, Homo sapiens
  misc_RNA (1)...(19): siRNA sense strand
agaaaaggcuuaacuguug

SEQ ID NO: 1961769 - RNA, 19 nt, Homo sapiens
  misc_RNA (1)...(19): siRNA sense strand
aguuucagcuccagaauuu

SEQ ID NO: 1961770 - RNA, 19 nt, Homo sapiens
  misc_RNA (1)...(19): siRNA sense strand
ccgacuccauuccagauua

SEQ ID NO: 1961771 - RNA, 19 nt, Homo sapiens
  misc_RNA (1)...(19): siRNA sense strand
caacaccaccugcucagaa

SEQ ID NO: 1961772 - RNA, 19 nt, Homo sapiens
  misc_RNA (1)...(19): siRNA sense strand
aagcagaccuacuccauca

SEQ ID NO: 1961773 - RNA, 19 nt, Homo sapiens
  misc_RNA (1)...(19): siRNA sense strand
gcagcagccucaacaagca

SEQ ID NO: 1961774 - RNA, 19 nt, Homo sapiens
  misc_RNA (1)...(19): siRNA sense strand
gcaaucaaacuuucauuac

SEQ ID NO: 1961775 - RNA, 19 nt, Homo sapiens
  misc_RNA (1)...(19): siRNA sense strand
gcacagcgggaauaacuuc

SEQ ID NO: 1961776 - RNA, 19 nt, Homo sapiens
  misc_RNA (1)...(19): siRNA sense strand
gcagaccuacuccaucauu

SEQ ID NO: 1961777 - RNA, 19 nt, Homo sapiens
  misc_RNA (1)...(19): siRNA sense strand
gggacaugguuaagacuga

SEQ ID NO: 1961778 - RNA, 19 nt, Homo sapiens
  misc_RNA (1)...(19): siRNA sense strand
ccauaagugugaagucugu

SEQ ID NO: 1961779 - RNA, 19 nt, Homo sapiens
  misc_RNA (1)...(19): siRNA sense strand
gacauggagcggcauuuaa

SEQ ID NO: 1961780 - RNA, 19 nt, Homo sapiens
  misc_RNA (1)...(19): siRNA sense strand
gagaagugcucggaaugca

SEQ ID NO: 1961781 - RNA, 19 nt, Homo sapiens
  misc_RNA (1)...(19): siRNA sense strand
ugagcaagcacaugaagaa

SEQ ID NO: 1961782 - RNA, 19 nt, Homo sapiens
  misc_RNA (1)...(19): siRNA sense strand
gaguuuccacugcgauaua

SEQ ID NO: 1961783 - RNA, 19 nt, Homo sapiens
  misc_RNA (1)...(19): siRNA sense strand
caagcuggaugccaagaag

SEQ ID NO: 1961784 - RNA, 19 nt, Homo sapiens
  misc_RNA (1)...(19): siRNA sense strand
gcucuggcaaucaaacuuu

SEQ ID NO: 1961785 - RNA, 19 nt, Homo sapiens
  misc_RNA (1)...(19): siRNA sense strand
gcgugaagcccuacaagug

SEQ ID NO: 1961786 - RNA, 19 nt, Homo sapiens
  misc_RNA (1)...(19): siRNA sense strand
aauguccgcugcaccauga

SEQ ID NO: 1961787 - RNA, 19 nt, Homo sapiens
  misc_RNA (1)...(19): siRNA sense strand
gcaccgaccgcccuuucaa

SEQ ID NO: 1961788 - RNA, 19 nt, Homo sapiens
  misc_RNA (1)...(19): siRNA sense strand
caggaaggcucuggcaauc

SEQ ID NO: 1961789 - RNA, 19 nt, Homo sapiens
  misc_RNA (1)...(19): siRNA sense strand
uaacaaccuggaugccuuu

SEQ ID NO: 1961790 - RNA, 19 nt, Homo sapiens
  misc_RNA (1)...(19): siRNA sense strand
caagugcuuuagccggaaa

SEQ ID NO: 1961791 - RNA, 19 nt, Homo sapiens
  misc_RNA (1)...(19): siRNA sense strand
gguauuacuugcacugacu

SEQ ID NO: 1961792 - RNA, 19 nt, Homo sapiens
  misc_RNA (1)...(19): siRNA sense strand
cgugaccguucuccaguuu

SEQ ID NO: 1961793 - RNA, 19 nt, Homo sapiens
  misc_RNA (1)...(19): siRNA sense strand
ucaagucgcacauccguau

SEQ ID NO: 1961794 - RNA, 19 nt, Homo sapiens
  misc_RNA (1)...(19): siRNA sense strand
acauggagcggcauuuaaa

SEQ ID NO: 1961795 - RNA, 19 nt, Homo sapiens
  misc_RNA (1)...(19): siRNA sense strand
ccaguucggguauuacuug

SEQ ID NO: 1961796 - RNA, 19 nt, Homo sapiens
  misc_RNA (1)...(19): siRNA sense strand
gguuaagacugaggcucua

SEQ ID NO: 1961797 - RNA, 19 nt, Homo sapiens
  misc_RNA (1)...(19): siRNA sense strand
ccagcacgguccaguuugu

SEQ ID NO: 1961798 - RNA, 19 nt, Homo sapiens
  misc_RNA (1)...(19): siRNA sense strand
ugaccguucuccaguuuca

SEQ ID NO: 1961799 - RNA, 19 nt, Homo sapiens
  misc_RNA (1)...(19): siRNA sense strand
aggcuuaacuguugcuauc

SEQ ID NO: 1961800 - RNA, 19 nt, Homo sapiens
  misc_RNA (1)...(19): siRNA sense strand
ccugagaagugcucggaau

SEQ ID NO: 1961801 - RNA, 19 nt, Homo sapiens
  misc_RNA (1)...(19): siRNA sense strand
aaucagcucggacuugaaa

SEQ ID NO: 1961802 - RNA, 19 nt, Homo sapiens
  misc_RNA (1)...(19): siRNA sense strand
acaagagacagcacaguga

SEQ ID NO: 1961803 - RNA, 19 nt, Homo sapiens
  misc_RNA (1)...(19): siRNA sense strand
ggccuaaacgccuugauuc

SEQ ID NO: 1961804 - RNA, 19 nt, Homo sapiens
  misc_RNA (1)...(19): siRNA sense strand
caaucaaacuuucauuacc

SEQ ID NO: 1961805 - RNA, 19 nt, Homo sapiens
  misc_RNA (1)...(19): siRNA sense strand
cgacuccauuccagauuag

SEQ ID NO: 1961806 - RNA, 19 nt, Homo sapiens
  misc_RNA (1)...(19): siRNA sense strand
cuauccagguugccaauuc

SEQ ID NO: 1961807 - RNA, 19 nt, Homo sapiens
  misc_RNA (1)...(19): siRNA sense strand
uuacuugcacugacuuuga

SEQ ID NO: 1961808 - RNA, 19 nt, Homo sapiens
  misc_RNA (1)...(19): siRNA sense strand
agagacagcacagugagua

SEQ ID NO: 1961809 - RNA, 19 nt, Homo sapiens
  misc_RNA (1)...(19): siRNA sense strand
gccaauucaagacugcuua

SEQ ID NO: 1961810 - RNA, 19 nt, Homo sapiens
  misc_RNA (1)...(19): siRNA sense strand
aacaccaccugcucagaaa

SEQ ID NO: 1961811 - RNA, 19 nt, Homo sapiens
  misc_RNA (1)...(19): siRNA sense strand
ccagcaaccugagcaagca

SEQ ID NO: 1961812 - RNA, 19 nt, Homo sapiens
  misc_RNA (1)...(19): siRNA sense strand
aaaaucagcucggacuuga

SEQ ID NO: 1961813 - RNA, 19 nt, Homo sapiens
  misc_RNA (1)...(19): siRNA sense strand
ucaacaagcaccugaggau

SEQ ID NO: 1961814 - RNA, 19 nt, Homo sapiens
  misc_RNA (1)...(19): siRNA sense strand
uauccagguugccaauuca

SEQ ID NO: 1961815 - RNA, 19 nt, Homo sapiens
  misc_RNA (1)...(19): siRNA sense strand
gacagcagcagccucaaca

SEQ ID NO: 1961816 - RNA, 19 nt, Homo sapiens
  misc_RNA (1)...(19): siRNA sense strand
gaccuacuccaucauucaa

SEQ ID NO: 1961817 - RNA, 19 nt, Homo sapiens
  misc_RNA (1)...(19): siRNA sense strand
ccucggagacccagacaau

SEQ ID NO: 1961818 - RNA, 19 nt, Homo sapiens
  misc_RNA (1)...(19): siRNA sense strand
ccauccagcuuugcucugu

SEQ ID NO: 1961819 - RNA, 19 nt, Homo sapiens
  misc_RNA (1)...(19): siRNA sense strand
ggacagcagaagugacagu

SEQ ID NO: 1961820 - RNA, 19 nt, Homo sapiens
  misc_RNA (1)...(19): siRNA sense strand
uacuugcacugacuuugaa

SEQ ID NO: 1961821 - RNA, 19 nt, Homo sapiens
  misc_RNA (1)...(19): siRNA sense strand
ucaagcacagcgggaauaa

SEQ ID NO: 1961822 - RNA, 19 nt, Homo sapiens
  misc_RNA (1)...(19): siRNA sense strand
caagugcgaguucugcaau

SEQ ID NO: 1961823 - RNA, 19 nt, Homo sapiens
  misc_RNA (1)...(19): siRNA sense strand
aagacaagcugaaaacuca

SEQ ID NO: 1961824 - RNA, 19 nt, Homo sapiens
  misc_RNA (1)...(19): siRNA sense strand
ccagguugccaauucaaga

SEQ ID NO: 1961825 - RNA, 19 nt, Homo sapiens
  misc_RNA (1)...(19): siRNA sense strand
acaaguguaagacguguga

SEQ ID NO: 1961826 - RNA, 19 nt, Homo sapiens
  misc_RNA (1)...(19): siRNA sense strand
ccaagcagaccuacuccau

SEQ ID NO: 1961827 - RNA, 19 nt, Homo sapiens
  misc_RNA (1)...(19): siRNA sense strand
agcaagaacuacccaagca

SEQ ID NO: 1961828 - RNA, 19 nt, Homo sapiens
  misc_RNA (1)...(19): siRNA sense strand
cagcgggaauaacuucaag

SEQ ID NO: 1961829 - RNA, 19 nt, Homo sapiens
  misc_RNA (1)...(19): siRNA sense strand
gcacgguccaguuuguauc

SEQ ID NO: 1961830 - RNA, 19 nt, Homo sapiens
  misc_RNA (1)...(19): siRNA sense strand
ucggagacccagacaauca

SEQ ID NO: 1961831 - RNA, 19 nt, Homo sapiens
  misc_RNA (1)...(19): siRNA sense strand
cagaccuacuccaucauuc

SEQ ID NO: 1961832 - RNA, 19 nt, Homo sapiens
  misc_RNA (1)...(19): siRNA sense strand
agucggagcauccugagaa

SEQ ID NO: 1961833 - RNA, 19 nt, Homo sapiens
  misc_RNA (1)...(19): siRNA sense strand
gcuuaacuguugcuaucca

SEQ ID NO: 1961834 - RNA, 19 nt, Homo sapiens
  misc_RNA (1)...(19): siRNA sense strand
ggcagcccauccagcuuug

SEQ ID NO: 1961835 - RNA, 19 nt, Homo sapiens
  misc_RNA (1)...(19): siRNA sense strand
acucagaccaccaccagaa

SEQ ID NO: 1961836 - RNA, 19 nt, Homo sapiens
  misc_RNA (1)...(19): siRNA sense strand
cggagcauccugagaagug

SEQ ID NO: 1961837 - RNA, 19 nt, Homo sapiens
  misc_RNA (1)...(19): siRNA sense strand
cuuccugggugacagcaaa

SEQ ID NO: 1961838 - RNA, 19 nt, Homo sapiens
  misc_RNA (1)...(19): siRNA sense strand
cgugaagcccuacaagugu

SEQ ID NO: 1961839 - RNA, 19 nt, Homo sapiens
  misc_RNA (1)...(19): siRNA sense strand
cagaaaaggcuuaacuguu

SEQ ID NO: 1961840 - RNA, 19 nt, Homo sapiens
  misc_RNA (1)...(19): siRNA sense strand
gagggaagagucaaaauca

SEQ ID NO: 1961841 - RNA, 19 nt, Homo sapiens
  misc_RNA (1)...(19): siRNA sense strand
aaccugagcaagcacauga

SEQ ID NO: 1961842 - RNA, 19 nt, Homo sapiens
  misc_RNA (1)...(19): siRNA sense strand
ggaaagacaagcugaaaac

SEQ ID NO: 1961843 - RNA, 19 nt, Homo sapiens
  misc_RNA (1)...(19): siRNA sense strand
agacaaaccccauaagugu

SEQ ID NO: 1961844 - RNA, 19 nt, Homo sapiens
  misc_RNA (1)...(19): siRNA sense strand
gagacaaaccccauaagug

SEQ ID NO: 1961845 - RNA, 19 nt, Homo sapiens
  misc_RNA (1)...(19): siRNA sense strand
ccacggaaaguaaugaaaa

SEQ ID NO: 1961846 - RNA, 19 nt, Homo sapiens
  misc_RNA (1)...(19): siRNA sense strand
gccuaaacgccuugauuca

SEQ ID NO: 1961847 - RNA, 19 nt, Homo sapiens
  misc_RNA (1)...(19): siRNA sense strand
cagccacugucaucucucu

SEQ ID NO: 1961848 - RNA, 19 nt, Homo sapiens
  misc_RNA (1)...(19): siRNA sense strand
cagcgagggaagagucaaa

SEQ ID NO: 1961849 - RNA, 19 nt, Homo sapiens
  misc_RNA (1)...(19): siRNA sense strand
gcagguggccaagcuggau

SEQ ID NO: 1961850 - RNA, 19 nt, Homo sapiens
  misc_RNA (1)...(19): siRNA sense strand
aagcacagcgggaauaacu

SEQ ID NO: 1961851 - RNA, 19 nt, Homo sapiens
  misc_RNA (1)...(19): siRNA sense strand
acccagacaaucacaguuu

SEQ ID NO: 1961852 - RNA, 19 nt, Homo sapiens
  misc_RNA (1)...(19): siRNA sense strand
cccagacaaucacaguuuc

SEQ ID NO: 1961853 - RNA, 19 nt, Homo sapiens
  misc_RNA (1)...(19): siRNA sense strand
ccggaaagacaagcugaaa

SEQ ID NO: 1961854 - RNA, 19 nt, Homo sapiens
  misc_RNA (1)...(19): siRNA sense strand
ccaauucaagacugcuuau

SEQ ID NO: 1961855 - RNA, 19 nt, Homo sapiens
  misc_RNA (1)...(19): siRNA sense strand
gaaggcucuggcaaucaaa

SEQ ID NO: 1961856 - RNA, 19 nt, Homo sapiens
  misc_RNA (1)...(19): siRNA sense strand
gaacauggcuaucaaacuu

SEQ ID NO: 1961857 - RNA, 19 nt, Homo sapiens
  misc_RNA (1)...(19): siRNA sense strand
gcaagcacaugaagaaguu

SEQ ID NO: 1961858 - RNA, 19 nt, Homo sapiens
  misc_RNA (1)...(19): siRNA sense strand
caaccuggaugccuuugua

SEQ ID NO: 1961859 - RNA, 19 nt, Homo sapiens
  misc_RNA (1)...(19): siRNA sense strand
ggaaggcucuggcaaucaa

SEQ ID NO: 1961860 - RNA, 19 nt, Homo sapiens
  misc_RNA (1)...(19): siRNA sense strand
ggacauggagcggcauuua

SEQ ID NO: 1961861 - RNA, 19 nt, Homo sapiens
  misc_RNA (1)...(19): siRNA sense strand
gcaagcagcaguuuaacaa

SEQ ID NO: 1961862 - RNA, 19 nt, Homo sapiens
  misc_RNA (1)...(19): siRNA sense strand
gggagaagccuuucaagug

SEQ ID NO: 1961863 - RNA, 19 nt, Homo sapiens
  misc_RNA (1)...(19): siRNA sense strand
ggcaaucaaacuuucauua

SEQ ID NO: 1961864 - RNA, 19 nt, Homo sapiens
  misc_RNA (1)...(19): siRNA sense strand
agaaaaggcuuaacuguug

SEQ ID NO: 1961865 - RNA, 19 nt, Homo sapiens
  misc_RNA (1)...(19): siRNA sense strand
aguuucagcuccagaauuu

SEQ ID NO: 1961866 - RNA, 19 nt, Homo sapiens
  misc_RNA (1)...(19): siRNA sense strand
ccgacuccauuccagauua

SEQ ID NO: 1961867 - RNA, 19 nt, Homo sapiens
  misc_RNA (1)...(19): siRNA sense strand
caacaccaccugcucagaa

SEQ ID NO: 1961868 - RNA, 19 nt, Homo sapiens
  misc_RNA (1)...(19): siRNA sense strand
aagcagaccuacuccauca

SEQ ID NO: 1961869 - RNA, 19 nt, Homo sapiens
  misc_RNA (1)...(19): siRNA sense strand
gcagcagccucaacaagca

SEQ ID NO: 1961870 - RNA, 19 nt, Homo sapiens
  misc_RNA (1)...(19): siRNA sense strand
gcaaucaaacuuucauuac

SEQ ID NO: 1961871 - RNA, 19 nt, Homo sapiens
  misc_RNA (1)...(19): siRNA sense strand
gcacagcgggaauaacuuc

SEQ ID NO: 1961872 - RNA, 19 nt, Homo sapiens
  misc_RNA (1)...(19): siRNA sense strand
gcagaccuacuccaucauu

SEQ ID NO: 1961873 - RNA, 19 nt, Homo sapiens
  misc_RNA (1)...(19): siRNA sense strand
gggacaugguuaagacuga

SEQ ID NO: 1961874 - RNA, 19 nt, Homo sapiens
  misc_RNA (1)...(19): siRNA sense strand
ccauaagugugaagucugu

SEQ ID NO: 1961875 - RNA, 19 nt, Homo sapiens
  misc_RNA (1)...(19): siRNA sense strand
gacauggagcggcauuuaa

SEQ ID NO: 1961876 - RNA, 19 nt, Homo sapiens
  misc_RNA (1)...(19): siRNA sense strand
gagaagugcucggaaugca

SEQ ID NO: 1961877 - RNA, 19 nt, Homo sapiens
  misc_RNA (1)...(19): siRNA sense strand
ugagcaagcacaugaagaa

SEQ ID NO: 1961878 - RNA, 19 nt, Homo sapiens
  misc_RNA (1)...(19): siRNA sense strand
gaguuuccacugcgauaua

SEQ ID NO: 1961879 - RNA, 19 nt, Homo sapiens
  misc_RNA (1)...(19): siRNA sense strand
caagcuggaugccaagaag

SEQ ID NO: 1961880 - RNA, 19 nt, Homo sapiens
  misc_RNA (1)...(19): siRNA sense strand
gcucuggcaaucaaacuuu

SEQ ID NO: 1961881 - RNA, 19 nt, Homo sapiens
  misc_RNA (1)...(19): siRNA sense strand
gcgugaagcccuacaagug

SEQ ID NO: 1961882 - RNA, 19 nt, Homo sapiens
  misc_RNA (1)...(19): siRNA sense strand
aauguccgcugcaccauga

SEQ ID NO: 1961883 - RNA, 19 nt, Homo sapiens
  misc_RNA (1)...(19): siRNA sense strand
gcaccgaccgcccuuucaa

SEQ ID NO: 1961884 - RNA, 19 nt, Homo sapiens
  misc_RNA (1)...(19): siRNA sense strand
caggaaggcucuggcaauc

SEQ ID NO: 1961885 - RNA, 19 nt, Homo sapiens
  misc_RNA (1)...(19): siRNA sense strand
uaacaaccuggaugccuuu

SEQ ID NO: 1961886 - RNA, 19 nt, Homo sapiens
  misc_RNA (1)...(19): siRNA sense strand
caagugcuuuagccggaaa

SEQ ID NO: 1961887 - RNA, 19 nt, Homo sapiens
  misc_RNA (1)...(19): siRNA sense strand
gguauuacuugcacugacu

SEQ ID NO: 1961888 - RNA, 19 nt, Homo sapiens
  misc_RNA (1)...(19): siRNA sense strand
cgugaccguucuccaguuu

SEQ ID NO: 1961889 - RNA, 19 nt, Homo sapiens
  misc_RNA (1)...(19): siRNA sense strand
ucaagucgcacauccguau

SEQ ID NO: 1961890 - RNA, 19 nt, Homo sapiens
  misc_RNA (1)...(19): siRNA sense strand
acauggagcggcauuuaaa

SEQ ID NO: 1961891 - RNA, 19 nt, Homo sapiens
  misc_RNA (1)...(19): siRNA sense strand
ccaguucggguauuacuug

SEQ ID NO: 1961892 - RNA, 19 nt, Homo sapiens
  misc_RNA (1)...(19): siRNA sense strand
gguuaagacugaggcucua

SEQ ID NO: 1961893 - RNA, 19 nt, Homo sapiens
  misc_RNA (1)...(19): siRNA sense strand
ccagcacgguccaguuugu

SEQ ID NO: 1961894 - RNA, 19 nt, Homo sapiens
  misc_RNA (1)...(19): siRNA sense strand
ugaccguucuccaguuuca

SEQ ID NO: 1961895 - RNA, 19 nt, Homo sapiens
  misc_RNA (1)...(19): siRNA sense strand
aggcuuaacuguugcuauc

SEQ ID NO: 1961896 - RNA, 19 nt, Homo sapiens
  misc_RNA (1)...(19): siRNA sense strand
ccugagaagugcucggaau

SEQ ID NO: 1961897 - RNA, 19 nt, Homo sapiens
  misc_RNA (1)...(19): siRNA sense strand
aaucagcucggacuugaaa

SEQ ID NO: 1961898 - RNA, 19 nt, Homo sapiens
  misc_RNA (1)...(19): siRNA sense strand
acaagagacagcacaguga

SEQ ID NO: 1961899 - RNA, 19 nt, Homo sapiens
  misc_RNA (1)...(19): siRNA sense strand
ggccuaaacgccuugauuc

SEQ ID NO: 1961900 - RNA, 19 nt, Homo sapiens
  misc_RNA (1)...(19): siRNA sense strand
caaucaaacuuucauuacc

SEQ ID NO: 1961901 - RNA, 19 nt, Homo sapiens
  misc_RNA (1)...(19): siRNA sense strand
cgacuccauuccagauuag

SEQ ID NO: 1961902 - RNA, 19 nt, Homo sapiens
  misc_RNA (1)...(19): siRNA sense strand
cuauccagguugccaauuc

SEQ ID NO: 1961903 - RNA, 19 nt, Homo sapiens
  misc_RNA (1)...(19): siRNA sense strand
uuacuugcacugacuuuga

SEQ ID NO: 1961904 - RNA, 19 nt, Homo sapiens
  misc_RNA (1)...(19): siRNA sense strand
agagacagcacagugagua

SEQ ID NO: 1961905 - RNA, 19 nt, Homo sapiens
  misc_RNA (1)...(19): siRNA sense strand
gccaauucaagacugcuua

SEQ ID NO: 1961906 - RNA, 19 nt, Homo sapiens
  misc_RNA (1)...(19): siRNA sense strand
aacaccaccugcucagaaa

SEQ ID NO: 1961907 - RNA, 19 nt, Homo sapiens
  misc_RNA (1)...(19): siRNA sense strand
ccagcaaccugagcaagca

SEQ ID NO: 1961908 - RNA, 19 nt, Homo sapiens
  misc_RNA (1)...(19): siRNA sense strand
aaaaucagcucggacuuga

SEQ ID NO: 1961909 - RNA, 19 nt, Homo sapiens
  misc_RNA (1)...(19): siRNA sense strand
ucaacaagcaccugaggau

SEQ ID NO: 1961910 - RNA, 19 nt, Homo sapiens
  misc_RNA (1)...(19): siRNA sense strand
uauccagguugccaauuca

SEQ ID NO: 1961911 - RNA, 19 nt, Homo sapiens
  misc_RNA (1)...(19): siRNA sense strand
gacagcagcagccucaaca

SEQ ID NO: 1961912 - RNA, 19 nt, Homo sapiens
  misc_RNA (1)...(19): siRNA sense strand
gaccuacuccaucauucaa

SEQ ID NO: 1961913 - RNA, 19 nt, Homo sapiens
  misc_RNA (1)...(19): siRNA sense strand
ccucggagacccagacaau

SEQ ID NO: 1961914 - RNA, 19 nt, Homo sapiens
  misc_RNA (1)...(19): siRNA sense strand
ccauccagcuuugcucugu

SEQ ID NO: 1961915 - RNA, 19 nt, Homo sapiens
  misc_RNA (1)...(19): siRNA sense strand
ggacagcagaagugacagu

SEQ ID NO: 1961916 - RNA, 19 nt, Homo sapiens
  misc_RNA (1)...(19): siRNA sense strand
uacuugcacugacuuugaa

SEQ ID NO: 1961917 - RNA, 19 nt, Homo sapiens
  misc_RNA (1)...(19): siRNA sense strand
ucaagcacagcgggaauaa

SEQ ID NO: 1961918 - RNA, 19 nt, Homo sapiens
  misc_RNA (1)...(19): siRNA sense strand
caagugcgaguucugcaau

SEQ ID NO: 1961919 - RNA, 19 nt, Homo sapiens
  misc_RNA (1)...(19): siRNA sense strand
aagacaagcugaaaacuca

SEQ ID NO: 1961920 - RNA, 19 nt, Homo sapiens
  misc_RNA (1)...(19): siRNA sense strand
ccagguugccaauucaaga

SEQ ID NO: 1961921 - RNA, 19 nt, Homo sapiens
  misc_RNA (1)...(19): siRNA sense strand
acaaguguaagacguguga

SEQ ID NO: 1961922 - RNA, 19 nt, Homo sapiens
  misc_RNA (1)...(19): siRNA sense strand
ccaagcagaccuacuccau

SEQ ID NO: 1961923 - RNA, 19 nt, Homo sapiens
  misc_RNA (1)...(19): siRNA sense strand
agcaagaacuacccaagca

SEQ ID NO: 1961924 - RNA, 19 nt, Homo sapiens
  misc_RNA (1)...(19): siRNA sense strand
cagcgggaauaacuucaag

SEQ ID NO: 1961925 - RNA, 19 nt, Homo sapiens
  misc_RNA (1)...(19): siRNA sense strand
gcacgguccaguuuguauc

SEQ ID NO: 1961926 - RNA, 19 nt, Homo sapiens
  misc_RNA (1)...(19): siRNA sense strand
ucggagacccagacaauca

SEQ ID NO: 1961927 - RNA, 19 nt, Homo sapiens
  misc_RNA (1)...(19): siRNA sense strand
cagaccuacuccaucauuc

SEQ ID NO: 1961928 - RNA, 19 nt, Homo sapiens
  misc_RNA (1)...(19): siRNA sense strand
agucggagcauccugagaa

SEQ ID NO: 1961929 - RNA, 19 nt, Homo sapiens
  misc_RNA (1)...(19): siRNA sense strand
gcuuaacuguugcuaucca

SEQ ID NO: 1961930 - RNA, 19 nt, Homo sapiens
  misc_RNA (1)...(19): siRNA sense strand
ggcagcccauccagcuuug

SEQ ID NO: 1961931 - RNA, 19 nt, Homo sapiens
  misc_RNA (1)...(19): siRNA sense strand
acucagaccaccaccagaa

SEQ ID NO: 1961932 - RNA, 19 nt, Homo sapiens
  misc_RNA (1)...(19): siRNA sense strand
cggagcauccugagaagug

SEQ ID NO: 1961933 - RNA, 19 nt, Homo sapiens
  misc_RNA (1)...(19): siRNA sense strand
cuuccugggugacagcaaa

SEQ ID NO: 1961934 - RNA, 19 nt, Homo sapiens
  misc_RNA (1)...(19): siRNA sense strand
cgugaagcccuacaagugu

SEQ ID NO: 1961935 - RNA, 19 nt, Homo sapiens
  misc_RNA (1)...(19): siRNA sense strand
cagaaaaggcuuaacuguu

SEQ ID NO: 1961936 - RNA, 19 nt, Homo sapiens
  misc_RNA (1)...(19): siRNA sense strand
gagggaagagucaaaauca

SEQ ID NO: 1961937 - RNA, 19 nt, Homo sapiens
  misc_RNA (1)...(19): siRNA sense strand
aaccugagcaagcacauga

SEQ ID NO: 1961938 - RNA, 19 nt, Homo sapiens
  misc_RNA (1)...(19): siRNA sense strand
ggaaagacaagcugaaaac

SEQ ID NO: 1961939 - RNA, 19 nt, Homo sapiens
  misc_RNA (1)...(19): siRNA sense strand
agacaaaccccauaagugu

SEQ ID NO: 1961940 - RNA, 19 nt, Homo sapiens
  misc_RNA (1)...(19): siRNA sense strand
gagacaaaccccauaagug

SEQ ID NO: 1961941 - RNA, 19 nt, Homo sapiens
  misc_RNA (1)...(19): siRNA sense strand
ccacggaaaguaaugaaaa

SEQ ID NO: 1961942 - RNA, 19 nt, Homo sapiens
  misc_RNA (1)...(19): siRNA sense strand
gccuaaacgccuugauuca

SEQ ID NO: 1961943 - RNA, 19 nt, Homo sapiens
  misc_RNA (1)...(19): siRNA sense strand
cagccacugucaucucucu

SEQ ID NO: 1961944 - RNA, 19 nt, Homo sapiens
  misc_RNA (1)...(19): siRNA sense strand
cagcgagggaagagucaaa

SEQ ID NO: 1961945 - RNA, 19 nt, Homo sapiens
  misc_RNA (1)...(19): siRNA sense strand
gcagguggccaagcuggau

SEQ ID NO: 1961946 - RNA, 19 nt, Homo sapiens
  misc_RNA (1)...(19): siRNA sense strand
aagcacagcgggaauaacu

SEQ ID NO: 1961947 - RNA, 19 nt, Homo sapiens
  misc_RNA (1)...(19): siRNA sense strand
acccagacaaucacaguuu

SEQ ID NO: 1961948 - RNA, 19 nt, Homo sapiens
  misc_RNA (1)...(19): siRNA sense strand
cccagacaaucacaguuuc

SEQ ID NO: 1961949 - RNA, 19 nt, Homo sapiens
  misc_RNA (1)...(19): siRNA sense strand
ccggaaagacaagcugaaa

SEQ ID NO: 1961950 - RNA, 19 nt, Homo sapiens
  misc_RNA (1)...(19): siRNA sense strand
ccaauucaagacugcuuau

SEQ ID NO: 1961951 - RNA, 19 nt, Homo sapiens
  misc_RNA (1)...(19): siRNA sense strand
gaaggcucuggcaaucaaa

SEQ ID NO: 1961952 - RNA, 19 nt, Homo sapiens
  misc_RNA (1)...(19): siRNA sense strand
gaacugagccugaugaaga

SEQ ID NO: 1961953 - RNA, 19 nt, Homo sapiens
  misc_RNA (1)...(19): siRNA sense strand
gauguuugcuucugaguua

SEQ ID NO: 1961954 - RNA, 19 nt, Homo sapiens
  misc_RNA (1)...(19): siRNA sense strand
gcaaagcugcugaguaaua

SEQ ID NO: 1961955 - RNA, 19 nt, Homo sapiens
  misc_RNA (1)...(19): siRNA sense strand
ccuaggaaaugauauguua

SEQ ID NO: 1961956 - RNA, 19 nt, Homo sapiens
  misc_RNA (1)...(19): siRNA sense strand
gagaggacuuccagccuua

SEQ ID NO: 1961957 - RNA, 19 nt, Homo sapiens
  misc_RNA (1)...(19): siRNA sense strand
aggcaaagcugcugaguaa

SEQ ID NO: 1961958 - RNA, 19 nt, Homo sapiens
  misc_RNA (1)...(19): siRNA sense strand
ugauugaccuaccagauua

SEQ ID NO: 1961959 - RNA, 19 nt, Homo sapiens
  misc_RNA (1)...(19): siRNA sense strand
gagauuaauuucagagaga

SEQ ID NO: 1961960 - RNA, 19 nt, Homo sapiens
  misc_RNA (1)...(19): siRNA sense strand
gagacaagauggugaagga

SEQ ID NO: 1961961 - RNA, 19 nt, Homo sapiens
  misc_RNA (1)...(19): siRNA sense strand
caacuggccuuggaaagaa

SEQ ID NO: 1961962 - RNA, 19 nt, Homo sapiens
  misc_RNA (1)...(19): siRNA sense strand
gagcaacaacgaagaauug

SEQ ID NO: 1961963 - RNA, 19 nt, Homo sapiens
  misc_RNA (1)...(19): siRNA sense strand
guagaagccuaacagaaga

SEQ ID NO: 1961964 - RNA, 19 nt, Homo sapiens
  misc_RNA (1)...(19): siRNA sense strand
gacaauccauguaaugaug

SEQ ID NO: 1961965 - RNA, 19 nt, Homo sapiens
  misc_RNA (1)...(19): siRNA sense strand
uugaagagguuaauacuga

SEQ ID NO: 1961966 - RNA, 19 nt, Homo sapiens
  misc_RNA (1)...(19): siRNA sense strand
gcuggaugcucagagauua

SEQ ID NO: 1961967 - RNA, 19 nt, Homo sapiens
  misc_RNA (1)...(19): siRNA sense strand
ggaggagucaaauggauua

SEQ ID NO: 1961968 - RNA, 19 nt, Homo sapiens
  misc_RNA (1)...(19): siRNA sense strand
gcucagagauuaauuucag

SEQ ID NO: 1961969 - RNA, 19 nt, Homo sapiens
  misc_RNA (1)...(19): siRNA sense strand
gaaguucagaccuguuuaa

SEQ ID NO: 1961970 - RNA, 19 nt, Homo sapiens
  misc_RNA (1)...(19): siRNA sense strand
ugaauuagaucccuuucug

SEQ ID NO: 1961971 - RNA, 19 nt, Homo sapiens
  misc_RNA (1)...(19): siRNA sense strand
caacaacgaagaauugaga

SEQ ID NO: 1961972 - RNA, 19 nt, Homo sapiens
  misc_RNA (1)...(19): siRNA sense strand
gaagagcaacaacgaagaa

SEQ ID NO: 1961973 - RNA, 19 nt, Homo sapiens
  misc_RNA (1)...(19): siRNA sense strand
ggaaauggagcaccuguuc

SEQ ID NO: 1961974 - RNA, 19 nt, Homo sapiens
  misc_RNA (1)...(19): siRNA sense strand
ggagucaaauggauuaaac

SEQ ID NO: 1961975 - RNA, 19 nt, Homo sapiens
  misc_RNA (1)...(19): siRNA sense strand
ucaugaggcugaagacuug

SEQ ID NO: 1961976 - RNA, 19 nt, Homo sapiens
  misc_RNA (1)...(19): siRNA sense strand
ggagaauaaugaacaugau

SEQ ID NO: 1961977 - RNA, 19 nt, Homo sapiens
  misc_RNA (1)...(19): siRNA sense strand
ugucacuucuacugaauua

SEQ ID NO: 1961978 - RNA, 19 nt, Homo sapiens
  misc_RNA (1)...(19): siRNA sense strand
gaugaagagucaggaaaug

SEQ ID NO: 1961979 - RNA, 19 nt, Homo sapiens
  misc_RNA (1)...(19): siRNA sense strand
uugaauaccugggaaguaa

SEQ ID NO: 1961980 - RNA, 19 nt, Homo sapiens
  misc_RNA (1)...(19): siRNA sense strand
caaauggauuaaacgaaga

SEQ ID NO: 1961981 - RNA, 19 nt, Homo sapiens
  misc_RNA (1)...(19): siRNA sense strand
cugacaaacuuaucugaaa

SEQ ID NO: 1961982 - RNA, 19 nt, Homo sapiens
  misc_RNA (1)...(19): siRNA sense strand
caaagcugcugaguaauag

SEQ ID NO: 1961983 - RNA, 19 nt, Homo sapiens
  misc_RNA (1)...(19): siRNA sense strand
caagcuggaugcucagaga

SEQ ID NO: 1961984 - RNA, 19 nt, Homo sapiens
  misc_RNA (1)...(19): siRNA sense strand
gcuacauccagaaauauua

SEQ ID NO: 1961985 - RNA, 19 nt, Homo sapiens
  misc_RNA (1)...(19): siRNA sense strand
cgaagaauugagagaaaua

SEQ ID NO: 1961986 - RNA, 19 nt, Homo sapiens
  misc_RNA (1)...(19): siRNA sense strand
ugagagaaauaaacaacug

SEQ ID NO: 1961987 - RNA, 19 nt, Homo sapiens
  misc_RNA (1)...(19): siRNA sense strand
gccaauacuuuaaaugaag

SEQ ID NO: 1961988 - RNA, 19 nt, Homo sapiens
  misc_RNA (1)...(19): siRNA sense strand
cgacuugaucucccuauuu

SEQ ID NO: 1961989 - RNA, 19 nt, Homo sapiens
  misc_RNA (1)...(19): siRNA sense strand
gaaagugagauguuugcuu

SEQ ID NO: 1961990 - RNA, 19 nt, Homo sapiens
  misc_RNA (1)...(19): siRNA sense strand
uuagaucccuuucugacaa

SEQ ID NO: 1961991 - RNA, 19 nt, Homo sapiens
  misc_RNA (1)...(19): siRNA sense strand
caacgaagaauugagagaa

SEQ ID NO: 1961992 - RNA, 19 nt, Homo sapiens
  misc_RNA (1)...(19): siRNA sense strand
auaaacaacuggccuugga

SEQ ID NO: 1961993 - RNA, 19 nt, Homo sapiens
  misc_RNA (1)...(19): siRNA sense strand
gaauuagaucccuuucuga

SEQ ID NO: 1961994 - RNA, 19 nt, Homo sapiens
  misc_RNA (1)...(19): siRNA sense strand
ugacaaacuuaucugaaag

SEQ ID NO: 1961995 - RNA, 19 nt, Homo sapiens
  misc_RNA (1)...(19): siRNA sense strand
gaugucacuucuacugaau

SEQ ID NO: 1961996 - RNA, 19 nt, Homo sapiens
  misc_RNA (1)...(19): siRNA sense strand
ugaagaugcuaaucagaca

SEQ ID NO: 1961997 - RNA, 19 nt, Homo sapiens
  misc_RNA (1)...(19): siRNA sense strand
ggacaauccauguaaugau

SEQ ID NO: 1961998 - RNA, 19 nt, Homo sapiens
  misc_RNA (1)...(19): siRNA sense strand
uggagcaccuguuccugua

SEQ ID NO: 1961999 - RNA, 19 nt, Homo sapiens
  misc_RNA (1)...(19): siRNA sense strand
gugauugaccuaccagauu

SEQ ID NO: 1962000 - RNA, 19 nt, Homo sapiens
  misc_RNA (1)...(19): siRNA sense strand
gaaguugcggagaauaaug

SEQ ID NO: 1962001 - RNA, 19 nt, Homo sapiens
  misc_RNA (1)...(19): siRNA sense strand
gaugcucagagauuaauuu

SEQ ID NO: 1962002 - RNA, 19 nt, Homo sapiens
  misc_RNA (1)...(19): siRNA sense strand
ggaaguucagaccuguuua

SEQ ID NO: 1962003 - RNA, 19 nt, Homo sapiens
  misc_RNA (1)...(19): siRNA sense strand
ugaugucacuucuacugaa

SEQ ID NO: 1962004 - RNA, 19 nt, Homo sapiens
  misc_RNA (1)...(19): siRNA sense strand
gagaauaaugaacaugaug

SEQ ID NO: 1962005 - RNA, 19 nt, Homo sapiens
  misc_RNA (1)...(19): siRNA sense strand
gacuugaucucccuauuuu

SEQ ID NO: 1962006 - RNA, 19 nt, Homo sapiens
  misc_RNA (1)...(19): siRNA sense strand
aaagaaauauacccaagcu

SEQ ID NO: 1962007 - RNA, 19 nt, Homo sapiens
  misc_RNA (1)...(19): siRNA sense strand
acacacgguugaagagguu

SEQ ID NO: 1962008 - RNA, 19 nt, Homo sapiens
  misc_RNA (1)...(19): siRNA sense strand
acaggagaauggcgugauu

SEQ ID NO: 1962009 - RNA, 19 nt, Homo sapiens
  misc_RNA (1)...(19): siRNA sense strand
gugagauguuugcuucuga

SEQ ID NO: 1962010 - RNA, 19 nt, Homo sapiens
  misc_RNA (1)...(19): siRNA sense strand
acgaagacauucuggacaa

SEQ ID NO: 1962011 - RNA, 19 nt, Homo sapiens
  misc_RNA (1)...(19): siRNA sense strand
ugaaggaacugagccugau

SEQ ID NO: 1962012 - RNA, 19 nt, Homo sapiens
  misc_RNA (1)...(19): siRNA sense strand
aacgaagaauugagagaaa

SEQ ID NO: 1962013 - RNA, 19 nt, Homo sapiens
  misc_RNA (1)...(19): siRNA sense strand
gaguuaaguagaagccuaa

SEQ ID NO: 1962014 - RNA, 19 nt, Homo sapiens
  misc_RNA (1)...(19): siRNA sense strand
gaagagguuaauacugaug

SEQ ID NO: 1962015 - RNA, 19 nt, Homo sapiens
  misc_RNA (1)...(19): siRNA sense strand
gguuaauacugaugaggau

SEQ ID NO: 1962016 - RNA, 19 nt, Homo sapiens
  misc_RNA (1)...(19): siRNA sense strand
ccuccaaagagaacaguua

SEQ ID NO: 1962017 - RNA, 19 nt, Homo sapiens
  misc_RNA (1)...(19): siRNA sense strand
gcauguagaagaugaaacu

SEQ ID NO: 1962018 - RNA, 19 nt, Homo sapiens
  misc_RNA (1)...(19): siRNA sense strand
uggauuaaacgaagacauu

SEQ ID NO: 1962019 - RNA, 19 nt, Homo sapiens
  misc_RNA (1)...(19): siRNA sense strand
gggcacacacgguugaaga

SEQ ID NO: 1962020 - RNA, 19 nt, Homo sapiens
  misc_RNA (1)...(19): siRNA sense strand
aaacaacuggccuuggaaa

SEQ ID NO: 1962021 - RNA, 19 nt, Homo sapiens
  misc_RNA (1)...(19): siRNA sense strand
ggaaagaaggcaggcaaag

SEQ ID NO: 1962022 - RNA, 19 nt, Homo sapiens
  misc_RNA (1)...(19): siRNA sense strand
gaaagaaggcaggcaaagc

SEQ ID NO: 1962023 - RNA, 19 nt, Homo sapiens
  misc_RNA (1)...(19): siRNA sense strand
cggagaauaaugaacauga

SEQ ID NO: 1962024 - RNA, 19 nt, Homo sapiens
  misc_RNA (1)...(19): siRNA sense strand
ccuuaaggcauguauuuga

SEQ ID NO: 1962025 - RNA, 19 nt, Homo sapiens
  misc_RNA (1)...(19): siRNA sense strand
gaagacauucuggacaauc

SEQ ID NO: 1962026 - RNA, 19 nt, Homo sapiens
  misc_RNA (1)...(19): siRNA sense strand
gucagacccuaggaaauga

SEQ ID NO: 1962027 - RNA, 19 nt, Homo sapiens
  misc_RNA (1)...(19): siRNA sense strand
uagaucccuuucugacaaa

SEQ ID NO: 1962028 - RNA, 19 nt, Homo sapiens
  misc_RNA (1)...(19): siRNA sense strand
gaagacuugaagaugcuaa

SEQ ID NO: 1962029 - RNA, 19 nt, Homo sapiens
  misc_RNA (1)...(19): siRNA sense strand
ccaaagagaacaguuaaaa

SEQ ID NO: 1962030 - RNA, 19 nt, Homo sapiens
  misc_RNA (1)...(19): siRNA sense strand
cuuaaggcauguauuugau

SEQ ID NO: 1962031 - RNA, 19 nt, Homo sapiens
  misc_RNA (1)...(19): siRNA sense strand
aaacgaauucgacuugauc

SEQ ID NO: 1962032 - RNA, 19 nt, Homo sapiens
  misc_RNA (1)...(19): siRNA sense strand
cgaagacauucuggacaau

SEQ ID NO: 1962033 - RNA, 19 nt, Homo sapiens
  misc_RNA (1)...(19): siRNA sense strand
gaaggaacugagccugaug

SEQ ID NO: 1962034 - RNA, 19 nt, Homo sapiens
  misc_RNA (1)...(19): siRNA sense strand
gaugaaguugcggagaaua

SEQ ID NO: 1962035 - RNA, 19 nt, Homo sapiens
  misc_RNA (1)...(19): siRNA sense strand
ugaagagguuaauacugau

SEQ ID NO: 1962036 - RNA, 19 nt, Homo sapiens
  misc_RNA (1)...(19): siRNA sense strand
gagcauguagaagaugaaa

SEQ ID NO: 1962037 - RNA, 19 nt, Homo sapiens
  misc_RNA (1)...(19): siRNA sense strand
ugaagagucaggaaaugga

SEQ ID NO: 1962038 - RNA, 19 nt, Homo sapiens
  misc_RNA (1)...(19): siRNA sense strand
uaaaugaagaggaaacacu

SEQ ID NO: 1962039 - RNA, 19 nt, Homo sapiens
  misc_RNA (1)...(19): siRNA sense strand
ggauuaaacgaagacauuc

SEQ ID NO: 1962040 - RNA, 19 nt, Homo sapiens
  misc_RNA (1)...(19): siRNA sense strand
aguagaagccuaacagaag

SEQ ID NO: 1962041 - RNA, 19 nt, Homo sapiens
  misc_RNA (1)...(19): siRNA sense strand
uaaguagaagccuaacaga

SEQ ID NO: 1962042 - RNA, 19 nt, Homo sapiens
  misc_RNA (1)...(19): siRNA sense strand
uaaaggucaugaggcugaa

SEQ ID NO: 1962043 - RNA, 19 nt, Homo sapiens
  misc_RNA (1)...(19): siRNA sense strand
cagauuaugagcauguaga

SEQ ID NO: 1962044 - RNA, 19 nt, Homo sapiens
  misc_RNA (1)...(19): siRNA sense strand
gcuagaaccacaggagaau

SEQ ID NO: 1962045 - RNA, 19 nt, Homo sapiens
  misc_RNA (1)...(19): siRNA sense strand
gaauggcgugauugaccua

SEQ ID NO: 1962046 - RNA, 19 nt, Homo sapiens
  misc_RNA (1)...(19): siRNA sense strand
augaugaaguugcggagaa

SEQ ID NO: 1962047 - RNA, 19 nt, Homo sapiens
  misc_RNA (1)...(19): siRNA sense strand
guugaauaccugggaagua

SEQ ID NO: 1962048 - RNA, 19 nt, Homo sapiens
  misc_RNA (1)...(19): siRNA sense strand
acaacuggccuuggaaaga

SEQ ID NO: 1962049 - RNA, 19 nt, Homo sapiens
  misc_RNA (1)...(19): siRNA sense strand
agucagacccuaggaaaug

SEQ ID NO: 1962050 - RNA, 19 nt, Homo sapiens
  misc_RNA (1)...(19): siRNA sense strand
caggcaaagcugcugagua

SEQ ID NO: 1962051 - RNA, 19 nt, Homo sapiens
  misc_RNA (1)...(19): siRNA sense strand
aaggaggagucaaauggau

SEQ ID NO: 1962052 - RNA, 19 nt, Homo sapiens
  misc_RNA (1)...(19): siRNA sense strand
ccaucaaccugaaccauua

SEQ ID NO: 1962053 - RNA, 19 nt, Homo sapiens
  misc_RNA (1)...(19): siRNA sense strand
gaagaaagcagcagagacu

SEQ ID NO: 1962054 - RNA, 19 nt, Homo sapiens
  misc_RNA (1)...(19): siRNA sense strand
caacgcagccaccaucuug

SEQ ID NO: 1962055 - RNA, 19 nt, Homo sapiens
  misc_RNA (1)...(19): siRNA sense strand
gaaaagcaguggcgacuca

SEQ ID NO: 1962056 - RNA, 19 nt, Homo sapiens
  misc_RNA (1)...(19): siRNA sense strand
ucacuguggucaucaaugu

SEQ ID NO: 1962057 - RNA, 19 nt, Homo sapiens
  misc_RNA (1)...(19): siRNA sense strand
gauggaaucagcaagagaa

SEQ ID NO: 1962058 - RNA, 19 nt, Homo sapiens
  misc_RNA (1)...(19): siRNA sense strand
ggacguggcccuguucaug

SEQ ID NO: 1962059 - RNA, 19 nt, Homo sapiens
  misc_RNA (1)...(19): siRNA sense strand
gagaaaacaucgaccuuca

SEQ ID NO: 1962060 - RNA, 19 nt, Homo sapiens
  misc_RNA (1)...(19): siRNA sense strand
gaccauccucucacuacua

SEQ ID NO: 1962061 - RNA, 19 nt, Homo sapiens
  misc_RNA (1)...(19): siRNA sense strand
cgagauggaaucagcaaga

SEQ ID NO: 1962062 - RNA, 19 nt, Homo sapiens
  misc_RNA (1)...(19): siRNA sense strand
gccagggccucaaggaauc

SEQ ID NO: 1962063 - RNA, 19 nt, Homo sapiens
  misc_RNA (1)...(19): siRNA sense strand
gagauggaaucagcaagag

SEQ ID NO: 1962064 - RNA, 19 nt, Homo sapiens
  misc_RNA (1)...(19): siRNA sense strand
ggaccauccucucacuacu

SEQ ID NO: 1962065 - RNA, 19 nt, Homo sapiens
  misc_RNA (1)...(19): siRNA sense strand
uugcacggcugaaccugaa

SEQ ID NO: 1962066 - RNA, 19 nt, Homo sapiens
  misc_RNA (1)...(19): siRNA sense strand
gcacggcugaaccugaaug

SEQ ID NO: 1962067 - RNA, 19 nt, Homo sapiens
  misc_RNA (1)...(19): siRNA sense strand
cgacucaaccagcucaaca

SEQ ID NO: 1962068 - RNA, 19 nt, Homo sapiens
  misc_RNA (1)...(19): siRNA sense strand
aaacaucgaccuucaaccu

SEQ ID NO: 1962069 - RNA, 19 nt, Homo sapiens
  misc_RNA (1)...(19): siRNA sense strand
ugaaugagguagaaaagca

SEQ ID NO: 1962070 - RNA, 19 nt, Homo sapiens
  misc_RNA (1)...(19): siRNA sense strand
gacguggcccuguucaugu

SEQ ID NO: 1962071 - RNA, 19 nt, Homo sapiens
  misc_RNA (1)...(19): siRNA sense strand
agaaagcagcagagacuca

SEQ ID NO: 1962072 - RNA, 19 nt, Homo sapiens
  misc_RNA (1)...(19): siRNA sense strand
gccagcccaucaaccugaa

SEQ ID NO: 1962073 - RNA, 19 nt, Homo sapiens
  misc_RNA (1)...(19): siRNA sense strand
gagggcagcgagauggaau

SEQ ID NO: 1962074 - RNA, 19 nt, Homo sapiens
  misc_RNA (1)...(19): siRNA sense strand
cccaucaaccugaaccauu

SEQ ID NO: 1962075 - RNA, 19 nt, Homo sapiens
  misc_RNA (1)...(19): siRNA sense strand
caucaaaggcuucccaaga

SEQ ID NO: 1962076 - RNA, 19 nt, Homo sapiens
  misc_RNA (1)...(19): siRNA sense strand
ggucggcccuguucacucu

SEQ ID NO: 1962077 - RNA, 19 nt, Homo sapiens
  misc_RNA (1)...(19): siRNA sense strand
caagaggcaaggagaagug

SEQ ID NO: 1962078 - RNA, 19 nt, Homo sapiens
  misc_RNA (1)...(19): siRNA sense strand
gcaagaggcaaggagaagu

SEQ ID NO: 1962079 - RNA, 19 nt, Homo sapiens
  misc_RNA (1)...(19): siRNA sense strand
gcgccuggacuccuggaaa

SEQ ID NO: 1962080 - RNA, 19 nt, Homo sapiens
  misc_RNA (1)...(19): siRNA sense strand
aucaaaggcuucccaagag

SEQ ID NO: 1962081 - RNA, 19 nt, Homo sapiens
  misc_RNA (1)...(19): siRNA sense strand
cgccuggacuccuggaaag

SEQ ID NO: 1962082 - RNA, 19 nt, Homo sapiens
  misc_RNA (1)...(19): siRNA sense strand
gaacaggccgcacacaaca

SEQ ID NO: 1962083 - RNA, 19 nt, Homo sapiens
  misc_RNA (1)...(19): siRNA sense strand
gcaacacgguggccaucaa

SEQ ID NO: 1962084 - RNA, 19 nt, Homo sapiens
  misc_RNA (1)...(19): siRNA sense strand
gugucaaggugcccauuua

SEQ ID NO: 1962085 - RNA, 19 nt, Homo sapiens
  misc_RNA (1)...(19): siRNA sense strand
gcgacgaguucaucuucua

SEQ ID NO: 1962086 - RNA, 19 nt, Homo sapiens
  misc_RNA (1)...(19): siRNA sense strand
ggacacagacuccgacauc

SEQ ID NO: 1962087 - RNA, 19 nt, Homo sapiens
  misc_RNA (1)...(19): siRNA sense strand
ucaaggugcccauuuauga

SEQ ID NO: 1962088 - RNA, 19 nt, Homo sapiens
  misc_RNA (1)...(19): siRNA sense strand
gugcaaacgucaucaucuu

SEQ ID NO: 1962089 - RNA, 19 nt, Homo sapiens
  misc_RNA (1)...(19): siRNA sense strand
caagcaagcguaccaucua

SEQ ID NO: 1962090 - RNA, 19 nt, Homo sapiens
  misc_RNA (1)...(19): siRNA sense strand
gaagagcacgccgcaggua

SEQ ID NO: 1962091 - RNA, 19 nt, Homo sapiens
  misc_RNA (1)...(19): siRNA sense strand
gaucaccgguguguccauu

SEQ ID NO: 1962092 - RNA, 19 nt, Homo sapiens
  misc_RNA (1)...(19): siRNA sense strand
ucuacaaggugcugacuga

SEQ ID NO: 1962093 - RNA, 19 nt, Homo sapiens
  misc_RNA (1)...(19): siRNA sense strand
ugacuucgaccucaucauu

SEQ ID NO: 1962094 - RNA, 19 nt, Homo sapiens
  misc_RNA (1)...(19): siRNA sense strand
caucgagggugucaucaag

SEQ ID NO: 1962095 - RNA, 19 nt, Homo sapiens
  misc_RNA (1)...(19): siRNA sense strand
gaacacggcacgcaaucca

SEQ ID NO: 1962096 - RNA, 19 nt, Homo sapiens
  misc_RNA (1)...(19): siRNA sense strand
caacuucgaccacccagau

SEQ ID NO: 1962097 - RNA, 19 nt, Homo sapiens
  misc_RNA (1)...(19): siRNA sense strand
ggccuuugcugacaagaca

SEQ ID NO: 1962098 - RNA, 19 nt, Homo sapiens
  misc_RNA (1)...(19): siRNA sense strand
acacaacaacuucaacuuc

SEQ ID NO: 1962099 - RNA, 19 nt, Homo sapiens
  misc_RNA (1)...(19): siRNA sense strand
ggacaugaagaucuuugug

SEQ ID NO: 1962100 - RNA, 19 nt, Homo sapiens
  misc_RNA (1)...(19): siRNA sense strand
ggaacaggccgcacacaac

SEQ ID NO: 1962101 - RNA, 19 nt, Homo sapiens
  misc_RNA (1)...(19): siRNA sense strand
caagcaguacaacaaguuu

SEQ ID NO: 1962102 - RNA, 19 nt, Homo sapiens
  misc_RNA (1)...(19): siRNA sense strand
gcacacaacaacuucaacu

SEQ ID NO: 1962103 - RNA, 19 nt, Homo sapiens
  misc_RNA (1)...(19): siRNA sense strand
gaucaucgaggcccuggau

SEQ ID NO: 1962104 - RNA, 19 nt, Homo sapiens
  misc_RNA (1)...(19): siRNA sense strand
uggacaagcgggucaauga

SEQ ID NO: 1962105 - RNA, 19 nt, Homo sapiens
  misc_RNA (1)...(19): siRNA sense strand
cgacgugccugaggacaag

SEQ ID NO: 1962106 - RNA, 19 nt, Homo sapiens
  misc_RNA (1)...(19): siRNA sense strand
ucaagcaguacaacaaguu

SEQ ID NO: 1962107 - RNA, 19 nt, Homo sapiens
  misc_RNA (1)...(19): siRNA sense strand
gcugcgcgcugugugcaaa

SEQ ID NO: 1962108 - RNA, 19 nt, Homo sapiens
  misc_RNA (1)...(19): siRNA sense strand
gacuucgaccucaucauuu

SEQ ID NO: 1962109 - RNA, 19 nt, Homo sapiens
  misc_RNA (1)...(19): siRNA sense strand
cucaguggccuaugcauuu

SEQ ID NO: 1962110 - RNA, 19 nt, Homo sapiens
  misc_RNA (1)...(19): siRNA sense strand
cgaccacccagaugccuuu

SEQ ID NO: 1962111 - RNA, 19 nt, Homo sapiens
  misc_RNA (1)...(19): siRNA sense strand
ucaucaagcaguacaacaa

SEQ ID NO: 1962112 - RNA, 19 nt, Homo sapiens
  misc_RNA (1)...(19): siRNA sense strand
gcagugacgaggaggaagu

SEQ ID NO: 1962113 - RNA, 19 nt, Homo sapiens
  misc_RNA (1)...(19): siRNA sense strand
acaacaacuucaacuucga

SEQ ID NO: 1962114 - RNA, 19 nt, Homo sapiens
  misc_RNA (1)...(19): siRNA sense strand
ucaguggccuaugcauuuc

SEQ ID NO: 1962115 - RNA, 19 nt, Homo sapiens
  misc_RNA (1)...(19): siRNA sense strand
gaagaaggacuggaaaaca

SEQ ID NO: 1962116 - RNA, 19 nt, Homo sapiens
  misc_RNA (1)...(19): siRNA sense strand
ccacccagaugccuuugac

SEQ ID NO: 1962117 - RNA, 19 nt, Homo sapiens
  misc_RNA (1)...(19): siRNA sense strand
acacggcacgcaauccaaa

SEQ ID NO: 1962118 - RNA, 19 nt, Homo sapiens
  misc_RNA (1)...(19): siRNA sense strand
cagaugccuuugacuucga

SEQ ID NO: 1962119 - RNA, 19 nt, Homo sapiens
  misc_RNA (1)...(19): siRNA sense strand
uguuggagcuccuggacau

SEQ ID NO: 1962120 - RNA, 19 nt, Homo sapiens
  misc_RNA (1)...(19): siRNA sense strand
ucaccgguguguccauucu

SEQ ID NO: 1962121 - RNA, 19 nt, Homo sapiens
  misc_RNA (1)...(19): siRNA sense strand
ucauuuccacccucaagaa

SEQ ID NO: 1962122 - RNA, 19 nt, Homo sapiens
  misc_RNA (1)...(19): siRNA sense strand
ggcaugcacaccaucauca

SEQ ID NO: 1962123 - RNA, 19 nt, Homo sapiens
  misc_RNA (1)...(19): siRNA sense strand
aagcaagcguaccaucuac

SEQ ID NO: 1962124 - RNA, 19 nt, Homo sapiens
  misc_RNA (1)...(19): siRNA sense strand
gccggaagaaggacuggaa

SEQ ID NO: 1962125 - RNA, 19 nt, Homo sapiens
  misc_RNA (1)...(19): siRNA sense strand
ccauggacuccuucuacaa

SEQ ID NO: 1962126 - RNA, 19 nt, Homo sapiens
  misc_RNA (1)...(19): siRNA sense strand
caucaagcaguacaacaag

SEQ ID NO: 1962127 - RNA, 19 nt, Homo sapiens
  misc_RNA (1)...(19): siRNA sense strand
cauggacuccuucuacaag

SEQ ID NO: 1962128 - RNA, 19 nt, Homo sapiens
  misc_RNA (1)...(19): siRNA sense strand
ucgagggugucaucaagca

SEQ ID NO: 1962129 - RNA, 19 nt, Homo sapiens
  misc_RNA (1)...(19): siRNA sense strand
gucaaggugcccauuuaug

SEQ ID NO: 1962130 - RNA, 19 nt, Homo sapiens
  misc_RNA (1)...(19): siRNA sense strand
acuucgaccucaucauuuc

SEQ ID NO: 1962131 - RNA, 19 nt, Homo sapiens
  misc_RNA (1)...(19): siRNA sense strand
gaagaggucugcauuacua

SEQ ID NO: 1962132 - RNA, 19 nt, Homo sapiens
  misc_RNA (1)...(19): siRNA sense strand
gaaauggggugauagauua

SEQ ID NO: 1962133 - RNA, 19 nt, Homo sapiens
  misc_RNA (1)...(19): siRNA sense strand
uuauaagggugacuuguua

SEQ ID NO: 1962134 - RNA, 19 nt, Homo sapiens
  misc_RNA (1)...(19): siRNA sense strand
ggaagaagauaaaccacau

SEQ ID NO: 1962135 - RNA, 19 nt, Homo sapiens
  misc_RNA (1)...(19): siRNA sense strand
uaaaccacauuauggauug

SEQ ID NO: 1962136 - RNA, 19 nt, Homo sapiens
  misc_RNA (1)...(19): siRNA sense strand
gaaacuuccugauggauac

SEQ ID NO: 1962137 - RNA, 19 nt, Homo sapiens
  misc_RNA (1)...(19): siRNA sense strand
uagaugauaucgucaaugu

SEQ ID NO: 1962138 - RNA, 19 nt, Homo sapiens
  misc_RNA (1)...(19): siRNA sense strand
ccaggcaucucaaacauca

SEQ ID NO: 1962139 - RNA, 19 nt, Homo sapiens
  misc_RNA (1)...(19): siRNA sense strand
ccauagccauuguuucuga

SEQ ID NO: 1962140 - RNA, 19 nt, Homo sapiens
  misc_RNA (1)...(19): siRNA sense strand
caccuuggauucugugaaa

SEQ ID NO: 1962141 - RNA, 19 nt, Homo sapiens
  misc_RNA (1)...(19): siRNA sense strand
auacguaccucaaguagau

SEQ ID NO: 1962142 - RNA, 19 nt, Homo sapiens
  misc_RNA (1)...(19): siRNA sense strand
caacgugccucuaaaaguu

SEQ ID NO: 1962143 - RNA, 19 nt, Homo sapiens
  misc_RNA (1)...(19): siRNA sense strand
uagcguacauggaagaaau

SEQ ID NO: 1962144 - RNA, 19 nt, Homo sapiens
  misc_RNA (1)...(19): siRNA sense strand
gauuauggcaugauugaug

SEQ ID NO: 1962145 - RNA, 19 nt, Homo sapiens
  misc_RNA (1)...(19): siRNA sense strand
ggagagcgauuucuaucac

SEQ ID NO: 1962146 - RNA, 19 nt, Homo sapiens
  misc_RNA (1)...(19): siRNA sense strand
caaucaagguggauguugu

SEQ ID NO: 1962147 - RNA, 19 nt, Homo sapiens
  misc_RNA (1)...(19): siRNA sense strand
gaagaagauaaaccacauu

SEQ ID NO: 1962148 - RNA, 19 nt, Homo sapiens
  misc_RNA (1)...(19): siRNA sense strand
gcauucaguucugcuuuau

SEQ ID NO: 1962149 - RNA, 19 nt, Homo sapiens
  misc_RNA (1)...(19): siRNA sense strand
cauuauggauugagagcaa

SEQ ID NO: 1962150 - RNA, 19 nt, Homo sapiens
  misc_RNA (1)...(19): siRNA sense strand
ggauguguuacuucuauaa

SEQ ID NO: 1962151 - RNA, 19 nt, Homo sapiens
  misc_RNA (1)...(19): siRNA sense strand
ugaaacuuccugauggaua

SEQ ID NO: 1962152 - RNA, 19 nt, Homo sapiens
  misc_RNA (1)...(19): siRNA sense strand
uuaaugugguuguggaaga

SEQ ID NO: 1962153 - RNA, 19 nt, Homo sapiens
  misc_RNA (1)...(19): siRNA sense strand
gugaagcccauccguugua

SEQ ID NO: 1962154 - RNA, 19 nt, Homo sapiens
  misc_RNA (1)...(19): siRNA sense strand
acaaguuucuguggugauu

SEQ ID NO: 1962155 - RNA, 19 nt, Homo sapiens
  misc_RNA (1)...(19): siRNA sense strand
uaaugugguuguggaagaa

SEQ ID NO: 1962156 - RNA, 19 nt, Homo sapiens
  misc_RNA (1)...(19): siRNA sense strand
cccauccguuguauucaua

SEQ ID NO: 1962157 - RNA, 19 nt, Homo sapiens
  misc_RNA (1)...(19): siRNA sense strand
gagccaggcaucucaaaca

SEQ ID NO: 1962158 - RNA, 19 nt, Homo sapiens
  misc_RNA (1)...(19): siRNA sense strand
gugauuauggcaugauuga

SEQ ID NO: 1962159 - RNA, 19 nt, Homo sapiens
  misc_RNA (1)...(19): siRNA sense strand
gcaaucaagguggauguug

SEQ ID NO: 1962160 - RNA, 19 nt, Homo sapiens
  misc_RNA (1)...(19): siRNA sense strand
cggaagaggucugcauuac

SEQ ID NO: 1962161 - RNA, 19 nt, Homo sapiens
  misc_RNA (1)...(19): siRNA sense strand
gaaccagaguuuuaauugg

SEQ ID NO: 1962162 - RNA, 19 nt, Homo sapiens
  misc_RNA (1)...(19): siRNA sense strand
gaagaaauggggugauaga

SEQ ID NO: 1962163 - RNA, 19 nt, Homo sapiens
  misc_RNA (1)...(19): siRNA sense strand
guuagaaguugaauauucc

SEQ ID NO: 1962164 - RNA, 19 nt, Homo sapiens
  misc_RNA (1)...(19): siRNA sense strand
gcccauccguuguauucau

SEQ ID NO: 1962165 - RNA, 19 nt, Homo sapiens
  misc_RNA (1)...(19): siRNA sense strand
ggaaccagaguuuuaauug

SEQ ID NO: 1962166 - RNA, 19 nt, Homo sapiens
  misc_RNA (1)...(19): siRNA sense strand
guaccucaaguagaugaua

SEQ ID NO: 1962167 - RNA, 19 nt, Homo sapiens
  misc_RNA (1)...(19): siRNA sense strand
ggaagaggucugcauuacu

SEQ ID NO: 1962168 - RNA, 19 nt, Homo sapiens
  misc_RNA (1)...(19): siRNA sense strand
gccauuguuucugaagauu

SEQ ID NO: 1962169 - RNA, 19 nt, Homo sapiens
  misc_RNA (1)...(19): siRNA sense strand
uuggauguguuacuucuau

SEQ ID NO: 1962170 - RNA, 19 nt, Homo sapiens
  misc_RNA (1)...(19): siRNA sense strand
auuauggcaugauugauga

SEQ ID NO: 1962171 - RNA, 19 nt, Homo sapiens
  misc_RNA (1)...(19): siRNA sense strand
uaccucaaguagaugauau

SEQ ID NO: 1962172 - RNA, 19 nt, Homo sapiens
  misc_RNA (1)...(19): siRNA sense strand
cugaagauuuugugccuua

SEQ ID NO: 1962173 - RNA, 19 nt, Homo sapiens
  misc_RNA (1)...(19): siRNA sense strand
aagggugacuuguuagaag

SEQ ID NO: 1962174 - RNA, 19 nt, Homo sapiens
  misc_RNA (1)...(19): siRNA sense strand
cccagugcauaaaucguaa

SEQ ID NO: 1962175 - RNA, 19 nt, Homo sapiens
  misc_RNA (1)...(19): siRNA sense strand
ggauacguaccucaaguag

SEQ ID NO: 1962176 - RNA, 19 nt, Homo sapiens
  misc_RNA (1)...(19): siRNA sense strand
ugugaaacuuccugaugga

SEQ ID NO: 1962177 - RNA, 19 nt, Homo sapiens
  misc_RNA (1)...(19): siRNA sense strand
gguuguggaagaagauaaa

SEQ ID NO: 1962178 - RNA, 19 nt, Homo sapiens
  misc_RNA (1)...(19): siRNA sense strand
uaucgucaauguggucaug

SEQ ID NO: 1962179 - RNA, 19 nt, Homo sapiens
  misc_RNA (1)...(19): siRNA sense strand
gauacguaccucaaguaga

SEQ ID NO: 1962180 - RNA, 19 nt, Homo sapiens
  misc_RNA (1)...(19): siRNA sense strand
ugaagcccauccguuguau

SEQ ID NO: 1962181 - RNA, 19 nt, Homo sapiens
  misc_RNA (1)...(19): siRNA sense strand
uggauguguuacuucuaua

SEQ ID NO: 1962182 - RNA, 19 nt, Homo sapiens
  misc_RNA (1)...(19): siRNA sense strand
cauagccauuguuucugaa

SEQ ID NO: 1962183 - RNA, 19 nt, Homo sapiens
  misc_RNA (1)...(19): siRNA sense strand
gacuugcuuuggccuucua

SEQ ID NO: 1962184 - RNA, 19 nt, Homo sapiens
  misc_RNA (1)...(19): siRNA sense strand
ucaaggcaacuucugugaa

SEQ ID NO: 1962185 - RNA, 19 nt, Homo sapiens
  misc_RNA (1)...(19): siRNA sense strand
gagcaaucaagguggaugu

SEQ ID NO: 1962186 - RNA, 19 nt, Homo sapiens
  misc_RNA (1)...(19): siRNA sense strand
caguucugcuuuauuugga

SEQ ID NO: 1962187 - RNA, 19 nt, Homo sapiens
  misc_RNA (1)...(19): siRNA sense strand
aaguuucuguggugauuau

SEQ ID NO: 1962188 - RNA, 19 nt, Homo sapiens
  misc_RNA (1)...(19): siRNA sense strand
uaagggugacuuguuagaa

SEQ ID NO: 1962189 - RNA, 19 nt, Homo sapiens
  misc_RNA (1)...(19): siRNA sense strand
gaagauuuugugccuuaua

SEQ ID NO: 1962190 - RNA, 19 nt, Homo sapiens
  misc_RNA (1)...(19): siRNA sense strand
uggaagaaauggggugaua

SEQ ID NO: 1962191 - RNA, 19 nt, Homo sapiens
  misc_RNA (1)...(19): siRNA sense strand
guggagagcauucaguucu

SEQ ID NO: 1962192 - RNA, 19 nt, Homo sapiens
  misc_RNA (1)...(19): siRNA sense strand
uagccauuguuucugaaga

SEQ ID NO: 1962193 - RNA, 19 nt, Homo sapiens
  misc_RNA (1)...(19): siRNA sense strand
caaguuucuguggugauua

SEQ ID NO: 1962194 - RNA, 19 nt, Homo sapiens
  misc_RNA (1)...(19): siRNA sense strand
cuuauaagggugacuuguu

SEQ ID NO: 1962195 - RNA, 19 nt, Homo sapiens
  misc_RNA (1)...(19): siRNA sense strand
aaaccacauuauggauuga

SEQ ID NO: 1962196 - RNA, 19 nt, Homo sapiens
  misc_RNA (1)...(19): siRNA sense strand
uggauacguaccucaagua

SEQ ID NO: 1962197 - RNA, 19 nt, Homo sapiens
  misc_RNA (1)...(19): siRNA sense strand
ugauugaugagucgaucua

SEQ ID NO: 1962198 - RNA, 19 nt, Homo sapiens
  misc_RNA (1)...(19): siRNA sense strand
acggaagaggucugcauua

SEQ ID NO: 1962199 - RNA, 19 nt, Homo sapiens
  misc_RNA (1)...(19): siRNA sense strand
gaagcccauccguuguauu

SEQ ID NO: 1962200 - RNA, 19 nt, Homo sapiens
  misc_RNA (1)...(19): siRNA sense strand
ucaaacaucaaggcaacuu

SEQ ID NO: 1962201 - RNA, 19 nt, Homo sapiens
  misc_RNA (1)...(19): siRNA sense strand
aagcccauccguuguauuc

SEQ ID NO: 1962202 - RNA, 19 nt, Homo sapiens
  misc_RNA (1)...(19): siRNA sense strand
ccauuguuucugaagauuu

SEQ ID NO: 1962203 - RNA, 19 nt, Homo sapiens
  misc_RNA (1)...(19): siRNA sense strand
ggacaaguucggauuauuu

SEQ ID NO: 1962204 - RNA, 19 nt, Homo sapiens
  misc_RNA (1)...(19): siRNA sense strand
gggagacucuucacacauu

SEQ ID NO: 1962205 - RNA, 19 nt, Homo sapiens
  misc_RNA (1)...(19): siRNA sense strand
gaacugcucugugaaacug

SEQ ID NO: 1962206 - RNA, 19 nt, Homo sapiens
  misc_RNA (1)...(19): siRNA sense strand
ccaugaagcuaauguacaa

SEQ ID NO: 1962207 - RNA, 19 nt, Homo sapiens
  misc_RNA (1)...(19): siRNA sense strand
ugacuggccugcacccuaa

SEQ ID NO: 1962208 - RNA, 19 nt, Homo sapiens
  misc_RNA (1)...(19): siRNA sense strand
cagcugagccucuacauga

SEQ ID NO: 1962209 - RNA, 19 nt, Homo sapiens
  misc_RNA (1)...(19): siRNA sense strand
ggacaaacugggaagauug

SEQ ID NO: 1962210 - RNA, 19 nt, Homo sapiens
  misc_RNA (1)...(19): siRNA sense strand
caaggacaaguucggauua

SEQ ID NO: 1962211 - RNA, 19 nt, Homo sapiens
  misc_RNA (1)...(19): siRNA sense strand
cccaugaacugcucuguga

SEQ ID NO: 1962212 - RNA, 19 nt, Homo sapiens
  misc_RNA (1)...(19): siRNA sense strand
ugaaucucaucaacaagua

SEQ ID NO: 1962213 - RNA, 19 nt, Homo sapiens
  misc_RNA (1)...(19): siRNA sense strand
caacaucaccuucaacaac

SEQ ID NO: 1962214 - RNA, 19 nt, Homo sapiens
  misc_RNA (1)...(19): siRNA sense strand
ccaguagccuguccuucaa

SEQ ID NO: 1962215 - RNA, 19 nt, Homo sapiens
  misc_RNA (1)...(19): siRNA sense strand
gcugggcgcugucaugauc

SEQ ID NO: 1962216 - RNA, 19 nt, Homo sapiens
  misc_RNA (1)...(19): siRNA sense strand
ucaagcagcagguccuuaa

SEQ ID NO: 1962217 - RNA, 19 nt, Homo sapiens
  misc_RNA (1)...(19): siRNA sense strand
ggaacgggcugagcaaggu

SEQ ID NO: 1962218 - RNA, 19 nt, Homo sapiens
  misc_RNA (1)...(19): siRNA sense strand
gaacuucugggcaaaugug

SEQ ID NO: 1962219 - RNA, 19 nt, Homo sapiens
  misc_RNA (1)...(19): siRNA sense strand
gacaaguucggauuauuug

SEQ ID NO: 1962220 - RNA, 19 nt, Homo sapiens
  misc_RNA (1)...(19): siRNA sense strand
aaagcaacaucaccuucaa

SEQ ID NO: 1962221 - RNA, 19 nt, Homo sapiens
  misc_RNA (1)...(19): siRNA sense strand
gacaaacugggaagauuga

SEQ ID NO: 1962222 - RNA, 19 nt, Homo sapiens
  misc_RNA (1)...(19): siRNA sense strand
cggugaugauggagaauaa

SEQ ID NO: 1962223 - RNA, 19 nt, Homo sapiens
  misc_RNA (1)...(19): siRNA sense strand
ccaaggugaugcacuaugc

SEQ ID NO: 1962224 - RNA, 19 nt, Homo sapiens
  misc_RNA (1)...(19): siRNA sense strand
ggagacucuucacacauuc

SEQ ID NO: 1962225 - RNA, 19 nt, Homo sapiens
  misc_RNA (1)...(19): siRNA sense strand
cuacuucuuugacgucaug

SEQ ID NO: 1962226 - RNA, 19 nt, Homo sapiens
  misc_RNA (1)...(19): siRNA sense strand
aagguugacuucuggcauu

SEQ ID NO: 1962227 - RNA, 19 nt, Homo sapiens
  misc_RNA (1)...(19): siRNA sense strand
gaaaucugucgcaggcauu

SEQ ID NO: 1962228 - RNA, 19 nt, Homo sapiens
  misc_RNA (1)...(19): siRNA sense strand
caugaacugcucugugaaa

SEQ ID NO: 1962229 - RNA, 19 nt, Homo sapiens
  misc_RNA (1)...(19): siRNA sense strand
uggacaaacugggaagauu

SEQ ID NO: 1962230 - RNA, 19 nt, Homo sapiens
  misc_RNA (1)...(19): siRNA sense strand
guaccgcaccuuccaguuc

SEQ ID NO: 1962231 - RNA, 19 nt, Homo sapiens
  misc_RNA (1)...(19): siRNA sense strand
gauccaugaagcuaaugua

SEQ ID NO: 1962232 - RNA, 19 nt, Homo sapiens
  misc_RNA (1)...(19): siRNA sense strand
ugagcaagguugacuucug

SEQ ID NO: 1962233 - RNA, 19 nt, Homo sapiens
  misc_RNA (1)...(19): siRNA sense strand
uugcugagcucaacaacuc

SEQ ID NO: 1962234 - RNA, 19 nt, Homo sapiens
  misc_RNA (1)...(19): siRNA sense strand
aguccucgcuggaguucua

SEQ ID NO: 1962235 - RNA, 19 nt, Homo sapiens
  misc_RNA (1)...(19): siRNA sense strand
ucaaggacaaguucggauu

SEQ ID NO: 1962236 - RNA, 19 nt, Homo sapiens
  misc_RNA (1)...(19): siRNA sense strand
ugaagcuaauguacaagga

SEQ ID NO: 1962237 - RNA, 19 nt, Homo sapiens
  misc_RNA (1)...(19): siRNA sense strand
gcaacaucaccuucaacaa

SEQ ID NO: 1962238 - RNA, 19 nt, Homo sapiens
  misc_RNA (1)...(19): siRNA sense strand
gagccaagagaaaugcuau

SEQ ID NO: 1962239 - RNA, 19 nt, Homo sapiens
  misc_RNA (1)...(19): siRNA sense strand
caaauccggagccaagaga

SEQ ID NO: 1962240 - RNA, 19 nt, Homo sapiens
  misc_RNA (1)...(19): siRNA sense strand
caugaucaauggaacuucu

SEQ ID NO: 1962241 - RNA, 19 nt, Homo sapiens
  misc_RNA (1)...(19): siRNA sense strand
aacaucaccuucaacaaca

SEQ ID NO: 1962242 - RNA, 19 nt, Homo sapiens
  misc_RNA (1)...(19): siRNA sense strand
gcugagccucuacaugaaa

SEQ ID NO: 1962243 - RNA, 19 nt, Homo sapiens
  misc_RNA (1)...(19): siRNA sense strand
gccgauccaugaagcuaau

SEQ ID NO: 1962244 - RNA, 19 nt, Homo sapiens
  misc_RNA (1)...(19): siRNA sense strand
caucaugaccuuggcauuc

SEQ ID NO: 1962245 - RNA, 19 nt, Homo sapiens
  misc_RNA (1)...(19): siRNA sense strand
guacuuuccaggcauguuc

SEQ ID NO: 1962246 - RNA, 19 nt, Homo sapiens
  misc_RNA (1)...(19): siRNA sense strand
agcagcagguccuuaagaa

SEQ ID NO: 1962247 - RNA, 19 nt, Homo sapiens
  misc_RNA (1)...(19): siRNA sense strand
ugcccaaggugaugcacua

SEQ ID NO: 1962248 - RNA, 19 nt, Homo sapiens
  misc_RNA (1)...(19): siRNA sense strand
cggcggugaugauggagaa

SEQ ID NO: 1962249 - RNA, 19 nt, Homo sapiens
  misc_RNA (1)...(19): siRNA sense strand
gaugcacuaugcccaguac

SEQ ID NO: 1962250 - RNA, 19 nt, Homo sapiens
  misc_RNA (1)...(19): siRNA sense strand
gcggugaugauggagaaua

SEQ ID NO: 1962251 - RNA, 19 nt, Homo sapiens
  misc_RNA (1)...(19): siRNA sense strand
gugaaucucaucaacaagu

SEQ ID NO: 1962252 - RNA, 19 nt, Homo sapiens
  misc_RNA (1)...(19): siRNA sense strand
ggagccaagagaaaugcua

SEQ ID NO: 1962253 - RNA, 19 nt, Homo sapiens
  misc_RNA (1)...(19): siRNA sense strand
uccgaucagugcaacauga

SEQ ID NO: 1962254 - RNA, 19 nt, Homo sapiens
  misc_RNA (1)...(19): siRNA sense strand
ccuucuaucucuccgucua

SEQ ID NO: 1962255 - RNA, 19 nt, Homo sapiens
  misc_RNA (1)...(19): siRNA sense strand
gcagcugagccucuacaug

SEQ ID NO: 1962256 - RNA, 19 nt, Homo sapiens
  misc_RNA (1)...(19): siRNA sense strand
aaggacaaguucggauuau

SEQ ID NO: 1962257 - RNA, 19 nt, Homo sapiens
  misc_RNA (1)...(19): siRNA sense strand
caucuacccacccaacgaa

SEQ ID NO: 1962258 - RNA, 19 nt, Homo sapiens
  misc_RNA (1)...(19): siRNA sense strand
gaacgggcugagcaagguu

SEQ ID NO: 1962259 - RNA, 19 nt, Homo sapiens
  misc_RNA (1)...(19): siRNA sense strand
ugccgucgcucaucaagca

SEQ ID NO: 1962260 - RNA, 19 nt, Homo sapiens
  misc_RNA (1)...(19): siRNA sense strand
gcucaacaacuccgacucu

SEQ ID NO: 1962261 - RNA, 19 nt, Homo sapiens
  misc_RNA (1)...(19): siRNA sense strand
cccaguagccuguccuuca

SEQ ID NO: 1962262 - RNA, 19 nt, Homo sapiens
  misc_RNA (1)...(19): siRNA sense strand
gccucuacaugaaaucugu

SEQ ID NO: 1962263 - RNA, 19 nt, Homo sapiens
  misc_RNA (1)...(19): siRNA sense strand
gcugagcaagguugacuuc

SEQ ID NO: 1962264 - RNA, 19 nt, Homo sapiens
  misc_RNA (1)...(19): siRNA sense strand
aggacaaguucggauuauu

SEQ ID NO: 1962265 - RNA, 19 nt, Homo sapiens
  misc_RNA (1)...(19): siRNA sense strand
gcaggaagcaaaacuguag

SEQ ID NO: 1962266 - RNA, 19 nt, Homo sapiens
  misc_RNA (1)...(19): siRNA sense strand
aagcagcagguccuuaaga

SEQ ID NO: 1962267 - RNA, 19 nt, Homo sapiens
  misc_RNA (1)...(19): siRNA sense strand
gcgcugucaugaucgugau

SEQ ID NO: 1962268 - RNA, 19 nt, Homo sapiens
  misc_RNA (1)...(19): siRNA sense strand
gaggccugccgauccauga

SEQ ID NO: 1962269 - RNA, 19 nt, Homo sapiens
  misc_RNA (1)...(19): siRNA sense strand
uagccuguccuucaacaug

SEQ ID NO: 1962270 - RNA, 19 nt, Homo sapiens
  misc_RNA (1)...(19): siRNA sense strand
caacaugaucaauggaacu

SEQ ID NO: 1962271 - RNA, 19 nt, Homo sapiens
  misc_RNA (1)...(19): siRNA sense strand
uuaagaacgugcgcaucga

SEQ ID NO: 1962272 - RNA, 19 nt, Homo sapiens
  misc_RNA (1)...(19): siRNA sense strand
gcacugugggugagaucau

SEQ ID NO: 1962273 - RNA, 19 nt, Homo sapiens
  misc_RNA (1)...(19): siRNA sense strand
gugcugggcgcugucauga

SEQ ID NO: 1962274 - RNA, 19 nt, Homo sapiens
  misc_RNA (1)...(19): siRNA sense strand
gcuaauguacaaggaguca

SEQ ID NO: 1962275 - RNA, 19 nt, Homo sapiens
  misc_RNA (1)...(19): siRNA sense strand
uggaacuucugggcaaaug

SEQ ID NO: 1962276 - RNA, 19 nt, Homo sapiens
  misc_RNA (1)...(19): siRNA sense strand
gaaaguacccugaccuuaa

SEQ ID NO: 1962277 - RNA, 19 nt, Homo sapiens
  misc_RNA (1)...(19): siRNA sense strand
uuguugagcuuaaccauua

SEQ ID NO: 1962278 - RNA, 19 nt, Homo sapiens
  misc_RNA (1)...(19): siRNA sense strand
ggaaaguacccugaccuua

SEQ ID NO: 1962279 - RNA, 19 nt, Homo sapiens
  misc_RNA (1)...(19): siRNA sense strand
ggauuuacaucacucuuuc

SEQ ID NO: 1962280 - RNA, 19 nt, Homo sapiens
  misc_RNA (1)...(19): siRNA sense strand
aaaguacccugaccuuaau

SEQ ID NO: 1962281 - RNA, 19 nt, Homo sapiens
  misc_RNA (1)...(19): siRNA sense strand
uagcuuuggugcuuaguuu

SEQ ID NO: 1962282 - RNA, 19 nt, Homo sapiens
  misc_RNA (1)...(19): siRNA sense strand
gcaguaugcuaaaguaagg

SEQ ID NO: 1962283 - RNA, 19 nt, Homo sapiens
  misc_RNA (1)...(19): siRNA sense strand
uggcaagacugaagguaaa

SEQ ID NO: 1962284 - RNA, 19 nt, Homo sapiens
  misc_RNA (1)...(19): siRNA sense strand
gagaagggauuuacaucac

SEQ ID NO: 1962285 - RNA, 19 nt, Homo sapiens
  misc_RNA (1)...(19): siRNA sense strand
gggauuuacaucacucuuu

SEQ ID NO: 1962286 - RNA, 19 nt, Homo sapiens
  misc_RNA (1)...(19): siRNA sense strand
caagacugaagguaaauga

SEQ ID NO: 1962287 - RNA, 19 nt, Homo sapiens
  misc_RNA (1)...(19): siRNA sense strand
ucaguggucguuugaguuu

SEQ ID NO: 1962288 - RNA, 19 nt, Homo sapiens
  misc_RNA (1)...(19): siRNA sense strand
caucaguggucguuugagu

SEQ ID NO: 1962289 - RNA, 19 nt, Homo sapiens
  misc_RNA (1)...(19): siRNA sense strand
gcagauggcaagacugaag

SEQ ID NO: 1962290 - RNA, 19 nt, Homo sapiens
  misc_RNA (1)...(19): siRNA sense strand
ugagaagggauuuacauca

SEQ ID NO: 1962291 - RNA, 19 nt, Homo sapiens
  misc_RNA (1)...(19): siRNA sense strand
aaaggcagauggcaagacu

SEQ ID NO: 1962292 - RNA, 19 nt, Homo sapiens
  misc_RNA (1)...(19): siRNA sense strand
uuuccaugcucugauauuu

SEQ ID NO: 1962293 - RNA, 19 nt, Homo sapiens
  misc_RNA (1)...(19): siRNA sense strand
gcaugcaguaccugagaaa

SEQ ID NO: 1962294 - RNA, 19 nt, Homo sapiens
  misc_RNA (1)...(19): siRNA sense strand
cuuguuagcuuuggugcuu

SEQ ID NO: 1962295 - RNA, 19 nt, Homo sapiens
  misc_RNA (1)...(19): siRNA sense strand
cuuaguuuguugagcuuaa

SEQ ID NO: 1962296 - RNA, 19 nt, Homo sapiens
  misc_RNA (1)...(19): siRNA sense strand
acccugaccuuaaucuugu

SEQ ID NO: 1962297 - RNA, 19 nt, Homo sapiens
  misc_RNA (1)...(19): siRNA sense strand
augccagacuuuagugaaa

SEQ ID NO: 1962298 - RNA, 19 nt, Homo sapiens
  misc_RNA (1)...(19): siRNA sense strand
gcaagacugaagguaaaug

SEQ ID NO: 1962299 - RNA, 19 nt, Homo sapiens
  misc_RNA (1)...(19): siRNA sense strand
ugcaguaccugagaaagau

SEQ ID NO: 1962300 - RNA, 19 nt, Homo sapiens
  misc_RNA (1)...(19): siRNA sense strand
uaugugauucucucuguug

SEQ ID NO: 1962301 - RNA, 19 nt, Homo sapiens
  misc_RNA (1)...(19): siRNA sense strand
caagagugagaagggauuu

SEQ ID NO: 1962302 - RNA, 19 nt, Homo sapiens
  misc_RNA (1)...(19): siRNA sense strand
auucaucaguggucguuug

SEQ ID NO: 1962303 - RNA, 19 nt, Homo sapiens
  misc_RNA (1)...(19): siRNA sense strand
ucaagagugagaagggauu

SEQ ID NO: 1962304 - RNA, 19 nt, Homo sapiens
  misc_RNA (1)...(19): siRNA sense strand
uaauacucaugccagacuu

SEQ ID NO: 1962305 - RNA, 19 nt, Homo sapiens
  misc_RNA (1)...(19): siRNA sense strand
uuuaugugauucucucugu

SEQ ID NO: 1962306 - RNA, 19 nt, Homo sapiens
  misc_RNA (1)...(19): siRNA sense strand
ccuuaaucuuguuagcuuu

SEQ ID NO: 1962307 - RNA, 19 nt, Homo sapiens
  misc_RNA (1)...(19): siRNA sense strand
cugagaaagaucaaaguga

SEQ ID NO: 1962308 - RNA, 19 nt, Homo sapiens
  misc_RNA (1)...(19): siRNA sense strand
auacucaugccagacuuua

SEQ ID NO: 1962309 - RNA, 19 nt, Homo sapiens
  misc_RNA (1)...(19): siRNA sense strand
gauggcaagacugaaggua

SEQ ID NO: 1962310 - RNA, 19 nt, Homo sapiens
  misc_RNA (1)...(19): siRNA sense strand
uacccugaccuuaaucuug

SEQ ID NO: 1962311 - RNA, 19 nt, Homo sapiens
  misc_RNA (1)...(19): siRNA sense strand
aggcagauggcaagacuga

SEQ ID NO: 1962312 - RNA, 19 nt, Homo sapiens
  misc_RNA (1)...(19): siRNA sense strand
agaagggauuuacaucacu

SEQ ID NO: 1962313 - RNA, 19 nt, Homo sapiens
  misc_RNA (1)...(19): siRNA sense strand
accuuaaucuuguuagcuu

SEQ ID NO: 1962314 - RNA, 19 nt, Homo sapiens
  misc_RNA (1)...(19): siRNA sense strand
gugagaagggauuuacauc

SEQ ID NO: 1962315 - RNA, 19 nt, Homo sapiens
  misc_RNA (1)...(19): siRNA sense strand
caacaggccugaauuuuaa

SEQ ID NO: 1962316 - RNA, 19 nt, Homo sapiens
  misc_RNA (1)...(19): siRNA sense strand
gcaguuugcuaaugaugaa

SEQ ID NO: 1962317 - RNA, 19 nt, Homo sapiens
  misc_RNA (1)...(19): siRNA sense strand
cauauaaucuguugaagag

SEQ ID NO: 1962318 - RNA, 19 nt, Homo sapiens
  misc_RNA (1)...(19): siRNA sense strand
gaacagagaaccgugaaga

SEQ ID NO: 1962319 - RNA, 19 nt, Homo sapiens
  misc_RNA (1)...(19): siRNA sense strand
ucaauuaguugguccuuau

SEQ ID NO: 1962320 - RNA, 19 nt, Homo sapiens
  misc_RNA (1)...(19): siRNA sense strand
caagagaauuugcaagaca

SEQ ID NO: 1962321 - RNA, 19 nt, Homo sapiens
  misc_RNA (1)...(19): siRNA sense strand
gaaacagagagauaagaaa

SEQ ID NO: 1962322 - RNA, 19 nt, Homo sapiens
  misc_RNA (1)...(19): siRNA sense strand
acagagagauaagaaaguu

SEQ ID NO: 1962323 - RNA, 19 nt, Homo sapiens
  misc_RNA (1)...(19): siRNA sense strand
gaagaggaaucuguuugca

SEQ ID NO: 1962324 - RNA, 19 nt, Homo sapiens
  misc_RNA (1)...(19): siRNA sense strand
gcauauaaucuguugaaga

SEQ ID NO: 1962325 - RNA, 19 nt, Homo sapiens
  misc_RNA (1)...(19): siRNA sense strand
aagcugaugucuccaguga

SEQ ID NO: 1962326 - RNA, 19 nt, Homo sapiens
  misc_RNA (1)...(19): siRNA sense strand
ugaagaacuugauccugaa

SEQ ID NO: 1962327 - RNA, 19 nt, Homo sapiens
  misc_RNA (1)...(19): siRNA sense strand
uaaauucugugaagcugau

SEQ ID NO: 1962328 - RNA, 19 nt, Homo sapiens
  misc_RNA (1)...(19): siRNA sense strand
ccaaauggagauaauguau

SEQ ID NO: 1962329 - RNA, 19 nt, Homo sapiens
  misc_RNA (1)...(19): siRNA sense strand
cagagaaccgugaagauga

SEQ ID NO: 1962330 - RNA, 19 nt, Homo sapiens
  misc_RNA (1)...(19): siRNA sense strand
ccugaugaauuuccuguau

SEQ ID NO: 1962331 - RNA, 19 nt, Homo sapiens
  misc_RNA (1)...(19): siRNA sense strand
aaacaacugaugugaagaa

SEQ ID NO: 1962332 - RNA, 19 nt, Homo sapiens
  misc_RNA (1)...(19): siRNA sense strand
agaagcagccagagaauug

SEQ ID NO: 1962333 - RNA, 19 nt, Homo sapiens
  misc_RNA (1)...(19): siRNA sense strand
cugaugaauuuccuguaua

SEQ ID NO: 1962334 - RNA, 19 nt, Homo sapiens
  misc_RNA (1)...(19): siRNA sense strand
gaagaacuugauccugaaa

SEQ ID NO: 1962335 - RNA, 19 nt, Homo sapiens
  misc_RNA (1)...(19): siRNA sense strand
agagaaccgugaagaugaa

SEQ ID NO: 1962336 - RNA, 19 nt, Homo sapiens
  misc_RNA (1)...(19): siRNA sense strand
caacugaugugaagaaaag

SEQ ID NO: 1962337 - RNA, 19 nt, Homo sapiens
  misc_RNA (1)...(19): siRNA sense strand
ugaaacagagagauaagaa

SEQ ID NO: 1962338 - RNA, 19 nt, Homo sapiens
  misc_RNA (1)...(19): siRNA sense strand
guauaauuguuccaaaugg

SEQ ID NO: 1962339 - RNA, 19 nt, Homo sapiens
  misc_RNA (1)...(19): siRNA sense strand
aaagccaucugauucacuu

SEQ ID NO: 1962340 - RNA, 19 nt, Homo sapiens
  misc_RNA (1)...(19): siRNA sense strand
guacucgcuugaacagaga

SEQ ID NO: 1962341 - RNA, 19 nt, Homo sapiens
  misc_RNA (1)...(19): siRNA sense strand
ugcuauggcucacauuauu

SEQ ID NO: 1962342 - RNA, 19 nt, Homo sapiens
  misc_RNA (1)...(19): siRNA sense strand
uucaggaaaugaugacuuu

SEQ ID NO: 1962343 - RNA, 19 nt, Homo sapiens
  misc_RNA (1)...(19): siRNA sense strand
uaagcuuucuuuaccugaa

SEQ ID NO: 1962344 - RNA, 19 nt, Homo sapiens
  misc_RNA (1)...(19): siRNA sense strand
gaauuuccuguauauguug

SEQ ID NO: 1962345 - RNA, 19 nt, Homo sapiens
  misc_RNA (1)...(19): siRNA sense strand
gaguuccagaccauuauua

SEQ ID NO: 1962346 - RNA, 19 nt, Homo sapiens
  misc_RNA (1)...(19): siRNA sense strand
aagaugaaacagagagaua

SEQ ID NO: 1962347 - RNA, 19 nt, Homo sapiens
  misc_RNA (1)...(19): siRNA sense strand
gcuauggcucacauuauuu

SEQ ID NO: 1962348 - RNA, 19 nt, Homo sapiens
  misc_RNA (1)...(19): siRNA sense strand
gagaauuugcaagacaaua

SEQ ID NO: 1962349 - RNA, 19 nt, Homo sapiens
  misc_RNA (1)...(19): siRNA sense strand
aaacagaugcugaccucaa

SEQ ID NO: 1962350 - RNA, 19 nt, Homo sapiens
  misc_RNA (1)...(19): siRNA sense strand
aaacagagagauaagaaag

SEQ ID NO: 1962351 - RNA, 19 nt, Homo sapiens
  misc_RNA (1)...(19): siRNA sense strand
aaucaacaggccugaauuu

SEQ ID NO: 1962352 - RNA, 19 nt, Homo sapiens
  misc_RNA (1)...(19): siRNA sense strand
gaaccgugaagaugaaaca

SEQ ID NO: 1962353 - RNA, 19 nt, Homo sapiens
  misc_RNA (1)...(19): siRNA sense strand
ucaacaggccugaauuuua

SEQ ID NO: 1962354 - RNA, 19 nt, Homo sapiens
  misc_RNA (1)...(19): siRNA sense strand
gcugaccucaagagaauuu

SEQ ID NO: 1962355 - RNA, 19 nt, Homo sapiens
  misc_RNA (1)...(19): siRNA sense strand
cugaagauuucuaucacuu

SEQ ID NO: 1962356 - RNA, 19 nt, Homo sapiens
  misc_RNA (1)...(19): siRNA sense strand
uuaguugguccuuaugaua

SEQ ID NO: 1962357 - RNA, 19 nt, Homo sapiens
  misc_RNA (1)...(19): siRNA sense strand
aagagaauuugcaagacaa

SEQ ID NO: 1962358 - RNA, 19 nt, Homo sapiens
  misc_RNA (1)...(19): siRNA sense strand
ucacagaagcagccagaga

SEQ ID NO: 1962359 - RNA, 19 nt, Homo sapiens
  misc_RNA (1)...(19): siRNA sense strand
gaugcugaccucaagagaa

SEQ ID NO: 1962360 - RNA, 19 nt, Homo sapiens
  misc_RNA (1)...(19): siRNA sense strand
aggcuugguuguuccagua

SEQ ID NO: 1962361 - RNA, 19 nt, Homo sapiens
  misc_RNA (1)...(19): siRNA sense strand
cacagaagcagccagagaa

SEQ ID NO: 1962362 - RNA, 19 nt, Homo sapiens
  misc_RNA (1)...(19): siRNA sense strand
ggugcaggcuugguuguuc

SEQ ID NO: 1962363 - RNA, 19 nt, Homo sapiens
  misc_RNA (1)...(19): siRNA sense strand
gcuuuuaccucuugcauau

SEQ ID NO: 1962364 - RNA, 19 nt, Homo sapiens
  misc_RNA (1)...(19): siRNA sense strand
uaugauauccuugcuggaa

SEQ ID NO: 1962365 - RNA, 19 nt, Homo sapiens
  misc_RNA (1)...(19): siRNA sense strand
augcugaccucaagagaau

SEQ ID NO: 1962366 - RNA, 19 nt, Homo sapiens
  misc_RNA (1)...(19): siRNA sense strand
uugcugcagucaaauuauu

SEQ ID NO: 1962367 - RNA, 19 nt, Homo sapiens
  misc_RNA (1)...(19): siRNA sense strand
ccuuggacuucaauuaguu

SEQ ID NO: 1962368 - RNA, 19 nt, Homo sapiens
  misc_RNA (1)...(19): siRNA sense strand
gaagaugaaacagagagau

SEQ ID NO: 1962369 - RNA, 19 nt, Homo sapiens
  misc_RNA (1)...(19): siRNA sense strand
ccagugaccuucgaaaaga

SEQ ID NO: 1962370 - RNA, 19 nt, Homo sapiens
  misc_RNA (1)...(19): siRNA sense strand
ccugaguuccagaccauua

SEQ ID NO: 1962371 - RNA, 19 nt, Homo sapiens
  misc_RNA (1)...(19): siRNA sense strand
acagagaaccgugaagaug

SEQ ID NO: 1962372 - RNA, 19 nt, Homo sapiens
  misc_RNA (1)...(19): siRNA sense strand
ccucuugcauauaaucugu

SEQ ID NO: 1962373 - RNA, 19 nt, Homo sapiens
  misc_RNA (1)...(19): siRNA sense strand
gaauuugcaagacaauagu

SEQ ID NO: 1962374 - RNA, 19 nt, Homo sapiens
  misc_RNA (1)...(19): siRNA sense strand
acuaugauccuccugaguu

SEQ ID NO: 1962375 - RNA, 19 nt, Homo sapiens
  misc_RNA (1)...(19): siRNA sense strand
gcuaaugaugaaugugauu

SEQ ID NO: 1962376 - RNA, 19 nt, Homo sapiens
  misc_RNA (1)...(19): siRNA sense strand
guaccgagagcucccugaa

SEQ ID NO: 1962377 - RNA, 19 nt, Homo sapiens
  misc_RNA (1)...(19): siRNA sense strand
ugguauaaaugaagcaaag

SEQ ID NO: 1962378 - RNA, 19 nt, Homo sapiens
  misc_RNA (1)...(19): siRNA sense strand
gaugaaacagagagauaag

SEQ ID NO: 1962379 - RNA, 19 nt, Homo sapiens
  misc_RNA (1)...(19): siRNA sense strand
uaguugaggcugcaaguga

SEQ ID NO: 1962380 - RNA, 19 nt, Homo sapiens
  misc_RNA (1)...(19): siRNA sense strand
gagagcucccugaaacaga

SEQ ID NO: 1962381 - RNA, 19 nt, Homo sapiens
  misc_RNA (1)...(19): siRNA sense strand
gccuuggacuucaauuagu

SEQ ID NO: 1962382 - RNA, 19 nt, Homo sapiens
  misc_RNA (1)...(19): siRNA sense strand
aagccuuggacuucaauua

SEQ ID NO: 1962383 - RNA, 19 nt, Homo sapiens
  misc_RNA (1)...(19): siRNA sense strand
cagaagcagccagagaauu

SEQ ID NO: 1962384 - RNA, 19 nt, Homo sapiens
  misc_RNA (1)...(19): siRNA sense strand
agaugaaacagagagauaa

SEQ ID NO: 1962385 - RNA, 19 nt, Homo sapiens
  misc_RNA (1)...(19): siRNA sense strand
cuaugauccuccugaguuc

SEQ ID NO: 1962386 - RNA, 19 nt, Homo sapiens
  misc_RNA (1)...(19): siRNA sense strand
agagcucccugaaacagau

SEQ ID NO: 1962387 - RNA, 19 nt, Homo sapiens
  misc_RNA (1)...(19): siRNA sense strand
uaccugaagauuucuauca

SEQ ID NO: 1962388 - RNA, 19 nt, Homo sapiens
  misc_RNA (1)...(19): siRNA sense strand
agaauuugcaagacaauag

SEQ ID NO: 1962389 - RNA, 19 nt, Homo sapiens
  misc_RNA (1)...(19): siRNA sense strand
uaguugguccuuaugauau

SEQ ID NO: 1962390 - RNA, 19 nt, Homo sapiens
  misc_RNA (1)...(19): siRNA sense strand
gaccauuauuaucggagau

SEQ ID NO: 1962391 - RNA, 19 nt, Homo sapiens
  misc_RNA (1)...(19): siRNA sense strand
guugaagaggaaucuguuu

SEQ ID NO: 1962392 - RNA, 19 nt, Homo sapiens
  misc_RNA (1)...(19): siRNA sense strand
ucaagagaauuugcaagac

SEQ ID NO: 1962393 - RNA, 19 nt, Homo sapiens
  misc_RNA (1)...(19): siRNA sense strand
agagagauaagaaaguugu

SEQ ID NO: 1962394 - RNA, 19 nt, Homo sapiens
  misc_RNA (1)...(19): siRNA sense strand
ucuggaaguucugugaaga

SEQ ID NO: 1962395 - RNA, 19 nt, Homo sapiens
  misc_RNA (1)...(19): siRNA sense strand
cucaagagaauuugcaaga

SEQ ID NO: 1962396 - RNA, 19 nt, Homo sapiens
  misc_RNA (1)...(19): siRNA sense strand
accgagagcucccugaaac

SEQ ID NO: 1962397 - RNA, 19 nt, Homo sapiens
  misc_RNA (1)...(19): siRNA sense strand
uugugcaguuugcuaauga

SEQ ID NO: 1962398 - RNA, 19 nt, Homo sapiens
  misc_RNA (1)...(19): siRNA sense strand
aacagaugcugaccucaag

SEQ ID NO: 1962399 - RNA, 19 nt, Homo sapiens
  misc_RNA (1)...(19): siRNA sense strand
augauauccuugcuggaaa

SEQ ID NO: 1962400 - RNA, 19 nt, Homo sapiens
  misc_RNA (1)...(19): siRNA sense strand
auaaucuguugaagaggaa

SEQ ID NO: 1962401 - RNA, 19 nt, Homo sapiens
  misc_RNA (1)...(19): siRNA sense strand
aacaacugaugugaagaaa

SEQ ID NO: 1962402 - RNA, 19 nt, Homo sapiens
  misc_RNA (1)...(19): siRNA sense strand
gccaucugauucacuuucu

SEQ ID NO: 1962403 - RNA, 19 nt, Homo sapiens
  misc_RNA (1)...(19): siRNA sense strand
gaacuucucucucugcuaa

SEQ ID NO: 1962404 - RNA, 19 nt, Homo sapiens
  misc_RNA (1)...(19): siRNA sense strand
gauuugaacuggaagcuua

SEQ ID NO: 1962405 - RNA, 19 nt, Homo sapiens
  misc_RNA (1)...(19): siRNA sense strand
gcaguaauguugauauaga

SEQ ID NO: 1962406 - RNA, 19 nt, Homo sapiens
  misc_RNA (1)...(19): siRNA sense strand
gaaagaagagugggaaauu

SEQ ID NO: 1962407 - RNA, 19 nt, Homo sapiens
  misc_RNA (1)...(19): siRNA sense strand
gaacacagacaauacucua

SEQ ID NO: 1962408 - RNA, 19 nt, Homo sapiens
  misc_RNA (1)...(19): siRNA sense strand
gcugaaggguugaaacuga

SEQ ID NO: 1962409 - RNA, 19 nt, Homo sapiens
  misc_RNA (1)...(19): siRNA sense strand
ccaaauauaaggucuguaa

SEQ ID NO: 1962410 - RNA, 19 nt, Homo sapiens
  misc_RNA (1)...(19): siRNA sense strand
gaaggugaaugagaagauu

SEQ ID NO: 1962411 - RNA, 19 nt, Homo sapiens
  misc_RNA (1)...(19): siRNA sense strand
gaacgauggcacugaauuu

SEQ ID NO: 1962412 - RNA, 19 nt, Homo sapiens
  misc_RNA (1)...(19): siRNA sense strand
gaaagcaucaggcaaccua

SEQ ID NO: 1962413 - RNA, 19 nt, Homo sapiens
  misc_RNA (1)...(19): siRNA sense strand
cuaaguacaugcuggauug

SEQ ID NO: 1962414 - RNA, 19 nt, Homo sapiens
  misc_RNA (1)...(19): siRNA sense strand
ggucaugcuuacacugaua

SEQ ID NO: 1962415 - RNA, 19 nt, Homo sapiens
  misc_RNA (1)...(19): siRNA sense strand
ggacuggguuauacucaga

SEQ ID NO: 1962416 - RNA, 19 nt, Homo sapiens
  misc_RNA (1)...(19): siRNA sense strand
cuaaggaugucuucaacaa

SEQ ID NO: 1962417 - RNA, 19 nt, Homo sapiens
  misc_RNA (1)...(19): siRNA sense strand
uauaaggucuguaacuaug

SEQ ID NO: 1962418 - RNA, 19 nt, Homo sapiens
  misc_RNA (1)...(19): siRNA sense strand
gguugaaacugacucuuga

SEQ ID NO: 1962419 - RNA, 19 nt, Homo sapiens
  misc_RNA (1)...(19): siRNA sense strand
gagaauaaguuggcugaag

SEQ ID NO: 1962420 - RNA, 19 nt, Homo sapiens
  misc_RNA (1)...(19): siRNA sense strand
gaagauugaaacauccaua

SEQ ID NO: 1962421 - RNA, 19 nt, Homo sapiens
  misc_RNA (1)...(19): siRNA sense strand
gaaaggcugcuaaggaugu

SEQ ID NO: 1962422 - RNA, 19 nt, Homo sapiens
  misc_RNA (1)...(19): siRNA sense strand
aaagaagagugggaaauug

SEQ ID NO: 1962423 - RNA, 19 nt, Homo sapiens
  misc_RNA (1)...(19): siRNA sense strand
caaccuagaaaccaaauau

SEQ ID NO: 1962424 - RNA, 19 nt, Homo sapiens
  misc_RNA (1)...(19): siRNA sense strand
gaaauggaacacagacaau

SEQ ID NO: 1962425 - RNA, 19 nt, Homo sapiens
  misc_RNA (1)...(19): siRNA sense strand
ggaguaacaacacccguuu

SEQ ID NO: 1962426 - RNA, 19 nt, Homo sapiens
  misc_RNA (1)...(19): siRNA sense strand
ugacacagccaaauccaaa

SEQ ID NO: 1962427 - RNA, 19 nt, Homo sapiens
  misc_RNA (1)...(19): siRNA sense strand
uggcaguaauguugauaua

SEQ ID NO: 1962428 - RNA, 19 nt, Homo sapiens
  misc_RNA (1)...(19): siRNA sense strand
gaaauugaaggccuccuau

SEQ ID NO: 1962429 - RNA, 19 nt, Homo sapiens
  misc_RNA (1)...(19): siRNA sense strand
ggaaauugaaggccuccua

SEQ ID NO: 1962430 - RNA, 19 nt, Homo sapiens
  misc_RNA (1)...(19): siRNA sense strand
gaaacugacucuugauacc

SEQ ID NO: 1962431 - RNA, 19 nt, Homo sapiens
  misc_RNA (1)...(19): siRNA sense strand
uuacaaggcugcggacuuc

SEQ ID NO: 1962432 - RNA, 19 nt, Homo sapiens
  misc_RNA (1)...(19): siRNA sense strand
ggaaagaagagugggaaau

SEQ ID NO: 1962433 - RNA, 19 nt, Homo sapiens
  misc_RNA (1)...(19): siRNA sense strand
aggaaaggcugcuaaggau

SEQ ID NO: 1962434 - RNA, 19 nt, Homo sapiens
  misc_RNA (1)...(19): siRNA sense strand
gaauuuggagguucuaucu

SEQ ID NO: 1962435 - RNA, 19 nt, Homo sapiens
  misc_RNA (1)...(19): siRNA sense strand
cgauggcacugaauuugga

SEQ ID NO: 1962436 - RNA, 19 nt, Homo sapiens
  misc_RNA (1)...(19): siRNA sense strand
gucuguaacuauggacuua

SEQ ID NO: 1962437 - RNA, 19 nt, Homo sapiens
  misc_RNA (1)...(19): siRNA sense strand
ugaaacauccauaaaccuu

SEQ ID NO: 1962438 - RNA, 19 nt, Homo sapiens
  misc_RNA (1)...(19): siRNA sense strand
aauugaaggccuccuauaa

SEQ ID NO: 1962439 - RNA, 19 nt, Homo sapiens
  misc_RNA (1)...(19): siRNA sense strand
aaggaugucuucaacaaag

SEQ ID NO: 1962440 - RNA, 19 nt, Homo sapiens
  misc_RNA (1)...(19): siRNA sense strand
uaggaaaggcugcuaagga

SEQ ID NO: 1962441 - RNA, 19 nt, Homo sapiens
  misc_RNA (1)...(19): siRNA sense strand
cuacuucuggucaugcuua

SEQ ID NO: 1962442 - RNA, 19 nt, Homo sapiens
  misc_RNA (1)...(19): siRNA sense strand
uaaggucuguaacuaugga

SEQ ID NO: 1962443 - RNA, 19 nt, Homo sapiens
  misc_RNA (1)...(19): siRNA sense strand
ggaguggaauuuucuacuu

SEQ ID NO: 1962444 - RNA, 19 nt, Homo sapiens
  misc_RNA (1)...(19): siRNA sense strand
accagaaggugaaugagaa

SEQ ID NO: 1962445 - RNA, 19 nt, Homo sapiens
  misc_RNA (1)...(19): siRNA sense strand
gacucuugauaccauauuu

SEQ ID NO: 1962446 - RNA, 19 nt, Homo sapiens
  misc_RNA (1)...(19): siRNA sense strand
aaauggaacacagacaaua

SEQ ID NO: 1962447 - RNA, 19 nt, Homo sapiens
  misc_RNA (1)...(19): siRNA sense strand
gaacacaggaaagaagagu

SEQ ID NO: 1962448 - RNA, 19 nt, Homo sapiens
  misc_RNA (1)...(19): siRNA sense strand
aagguuggcuugggauuug

SEQ ID NO: 1962449 - RNA, 19 nt, Homo sapiens
  misc_RNA (1)...(19): siRNA sense strand
ugcaggaggucacaagguu

SEQ ID NO: 1962450 - RNA, 19 nt, Homo sapiens
  misc_RNA (1)...(19): siRNA sense strand
uggcauugcugcuaaguac

SEQ ID NO: 1962451 - RNA, 19 nt, Homo sapiens
  misc_RNA (1)...(19): siRNA sense strand
aagaagagugggaaauuga

SEQ ID NO: 1962452 - RNA, 19 nt, Homo sapiens
  misc_RNA (1)...(19): siRNA sense strand
guaccgaacacaggaaaga

SEQ ID NO: 1962453 - RNA, 19 nt, Homo sapiens
  misc_RNA (1)...(19): siRNA sense strand
augagaagauugaaacauc

SEQ ID NO: 1962454 - RNA, 19 nt, Homo sapiens
  misc_RNA (1)...(19): siRNA sense strand
gcuaaguacaugcuggauu

SEQ ID NO: 1962455 - RNA, 19 nt, Homo sapiens
  misc_RNA (1)...(19): siRNA sense strand
ggacagcugggaguaacaa

SEQ ID NO: 1962456 - RNA, 19 nt, Homo sapiens
  misc_RNA (1)...(19): siRNA sense strand
acaauacucuagggacaga

SEQ ID NO: 1962457 - RNA, 19 nt, Homo sapiens
  misc_RNA (1)...(19): siRNA sense strand
gacuuuaucagcuuuaauc

SEQ ID NO: 1962458 - RNA, 19 nt, Homo sapiens
  misc_RNA (1)...(19): siRNA sense strand
aauaaugccagccugauug

SEQ ID NO: 1962459 - RNA, 19 nt, Homo sapiens
  misc_RNA (1)...(19): siRNA sense strand
gauugaaacauccauaaac

SEQ ID NO: 1962460 - RNA, 19 nt, Homo sapiens
  misc_RNA (1)...(19): siRNA sense strand
ugugaacgauggcacugaa

SEQ ID NO: 1962461 - RNA, 19 nt, Homo sapiens
  misc_RNA (1)...(19): siRNA sense strand
uaaggaugucuucaacaaa

SEQ ID NO: 1962462 - RNA, 19 nt, Homo sapiens
  misc_RNA (1)...(19): siRNA sense strand
caggcaaccuagaaaccaa

SEQ ID NO: 1962463 - RNA, 19 nt, Homo sapiens
  misc_RNA (1)...(19): siRNA sense strand
ggguugaaacugacucuug

SEQ ID NO: 1962464 - RNA, 19 nt, Homo sapiens
  misc_RNA (1)...(19): siRNA sense strand
gcaucaggcaaccuagaaa

SEQ ID NO: 1962465 - RNA, 19 nt, Homo sapiens
  misc_RNA (1)...(19): siRNA sense strand
aaauaaugccagccugauu

SEQ ID NO: 1962466 - RNA, 19 nt, Homo sapiens
  misc_RNA (1)...(19): siRNA sense strand
caacacccguuuuggcauu

SEQ ID NO: 1962467 - RNA, 19 nt, Homo sapiens
  misc_RNA (1)...(19): siRNA sense strand
ugaaugagaagauugaaac

SEQ ID NO: 1962468 - RNA, 19 nt, Homo sapiens
  misc_RNA (1)...(19): siRNA sense strand
aaauugaaggccuccuaua

SEQ ID NO: 1962469 - RNA, 19 nt, Homo sapiens
  misc_RNA (1)...(19): siRNA sense strand
gaagagugggaaauugaag

SEQ ID NO: 1962470 - RNA, 19 nt, Homo sapiens
  misc_RNA (1)...(19): siRNA sense strand
agaaauggaacacagacaa

SEQ ID NO: 1962471 - RNA, 19 nt, Homo sapiens
  misc_RNA (1)...(19): siRNA sense strand
gcuuuggcauggucaagau

SEQ ID NO: 1962472 - RNA, 19 nt, Homo sapiens
  misc_RNA (1)...(19): siRNA sense strand
gaaugagaagauugaaaca

SEQ ID NO: 1962473 - RNA, 19 nt, Homo sapiens
  misc_RNA (1)...(19): siRNA sense strand
ugaacgauggcacugaauu

SEQ ID NO: 1962474 - RNA, 19 nt, Homo sapiens
  misc_RNA (1)...(19): siRNA sense strand
gcuaucagaugaguuuuga

SEQ ID NO: 1962475 - RNA, 19 nt, Homo sapiens
  misc_RNA (1)...(19): siRNA sense strand
uugaaggccuccuauaaac

SEQ ID NO: 1962476 - RNA, 19 nt, Homo sapiens
  misc_RNA (1)...(19): siRNA sense strand
uuacacugauacagggaaa

SEQ ID NO: 1962477 - RNA, 19 nt, Homo sapiens
  misc_RNA (1)...(19): siRNA sense strand
ucucucugcuaaaguaaau

SEQ ID NO: 1962478 - RNA, 19 nt, Homo sapiens
  misc_RNA (1)...(19): siRNA sense strand
gcaaccuagaaaccaaaua

SEQ ID NO: 1962479 - RNA, 19 nt, Homo sapiens
  misc_RNA (1)...(19): siRNA sense strand
ccuagaaaccaaauauaag

SEQ ID NO: 1962480 - RNA, 19 nt, Homo sapiens
  misc_RNA (1)...(19): siRNA sense strand
gugaaugagaagauugaaa

SEQ ID NO: 1962481 - RNA, 19 nt, Homo sapiens
  misc_RNA (1)...(19): siRNA sense strand
guacugugaccuaggaaag

SEQ ID NO: 1962482 - RNA, 19 nt, Homo sapiens
  misc_RNA (1)...(19): siRNA sense strand
cuagaaaccaaauauaagg

SEQ ID NO: 1962483 - RNA, 19 nt, Homo sapiens
  misc_RNA (1)...(19): siRNA sense strand
ugauuggacuggguuauac

SEQ ID NO: 1962484 - RNA, 19 nt, Homo sapiens
  misc_RNA (1)...(19): siRNA sense strand
cuugcuggcuaucagauga

SEQ ID NO: 1962485 - RNA, 19 nt, Homo sapiens
  misc_RNA (1)...(19): siRNA sense strand
auugaaggccuccuauaaa

SEQ ID NO: 1962486 - RNA, 19 nt, Homo sapiens
  misc_RNA (1)...(19): siRNA sense strand
uugaaacugacucuugaua

SEQ ID NO: 1962487 - RNA, 19 nt, Homo sapiens
  misc_RNA (1)...(19): siRNA sense strand
cugcuaaaguaaauaaugc

SEQ ID NO: 1962488 - RNA, 19 nt, Homo sapiens
  misc_RNA (1)...(19): siRNA sense strand
gcauugcugcuaaguacau

SEQ ID NO: 1962489 - RNA, 19 nt, Homo sapiens
  misc_RNA (1)...(19): siRNA sense strand
gacuuaccuucacccagaa

SEQ ID NO: 1962490 - RNA, 19 nt, Homo sapiens
  misc_RNA (1)...(19): siRNA sense strand
guaacacaccaacguacug

SEQ ID NO: 1962491 - RNA, 19 nt, Homo sapiens
  misc_RNA (1)...(19): siRNA sense strand
ggaacacagacaauacucu

SEQ ID NO: 1962492 - RNA, 19 nt, Homo sapiens
  misc_RNA (1)...(19): siRNA sense strand
cuugggauuugaacuggaa

SEQ ID NO: 1962493 - RNA, 19 nt, Homo sapiens
  misc_RNA (1)...(19): siRNA sense strand
uaccagaaggugaaugaga

SEQ ID NO: 1962494 - RNA, 19 nt, Homo sapiens
  misc_RNA (1)...(19): siRNA sense strand
guaguggaguggaauuuuc

SEQ ID NO: 1962495 - RNA, 19 nt, Homo sapiens
  misc_RNA (1)...(19): siRNA sense strand
uaacacaccaacguacugu

SEQ ID NO: 1962496 - RNA, 19 nt, Homo sapiens
  misc_RNA (1)...(19): siRNA sense strand
agauagaccugaaaaccaa

SEQ ID NO: 1962497 - RNA, 19 nt, Homo sapiens
  misc_RNA (1)...(19): siRNA sense strand
aaccaaauauaaggucugu

SEQ ID NO: 1962498 - RNA, 19 nt, Homo sapiens
  misc_RNA (1)...(19): siRNA sense strand
uaaauaaugccagccugau

SEQ ID NO: 1962499 - RNA, 19 nt, Homo sapiens
  misc_RNA (1)...(19): siRNA sense strand
agaagagugggaaauugaa

SEQ ID NO: 1962500 - RNA, 19 nt, Homo sapiens
  misc_RNA (1)...(19): siRNA sense strand
cugauuggacuggguuaua

SEQ ID NO: 1962501 - RNA, 19 nt, Homo sapiens
  misc_RNA (1)...(19): siRNA sense strand
guuacaaggcugcggacuu

SEQ ID NO: 1962502 - RNA, 19 nt, Homo sapiens
  misc_RNA (1)...(19): siRNA sense strand
auaauuucgcccuggguua

SEQ ID NO: 1962503 - RNA, 19 nt, Homo sapiens
  misc_RNA (1)...(19): siRNA sense strand
gaacuugccaaccagcuua

SEQ ID NO: 1962504 - RNA, 19 nt, Homo sapiens
  misc_RNA (1)...(19): siRNA sense strand
ugaaagaacuugccaacca

SEQ ID NO: 1962505 - RNA, 19 nt, Homo sapiens
  misc_RNA (1)...(19): siRNA sense strand
ccaaccagcuuaaagacaa

SEQ ID NO: 1962506 - RNA, 19 nt, Homo sapiens
  misc_RNA (1)...(19): siRNA sense strand
ggucauaccuauaacuaca

SEQ ID NO: 1962507 - RNA, 19 nt, Homo sapiens
  misc_RNA (1)...(19): siRNA sense strand
aaacuggucauaccuauaa

SEQ ID NO: 1962508 - RNA, 19 nt, Homo sapiens
  misc_RNA (1)...(19): siRNA sense strand
caggacaggucauuaauag

SEQ ID NO: 1962509 - RNA, 19 nt, Homo sapiens
  misc_RNA (1)...(19): siRNA sense strand
guaccuggcccuucuguuu

SEQ ID NO: 1962510 - RNA, 19 nt, Homo sapiens
  misc_RNA (1)...(19): siRNA sense strand
ggacaagggagacuauuuc

SEQ ID NO: 1962511 - RNA, 19 nt, Homo sapiens
  misc_RNA (1)...(19): siRNA sense strand
ggacaggucauuaauagca

SEQ ID NO: 1962512 - RNA, 19 nt, Homo sapiens
  misc_RNA (1)...(19): siRNA sense strand
guccaugacuugcccaauu

SEQ ID NO: 1962513 - RNA, 19 nt, Homo sapiens
  misc_RNA (1)...(19): siRNA sense strand
uaacuacagcuccaaauau

SEQ ID NO: 1962514 - RNA, 19 nt, Homo sapiens
  misc_RNA (1)...(19): siRNA sense strand
gagguuggauugccagcuu

SEQ ID NO: 1962515 - RNA, 19 nt, Homo sapiens
  misc_RNA (1)...(19): siRNA sense strand
ccaaacuggucauaccuau

SEQ ID NO: 1962516 - RNA, 19 nt, Homo sapiens
  misc_RNA (1)...(19): siRNA sense strand
caaccagcuuaaagacaaa

SEQ ID NO: 1962517 - RNA, 19 nt, Homo sapiens
  misc_RNA (1)...(19): siRNA sense strand
ucagugcccuggaguuguu

SEQ ID NO: 1962518 - RNA, 19 nt, Homo sapiens
  misc_RNA (1)...(19): siRNA sense strand
ccaggacaggucauuaaua

SEQ ID NO: 1962519 - RNA, 19 nt, Homo sapiens
  misc_RNA (1)...(19): siRNA sense strand
gcaaugggaggaauguuca

SEQ ID NO: 1962520 - RNA, 19 nt, Homo sapiens
  misc_RNA (1)...(19): siRNA sense strand
uccaugacuugcccaauuu

SEQ ID NO: 1962521 - RNA, 19 nt, Homo sapiens
  misc_RNA (1)...(19): siRNA sense strand
caaacuggucauaccuaua

SEQ ID NO: 1962522 - RNA, 19 nt, Homo sapiens
  misc_RNA (1)...(19): siRNA sense strand
gaucuauggcugugauaau

SEQ ID NO: 1962523 - RNA, 19 nt, Homo sapiens
  misc_RNA (1)...(19): siRNA sense strand
gcccuggaguuguugaaau

SEQ ID NO: 1962524 - RNA, 19 nt, Homo sapiens
  misc_RNA (1)...(19): siRNA sense strand
gggaguuggucagaucuau

SEQ ID NO: 1962525 - RNA, 19 nt, Homo sapiens
  misc_RNA (1)...(19): siRNA sense strand
auaacuacagcuccaaaua

SEQ ID NO: 1962526 - RNA, 19 nt, Homo sapiens
  misc_RNA (1)...(19): siRNA sense strand
gugccugcaugcugccaua

SEQ ID NO: 1962527 - RNA, 19 nt, Homo sapiens
  misc_RNA (1)...(19): siRNA sense strand
caagugcauugaauuccau

SEQ ID NO: 1962528 - RNA, 19 nt, Homo sapiens
  misc_RNA (1)...(19): siRNA sense strand
gaucauugcugggcauagc

SEQ ID NO: 1962529 - RNA, 19 nt, Homo sapiens
  misc_RNA (1)...(19): siRNA sense strand
ggaguuguugaaaucuaua

SEQ ID NO: 1962530 - RNA, 19 nt, Homo sapiens
  misc_RNA (1)...(19): siRNA sense strand
ucagaucuauggcugugau

SEQ ID NO: 1962531 - RNA, 19 nt, Homo sapiens
  misc_RNA (1)...(19): siRNA sense strand
cacccucccuuucaacaug

SEQ ID NO: 1962532 - RNA, 19 nt, Homo sapiens
  misc_RNA (1)...(19): siRNA sense strand
acauuacaauccguucuuu

SEQ ID NO: 1962533 - RNA, 19 nt, Homo sapiens
  misc_RNA (1)...(19): siRNA sense strand
guucacggccuaucuugga

SEQ ID NO: 1962534 - RNA, 19 nt, Homo sapiens
  misc_RNA (1)...(19): siRNA sense strand
gacauuacaauccguucuu

SEQ ID NO: 1962535 - RNA, 19 nt, Homo sapiens
  misc_RNA (1)...(19): siRNA sense strand
gcuuguaccuggcccuucu

SEQ ID NO: 1962536 - RNA, 19 nt, Homo sapiens
  misc_RNA (1)...(19): siRNA sense strand
uggaguuguugaaaucuau

SEQ ID NO: 1962537 - RNA, 19 nt, Homo sapiens
  misc_RNA (1)...(19): siRNA sense strand
aacuacagcuccaaauauc

SEQ ID NO: 1962538 - RNA, 19 nt, Homo sapiens
  misc_RNA (1)...(19): siRNA sense strand
gguaggacuucuuguucag

SEQ ID NO: 1962539 - RNA, 19 nt, Homo sapiens
  misc_RNA (1)...(19): siRNA sense strand
gcuguuacucccuguaugu

SEQ ID NO: 1962540 - RNA, 19 nt, Homo sapiens
  misc_RNA (1)...(19): siRNA sense strand
cggacaagggagacuauuu

SEQ ID NO: 1962541 - RNA, 19 nt, Homo sapiens
  misc_RNA (1)...(19): siRNA sense strand
gagucggcauggcaaacuu

SEQ ID NO: 1962542 - RNA, 19 nt, Homo sapiens
  misc_RNA (1)...(19): siRNA sense strand
gacaggucauuaauagcau

SEQ ID NO: 1962543 - RNA, 19 nt, Homo sapiens
  misc_RNA (1)...(19): siRNA sense strand
gcuauuguuccucaucaug

SEQ ID NO: 1962544 - RNA, 19 nt, Homo sapiens
  misc_RNA (1)...(19): siRNA sense strand
gccaaacuggucauaccua

SEQ ID NO: 1962545 - RNA, 19 nt, Homo sapiens
  misc_RNA (1)...(19): siRNA sense strand
ccacaggacauuacaaucc

SEQ ID NO: 1962546 - RNA, 19 nt, Homo sapiens
  misc_RNA (1)...(19): siRNA sense strand
gcauaucccaagugguguu

SEQ ID NO: 1962547 - RNA, 19 nt, Homo sapiens
  misc_RNA (1)...(19): siRNA sense strand
cggcauggcaaacuuuaug

SEQ ID NO: 1962548 - RNA, 19 nt, Homo sapiens
  misc_RNA (1)...(19): siRNA sense strand
ggaguuggucagaucuaug

SEQ ID NO: 1962549 - RNA, 19 nt, Homo sapiens
  misc_RNA (1)...(19): siRNA sense strand
ugguaggacuucuuguuca

SEQ ID NO: 1962550 - RNA, 19 nt, Homo sapiens
  misc_RNA (1)...(19): siRNA sense strand
caagaugccccucaguaaa

SEQ ID NO: 1962551 - RNA, 19 nt, Homo sapiens
  misc_RNA (1)...(19): siRNA sense strand
ggacagccccacuaugguu

SEQ ID NO: 1962552 - RNA, 19 nt, Homo sapiens
  misc_RNA (1)...(19): siRNA sense strand
ggacagccccacuaugguu

SEQ ID NO: 1962553 - RNA, 19 nt, Homo sapiens
  misc_RNA (1)...(19): siRNA sense strand
ggacauuacaauccguucu

SEQ ID NO: 1962554 - RNA, 19 nt, Homo sapiens
  misc_RNA (1)...(19): siRNA sense strand
cuggaguuguugaaaucua

SEQ ID NO: 1962555 - RNA, 19 nt, Homo sapiens
  misc_RNA (1)...(19): siRNA sense strand
ccacucugauggcccucuu

SEQ ID NO: 1962556 - RNA, 19 nt, Homo sapiens
  misc_RNA (1)...(19): siRNA sense strand
cauagcagcgggacucagu

SEQ ID NO: 1962557 - RNA, 19 nt, Homo sapiens
  misc_RNA (1)...(19): siRNA sense strand
ccugcaugcugccauagga

SEQ ID NO: 1962558 - RNA, 19 nt, Homo sapiens
  misc_RNA (1)...(19): siRNA sense strand
gaguuggucagaucuaugg

SEQ ID NO: 1962559 - RNA, 19 nt, Homo sapiens
  misc_RNA (1)...(19): siRNA sense strand
cagccaggacaggucauua

SEQ ID NO: 1962560 - RNA, 19 nt, Homo sapiens
  misc_RNA (1)...(19): siRNA sense strand
gccaggacaggucauuaau

SEQ ID NO: 1962561 - RNA, 19 nt, Homo sapiens
  misc_RNA (1)...(19): siRNA sense strand
caaauaucuccuggucuga

SEQ ID NO: 1962562 - RNA, 19 nt, Homo sapiens
  misc_RNA (1)...(19): siRNA sense strand
cagccaaacuggucauacc

SEQ ID NO: 1962563 - RNA, 19 nt, Homo sapiens
  misc_RNA (1)...(19): siRNA sense strand
ccggugacaugaaagaacu

SEQ ID NO: 1962564 - RNA, 19 nt, Homo sapiens
  misc_RNA (1)...(19): siRNA sense strand
gacaagggagacuauuucu

SEQ ID NO: 1962565 - RNA, 19 nt, Homo sapiens
  misc_RNA (1)...(19): siRNA sense strand
guggugcuccaguucauug

SEQ ID NO: 1962566 - RNA, 19 nt, Homo sapiens
  misc_RNA (1)...(19): siRNA sense strand
gaggacagccccacuaugg

SEQ ID NO: 1962567 - RNA, 19 nt, Homo sapiens
  misc_RNA (1)...(19): siRNA sense strand
gaacacgacuuccaaaugc

SEQ ID NO: 1962568 - RNA, 19 nt, Homo sapiens
  misc_RNA (1)...(19): siRNA sense strand
ugaagaagcggcugaagaa

SEQ ID NO: 1962569 - RNA, 19 nt, Homo sapiens
  misc_RNA (1)...(19): siRNA sense strand
caacugcagccaugugauu

SEQ ID NO: 1962570 - RNA, 19 nt, Homo sapiens
  misc_RNA (1)...(19): siRNA sense strand
acaugaagcccguguguaa

SEQ ID NO: 1962571 - RNA, 19 nt, Homo sapiens
  misc_RNA (1)...(19): siRNA sense strand
aacaaggccugguguguga

SEQ ID NO: 1962572 - RNA, 19 nt, Homo sapiens
  misc_RNA (1)...(19): siRNA sense strand
acagcaagcucacccugaa

SEQ ID NO: 1962573 - RNA, 19 nt, Homo sapiens
  misc_RNA (1)...(19): siRNA sense strand
gcucuucuaugaguuugaa

SEQ ID NO: 1962574 - RNA, 19 nt, Homo sapiens
  misc_RNA (1)...(19): siRNA sense strand
cgaacacgacuuccaaaug

SEQ ID NO: 1962575 - RNA, 19 nt, Homo sapiens
  misc_RNA (1)...(19): siRNA sense strand
gcggugaguucaucauugg

SEQ ID NO: 1962576 - RNA, 19 nt, Homo sapiens
  misc_RNA (1)...(19): siRNA sense strand
guacugcgaacacgacuuc

SEQ ID NO: 1962577 - RNA, 19 nt, Homo sapiens
  misc_RNA (1)...(19): siRNA sense strand
ccgaggggcucuucuauga

SEQ ID NO: 1962578 - RNA, 19 nt, Homo sapiens
  misc_RNA (1)...(19): siRNA sense strand
gcaagcucacccugaagaa

SEQ ID NO: 1962579 - RNA, 19 nt, Homo sapiens
  misc_RNA (1)...(19): siRNA sense strand
guaagaggugcuacgagaa

SEQ ID NO: 1962580 - RNA, 19 nt, Homo sapiens
  misc_RNA (1)...(19): siRNA sense strand
agaagcggcugaagaagcu

SEQ ID NO: 1962581 - RNA, 19 nt, Homo sapiens
  misc_RNA (1)...(19): siRNA sense strand
gcgaacacgacuuccaaau

SEQ ID NO: 1962582 - RNA, 19 nt, Homo sapiens
  misc_RNA (1)...(19): siRNA sense strand
gacaugaagcccgugugua

SEQ ID NO: 1962583 - RNA, 19 nt, Homo sapiens
  misc_RNA (1)...(19): siRNA sense strand
ucaucaaggccaaguguga

SEQ ID NO: 1962584 - RNA, 19 nt, Homo sapiens
  misc_RNA (1)...(19): siRNA sense strand
ccaagugugagaagccauu

SEQ ID NO: 1962585 - RNA, 19 nt, Homo sapiens
  misc_RNA (1)...(19): siRNA sense strand
uaagaggugcuacgagaag

SEQ ID NO: 1962586 - RNA, 19 nt, Homo sapiens
  misc_RNA (1)...(19): siRNA sense strand
cgacaugaagcccgugugu

SEQ ID NO: 1962587 - RNA, 19 nt, Homo sapiens
  misc_RNA (1)...(19): siRNA sense strand
gcaccggcacuaugagaag

SEQ ID NO: 1962588 - RNA, 19 nt, Homo sapiens
  misc_RNA (1)...(19): siRNA sense strand
gaagaagcggcugaagaag

SEQ ID NO: 1962589 - RNA, 19 nt, Homo sapiens
  misc_RNA (1)...(19): siRNA sense strand
cugaagaagcggcugaaga

SEQ ID NO: 1962590 - RNA, 19 nt, Homo sapiens
  misc_RNA (1)...(19): siRNA sense strand
gggcaccggcacuaugaga

SEQ ID NO: 1962591 - RNA, 19 nt, Homo sapiens
  misc_RNA (1)...(19): siRNA sense strand
ggccacagaccucaacucu

SEQ ID NO: 1962592 - RNA, 19 nt, Homo sapiens
  misc_RNA (1)...(19): siRNA sense strand
caccggcacuaugagaaga

SEQ ID NO: 1962593 - RNA, 19 nt, Homo sapiens
  misc_RNA (1)...(19): siRNA sense strand
gaggggcucuucuaugagu

SEQ ID NO: 1962594 - RNA, 19 nt, Homo sapiens
  misc_RNA (1)...(19): siRNA sense strand
cugcagccaugugauugaa

SEQ ID NO: 1962595 - RNA, 19 nt, Homo sapiens
  misc_RNA (1)...(19): siRNA sense strand
cgacuuccaaaugcuguuu

SEQ ID NO: 1962596 - RNA, 19 nt, Homo sapiens
  misc_RNA (1)...(19): siRNA sense strand
ugcggugaguucaucauug

SEQ ID NO: 1962597 - RNA, 19 nt, Homo sapiens
  misc_RNA (1)...(19): siRNA sense strand
gaacuguacuuacuaggaa

SEQ ID NO: 1962598 - RNA, 19 nt, Homo sapiens
  misc_RNA (1)...(19): siRNA sense strand
gcagggaccucaucugguu

SEQ ID NO: 1962599 - RNA, 19 nt, Homo sapiens
  misc_RNA (1)...(19): siRNA sense strand
guuggcagcuggcaaauuu

SEQ ID NO: 1962600 - RNA, 19 nt, Homo sapiens
  misc_RNA (1)...(19): siRNA sense strand
ccacaagggugacaucugu

SEQ ID NO: 1962601 - RNA, 19 nt, Homo sapiens
  misc_RNA (1)...(19): siRNA sense strand
gaugagguguucugguuug

SEQ ID NO: 1962602 - RNA, 19 nt, Homo sapiens
  misc_RNA (1)...(19): siRNA sense strand
gaaaugugcccgacaccaa

SEQ ID NO: 1962603 - RNA, 19 nt, Homo sapiens
  misc_RNA (1)...(19): siRNA sense strand
gcagcuggcaaauuugaua

SEQ ID NO: 1962604 - RNA, 19 nt, Homo sapiens
  misc_RNA (1)...(19): siRNA sense strand
aaagacggauuucgaagga

SEQ ID NO: 1962605 - RNA, 19 nt, Homo sapiens
  misc_RNA (1)...(19): siRNA sense strand
ggaaaggguccaucuucaa

SEQ ID NO: 1962606 - RNA, 19 nt, Homo sapiens
  misc_RNA (1)...(19): siRNA sense strand
caaauuugauagagaacug

SEQ ID NO: 1962607 - RNA, 19 nt, Homo sapiens
  misc_RNA (1)...(19): siRNA sense strand
caggagggcuguucugaca

SEQ ID NO: 1962608 - RNA, 19 nt, Homo sapiens
  misc_RNA (1)...(19): siRNA sense strand
gaaaggguccaucuucaag

SEQ ID NO: 1962609 - RNA, 19 nt, Homo sapiens
  misc_RNA (1)...(19): siRNA sense strand
acucggaucuugcagacua

SEQ ID NO: 1962610 - RNA, 19 nt, Homo sapiens
  misc_RNA (1)...(19): siRNA sense strand
uggcaaauuugauagagaa

SEQ ID NO: 1962611 - RNA, 19 nt, Homo sapiens
  misc_RNA (1)...(19): siRNA sense strand
gaccgcgucuuguacagaa

SEQ ID NO: 1962612 - RNA, 19 nt, Homo sapiens
  misc_RNA (1)...(19): siRNA sense strand
ucgaugagguguucugguu

SEQ ID NO: 1962613 - RNA, 19 nt, Homo sapiens
  misc_RNA (1)...(19): siRNA sense strand
ugauagagaacuguacuua

SEQ ID NO: 1962614 - RNA, 19 nt, Homo sapiens
  misc_RNA (1)...(19): siRNA sense strand
gggcaucagcuucaccuuu

SEQ ID NO: 1962615 - RNA, 19 nt, Homo sapiens
  misc_RNA (1)...(19): siRNA sense strand
ggaauuaaaagacggauuu

SEQ ID NO: 1962616 - RNA, 19 nt, Homo sapiens
  misc_RNA (1)...(19): siRNA sense strand
gaacaugcagggccagaag

SEQ ID NO: 1962617 - RNA, 19 nt, Homo sapiens
  misc_RNA (1)...(19): siRNA sense strand
cggaaaggguccaucuuca

SEQ ID NO: 1962618 - RNA, 19 nt, Homo sapiens
  misc_RNA (1)...(19): siRNA sense strand
gcacuuccuuccucuucau

SEQ ID NO: 1962619 - RNA, 19 nt, Homo sapiens
  misc_RNA (1)...(19): siRNA sense strand
guacagaagccgccacaag

SEQ ID NO: 1962620 - RNA, 19 nt, Homo sapiens
  misc_RNA (1)...(19): siRNA sense strand
auagagaacuguacuuacu

SEQ ID NO: 1962621 - RNA, 19 nt, Homo sapiens
  misc_RNA (1)...(19): siRNA sense strand
gcagcaagcacuacagagu

SEQ ID NO: 1962622 - RNA, 19 nt, Homo sapiens
  misc_RNA (1)...(19): siRNA sense strand
acacggaccgcgucuugua

SEQ ID NO: 1962623 - RNA, 19 nt, Homo sapiens
  misc_RNA (1)...(19): siRNA sense strand
ggcaucagcuucaccuuuu

SEQ ID NO: 1962624 - RNA, 19 nt, Homo sapiens
  misc_RNA (1)...(19): siRNA sense strand
caucugcuccguuucuuga

SEQ ID NO: 1962625 - RNA, 19 nt, Homo sapiens
  misc_RNA (1)...(19): siRNA sense strand
gcggaaaggguccaucuuc

SEQ ID NO: 1962626 - RNA, 19 nt, Homo sapiens
  misc_RNA (1)...(19): siRNA sense strand
agagaacuguacuuacuag

SEQ ID NO: 1962627 - RNA, 19 nt, Homo sapiens
  misc_RNA (1)...(19): siRNA sense strand
ggauuucgaaggagauuca

SEQ ID NO: 1962628 - RNA, 19 nt, Homo sapiens
  misc_RNA (1)...(19): siRNA sense strand
caucgugucucagaucaag

SEQ ID NO: 1962629 - RNA, 19 nt, Homo sapiens
  misc_RNA (1)...(19): siRNA sense strand
guucugguuuggagacuuc

SEQ ID NO: 1962630 - RNA, 19 nt, Homo sapiens
  misc_RNA (1)...(19): siRNA sense strand
uagagaacuguacuuacua

SEQ ID NO: 1962631 - RNA, 19 nt, Homo sapiens
  misc_RNA (1)...(19): siRNA sense strand
gauagagaacuguacuuac

SEQ ID NO: 1962632 - RNA, 19 nt, Homo sapiens
  misc_RNA (1)...(19): siRNA sense strand
cuacaugucgcucuucauc

SEQ ID NO: 1962633 - RNA, 19 nt, Homo sapiens
  misc_RNA (1)...(19): siRNA sense strand
caucauacaaguuugacau

SEQ ID NO: 1962634 - RNA, 19 nt, Homo sapiens
  misc_RNA (1)...(19): siRNA sense strand
ccgcuucgaugagguguuc

SEQ ID NO: 1962635 - RNA, 19 nt, Homo sapiens
  misc_RNA (1)...(19): siRNA sense strand
ccucccaucauacaaguuu

SEQ ID NO: 1962636 - RNA, 19 nt, Homo sapiens
  misc_RNA (1)...(19): siRNA sense strand
uccacuuccucccaucaua

SEQ ID NO: 1962637 - RNA, 19 nt, Homo sapiens
  misc_RNA (1)...(19): siRNA sense strand
guuuggagacuucaacuuc

SEQ ID NO: 1962638 - RNA, 19 nt, Homo sapiens
  misc_RNA (1)...(19): siRNA sense strand
ucaccacccgcuucgauga

SEQ ID NO: 1962639 - RNA, 19 nt, Homo sapiens
  misc_RNA (1)...(19): siRNA sense strand
gcuggcaaauuugauagag

SEQ ID NO: 1962640 - RNA, 19 nt, Homo sapiens
  misc_RNA (1)...(19): siRNA sense strand
gcacuacagagucagaacu

SEQ ID NO: 1962641 - RNA, 19 nt, Homo sapiens
  misc_RNA (1)...(19): siRNA sense strand
ggaccuggaagcccggaau

SEQ ID NO: 1962642 - RNA, 19 nt, Homo sapiens
  misc_RNA (1)...(19): siRNA sense strand
agcaagcacuacagaguca

SEQ ID NO: 1962643 - RNA, 19 nt, Homo sapiens
  misc_RNA (1)...(19): siRNA sense strand
ucagaggcagcaagcacua

SEQ ID NO: 1962644 - RNA, 19 nt, Homo sapiens
  misc_RNA (1)...(19): siRNA sense strand
ggaccgcgucuuguacaga

SEQ ID NO: 1962645 - RNA, 19 nt, Homo sapiens
  misc_RNA (1)...(19): siRNA sense strand
ggaacaugcagggccagaa

SEQ ID NO: 1962646 - RNA, 19 nt, Homo sapiens
  misc_RNA (1)...(19): siRNA sense strand
ggcacuuccuuccucuuca

SEQ ID NO: 1962647 - RNA, 19 nt, Homo sapiens
  misc_RNA (1)...(19): siRNA sense strand
caaggucgacucggaucuu

SEQ ID NO: 1962648 - RNA, 19 nt, Homo sapiens
  misc_RNA (1)...(19): siRNA sense strand
agaacuguacuuacuagga

SEQ ID NO: 1962649 - RNA, 19 nt, Homo sapiens
  misc_RNA (1)...(19): siRNA sense strand
cgaccaccgcccuguguau

SEQ ID NO: 1962650 - RNA, 19 nt, Homo sapiens
  misc_RNA (1)...(19): siRNA sense strand
auacacggaccgcgucuug

SEQ ID NO: 1962651 - RNA, 19 nt, Homo sapiens
  misc_RNA (1)...(19): siRNA sense strand
gaccaccgcccuguguaug

SEQ ID NO: 1962652 - RNA, 19 nt, Homo sapiens
  misc_RNA (1)...(19): siRNA sense strand
gcagguaucuggcauaauu

SEQ ID NO: 1962653 - RNA, 19 nt, Homo sapiens
  misc_RNA (1)...(19): siRNA sense strand
ucaaucaacugaccuauuu

SEQ ID NO: 1962654 - RNA, 19 nt, Homo sapiens
  misc_RNA (1)...(19): siRNA sense strand
gcaguuaaguuucccaguu

SEQ ID NO: 1962655 - RNA, 19 nt, Homo sapiens
  misc_RNA (1)...(19): siRNA sense strand
gaagucaucugucuauuuu

SEQ ID NO: 1962656 - RNA, 19 nt, Homo sapiens
  misc_RNA (1)...(19): siRNA sense strand
gauggacaauggauucuaa

SEQ ID NO: 1962657 - RNA, 19 nt, Homo sapiens
  misc_RNA (1)...(19): siRNA sense strand
caacugaccuauuucuuca

SEQ ID NO: 1962658 - RNA, 19 nt, Homo sapiens
  misc_RNA (1)...(19): siRNA sense strand
caguuaaguuucccaguua

SEQ ID NO: 1962659 - RNA, 19 nt, Homo sapiens
  misc_RNA (1)...(19): siRNA sense strand
caaggaugcuuuaccaaug

SEQ ID NO: 1962660 - RNA, 19 nt, Homo sapiens
  misc_RNA (1)...(19): siRNA sense strand
ggaaugguguuuggcguaa

SEQ ID NO: 1962661 - RNA, 19 nt, Homo sapiens
  misc_RNA (1)...(19): siRNA sense strand
uuacuaaugugcaagauug

SEQ ID NO: 1962662 - RNA, 19 nt, Homo sapiens
  misc_RNA (1)...(19): siRNA sense strand
gaaccaauaaagacuguaa

SEQ ID NO: 1962663 - RNA, 19 nt, Homo sapiens
  misc_RNA (1)...(19): siRNA sense strand
guaauucucuugccauuuu

SEQ ID NO: 1962664 - RNA, 19 nt, Homo sapiens
  misc_RNA (1)...(19): siRNA sense strand
gaaacucacacucgcuuaa

SEQ ID NO: 1962665 - RNA, 19 nt, Homo sapiens
  misc_RNA (1)...(19): siRNA sense strand
gacaauggauucuaaacuc

SEQ ID NO: 1962666 - RNA, 19 nt, Homo sapiens
  misc_RNA (1)...(19): siRNA sense strand
caaguuugcagaaccaaua

SEQ ID NO: 1962667 - RNA, 19 nt, Homo sapiens
  misc_RNA (1)...(19): siRNA sense strand
uuuaauggcuuugggauuu

SEQ ID NO: 1962668 - RNA, 19 nt, Homo sapiens
  misc_RNA (1)...(19): siRNA sense strand
uagauaccaucgccuauga

SEQ ID NO: 1962669 - RNA, 19 nt, Homo sapiens
  misc_RNA (1)...(19): siRNA sense strand
gagcauuuguugaucuguu

SEQ ID NO: 1962670 - RNA, 19 nt, Homo sapiens
  misc_RNA (1)...(19): siRNA sense strand
gcaaggaugcuuuaccaau

SEQ ID NO: 1962671 - RNA, 19 nt, Homo sapiens
  misc_RNA (1)...(19): siRNA sense strand
uaugaagacuggcuggaaa

SEQ ID NO: 1962672 - RNA, 19 nt, Homo sapiens
  misc_RNA (1)...(19): siRNA sense strand
aaacgcugaugcagacuuu

SEQ ID NO: 1962673 - RNA, 19 nt, Homo sapiens
  misc_RNA (1)...(19): siRNA sense strand
cacauaagauggcaaacug

SEQ ID NO: 1962674 - RNA, 19 nt, Homo sapiens
  misc_RNA (1)...(19): siRNA sense strand
uaaauuuacccgucaauca

SEQ ID NO: 1962675 - RNA, 19 nt, Homo sapiens
  misc_RNA (1)...(19): siRNA sense strand
cuuccucgcuucacaauga

SEQ ID NO: 1962676 - RNA, 19 nt, Homo sapiens
  misc_RNA (1)...(19): siRNA sense strand
gugcagguaucuggcauaa

SEQ ID NO: 1962677 - RNA, 19 nt, Homo sapiens
  misc_RNA (1)...(19): siRNA sense strand
acaaugaugucaaagaucu

SEQ ID NO: 1962678 - RNA, 19 nt, Homo sapiens
  misc_RNA (1)...(19): siRNA sense strand
ggagcucuggcuauuguua

SEQ ID NO: 1962679 - RNA, 19 nt, Homo sapiens
  misc_RNA (1)...(19): siRNA sense strand
caggagcucuggcuauugu

SEQ ID NO: 1962680 - RNA, 19 nt, Homo sapiens
  misc_RNA (1)...(19): siRNA sense strand
caccucagauugauauguu

SEQ ID NO: 1962681 - RNA, 19 nt, Homo sapiens
  misc_RNA (1)...(19): siRNA sense strand
ugaagucaucugucuauuu

SEQ ID NO: 1962682 - RNA, 19 nt, Homo sapiens
  misc_RNA (1)...(19): siRNA sense strand
ucuaaacucuuucuuggau

SEQ ID NO: 1962683 - RNA, 19 nt, Homo sapiens
  misc_RNA (1)...(19): siRNA sense strand
ccacucauuugcaacuuau

SEQ ID NO: 1962684 - RNA, 19 nt, Homo sapiens
  misc_RNA (1)...(19): siRNA sense strand
guucaccacucauuugcaa

SEQ ID NO: 1962685 - RNA, 19 nt, Homo sapiens
  misc_RNA (1)...(19): siRNA sense strand
ggacauccucugcaucuuc

SEQ ID NO: 1962686 - RNA, 19 nt, Homo sapiens
  misc_RNA (1)...(19): siRNA sense strand
ggacucuccugccauugga

SEQ ID NO: 1962687 - RNA, 19 nt, Homo sapiens
  misc_RNA (1)...(19): siRNA sense strand
ucacccaucuacaggauug

SEQ ID NO: 1962688 - RNA, 19 nt, Homo sapiens
  misc_RNA (1)...(19): siRNA sense strand
gaaugaauguuuagauacc

SEQ ID NO: 1962689 - RNA, 19 nt, Homo sapiens
  misc_RNA (1)...(19): siRNA sense strand
ggauuguccuguuacuaau

SEQ ID NO: 1962690 - RNA, 19 nt, Homo sapiens
  misc_RNA (1)...(19): siRNA sense strand
gcucaucacugaaguugcu

SEQ ID NO: 1962691 - RNA, 19 nt, Homo sapiens
  misc_RNA (1)...(19): siRNA sense strand
ggaaacucacacucgcuua

SEQ ID NO: 1962692 - RNA, 19 nt, Homo sapiens
  misc_RNA (1)...(19): siRNA sense strand
ucacggcaguucucauuag

SEQ ID NO: 1962693 - RNA, 19 nt, Homo sapiens
  misc_RNA (1)...(19): siRNA sense strand
cugggacucuggaugguua

SEQ ID NO: 1962694 - RNA, 19 nt, Homo sapiens
  misc_RNA (1)...(19): siRNA sense strand
gcauacaaacgacuagaug

SEQ ID NO: 1962695 - RNA, 19 nt, Homo sapiens
  misc_RNA (1)...(19): siRNA sense strand
gaaauuggacaugggauag

SEQ ID NO: 1962696 - RNA, 19 nt, Homo sapiens
  misc_RNA (1)...(19): siRNA sense strand
uuagugguguuguacauga

SEQ ID NO: 1962697 - RNA, 19 nt, Homo sapiens
  misc_RNA (1)...(19): siRNA sense strand
gacauccucugcaucuuca

SEQ ID NO: 1962698 - RNA, 19 nt, Homo sapiens
  misc_RNA (1)...(19): siRNA sense strand
ggaaugaauguuuagauac

SEQ ID NO: 1962699 - RNA, 19 nt, Homo sapiens
  misc_RNA (1)...(19): siRNA sense strand
ucucauuagugguguugua

SEQ ID NO: 1962700 - RNA, 19 nt, Homo sapiens
  misc_RNA (1)...(19): siRNA sense strand
ucaacugaaugcuguaaca

SEQ ID NO: 1962701 - RNA, 19 nt, Homo sapiens
  misc_RNA (1)...(19): siRNA sense strand
gugcaagauuggaaugaau

SEQ ID NO: 1962702 - RNA, 19 nt, Homo sapiens
  misc_RNA (1)...(19): siRNA sense strand
ugaaauuggacaugggaua

SEQ ID NO: 1962703 - RNA, 19 nt, Homo sapiens
  misc_RNA (1)...(19): siRNA sense strand
gacucucccucuucuuauu

SEQ ID NO: 1962704 - RNA, 19 nt, Homo sapiens
  misc_RNA (1)...(19): siRNA sense strand
gcugaagucaucugucuau

SEQ ID NO: 1962705 - RNA, 19 nt, Homo sapiens
  misc_RNA (1)...(19): siRNA sense strand
aaucacagccucacagaug

SEQ ID NO: 1962706 - RNA, 19 nt, Homo sapiens
  misc_RNA (1)...(19): siRNA sense strand
uauuuauccuggagcauuu

SEQ ID NO: 1962707 - RNA, 19 nt, Homo sapiens
  misc_RNA (1)...(19): siRNA sense strand
gaucuguucaccacucauu

SEQ ID NO: 1962708 - RNA, 19 nt, Homo sapiens
  misc_RNA (1)...(19): siRNA sense strand
ggacaauggauucuaaacu

SEQ ID NO: 1962709 - RNA, 19 nt, Homo sapiens
  misc_RNA (1)...(19): siRNA sense strand
caaguucaaguuucuguau

SEQ ID NO: 1962710 - RNA, 19 nt, Homo sapiens
  misc_RNA (1)...(19): siRNA sense strand
caguaauucucuugccauu

SEQ ID NO: 1962711 - RNA, 19 nt, Homo sapiens
  misc_RNA (1)...(19): siRNA sense strand
caaguugugguuccuggua

SEQ ID NO: 1962712 - RNA, 19 nt, Homo sapiens
  misc_RNA (1)...(19): siRNA sense strand
gauucuaaacucuuucuug

SEQ ID NO: 1962713 - RNA, 19 nt, Homo sapiens
  misc_RNA (1)...(19): siRNA sense strand
guaccugauuucccucuca

SEQ ID NO: 1962714 - RNA, 19 nt, Homo sapiens
  misc_RNA (1)...(19): siRNA sense strand
uuaauaagcguuugcauac

SEQ ID NO: 1962715 - RNA, 19 nt, Homo sapiens
  misc_RNA (1)...(19): siRNA sense strand
gugcugaagucaucugucu

SEQ ID NO: 1962716 - RNA, 19 nt, Homo sapiens
  misc_RNA (1)...(19): siRNA sense strand
aauaagcguuugcauacau

SEQ ID NO: 1962717 - RNA, 19 nt, Homo sapiens
  misc_RNA (1)...(19): siRNA sense strand
gagcucuggcuauuguuaa

SEQ ID NO: 1962718 - RNA, 19 nt, Homo sapiens
  misc_RNA (1)...(19): siRNA sense strand
guauaaauuuacccgucaa

SEQ ID NO: 1962719 - RNA, 19 nt, Homo sapiens
  misc_RNA (1)...(19): siRNA sense strand
aaacacccaccucagauug

SEQ ID NO: 1962720 - RNA, 19 nt, Homo sapiens
  misc_RNA (1)...(19): siRNA sense strand
cagaaccaauaaagacugu

SEQ ID NO: 1962721 - RNA, 19 nt, Homo sapiens
  misc_RNA (1)...(19): siRNA sense strand
ucaacugaccuauuucuuc

SEQ ID NO: 1962722 - RNA, 19 nt, Homo sapiens
  misc_RNA (1)...(19): siRNA sense strand
aaauuuacccgucaaucaa

SEQ ID NO: 1962723 - RNA, 19 nt, Homo sapiens
  misc_RNA (1)...(19): siRNA sense strand
gacuagaugguucaacuga

SEQ ID NO: 1962724 - RNA, 19 nt, Homo sapiens
  misc_RNA (1)...(19): siRNA sense strand
aacucacacucgcuuaaua

SEQ ID NO: 1962725 - RNA, 19 nt, Homo sapiens
  misc_RNA (1)...(19): siRNA sense strand
gaugcagacuuuggcacaa

SEQ ID NO: 1962726 - RNA, 19 nt, Homo sapiens
  misc_RNA (1)...(19): siRNA sense strand
caucuccccuuuccacaua

SEQ ID NO: 1962727 - RNA, 19 nt, Homo sapiens
  misc_RNA (1)...(19): siRNA sense strand
gguuccugguauaaauuua

SEQ ID NO: 1962728 - RNA, 19 nt, Homo sapiens
  misc_RNA (1)...(19): siRNA sense strand
aaugguguuuggcguaauu

SEQ ID NO: 1962729 - RNA, 19 nt, Homo sapiens
  misc_RNA (1)...(19): siRNA sense strand
cugacucucccucuucuua

SEQ ID NO: 1962730 - RNA, 19 nt, Homo sapiens
  misc_RNA (1)...(19): siRNA sense strand
uaauaagcguuugcauaca

SEQ ID NO: 1962731 - RNA, 19 nt, Homo sapiens
  misc_RNA (1)...(19): siRNA sense strand
acugaaugcuguaacaauc

SEQ ID NO: 1962732 - RNA, 19 nt, Homo sapiens
  misc_RNA (1)...(19): siRNA sense strand
aagcucaaguucaaguuuc

SEQ ID NO: 1962733 - RNA, 19 nt, Homo sapiens
  misc_RNA (1)...(19): siRNA sense strand
ugaccgacuuggugcugaa

SEQ ID NO: 1962734 - RNA, 19 nt, Homo sapiens
  misc_RNA (1)...(19): siRNA sense strand
acaauggauucuaaacucu

SEQ ID NO: 1962735 - RNA, 19 nt, Homo sapiens
  misc_RNA (1)...(19): siRNA sense strand
guaaaacacccaccucaga

SEQ ID NO: 1962736 - RNA, 19 nt, Homo sapiens
  misc_RNA (1)...(19): siRNA sense strand
acucacacucgcuuaauaa

SEQ ID NO: 1962737 - RNA, 19 nt, Homo sapiens
  misc_RNA (1)...(19): siRNA sense strand
cuuuacagcaguuaaguuu

SEQ ID NO: 1962738 - RNA, 19 nt, Homo sapiens
  misc_RNA (1)...(19): siRNA sense strand
gcaagauuggaaugaaugu

SEQ ID NO: 1962739 - RNA, 19 nt, Homo sapiens
  misc_RNA (1)...(19): siRNA sense strand
ugaaguugcugaggacucu

SEQ ID NO: 1962740 - RNA, 19 nt, Homo sapiens
  misc_RNA (1)...(19): siRNA sense strand
ugugguuccugguauaaau

SEQ ID NO: 1962741 - RNA, 19 nt, Homo sapiens
  misc_RNA (1)...(19): siRNA sense strand
guaauugccauguuuagcu

SEQ ID NO: 1962742 - RNA, 19 nt, Homo sapiens
  misc_RNA (1)...(19): siRNA sense strand
caacugaaugcuguaacaa

SEQ ID NO: 1962743 - RNA, 19 nt, Homo sapiens
  misc_RNA (1)...(19): siRNA sense strand
ggcguaauugccauguuua

SEQ ID NO: 1962744 - RNA, 19 nt, Homo sapiens
  misc_RNA (1)...(19): siRNA sense strand
acccuuaccucagugauug

SEQ ID NO: 1962745 - RNA, 19 nt, Homo sapiens
  misc_RNA (1)...(19): siRNA sense strand
cucaggagcucuggcuauu

SEQ ID NO: 1962746 - RNA, 19 nt, Homo sapiens
  misc_RNA (1)...(19): siRNA sense strand
ugccauguuuagcucauuu

SEQ ID NO: 1962747 - RNA, 19 nt, Homo sapiens
  misc_RNA (1)...(19): siRNA sense strand
ccggaaagcaguugaagca

SEQ ID NO: 1962748 - RNA, 19 nt, Homo sapiens
  misc_RNA (1)...(19): siRNA sense strand
cuugcacucuuggguauuu

SEQ ID NO: 1962749 - RNA, 19 nt, Homo sapiens
  misc_RNA (1)...(19): siRNA sense strand
gaugucaaagaucuaauag

SEQ ID NO: 1962750 - RNA, 19 nt, Homo sapiens
  misc_RNA (1)...(19): siRNA sense strand
ggcuauuguuaaugcagua

SEQ ID NO: 1962751 - RNA, 19 nt, Homo sapiens
  misc_RNA (1)...(19): siRNA sense strand
aaagcucaaguucaaguuu

SEQ ID NO: 1962752 - RNA, 19 nt, Homo sapiens
  misc_RNA (1)...(19): siRNA sense strand
gagaagaauuuauggagua

SEQ ID NO: 1962753 - RNA, 19 nt, Homo sapiens
  misc_RNA (1)...(19): siRNA sense strand
ggcagaagcucaacuauga

SEQ ID NO: 1962754 - RNA, 19 nt, Homo sapiens
  misc_RNA (1)...(19): siRNA sense strand
gaagcugacucuuuguugu

SEQ ID NO: 1962755 - RNA, 19 nt, Homo sapiens
  misc_RNA (1)...(19): siRNA sense strand
aaggaaagcucgagagaug

SEQ ID NO: 1962756 - RNA, 19 nt, Homo sapiens
  misc_RNA (1)...(19): siRNA sense strand
gggaugaugagaagaauuu

SEQ ID NO: 1962757 - RNA, 19 nt, Homo sapiens
  misc_RNA (1)...(19): siRNA sense strand
guaaucagcaggccaaaga

SEQ ID NO: 1962758 - RNA, 19 nt, Homo sapiens
  misc_RNA (1)...(19): siRNA sense strand
caauccauauuccucauuu

SEQ ID NO: 1962759 - RNA, 19 nt, Homo sapiens
  misc_RNA (1)...(19): siRNA sense strand
gaaguaagaaacagaugga

SEQ ID NO: 1962760 - RNA, 19 nt, Homo sapiens
  misc_RNA (1)...(19): siRNA sense strand
ggaaagcucgagagauguu

SEQ ID NO: 1962761 - RNA, 19 nt, Homo sapiens
  misc_RNA (1)...(19): siRNA sense strand
cagaagcucaacuaugaua

SEQ ID NO: 1962762 - RNA, 19 nt, Homo sapiens
  misc_RNA (1)...(19): siRNA sense strand
gcugaagaaaccaguauuu

SEQ ID NO: 1962763 - RNA, 19 nt, Homo sapiens
  misc_RNA (1)...(19): siRNA sense strand
gcucaacuaugauauccau

SEQ ID NO: 1962764 - RNA, 19 nt, Homo sapiens
  misc_RNA (1)...(19): siRNA sense strand
ggugagggaugaugagaag

SEQ ID NO: 1962765 - RNA, 19 nt, Homo sapiens
  misc_RNA (1)...(19): siRNA sense strand
gcacauaugcagggaguau

SEQ ID NO: 1962766 - RNA, 19 nt, Homo sapiens
  misc_RNA (1)...(19): siRNA sense strand
guaagaaacagauggaagu

SEQ ID NO: 1962767 - RNA, 19 nt, Homo sapiens
  misc_RNA (1)...(19): siRNA sense strand
cucgagagauguuguuaaa

SEQ ID NO: 1962768 - RNA, 19 nt, Homo sapiens
  misc_RNA (1)...(19): siRNA sense strand
ggaagcugacucuuuguug

SEQ ID NO: 1962769 - RNA, 19 nt, Homo sapiens
  misc_RNA (1)...(19): siRNA sense strand
gaagggaaguaagaaacag

SEQ ID NO: 1962770 - RNA, 19 nt, Homo sapiens
  misc_RNA (1)...(19): siRNA sense strand
ucagugauaacaauccaua

SEQ ID NO: 1962771 - RNA, 19 nt, Homo sapiens
  misc_RNA (1)...(19): siRNA sense strand
caacucuggugagggauga

SEQ ID NO: 1962772 - RNA, 19 nt, Homo sapiens
  misc_RNA (1)...(19): siRNA sense strand
gcagauggccagaaagaac

SEQ ID NO: 1962773 - RNA, 19 nt, Homo sapiens
  misc_RNA (1)...(19): siRNA sense strand
ugacuaaacucagcaccau

SEQ ID NO: 1962774 - RNA, 19 nt, Homo sapiens
  misc_RNA (1)...(19): siRNA sense strand
gaagcucaacuaugauauc

SEQ ID NO: 1962775 - RNA, 19 nt, Homo sapiens
  misc_RNA (1)...(19): siRNA sense strand
gugauaacaauccauauuc

SEQ ID NO: 1962776 - RNA, 19 nt, Homo sapiens
  misc_RNA (1)...(19): siRNA sense strand
ccucgucagugauaacaau

SEQ ID NO: 1962777 - RNA, 19 nt, Homo sapiens
  misc_RNA (1)...(19): siRNA sense strand
gaugagaagaauuuaugga

SEQ ID NO: 1962778 - RNA, 19 nt, Homo sapiens
  misc_RNA (1)...(19): siRNA sense strand
gcagggaguauugcacuga

SEQ ID NO: 1962779 - RNA, 19 nt, Homo sapiens
  misc_RNA (1)...(19): siRNA sense strand
gagggaugaugagaagaau

SEQ ID NO: 1962780 - RNA, 19 nt, Homo sapiens
  misc_RNA (1)...(19): siRNA sense strand
caaguugggagcucucaga

SEQ ID NO: 1962781 - RNA, 19 nt, Homo sapiens
  misc_RNA (1)...(19): siRNA sense strand
gcucgagagauguuguuaa

SEQ ID NO: 1962782 - RNA, 19 nt, Homo sapiens
  misc_RNA (1)...(19): siRNA sense strand
gauagucauucguaaucag

SEQ ID NO: 1962783 - RNA, 19 nt, Homo sapiens
  misc_RNA (1)...(19): siRNA sense strand
ggaccucucaugcagacuu

SEQ ID NO: 1962784 - RNA, 19 nt, Homo sapiens
  misc_RNA (1)...(19): siRNA sense strand
ugagggaugaugagaagaa

SEQ ID NO: 1962785 - RNA, 19 nt, Homo sapiens
  misc_RNA (1)...(19): siRNA sense strand
gaccucucaugcagacuug

SEQ ID NO: 1962786 - RNA, 19 nt, Homo sapiens
  misc_RNA (1)...(19): siRNA sense strand
cugagggacuggcugagaa

SEQ ID NO: 1962787 - RNA, 19 nt, Homo sapiens
  misc_RNA (1)...(19): siRNA sense strand
ggaugaugagaagaauuua

SEQ ID NO: 1962788 - RNA, 19 nt, Homo sapiens
  misc_RNA (1)...(19): siRNA sense strand
cgagagauguuguuaaaac

SEQ ID NO: 1962789 - RNA, 19 nt, Homo sapiens
  misc_RNA (1)...(19): siRNA sense strand
cgaagggaaguaagaaaca

SEQ ID NO: 1962790 - RNA, 19 nt, Homo sapiens
  misc_RNA (1)...(19): siRNA sense strand
guuguggaccgucucauug

SEQ ID NO: 1962791 - RNA, 19 nt, Homo sapiens
  misc_RNA (1)...(19): siRNA sense strand
aagaauuuauggaguaugc

SEQ ID NO: 1962792 - RNA, 19 nt, Homo sapiens
  misc_RNA (1)...(19): siRNA sense strand
uaagcuugcucgucgaacu

SEQ ID NO: 1962793 - RNA, 19 nt, Homo sapiens
  misc_RNA (1)...(19): siRNA sense strand
acaaggaaagcucgagaga

SEQ ID NO: 1962794 - RNA, 19 nt, Homo sapiens
  misc_RNA (1)...(19): siRNA sense strand
agaacccuguacaauuuga

SEQ ID NO: 1962795 - RNA, 19 nt, Homo sapiens
  misc_RNA (1)...(19): siRNA sense strand
gcagaagcucaacuaugau

SEQ ID NO: 1962796 - RNA, 19 nt, Homo sapiens
  misc_RNA (1)...(19): siRNA sense strand
gaccgucucauugcacuug

SEQ ID NO: 1962797 - RNA, 19 nt, Homo sapiens
  misc_RNA (1)...(19): siRNA sense strand
uggcagaagcucaacuaug

SEQ ID NO: 1962798 - RNA, 19 nt, Homo sapiens
  misc_RNA (1)...(19): siRNA sense strand
caaggaaagcucgagagau

SEQ ID NO: 1962799 - RNA, 19 nt, Homo sapiens
  misc_RNA (1)...(19): siRNA sense strand
uaagaaacagauggaagug

SEQ ID NO: 1962800 - RNA, 19 nt, Homo sapiens
  misc_RNA (1)...(19): siRNA sense strand
acauaugcagggaguauug

SEQ ID NO: 1962801 - RNA, 19 nt, Homo sapiens
  misc_RNA (1)...(19): siRNA sense strand
ugauaacaauccauauucc

SEQ ID NO: 1962802 - RNA, 19 nt, Homo sapiens
  misc_RNA (1)...(19): siRNA sense strand
gaaagcucgagagauguug

SEQ ID NO: 1962803 - RNA, 19 nt, Homo sapiens
  misc_RNA (1)...(19): siRNA sense strand
gacucuuuguugucaguga

SEQ ID NO: 1962804 - RNA, 19 nt, Homo sapiens
  misc_RNA (1)...(19): siRNA sense strand
gcugagggacuggcugaga

SEQ ID NO: 1962805 - RNA, 19 nt, Homo sapiens
  misc_RNA (1)...(19): siRNA sense strand
acaauuugauagucauucg

SEQ ID NO: 1962806 - RNA, 19 nt, Homo sapiens
  misc_RNA (1)...(19): siRNA sense strand
guucgaagggaaguaagaa

SEQ ID NO: 1962807 - RNA, 19 nt, Homo sapiens
  misc_RNA (1)...(19): siRNA sense strand
agaggcagacgacgacaga

SEQ ID NO: 1962808 - RNA, 19 nt, Homo sapiens
  misc_RNA (1)...(19): siRNA sense strand
ggacaaagguguucaaauc

SEQ ID NO: 1962809 - RNA, 19 nt, Homo sapiens
  misc_RNA (1)...(19): siRNA sense strand
gaacaaauccgagagauga

SEQ ID NO: 1962810 - RNA, 19 nt, Homo sapiens
  misc_RNA (1)...(19): siRNA sense strand
gaacccagcugccuaacaa

SEQ ID NO: 1962811 - RNA, 19 nt, Homo sapiens
  misc_RNA (1)...(19): siRNA sense strand
gcgcacagcuucuuugaug

SEQ ID NO: 1962812 - RNA, 19 nt, Homo sapiens
  misc_RNA (1)...(19): siRNA sense strand
gcucuagccugcuggagua

SEQ ID NO: 1962813 - RNA, 19 nt, Homo sapiens
  misc_RNA (1)...(19): siRNA sense strand
uaaaucuggugcuggaaua

SEQ ID NO: 1962814 - RNA, 19 nt, Homo sapiens
  misc_RNA (1)...(19): siRNA sense strand
caaguucccucagauuaaa

SEQ ID NO: 1962815 - RNA, 19 nt, Homo sapiens
  misc_RNA (1)...(19): siRNA sense strand
gaacuagucgccaucaaga

SEQ ID NO: 1962816 - RNA, 19 nt, Homo sapiens
  misc_RNA (1)...(19): siRNA sense strand
gaccaucccuauccucuau

SEQ ID NO: 1962817 - RNA, 19 nt, Homo sapiens
  misc_RNA (1)...(19): siRNA sense strand
gaaggugaccacagucgua

SEQ ID NO: 1962818 - RNA, 19 nt, Homo sapiens
  misc_RNA (1)...(19): siRNA sense strand
ccagagcgcucccaagaag

SEQ ID NO: 1962819 - RNA, 19 nt, Homo sapiens
  misc_RNA (1)...(19): siRNA sense strand
ucacaagcuuuaacugaga

SEQ ID NO: 1962820 - RNA, 19 nt, Homo sapiens
  misc_RNA (1)...(19): siRNA sense strand
gcacagcuucuuugaugaa

SEQ ID NO: 1962821 - RNA, 19 nt, Homo sapiens
  misc_RNA (1)...(19): siRNA sense strand
ucucaucccuccucacuug

SEQ ID NO: 1962822 - RNA, 19 nt, Homo sapiens
  misc_RNA (1)...(19): siRNA sense strand
ucaaguucccucagauuaa

SEQ ID NO: 1962823 - RNA, 19 nt, Homo sapiens
  misc_RNA (1)...(19): siRNA sense strand
ccacaccuacccucacuaa

SEQ ID NO: 1962824 - RNA, 19 nt, Homo sapiens
  misc_RNA (1)...(19): siRNA sense strand
gcgggaaggugaccacagu

SEQ ID NO: 1962825 - RNA, 19 nt, Homo sapiens
  misc_RNA (1)...(19): siRNA sense strand
gaguucaaguucccucaga

SEQ ID NO: 1962826 - RNA, 19 nt, Homo sapiens
  misc_RNA (1)...(19): siRNA sense strand
ggaacaaauccgagagaug

SEQ ID NO: 1962827 - RNA, 19 nt, Homo sapiens
  misc_RNA (1)...(19): siRNA sense strand
gcagagaccagggaacuag

SEQ ID NO: 1962828 - RNA, 19 nt, Homo sapiens
  misc_RNA (1)...(19): siRNA sense strand
cuggaccacugcaauauug

SEQ ID NO: 1962829 - RNA, 19 nt, Homo sapiens
  misc_RNA (1)...(19): siRNA sense strand
ggaacuagucgccaucaag

SEQ ID NO: 1962830 - RNA, 19 nt, Homo sapiens
  misc_RNA (1)...(19): siRNA sense strand
ccucacaagcuuuaacuga

SEQ ID NO: 1962831 - RNA, 19 nt, Homo sapiens
  misc_RNA (1)...(19): siRNA sense strand
gggaacaaauccgagagau

SEQ ID NO: 1962832 - RNA, 19 nt, Homo sapiens
  misc_RNA (1)...(19): siRNA sense strand
acaaagguguucaaaucuc

SEQ ID NO: 1962833 - RNA, 19 nt, Homo sapiens
  misc_RNA (1)...(19): siRNA sense strand
caucuguucucgcuacuac

SEQ ID NO: 1962834 - RNA, 19 nt, Homo sapiens
  misc_RNA (1)...(19): siRNA sense strand
gaaccgagagcugcagauc

SEQ ID NO: 1962835 - RNA, 19 nt, Homo sapiens
  misc_RNA (1)...(19): siRNA sense strand
cagcuucuuugaugaacug

SEQ ID NO: 1962836 - RNA, 19 nt, Homo sapiens
  misc_RNA (1)...(19): siRNA sense strand
aagcuggaccacugcaaua

SEQ ID NO: 1962837 - RNA, 19 nt, Homo sapiens
  misc_RNA (1)...(19): siRNA sense strand
ccuaacaaccgcccacuuc

SEQ ID NO: 1962838 - RNA, 19 nt, Homo sapiens
  misc_RNA (1)...(19): siRNA sense strand
gacaaagguguucaaaucu

SEQ ID NO: 1962839 - RNA, 19 nt, Homo sapiens
  misc_RNA (1)...(19): siRNA sense strand
gcuggaccacugcaauauu

SEQ ID NO: 1962840 - RNA, 19 nt, Homo sapiens
  misc_RNA (1)...(19): siRNA sense strand
guucaaguucccucagauu

SEQ ID NO: 1962841 - RNA, 19 nt, Homo sapiens
  misc_RNA (1)...(19): siRNA sense strand
ccaaguugaccaucccuau

SEQ ID NO: 1962842 - RNA, 19 nt, Homo sapiens
  misc_RNA (1)...(19): siRNA sense strand
gaccacugcaauauuguga

SEQ ID NO: 1962843 - RNA, 19 nt, Homo sapiens
  misc_RNA (1)...(19): siRNA sense strand
caccuacccucacuaacuc

SEQ ID NO: 1962844 - RNA, 19 nt, Homo sapiens
  misc_RNA (1)...(19): siRNA sense strand
gaacaccaacccgggaaca

SEQ ID NO: 1962845 - RNA, 19 nt, Homo sapiens
  misc_RNA (1)...(19): siRNA sense strand
gggaacuagucgccaucaa

SEQ ID NO: 1962846 - RNA, 19 nt, Homo sapiens
  misc_RNA (1)...(19): siRNA sense strand
uucaaguucccucagauua

SEQ ID NO: 1962847 - RNA, 19 nt, Homo sapiens
  misc_RNA (1)...(19): siRNA sense strand
ggaccacugcaauauugug

SEQ ID NO: 1962848 - RNA, 19 nt, Homo sapiens
  misc_RNA (1)...(19): siRNA sense strand
cuacacggaguucaaguuc

SEQ ID NO: 1962849 - RNA, 19 nt, Homo sapiens
  misc_RNA (1)...(19): siRNA sense strand
acaccaacccgggaacaaa

SEQ ID NO: 1962850 - RNA, 19 nt, Homo sapiens
  misc_RNA (1)...(19): siRNA sense strand
accgagagcugcagaucau

SEQ ID NO: 1962851 - RNA, 19 nt, Homo sapiens
  misc_RNA (1)...(19): siRNA sense strand
ggaacccagcugccuaaca

SEQ ID NO: 1962852 - RNA, 19 nt, Homo sapiens
  misc_RNA (1)...(19): siRNA sense strand
ccacagucguagccacucu

SEQ ID NO: 1962853 - RNA, 19 nt, Homo sapiens
  misc_RNA (1)...(19): siRNA sense strand
caaguugaccaucccuauc

SEQ ID NO: 1962854 - RNA, 19 nt, Homo sapiens
  misc_RNA (1)...(19): siRNA sense strand
ccaguggcgagaagaaaga

SEQ ID NO: 1962855 - RNA, 19 nt, Homo sapiens
  misc_RNA (1)...(19): siRNA sense strand
ucucaacgccauucucauc

SEQ ID NO: 1962856 - RNA, 19 nt, Homo sapiens
  misc_RNA (1)...(19): siRNA sense strand
uccucaagcucugcgauuu

SEQ ID NO: 1962857 - RNA, 19 nt, Homo sapiens
  misc_RNA (1)...(19): siRNA sense strand
acaccuacccucacuaacu

SEQ ID NO: 1962858 - RNA, 19 nt, Homo sapiens
  misc_RNA (1)...(19): siRNA sense strand
ccaucgcgcucugcucuag

SEQ ID NO: 1962859 - RNA, 19 nt, Homo sapiens
  misc_RNA (1)...(19): siRNA sense strand
ugguggagaucaucaaggu

SEQ ID NO: 1962860 - RNA, 19 nt, Homo sapiens
  misc_RNA (1)...(19): siRNA sense strand
ccacugauuacaccucauc

SEQ ID NO: 1962861 - RNA, 19 nt, Homo sapiens
  misc_RNA (1)...(19): siRNA sense strand
cgagaagaaagacgagcuu

SEQ ID NO: 1962862 - RNA, 19 nt, Homo sapiens
  misc_RNA (1)...(19): siRNA sense strand
ucaaggcucuccccacuag

SEQ ID NO: 1962863 - RNA, 19 nt, Homo sapiens
  misc_RNA (1)...(19): siRNA sense strand
caccaacccgggaacaaau

SEQ ID NO: 1962864 - RNA, 19 nt, Homo sapiens
  misc_RNA (1)...(19): siRNA sense strand
ucuuuggagccacugauua

SEQ ID NO: 1962865 - RNA, 19 nt, Homo sapiens
  misc_RNA (1)...(19): siRNA sense strand
acacugcuguccucaagcu

SEQ ID NO: 1962866 - RNA, 19 nt, Homo sapiens
  misc_RNA (1)...(19): siRNA sense strand
ccaucccuauccucuaugu

SEQ ID NO: 1962867 - RNA, 19 nt, Homo sapiens
  misc_RNA (1)...(19): siRNA sense strand
ggaauaugugcccgagaca

SEQ ID NO: 1962868 - RNA, 19 nt, Homo sapiens
  misc_RNA (1)...(19): siRNA sense strand
ccccagagcucaucuuugg

SEQ ID NO: 1962869 - RNA, 19 nt, Homo sapiens
  misc_RNA (1)...(19): siRNA sense strand
gcucccaagaaguggcuua

SEQ ID NO: 1962870 - RNA, 19 nt, Homo sapiens
  misc_RNA (1)...(19): siRNA sense strand
gcauggacugcgcgucuug

SEQ ID NO: 1962871 - RNA, 19 nt, Homo sapiens
  misc_RNA (1)...(19): siRNA sense strand
cagaacagcuugaugcaaa

SEQ ID NO: 1962872 - RNA, 19 nt, Homo sapiens
  misc_RNA (1)...(19): siRNA sense strand
gcaaacaacccacugacua

SEQ ID NO: 1962873 - RNA, 19 nt, Homo sapiens
  misc_RNA (1)...(19): siRNA sense strand
cuaagaaggucgcaaacaa

SEQ ID NO: 1962874 - RNA, 19 nt, Homo sapiens
  misc_RNA (1)...(19): siRNA sense strand
acacuggacuucagaaaug

SEQ ID NO: 1962875 - RNA, 19 nt, Homo sapiens
  misc_RNA (1)...(19): siRNA sense strand
gcgcaguccuuccaucuga

SEQ ID NO: 1962876 - RNA, 19 nt, Homo sapiens
  misc_RNA (1)...(19): siRNA sense strand
gcaaacaguggauuaccua

SEQ ID NO: 1962877 - RNA, 19 nt, Homo sapiens
  misc_RNA (1)...(19): siRNA sense strand
gaacacuggacuucagaaa

SEQ ID NO: 1962878 - RNA, 19 nt, Homo sapiens
  misc_RNA (1)...(19): siRNA sense strand
caaacaacccacugacuau

SEQ ID NO: 1962879 - RNA, 19 nt, Homo sapiens
  misc_RNA (1)...(19): siRNA sense strand
gaagaugccagacucagau

SEQ ID NO: 1962880 - RNA, 19 nt, Homo sapiens
  misc_RNA (1)...(19): siRNA sense strand
ccacaccaaugccuucaug

SEQ ID NO: 1962881 - RNA, 19 nt, Homo sapiens
  misc_RNA (1)...(19): siRNA sense strand
ggaagaugccagacucaga

SEQ ID NO: 1962882 - RNA, 19 nt, Homo sapiens
  misc_RNA (1)...(19): siRNA sense strand
acaacccacugacuauaaa

SEQ ID NO: 1962883 - RNA, 19 nt, Homo sapiens
  misc_RNA (1)...(19): siRNA sense strand
aaacaacccacugacuaua

SEQ ID NO: 1962884 - RNA, 19 nt, Homo sapiens
  misc_RNA (1)...(19): siRNA sense strand
gaacggccucgacacauca

SEQ ID NO: 1962885 - RNA, 19 nt, Homo sapiens
  misc_RNA (1)...(19): siRNA sense strand
gaaacacguucgucguacu

SEQ ID NO: 1962886 - RNA, 19 nt, Homo sapiens
  misc_RNA (1)...(19): siRNA sense strand
cgacacaggcugccaccaa

SEQ ID NO: 1962887 - RNA, 19 nt, Homo sapiens
  misc_RNA (1)...(19): siRNA sense strand
cuucagaaaugggacacua

SEQ ID NO: 1962888 - RNA, 19 nt, Homo sapiens
  misc_RNA (1)...(19): siRNA sense strand
cggaaacacguucgucgua

SEQ ID NO: 1962889 - RNA, 19 nt, Homo sapiens
  misc_RNA (1)...(19): siRNA sense strand
ugaacggccucgacacauc

SEQ ID NO: 1962890 - RNA, 19 nt, Homo sapiens
  misc_RNA (1)...(19): siRNA sense strand
gcaccagaucaaccaguuu

SEQ ID NO: 1962891 - RNA, 19 nt, Homo sapiens
  misc_RNA (1)...(19): siRNA sense strand
gcagaugaacacuggacuu

SEQ ID NO: 1962892 - RNA, 19 nt, Homo sapiens
  misc_RNA (1)...(19): siRNA sense strand
gagaacugcucacuauccu

SEQ ID NO: 1962893 - RNA, 19 nt, Homo sapiens
  misc_RNA (1)...(19): siRNA sense strand
aacaguggauuaccuaagu

SEQ ID NO: 1962894 - RNA, 19 nt, Homo sapiens
  misc_RNA (1)...(19): siRNA sense strand
ggaugcguaugcuaagaag

SEQ ID NO: 1962895 - RNA, 19 nt, Homo sapiens
  misc_RNA (1)...(19): siRNA sense strand
gcacugucccacccucaga

SEQ ID NO: 1962896 - RNA, 19 nt, Homo sapiens
  misc_RNA (1)...(19): siRNA sense strand
gaauuggaugcguaugcua

SEQ ID NO: 1962897 - RNA, 19 nt, Homo sapiens
  misc_RNA (1)...(19): siRNA sense strand
ugaugcaaacaguggauua

SEQ ID NO: 1962898 - RNA, 19 nt, Homo sapiens
  misc_RNA (1)...(19): siRNA sense strand
aaagcauacucaaggacuu

SEQ ID NO: 1962899 - RNA, 19 nt, Homo sapiens
  misc_RNA (1)...(19): siRNA sense strand
caaacaguggauuaccuaa

SEQ ID NO: 1962900 - RNA, 19 nt, Homo sapiens
  misc_RNA (1)...(19): siRNA sense strand
gcauggaggccggaagaug

SEQ ID NO: 1962901 - RNA, 19 nt, Homo sapiens
  misc_RNA (1)...(19): siRNA sense strand
caccaaugccuucaugugu

SEQ ID NO: 1962902 - RNA, 19 nt, Homo sapiens
  misc_RNA (1)...(19): siRNA sense strand
gaccgugucuaccucaacu

SEQ ID NO: 1962903 - RNA, 19 nt, Homo sapiens
  misc_RNA (1)...(19): siRNA sense strand
gcuaagaaggucgcaaaca

SEQ ID NO: 1962904 - RNA, 19 nt, Homo sapiens
  misc_RNA (1)...(19): siRNA sense strand
gaacagcuugaugcaaaca

SEQ ID NO: 1962905 - RNA, 19 nt, Homo sapiens
  misc_RNA (1)...(19): siRNA sense strand
gggcaggcaucagcacuac

SEQ ID NO: 1962906 - RNA, 19 nt, Homo sapiens
  misc_RNA (1)...(19): siRNA sense strand
ccaaaagcauacucaagga

SEQ ID NO: 1962907 - RNA, 19 nt, Homo sapiens
  misc_RNA (1)...(19): siRNA sense strand
aacaacccacugacuauaa

SEQ ID NO: 1962908 - RNA, 19 nt, Homo sapiens
  misc_RNA (1)...(19): siRNA sense strand
agaaaugggacacuacaca

SEQ ID NO: 1962909 - RNA, 19 nt, Homo sapiens
  misc_RNA (1)...(19): siRNA sense strand
ccacagagagucgaagucu

SEQ ID NO: 1962910 - RNA, 19 nt, Homo sapiens
  misc_RNA (1)...(19): siRNA sense strand
ccaguggcacccuaugcua

SEQ ID NO: 1962911 - RNA, 19 nt, Homo sapiens
  misc_RNA (1)...(19): siRNA sense strand
cgaauuggaugcguaugcu

SEQ ID NO: 1962912 - RNA, 19 nt, Homo sapiens
  misc_RNA (1)...(19): siRNA sense strand
cagaugaacacuggacuuc

SEQ ID NO: 1962913 - RNA, 19 nt, Homo sapiens
  misc_RNA (1)...(19): siRNA sense strand
uaagaaggucgcaaacaac

SEQ ID NO: 1962914 - RNA, 19 nt, Homo sapiens
  misc_RNA (1)...(19): siRNA sense strand
ugucaaagugccagccaaa

SEQ ID NO: 1962915 - RNA, 19 nt, Homo sapiens
  misc_RNA (1)...(19): siRNA sense strand
cacagagagucgaagucuu

SEQ ID NO: 1962916 - RNA, 19 nt, Homo sapiens
  misc_RNA (1)...(19): siRNA sense strand
cgaaugugaccgugucuac

SEQ ID NO: 1962917 - RNA, 19 nt, Homo sapiens
  misc_RNA (1)...(19): siRNA sense strand
aauuggaugcguaugcuaa

SEQ ID NO: 1962918 - RNA, 19 nt, Homo sapiens
  misc_RNA (1)...(19): siRNA sense strand
aaaugggacacuacacaga

SEQ ID NO: 1962919 - RNA, 19 nt, Homo sapiens
  misc_RNA (1)...(19): siRNA sense strand
ccuuucagccucuuucuca

SEQ ID NO: 1962920 - RNA, 19 nt, Homo sapiens
  misc_RNA (1)...(19): siRNA sense strand
ugcaccagaucaaccaguu

SEQ ID NO: 1962921 - RNA, 19 nt, Homo sapiens
  misc_RNA (1)...(19): siRNA sense strand
aaugggacacuacacagaa

SEQ ID NO: 1962922 - RNA, 19 nt, Homo sapiens
  misc_RNA (1)...(19): siRNA sense strand
ucagaaaugggacacuaca

SEQ ID NO: 1962923 - RNA, 19 nt, Homo sapiens
  misc_RNA (1)...(19): siRNA sense strand
gaacacaccuggaaagaug

SEQ ID NO: 1962924 - RNA, 19 nt, Homo sapiens
  misc_RNA (1)...(19): siRNA sense strand
gcaguaacaucgauuguaa

SEQ ID NO: 1962925 - RNA, 19 nt, Homo sapiens
  misc_RNA (1)...(19): siRNA sense strand
gaaguacgcugcucugguu

SEQ ID NO: 1962926 - RNA, 19 nt, Homo sapiens
  misc_RNA (1)...(19): siRNA sense strand
ggaauuaugucaccaaaca

SEQ ID NO: 1962927 - RNA, 19 nt, Homo sapiens
  misc_RNA (1)...(19): siRNA sense strand
gacauuagacguuucauua

SEQ ID NO: 1962928 - RNA, 19 nt, Homo sapiens
  misc_RNA (1)...(19): siRNA sense strand
gaacuaugcuuuugagaua

SEQ ID NO: 1962929 - RNA, 19 nt, Homo sapiens
  misc_RNA (1)...(19): siRNA sense strand
ggagauacagauucaauua

SEQ ID NO: 1962930 - RNA, 19 nt, Homo sapiens
  misc_RNA (1)...(19): siRNA sense strand
uaacaucgcugggaacauu

SEQ ID NO: 1962931 - RNA, 19 nt, Homo sapiens
  misc_RNA (1)...(19): siRNA sense strand
gaagauggccgagagauuu

SEQ ID NO: 1962932 - RNA, 19 nt, Homo sapiens
  misc_RNA (1)...(19): siRNA sense strand
cagcacagcucacugauga

SEQ ID NO: 1962933 - RNA, 19 nt, Homo sapiens
  misc_RNA (1)...(19): siRNA sense strand
gcucaaaggauuagauaua

SEQ ID NO: 1962934 - RNA, 19 nt, Homo sapiens
  misc_RNA (1)...(19): siRNA sense strand
agauaaagcuguagacuug

SEQ ID NO: 1962935 - RNA, 19 nt, Homo sapiens
  misc_RNA (1)...(19): siRNA sense strand
ugaagaaguugaugaagaa

SEQ ID NO: 1962936 - RNA, 19 nt, Homo sapiens
  misc_RNA (1)...(19): siRNA sense strand
gauaaugucuuugaugguu

SEQ ID NO: 1962937 - RNA, 19 nt, Homo sapiens
  misc_RNA (1)...(19): siRNA sense strand
aaagaacacugcuagguuu

SEQ ID NO: 1962938 - RNA, 19 nt, Homo sapiens
  misc_RNA (1)...(19): siRNA sense strand
gaaacaggaacuccaauuu

SEQ ID NO: 1962939 - RNA, 19 nt, Homo sapiens
  misc_RNA (1)...(19): siRNA sense strand
ccaagaagcccuagaaaga

SEQ ID NO: 1962940 - RNA, 19 nt, Homo sapiens
  misc_RNA (1)...(19): siRNA sense strand
guacaaacugcuugaaaua

SEQ ID NO: 1962941 - RNA, 19 nt, Homo sapiens
  misc_RNA (1)...(19): siRNA sense strand
ucaaacagcuaaugaaaca

SEQ ID NO: 1962942 - RNA, 19 nt, Homo sapiens
  misc_RNA (1)...(19): siRNA sense strand
caacacaucuagccuggaa

SEQ ID NO: 1962943 - RNA, 19 nt, Homo sapiens
  misc_RNA (1)...(19): siRNA sense strand
gcaagaaguucaaguggau

SEQ ID NO: 1962944 - RNA, 19 nt, Homo sapiens
  misc_RNA (1)...(19): siRNA sense strand
gaaagaacacugcuagguu

SEQ ID NO: 1962945 - RNA, 19 nt, Homo sapiens
  misc_RNA (1)...(19): siRNA sense strand
caagauaggucgacugaag

SEQ ID NO: 1962946 - RNA, 19 nt, Homo sapiens
  misc_RNA (1)...(19): siRNA sense strand
gcaccaaucuggaagaagu

SEQ ID NO: 1962947 - RNA, 19 nt, Homo sapiens
  misc_RNA (1)...(19): siRNA sense strand
ugaaucuucucaacuguua

SEQ ID NO: 1962948 - RNA, 19 nt, Homo sapiens
  misc_RNA (1)...(19): siRNA sense strand
gaacacagcagagcaauuc

SEQ ID NO: 1962949 - RNA, 19 nt, Homo sapiens
  misc_RNA (1)...(19): siRNA sense strand
gagauacugugucauaugu

SEQ ID NO: 1962950 - RNA, 19 nt, Homo sapiens
  misc_RNA (1)...(19): siRNA sense strand
ggacauugaucaagaaggu

SEQ ID NO: 1962951 - RNA, 19 nt, Homo sapiens
  misc_RNA (1)...(19): siRNA sense strand
caacugagcaacaaauuga

SEQ ID NO: 1962952 - RNA, 19 nt, Homo sapiens
  misc_RNA (1)...(19): siRNA sense strand
ggaagaaguauuuaaguug

SEQ ID NO: 1962953 - RNA, 19 nt, Homo sapiens
  misc_RNA (1)...(19): siRNA sense strand
gaaaggacguaagaaagga

SEQ ID NO: 1962954 - RNA, 19 nt, Homo sapiens
  misc_RNA (1)...(19): siRNA sense strand
caagaaaggacguaagaaa

SEQ ID NO: 1962955 - RNA, 19 nt, Homo sapiens
  misc_RNA (1)...(19): siRNA sense strand
uaugauggcugguugauau

SEQ ID NO: 1962956 - RNA, 19 nt, Homo sapiens
  misc_RNA (1)...(19): siRNA sense strand
gagcccagcuuguaucguu

SEQ ID NO: 1962957 - RNA, 19 nt, Homo sapiens
  misc_RNA (1)...(19): siRNA sense strand
caugugagcuguuguguca

SEQ ID NO: 1962958 - RNA, 19 nt, Homo sapiens
  misc_RNA (1)...(19): siRNA sense strand
ccaaaguucugcaggacua

SEQ ID NO: 1962959 - RNA, 19 nt, Homo sapiens
  misc_RNA (1)...(19): siRNA sense strand
gaucaaagccgggacacua

SEQ ID NO: 1962960 - RNA, 19 nt, Homo sapiens
  misc_RNA (1)...(19): siRNA sense strand
gauccaagcuuagaaaugg

SEQ ID NO: 1962961 - RNA, 19 nt, Homo sapiens
  misc_RNA (1)...(19): siRNA sense strand
guacuacugcagagaauua

SEQ ID NO: 1962962 - RNA, 19 nt, Homo sapiens
  misc_RNA (1)...(19): siRNA sense strand
gaacagaaagaucaaagga

SEQ ID NO: 1962963 - RNA, 19 nt, Homo sapiens
  misc_RNA (1)...(19): siRNA sense strand
gaaggauguuuaugaggaa

SEQ ID NO: 1962964 - RNA, 19 nt, Homo sapiens
  misc_RNA (1)...(19): siRNA sense strand
cgaaagagaugguacaaaa

SEQ ID NO: 1962965 - RNA, 19 nt, Homo sapiens
  misc_RNA (1)...(19): siRNA sense strand
guaaagcacgcaauaaaga

SEQ ID NO: 1962966 - RNA, 19 nt, Homo sapiens
  misc_RNA (1)...(19): siRNA sense strand
agaagaggcugauagaaau

SEQ ID NO: 1962967 - RNA, 19 nt, Homo sapiens
  misc_RNA (1)...(19): siRNA sense strand
ucacagguguuuaugaaga

SEQ ID NO: 1962968 - RNA, 19 nt, Homo sapiens
  misc_RNA (1)...(19): siRNA sense strand
gaaauuaacaaggcauuga

SEQ ID NO: 1962969 - RNA, 19 nt, Homo sapiens
  misc_RNA (1)...(19): siRNA sense strand
cagaagaggcugauagaaa

SEQ ID NO: 1962970 - RNA, 19 nt, Homo sapiens
  misc_RNA (1)...(19): siRNA sense strand
uacaggaucuuaacacuga

SEQ ID NO: 1962971 - RNA, 19 nt, Homo sapiens
  misc_RNA (1)...(19): siRNA sense strand
gaaagaaaacugcagauaa

SEQ ID NO: 1962972 - RNA, 19 nt, Homo sapiens
  misc_RNA (1)...(19): siRNA sense strand
gcagaaacaggauaaucua

SEQ ID NO: 1962973 - RNA, 19 nt, Homo sapiens
  misc_RNA (1)...(19): siRNA sense strand
ggugaaagcuggagauacu

SEQ ID NO: 1962974 - RNA, 19 nt, Homo sapiens
  misc_RNA (1)...(19): siRNA sense strand
gaucaugugugagcuaaau

SEQ ID NO: 1962975 - RNA, 19 nt, Homo sapiens
  misc_RNA (1)...(19): siRNA sense strand
guuugaagauggugacuuu

SEQ ID NO: 1962976 - RNA, 19 nt, Homo sapiens
  misc_RNA (1)...(19): siRNA sense strand
gcaacaaauugaucaugga

SEQ ID NO: 1962977 - RNA, 19 nt, Homo sapiens
  misc_RNA (1)...(19): siRNA sense strand
gaucugugauguggaaauu

SEQ ID NO: 1962978 - RNA, 19 nt, Homo sapiens
  misc_RNA (1)...(19): siRNA sense strand
cgaacaacauuaagucaau

SEQ ID NO: 1962979 - RNA, 19 nt, Homo sapiens
  misc_RNA (1)...(19): siRNA sense strand
caacgucggaugggaauua

SEQ ID NO: 1962980 - RNA, 19 nt, Homo sapiens
  misc_RNA (1)...(19): siRNA sense strand
caaagaagucauugagaaa

SEQ ID NO: 1962981 - RNA, 19 nt, Homo sapiens
  misc_RNA (1)...(19): siRNA sense strand
ggugagaaguauaaauaug

SEQ ID NO: 1962982 - RNA, 19 nt, Homo sapiens
  misc_RNA (1)...(19): siRNA sense strand
guaaugauacugaagaaga

SEQ ID NO: 1962983 - RNA, 19 nt, Homo sapiens
  misc_RNA (1)...(19): siRNA sense strand
gcaauaaagacaagaggaa

SEQ ID NO: 1962984 - RNA, 19 nt, Homo sapiens
  misc_RNA (1)...(19): siRNA sense strand
caaugaaggauguuuauga

SEQ ID NO: 1962985 - RNA, 19 nt, Homo sapiens
  misc_RNA (1)...(19): siRNA sense strand
cagaggaagugaaacaaga

SEQ ID NO: 1962986 - RNA, 19 nt, Homo sapiens
  misc_RNA (1)...(19): siRNA sense strand
gcaauggaguuugaagaug

SEQ ID NO: 1962987 - RNA, 19 nt, Homo sapiens
  misc_RNA (1)...(19): siRNA sense strand
uaacuccuguuccucuuaa

SEQ ID NO: 1962988 - RNA, 19 nt, Homo sapiens
  misc_RNA (1)...(19): siRNA sense strand
gagcuucaccgaauccuuu

SEQ ID NO: 1962989 - RNA, 19 nt, Homo sapiens
  misc_RNA (1)...(19): siRNA sense strand
caagaggaauguaaagaag

SEQ ID NO: 1962990 - RNA, 19 nt, Homo sapiens
  misc_RNA (1)...(19): siRNA sense strand
ggacuucacagguguuuau

SEQ ID NO: 1962991 - RNA, 19 nt, Homo sapiens
  misc_RNA (1)...(19): siRNA sense strand
gagccaaccugucgcaauc

SEQ ID NO: 1962992 - RNA, 19 nt, Homo sapiens
  misc_RNA (1)...(19): siRNA sense strand
ucuuaaacgugcugaauuu

SEQ ID NO: 1962993 - RNA, 19 nt, Homo sapiens
  misc_RNA (1)...(19): siRNA sense strand
ugaggaauuugaugagaaa

SEQ ID NO: 1962994 - RNA, 19 nt, Homo sapiens
  misc_RNA (1)...(19): siRNA sense strand
gcucacugaugaagagaaa

SEQ ID NO: 1962995 - RNA, 19 nt, Homo sapiens
  misc_RNA (1)...(19): siRNA sense strand
acaaacugcuugaaauaga

SEQ ID NO: 1962996 - RNA, 19 nt, Homo sapiens
  misc_RNA (1)...(19): siRNA sense strand
ggaaauuucagcaaaggaa

SEQ ID NO: 1962997 - RNA, 19 nt, Homo sapiens
  misc_RNA (1)...(19): siRNA sense strand
gagcucaaaggauuagaua

SEQ ID NO: 1962998 - RNA, 19 nt, Homo sapiens
  misc_RNA (1)...(19): siRNA sense strand
gaugguaaagcacgcaaua

SEQ ID NO: 1962999 - RNA, 19 nt, Homo sapiens
  misc_RNA (1)...(19): siRNA sense strand
gauacugugucauauguca

SEQ ID NO: 1963000 - RNA, 19 nt, Homo sapiens
  misc_RNA (1)...(19): siRNA sense strand
ccagugagccaguuugaaa

SEQ ID NO: 1963001 - RNA, 19 nt, Homo sapiens
  misc_RNA (1)...(19): siRNA sense strand
aacaggagcucaaaggauu

SEQ ID NO: 1963002 - RNA, 19 nt, Homo sapiens
  misc_RNA (1)...(19): siRNA sense strand
ggauguuuaugaggaauuu

SEQ ID NO: 1963003 - RNA, 19 nt, Homo sapiens
  misc_RNA (1)...(19): siRNA sense strand
gaaugaugcucuacuuggu

SEQ ID NO: 1963004 - RNA, 19 nt, Homo sapiens
  misc_RNA (1)...(19): siRNA sense strand
ugauggagauaccaauaaa

SEQ ID NO: 1963005 - RNA, 19 nt, Homo sapiens
  misc_RNA (1)...(19): siRNA sense strand
gaagaaauugauggagaua

SEQ ID NO: 1963006 - RNA, 19 nt, Homo sapiens
  misc_RNA (1)...(19): siRNA sense strand
gggaaaguuuggauugaau

SEQ ID NO: 1963007 - RNA, 19 nt, Homo sapiens
  misc_RNA (1)...(19): siRNA sense strand
ugucauaugucaucuguca

SEQ ID NO: 1963008 - RNA, 19 nt, Homo sapiens
  misc_RNA (1)...(19): siRNA sense strand
gugagccaguuugaaauua

SEQ ID NO: 1963009 - RNA, 19 nt, Homo sapiens
  misc_RNA (1)...(19): siRNA sense strand
ugaaacagcaagacuuaaa

SEQ ID NO: 1963010 - RNA, 19 nt, Homo sapiens
  misc_RNA (1)...(19): siRNA sense strand
ggagauaccaauaaauaca

SEQ ID NO: 1963011 - RNA, 19 nt, Homo sapiens
  misc_RNA (1)...(19): siRNA sense strand
gaguggauuuggugaaaga

SEQ ID NO: 1963012 - RNA, 19 nt, Homo sapiens
  misc_RNA (1)...(19): siRNA sense strand
guaaagaagcucgcaguga

SEQ ID NO: 1963013 - RNA, 19 nt, Homo sapiens
  misc_RNA (1)...(19): siRNA sense strand
ucacugaugaagagaaaua

SEQ ID NO: 1963014 - RNA, 19 nt, Homo sapiens
  misc_RNA (1)...(19): siRNA sense strand
ugagccaguuugaaauuaa

SEQ ID NO: 1963015 - RNA, 19 nt, Homo sapiens
  misc_RNA (1)...(19): siRNA sense strand
aagaacagaucccugaguu

SEQ ID NO: 1963016 - RNA, 19 nt, Homo sapiens
  misc_RNA (1)...(19): siRNA sense strand
gagaauuaaugugugcaaa

SEQ ID NO: 1963017 - RNA, 19 nt, Homo sapiens
  misc_RNA (1)...(19): siRNA sense strand
gcaaagaaccaucaaaaug

SEQ ID NO: 1963018 - RNA, 19 nt, Homo sapiens
  misc_RNA (1)...(19): siRNA sense strand
uaaauacucggcugaaaug

SEQ ID NO: 1963019 - RNA, 19 nt, Homo sapiens
  misc_RNA (1)...(19): siRNA sense strand
ggaacuccaauuucaauga

SEQ ID NO: 1963020 - RNA, 19 nt, Homo sapiens
  misc_RNA (1)...(19): siRNA sense strand
gugaauaaguuguacaaac

SEQ ID NO: 1963021 - RNA, 19 nt, Homo sapiens
  misc_RNA (1)...(19): siRNA sense strand
aggauaaucuaaccauuga

SEQ ID NO: 1963022 - RNA, 19 nt, Homo sapiens
  misc_RNA (1)...(19): siRNA sense strand
gagaaaaugugcuaaaugg

SEQ ID NO: 1963023 - RNA, 19 nt, Homo sapiens
  misc_RNA (1)...(19): siRNA sense strand
gcgccgagcuggaauacga

SEQ ID NO: 1963024 - RNA, 19 nt, Homo sapiens
  misc_RNA (1)...(19): siRNA sense strand
ccacugcuguccaccauga

SEQ ID NO: 1963025 - RNA, 19 nt, Homo sapiens
  misc_RNA (1)...(19): siRNA sense strand
ucucaccucugccuucauu

SEQ ID NO: 1963026 - RNA, 19 nt, Homo sapiens
  misc_RNA (1)...(19): siRNA sense strand
gcuggauggugucaagugu

SEQ ID NO: 1963027 - RNA, 19 nt, Homo sapiens
  misc_RNA (1)...(19): siRNA sense strand
ccgaaaggaggcugucuga

SEQ ID NO: 1963028 - RNA, 19 nt, Homo sapiens
  misc_RNA (1)...(19): siRNA sense strand
gcugcuggauggugucaag

SEQ ID NO: 1963029 - RNA, 19 nt, Homo sapiens
  misc_RNA (1)...(19): siRNA sense strand
uggauggugucaagugugu

SEQ ID NO: 1963030 - RNA, 19 nt, Homo sapiens
  misc_RNA (1)...(19): siRNA sense strand
cauuacugcugccuugcuu

SEQ ID NO: 1963031 - RNA, 19 nt, Homo sapiens
  misc_RNA (1)...(19): siRNA sense strand
ucaccucugccuucauuug

SEQ ID NO: 1963032 - RNA, 19 nt, Homo sapiens
  misc_RNA (1)...(19): siRNA sense strand
ucagucuccugccggaaga

SEQ ID NO: 1963033 - RNA, 19 nt, Homo sapiens
  misc_RNA (1)...(19): siRNA sense strand
ccucucaccucugccuuca

SEQ ID NO: 1963034 - RNA, 19 nt, Homo sapiens
  misc_RNA (1)...(19): siRNA sense strand
caacaagaguucugaauuu

SEQ ID NO: 1963035 - RNA, 19 nt, Homo sapiens
  misc_RNA (1)...(19): siRNA sense strand
gcagagacuuggucaggua

SEQ ID NO: 1963036 - RNA, 19 nt, Homo sapiens
  misc_RNA (1)...(19): siRNA sense strand
ggagugugcugggaugaua

SEQ ID NO: 1963037 - RNA, 19 nt, Homo sapiens
  misc_RNA (1)...(19): siRNA sense strand
caagaguucugaauuuaag

SEQ ID NO: 1963038 - RNA, 19 nt, Homo sapiens
  misc_RNA (1)...(19): siRNA sense strand
ccaccgaaguuccagguaa

SEQ ID NO: 1963039 - RNA, 19 nt, Homo sapiens
  misc_RNA (1)...(19): siRNA sense strand
gccagggacucagaaagua

SEQ ID NO: 1963040 - RNA, 19 nt, Homo sapiens
  misc_RNA (1)...(19): siRNA sense strand
cacagaaucuuaucacagu

SEQ ID NO: 1963041 - RNA, 19 nt, Homo sapiens
  misc_RNA (1)...(19): siRNA sense strand
gaagauggagcaggccuuu

SEQ ID NO: 1963042 - RNA, 19 nt, Homo sapiens
  misc_RNA (1)...(19): siRNA sense strand
ccaggaugcugccuucuuc

SEQ ID NO: 1963043 - RNA, 19 nt, Homo sapiens
  misc_RNA (1)...(19): siRNA sense strand
cuccaggacucccucaaua

SEQ ID NO: 1963044 - RNA, 19 nt, Homo sapiens
  misc_RNA (1)...(19): siRNA sense strand
gggcaauauuuaagggaaa

SEQ ID NO: 1963045 - RNA, 19 nt, Homo sapiens
  misc_RNA (1)...(19): siRNA sense strand
ucaacaagaguucugaauu

SEQ ID NO: 1963046 - RNA, 19 nt, Homo sapiens
  misc_RNA (1)...(19): siRNA sense strand
gcugugcacucaacaagag

SEQ ID NO: 1963047 - RNA, 19 nt, Homo sapiens
  misc_RNA (1)...(19): siRNA sense strand
aggacucccucaauaauga

SEQ ID NO: 1963048 - RNA, 19 nt, Homo sapiens
  misc_RNA (1)...(19): siRNA sense strand
gcguggagcucuucagaac

SEQ ID NO: 1963049 - RNA, 19 nt, Homo sapiens
  misc_RNA (1)...(19): siRNA sense strand
caaggccugggcaauauuu

SEQ ID NO: 1963050 - RNA, 19 nt, Homo sapiens
  misc_RNA (1)...(19): siRNA sense strand
ucaaagcgacagcacaguu

SEQ ID NO: 1963051 - RNA, 19 nt, Homo sapiens
  misc_RNA (1)...(19): siRNA sense strand
cauacuccacagaaucuua

SEQ ID NO: 1963052 - RNA, 19 nt, Homo sapiens
  misc_RNA (1)...(19): siRNA sense strand
gcaguccauucagacauug

SEQ ID NO: 1963053 - RNA, 19 nt, Homo sapiens
  misc_RNA (1)...(19): siRNA sense strand
cuucaaggccugggcaaua

SEQ ID NO: 1963054 - RNA, 19 nt, Homo sapiens
  misc_RNA (1)...(19): siRNA sense strand
ccaggacucccucaauaau

SEQ ID NO: 1963055 - RNA, 19 nt, Homo sapiens
  misc_RNA (1)...(19): siRNA sense strand
caaagcgacagcacaguuc

SEQ ID NO: 1963056 - RNA, 19 nt, Homo sapiens
  misc_RNA (1)...(19): siRNA sense strand
cuucagaaccgccuacuuc

SEQ ID NO: 1963057 - RNA, 19 nt, Homo sapiens
  misc_RNA (1)...(19): siRNA sense strand
gagacuuggucagguacuu

SEQ ID NO: 1963058 - RNA, 19 nt, Homo sapiens
  misc_RNA (1)...(19): siRNA sense strand
ggccuuugcccgauacuug

SEQ ID NO: 1963059 - RNA, 19 nt, Homo sapiens
  misc_RNA (1)...(19): siRNA sense strand
cagccauacuccacagaau

SEQ ID NO: 1963060 - RNA, 19 nt, Homo sapiens
  misc_RNA (1)...(19): siRNA sense strand
cucagaaaguaccaucaaa

SEQ ID NO: 1963061 - RNA, 19 nt, Homo sapiens
  misc_RNA (1)...(19): siRNA sense strand
acaggaaguuacagacaca

SEQ ID NO: 1963062 - RNA, 19 nt, Homo sapiens
  misc_RNA (1)...(19): siRNA sense strand
gaggaaggaggaagaggau

SEQ ID NO: 1963063 - RNA, 19 nt, Homo sapiens
  misc_RNA (1)...(19): siRNA sense strand
ccacaggaaguuacagaca

SEQ ID NO: 1963064 - RNA, 19 nt, Homo sapiens
  misc_RNA (1)...(19): siRNA sense strand
ccagguaacacugaauuuc

SEQ ID NO: 1963065 - RNA, 19 nt, Homo sapiens
  misc_RNA (1)...(19): siRNA sense strand
ucagaaaguaccaucaaag

SEQ ID NO: 1963066 - RNA, 19 nt, Homo sapiens
  misc_RNA (1)...(19): siRNA sense strand
gaacugggugguggagcaa

SEQ ID NO: 1963067 - RNA, 19 nt, Homo sapiens
  misc_RNA (1)...(19): siRNA sense strand
ggaaacaugcaggcaagca

SEQ ID NO: 1963068 - RNA, 19 nt, Homo sapiens
  misc_RNA (1)...(19): siRNA sense strand
gcaggccuuugcccgauac

SEQ ID NO: 1963069 - RNA, 19 nt, Homo sapiens
  misc_RNA (1)...(19): siRNA sense strand
aagaggaugccaugcagaa

SEQ ID NO: 1963070 - RNA, 19 nt, Homo sapiens
  misc_RNA (1)...(19): siRNA sense strand
uucaaggccugggcaauau

SEQ ID NO: 1963071 - RNA, 19 nt, Homo sapiens
  misc_RNA (1)...(19): siRNA sense strand
cugaauuucugggaagaga

SEQ ID NO: 1963072 - RNA, 19 nt, Homo sapiens
  misc_RNA (1)...(19): siRNA sense strand
agcaguccauucagacauu

SEQ ID NO: 1963073 - RNA, 19 nt, Homo sapiens
  misc_RNA (1)...(19): siRNA sense strand
ggagcaguccauucagaca

SEQ ID NO: 1963074 - RNA, 19 nt, Homo sapiens
  misc_RNA (1)...(19): siRNA sense strand
ggcaauauuuaagggaaag

SEQ ID NO: 1963075 - RNA, 19 nt, Homo sapiens
  misc_RNA (1)...(19): siRNA sense strand
gcuccaggacucccucaau

SEQ ID NO: 1963076 - RNA, 19 nt, Homo sapiens
  misc_RNA (1)...(19): siRNA sense strand
aagaccauguuccggauuc

SEQ ID NO: 1963077 - RNA, 19 nt, Homo sapiens
  misc_RNA (1)...(19): siRNA sense strand
cuacuucugcagagacuug

SEQ ID NO: 1963078 - RNA, 19 nt, Homo sapiens
  misc_RNA (1)...(19): siRNA sense strand
cugcucaccuucaucuaca

SEQ ID NO: 1963079 - RNA, 19 nt, Homo sapiens
  misc_RNA (1)...(19): siRNA sense strand
gagcaguccauucagacau

SEQ ID NO: 1963080 - RNA, 19 nt, Homo sapiens
  misc_RNA (1)...(19): siRNA sense strand
uccaggacucccucaauaa

SEQ ID NO: 1963081 - RNA, 19 nt, Homo sapiens
  misc_RNA (1)...(19): siRNA sense strand
gaggaugccaugcagaacu

SEQ ID NO: 1963082 - RNA, 19 nt, Homo sapiens
  misc_RNA (1)...(19): siRNA sense strand
gcagcaggcagccauucug

SEQ ID NO: 1963083 - RNA, 19 nt, Homo sapiens
  misc_RNA (1)...(19): siRNA sense strand
cagguaacacugaauuucu

SEQ ID NO: 1963084 - RNA, 19 nt, Homo sapiens
  misc_RNA (1)...(19): siRNA sense strand
caggacucccucaauaaug

SEQ ID NO: 1963085 - RNA, 19 nt, Homo sapiens
  misc_RNA (1)...(19): siRNA sense strand
cagaaaguaccaucaaagc

SEQ ID NO: 1963086 - RNA, 19 nt, Homo sapiens
  misc_RNA (1)...(19): siRNA sense strand
acucacugcugcucaccuu

SEQ ID NO: 1963087 - RNA, 19 nt, Homo sapiens
  misc_RNA (1)...(19): siRNA sense strand
gcacacucagucccucugu

SEQ ID NO: 1963088 - RNA, 19 nt, Homo sapiens
  misc_RNA (1)...(19): siRNA sense strand
uuaagggaaaguauaagga

SEQ ID NO: 1963089 - RNA, 19 nt, Homo sapiens
  misc_RNA (1)...(19): siRNA sense strand
gagcagcuuuggauaauga

SEQ ID NO: 1963090 - RNA, 19 nt, Homo sapiens
  misc_RNA (1)...(19): siRNA sense strand
gaaaugagcagcuuuggau

SEQ ID NO: 1963091 - RNA, 19 nt, Homo sapiens
  misc_RNA (1)...(19): siRNA sense strand
caagauguaucaccuauag

SEQ ID NO: 1963092 - RNA, 19 nt, Homo sapiens
  misc_RNA (1)...(19): siRNA sense strand
gagaugugaugguggagaa

SEQ ID NO: 1963093 - RNA, 19 nt, Homo sapiens
  misc_RNA (1)...(19): siRNA sense strand
ccgaagacagggaaauuua

SEQ ID NO: 1963094 - RNA, 19 nt, Homo sapiens
  misc_RNA (1)...(19): siRNA sense strand
uguaucaccuauagaaaga

SEQ ID NO: 1963095 - RNA, 19 nt, Homo sapiens
  misc_RNA (1)...(19): siRNA sense strand
agaaagaaaugagcagcuu

SEQ ID NO: 1963096 - RNA, 19 nt, Homo sapiens
  misc_RNA (1)...(19): siRNA sense strand
uuaggaaccugcugucagu

SEQ ID NO: 1963097 - RNA, 19 nt, Homo sapiens
  misc_RNA (1)...(19): siRNA sense strand
gauguaucaccuauagaaa

SEQ ID NO: 1963098 - RNA, 19 nt, Homo sapiens
  misc_RNA (1)...(19): siRNA sense strand
cauccacccuucaaacaag

SEQ ID NO: 1963099 - RNA, 19 nt, Homo sapiens
  misc_RNA (1)...(19): siRNA sense strand
aacaagauguaucaccuau

SEQ ID NO: 1963100 - RNA, 19 nt, Homo sapiens
  misc_RNA (1)...(19): siRNA sense strand
aaacaagauguaucaccua

SEQ ID NO: 1963101 - RNA, 19 nt, Homo sapiens
  misc_RNA (1)...(19): siRNA sense strand
gcauccacccuucaaacaa

SEQ ID NO: 1963102 - RNA, 19 nt, Homo sapiens
  misc_RNA (1)...(19): siRNA sense strand
agauguaucaccuauagaa

SEQ ID NO: 1963103 - RNA, 19 nt, Homo sapiens
  misc_RNA (1)...(19): siRNA sense strand
aaugagcagcuuuggauaa

SEQ ID NO: 1963104 - RNA, 19 nt, Homo sapiens
  misc_RNA (1)...(19): siRNA sense strand
gaagcuguaccgagaugug

SEQ ID NO: 1963105 - RNA, 19 nt, Homo sapiens
  misc_RNA (1)...(19): siRNA sense strand
cuucaaacaagauguauca

SEQ ID NO: 1963106 - RNA, 19 nt, Homo sapiens
  misc_RNA (1)...(19): siRNA sense strand
gacgacagcaacccgaaga

SEQ ID NO: 1963107 - RNA, 19 nt, Homo sapiens
  misc_RNA (1)...(19): siRNA sense strand
cgaagacagggaaauuuag

SEQ ID NO: 1963108 - RNA, 19 nt, Homo sapiens
  misc_RNA (1)...(19): siRNA sense strand
ucaccuauagaaagaaaug

SEQ ID NO: 1963109 - RNA, 19 nt, Homo sapiens
  misc_RNA (1)...(19): siRNA sense strand
gugaugguggagaacuuua

SEQ ID NO: 1963110 - RNA, 19 nt, Homo sapiens
  misc_RNA (1)...(19): siRNA sense strand
aaaugagcagcuuuggaua

SEQ ID NO: 1963111 - RNA, 19 nt, Homo sapiens
  misc_RNA (1)...(19): siRNA sense strand
acaagauguaucaccuaua

SEQ ID NO: 1963112 - RNA, 19 nt, Homo sapiens
  misc_RNA (1)...(19): siRNA sense strand
augagcagcuuuggauaau

SEQ ID NO: 1963113 - RNA, 19 nt, Homo sapiens
  misc_RNA (1)...(19): siRNA sense strand
ggcauccacccuucaaaca

SEQ ID NO: 1963114 - RNA, 19 nt, Homo sapiens
  misc_RNA (1)...(19): siRNA sense strand
aggaagcuguaccgagaug

SEQ ID NO: 1963115 - RNA, 19 nt, Homo sapiens
  misc_RNA (1)...(19): siRNA sense strand
gagcagcuuuggauaauga

SEQ ID NO: 1963116 - RNA, 19 nt, Homo sapiens
  misc_RNA (1)...(19): siRNA sense strand
gaaaugagcagcuuuggau

SEQ ID NO: 1963117 - RNA, 19 nt, Homo sapiens
  misc_RNA (1)...(19): siRNA sense strand
caagauguaucaccuauag

SEQ ID NO: 1963118 - RNA, 19 nt, Homo sapiens
  misc_RNA (1)...(19): siRNA sense strand
gagaugugaugguggagaa

SEQ ID NO: 1963119 - RNA, 19 nt, Homo sapiens
  misc_RNA (1)...(19): siRNA sense strand
ccgaagacagggaaauuua

SEQ ID NO: 1963120 - RNA, 19 nt, Homo sapiens
  misc_RNA (1)...(19): siRNA sense strand
uguaucaccuauagaaaga

SEQ ID NO: 1963121 - RNA, 19 nt, Homo sapiens
  misc_RNA (1)...(19): siRNA sense strand
agaaagaaaugagcagcuu

SEQ ID NO: 1963122 - RNA, 19 nt, Homo sapiens
  misc_RNA (1)...(19): siRNA sense strand
uuaggaaccugcugucagu

SEQ ID NO: 1963123 - RNA, 19 nt, Homo sapiens
  misc_RNA (1)...(19): siRNA sense strand
gauguaucaccuauagaaa

SEQ ID NO: 1963124 - RNA, 19 nt, Homo sapiens
  misc_RNA (1)...(19): siRNA sense strand
cauccacccuucaaacaag

SEQ ID NO: 1963125 - RNA, 19 nt, Homo sapiens
  misc_RNA (1)...(19): siRNA sense strand
aacaagauguaucaccuau

SEQ ID NO: 1963126 - RNA, 19 nt, Homo sapiens
  misc_RNA (1)...(19): siRNA sense strand
aaacaagauguaucaccua

SEQ ID NO: 1963127 - RNA, 19 nt, Homo sapiens
  misc_RNA (1)...(19): siRNA sense strand
gcauccacccuucaaacaa

SEQ ID NO: 1963128 - RNA, 19 nt, Homo sapiens
  misc_RNA (1)...(19): siRNA sense strand
agauguaucaccuauagaa

SEQ ID NO: 1963129 - RNA, 19 nt, Homo sapiens
  misc_RNA (1)...(19): siRNA sense strand
aaugagcagcuuuggauaa

SEQ ID NO: 1963130 - RNA, 19 nt, Homo sapiens
  misc_RNA (1)...(19): siRNA sense strand
gaagcuguaccgagaugug

SEQ ID NO: 1963131 - RNA, 19 nt, Homo sapiens
  misc_RNA (1)...(19): siRNA sense strand
cuucaaacaagauguauca

SEQ ID NO: 1963132 - RNA, 19 nt, Homo sapiens
  misc_RNA (1)...(19): siRNA sense strand
gacgacagcaacccgaaga

SEQ ID NO: 1963133 - RNA, 19 nt, Homo sapiens
  misc_RNA (1)...(19): siRNA sense strand
cgaagacagggaaauuuag

SEQ ID NO: 1963134 - RNA, 19 nt, Homo sapiens
  misc_RNA (1)...(19): siRNA sense strand
ucaccuauagaaagaaaug

SEQ ID NO: 1963135 - RNA, 19 nt, Homo sapiens
  misc_RNA (1)...(19): siRNA sense strand
gugaugguggagaacuuua

SEQ ID NO: 1963136 - RNA, 19 nt, Homo sapiens
  misc_RNA (1)...(19): siRNA sense strand
aaaugagcagcuuuggaua

SEQ ID NO: 1963137 - RNA, 19 nt, Homo sapiens
  misc_RNA (1)...(19): siRNA sense strand
acaagauguaucaccuaua

SEQ ID NO: 1963138 - RNA, 19 nt, Homo sapiens
  misc_RNA (1)...(19): siRNA sense strand
augagcagcuuuggauaau

SEQ ID NO: 1963139 - RNA, 19 nt, Homo sapiens
  misc_RNA (1)...(19): siRNA sense strand
ggcauccacccuucaaaca

SEQ ID NO: 1963140 - RNA, 19 nt, Homo sapiens
  misc_RNA (1)...(19): siRNA sense strand
aggaagcuguaccgagaug

SEQ ID NO: 1963141 - RNA, 19 nt, Homo sapiens
  misc_RNA (1)...(19): siRNA sense strand
gaucaaggcuuuccugugu

SEQ ID NO: 1963142 - RNA, 19 nt, Homo sapiens
  misc_RNA (1)...(19): siRNA sense strand
gauguuggcuguacucuug

SEQ ID NO: 1963143 - RNA, 19 nt, Homo sapiens
  misc_RNA (1)...(19): siRNA sense strand
aaacucauaugcagcuuua

SEQ ID NO: 1963144 - RNA, 19 nt, Homo sapiens
  misc_RNA (1)...(19): siRNA sense strand
gaaucuaccugauguuuua

SEQ ID NO: 1963145 - RNA, 19 nt, Homo sapiens
  misc_RNA (1)...(19): siRNA sense strand
gguggaaacgcuuauguua

SEQ ID NO: 1963146 - RNA, 19 nt, Homo sapiens
  misc_RNA (1)...(19): siRNA sense strand
gauauuugcugguauucug

SEQ ID NO: 1963147 - RNA, 19 nt, Homo sapiens
  misc_RNA (1)...(19): siRNA sense strand
gcuaugagagugggaaaua

SEQ ID NO: 1963148 - RNA, 19 nt, Homo sapiens
  misc_RNA (1)...(19): siRNA sense strand
aaauauggcuaugagagua

SEQ ID NO: 1963149 - RNA, 19 nt, Homo sapiens
  misc_RNA (1)...(19): siRNA sense strand
uggaaacgcuuauguuaca

SEQ ID NO: 1963150 - RNA, 19 nt, Homo sapiens
  misc_RNA (1)...(19): siRNA sense strand
gaaauauggcuaugagagu

SEQ ID NO: 1963151 - RNA, 19 nt, Homo sapiens
  misc_RNA (1)...(19): siRNA sense strand
gaugcaacccuuauuccua

SEQ ID NO: 1963152 - RNA, 19 nt, Homo sapiens
  misc_RNA (1)...(19): siRNA sense strand
gcaacccuuauuccuauua

SEQ ID NO: 1963153 - RNA, 19 nt, Homo sapiens
  misc_RNA (1)...(19): siRNA sense strand
gaacucuaauggcagcaau

SEQ ID NO: 1963154 - RNA, 19 nt, Homo sapiens
  misc_RNA (1)...(19): siRNA sense strand
caaagacuauggacuacgu

SEQ ID NO: 1963155 - RNA, 19 nt, Homo sapiens
  misc_RNA (1)...(19): siRNA sense strand
gaugcgcccuucucaggaa

SEQ ID NO: 1963156 - RNA, 19 nt, Homo sapiens
  misc_RNA (1)...(19): siRNA sense strand
gaagagaugauggccaaga

SEQ ID NO: 1963157 - RNA, 19 nt, Homo sapiens
  misc_RNA (1)...(19): siRNA sense strand
caaccgcccuggagucagu

SEQ ID NO: 1963158 - RNA, 19 nt, Homo sapiens
  misc_RNA (1)...(19): siRNA sense strand
gacagcaacucuccuucga

SEQ ID NO: 1963159 - RNA, 19 nt, Homo sapiens
  misc_RNA (1)...(19): siRNA sense strand
gacgguguaugaagagaug

SEQ ID NO: 1963160 - RNA, 19 nt, Homo sapiens
  misc_RNA (1)...(19): siRNA sense strand
uaugucaccuaucacugua

SEQ ID NO: 1963161 - RNA, 19 nt, Homo sapiens
  misc_RNA (1)...(19): siRNA sense strand
ggcacucucuacucuuuga

SEQ ID NO: 1963162 - RNA, 19 nt, Homo sapiens
  misc_RNA (1)...(19): siRNA sense strand
uuucaaagacuauggacua

SEQ ID NO: 1963163 - RNA, 19 nt, Homo sapiens
  misc_RNA (1)...(19): siRNA sense strand
ggugggcucucgcucuguu

SEQ ID NO: 1963164 - RNA, 19 nt, Homo sapiens
  misc_RNA (1)...(19): siRNA sense strand
gaccugcucuacccuccuu

SEQ ID NO: 1963165 - RNA, 19 nt, Homo sapiens
  misc_RNA (1)...(19): siRNA sense strand
uuucagcugugggauauuu

SEQ ID NO: 1963166 - RNA, 19 nt, Homo sapiens
  misc_RNA (1)...(19): siRNA sense strand
ugggauauuugcugguauu

SEQ ID NO: 1963167 - RNA, 19 nt, Homo sapiens
  misc_RNA (1)...(19): siRNA sense strand
cguggacgguguaugaaga

SEQ ID NO: 1963168 - RNA, 19 nt, Homo sapiens
  misc_RNA (1)...(19): siRNA sense strand
augcaacccuuauuccuau

SEQ ID NO: 1963169 - RNA, 19 nt, Homo sapiens
  misc_RNA (1)...(19): siRNA sense strand
caaccucuggaucuccuua

SEQ ID NO: 1963170 - RNA, 19 nt, Homo sapiens
  misc_RNA (1)...(19): siRNA sense strand
guaugucaccuaucacugu

SEQ ID NO: 1963171 - RNA, 19 nt, Homo sapiens
  misc_RNA (1)...(19): siRNA sense strand
ugugggauauuugcuggua

SEQ ID NO: 1963172 - RNA, 19 nt, Homo sapiens
  misc_RNA (1)...(19): siRNA sense strand
gcccuccgcagaacucuaa

SEQ ID NO: 1963173 - RNA, 19 nt, Homo sapiens
  misc_RNA (1)...(19): siRNA sense strand
auucuggccucacugguaa

SEQ ID NO: 1963174 - RNA, 19 nt, Homo sapiens
  misc_RNA (1)...(19): siRNA sense strand
gucuguaugucaccuauca

SEQ ID NO: 1963175 - RNA, 19 nt, Homo sapiens
  misc_RNA (1)...(19): siRNA sense strand
uaaucaagacgcgcuauga

SEQ ID NO: 1963176 - RNA, 19 nt, Homo sapiens
  misc_RNA (1)...(19): siRNA sense strand
aaauuucagcugugggaua

SEQ ID NO: 1963177 - RNA, 19 nt, Homo sapiens
  misc_RNA (1)...(19): siRNA sense strand
gcagcuuuauccacugaag

SEQ ID NO: 1963178 - RNA, 19 nt, Homo sapiens
  misc_RNA (1)...(19): siRNA sense strand
aauuucagcugugggauau

SEQ ID NO: 1963179 - RNA, 19 nt, Homo sapiens
  misc_RNA (1)...(19): siRNA sense strand
gaaucuacuuuggcacucu

SEQ ID NO: 1963180 - RNA, 19 nt, Homo sapiens
  misc_RNA (1)...(19): siRNA sense strand
aagagaugauggccaagau

SEQ ID NO: 1963181 - RNA, 19 nt, Homo sapiens
  misc_RNA (1)...(19): siRNA sense strand
uggcguggacgguguauga

SEQ ID NO: 1963182 - RNA, 19 nt, Homo sapiens
  misc_RNA (1)...(19): siRNA sense strand
ucaccuaucacuguaauca

SEQ ID NO: 1963183 - RNA, 19 nt, Homo sapiens
  misc_RNA (1)...(19): siRNA sense strand
uuggcacucucuacucuuu

SEQ ID NO: 1963184 - RNA, 19 nt, Homo sapiens
  misc_RNA (1)...(19): siRNA sense strand
cuaugagagugggaaauau

SEQ ID NO: 1963185 - RNA, 19 nt, Homo sapiens
  misc_RNA (1)...(19): siRNA sense strand
uggacuacguggcuucuuc

SEQ ID NO: 1963186 - RNA, 19 nt, Homo sapiens
  misc_RNA (1)...(19): siRNA sense strand
uggccucacugguaacuca

SEQ ID NO: 1963187 - RNA, 19 nt, Homo sapiens
  misc_RNA (1)...(19): siRNA sense strand
uaugagagugggaaauaug

SEQ ID NO: 1963188 - RNA, 19 nt, Homo sapiens
  misc_RNA (1)...(19): siRNA sense strand
caacccuuauuccuauuac

SEQ ID NO: 1963189 - RNA, 19 nt, Homo sapiens
  misc_RNA (1)...(19): siRNA sense strand
ugggaaauauggcuaugag

SEQ ID NO: 1963190 - RNA, 19 nt, Homo sapiens
  misc_RNA (1)...(19): siRNA sense strand
aaaauauagugccucauga

SEQ ID NO: 1963191 - RNA, 19 nt, Homo sapiens
  misc_RNA (1)...(19): siRNA sense strand
ucaugggucuagacguguu

SEQ ID NO: 1963192 - RNA, 19 nt, Homo sapiens
  misc_RNA (1)...(19): siRNA sense strand
guaaucaagacgcgcuaug

SEQ ID NO: 1963193 - RNA, 19 nt, Homo sapiens
  misc_RNA (1)...(19): siRNA sense strand
gcguuggaaucuacuuugg

SEQ ID NO: 1963194 - RNA, 19 nt, Homo sapiens
  misc_RNA (1)...(19): siRNA sense strand
ugucaccuaucacuguaau

SEQ ID NO: 1963195 - RNA, 19 nt, Homo sapiens
  misc_RNA (1)...(19): siRNA sense strand
gguguuaucaaaacucaua

SEQ ID NO: 1963196 - RNA, 19 nt, Homo sapiens
  misc_RNA (1)...(19): siRNA sense strand
gaggagcaucuaucacagu

SEQ ID NO: 1963197 - RNA, 19 nt, Homo sapiens
  misc_RNA (1)...(19): siRNA sense strand
uauucuggccucacuggua

SEQ ID NO: 1963198 - RNA, 19 nt, Homo sapiens
  misc_RNA (1)...(19): siRNA sense strand
ggaaucuaccugauguuuu

SEQ ID NO: 1963199 - RNA, 19 nt, Homo sapiens
  misc_RNA (1)...(19): siRNA sense strand
acucuuugaagcaguauuu

SEQ ID NO: 1963200 - RNA, 19 nt, Homo sapiens
  misc_RNA (1)...(19): siRNA sense strand
caagacgcgcuaugagagu

SEQ ID NO: 1963201 - RNA, 19 nt, Homo sapiens
  misc_RNA (1)...(19): siRNA sense strand
gggucuguaugucaccuau

SEQ ID NO: 1963202 - RNA, 19 nt, Homo sapiens
  misc_RNA (1)...(19): siRNA sense strand
cugaggagcaucuaucaca

SEQ ID NO: 1963203 - RNA, 19 nt, Homo sapiens
  misc_RNA (1)...(19): siRNA sense strand
ggacgguguaugaagagau

SEQ ID NO: 1963204 - RNA, 19 nt, Homo sapiens
  misc_RNA (1)...(19): siRNA sense strand
uggcuguacucuugaaggu

SEQ ID NO: 1963205 - RNA, 19 nt, Homo sapiens
  misc_RNA (1)...(19): siRNA sense strand
guggaugcaacccuuauuc

SEQ ID NO: 1963206 - RNA, 19 nt, Homo sapiens
  misc_RNA (1)...(19): siRNA sense strand
gguggaugcaacccuuauu

SEQ ID NO: 1963207 - RNA, 19 nt, Homo sapiens
  misc_RNA (1)...(19): siRNA sense strand
cuagacguguugggauguu

SEQ ID NO: 1963208 - RNA, 19 nt, Homo sapiens
  misc_RNA (1)...(19): siRNA sense strand
aaacacagcuuggaauuua

SEQ ID NO: 1963209 - RNA, 19 nt, Homo sapiens
  misc_RNA (1)...(19): siRNA sense strand
gggaaucacugcagguuua

SEQ ID NO: 1963210 - RNA, 19 nt, Homo sapiens
  misc_RNA (1)...(19): siRNA sense strand
gaucacagaugaauucuca

SEQ ID NO: 1963211 - RNA, 19 nt, Homo sapiens
  misc_RNA (1)...(19): siRNA sense strand
guaaauagguuuccaggau

SEQ ID NO: 1963212 - RNA, 19 nt, Homo sapiens
  misc_RNA (1)...(19): siRNA sense strand
gggauaaacuuaaggaaga

SEQ ID NO: 1963213 - RNA, 19 nt, Homo sapiens
  misc_RNA (1)...(19): siRNA sense strand
caacacaaccuuugaauuc

SEQ ID NO: 1963214 - RNA, 19 nt, Homo sapiens
  misc_RNA (1)...(19): siRNA sense strand
gaaaagacauaaaggauga

SEQ ID NO: 1963215 - RNA, 19 nt, Homo sapiens
  misc_RNA (1)...(19): siRNA sense strand
ccagauaucucaggaaaga

SEQ ID NO: 1963216 - RNA, 19 nt, Homo sapiens
  misc_RNA (1)...(19): siRNA sense strand
gcaguaauaagcaaguuua

SEQ ID NO: 1963217 - RNA, 19 nt, Homo sapiens
  misc_RNA (1)...(19): siRNA sense strand
gaugaagacuugguagaaa

SEQ ID NO: 1963218 - RNA, 19 nt, Homo sapiens
  misc_RNA (1)...(19): siRNA sense strand
gaacuuaagagauuugaga

SEQ ID NO: 1963219 - RNA, 19 nt, Homo sapiens
  misc_RNA (1)...(19): siRNA sense strand
gaauaugaaugucuuaagg

SEQ ID NO: 1963220 - RNA, 19 nt, Homo sapiens
  misc_RNA (1)...(19): siRNA sense strand
gacaucagcuggcaauugu

SEQ ID NO: 1963221 - RNA, 19 nt, Homo sapiens
  misc_RNA (1)...(19): siRNA sense strand
aaggagagaucacagauga

SEQ ID NO: 1963222 - RNA, 19 nt, Homo sapiens
  misc_RNA (1)...(19): siRNA sense strand
gaugaauucucaaacugaa

SEQ ID NO: 1963223 - RNA, 19 nt, Homo sapiens
  misc_RNA (1)...(19): siRNA sense strand
ggccagauaucucaggaaa

SEQ ID NO: 1963224 - RNA, 19 nt, Homo sapiens
  misc_RNA (1)...(19): siRNA sense strand
gaacuauaaugacuguauc

SEQ ID NO: 1963225 - RNA, 19 nt, Homo sapiens
  misc_RNA (1)...(19): siRNA sense strand
ggaaagaugagggcaguaa

SEQ ID NO: 1963226 - RNA, 19 nt, Homo sapiens
  misc_RNA (1)...(19): siRNA sense strand
agaaagauguuccugugaa

SEQ ID NO: 1963227 - RNA, 19 nt, Homo sapiens
  misc_RNA (1)...(19): siRNA sense strand
gaugauccauuccuucugu

SEQ ID NO: 1963228 - RNA, 19 nt, Homo sapiens
  misc_RNA (1)...(19): siRNA sense strand
gaaagauguuccugugaag

SEQ ID NO: 1963229 - RNA, 19 nt, Homo sapiens
  misc_RNA (1)...(19): siRNA sense strand
gaaauaaucagcuguaucc

SEQ ID NO: 1963230 - RNA, 19 nt, Homo sapiens
  misc_RNA (1)...(19): siRNA sense strand
gaauugcuaggucaugaua

SEQ ID NO: 1963231 - RNA, 19 nt, Homo sapiens
  misc_RNA (1)...(19): siRNA sense strand
gcagaccgcuguggcauca

SEQ ID NO: 1963232 - RNA, 19 nt, Homo sapiens
  misc_RNA (1)...(19): siRNA sense strand
gaucaaaacuaaccuuuca

SEQ ID NO: 1963233 - RNA, 19 nt, Homo sapiens
  misc_RNA (1)...(19): siRNA sense strand
ggacaucagcuggcaauug

SEQ ID NO: 1963234 - RNA, 19 nt, Homo sapiens
  misc_RNA (1)...(19): siRNA sense strand
gacaacaccucaggaacuu

SEQ ID NO: 1963235 - RNA, 19 nt, Homo sapiens
  misc_RNA (1)...(19): siRNA sense strand
gcagguuuaucacaagaga

SEQ ID NO: 1963236 - RNA, 19 nt, Homo sapiens
  misc_RNA (1)...(19): siRNA sense strand
gaaugucgucucucaacua

SEQ ID NO: 1963237 - RNA, 19 nt, Homo sapiens
  misc_RNA (1)...(19): siRNA sense strand
caacaccucaggaacuuaa

SEQ ID NO: 1963238 - RNA, 19 nt, Homo sapiens
  misc_RNA (1)...(19): siRNA sense strand
ggagugggauaaacuuaag

SEQ ID NO: 1963239 - RNA, 19 nt, Homo sapiens
  misc_RNA (1)...(19): siRNA sense strand
aaagaugagggcaguaaua

SEQ ID NO: 1963240 - RNA, 19 nt, Homo sapiens
  misc_RNA (1)...(19): siRNA sense strand
uaagagauuugagaacuuc

SEQ ID NO: 1963241 - RNA, 19 nt, Homo sapiens
  misc_RNA (1)...(19): siRNA sense strand
gaggugaccaguacagaaa

SEQ ID NO: 1963242 - RNA, 19 nt, Homo sapiens
  misc_RNA (1)...(19): siRNA sense strand
guaaacacagcuuggaauu

SEQ ID NO: 1963243 - RNA, 19 nt, Homo sapiens
  misc_RNA (1)...(19): siRNA sense strand
aaaguuggaucauuucaca

SEQ ID NO: 1963244 - RNA, 19 nt, Homo sapiens
  misc_RNA (1)...(19): siRNA sense strand
gaggaacacuauucaacuc

SEQ ID NO: 1963245 - RNA, 19 nt, Homo sapiens
  misc_RNA (1)...(19): siRNA sense strand
gagcucuccuucaucaaga

SEQ ID NO: 1963246 - RNA, 19 nt, Homo sapiens
  misc_RNA (1)...(19): siRNA sense strand
cuauagauguggcuaaauc

SEQ ID NO: 1963247 - RNA, 19 nt, Homo sapiens
  misc_RNA (1)...(19): siRNA sense strand
cucaggaacuuaagagauu

SEQ ID NO: 1963248 - RNA, 19 nt, Homo sapiens
  misc_RNA (1)...(19): siRNA sense strand
ggagagaucacagaugaau

SEQ ID NO: 1963249 - RNA, 19 nt, Homo sapiens
  misc_RNA (1)...(19): siRNA sense strand
gaggagugggauaaacuua

SEQ ID NO: 1963250 - RNA, 19 nt, Homo sapiens
  misc_RNA (1)...(19): siRNA sense strand
gucaugauauuguuccuau

SEQ ID NO: 1963251 - RNA, 19 nt, Homo sapiens
  misc_RNA (1)...(19): siRNA sense strand
ucagacagauggagagaag

SEQ ID NO: 1963252 - RNA, 19 nt, Homo sapiens
  misc_RNA (1)...(19): siRNA sense strand
ccagauauaagacuuuaga

SEQ ID NO: 1963253 - RNA, 19 nt, Homo sapiens
  misc_RNA (1)...(19): siRNA sense strand
gagauuugagaacuucaua

SEQ ID NO: 1963254 - RNA, 19 nt, Homo sapiens
  misc_RNA (1)...(19): siRNA sense strand
gcuguuagaggacaucaaa

SEQ ID NO: 1963255 - RNA, 19 nt, Homo sapiens
  misc_RNA (1)...(19): siRNA sense strand
cagaugaauucucaaacug

SEQ ID NO: 1963256 - RNA, 19 nt, Homo sapiens
  misc_RNA (1)...(19): siRNA sense strand
gcuaggucaugauauuguu

SEQ ID NO: 1963257 - RNA, 19 nt, Homo sapiens
  misc_RNA (1)...(19): siRNA sense strand
ucacagaugaauucucaaa

SEQ ID NO: 1963258 - RNA, 19 nt, Homo sapiens
  misc_RNA (1)...(19): siRNA sense strand
guucgugaaucucaacuuc

SEQ ID NO: 1963259 - RNA, 19 nt, Homo sapiens
  misc_RNA (1)...(19): siRNA sense strand
ccagggcacucuuaugucu

SEQ ID NO: 1963260 - RNA, 19 nt, Homo sapiens
  misc_RNA (1)...(19): siRNA sense strand
caucagcuggcaauuguaa

SEQ ID NO: 1963261 - RNA, 19 nt, Homo sapiens
  misc_RNA (1)...(19): siRNA sense strand
ggagucauuugcacacagu

SEQ ID NO: 1963262 - RNA, 19 nt, Homo sapiens
  misc_RNA (1)...(19): siRNA sense strand
aacaaugucuccacagaau

SEQ ID NO: 1963263 - RNA, 19 nt, Homo sapiens
  misc_RNA (1)...(19): siRNA sense strand
ggauaaacuuaaggaagau

SEQ ID NO: 1963264 - RNA, 19 nt, Homo sapiens
  misc_RNA (1)...(19): siRNA sense strand
guaccaaccaaauggcuuu

SEQ ID NO: 1963265 - RNA, 19 nt, Homo sapiens
  misc_RNA (1)...(19): siRNA sense strand
ggaggugaccaguacagaa

SEQ ID NO: 1963266 - RNA, 19 nt, Homo sapiens
  misc_RNA (1)...(19): siRNA sense strand
augaaugucuuaagggaaa

SEQ ID NO: 1963267 - RNA, 19 nt, Homo sapiens
  misc_RNA (1)...(19): siRNA sense strand
ugauauuguuccuauguug

SEQ ID NO: 1963268 - RNA, 19 nt, Homo sapiens
  misc_RNA (1)...(19): siRNA sense strand
aaagaccaguuucgaaagu

SEQ ID NO: 1963269 - RNA, 19 nt, Homo sapiens
  misc_RNA (1)...(19): siRNA sense strand
uucgaaaguuggaucauuu

SEQ ID NO: 1963270 - RNA, 19 nt, Homo sapiens
  misc_RNA (1)...(19): siRNA sense strand
uaaacacagcuuggaauuu

SEQ ID NO: 1963271 - RNA, 19 nt, Homo sapiens
  misc_RNA (1)...(19): siRNA sense strand
gaaagaugagggcaguaau

SEQ ID NO: 1963272 - RNA, 19 nt, Homo sapiens
  misc_RNA (1)...(19): siRNA sense strand
uaaaguucgugaaucucaa

SEQ ID NO: 1963273 - RNA, 19 nt, Homo sapiens
  misc_RNA (1)...(19): siRNA sense strand
cagcuuggaauuuauauca

SEQ ID NO: 1963274 - RNA, 19 nt, Homo sapiens
  misc_RNA (1)...(19): siRNA sense strand
acacagcuuggaauuuaua

SEQ ID NO: 1963275 - RNA, 19 nt, Homo sapiens
  misc_RNA (1)...(19): siRNA sense strand
ucaggaacuuaagagauuu

SEQ ID NO: 1963276 - RNA, 19 nt, Homo sapiens
  misc_RNA (1)...(19): siRNA sense strand
ggugaccaguacagaaaga

SEQ ID NO: 1963277 - RNA, 19 nt, Homo sapiens
  misc_RNA (1)...(19): siRNA sense strand
caugagggaugugauagau

SEQ ID NO: 1963278 - RNA, 19 nt, Homo sapiens
  misc_RNA (1)...(19): siRNA sense strand
acagaugaauucucaaacu

SEQ ID NO: 1963279 - RNA, 19 nt, Homo sapiens
  misc_RNA (1)...(19): siRNA sense strand
ccaacacaaccuuugaauu

SEQ ID NO: 1963280 - RNA, 19 nt, Homo sapiens
  misc_RNA (1)...(19): siRNA sense strand
agagaucacagaugaauuc

SEQ ID NO: 1963281 - RNA, 19 nt, Homo sapiens
  misc_RNA (1)...(19): siRNA sense strand
aaagacaacaccucaggaa

SEQ ID NO: 1963282 - RNA, 19 nt, Homo sapiens
  misc_RNA (1)...(19): siRNA sense strand
ucagcugaguccagaagaa

SEQ ID NO: 1963283 - RNA, 19 nt, Homo sapiens
  misc_RNA (1)...(19): siRNA sense strand
uaugaaagccagauauaag

SEQ ID NO: 1963284 - RNA, 19 nt, Homo sapiens
  misc_RNA (1)...(19): siRNA sense strand
aagaugagggcaguaauaa

SEQ ID NO: 1963285 - RNA, 19 nt, Homo sapiens
  misc_RNA (1)...(19): siRNA sense strand
aaauagguuuccaggauca

SEQ ID NO: 1963286 - RNA, 19 nt, Homo sapiens
  misc_RNA (1)...(19): siRNA sense strand
gaaauuaugaaagccagau

SEQ ID NO: 1963287 - RNA, 19 nt, Homo sapiens
  misc_RNA (1)...(19): siRNA sense strand
aagauguuccugugaagua

SEQ ID NO: 1963288 - RNA, 19 nt, Homo sapiens
  misc_RNA (1)...(19): siRNA sense strand
caagacccaacgccuguuu

SEQ ID NO: 1963289 - RNA, 19 nt, Homo sapiens
  misc_RNA (1)...(19): siRNA sense strand
gaugagggcaguaauaagc

SEQ ID NO: 1963290 - RNA, 19 nt, Homo sapiens
  misc_RNA (1)...(19): siRNA sense strand
gcugaguccagaagaauau

SEQ ID NO: 1963291 - RNA, 19 nt, Homo sapiens
  misc_RNA (1)...(19): siRNA sense strand
agccagauauaagacuuua

SEQ ID NO: 1963292 - RNA, 19 nt, Homo sapiens
  misc_RNA (1)...(19): siRNA sense strand
gcaauuguaaauagguuuc

SEQ ID NO: 1963293 - RNA, 19 nt, Homo sapiens
  misc_RNA (1)...(19): siRNA sense strand
aaacaaugucuccacagaa

SEQ ID NO: 1963294 - RNA, 19 nt, Homo sapiens
  misc_RNA (1)...(19): siRNA sense strand
gcaccugugaggaacacua

SEQ ID NO: 1963295 - RNA, 19 nt, Homo sapiens
  misc_RNA (1)...(19): siRNA sense strand
gcuaaggagagaucacaga

SEQ ID NO: 1963296 - RNA, 19 nt, Homo sapiens
  misc_RNA (1)...(19): siRNA sense strand
aaagccagauauaagacuu

SEQ ID NO: 1963297 - RNA, 19 nt, Homo sapiens
  misc_RNA (1)...(19): siRNA sense strand
agaccaguuucgaaaguug

SEQ ID NO: 1963298 - RNA, 19 nt, Homo sapiens
  misc_RNA (1)...(19): siRNA sense strand
ccacagaauaccaaagcaa

SEQ ID NO: 1963299 - RNA, 19 nt, Homo sapiens
  misc_RNA (1)...(19): siRNA sense strand
gggcaguaauaagcaaguu

SEQ ID NO: 1963300 - RNA, 19 nt, Homo sapiens
  misc_RNA (1)...(19): siRNA sense strand
cuauucaacucccaacaca

SEQ ID NO: 1963301 - RNA, 19 nt, Homo sapiens
  misc_RNA (1)...(19): siRNA sense strand
ggagacucguggcacauac

SEQ ID NO: 1963302 - RNA, 19 nt, Homo sapiens
  misc_RNA (1)...(19): siRNA sense strand
cagcuggcaauuguaaaua

SEQ ID NO: 1963303 - RNA, 19 nt, Homo sapiens
  misc_RNA (1)...(19): siRNA sense strand
ucaacuagccaaacggaau

SEQ ID NO: 1963304 - RNA, 19 nt, Homo sapiens
  misc_RNA (1)...(19): siRNA sense strand
gccaaaauguuuccuaaag

SEQ ID NO: 1963305 - RNA, 19 nt, Homo sapiens
  misc_RNA (1)...(19): siRNA sense strand
caugauauuguuccuaugu

SEQ ID NO: 1963306 - RNA, 19 nt, Homo sapiens
  misc_RNA (1)...(19): siRNA sense strand
ugaaguaccaaccaaaugg

SEQ ID NO: 1963307 - RNA, 19 nt, Homo sapiens
  misc_RNA (1)...(19): siRNA sense strand
uaaaaucucguccuccuuu

SEQ ID NO: 1963308 - RNA, 19 nt, Homo sapiens
  misc_RNA (1)...(19): siRNA sense strand
ggcagaggaugaacuggaa

SEQ ID NO: 1963309 - RNA, 19 nt, Homo sapiens
  misc_RNA (1)...(19): siRNA sense strand
agauggaggucaagcagaa

SEQ ID NO: 1963310 - RNA, 19 nt, Homo sapiens
  misc_RNA (1)...(19): siRNA sense strand
agagaaaggagucgaagaa

SEQ ID NO: 1963311 - RNA, 19 nt, Homo sapiens
  misc_RNA (1)...(19): siRNA sense strand
ggaagauggaggucaagca

SEQ ID NO: 1963312 - RNA, 19 nt, Homo sapiens
  misc_RNA (1)...(19): siRNA sense strand
ccagagaguccagcagaga

SEQ ID NO: 1963313 - RNA, 19 nt, Homo sapiens
  misc_RNA (1)...(19): siRNA sense strand
gagaaaggagucgaagaag

SEQ ID NO: 1963314 - RNA, 19 nt, Homo sapiens
  misc_RNA (1)...(19): siRNA sense strand
cagagaguccagcagagaa

SEQ ID NO: 1963315 - RNA, 19 nt, Homo sapiens
  misc_RNA (1)...(19): siRNA sense strand
agagaguccagcagagaaa

SEQ ID NO: 1963316 - RNA, 19 nt, Homo sapiens
  misc_RNA (1)...(19): siRNA sense strand
gcccugaacaccagagagu

SEQ ID NO: 1963317 - RNA, 19 nt, Homo sapiens
  misc_RNA (1)...(19): siRNA sense strand
cccggaagauggaggucaa

SEQ ID NO: 1963318 - RNA, 19 nt, Homo sapiens
  misc_RNA (1)...(19): siRNA sense strand
cagagaaaggagucgaaga

SEQ ID NO: 1963319 - RNA, 19 nt, Homo sapiens
  misc_RNA (1)...(19): siRNA sense strand
ggaaacaggcgcuccucua

SEQ ID NO: 1963320 - RNA, 19 nt, Homo sapiens
  misc_RNA (1)...(19): siRNA sense strand
gcacuaugguguggacaug

SEQ ID NO: 1963321 - RNA, 19 nt, Homo sapiens
  misc_RNA (1)...(19): siRNA sense strand
gaaccaaguggcugaagga

SEQ ID NO: 1963322 - RNA, 19 nt, Homo sapiens
  misc_RNA (1)...(19): siRNA sense strand
gcaagacacggacguuuca

SEQ ID NO: 1963323 - RNA, 19 nt, Homo sapiens
  misc_RNA (1)...(19): siRNA sense strand
gaaacaggcgcuccucuac

SEQ ID NO: 1963324 - RNA, 19 nt, Homo sapiens
  misc_RNA (1)...(19): siRNA sense strand
gcagcgcuuugcucagcua

SEQ ID NO: 1963325 - RNA, 19 nt, Homo sapiens
  misc_RNA (1)...(19): siRNA sense strand
gagcaagacacggacguuu

SEQ ID NO: 1963326 - RNA, 19 nt, Homo sapiens
  misc_RNA (1)...(19): siRNA sense strand
gaacgagccggugcaagug

SEQ ID NO: 1963327 - RNA, 19 nt, Homo sapiens
  misc_RNA (1)...(19): siRNA sense strand
gcaccggcauucugagcau

SEQ ID NO: 1963328 - RNA, 19 nt, Homo sapiens
  misc_RNA (1)...(19): siRNA sense strand
aguggagacuguagaguug

SEQ ID NO: 1963329 - RNA, 19 nt, Homo sapiens
  misc_RNA (1)...(19): siRNA sense strand
ugaacgagccggugcaagu

SEQ ID NO: 1963330 - RNA, 19 nt, Homo sapiens
  misc_RNA (1)...(19): siRNA sense strand
ggacguuucaggagagauc

SEQ ID NO: 1963331 - RNA, 19 nt, Homo sapiens
  misc_RNA (1)...(19): siRNA sense strand
gcgcuuugcucagcuagag

SEQ ID NO: 1963332 - RNA, 19 nt, Homo sapiens
  misc_RNA (1)...(19): siRNA sense strand
gaggagaagaccaaagacu

SEQ ID NO: 1963333 - RNA, 19 nt, Homo sapiens
  misc_RNA (1)...(19): siRNA sense strand
ggagcaagacacggacguu

SEQ ID NO: 1963334 - RNA, 19 nt, Homo sapiens
  misc_RNA (1)...(19): siRNA sense strand
aggaggagaagaccaaaga

SEQ ID NO: 1963335 - RNA, 19 nt, Homo sapiens
  misc_RNA (1)...(19): siRNA sense strand
aggagaagaccaaagacuu

SEQ ID NO: 1963336 - RNA, 19 nt, Homo sapiens
  misc_RNA (1)...(19): siRNA sense strand
gaauggcgccugggcuucu

SEQ ID NO: 1963337 - RNA, 19 nt, Homo sapiens
  misc_RNA (1)...(19): siRNA sense strand
gggagguggugcgguucaa

SEQ ID NO: 1963338 - RNA, 19 nt, Homo sapiens
  misc_RNA (1)...(19): siRNA sense strand
ggaaaccucuucaaaguga

SEQ ID NO: 1963339 - RNA, 19 nt, Homo sapiens
  misc_RNA (1)...(19): siRNA sense strand
gaaggugcgucgcuuuguu

SEQ ID NO: 1963340 - RNA, 19 nt, Homo sapiens
  misc_RNA (1)...(19): siRNA sense strand
ucauuaagcugaagacuca

SEQ ID NO: 1963341 - RNA, 19 nt, Homo sapiens
  misc_RNA (1)...(19): siRNA sense strand
ucaaagugauuacuaagga

SEQ ID NO: 1963342 - RNA, 19 nt, Homo sapiens
  misc_RNA (1)...(19): siRNA sense strand
gugcgucgcuuuguucuaa

SEQ ID NO: 1963343 - RNA, 19 nt, Homo sapiens
  misc_RNA (1)...(19): siRNA sense strand
ugucugcucuggaagauaa

SEQ ID NO: 1963344 - RNA, 19 nt, Homo sapiens
  misc_RNA (1)...(19): siRNA sense strand
cagcuuuccugcauuacua

SEQ ID NO: 1963345 - RNA, 19 nt, Homo sapiens
  misc_RNA (1)...(19): siRNA sense strand
gagcagggaagcaccuaua

SEQ ID NO: 1963346 - RNA, 19 nt, Homo sapiens
  misc_RNA (1)...(19): siRNA sense strand
ccugagcacuguggaguua

SEQ ID NO: 1963347 - RNA, 19 nt, Homo sapiens
  misc_RNA (1)...(19): siRNA sense strand
ugacacacacuauuacauu

SEQ ID NO: 1963348 - RNA, 19 nt, Homo sapiens
  misc_RNA (1)...(19): siRNA sense strand
gcagggaagcaccuauaaa

SEQ ID NO: 1963349 - RNA, 19 nt, Homo sapiens
  misc_RNA (1)...(19): siRNA sense strand
uaaggaaggauccagcuuu

SEQ ID NO: 1963350 - RNA, 19 nt, Homo sapiens
  misc_RNA (1)...(19): siRNA sense strand
cuaugacccuuccaaagaa

SEQ ID NO: 1963351 - RNA, 19 nt, Homo sapiens
  misc_RNA (1)...(19): siRNA sense strand
gacacacacuauuacauuc

SEQ ID NO: 1963352 - RNA, 19 nt, Homo sapiens
  misc_RNA (1)...(19): siRNA sense strand
ccagggaaaccucuucaaa

SEQ ID NO: 1963353 - RNA, 19 nt, Homo sapiens
  misc_RNA (1)...(19): siRNA sense strand
agggaaaccucuucaaagu

SEQ ID NO: 1963354 - RNA, 19 nt, Homo sapiens
  misc_RNA (1)...(19): siRNA sense strand
caaagugauuacuaaggau

SEQ ID NO: 1963355 - RNA, 19 nt, Homo sapiens
  misc_RNA (1)...(19): siRNA sense strand
ccgaguggauugaagcuau

SEQ ID NO: 1963356 - RNA, 19 nt, Homo sapiens
  misc_RNA (1)...(19): siRNA sense strand
ggauccagcuuuccugcau

SEQ ID NO: 1963357 - RNA, 19 nt, Homo sapiens
  misc_RNA (1)...(19): siRNA sense strand
aaacauccacggaguacuu

SEQ ID NO: 1963358 - RNA, 19 nt, Homo sapiens
  misc_RNA (1)...(19): siRNA sense strand
aggaugacacacacuauua

SEQ ID NO: 1963359 - RNA, 19 nt, Homo sapiens
  misc_RNA (1)...(19): siRNA sense strand
gauccagcuuuccugcauu

SEQ ID NO: 1963360 - RNA, 19 nt, Homo sapiens
  misc_RNA (1)...(19): siRNA sense strand
gaagauaagccccaaggaa

SEQ ID NO: 1963361 - RNA, 19 nt, Homo sapiens
  misc_RNA (1)...(19): siRNA sense strand
ccgagcaguuccuggauga

SEQ ID NO: 1963362 - RNA, 19 nt, Homo sapiens
  misc_RNA (1)...(19): siRNA sense strand
aaaccgaccgcuccucauu

SEQ ID NO: 1963363 - RNA, 19 nt, Homo sapiens
  misc_RNA (1)...(19): siRNA sense strand
uggacaagaugcacgauag

SEQ ID NO: 1963364 - RNA, 19 nt, Homo sapiens
  misc_RNA (1)...(19): siRNA sense strand
acuaugacccuuccaaaga

SEQ ID NO: 1963365 - RNA, 19 nt, Homo sapiens
  misc_RNA (1)...(19): siRNA sense strand
aagggaauguccagggaaa

SEQ ID NO: 1963366 - RNA, 19 nt, Homo sapiens
  misc_RNA (1)...(19): siRNA sense strand
aaggaaggauccagcuuuc

SEQ ID NO: 1963367 - RNA, 19 nt, Homo sapiens
  misc_RNA (1)...(19): siRNA sense strand
accgaccgcuccucauuaa

SEQ ID NO: 1963368 - RNA, 19 nt, Homo sapiens
  misc_RNA (1)...(19): siRNA sense strand
acucgugucugcucuggaa

SEQ ID NO: 1963369 - RNA, 19 nt, Homo sapiens
  misc_RNA (1)...(19): siRNA sense strand
cuaaggaugacacacacua

SEQ ID NO: 1963370 - RNA, 19 nt, Homo sapiens
  misc_RNA (1)...(19): siRNA sense strand
gggaaaccucuucaaagug

SEQ ID NO: 1963371 - RNA, 19 nt, Homo sapiens
  misc_RNA (1)...(19): siRNA sense strand
gagcgagccgaguggauug

SEQ ID NO: 1963372 - RNA, 19 nt, Homo sapiens
  misc_RNA (1)...(19): siRNA sense strand
aaauuagccugagcacugu

SEQ ID NO: 1963373 - RNA, 19 nt, Homo sapiens
  misc_RNA (1)...(19): siRNA sense strand
cagggaaaccucuucaaag

SEQ ID NO: 1963374 - RNA, 19 nt, Homo sapiens
  misc_RNA (1)...(19): siRNA sense strand
auccagcuuuccugcauua

SEQ ID NO: 1963375 - RNA, 19 nt, Homo sapiens
  misc_RNA (1)...(19): siRNA sense strand
gaugacacacacuauuaca

SEQ ID NO: 1963376 - RNA, 19 nt, Homo sapiens
  misc_RNA (1)...(19): siRNA sense strand
gcagggacacaagaggaaa

SEQ ID NO: 1963377 - RNA, 19 nt, Homo sapiens
  misc_RNA (1)...(19): siRNA sense strand
ggaugacacacacuauuac

SEQ ID NO: 1963378 - RNA, 19 nt, Homo sapiens
  misc_RNA (1)...(19): siRNA sense strand
ggaaggugcgucgcuuugu

SEQ ID NO: 1963379 - RNA, 19 nt, Homo sapiens
  misc_RNA (1)...(19): siRNA sense strand
gaaaccucuucaaagugau

SEQ ID NO: 1963380 - RNA, 19 nt, Homo sapiens
  misc_RNA (1)...(19): siRNA sense strand
uuacuaaggaugacacaca

SEQ ID NO: 1963381 - RNA, 19 nt, Homo sapiens
  misc_RNA (1)...(19): siRNA sense strand
cagggaagcaccuauaaaa

SEQ ID NO: 1963382 - RNA, 19 nt, Homo sapiens
  misc_RNA (1)...(19): siRNA sense strand
uaaggaugacacacacuau

SEQ ID NO: 1963383 - RNA, 19 nt, Homo sapiens
  misc_RNA (1)...(19): siRNA sense strand
gcucauggaggagaacuuc

SEQ ID NO: 1963384 - RNA, 19 nt, Homo sapiens
  misc_RNA (1)...(19): siRNA sense strand
guggacaagaugcacgaua

SEQ ID NO: 1963385 - RNA, 19 nt, Homo sapiens
  misc_RNA (1)...(19): siRNA sense strand
cgaguggauugaagcuauc

SEQ ID NO: 1963386 - RNA, 19 nt, Homo sapiens
  misc_RNA (1)...(19): siRNA sense strand
guggcacgguggugaaaca

SEQ ID NO: 1963387 - RNA, 19 nt, Homo sapiens
  misc_RNA (1)...(19): siRNA sense strand
aaccgaccgcuccucauua

SEQ ID NO: 1963388 - RNA, 19 nt, Homo sapiens
  misc_RNA (1)...(19): siRNA sense strand
cagccugcaucgcauugug

SEQ ID NO: 1963389 - RNA, 19 nt, Homo sapiens
  misc_RNA (1)...(19): siRNA sense strand
uuacuaugacccuuccaaa

SEQ ID NO: 1963390 - RNA, 19 nt, Homo sapiens
  misc_RNA (1)...(19): siRNA sense strand
aaggcuaccuggccaagca

SEQ ID NO: 1963391 - RNA, 19 nt, Homo sapiens
  misc_RNA (1)...(19): siRNA sense strand
ugagcgagccgaguggauu

SEQ ID NO: 1963392 - RNA, 19 nt, Homo sapiens
  misc_RNA (1)...(19): siRNA sense strand
ggaucuggccgagcaguuc

SEQ ID NO: 1963393 - RNA, 19 nt, Homo sapiens
  misc_RNA (1)...(19): siRNA sense strand
acacacacuauuacauuca

SEQ ID NO: 1963394 - RNA, 19 nt, Homo sapiens
  misc_RNA (1)...(19): siRNA sense strand
aaggaugacacacacuauu

SEQ ID NO: 1963395 - RNA, 19 nt, Homo sapiens
  misc_RNA (1)...(19): siRNA sense strand
uaaguggcacgguggugaa

SEQ ID NO: 1963396 - RNA, 19 nt, Homo sapiens
  misc_RNA (1)...(19): siRNA sense strand
cugcacagccugagaaacu

SEQ ID NO: 1963397 - RNA, 19 nt, Homo sapiens
  misc_RNA (1)...(19): siRNA sense strand
ugagcacuguggaguuaag

SEQ ID NO: 1963398 - RNA, 19 nt, Homo sapiens
  misc_RNA (1)...(19): siRNA sense strand
acaagaugcacgauagcaa

SEQ ID NO: 1963399 - RNA, 19 nt, Homo sapiens
  misc_RNA (1)...(19): siRNA sense strand
caacaaagccauagugaag

SEQ ID NO: 1963400 - RNA, 19 nt, Homo sapiens
  misc_RNA (1)...(19): siRNA sense strand
agaaggaacugcugucugu

SEQ ID NO: 1963401 - RNA, 19 nt, Homo sapiens
  misc_RNA (1)...(19): siRNA sense strand
cuuauucgcugaccaguga

SEQ ID NO: 1963402 - RNA, 19 nt, Homo sapiens
  misc_RNA (1)...(19): siRNA sense strand
acaaagccauagugaagaa

SEQ ID NO: 1963403 - RNA, 19 nt, Homo sapiens
  misc_RNA (1)...(19): siRNA sense strand
uaacaagcacgaugacaga

SEQ ID NO: 1963404 - RNA, 19 nt, Homo sapiens
  misc_RNA (1)...(19): siRNA sense strand
ucaauaacaagcacgauga

SEQ ID NO: 1963405 - RNA, 19 nt, Homo sapiens
  misc_RNA (1)...(19): siRNA sense strand
caagcacgaugacagauac

SEQ ID NO: 1963406 - RNA, 19 nt, Homo sapiens
  misc_RNA (1)...(19): siRNA sense strand
acacaccacugccuuccaa

SEQ ID NO: 1963407 - RNA, 19 nt, Homo sapiens
  misc_RNA (1)...(19): siRNA sense strand
acaacuacagggucaauaa

SEQ ID NO: 1963408 - RNA, 19 nt, Homo sapiens
  misc_RNA (1)...(19): siRNA sense strand
gagaccugauugagauuuc

SEQ ID NO: 1963409 - RNA, 19 nt, Homo sapiens
  misc_RNA (1)...(19): siRNA sense strand
ugucugcccugaccaacaa

SEQ ID NO: 1963410 - RNA, 19 nt, Homo sapiens
  misc_RNA (1)...(19): siRNA sense strand
cgugggagauggcuaugug

SEQ ID NO: 1963411 - RNA, 19 nt, Homo sapiens
  misc_RNA (1)...(19): siRNA sense strand
ggagaccugauugagauuu

SEQ ID NO: 1963412 - RNA, 19 nt, Homo sapiens
  misc_RNA (1)...(19): siRNA sense strand
acaagcacgaugacagaua

SEQ ID NO: 1963413 - RNA, 19 nt, Homo sapiens
  misc_RNA (1)...(19): siRNA sense strand
ccaacaaagccauagugaa

SEQ ID NO: 1963414 - RNA, 19 nt, Homo sapiens
  misc_RNA (1)...(19): siRNA sense strand
uuggagaccugauugagau

SEQ ID NO: 1963415 - RNA, 19 nt, Homo sapiens
  misc_RNA (1)...(19): siRNA sense strand
gaagaaggaacugcugucu

SEQ ID NO: 1963416 - RNA, 19 nt, Homo sapiens
  misc_RNA (1)...(19): siRNA sense strand
gcaagcgggaaaggcaaua

SEQ ID NO: 1963417 - RNA, 19 nt, Homo sapiens
  misc_RNA (1)...(19): siRNA sense strand
gaccaacaaagccauagug

SEQ ID NO: 1963418 - RNA, 19 nt, Homo sapiens
  misc_RNA (1)...(19): siRNA sense strand
gcacgaugacagauacaca

SEQ ID NO: 1963419 - RNA, 19 nt, Homo sapiens
  misc_RNA (1)...(19): siRNA sense strand
acuacagggucaauaacaa

SEQ ID NO: 1963420 - RNA, 19 nt, Homo sapiens
  misc_RNA (1)...(19): siRNA sense strand
gccagaagcaagcgggaaa

SEQ ID NO: 1963421 - RNA, 19 nt, Homo sapiens
  misc_RNA (1)...(19): siRNA sense strand
gagacuuggagaccugauu

SEQ ID NO: 1963422 - RNA, 19 nt, Homo sapiens
  misc_RNA (1)...(19): siRNA sense strand
gacaacuacagggucaaua

SEQ ID NO: 1963423 - RNA, 19 nt, Homo sapiens
  misc_RNA (1)...(19): siRNA sense strand
ccacugccuuccaacaaaa

SEQ ID NO: 1963424 - RNA, 19 nt, Homo sapiens
  misc_RNA (1)...(19): siRNA sense strand
accacugccuuccaacaaa

SEQ ID NO: 1963425 - RNA, 19 nt, Homo sapiens
  misc_RNA (1)...(19): siRNA sense strand
caagcgggaaaggcaauaa

SEQ ID NO: 1963426 - RNA, 19 nt, Homo sapiens
  misc_RNA (1)...(19): siRNA sense strand
gcgagcacuucgugaacca

SEQ ID NO: 1963427 - RNA, 19 nt, Homo sapiens
  misc_RNA (1)...(19): siRNA sense strand
caacuacagggucaauaac

SEQ ID NO: 1963428 - RNA, 19 nt, Homo sapiens
  misc_RNA (1)...(19): siRNA sense strand
ggauccugcuggccagaag

SEQ ID NO: 1963429 - RNA, 19 nt, Homo sapiens
  misc_RNA (1)...(19): siRNA sense strand
caagcgggcagaggaguug

SEQ ID NO: 1963430 - RNA, 19 nt, Homo sapiens
  misc_RNA (1)...(19): siRNA sense strand
agacuuggagaccugauug

SEQ ID NO: 1963431 - RNA, 19 nt, Homo sapiens
  misc_RNA (1)...(19): siRNA sense strand
ugacaacugcgagcacuuc

SEQ ID NO: 1963432 - RNA, 19 nt, Homo sapiens
  misc_RNA (1)...(19): siRNA sense strand
cuacgugggagauggcuau

SEQ ID NO: 1963433 - RNA, 19 nt, Homo sapiens
  misc_RNA (1)...(19): siRNA sense strand
caccacugccuuccaacaa

SEQ ID NO: 1963434 - RNA, 19 nt, Homo sapiens
  misc_RNA (1)...(19): siRNA sense strand
ucagauagcuuuagugauu

SEQ ID NO: 1963435 - RNA, 19 nt, Homo sapiens
  misc_RNA (1)...(19): siRNA sense strand
gaacuuauccugacugguu

SEQ ID NO: 1963436 - RNA, 19 nt, Homo sapiens
  misc_RNA (1)...(19): siRNA sense strand
caagacaccuucaucuaaa

SEQ ID NO: 1963437 - RNA, 19 nt, Homo sapiens
  misc_RNA (1)...(19): siRNA sense strand
caaagagucaucagaauaa

SEQ ID NO: 1963438 - RNA, 19 nt, Homo sapiens
  misc_RNA (1)...(19): siRNA sense strand
gcaacaaugugggacuaua

SEQ ID NO: 1963439 - RNA, 19 nt, Homo sapiens
  misc_RNA (1)...(19): siRNA sense strand
ccacauaggacuaauuauu

SEQ ID NO: 1963440 - RNA, 19 nt, Homo sapiens
  misc_RNA (1)...(19): siRNA sense strand
gaaacaagccagaagaaca

SEQ ID NO: 1963441 - RNA, 19 nt, Homo sapiens
  misc_RNA (1)...(19): siRNA sense strand
agacgaauauguuguucua

SEQ ID NO: 1963442 - RNA, 19 nt, Homo sapiens
  misc_RNA (1)...(19): siRNA sense strand
ucaaagagucaucagaaua

SEQ ID NO: 1963443 - RNA, 19 nt, Homo sapiens
  misc_RNA (1)...(19): siRNA sense strand
ucaagacaccuucaucuaa

SEQ ID NO: 1963444 - RNA, 19 nt, Homo sapiens
  misc_RNA (1)...(19): siRNA sense strand
caacugauguguuugaaaa

SEQ ID NO: 1963445 - RNA, 19 nt, Homo sapiens
  misc_RNA (1)...(19): siRNA sense strand
gagcaacaaugugggacua

SEQ ID NO: 1963446 - RNA, 19 nt, Homo sapiens
  misc_RNA (1)...(19): siRNA sense strand
aagaauggauccacuauag

SEQ ID NO: 1963447 - RNA, 19 nt, Homo sapiens
  misc_RNA (1)...(19): siRNA sense strand
aagcauccuugucuuuaua

SEQ ID NO: 1963448 - RNA, 19 nt, Homo sapiens
  misc_RNA (1)...(19): siRNA sense strand
gaccaaaagugaacuauau

SEQ ID NO: 1963449 - RNA, 19 nt, Homo sapiens
  misc_RNA (1)...(19): siRNA sense strand
gcagugggagcuucaauug

SEQ ID NO: 1963450 - RNA, 19 nt, Homo sapiens
  misc_RNA (1)...(19): siRNA sense strand
ggauggcaauggugauuuc

SEQ ID NO: 1963451 - RNA, 19 nt, Homo sapiens
  misc_RNA (1)...(19): siRNA sense strand
gauauacuuuagugcuuug

SEQ ID NO: 1963452 - RNA, 19 nt, Homo sapiens
  misc_RNA (1)...(19): siRNA sense strand
ucaggcauguugagauuug

SEQ ID NO: 1963453 - RNA, 19 nt, Homo sapiens
  misc_RNA (1)...(19): siRNA sense strand
ggugauuucuucauuugau

SEQ ID NO: 1963454 - RNA, 19 nt, Homo sapiens
  misc_RNA (1)...(19): siRNA sense strand
gcaagaauggauccacuau

SEQ ID NO: 1963455 - RNA, 19 nt, Homo sapiens
  misc_RNA (1)...(19): siRNA sense strand
caagaauggauccacuaua

SEQ ID NO: 1963456 - RNA, 19 nt, Homo sapiens
  misc_RNA (1)...(19): siRNA sense strand
aaacaagccagaagaacaa

SEQ ID NO: 1963457 - RNA, 19 nt, Homo sapiens
  misc_RNA (1)...(19): siRNA sense strand
gaauggauccacuauagca

SEQ ID NO: 1963458 - RNA, 19 nt, Homo sapiens
  misc_RNA (1)...(19): siRNA sense strand
cgaauauguuguucuaugg

SEQ ID NO: 1963459 - RNA, 19 nt, Homo sapiens
  misc_RNA (1)...(19): siRNA sense strand
ggaguaauauuuuccuguu

SEQ ID NO: 1963460 - RNA, 19 nt, Homo sapiens
  misc_RNA (1)...(19): siRNA sense strand
acgaauauguuguucuaug

SEQ ID NO: 1963461 - RNA, 19 nt, Homo sapiens
  misc_RNA (1)...(19): siRNA sense strand
ggacuccacauaggacuaa

SEQ ID NO: 1963462 - RNA, 19 nt, Homo sapiens
  misc_RNA (1)...(19): siRNA sense strand
gugauauacuuuagugcuu

SEQ ID NO: 1963463 - RNA, 19 nt, Homo sapiens
  misc_RNA (1)...(19): siRNA sense strand
gaaauucagauagcuuuag

SEQ ID NO: 1963464 - RNA, 19 nt, Homo sapiens
  misc_RNA (1)...(19): siRNA sense strand
gggaaacaagccagaagaa

SEQ ID NO: 1963465 - RNA, 19 nt, Homo sapiens
  misc_RNA (1)...(19): siRNA sense strand
uuucaggcauguugagauu

SEQ ID NO: 1963466 - RNA, 19 nt, Homo sapiens
  misc_RNA (1)...(19): siRNA sense strand
gaaaaguggauguaacuga

SEQ ID NO: 1963467 - RNA, 19 nt, Homo sapiens
  misc_RNA (1)...(19): siRNA sense strand
uggcaauggugauuucuuc

SEQ ID NO: 1963468 - RNA, 19 nt, Homo sapiens
  misc_RNA (1)...(19): siRNA sense strand
gcaaauuucaagacaccuu

SEQ ID NO: 1963469 - RNA, 19 nt, Homo sapiens
  misc_RNA (1)...(19): siRNA sense strand
gcgcucauuggcagacuua

SEQ ID NO: 1963470 - RNA, 19 nt, Homo sapiens
  misc_RNA (1)...(19): siRNA sense strand
gcaacugauguguuugaaa

SEQ ID NO: 1963471 - RNA, 19 nt, Homo sapiens
  misc_RNA (1)...(19): siRNA sense strand
ggacuauacgauuccuauu

SEQ ID NO: 1963472 - RNA, 19 nt, Homo sapiens
  misc_RNA (1)...(19): siRNA sense strand
auuucuagguggaguaaua

SEQ ID NO: 1963473 - RNA, 19 nt, Homo sapiens
  misc_RNA (1)...(19): siRNA sense strand
cagauagcuuuagugauug

SEQ ID NO: 1963474 - RNA, 19 nt, Homo sapiens
  misc_RNA (1)...(19): siRNA sense strand
gaauauguuguucuaugga

SEQ ID NO: 1963475 - RNA, 19 nt, Homo sapiens
  misc_RNA (1)...(19): siRNA sense strand
cagcaacugauguguuuga

SEQ ID NO: 1963476 - RNA, 19 nt, Homo sapiens
  misc_RNA (1)...(19): siRNA sense strand
gugauugucuuuguguugu

SEQ ID NO: 1963477 - RNA, 19 nt, Homo sapiens
  misc_RNA (1)...(19): siRNA sense strand
agacaccuucaucuaaaua

SEQ ID NO: 1963478 - RNA, 19 nt, Homo sapiens
  misc_RNA (1)...(19): siRNA sense strand
gacuauacgauuccuauuc

SEQ ID NO: 1963479 - RNA, 19 nt, Homo sapiens
  misc_RNA (1)...(19): siRNA sense strand
gggacuauacgauuccuau

SEQ ID NO: 1963480 - RNA, 19 nt, Homo sapiens
  misc_RNA (1)...(19): siRNA sense strand
cuucaaagagucaucagaa

SEQ ID NO: 1963481 - RNA, 19 nt, Homo sapiens
  misc_RNA (1)...(19): siRNA sense strand
uuggaugugucuuugcuaa

SEQ ID NO: 1963482 - RNA, 19 nt, Homo sapiens
  misc_RNA (1)...(19): siRNA sense strand
cuccacauaggacuaauua

SEQ ID NO: 1963483 - RNA, 19 nt, Homo sapiens
  misc_RNA (1)...(19): siRNA sense strand
uacgauuccuauucuagaa

SEQ ID NO: 1963484 - RNA, 19 nt, Homo sapiens
  misc_RNA (1)...(19): siRNA sense strand
gugacucucuuuccacagu

SEQ ID NO: 1963485 - RNA, 19 nt, Homo sapiens
  misc_RNA (1)...(19): siRNA sense strand
gguucaaguucuuucuuca

SEQ ID NO: 1963486 - RNA, 19 nt, Homo sapiens
  misc_RNA (1)...(19): siRNA sense strand
cgauuccuauucuagaaau

SEQ ID NO: 1963487 - RNA, 19 nt, Homo sapiens
  misc_RNA (1)...(19): siRNA sense strand
aaaaguggauguaacugaa

SEQ ID NO: 1963488 - RNA, 19 nt, Homo sapiens
  misc_RNA (1)...(19): siRNA sense strand
ccaccgaagaggcaccaua

SEQ ID NO: 1963489 - RNA, 19 nt, Homo sapiens
  misc_RNA (1)...(19): siRNA sense strand
ggauguuuguguuuuauug

SEQ ID NO: 1963490 - RNA, 19 nt, Homo sapiens
  misc_RNA (1)...(19): siRNA sense strand
ugacucucuuuccacagua

SEQ ID NO: 1963491 - RNA, 19 nt, Homo sapiens
  misc_RNA (1)...(19): siRNA sense strand
caacaaugugggacuauac

SEQ ID NO: 1963492 - RNA, 19 nt, Homo sapiens
  misc_RNA (1)...(19): siRNA sense strand
uuauugggauguuuguguu

SEQ ID NO: 1963493 - RNA, 19 nt, Homo sapiens
  misc_RNA (1)...(19): siRNA sense strand
gcaauggugauuucuucau

SEQ ID NO: 1963494 - RNA, 19 nt, Homo sapiens
  misc_RNA (1)...(19): siRNA sense strand
uguguugucugcauuugga

SEQ ID NO: 1963495 - RNA, 19 nt, Homo sapiens
  misc_RNA (1)...(19): siRNA sense strand
acuauacgauuccuauucu

SEQ ID NO: 1963496 - RNA, 19 nt, Homo sapiens
  misc_RNA (1)...(19): siRNA sense strand
caagacugcaugucaucaa

SEQ ID NO: 1963497 - RNA, 19 nt, Homo sapiens
  misc_RNA (1)...(19): siRNA sense strand
ggaaacaagccagaagaac

SEQ ID NO: 1963498 - RNA, 19 nt, Homo sapiens
  misc_RNA (1)...(19): siRNA sense strand
ggcaagaauggauccacua

SEQ ID NO: 1963499 - RNA, 19 nt, Homo sapiens
  misc_RNA (1)...(19): siRNA sense strand
ggauuucuagguggaguaa

SEQ ID NO: 1963500 - RNA, 19 nt, Homo sapiens
  misc_RNA (1)...(19): siRNA sense strand
gcucauuggcagacuuaug

SEQ ID NO: 1963501 - RNA, 19 nt, Homo sapiens
  misc_RNA (1)...(19): siRNA sense strand
ucuagguggaguaauauuu

SEQ ID NO: 1963502 - RNA, 19 nt, Homo sapiens
  misc_RNA (1)...(19): siRNA sense strand
cuauacgauuccuauucua

SEQ ID NO: 1963503 - RNA, 19 nt, Homo sapiens
  misc_RNA (1)...(19): siRNA sense strand
ggcagugggagcuucaauu

SEQ ID NO: 1963504 - RNA, 19 nt, Homo sapiens
  misc_RNA (1)...(19): siRNA sense strand
ggaugcuauugaugggaaa

SEQ ID NO: 1963505 - RNA, 19 nt, Homo sapiens
  misc_RNA (1)...(19): siRNA sense strand
caucagaauaacauggauu

SEQ ID NO: 1963506 - RNA, 19 nt, Homo sapiens
  misc_RNA (1)...(19): siRNA sense strand
uucaauugccgcucgcuua

SEQ ID NO: 1963507 - RNA, 19 nt, Homo sapiens
  misc_RNA (1)...(19): siRNA sense strand
gacugcaugucaucaagca

SEQ ID NO: 1963508 - RNA, 19 nt, Homo sapiens
  misc_RNA (1)...(19): siRNA sense strand
aagacaccuucaucuaaau

SEQ ID NO: 1963509 - RNA, 19 nt, Homo sapiens
  misc_RNA (1)...(19): siRNA sense strand
gccgcucgcuuaggaacuu

SEQ ID NO: 1963510 - RNA, 19 nt, Homo sapiens
  misc_RNA (1)...(19): siRNA sense strand
guucaaguucuuucuucaa

SEQ ID NO: 1963511 - RNA, 19 nt, Homo sapiens
  misc_RNA (1)...(19): siRNA sense strand
ggggccaggucuuuuguuu

SEQ ID NO: 1963512 - RNA, 19 nt, Homo sapiens
  misc_RNA (1)...(19): siRNA sense strand
gcaccauacuggacauacc

SEQ ID NO: 1963513 - RNA, 19 nt, Homo sapiens
  misc_RNA (1)...(19): siRNA sense strand
aaaguggauguaacugaaa

SEQ ID NO: 1963514 - RNA, 19 nt, Homo sapiens
  misc_RNA (1)...(19): siRNA sense strand
uucaaagagucaucagaau

SEQ ID NO: 1963515 - RNA, 19 nt, Homo sapiens
  misc_RNA (1)...(19): siRNA sense strand
gucacuggaugcuauugau

SEQ ID NO: 1963516 - RNA, 19 nt, Homo sapiens
  misc_RNA (1)...(19): siRNA sense strand
aauugccgcucgcuuagga

SEQ ID NO: 1963517 - RNA, 19 nt, Homo sapiens
  misc_RNA (1)...(19): siRNA sense strand
ccgaagaggcaccauacug

SEQ ID NO: 1963518 - RNA, 19 nt, Homo sapiens
  misc_RNA (1)...(19): siRNA sense strand
auucagauagcuuuaguga

SEQ ID NO: 1963519 - RNA, 19 nt, Homo sapiens
  misc_RNA (1)...(19): siRNA sense strand
aaacucuuguuccccuuua

SEQ ID NO: 1963520 - RNA, 19 nt, Homo sapiens
  misc_RNA (1)...(19): siRNA sense strand
auggugauuucuucauuug

SEQ ID NO: 1963521 - RNA, 19 nt, Homo sapiens
  misc_RNA (1)...(19): siRNA sense strand
uauccuccauggugguguu

SEQ ID NO: 1963522 - RNA, 19 nt, Homo sapiens
  misc_RNA (1)...(19): siRNA sense strand
uagcuuuagugauugucuu

SEQ ID NO: 1963523 - RNA, 19 nt, Homo sapiens
  misc_RNA (1)...(19): siRNA sense strand
gaugggaaacaagccagaa

SEQ ID NO: 1963524 - RNA, 19 nt, Homo sapiens
  misc_RNA (1)...(19): siRNA sense strand
aaugugggacuauacgauu

SEQ ID NO: 1963525 - RNA, 19 nt, Homo sapiens
  misc_RNA (1)...(19): siRNA sense strand
ccauggcugugacucucuu

SEQ ID NO: 1963526 - RNA, 19 nt, Homo sapiens
  misc_RNA (1)...(19): siRNA sense strand
gcauuuggaggagcaacaa

SEQ ID NO: 1963527 - RNA, 19 nt, Homo sapiens
  misc_RNA (1)...(19): siRNA sense strand
ucaauugccgcucgcuuag

SEQ ID NO: 1963528 - RNA, 19 nt, Homo sapiens
  misc_RNA (1)...(19): siRNA sense strand
gacaccuucaucuaaauau

SEQ ID NO: 1963529 - RNA, 19 nt, Homo sapiens
  misc_RNA (1)...(19): siRNA sense strand
gccugcaaauuucaagaca

SEQ ID NO: 1963530 - RNA, 19 nt, Homo sapiens
  misc_RNA (1)...(19): siRNA sense strand
gacucucuuuccacaguau

SEQ ID NO: 1963531 - RNA, 19 nt, Homo sapiens
  misc_RNA (1)...(19): siRNA sense strand
ucucuuuccacaguauuua

SEQ ID NO: 1963532 - RNA, 19 nt, Homo sapiens
  misc_RNA (1)...(19): siRNA sense strand
caaugugggacuauacgau

SEQ ID NO: 1963533 - RNA, 19 nt, Homo sapiens
  misc_RNA (1)...(19): siRNA sense strand
aaguggauguaacugaaau

SEQ ID NO: 1963534 - RNA, 19 nt, Homo sapiens
  misc_RNA (1)...(19): siRNA sense strand
ggacaacuuugaugagaug

SEQ ID NO: 1963535 - RNA, 19 nt, Homo sapiens
  misc_RNA (1)...(19): siRNA sense strand
agacaucuuugacaucaua

SEQ ID NO: 1963536 - RNA, 19 nt, Homo sapiens
  misc_RNA (1)...(19): siRNA sense strand
gcagacuuauucaguguuu

SEQ ID NO: 1963537 - RNA, 19 nt, Homo sapiens
  misc_RNA (1)...(19): siRNA sense strand
ucaagaggcugacgcagaa

SEQ ID NO: 1963538 - RNA, 19 nt, Homo sapiens
  misc_RNA (1)...(19): siRNA sense strand
ggacaggucuagggagguu

SEQ ID NO: 1963539 - RNA, 19 nt, Homo sapiens
  misc_RNA (1)...(19): siRNA sense strand
agaagcuagugcagacuua

SEQ ID NO: 1963540 - RNA, 19 nt, Homo sapiens
  misc_RNA (1)...(19): siRNA sense strand
gaugagcgacguagugguu

SEQ ID NO: 1963541 - RNA, 19 nt, Homo sapiens
  misc_RNA (1)...(19): siRNA sense strand
gaaaauucaugaagacauc

SEQ ID NO: 1963542 - RNA, 19 nt, Homo sapiens
  misc_RNA (1)...(19): siRNA sense strand
guaaggaggacauguucaa

SEQ ID NO: 1963543 - RNA, 19 nt, Homo sapiens
  misc_RNA (1)...(19): siRNA sense strand
caucauagaccgagaagca

SEQ ID NO: 1963544 - RNA, 19 nt, Homo sapiens
  misc_RNA (1)...(19): siRNA sense strand
ccggcuacaugaacaauga

SEQ ID NO: 1963545 - RNA, 19 nt, Homo sapiens
  misc_RNA (1)...(19): siRNA sense strand
cggcuccacuuucucauga

SEQ ID NO: 1963546 - RNA, 19 nt, Homo sapiens
  misc_RNA (1)...(19): siRNA sense strand
cagcaucuccucgcucuuu

SEQ ID NO: 1963547 - RNA, 19 nt, Homo sapiens
  misc_RNA (1)...(19): siRNA sense strand
gugcagacuuauucagugu

SEQ ID NO: 1963548 - RNA, 19 nt, Homo sapiens
  misc_RNA (1)...(19): siRNA sense strand
ggacaacacagcccugaac

SEQ ID NO: 1963549 - RNA, 19 nt, Homo sapiens
  misc_RNA (1)...(19): siRNA sense strand
gcagauggaagugacaguu

SEQ ID NO: 1963550 - RNA, 19 nt, Homo sapiens
  misc_RNA (1)...(19): siRNA sense strand
acaauucacuccugacacu

SEQ ID NO: 1963551 - RNA, 19 nt, Homo sapiens
  misc_RNA (1)...(19): siRNA sense strand
agauggaagugacaguuug

SEQ ID NO: 1963552 - RNA, 19 nt, Homo sapiens
  misc_RNA (1)...(19): siRNA sense strand
aaggacaacuuugaugaga

SEQ ID NO: 1963553 - RNA, 19 nt, Homo sapiens
  misc_RNA (1)...(19): siRNA sense strand
ugaaccggauugccacaga

SEQ ID NO: 1963554 - RNA, 19 nt, Homo sapiens
  misc_RNA (1)...(19): siRNA sense strand
aggaggacauguucaagga

SEQ ID NO: 1963555 - RNA, 19 nt, Homo sapiens
  misc_RNA (1)...(19): siRNA sense strand
ccacccagguccacaagag

SEQ ID NO: 1963556 - RNA, 19 nt, Homo sapiens
  misc_RNA (1)...(19): siRNA sense strand
gagaagcagauggaaguga

SEQ ID NO: 1963557 - RNA, 19 nt, Homo sapiens
  misc_RNA (1)...(19): siRNA sense strand
cagauggaagugacaguuu

SEQ ID NO: 1963558 - RNA, 19 nt, Homo sapiens
  misc_RNA (1)...(19): siRNA sense strand
guucuggccugggcuccua

SEQ ID NO: 1963559 - RNA, 19 nt, Homo sapiens
  misc_RNA (1)...(19): siRNA sense strand
ggucagcgggcucaugaug

SEQ ID NO: 1963560 - RNA, 19 nt, Homo sapiens
  misc_RNA (1)...(19): siRNA sense strand
ugacgcagaacgcagauug

SEQ ID NO: 1963561 - RNA, 19 nt, Homo sapiens
  misc_RNA (1)...(19): siRNA sense strand
ccucaucgccucgcucauu

SEQ ID NO: 1963562 - RNA, 19 nt, Homo sapiens
  misc_RNA (1)...(19): siRNA sense strand
aggaggagcuggcaacaac

SEQ ID NO: 1963563 - RNA, 19 nt, Homo sapiens
  misc_RNA (1)...(19): siRNA sense strand
ccacagaccgccugcacau

SEQ ID NO: 1963564 - RNA, 19 nt, Homo sapiens
  misc_RNA (1)...(19): siRNA sense strand
gugagaaaauucaugaaga

SEQ ID NO: 1963565 - RNA, 19 nt, Homo sapiens
  misc_RNA (1)...(19): siRNA sense strand
cgagaugagcgacguagug

SEQ ID NO: 1963566 - RNA, 19 nt, Homo sapiens
  misc_RNA (1)...(19): siRNA sense strand
guucaggagcucauugaug

SEQ ID NO: 1963567 - RNA, 19 nt, Homo sapiens
  misc_RNA (1)...(19): siRNA sense strand
gaugagauggacaggucua

SEQ ID NO: 1963568 - RNA, 19 nt, Homo sapiens
  misc_RNA (1)...(19): siRNA sense strand
ccacggcuccacuuucuca

SEQ ID NO: 1963569 - RNA, 19 nt, Homo sapiens
  misc_RNA (1)...(19): siRNA sense strand
ggacgagaugagcgacgua

SEQ ID NO: 1963570 - RNA, 19 nt, Homo sapiens
  misc_RNA (1)...(19): siRNA sense strand
cauguucaaggacaacuuu

SEQ ID NO: 1963571 - RNA, 19 nt, Homo sapiens
  misc_RNA (1)...(19): siRNA sense strand
gaccaaccacugcuacauc

SEQ ID NO: 1963572 - RNA, 19 nt, Homo sapiens
  misc_RNA (1)...(19): siRNA sense strand
gaagcuagugcagacuuau

SEQ ID NO: 1963573 - RNA, 19 nt, Homo sapiens
  misc_RNA (1)...(19): siRNA sense strand
acaucuaccugucggaaca

SEQ ID NO: 1963574 - RNA, 19 nt, Homo sapiens
  misc_RNA (1)...(19): siRNA sense strand
ccagugcggcaaccagauu

SEQ ID NO: 1963575 - RNA, 19 nt, Homo sapiens
  misc_RNA (1)...(19): siRNA sense strand
ccgagaagcagauggaagu

SEQ ID NO: 1963576 - RNA, 19 nt, Homo sapiens
  misc_RNA (1)...(19): siRNA sense strand
ccacgguccuggaugucau

SEQ ID NO: 1963577 - RNA, 19 nt, Homo sapiens
  misc_RNA (1)...(19): siRNA sense strand
ugacaucauagaccgagaa

SEQ ID NO: 1963578 - RNA, 19 nt, Homo sapiens
  misc_RNA (1)...(19): siRNA sense strand
cuacaucgccauccucaac

SEQ ID NO: 1963579 - RNA, 19 nt, Homo sapiens
  misc_RNA (1)...(19): siRNA sense strand
ccagauuggguucgaguuc

SEQ ID NO: 1963580 - RNA, 19 nt, Homo sapiens
  misc_RNA (1)...(19): siRNA sense strand
ggucuagggagguuguuca

SEQ ID NO: 1963581 - RNA, 19 nt, Homo sapiens
  misc_RNA (1)...(19): siRNA sense strand
caaggacaacuuugaugag

SEQ ID NO: 1963582 - RNA, 19 nt, Homo sapiens
  misc_RNA (1)...(19): siRNA sense strand
gaggaggagcuggcaacaa

SEQ ID NO: 1963583 - RNA, 19 nt, Homo sapiens
  misc_RNA (1)...(19): siRNA sense strand
ggcagacgaugagcacuac

SEQ ID NO: 1963584 - RNA, 19 nt, Homo sapiens
  misc_RNA (1)...(19): siRNA sense strand
cagauuggguucgaguucu

SEQ ID NO: 1963585 - RNA, 19 nt, Homo sapiens
  misc_RNA (1)...(19): siRNA sense strand
gaggagcuggcaacaacug

SEQ ID NO: 1963586 - RNA, 19 nt, Homo sapiens
  misc_RNA (1)...(19): siRNA sense strand
gccagcaguuugacaagcu

SEQ ID NO: 1963587 - RNA, 19 nt, Homo sapiens
  misc_RNA (1)...(19): siRNA sense strand
gugguucagcccuacaauu

SEQ ID NO: 1963588 - RNA, 19 nt, Homo sapiens
  misc_RNA (1)...(19): siRNA sense strand
ugagcgacguagugguuca

SEQ ID NO: 1963589 - RNA, 19 nt, Homo sapiens
  misc_RNA (1)...(19): siRNA sense strand
ccacccagccagacuacau

SEQ ID NO: 1963590 - RNA, 19 nt, Homo sapiens
  misc_RNA (1)...(19): siRNA sense strand
caucuccucgcucuuugaa

SEQ ID NO: 1963591 - RNA, 19 nt, Homo sapiens
  misc_RNA (1)...(19): siRNA sense strand
guucagcccuacaauucac

SEQ ID NO: 1963592 - RNA, 19 nt, Homo sapiens
  misc_RNA (1)...(19): siRNA sense strand
ugguucagcccuacaauuc

SEQ ID NO: 1963593 - RNA, 19 nt, Homo sapiens
  misc_RNA (1)...(19): siRNA sense strand
ggacugagcuguaagaaca

SEQ ID NO: 1963594 - RNA, 19 nt, Homo sapiens
  misc_RNA (1)...(19): siRNA sense strand
gaaaucacccguagcuuua

SEQ ID NO: 1963595 - RNA, 19 nt, Homo sapiens
  misc_RNA (1)...(19): siRNA sense strand
gcagugagcaguaaucuaa

SEQ ID NO: 1963596 - RNA, 19 nt, Homo sapiens
  misc_RNA (1)...(19): siRNA sense strand
caaauucucugaggacuaa

SEQ ID NO: 1963597 - RNA, 19 nt, Homo sapiens
  misc_RNA (1)...(19): siRNA sense strand
caagacauguggaaccaua

SEQ ID NO: 1963598 - RNA, 19 nt, Homo sapiens
  misc_RNA (1)...(19): siRNA sense strand
ggaaaucacccguagcuuu

SEQ ID NO: 1963599 - RNA, 19 nt, Homo sapiens
  misc_RNA (1)...(19): siRNA sense strand
gagaaaggaugaaguaucu

SEQ ID NO: 1963600 - RNA, 19 nt, Homo sapiens
  misc_RNA (1)...(19): siRNA sense strand
gcccagagaugcauucauu

SEQ ID NO: 1963601 - RNA, 19 nt, Homo sapiens
  misc_RNA (1)...(19): siRNA sense strand
ggacuuaugagcuauuuaa

SEQ ID NO: 1963602 - RNA, 19 nt, Homo sapiens
  misc_RNA (1)...(19): siRNA sense strand
gagaugcauucauuucuuu

SEQ ID NO: 1963603 - RNA, 19 nt, Homo sapiens
  misc_RNA (1)...(19): siRNA sense strand
gaaccgagaugggacuuau

SEQ ID NO: 1963604 - RNA, 19 nt, Homo sapiens
  misc_RNA (1)...(19): siRNA sense strand
ucucagacuuccuaaauuu

SEQ ID NO: 1963605 - RNA, 19 nt, Homo sapiens
  misc_RNA (1)...(19): siRNA sense strand
acuaauauccugcaaguua

SEQ ID NO: 1963606 - RNA, 19 nt, Homo sapiens
  misc_RNA (1)...(19): siRNA sense strand
ccaguuagguugccauuca

SEQ ID NO: 1963607 - RNA, 19 nt, Homo sapiens
  misc_RNA (1)...(19): siRNA sense strand
uaaaugcccuaaaguggaa

SEQ ID NO: 1963608 - RNA, 19 nt, Homo sapiens
  misc_RNA (1)...(19): siRNA sense strand
ccacauuccucagucauuu

SEQ ID NO: 1963609 - RNA, 19 nt, Homo sapiens
  misc_RNA (1)...(19): siRNA sense strand
gaggagaaaggaugaagua

SEQ ID NO: 1963610 - RNA, 19 nt, Homo sapiens
  misc_RNA (1)...(19): siRNA sense strand
gagcaguaaucuaaggaaa

SEQ ID NO: 1963611 - RNA, 19 nt, Homo sapiens
  misc_RNA (1)...(19): siRNA sense strand
gagaugcccuuggaaauca

SEQ ID NO: 1963612 - RNA, 19 nt, Homo sapiens
  misc_RNA (1)...(19): siRNA sense strand
ugaaaucgcacaagucaaa

SEQ ID NO: 1963613 - RNA, 19 nt, Homo sapiens
  misc_RNA (1)...(19): siRNA sense strand
guggucagcuguuagauga

SEQ ID NO: 1963614 - RNA, 19 nt, Homo sapiens
  misc_RNA (1)...(19): siRNA sense strand
guagaaagcauagcagaaa

SEQ ID NO: 1963615 - RNA, 19 nt, Homo sapiens
  misc_RNA (1)...(19): siRNA sense strand
cuaauauccugcaaguuaa

SEQ ID NO: 1963616 - RNA, 19 nt, Homo sapiens
  misc_RNA (1)...(19): siRNA sense strand
gcaagcagccuaguguuga

SEQ ID NO: 1963617 - RNA, 19 nt, Homo sapiens
  misc_RNA (1)...(19): siRNA sense strand
gaagagcucgguccugaau

SEQ ID NO: 1963618 - RNA, 19 nt, Homo sapiens
  misc_RNA (1)...(19): siRNA sense strand
ucacuaauauccugcaagu

SEQ ID NO: 1963619 - RNA, 19 nt, Homo sapiens
  misc_RNA (1)...(19): siRNA sense strand
gccaacaccuuucaucauc

SEQ ID NO: 1963620 - RNA, 19 nt, Homo sapiens
  misc_RNA (1)...(19): siRNA sense strand
gcagaaagucaguggcaaa

SEQ ID NO: 1963621 - RNA, 19 nt, Homo sapiens
  misc_RNA (1)...(19): siRNA sense strand
ccugaaagcugccacucaa

SEQ ID NO: 1963622 - RNA, 19 nt, Homo sapiens
  misc_RNA (1)...(19): siRNA sense strand
ggagaaaggaugaaguauc

SEQ ID NO: 1963623 - RNA, 19 nt, Homo sapiens
  misc_RNA (1)...(19): siRNA sense strand
gacacuggcucaggaauuc

SEQ ID NO: 1963624 - RNA, 19 nt, Homo sapiens
  misc_RNA (1)...(19): siRNA sense strand
ucacagaacgcauccauca

SEQ ID NO: 1963625 - RNA, 19 nt, Homo sapiens
  misc_RNA (1)...(19): siRNA sense strand
ugugguugcuuccucguua

SEQ ID NO: 1963626 - RNA, 19 nt, Homo sapiens
  misc_RNA (1)...(19): siRNA sense strand
ccacuauuacuuucccuua

SEQ ID NO: 1963627 - RNA, 19 nt, Homo sapiens
  misc_RNA (1)...(19): siRNA sense strand
ccagcuuucuuaucugauu

SEQ ID NO: 1963628 - RNA, 19 nt, Homo sapiens
  misc_RNA (1)...(19): siRNA sense strand
caagaugcagugagcagua

SEQ ID NO: 1963629 - RNA, 19 nt, Homo sapiens
  misc_RNA (1)...(19): siRNA sense strand
caagcagccuaguguugaa

SEQ ID NO: 1963630 - RNA, 19 nt, Homo sapiens
  misc_RNA (1)...(19): siRNA sense strand
ggaaguagaaagcauagca

SEQ ID NO: 1963631 - RNA, 19 nt, Homo sapiens
  misc_RNA (1)...(19): siRNA sense strand
gcccuaaaguggaaguaga

SEQ ID NO: 1963632 - RNA, 19 nt, Homo sapiens
  misc_RNA (1)...(19): siRNA sense strand
auacuuggcauaucacuaa

SEQ ID NO: 1963633 - RNA, 19 nt, Homo sapiens
  misc_RNA (1)...(19): siRNA sense strand
caaagaagaggagaaagga

SEQ ID NO: 1963634 - RNA, 19 nt, Homo sapiens
  misc_RNA (1)...(19): siRNA sense strand
gaacgcauccaucaaacca

SEQ ID NO: 1963635 - RNA, 19 nt, Homo sapiens
  misc_RNA (1)...(19): siRNA sense strand
acagaacgcauccaucaaa

SEQ ID NO: 1963636 - RNA, 19 nt, Homo sapiens
  misc_RNA (1)...(19): siRNA sense strand
ccagagaugcccuuggaaa

SEQ ID NO: 1963637 - RNA, 19 nt, Homo sapiens
  misc_RNA (1)...(19): siRNA sense strand
agacaacaauccagacagu

SEQ ID NO: 1963638 - RNA, 19 nt, Homo sapiens
  misc_RNA (1)...(19): siRNA sense strand
gcuguuagaugaggcacaa

SEQ ID NO: 1963639 - RNA, 19 nt, Homo sapiens
  misc_RNA (1)...(19): siRNA sense strand
ggccuguggucagcuguua

SEQ ID NO: 1963640 - RNA, 19 nt, Homo sapiens
  misc_RNA (1)...(19): siRNA sense strand
agagaugcauucauuucuu

SEQ ID NO: 1963641 - RNA, 19 nt, Homo sapiens
  misc_RNA (1)...(19): siRNA sense strand
caaaugccuccaaggauga

SEQ ID NO: 1963642 - RNA, 19 nt, Homo sapiens
  misc_RNA (1)...(19): siRNA sense strand
caacaguaucugcuuguga

SEQ ID NO: 1963643 - RNA, 19 nt, Homo sapiens
  misc_RNA (1)...(19): siRNA sense strand
ucgaguggaucccagauau

SEQ ID NO: 1963644 - RNA, 19 nt, Homo sapiens
  misc_RNA (1)...(19): siRNA sense strand
caacaccuuucaucaucga

SEQ ID NO: 1963645 - RNA, 19 nt, Homo sapiens
  misc_RNA (1)...(19): siRNA sense strand
agaugggacuuaugagcua

SEQ ID NO: 1963646 - RNA, 19 nt, Homo sapiens
  misc_RNA (1)...(19): siRNA sense strand
gcucaggaauucucagacu

SEQ ID NO: 1963647 - RNA, 19 nt, Homo sapiens
  misc_RNA (1)...(19): siRNA sense strand
gagccaacaccuuucauca

SEQ ID NO: 1963648 - RNA, 19 nt, Homo sapiens
  misc_RNA (1)...(19): siRNA sense strand
cacuauuacuuucccuuaa

SEQ ID NO: 1963649 - RNA, 19 nt, Homo sapiens
  misc_RNA (1)...(19): siRNA sense strand
caagccagaagcacaguuu

SEQ ID NO: 1963650 - RNA, 19 nt, Homo sapiens
  misc_RNA (1)...(19): siRNA sense strand
guucacuacugccucaaga

SEQ ID NO: 1963651 - RNA, 19 nt, Homo sapiens
  misc_RNA (1)...(19): siRNA sense strand
gcucgguccugaaugcaau

SEQ ID NO: 1963652 - RNA, 19 nt, Homo sapiens
  misc_RNA (1)...(19): siRNA sense strand
gagcugcggaucaaguuug

SEQ ID NO: 1963653 - RNA, 19 nt, Homo sapiens
  misc_RNA (1)...(19): siRNA sense strand
uggcaaaccagaaccauug

SEQ ID NO: 1963654 - RNA, 19 nt, Homo sapiens
  misc_RNA (1)...(19): siRNA sense strand
gcuguaagaacaagacaug

SEQ ID NO: 1963655 - RNA, 19 nt, Homo sapiens
  misc_RNA (1)...(19): siRNA sense strand
ccagagaugcauucauuuc

SEQ ID NO: 1963656 - RNA, 19 nt, Homo sapiens
  misc_RNA (1)...(19): siRNA sense strand
ccauugguguuccacauuc

SEQ ID NO: 1963657 - RNA, 19 nt, Homo sapiens
  misc_RNA (1)...(19): siRNA sense strand
gaagcugucaaaaucauua

SEQ ID NO: 1963658 - RNA, 19 nt, Homo sapiens
  misc_RNA (1)...(19): siRNA sense strand
cagcuuucuuaucugauuu

SEQ ID NO: 1963659 - RNA, 19 nt, Homo sapiens
  misc_RNA (1)...(19): siRNA sense strand
gugagucuacugccucuaa

SEQ ID NO: 1963660 - RNA, 19 nt, Homo sapiens
  misc_RNA (1)...(19): siRNA sense strand
acaucaagcuggcggugaa

SEQ ID NO: 1963661 - RNA, 19 nt, Homo sapiens
  misc_RNA (1)...(19): siRNA sense strand
caucaaaccaugcacuauc

SEQ ID NO: 1963662 - RNA, 19 nt, Homo sapiens
  misc_RNA (1)...(19): siRNA sense strand
aagaugcagugagcaguaa

SEQ ID NO: 1963663 - RNA, 19 nt, Homo sapiens
  misc_RNA (1)...(19): siRNA sense strand
cugcgacccuuggaacuaa

SEQ ID NO: 1963664 - RNA, 19 nt, Homo sapiens
  misc_RNA (1)...(19): siRNA sense strand
gugcagagaauuacuaaaa

SEQ ID NO: 1963665 - RNA, 19 nt, Homo sapiens
  misc_RNA (1)...(19): siRNA sense strand
ccucugaccacuauuacuu

SEQ ID NO: 1963666 - RNA, 19 nt, Homo sapiens
  misc_RNA (1)...(19): siRNA sense strand
gcacgcaagcagccuagug

SEQ ID NO: 1963667 - RNA, 19 nt, Homo sapiens
  misc_RNA (1)...(19): siRNA sense strand
gaaucaacaguaucugcuu

SEQ ID NO: 1963668 - RNA, 19 nt, Homo sapiens
  misc_RNA (1)...(19): siRNA sense strand
gaaagucaguggcaaaagc

SEQ ID NO: 1963669 - RNA, 19 nt, Homo sapiens
  misc_RNA (1)...(19): siRNA sense strand
agucccagcuuucuuaucu

SEQ ID NO: 1963670 - RNA, 19 nt, Homo sapiens
  misc_RNA (1)...(19): siRNA sense strand
gugguugcuuccucguuaa

SEQ ID NO: 1963671 - RNA, 19 nt, Homo sapiens
  misc_RNA (1)...(19): siRNA sense strand
gcaguaaucuaaggaaaag

SEQ ID NO: 1963672 - RNA, 19 nt, Homo sapiens
  misc_RNA (1)...(19): siRNA sense strand
ucaaagaagaggagaaagg

SEQ ID NO: 1963673 - RNA, 19 nt, Homo sapiens
  misc_RNA (1)...(19): siRNA sense strand
gaaaccaaacagaccaucu

SEQ ID NO: 1963674 - RNA, 19 nt, Homo sapiens
  misc_RNA (1)...(19): siRNA sense strand
ccaaauucucugaggacua

SEQ ID NO: 1963675 - RNA, 19 nt, Homo sapiens
  misc_RNA (1)...(19): siRNA sense strand
ucccagcuuucuuaucuga

SEQ ID NO: 1963676 - RNA, 19 nt, Homo sapiens
  misc_RNA (1)...(19): siRNA sense strand
cagagaugcccuuggaaau

SEQ ID NO: 1963677 - RNA, 19 nt, Homo sapiens
  misc_RNA (1)...(19): siRNA sense strand
ccaacuccaccacagcuuu

SEQ ID NO: 1963678 - RNA, 19 nt, Homo sapiens
  misc_RNA (1)...(19): siRNA sense strand
aaccaugcacuaucaguuu

SEQ ID NO: 1963679 - RNA, 19 nt, Homo sapiens
  misc_RNA (1)...(19): siRNA sense strand
uuucuuugcuugcaucugu

SEQ ID NO: 1963680 - RNA, 19 nt, Homo sapiens
  misc_RNA (1)...(19): siRNA sense strand
gaugagacagcccagagau

SEQ ID NO: 1963681 - RNA, 19 nt, Homo sapiens
  misc_RNA (1)...(19): siRNA sense strand
ggaugagacagcccagaga

SEQ ID NO: 1963682 - RNA, 19 nt, Homo sapiens
  misc_RNA (1)...(19): siRNA sense strand
gcaaggcaagccagaagca

SEQ ID NO: 1963683 - RNA, 19 nt, Homo sapiens
  misc_RNA (1)...(19): siRNA sense strand
gaugggacuuaugagcuau

SEQ ID NO: 1963684 - RNA, 19 nt, Homo sapiens
  misc_RNA (1)...(19): siRNA sense strand
gcuggccagugucacagaa

SEQ ID NO: 1963685 - RNA, 19 nt, Homo sapiens
  misc_RNA (1)...(19): siRNA sense strand
ucacuacugccucaagaug

SEQ ID NO: 1963686 - RNA, 19 nt, Homo sapiens
  misc_RNA (1)...(19): siRNA sense strand
gaagaggagaaaggaugaa

SEQ ID NO: 1963687 - RNA, 19 nt, Homo sapiens
  misc_RNA (1)...(19): siRNA sense strand
gcuugcaucugugccuuug

SEQ ID NO: 1963688 - RNA, 19 nt, Homo sapiens
  misc_RNA (1)...(19): siRNA sense strand
gccucuaagucaaagaaga

SEQ ID NO: 1963689 - RNA, 19 nt, Homo sapiens
  misc_RNA (1)...(19): siRNA sense strand
acucugaaaucgcacaagu

SEQ ID NO: 1963690 - RNA, 19 nt, Homo sapiens
  misc_RNA (1)...(19): siRNA sense strand
gaaaucgcacaagucaaau

SEQ ID NO: 1963691 - RNA, 19 nt, Homo sapiens
  misc_RNA (1)...(19): siRNA sense strand
uaaaguggaaguagaaagc

SEQ ID NO: 1963692 - RNA, 19 nt, Homo sapiens
  misc_RNA (1)...(19): siRNA sense strand
gcugcgacccuuggaacua

SEQ ID NO: 1963693 - RNA, 19 nt, Homo sapiens
  misc_RNA (1)...(19): siRNA sense strand
ggagaaagauuggaauuau

SEQ ID NO: 1963694 - RNA, 19 nt, Homo sapiens
  misc_RNA (1)...(19): siRNA sense strand
ccaaguggaugaacugaaa

SEQ ID NO: 1963695 - RNA, 19 nt, Homo sapiens
  misc_RNA (1)...(19): siRNA sense strand
caagcugugugaagaaaua

SEQ ID NO: 1963696 - RNA, 19 nt, Homo sapiens
  misc_RNA (1)...(19): siRNA sense strand
gaauaagggccuagacaaa

SEQ ID NO: 1963697 - RNA, 19 nt, Homo sapiens
  misc_RNA (1)...(19): siRNA sense strand
guacucacauggcaauuau

SEQ ID NO: 1963698 - RNA, 19 nt, Homo sapiens
  misc_RNA (1)...(19): siRNA sense strand
aagaagagguuccagacua

SEQ ID NO: 1963699 - RNA, 19 nt, Homo sapiens
  misc_RNA (1)...(19): siRNA sense strand
gcuaagauaccuucugaaa

SEQ ID NO: 1963700 - RNA, 19 nt, Homo sapiens
  misc_RNA (1)...(19): siRNA sense strand
aagcaucacucugagaaua

SEQ ID NO: 1963701 - RNA, 19 nt, Homo sapiens
  misc_RNA (1)...(19): siRNA sense strand
gaacguucccgagccuuua

SEQ ID NO: 1963702 - RNA, 19 nt, Homo sapiens
  misc_RNA (1)...(19): siRNA sense strand
aaacuaacguacucacaug

SEQ ID NO: 1963703 - RNA, 19 nt, Homo sapiens
  misc_RNA (1)...(19): siRNA sense strand
ugaaugagauaaagaagag

SEQ ID NO: 1963704 - RNA, 19 nt, Homo sapiens
  misc_RNA (1)...(19): siRNA sense strand
gcacuuccauaugccauga

SEQ ID NO: 1963705 - RNA, 19 nt, Homo sapiens
  misc_RNA (1)...(19): siRNA sense strand
ccacuauccuugccaaaca

SEQ ID NO: 1963706 - RNA, 19 nt, Homo sapiens
  misc_RNA (1)...(19): siRNA sense strand
agacagcacuuccauaugc

SEQ ID NO: 1963707 - RNA, 19 nt, Homo sapiens
  misc_RNA (1)...(19): siRNA sense strand
uggcuaagauaccuucuga

SEQ ID NO: 1963708 - RNA, 19 nt, Homo sapiens
  misc_RNA (1)...(19): siRNA sense strand
aaacauagaucugguagcu

SEQ ID NO: 1963709 - RNA, 19 nt, Homo sapiens
  misc_RNA (1)...(19): siRNA sense strand
cugcacagcugaagcauca

SEQ ID NO: 1963710 - RNA, 19 nt, Homo sapiens
  misc_RNA (1)...(19): siRNA sense strand
acaaagugauggagacuca

SEQ ID NO: 1963711 - RNA, 19 nt, Homo sapiens
  misc_RNA (1)...(19): siRNA sense strand
cgaguucucaagugucuua

SEQ ID NO: 1963712 - RNA, 19 nt, Homo sapiens
  misc_RNA (1)...(19): siRNA sense strand
uggaugaacugaaaggaau

SEQ ID NO: 1963713 - RNA, 19 nt, Homo sapiens
  misc_RNA (1)...(19): siRNA sense strand
gccaagacaggauuguaua

SEQ ID NO: 1963714 - RNA, 19 nt, Homo sapiens
  misc_RNA (1)...(19): siRNA sense strand
gcucgagccauguguauga

SEQ ID NO: 1963715 - RNA, 19 nt, Homo sapiens
  misc_RNA (1)...(19): siRNA sense strand
gacaggauuguauaucuuu

SEQ ID NO: 1963716 - RNA, 19 nt, Homo sapiens
  misc_RNA (1)...(19): siRNA sense strand
gaggagaaagauuggaauu

SEQ ID NO: 1963717 - RNA, 19 nt, Homo sapiens
  misc_RNA (1)...(19): siRNA sense strand
caagcucacuauuaucauc

SEQ ID NO: 1963718 - RNA, 19 nt, Homo sapiens
  misc_RNA (1)...(19): siRNA sense strand
ggaaucauggucagaaaca

SEQ ID NO: 1963719 - RNA, 19 nt, Homo sapiens
  misc_RNA (1)...(19): siRNA sense strand
ucacauggcaauuauuugu

SEQ ID NO: 1963720 - RNA, 19 nt, Homo sapiens
  misc_RNA (1)...(19): siRNA sense strand
gccaagcugugugaagaaa

SEQ ID NO: 1963721 - RNA, 19 nt, Homo sapiens
  misc_RNA (1)...(19): siRNA sense strand
ggauuuacauggccaagcu

SEQ ID NO: 1963722 - RNA, 19 nt, Homo sapiens
  misc_RNA (1)...(19): siRNA sense strand
gaaccucaagcucacuauu

SEQ ID NO: 1963723 - RNA, 19 nt, Homo sapiens
  misc_RNA (1)...(19): siRNA sense strand
gagaauaagggccuagaca

SEQ ID NO: 1963724 - RNA, 19 nt, Homo sapiens
  misc_RNA (1)...(19): siRNA sense strand
gaauagcgaguucucaagu

SEQ ID NO: 1963725 - RNA, 19 nt, Homo sapiens
  misc_RNA (1)...(19): siRNA sense strand
agacaggauuguauaucuu

SEQ ID NO: 1963726 - RNA, 19 nt, Homo sapiens
  misc_RNA (1)...(19): siRNA sense strand
cauuacaucugccaagaca

SEQ ID NO: 1963727 - RNA, 19 nt, Homo sapiens
  misc_RNA (1)...(19): siRNA sense strand
gcacagacagcacuuccau

SEQ ID NO: 1963728 - RNA, 19 nt, Homo sapiens
  misc_RNA (1)...(19): siRNA sense strand
acagacagcacuuccauau

SEQ ID NO: 1963729 - RNA, 19 nt, Homo sapiens
  misc_RNA (1)...(19): siRNA sense strand
guguucaucuauaucauug

SEQ ID NO: 1963730 - RNA, 19 nt, Homo sapiens
  misc_RNA (1)...(19): siRNA sense strand
caucaucaucguaucaauu

SEQ ID NO: 1963731 - RNA, 19 nt, Homo sapiens
  misc_RNA (1)...(19): siRNA sense strand
gaaaggaaucauggucaga

SEQ ID NO: 1963732 - RNA, 19 nt, Homo sapiens
  misc_RNA (1)...(19): siRNA sense strand
aaccucaagcucacuauua

SEQ ID NO: 1963733 - RNA, 19 nt, Homo sapiens
  misc_RNA (1)...(19): siRNA sense strand
cgagccauguguaugaaga

SEQ ID NO: 1963734 - RNA, 19 nt, Homo sapiens
  misc_RNA (1)...(19): siRNA sense strand
aaucauggucagaaacaua

SEQ ID NO: 1963735 - RNA, 19 nt, Homo sapiens
  misc_RNA (1)...(19): siRNA sense strand
ccagacuacuuacgguuca

SEQ ID NO: 1963736 - RNA, 19 nt, Homo sapiens
  misc_RNA (1)...(19): siRNA sense strand
caaacuaacguacucacau

SEQ ID NO: 1963737 - RNA, 19 nt, Homo sapiens
  misc_RNA (1)...(19): siRNA sense strand
ugaagcaucacucugagaa

SEQ ID NO: 1963738 - RNA, 19 nt, Homo sapiens
  misc_RNA (1)...(19): siRNA sense strand
aagacaggauuguauaucu

SEQ ID NO: 1963739 - RNA, 19 nt, Homo sapiens
  misc_RNA (1)...(19): siRNA sense strand
uggccaagcugugugaaga

SEQ ID NO: 1963740 - RNA, 19 nt, Homo sapiens
  misc_RNA (1)...(19): siRNA sense strand
caucguaucaauuguguuc

SEQ ID NO: 1963741 - RNA, 19 nt, Homo sapiens
  misc_RNA (1)...(19): siRNA sense strand
ggaggugacagagcagauu

SEQ ID NO: 1963742 - RNA, 19 nt, Homo sapiens
  misc_RNA (1)...(19): siRNA sense strand
gcgaggagaaagauuggaa

SEQ ID NO: 1963743 - RNA, 19 nt, Homo sapiens
  misc_RNA (1)...(19): siRNA sense strand
ccaagacaggauuguauau

SEQ ID NO: 1963744 - RNA, 19 nt, Homo sapiens
  misc_RNA (1)...(19): siRNA sense strand
acucacauggcaauuauuu

SEQ ID NO: 1963745 - RNA, 19 nt, Homo sapiens
  misc_RNA (1)...(19): siRNA sense strand
aaggaaucauggucagaaa

SEQ ID NO: 1963746 - RNA, 19 nt, Homo sapiens
  misc_RNA (1)...(19): siRNA sense strand
agaagagguuccagacuac

SEQ ID NO: 1963747 - RNA, 19 nt, Homo sapiens
  misc_RNA (1)...(19): siRNA sense strand
agagguuccagacuacuua

SEQ ID NO: 1963748 - RNA, 19 nt, Homo sapiens
  misc_RNA (1)...(19): siRNA sense strand
gcaucacucugagaauaag

SEQ ID NO: 1963749 - RNA, 19 nt, Homo sapiens
  misc_RNA (1)...(19): siRNA sense strand
aggagaaagauuggaauua

SEQ ID NO: 1963750 - RNA, 19 nt, Homo sapiens
  misc_RNA (1)...(19): siRNA sense strand
auaagggccuagacaaagu

SEQ ID NO: 1963751 - RNA, 19 nt, Homo sapiens
  misc_RNA (1)...(19): siRNA sense strand
agaauaagggccuagacaa

SEQ ID NO: 1963752 - RNA, 19 nt, Homo sapiens
  misc_RNA (1)...(19): siRNA sense strand
gggccuagacaaagugaug

SEQ ID NO: 1963753 - RNA, 19 nt, Homo sapiens
  misc_RNA (1)...(19): siRNA sense strand
cguacucacauggcaauua

SEQ ID NO: 1963754 - RNA, 19 nt, Homo sapiens
  misc_RNA (1)...(19): siRNA sense strand
gaagcaucacucugagaau

SEQ ID NO: 1963755 - RNA, 19 nt, Homo sapiens
  misc_RNA (1)...(19): siRNA sense strand
ucagcgaggagaaagauug

SEQ ID NO: 1963756 - RNA, 19 nt, Homo sapiens
  misc_RNA (1)...(19): siRNA sense strand
gaaucauggucagaaacau

SEQ ID NO: 1963757 - RNA, 19 nt, Homo sapiens
  misc_RNA (1)...(19): siRNA sense strand
aaaggaaucauggucagaa

SEQ ID NO: 1963758 - RNA, 19 nt, Homo sapiens
  misc_RNA (1)...(19): siRNA sense strand
caagacaggauuguauauc

SEQ ID NO: 1963759 - RNA, 19 nt, Homo sapiens
  misc_RNA (1)...(19): siRNA sense strand
auaacaaacuaacguacuc

SEQ ID NO: 1963760 - RNA, 19 nt, Homo sapiens
  misc_RNA (1)...(19): siRNA sense strand
guggaugaacugaaaggaa

SEQ ID NO: 1963761 - RNA, 19 nt, Homo sapiens
  misc_RNA (1)...(19): siRNA sense strand
aauagcgaguucucaagug

SEQ ID NO: 1963762 - RNA, 19 nt, Homo sapiens
  misc_RNA (1)...(19): siRNA sense strand
guucucaagugucuuagcu

SEQ ID NO: 1963763 - RNA, 19 nt, Homo sapiens
  misc_RNA (1)...(19): siRNA sense strand
guucccgagccuuuaauuu

SEQ ID NO: 1963764 - RNA, 19 nt, Homo sapiens
  misc_RNA (1)...(19): siRNA sense strand
caucaucguaucaauugug

SEQ ID NO: 1963765 - RNA, 19 nt, Homo sapiens
  misc_RNA (1)...(19): siRNA sense strand
accucaagcucacuauuau

SEQ ID NO: 1963766 - RNA, 19 nt, Homo sapiens
  misc_RNA (1)...(19): siRNA sense strand
auagcgaguucucaagugu

SEQ ID NO: 1963767 - RNA, 19 nt, Homo sapiens
  misc_RNA (1)...(19): siRNA sense strand
gaggugacagagcagauuc

SEQ ID NO: 1963768 - RNA, 19 nt, Homo sapiens
  misc_RNA (1)...(19): siRNA sense strand
uaucaucaucaucguauca

SEQ ID NO: 1963769 - RNA, 19 nt, Homo sapiens
  misc_RNA (1)...(19): siRNA sense strand
ugaacguucccgagccuuu

SEQ ID NO: 1963770 - RNA, 19 nt, Homo sapiens
  misc_RNA (1)...(19): siRNA sense strand
uaacaaacuaacguacuca

SEQ ID NO: 1963771 - RNA, 19 nt, Homo sapiens
  misc_RNA (1)...(19): siRNA sense strand
ucucugugguggauuuaca

SEQ ID NO: 1963772 - RNA, 19 nt, Homo sapiens
  misc_RNA (1)...(19): siRNA sense strand
gagccauguguaugaagaa

SEQ ID NO: 1963773 - RNA, 19 nt, Homo sapiens
  misc_RNA (1)...(19): siRNA sense strand
gcucagcgaggagaaagau

SEQ ID NO: 1963774 - RNA, 19 nt, Homo sapiens
  misc_RNA (1)...(19): siRNA sense strand
acaggauuguauaucuuug

SEQ ID NO: 1963775 - RNA, 19 nt, Homo sapiens
  misc_RNA (1)...(19): siRNA sense strand
cauggcaauuauuuguuuc

SEQ ID NO: 1963776 - RNA, 19 nt, Homo sapiens
  misc_RNA (1)...(19): siRNA sense strand
gacucaagcccaaguggau

SEQ ID NO: 1963777 - RNA, 19 nt, Homo sapiens
  misc_RNA (1)...(19): siRNA sense strand
aauaagggccuagacaaag

SEQ ID NO: 1963778 - RNA, 19 nt, Homo sapiens
  misc_RNA (1)...(19): siRNA sense strand
gaugaacugaaaggaauca

SEQ ID NO: 1963779 - RNA, 19 nt, Homo sapiens
  misc_RNA (1)...(19): siRNA sense strand
uuacauggccaagcugugu

SEQ ID NO: 1963780 - RNA, 19 nt, Homo sapiens
  misc_RNA (1)...(19): siRNA sense strand
ucugucaccuucaaaacua

SEQ ID NO: 1963781 - RNA, 19 nt, Homo sapiens
  misc_RNA (1)...(19): siRNA sense strand
gcagggcuauggcaacuac

SEQ ID NO: 1963782 - RNA, 19 nt, Homo sapiens
  misc_RNA (1)...(19): siRNA sense strand
ucaagaaggagaacaagau

SEQ ID NO: 1963783 - RNA, 19 nt, Homo sapiens
  misc_RNA (1)...(19): siRNA sense strand
caagaaggagaacaagaug

SEQ ID NO: 1963784 - RNA, 19 nt, Homo sapiens
  misc_RNA (1)...(19): siRNA sense strand
cagcuuugauuccaaggau

SEQ ID NO: 1963785 - RNA, 19 nt, Homo sapiens
  misc_RNA (1)...(19): siRNA sense strand
cggcaggcuuggaggcuaa

SEQ ID NO: 1963786 - RNA, 19 nt, Homo sapiens
  misc_RNA (1)...(19): siRNA sense strand
gguaaccagucucagaaac

SEQ ID NO: 1963787 - RNA, 19 nt, Homo sapiens
  misc_RNA (1)...(19): siRNA sense strand
caagugcgcagacgagaag

SEQ ID NO: 1963788 - RNA, 19 nt, Homo sapiens
  misc_RNA (1)...(19): siRNA sense strand
ugaacagcuuugauuccaa

SEQ ID NO: 1963789 - RNA, 19 nt, Homo sapiens
  misc_RNA (1)...(19): siRNA sense strand
gcuggagcuuagugacuug

SEQ ID NO: 1963790 - RNA, 19 nt, Homo sapiens
  misc_RNA (1)...(19): siRNA sense strand
ccaccaagggcgagaagau

SEQ ID NO: 1963791 - RNA, 19 nt, Homo sapiens
  misc_RNA (1)...(19): siRNA sense strand
uuagugacuuggacgacuu

SEQ ID NO: 1963792 - RNA, 19 nt, Homo sapiens
  misc_RNA (1)...(19): siRNA sense strand
caaggaugguucgggaucu

SEQ ID NO: 1963793 - RNA, 19 nt, Homo sapiens
  misc_RNA (1)...(19): siRNA sense strand
caccaggacuccccgguaa

SEQ ID NO: 1963794 - RNA, 19 nt, Homo sapiens
  misc_RNA (1)...(19): siRNA sense strand
gaucaugcuggccaucauc

SEQ ID NO: 1963795 - RNA, 19 nt, Homo sapiens
  misc_RNA (1)...(19): siRNA sense strand
ccaagaugacccucacaca

SEQ ID NO: 1963796 - RNA, 19 nt, Homo sapiens
  misc_RNA (1)...(19): siRNA sense strand
cugaacagcuuugauucca

SEQ ID NO: 1963797 - RNA, 19 nt, Homo sapiens
  misc_RNA (1)...(19): siRNA sense strand
ccgguaaccagucucagaa

SEQ ID NO: 1963798 - RNA, 19 nt, Homo sapiens
  misc_RNA (1)...(19): siRNA sense strand
guaaccagucucagaaacu

SEQ ID NO: 1963799 - RNA, 19 nt, Homo sapiens
  misc_RNA (1)...(19): siRNA sense strand
gcaaguauaugaagaucua

SEQ ID NO: 1963800 - RNA, 19 nt, Homo sapiens
  misc_RNA (1)...(19): siRNA sense strand
ggaaagugcugaggaaauu

SEQ ID NO: 1963801 - RNA, 19 nt, Homo sapiens
  misc_RNA (1)...(19): siRNA sense strand
aaacaacacuggcuaagaa

SEQ ID NO: 1963802 - RNA, 19 nt, Homo sapiens
  misc_RNA (1)...(19): siRNA sense strand
agaaacaccucccaaauug

SEQ ID NO: 1963803 - RNA, 19 nt, Homo sapiens
  misc_RNA (1)...(19): siRNA sense strand
gaagcuauuuccugacuau

SEQ ID NO: 1963804 - RNA, 19 nt, Homo sapiens
  misc_RNA (1)...(19): siRNA sense strand
caacacuggcuaagaauuu

SEQ ID NO: 1963805 - RNA, 19 nt, Homo sapiens
  misc_RNA (1)...(19): siRNA sense strand
gcaagacacucugugguau

SEQ ID NO: 1963806 - RNA, 19 nt, Homo sapiens
  misc_RNA (1)...(19): siRNA sense strand
cagaaacaccucccaaauu

SEQ ID NO: 1963807 - RNA, 19 nt, Homo sapiens
  misc_RNA (1)...(19): siRNA sense strand
gcagaaacaccucccaaau

SEQ ID NO: 1963808 - RNA, 19 nt, Homo sapiens
  misc_RNA (1)...(19): siRNA sense strand
gcaguacgaugugcuugaa

SEQ ID NO: 1963809 - RNA, 19 nt, Homo sapiens
  misc_RNA (1)...(19): siRNA sense strand
ccaggaaagugcugaggaa

SEQ ID NO: 1963810 - RNA, 19 nt, Homo sapiens
  misc_RNA (1)...(19): siRNA sense strand
gacaagaaaugcaggacau

SEQ ID NO: 1963811 - RNA, 19 nt, Homo sapiens
  misc_RNA (1)...(19): siRNA sense strand
ggacaucacaugggaaguu

SEQ ID NO: 1963812 - RNA, 19 nt, Homo sapiens
  misc_RNA (1)...(19): siRNA sense strand
cuaagaauuugcagaaaca

SEQ ID NO: 1963813 - RNA, 19 nt, Homo sapiens
  misc_RNA (1)...(19): siRNA sense strand
gcuaagaauuugcagaaac

SEQ ID NO: 1963814 - RNA, 19 nt, Homo sapiens
  misc_RNA (1)...(19): siRNA sense strand
ugagauagagacagauaaa

SEQ ID NO: 1963815 - RNA, 19 nt, Homo sapiens
  misc_RNA (1)...(19): siRNA sense strand
uacaagaacuagcaaagca

SEQ ID NO: 1963816 - RNA, 19 nt, Homo sapiens
  misc_RNA (1)...(19): siRNA sense strand
ggaaagcgcaagacacucu

SEQ ID NO: 1963817 - RNA, 19 nt, Homo sapiens
  misc_RNA (1)...(19): siRNA sense strand
gcccauguaucuaaaguac

SEQ ID NO: 1963818 - RNA, 19 nt, Homo sapiens
  misc_RNA (1)...(19): siRNA sense strand
caagaacuagcaaagcaaa

SEQ ID NO: 1963819 - RNA, 19 nt, Homo sapiens
  misc_RNA (1)...(19): siRNA sense strand
gacaucacaugggaaguug

SEQ ID NO: 1963820 - RNA, 19 nt, Homo sapiens
  misc_RNA (1)...(19): siRNA sense strand
gaagaucuaauacaagaac

SEQ ID NO: 1963821 - RNA, 19 nt, Homo sapiens
  misc_RNA (1)...(19): siRNA sense strand
ggaguacaagggucuauca

SEQ ID NO: 1963822 - RNA, 19 nt, Homo sapiens
  misc_RNA (1)...(19): siRNA sense strand
cuaaaguacagacaagaaa

SEQ ID NO: 1963823 - RNA, 19 nt, Homo sapiens
  misc_RNA (1)...(19): siRNA sense strand
ccaaauugcagugucauau

SEQ ID NO: 1963824 - RNA, 19 nt, Homo sapiens
  misc_RNA (1)...(19): siRNA sense strand
guaccuggauggaacaaaa

SEQ ID NO: 1963825 - RNA, 19 nt, Homo sapiens
  misc_RNA (1)...(19): siRNA sense strand
uugaagcacuuaacaugga

SEQ ID NO: 1963826 - RNA, 19 nt, Homo sapiens
  misc_RNA (1)...(19): siRNA sense strand
uaucuaaaguacagacaag

SEQ ID NO: 1963827 - RNA, 19 nt, Homo sapiens
  misc_RNA (1)...(19): siRNA sense strand
guuugcaagugacagcaua

SEQ ID NO: 1963828 - RNA, 19 nt, Homo sapiens
  misc_RNA (1)...(19): siRNA sense strand
ugaagcacuuaacauggaa

SEQ ID NO: 1963829 - RNA, 19 nt, Homo sapiens
  misc_RNA (1)...(19): siRNA sense strand
gguaucaacagaccaggaa

SEQ ID NO: 1963830 - RNA, 19 nt, Homo sapiens
  misc_RNA (1)...(19): siRNA sense strand
aaauugcagugucauaucu

SEQ ID NO: 1963831 - RNA, 19 nt, Homo sapiens
  misc_RNA (1)...(19): siRNA sense strand
caaauugcagugucauauc

SEQ ID NO: 1963832 - RNA, 19 nt, Homo sapiens
  misc_RNA (1)...(19): siRNA sense strand
cgcaagacacucuguggua

SEQ ID NO: 1963833 - RNA, 19 nt, Homo sapiens
  misc_RNA (1)...(19): siRNA sense strand
ucaggaugauuucuucaag

SEQ ID NO: 1963834 - RNA, 19 nt, Homo sapiens
  misc_RNA (1)...(19): siRNA sense strand
gaucuaauacaagaacuag

SEQ ID NO: 1963835 - RNA, 19 nt, Homo sapiens
  misc_RNA (1)...(19): siRNA sense strand
gaaucaguggugugacaaa

SEQ ID NO: 1963836 - RNA, 19 nt, Homo sapiens
  misc_RNA (1)...(19): siRNA sense strand
uagaagcuauuuccugacu

SEQ ID NO: 1963837 - RNA, 19 nt, Homo sapiens
  misc_RNA (1)...(19): siRNA sense strand
caagaaaugcaggacauca

SEQ ID NO: 1963838 - RNA, 19 nt, Homo sapiens
  misc_RNA (1)...(19): siRNA sense strand
ggcuaagaauuugcagaaa

SEQ ID NO: 1963839 - RNA, 19 nt, Homo sapiens
  misc_RNA (1)...(19): siRNA sense strand
gcaaaacaacacuggcuaa

SEQ ID NO: 1963840 - RNA, 19 nt, Homo sapiens
  misc_RNA (1)...(19): siRNA sense strand
uagcaaagcaaaaguguuu

SEQ ID NO: 1963841 - RNA, 19 nt, Homo sapiens
  misc_RNA (1)...(19): siRNA sense strand
uggaaucaguggugugaca

SEQ ID NO: 1963842 - RNA, 19 nt, Homo sapiens
  misc_RNA (1)...(19): siRNA sense strand
aaaguacagacaagaaaug

SEQ ID NO: 1963843 - RNA, 19 nt, Homo sapiens
  misc_RNA (1)...(19): siRNA sense strand
gacaaacaguggcaaaaca

SEQ ID NO: 1963844 - RNA, 19 nt, Homo sapiens
  misc_RNA (1)...(19): siRNA sense strand
aaacaccucccaaauugca

SEQ ID NO: 1963845 - RNA, 19 nt, Homo sapiens
  misc_RNA (1)...(19): siRNA sense strand
uggcuaagaauuugcagaa

SEQ ID NO: 1963846 - RNA, 19 nt, Homo sapiens
  misc_RNA (1)...(19): siRNA sense strand
ugacuauuccauaugaaga

SEQ ID NO: 1963847 - RNA, 19 nt, Homo sapiens
  misc_RNA (1)...(19): siRNA sense strand
gcuauuuccugacuauucc

SEQ ID NO: 1963848 - RNA, 19 nt, Homo sapiens
  misc_RNA (1)...(19): siRNA sense strand
aagacacucugugguauca

SEQ ID NO: 1963849 - RNA, 19 nt, Homo sapiens
  misc_RNA (1)...(19): siRNA sense strand
gaaaugcaggacaucacau

SEQ ID NO: 1963850 - RNA, 19 nt, Homo sapiens
  misc_RNA (1)...(19): siRNA sense strand
gacuauuccauaugaagaa

SEQ ID NO: 1963851 - RNA, 19 nt, Homo sapiens
  misc_RNA (1)...(19): siRNA sense strand
gaaagugcugaggaaauuc

SEQ ID NO: 1963852 - RNA, 19 nt, Homo sapiens
  misc_RNA (1)...(19): siRNA sense strand
ucuaaaguacagacaagaa

SEQ ID NO: 1963853 - RNA, 19 nt, Homo sapiens
  misc_RNA (1)...(19): siRNA sense strand
ggauggaaagcgcaagaca

SEQ ID NO: 1963854 - RNA, 19 nt, Homo sapiens
  misc_RNA (1)...(19): siRNA sense strand
auacuuugauggccaugug

SEQ ID NO: 1963855 - RNA, 19 nt, Homo sapiens
  misc_RNA (1)...(19): siRNA sense strand
gacacucugugguaucaac

SEQ ID NO: 1963856 - RNA, 19 nt, Homo sapiens
  misc_RNA (1)...(19): siRNA sense strand
ucaguggugugacaaacag

SEQ ID NO: 1963857 - RNA, 19 nt, Homo sapiens
  misc_RNA (1)...(19): siRNA sense strand
ggaaucaguggugugacaa

SEQ ID NO: 1963858 - RNA, 19 nt, Homo sapiens
  misc_RNA (1)...(19): siRNA sense strand
gaaacaccucccaaauugc

SEQ ID NO: 1963859 - RNA, 19 nt, Homo sapiens
  misc_RNA (1)...(19): siRNA sense strand
uuuccugacuauuccauau

SEQ ID NO: 1963860 - RNA, 19 nt, Homo sapiens
  misc_RNA (1)...(19): siRNA sense strand
uccugacuauuccauauga

SEQ ID NO: 1963861 - RNA, 19 nt, Homo sapiens
  misc_RNA (1)...(19): siRNA sense strand
caagacacucugugguauc

SEQ ID NO: 1963862 - RNA, 19 nt, Homo sapiens
  misc_RNA (1)...(19): siRNA sense strand
ucuaauacaagaacuagca

SEQ ID NO: 1963863 - RNA, 19 nt, Homo sapiens
  misc_RNA (1)...(19): siRNA sense strand
ggaaguuguguaccuggau

SEQ ID NO: 1963864 - RNA, 19 nt, Homo sapiens
  misc_RNA (1)...(19): siRNA sense strand
caugggaaguuguguaccu

SEQ ID NO: 1963865 - RNA, 19 nt, Homo sapiens
  misc_RNA (1)...(19): siRNA sense strand
agaagcuauuuccugacua

SEQ ID NO: 1963866 - RNA, 19 nt, Homo sapiens
  misc_RNA (1)...(19): siRNA sense strand
gaagcacuuaacauggaaa

SEQ ID NO: 1963867 - RNA, 19 nt, Homo sapiens
  misc_RNA (1)...(19): siRNA sense strand
aacacuggcuaagaauuug

SEQ ID NO: 1963868 - RNA, 19 nt, Homo sapiens
  misc_RNA (1)...(19): siRNA sense strand
guguggcccauguaucuaa

SEQ ID NO: 1963869 - RNA, 19 nt, Homo sapiens
  misc_RNA (1)...(19): siRNA sense strand
uaucucaggaugauuucuu

SEQ ID NO: 1963870 - RNA, 19 nt, Homo sapiens
  misc_RNA (1)...(19): siRNA sense strand
ucuccgggauacuuugaug

SEQ ID NO: 1963871 - RNA, 19 nt, Homo sapiens
  misc_RNA (1)...(19): siRNA sense strand
ggagaaggcugaacacaca

SEQ ID NO: 1963872 - RNA, 19 nt, Homo sapiens
  misc_RNA (1)...(19): siRNA sense strand
caauacagcugcaucuauc

SEQ ID NO: 1963873 - RNA, 19 nt, Homo sapiens
  misc_RNA (1)...(19): siRNA sense strand
gaacacacagacucuuuga

SEQ ID NO: 1963874 - RNA, 19 nt, Homo sapiens
  misc_RNA (1)...(19): siRNA sense strand
gcaauacagcugcaucuau

SEQ ID NO: 1963875 - RNA, 19 nt, Homo sapiens
  misc_RNA (1)...(19): siRNA sense strand
agacgggacuccagaaaga

SEQ ID NO: 1963876 - RNA, 19 nt, Homo sapiens
  misc_RNA (1)...(19): siRNA sense strand
gggaagauccagccacgua

SEQ ID NO: 1963877 - RNA, 19 nt, Homo sapiens
  misc_RNA (1)...(19): siRNA sense strand
aauaccagcugcacuuuga

SEQ ID NO: 1963878 - RNA, 19 nt, Homo sapiens
  misc_RNA (1)...(19): siRNA sense strand
gcaggaagaggacuagaga

SEQ ID NO: 1963879 - RNA, 19 nt, Homo sapiens
  misc_RNA (1)...(19): siRNA sense strand
ggucagagcccagcaacuu

SEQ ID NO: 1963880 - RNA, 19 nt, Homo sapiens
  misc_RNA (1)...(19): siRNA sense strand
ggugguaacagaaauguau

SEQ ID NO: 1963881 - RNA, 19 nt, Homo sapiens
  misc_RNA (1)...(19): siRNA sense strand
ggaucacacugcccagaau

SEQ ID NO: 1963882 - RNA, 19 nt, Homo sapiens
  misc_RNA (1)...(19): siRNA sense strand
cagcugcacuuugaaggaa

SEQ ID NO: 1963883 - RNA, 19 nt, Homo sapiens
  misc_RNA (1)...(19): siRNA sense strand
gaauaccagcugcacuuug

SEQ ID NO: 1963884 - RNA, 19 nt, Homo sapiens
  misc_RNA (1)...(19): siRNA sense strand
gcagcagacucucccaaaa

SEQ ID NO: 1963885 - RNA, 19 nt, Homo sapiens
  misc_RNA (1)...(19): siRNA sense strand
gaaauuauggggcuguuga

SEQ ID NO: 1963886 - RNA, 19 nt, Homo sapiens
  misc_RNA (1)...(19): siRNA sense strand
gaagauccagccacguaca

SEQ ID NO: 1963887 - RNA, 19 nt, Homo sapiens
  misc_RNA (1)...(19): siRNA sense strand
ggaagguccaggcggaguu

SEQ ID NO: 1963888 - RNA, 19 nt, Homo sapiens
  misc_RNA (1)...(19): siRNA sense strand
ucacaggcgacauugagaa

SEQ ID NO: 1963889 - RNA, 19 nt, Homo sapiens
  misc_RNA (1)...(19): siRNA sense strand
gggaucacacugcccagaa

SEQ ID NO: 1963890 - RNA, 19 nt, Homo sapiens
  misc_RNA (1)...(19): siRNA sense strand
ggucacaggcgacauugag

SEQ ID NO: 1963891 - RNA, 19 nt, Homo sapiens
  misc_RNA (1)...(19): siRNA sense strand
gagcgagccagcagagcuu

SEQ ID NO: 1963892 - RNA, 19 nt, Homo sapiens
  misc_RNA (1)...(19): siRNA sense strand
aagacuggcucagcaggaa

SEQ ID NO: 1963893 - RNA, 19 nt, Homo sapiens
  misc_RNA (1)...(19): siRNA sense strand
gaccuucuacugccgucua

SEQ ID NO: 1963894 - RNA, 19 nt, Homo sapiens
  misc_RNA (1)...(19): siRNA sense strand
ucuguugccagggaaauua

SEQ ID NO: 1963895 - RNA, 19 nt, Homo sapiens
  misc_RNA (1)...(19): siRNA sense strand
ugaacacacagacucuuug

SEQ ID NO: 1963896 - RNA, 19 nt, Homo sapiens
  misc_RNA (1)...(19): siRNA sense strand
gagacgggacuccagaaag

SEQ ID NO: 1963897 - RNA, 19 nt, Homo sapiens
  misc_RNA (1)...(19): siRNA sense strand
cugagcggauuaacaaagu

SEQ ID NO: 1963898 - RNA, 19 nt, Homo sapiens
  misc_RNA (1)...(19): siRNA sense strand
ugaauaccagcugcacuuu

SEQ ID NO: 1963899 - RNA, 19 nt, Homo sapiens
  misc_RNA (1)...(19): siRNA sense strand
ccagugagccagugaagcu

SEQ ID NO: 1963900 - RNA, 19 nt, Homo sapiens
  misc_RNA (1)...(19): siRNA sense strand
ggcaauacagcugcaucua

SEQ ID NO: 1963901 - RNA, 19 nt, Homo sapiens
  misc_RNA (1)...(19): siRNA sense strand
ugugguuccugguugaaga

SEQ ID NO: 1963902 - RNA, 19 nt, Homo sapiens
  misc_RNA (1)...(19): siRNA sense strand
gaucacacugcccagaauc

SEQ ID NO: 1963903 - RNA, 19 nt, Homo sapiens
  misc_RNA (1)...(19): siRNA sense strand
caccagccuugcaccugaa

SEQ ID NO: 1963904 - RNA, 19 nt, Homo sapiens
  misc_RNA (1)...(19): siRNA sense strand
cuacugccgucuagacacu

SEQ ID NO: 1963905 - RNA, 19 nt, Homo sapiens
  misc_RNA (1)...(19): siRNA sense strand
guaacagaaauguaugaca

SEQ ID NO: 1963906 - RNA, 19 nt, Homo sapiens
  misc_RNA (1)...(19): siRNA sense strand
uagugugguuccugguuga

SEQ ID NO: 1963907 - RNA, 19 nt, Homo sapiens
  misc_RNA (1)...(19): siRNA sense strand
cugaacacacagacucuuu

SEQ ID NO: 1963908 - RNA, 19 nt, Homo sapiens
  misc_RNA (1)...(19): siRNA sense strand
gaagguccaggcggaguuc

SEQ ID NO: 1963909 - RNA, 19 nt, Homo sapiens
  misc_RNA (1)...(19): siRNA sense strand
gaaaagcaagugaccaucu

SEQ ID NO: 1963910 - RNA, 19 nt, Homo sapiens
  misc_RNA (1)...(19): siRNA sense strand
cacccacccucucgguuca

SEQ ID NO: 1963911 - RNA, 19 nt, Homo sapiens
  misc_RNA (1)...(19): siRNA sense strand
ggcaggagaaggcugaaca

SEQ ID NO: 1963912 - RNA, 19 nt, Homo sapiens
  misc_RNA (1)...(19): siRNA sense strand
ccagcagagcuuccacuug

SEQ ID NO: 1963913 - RNA, 19 nt, Homo sapiens
  misc_RNA (1)...(19): siRNA sense strand
ccacguacagcgcggauac

SEQ ID NO: 1963914 - RNA, 19 nt, Homo sapiens
  misc_RNA (1)...(19): siRNA sense strand
ugacaugcaugacuucuuu

SEQ ID NO: 1963915 - RNA, 19 nt, Homo sapiens
  misc_RNA (1)...(19): siRNA sense strand
cuacggaugugaaucaaga

SEQ ID NO: 1963916 - RNA, 19 nt, Homo sapiens
  misc_RNA (1)...(19): siRNA sense strand
gcuuuggcauccucaagua

SEQ ID NO: 1963917 - RNA, 19 nt, Homo sapiens
  misc_RNA (1)...(19): siRNA sense strand
cgagaaacgugacaugcau

SEQ ID NO: 1963918 - RNA, 19 nt, Homo sapiens
  misc_RNA (1)...(19): siRNA sense strand
acucaucucuggagggauu

SEQ ID NO: 1963919 - RNA, 19 nt, Homo sapiens
  misc_RNA (1)...(19): siRNA sense strand
ggaugugaaucaagagaac

SEQ ID NO: 1963920 - RNA, 19 nt, Homo sapiens
  misc_RNA (1)...(19): siRNA sense strand
ccuaaggaaucaacaucuc

SEQ ID NO: 1963921 - RNA, 19 nt, Homo sapiens
  misc_RNA (1)...(19): siRNA sense strand
gaucaugcugcuauucaca

SEQ ID NO: 1963922 - RNA, 19 nt, Homo sapiens
  misc_RNA (1)...(19): siRNA sense strand
agaaacgugacaugcauga

SEQ ID NO: 1963923 - RNA, 19 nt, Homo sapiens
  misc_RNA (1)...(19): siRNA sense strand
cuggagggauugcucaaag

SEQ ID NO: 1963924 - RNA, 19 nt, Homo sapiens
  misc_RNA (1)...(19): siRNA sense strand
ugacuucuuugugggacuu

SEQ ID NO: 1963925 - RNA, 19 nt, Homo sapiens
  misc_RNA (1)...(19): siRNA sense strand
cagacucuccuacggaugu

SEQ ID NO: 1963926 - RNA, 19 nt, Homo sapiens
  misc_RNA (1)...(19): siRNA sense strand
aacgugacaugcaugacuu

SEQ ID NO: 1963927 - RNA, 19 nt, Homo sapiens
  misc_RNA (1)...(19): siRNA sense strand
ggaucaugcugcuauucac

SEQ ID NO: 1963928 - RNA, 19 nt, Homo sapiens
  misc_RNA (1)...(19): siRNA sense strand
ggaaauaugugucucagua

SEQ ID NO: 1963929 - RNA, 19 nt, Homo sapiens
  misc_RNA (1)...(19): siRNA sense strand
ccacugcucugaagaagua

SEQ ID NO: 1963930 - RNA, 19 nt, Homo sapiens
  misc_RNA (1)...(19): siRNA sense strand
uaaagaagcuuccuacagu

SEQ ID NO: 1963931 - RNA, 19 nt, Homo sapiens
  misc_RNA (1)...(19): siRNA sense strand
ucaaacagguuaaaggaaa

SEQ ID NO: 1963932 - RNA, 19 nt, Homo sapiens
  misc_RNA (1)...(19): siRNA sense strand
gauggaauaugcaaucuug

SEQ ID NO: 1963933 - RNA, 19 nt, Homo sapiens
  misc_RNA (1)...(19): siRNA sense strand
caaguuaggugagaaggua

SEQ ID NO: 1963934 - RNA, 19 nt, Homo sapiens
  misc_RNA (1)...(19): siRNA sense strand
gaagaaguauguccuagag

SEQ ID NO: 1963935 - RNA, 19 nt, Homo sapiens
  misc_RNA (1)...(19): siRNA sense strand
guggaagccugauggaaua

SEQ ID NO: 1963936 - RNA, 19 nt, Homo sapiens
  misc_RNA (1)...(19): siRNA sense strand
gcaaauccaccaugaagaa

SEQ ID NO: 1963937 - RNA, 19 nt, Homo sapiens
  misc_RNA (1)...(19): siRNA sense strand
agacauaaguucagaggaa

SEQ ID NO: 1963938 - RNA, 19 nt, Homo sapiens
  misc_RNA (1)...(19): siRNA sense strand
ggccucagcuguugaagaa

SEQ ID NO: 1963939 - RNA, 19 nt, Homo sapiens
  misc_RNA (1)...(19): siRNA sense strand
gauccacgcggacaaguua

SEQ ID NO: 1963940 - RNA, 19 nt, Homo sapiens
  misc_RNA (1)...(19): siRNA sense strand
gaaccaauucuaacuauca

SEQ ID NO: 1963941 - RNA, 19 nt, Homo sapiens
  misc_RNA (1)...(19): siRNA sense strand
ggaguucuguuuccgaaga

SEQ ID NO: 1963942 - RNA, 19 nt, Homo sapiens
  misc_RNA (1)...(19): siRNA sense strand
ugagaaagaucagucuaaa

SEQ ID NO: 1963943 - RNA, 19 nt, Homo sapiens
  misc_RNA (1)...(19): siRNA sense strand
gagaugaggaugaagauga

SEQ ID NO: 1963944 - RNA, 19 nt, Homo sapiens
  misc_RNA (1)...(19): siRNA sense strand
gaagaaagagccagaugau

SEQ ID NO: 1963945 - RNA, 19 nt, Homo sapiens
  misc_RNA (1)...(19): siRNA sense strand
aaauaagucuucugaggaa

SEQ ID NO: 1963946 - RNA, 19 nt, Homo sapiens
  misc_RNA (1)...(19): siRNA sense strand
gaagagccgccaccuaaga

SEQ ID NO: 1963947 - RNA, 19 nt, Homo sapiens
  misc_RNA (1)...(19): siRNA sense strand
guccaaaccugcaccuaaa

SEQ ID NO: 1963948 - RNA, 19 nt, Homo sapiens
  misc_RNA (1)...(19): siRNA sense strand
agaaagaucagucuaaaga

SEQ ID NO: 1963949 - RNA, 19 nt, Homo sapiens
  misc_RNA (1)...(19): siRNA sense strand
agaaguauguccuagagaa

SEQ ID NO: 1963950 - RNA, 19 nt, Homo sapiens
  misc_RNA (1)...(19): siRNA sense strand
gaaucugucuccacuguag

SEQ ID NO: 1963951 - RNA, 19 nt, Homo sapiens
  misc_RNA (1)...(19): siRNA sense strand
gaagaacaagagaaugaaa

SEQ ID NO: 1963952 - RNA, 19 nt, Homo sapiens
  misc_RNA (1)...(19): siRNA sense strand
ggaugaagaugaagaugag

SEQ ID NO: 1963953 - RNA, 19 nt, Homo sapiens
  misc_RNA (1)...(19): siRNA sense strand
aaacaccgauggcuucuuc

SEQ ID NO: 1963954 - RNA, 19 nt, Homo sapiens
  misc_RNA (1)...(19): siRNA sense strand
ggagucaucaaacagguua

SEQ ID NO: 1963955 - RNA, 19 nt, Homo sapiens
  misc_RNA (1)...(19): siRNA sense strand
ggacauuccagcugaagaa

SEQ ID NO: 1963956 - RNA, 19 nt, Homo sapiens
  misc_RNA (1)...(19): siRNA sense strand
acagauaacuggcaaaggu

SEQ ID NO: 1963957 - RNA, 19 nt, Homo sapiens
  misc_RNA (1)...(19): siRNA sense strand
gaaagaucagucuaaagaa

SEQ ID NO: 1963958 - RNA, 19 nt, Homo sapiens
  misc_RNA (1)...(19): siRNA sense strand
aagagaagguugcagaaga

SEQ ID NO: 1963959 - RNA, 19 nt, Homo sapiens
  misc_RNA (1)...(19): siRNA sense strand
agaaagagccagaugauuc

SEQ ID NO: 1963960 - RNA, 19 nt, Homo sapiens
  misc_RNA (1)...(19): siRNA sense strand
uagaagaacaagagaauga

SEQ ID NO: 1963961 - RNA, 19 nt, Homo sapiens
  misc_RNA (1)...(19): siRNA sense strand
agagaagguugcagaagaa

SEQ ID NO: 1963962 - RNA, 19 nt, Homo sapiens
  misc_RNA (1)...(19): siRNA sense strand
ccagaagaguggugcauca

SEQ ID NO: 1963963 - RNA, 19 nt, Homo sapiens
  misc_RNA (1)...(19): siRNA sense strand
gaaagagccagaugauucu

SEQ ID NO: 1963964 - RNA, 19 nt, Homo sapiens
  misc_RNA (1)...(19): siRNA sense strand
caucaggccucagcuguug

SEQ ID NO: 1963965 - RNA, 19 nt, Homo sapiens
  misc_RNA (1)...(19): siRNA sense strand
gaaauaugugucucaguau

SEQ ID NO: 1963966 - RNA, 19 nt, Homo sapiens
  misc_RNA (1)...(19): siRNA sense strand
gugagaagguagaagauag

SEQ ID NO: 1963967 - RNA, 19 nt, Homo sapiens
  misc_RNA (1)...(19): siRNA sense strand
ccagaugauucuagagaug

SEQ ID NO: 1963968 - RNA, 19 nt, Homo sapiens
  misc_RNA (1)...(19): siRNA sense strand
gguccaaaccugcaccuaa

SEQ ID NO: 1963969 - RNA, 19 nt, Homo sapiens
  misc_RNA (1)...(19): siRNA sense strand
gauccagaaccacaaguaa

SEQ ID NO: 1963970 - RNA, 19 nt, Homo sapiens
  misc_RNA (1)...(19): siRNA sense strand
gaagcuuccuacagucuca

SEQ ID NO: 1963971 - RNA, 19 nt, Homo sapiens
  misc_RNA (1)...(19): siRNA sense strand
aaauagaggagucaucaaa

SEQ ID NO: 1963972 - RNA, 19 nt, Homo sapiens
  misc_RNA (1)...(19): siRNA sense strand
gaacagauaacuggcaaag

SEQ ID NO: 1963973 - RNA, 19 nt, Homo sapiens
  misc_RNA (1)...(19): siRNA sense strand
gugcaucagugguugcuau

SEQ ID NO: 1963974 - RNA, 19 nt, Homo sapiens
  misc_RNA (1)...(19): siRNA sense strand
aaucuuaacugaggccauu

SEQ ID NO: 1963975 - RNA, 19 nt, Homo sapiens
  misc_RNA (1)...(19): siRNA sense strand
cauccacagucaucaagaa

SEQ ID NO: 1963976 - RNA, 19 nt, Homo sapiens
  misc_RNA (1)...(19): siRNA sense strand
cgaagaaagagccagauga

SEQ ID NO: 1963977 - RNA, 19 nt, Homo sapiens
  misc_RNA (1)...(19): siRNA sense strand
ccgaagaccugcucuacca

SEQ ID NO: 1963978 - RNA, 19 nt, Homo sapiens
  misc_RNA (1)...(19): siRNA sense strand
uggaugcaaucuuaacuga

SEQ ID NO: 1963979 - RNA, 19 nt, Homo sapiens
  misc_RNA (1)...(19): siRNA sense strand
uaagaaagcaccuccuaag

SEQ ID NO: 1963980 - RNA, 19 nt, Homo sapiens
  misc_RNA (1)...(19): siRNA sense strand
ccagaaaacagaaagaaua

SEQ ID NO: 1963981 - RNA, 19 nt, Homo sapiens
  misc_RNA (1)...(19): siRNA sense strand
caucaaacagguuaaagga

SEQ ID NO: 1963982 - RNA, 19 nt, Homo sapiens
  misc_RNA (1)...(19): siRNA sense strand
gggaaggccgcaucuguga

SEQ ID NO: 1963983 - RNA, 19 nt, Homo sapiens
  misc_RNA (1)...(19): siRNA sense strand
ggaaccaauucuaacuauc

SEQ ID NO: 1963984 - RNA, 19 nt, Homo sapiens
  misc_RNA (1)...(19): siRNA sense strand
gacauaaguucagaggaau

SEQ ID NO: 1963985 - RNA, 19 nt, Homo sapiens
  misc_RNA (1)...(19): siRNA sense strand
agaagacucugaggaugaa

SEQ ID NO: 1963986 - RNA, 19 nt, Homo sapiens
  misc_RNA (1)...(19): siRNA sense strand
gguggaagccugauggaau

SEQ ID NO: 1963987 - RNA, 19 nt, Homo sapiens
  misc_RNA (1)...(19): siRNA sense strand
ugucuccacuguagaagaa

SEQ ID NO: 1963988 - RNA, 19 nt, Homo sapiens
  misc_RNA (1)...(19): siRNA sense strand
gcaccuuccagcucuguuu

SEQ ID NO: 1963989 - RNA, 19 nt, Homo sapiens
  misc_RNA (1)...(19): siRNA sense strand
gaaguauguccuagagaau

SEQ ID NO: 1963990 - RNA, 19 nt, Homo sapiens
  misc_RNA (1)...(19): siRNA sense strand
gaaaaggugcuucuuggaa

SEQ ID NO: 1963991 - RNA, 19 nt, Homo sapiens
  misc_RNA (1)...(19): siRNA sense strand
ggugagaagguagaagaua

SEQ ID NO: 1963992 - RNA, 19 nt, Homo sapiens
  misc_RNA (1)...(19): siRNA sense strand
gaaugaagagaaggaagaa

SEQ ID NO: 1963993 - RNA, 19 nt, Homo sapiens
  misc_RNA (1)...(19): siRNA sense strand
ggauccagaaccacaagua

SEQ ID NO: 1963994 - RNA, 19 nt, Homo sapiens
  misc_RNA (1)...(19): siRNA sense strand
agugguggcuccucaaaga

SEQ ID NO: 1963995 - RNA, 19 nt, Homo sapiens
  misc_RNA (1)...(19): siRNA sense strand
gauagcaccaugccgauuc

SEQ ID NO: 1963996 - RNA, 19 nt, Homo sapiens
  misc_RNA (1)...(19): siRNA sense strand
gaagagaaggaagaaaaua

SEQ ID NO: 1963997 - RNA, 19 nt, Homo sapiens
  misc_RNA (1)...(19): siRNA sense strand
gggcaaauccaccaugaag

SEQ ID NO: 1963998 - RNA, 19 nt, Homo sapiens
  misc_RNA (1)...(19): siRNA sense strand
gaugaagagccgccaccua

SEQ ID NO: 1963999 - RNA, 19 nt, Homo sapiens
  misc_RNA (1)...(19): siRNA sense strand
agaugaggaugaagaugaa

SEQ ID NO: 1964000 - RNA, 19 nt, Homo sapiens
  misc_RNA (1)...(19): siRNA sense strand
cauuccagcugaagaaauc

SEQ ID NO: 1964001 - RNA, 19 nt, Homo sapiens
  misc_RNA (1)...(19): siRNA sense strand
ccuacagucucaucaggaa

SEQ ID NO: 1964002 - RNA, 19 nt, Homo sapiens
  misc_RNA (1)...(19): siRNA sense strand
gcacucccacuuauaguag

SEQ ID NO: 1964003 - RNA, 19 nt, Homo sapiens
  misc_RNA (1)...(19): siRNA sense strand
ccaaaacgccugccaagaa

SEQ ID NO: 1964004 - RNA, 19 nt, Homo sapiens
  misc_RNA (1)...(19): siRNA sense strand
ggugaacucguccauccua

SEQ ID NO: 1964005 - RNA, 19 nt, Homo sapiens
  misc_RNA (1)...(19): siRNA sense strand
augaagagccgccaccuaa

SEQ ID NO: 1964006 - RNA, 19 nt, Homo sapiens
  misc_RNA (1)...(19): siRNA sense strand
gaacucguccauccuaagg

SEQ ID NO: 1964007 - RNA, 19 nt, Homo sapiens
  misc_RNA (1)...(19): siRNA sense strand
gaagccugauggaauaugc

SEQ ID NO: 1964008 - RNA, 19 nt, Homo sapiens
  misc_RNA (1)...(19): siRNA sense strand
gaagaaaucaggggagaaa

SEQ ID NO: 1964009 - RNA, 19 nt, Homo sapiens
  misc_RNA (1)...(19): siRNA sense strand
gaaaacagaaagaauagga

SEQ ID NO: 1964010 - RNA, 19 nt, Homo sapiens
  misc_RNA (1)...(19): siRNA sense strand
gaugagaaagaucagucua

SEQ ID NO: 1964011 - RNA, 19 nt, Homo sapiens
  misc_RNA (1)...(19): siRNA sense strand
cuaagaaagcaccuccuaa

SEQ ID NO: 1964012 - RNA, 19 nt, Homo sapiens
  misc_RNA (1)...(19): siRNA sense strand
gaaggccgcaucugugaag

SEQ ID NO: 1964013 - RNA, 19 nt, Homo sapiens
  misc_RNA (1)...(19): siRNA sense strand
ugauacgucucaaggugaa

SEQ ID NO: 1964014 - RNA, 19 nt, Homo sapiens
  misc_RNA (1)...(19): siRNA sense strand
gcggacaaguuaggugaga

SEQ ID NO: 1964015 - RNA, 19 nt, Homo sapiens
  misc_RNA (1)...(19): siRNA sense strand
uaggagcucugcaguggau

SEQ ID NO: 1964016 - RNA, 19 nt, Homo sapiens
  misc_RNA (1)...(19): siRNA sense strand
gggguuaucuccuuaaaca

SEQ ID NO: 1964017 - RNA, 19 nt, Homo sapiens
  misc_RNA (1)...(19): siRNA sense strand
auagaggagucaucaaaca

SEQ ID NO: 1964018 - RNA, 19 nt, Homo sapiens
  misc_RNA (1)...(19): siRNA sense strand
agaagaagacucugaggau

SEQ ID NO: 1964019 - RNA, 19 nt, Homo sapiens
  misc_RNA (1)...(19): siRNA sense strand
gugaacucguccauccuaa

SEQ ID NO: 1964020 - RNA, 19 nt, Homo sapiens
  misc_RNA (1)...(19): siRNA sense strand
gaaacuccaccugcuacuu

SEQ ID NO: 1964021 - RNA, 19 nt, Homo sapiens
  misc_RNA (1)...(19): siRNA sense strand
aggaaccaauucuaacuau

SEQ ID NO: 1964022 - RNA, 19 nt, Homo sapiens
  misc_RNA (1)...(19): siRNA sense strand
ggaauaugcaaucuugucu

SEQ ID NO: 1964023 - RNA, 19 nt, Homo sapiens
  misc_RNA (1)...(19): siRNA sense strand
ggccuuuacucgccuuugu

SEQ ID NO: 1964024 - RNA, 19 nt, Homo sapiens
  misc_RNA (1)...(19): siRNA sense strand
caggaaccaauucuaacua

SEQ ID NO: 1964025 - RNA, 19 nt, Homo sapiens
  misc_RNA (1)...(19): siRNA sense strand
aaagccagaaccagacaua

SEQ ID NO: 1964026 - RNA, 19 nt, Homo sapiens
  misc_RNA (1)...(19): siRNA sense strand
aagaagacucugaggauga

SEQ ID NO: 1964027 - RNA, 19 nt, Homo sapiens
  misc_RNA (1)...(19): siRNA sense strand
gcagaaaugcgaaaagaau

SEQ ID NO: 1964028 - RNA, 19 nt, Homo sapiens
  misc_RNA (1)...(19): siRNA sense strand
gaaaugaucgccacucuaa

SEQ ID NO: 1964029 - RNA, 19 nt, Homo sapiens
  misc_RNA (1)...(19): siRNA sense strand
caagaaaccauuccaaaua

SEQ ID NO: 1964030 - RNA, 19 nt, Homo sapiens
  misc_RNA (1)...(19): siRNA sense strand
ggaagaagauggagagaag

SEQ ID NO: 1964031 - RNA, 19 nt, Homo sapiens
  misc_RNA (1)...(19): siRNA sense strand
ucacaggcuuuauacuuua

SEQ ID NO: 1964032 - RNA, 19 nt, Homo sapiens
  misc_RNA (1)...(19): siRNA sense strand
gagcagaguuggagaaugg

SEQ ID NO: 1964033 - RNA, 19 nt, Homo sapiens
  misc_RNA (1)...(19): siRNA sense strand
gcagagauaaguuuaagaa

SEQ ID NO: 1964034 - RNA, 19 nt, Homo sapiens
  misc_RNA (1)...(19): siRNA sense strand
gcaaauggagaccucauaa

SEQ ID NO: 1964035 - RNA, 19 nt, Homo sapiens
  misc_RNA (1)...(19): siRNA sense strand
ggaaagaaagucucaagga

SEQ ID NO: 1964036 - RNA, 19 nt, Homo sapiens
  misc_RNA (1)...(19): siRNA sense strand
cagcagaaguccaagaaga

SEQ ID NO: 1964037 - RNA, 19 nt, Homo sapiens
  misc_RNA (1)...(19): siRNA sense strand
ggacauaggagaaaucaag

SEQ ID NO: 1964038 - RNA, 19 nt, Homo sapiens
  misc_RNA (1)...(19): siRNA sense strand
ucagugggaucauguacua

SEQ ID NO: 1964039 - RNA, 19 nt, Homo sapiens
  misc_RNA (1)...(19): siRNA sense strand
caauggaaguuguuaauac

SEQ ID NO: 1964040 - RNA, 19 nt, Homo sapiens
  misc_RNA (1)...(19): siRNA sense strand
ccaagaagaugaagauacu

SEQ ID NO: 1964041 - RNA, 19 nt, Homo sapiens
  misc_RNA (1)...(19): siRNA sense strand
gaucagaggccagcagaaa

SEQ ID NO: 1964042 - RNA, 19 nt, Homo sapiens
  misc_RNA (1)...(19): siRNA sense strand
aagaagacgugaauucaga

SEQ ID NO: 1964043 - RNA, 19 nt, Homo sapiens
  misc_RNA (1)...(19): siRNA sense strand
agaagaagguguccagcuu

SEQ ID NO: 1964044 - RNA, 19 nt, Homo sapiens
  misc_RNA (1)...(19): siRNA sense strand
ucagaggccagcagaaaua

SEQ ID NO: 1964045 - RNA, 19 nt, Homo sapiens
  misc_RNA (1)...(19): siRNA sense strand
aaacaaggaugcagaacag

SEQ ID NO: 1964046 - RNA, 19 nt, Homo sapiens
  misc_RNA (1)...(19): siRNA sense strand
ugaagagcgugcuugugua

SEQ ID NO: 1964047 - RNA, 19 nt, Homo sapiens
  misc_RNA (1)...(19): siRNA sense strand
aagaaaccauuccaaauag

SEQ ID NO: 1964048 - RNA, 19 nt, Homo sapiens
  misc_RNA (1)...(19): siRNA sense strand
uaaagggaguggaaaugau

SEQ ID NO: 1964049 - RNA, 19 nt, Homo sapiens
  misc_RNA (1)...(19): siRNA sense strand
gagagaaggcaaacaagga

SEQ ID NO: 1964050 - RNA, 19 nt, Homo sapiens
  misc_RNA (1)...(19): siRNA sense strand
gaggccagcagaaauagua

SEQ ID NO: 1964051 - RNA, 19 nt, Homo sapiens
  misc_RNA (1)...(19): siRNA sense strand
caacgugucagcucgcuuu

SEQ ID NO: 1964052 - RNA, 19 nt, Homo sapiens
  misc_RNA (1)...(19): siRNA sense strand
ugcagcagguuaauaauga

SEQ ID NO: 1964053 - RNA, 19 nt, Homo sapiens
  misc_RNA (1)...(19): siRNA sense strand
cuacaaauggucacagaaa

SEQ ID NO: 1964054 - RNA, 19 nt, Homo sapiens
  misc_RNA (1)...(19): siRNA sense strand
ucgaggagauucuggauca

SEQ ID NO: 1964055 - RNA, 19 nt, Homo sapiens
  misc_RNA (1)...(19): siRNA sense strand
gaucgccacucuaagucaa

SEQ ID NO: 1964056 - RNA, 19 nt, Homo sapiens
  misc_RNA (1)...(19): siRNA sense strand
caaauggagaccucauaaa

SEQ ID NO: 1964057 - RNA, 19 nt, Homo sapiens
  misc_RNA (1)...(19): siRNA sense strand
gaaugaauggugaccuuga

SEQ ID NO: 1964058 - RNA, 19 nt, Homo sapiens
  misc_RNA (1)...(19): siRNA sense strand
ggaaaugaucgccacucua

SEQ ID NO: 1964059 - RNA, 19 nt, Homo sapiens
  misc_RNA (1)...(19): siRNA sense strand
ccaauggaaguuguuaaua

SEQ ID NO: 1964060 - RNA, 19 nt, Homo sapiens
  misc_RNA (1)...(19): siRNA sense strand
gugaagagcgugcuugugu

SEQ ID NO: 1964061 - RNA, 19 nt, Homo sapiens
  misc_RNA (1)...(19): siRNA sense strand
aaauagugaugaaggcauu

SEQ ID NO: 1964062 - RNA, 19 nt, Homo sapiens
  misc_RNA (1)...(19): siRNA sense strand
gaaaccauuccaaauagug

SEQ ID NO: 1964063 - RNA, 19 nt, Homo sapiens
  misc_RNA (1)...(19): siRNA sense strand
cgugucagcucgcuuuaga

SEQ ID NO: 1964064 - RNA, 19 nt, Homo sapiens
  misc_RNA (1)...(19): siRNA sense strand
caaggaugcagaacagaaa

SEQ ID NO: 1964065 - RNA, 19 nt, Homo sapiens
  misc_RNA (1)...(19): siRNA sense strand
gaaaacaaccaacaaaaca

SEQ ID NO: 1964066 - RNA, 19 nt, Homo sapiens
  misc_RNA (1)...(19): siRNA sense strand
ugcacuaucuucuugauug

SEQ ID NO: 1964067 - RNA, 19 nt, Homo sapiens
  misc_RNA (1)...(19): siRNA sense strand
gaaagcuucuucacuaccu

SEQ ID NO: 1964068 - RNA, 19 nt, Homo sapiens
  misc_RNA (1)...(19): siRNA sense strand
guucacaggcuuuauacuu

SEQ ID NO: 1964069 - RNA, 19 nt, Homo sapiens
  misc_RNA (1)...(19): siRNA sense strand
gcuuuauacuuuagaagga

SEQ ID NO: 1964070 - RNA, 19 nt, Homo sapiens
  misc_RNA (1)...(19): siRNA sense strand
gaagacgugaauucagaaa

SEQ ID NO: 1964071 - RNA, 19 nt, Homo sapiens
  misc_RNA (1)...(19): siRNA sense strand
cauaggagaaaucaagaaa

SEQ ID NO: 1964072 - RNA, 19 nt, Homo sapiens
  misc_RNA (1)...(19): siRNA sense strand
ccaccaaggccagaaguaa

SEQ ID NO: 1964073 - RNA, 19 nt, Homo sapiens
  misc_RNA (1)...(19): siRNA sense strand
cugacgaaauugaaacaaa

SEQ ID NO: 1964074 - RNA, 19 nt, Homo sapiens
  misc_RNA (1)...(19): siRNA sense strand
uucacaggcuuuauacuuu

SEQ ID NO: 1964075 - RNA, 19 nt, Homo sapiens
  misc_RNA (1)...(19): siRNA sense strand
cacaagaaaccauuccaaa

SEQ ID NO: 1964076 - RNA, 19 nt, Homo sapiens
  misc_RNA (1)...(19): siRNA sense strand
gaauucacaagaaaccauu

SEQ ID NO: 1964077 - RNA, 19 nt, Homo sapiens
  misc_RNA (1)...(19): siRNA sense strand
ugauguagacccucaaaga

SEQ ID NO: 1964078 - RNA, 19 nt, Homo sapiens
  misc_RNA (1)...(19): siRNA sense strand
gccgugcacuaucuucuug

SEQ ID NO: 1964079 - RNA, 19 nt, Homo sapiens
  misc_RNA (1)...(19): siRNA sense strand
gcagguuaauaaugagcuu

SEQ ID NO: 1964080 - RNA, 19 nt, Homo sapiens
  misc_RNA (1)...(19): siRNA sense strand
caaacaaggaugcagaaca

SEQ ID NO: 1964081 - RNA, 19 nt, Homo sapiens
  misc_RNA (1)...(19): siRNA sense strand
agaaauaguagacgaggaa

SEQ ID NO: 1964082 - RNA, 19 nt, Homo sapiens
  misc_RNA (1)...(19): siRNA sense strand
agaugaagauacucagguu

SEQ ID NO: 1964083 - RNA, 19 nt, Homo sapiens
  misc_RNA (1)...(19): siRNA sense strand
acaagaaaccauuccaaau

SEQ ID NO: 1964084 - RNA, 19 nt, Homo sapiens
  misc_RNA (1)...(19): siRNA sense strand
ucaauuacuuggacauagg

SEQ ID NO: 1964085 - RNA, 19 nt, Homo sapiens
  misc_RNA (1)...(19): siRNA sense strand
gcagaaguccaagaagaug

SEQ ID NO: 1964086 - RNA, 19 nt, Homo sapiens
  misc_RNA (1)...(19): siRNA sense strand
gaagagcgugcuuguguac

SEQ ID NO: 1964087 - RNA, 19 nt, Homo sapiens
  misc_RNA (1)...(19): siRNA sense strand
cuaaagggaguggaaauga

SEQ ID NO: 1964088 - RNA, 19 nt, Homo sapiens
  misc_RNA (1)...(19): siRNA sense strand
gacaagaugaggcugaugu

SEQ ID NO: 1964089 - RNA, 19 nt, Homo sapiens
  misc_RNA (1)...(19): siRNA sense strand
uaaauggaggcaccgauga

SEQ ID NO: 1964090 - RNA, 19 nt, Homo sapiens
  misc_RNA (1)...(19): siRNA sense strand
gaaaagaccaauggaaguu

SEQ ID NO: 1964091 - RNA, 19 nt, Homo sapiens
  misc_RNA (1)...(19): siRNA sense strand
uggaaguuguuaauacaga

SEQ ID NO: 1964092 - RNA, 19 nt, Homo sapiens
  misc_RNA (1)...(19): siRNA sense strand
aaagaccaauggaaguugu

SEQ ID NO: 1964093 - RNA, 19 nt, Homo sapiens
  misc_RNA (1)...(19): siRNA sense strand
uucacuaccuccuauugua

SEQ ID NO: 1964094 - RNA, 19 nt, Homo sapiens
  misc_RNA (1)...(19): siRNA sense strand
gaaucagugggaucaugua

SEQ ID NO: 1964095 - RNA, 19 nt, Homo sapiens
  misc_RNA (1)...(19): siRNA sense strand
gcacuaucuucuugauugc

SEQ ID NO: 1964096 - RNA, 19 nt, Homo sapiens
  misc_RNA (1)...(19): siRNA sense strand
aaugaauggugaccuugaa

SEQ ID NO: 1964097 - RNA, 19 nt, Homo sapiens
  misc_RNA (1)...(19): siRNA sense strand
acaguuggauccagugaca

SEQ ID NO: 1964098 - RNA, 19 nt, Homo sapiens
  misc_RNA (1)...(19): siRNA sense strand
ggagcagaguuggagaaug

SEQ ID NO: 1964099 - RNA, 19 nt, Homo sapiens
  misc_RNA (1)...(19): siRNA sense strand
caccaaggccagaaguaaa

SEQ ID NO: 1964100 - RNA, 19 nt, Homo sapiens
  misc_RNA (1)...(19): siRNA sense strand
caggagccgugcacuaucu

SEQ ID NO: 1964101 - RNA, 19 nt, Homo sapiens
  misc_RNA (1)...(19): siRNA sense strand
gcaccgaugaggagaaugg

SEQ ID NO: 1964102 - RNA, 19 nt, Homo sapiens
  misc_RNA (1)...(19): siRNA sense strand
ugucagcucgcuuuagaaa

SEQ ID NO: 1964103 - RNA, 19 nt, Homo sapiens
  misc_RNA (1)...(19): siRNA sense strand
guuggagaaugggcaguuu

SEQ ID NO: 1964104 - RNA, 19 nt, Homo sapiens
  misc_RNA (1)...(19): siRNA sense strand
aauaguagacgaggaagaa

SEQ ID NO: 1964105 - RNA, 19 nt, Homo sapiens
  misc_RNA (1)...(19): siRNA sense strand
guaaaaccaguaauccaua

SEQ ID NO: 1964106 - RNA, 19 nt, Homo sapiens
  misc_RNA (1)...(19): siRNA sense strand
gaccaauggaaguuguuaa

SEQ ID NO: 1964107 - RNA, 19 nt, Homo sapiens
  misc_RNA (1)...(19): siRNA sense strand
gacauaggagaaaucaaga

SEQ ID NO: 1964108 - RNA, 19 nt, Homo sapiens
  misc_RNA (1)...(19): siRNA sense strand
aagaugaggcugauguaga

SEQ ID NO: 1964109 - RNA, 19 nt, Homo sapiens
  misc_RNA (1)...(19): siRNA sense strand
ggaugcagaacagaaagaa

SEQ ID NO: 1964110 - RNA, 19 nt, Homo sapiens
  misc_RNA (1)...(19): siRNA sense strand
ccuucaagaaacucaauua

SEQ ID NO: 1964111 - RNA, 19 nt, Homo sapiens
  misc_RNA (1)...(19): siRNA sense strand
agaaaccauuccaaauagu

SEQ ID NO: 1964112 - RNA, 19 nt, Homo sapiens
  misc_RNA (1)...(19): siRNA sense strand
guuggcagagauaaguuua

SEQ ID NO: 1964113 - RNA, 19 nt, Homo sapiens
  misc_RNA (1)...(19): siRNA sense strand
gcagcagguuaauaaugag

SEQ ID NO: 1964114 - RNA, 19 nt, Homo sapiens
  misc_RNA (1)...(19): siRNA sense strand
gaauggugaccuugaagag

SEQ ID NO: 1964115 - RNA, 19 nt, Homo sapiens
  misc_RNA (1)...(19): siRNA sense strand
aggaaugaauggugaccuu

SEQ ID NO: 1964116 - RNA, 19 nt, Homo sapiens
  misc_RNA (1)...(19): siRNA sense strand
ucacaagaaaccauuccaa

SEQ ID NO: 1964117 - RNA, 19 nt, Homo sapiens
  misc_RNA (1)...(19): siRNA sense strand
uggcagagauaaguuuaag

SEQ ID NO: 1964118 - RNA, 19 nt, Homo sapiens
  misc_RNA (1)...(19): siRNA sense strand
aaauggagaccucauaaac

SEQ ID NO: 1964119 - RNA, 19 nt, Homo sapiens
  misc_RNA (1)...(19): siRNA sense strand
gauguagacccucaaagac

SEQ ID NO: 1964120 - RNA, 19 nt, Homo sapiens
  misc_RNA (1)...(19): siRNA sense strand
agaugaggcugauguagac

SEQ ID NO: 1964121 - RNA, 19 nt, Homo sapiens
  misc_RNA (1)...(19): siRNA sense strand
acaaggaugcagaacagaa

SEQ ID NO: 1964122 - RNA, 19 nt, Homo sapiens
  misc_RNA (1)...(19): siRNA sense strand
ggcagcagaaguccaagaa

SEQ ID NO: 1964123 - RNA, 19 nt, Homo sapiens
  misc_RNA (1)...(19): siRNA sense strand
aaaccauuccaaauaguga

SEQ ID NO: 1964124 - RNA, 19 nt, Homo sapiens
  misc_RNA (1)...(19): siRNA sense strand
cuucuucacuaccuccuau

SEQ ID NO: 1964125 - RNA, 19 nt, Homo sapiens
  misc_RNA (1)...(19): siRNA sense strand
gagcaagucgaggagauuc

SEQ ID NO: 1964126 - RNA, 19 nt, Homo sapiens
  misc_RNA (1)...(19): siRNA sense strand
aauuaccaguccagaagaa

SEQ ID NO: 1964127 - RNA, 19 nt, Homo sapiens
  misc_RNA (1)...(19): siRNA sense strand
acaagaugaggcugaugua

SEQ ID NO: 1964128 - RNA, 19 nt, Homo sapiens
  misc_RNA (1)...(19): siRNA sense strand
gaacaacguuaauguggua

SEQ ID NO: 1964129 - RNA, 19 nt, Homo sapiens
  misc_RNA (1)...(19): siRNA sense strand
ggaaauggaugaacuuagg

SEQ ID NO: 1964130 - RNA, 19 nt, Homo sapiens
  misc_RNA (1)...(19): siRNA sense strand
gaaaacagcugacauggau

SEQ ID NO: 1964131 - RNA, 19 nt, Homo sapiens
  misc_RNA (1)...(19): siRNA sense strand
gagaaagaaugcagagauc

SEQ ID NO: 1964132 - RNA, 19 nt, Homo sapiens
  misc_RNA (1)...(19): siRNA sense strand
gagaagaaaguaaaugaga

SEQ ID NO: 1964133 - RNA, 19 nt, Homo sapiens
  misc_RNA (1)...(19): siRNA sense strand
gaagaaaugaagaagaaga

SEQ ID NO: 1964134 - RNA, 19 nt, Homo sapiens
  misc_RNA (1)...(19): siRNA sense strand
gaacuuaggagcuauucau

SEQ ID NO: 1964135 - RNA, 19 nt, Homo sapiens
  misc_RNA (1)...(19): siRNA sense strand
caacguuaaugugguauau

SEQ ID NO: 1964136 - RNA, 19 nt, Homo sapiens
  misc_RNA (1)...(19): siRNA sense strand
auucaaggcugcaagauga

SEQ ID NO: 1964137 - RNA, 19 nt, Homo sapiens
  misc_RNA (1)...(19): siRNA sense strand
gaagaaaguaaaugagauc

SEQ ID NO: 1964138 - RNA, 19 nt, Homo sapiens
  misc_RNA (1)...(19): siRNA sense strand
gcaagaugaacaacguuaa

SEQ ID NO: 1964139 - RNA, 19 nt, Homo sapiens
  misc_RNA (1)...(19): siRNA sense strand
uaggagcuauucaucacua

SEQ ID NO: 1964140 - RNA, 19 nt, Homo sapiens
  misc_RNA (1)...(19): siRNA sense strand
caaaucaggauggcaauga

SEQ ID NO: 1964141 - RNA, 19 nt, Homo sapiens
  misc_RNA (1)...(19): siRNA sense strand
gaaggccaauagcauucaa

SEQ ID NO: 1964142 - RNA, 19 nt, Homo sapiens
  misc_RNA (1)...(19): siRNA sense strand
gugaagagaggaaugagaa

SEQ ID NO: 1964143 - RNA, 19 nt, Homo sapiens
  misc_RNA (1)...(19): siRNA sense strand
ggauggcaaugauucagau

SEQ ID NO: 1964144 - RNA, 19 nt, Homo sapiens
  misc_RNA (1)...(19): siRNA sense strand
gaagaaaacagcugacaug

SEQ ID NO: 1964145 - RNA, 19 nt, Homo sapiens
  misc_RNA (1)...(19): siRNA sense strand
uggaugaacuuaggagcua

SEQ ID NO: 1964146 - RNA, 19 nt, Homo sapiens
  misc_RNA (1)...(19): siRNA sense strand
gaagaagagggaaauggau

SEQ ID NO: 1964147 - RNA, 19 nt, Homo sapiens
  misc_RNA (1)...(19): siRNA sense strand
ggacugugcccaccuugug

SEQ ID NO: 1964148 - RNA, 19 nt, Homo sapiens
  misc_RNA (1)...(19): siRNA sense strand
gagcuauucaucacuaaug

SEQ ID NO: 1964149 - RNA, 19 nt, Homo sapiens
  misc_RNA (1)...(19): siRNA sense strand
uauauacgccguggucuaa

SEQ ID NO: 1964150 - RNA, 19 nt, Homo sapiens
  misc_RNA (1)...(19): siRNA sense strand
gauccugaaccgauuagaa

SEQ ID NO: 1964151 - RNA, 19 nt, Homo sapiens
  misc_RNA (1)...(19): siRNA sense strand
caucacuaaugaaaguuga

SEQ ID NO: 1964152 - RNA, 19 nt, Homo sapiens
  misc_RNA (1)...(19): siRNA sense strand
agaccuagcagcagagaaa

SEQ ID NO: 1964153 - RNA, 19 nt, Homo sapiens
  misc_RNA (1)...(19): siRNA sense strand
gaugaacaacguuaaugug

SEQ ID NO: 1964154 - RNA, 19 nt, Homo sapiens
  misc_RNA (1)...(19): siRNA sense strand
gaaauggaugaacuuagga

SEQ ID NO: 1964155 - RNA, 19 nt, Homo sapiens
  misc_RNA (1)...(19): siRNA sense strand
caagaugaacaacguuaau

SEQ ID NO: 1964156 - RNA, 19 nt, Homo sapiens
  misc_RNA (1)...(19): siRNA sense strand
gaagagggaaauggaugaa

SEQ ID NO: 1964157 - RNA, 19 nt, Homo sapiens
  misc_RNA (1)...(19): siRNA sense strand
gaaagaaugcagagaucgu

SEQ ID NO: 1964158 - RNA, 19 nt, Homo sapiens
  misc_RNA (1)...(19): siRNA sense strand
guauauacgccguggucua

SEQ ID NO: 1964159 - RNA, 19 nt, Homo sapiens
  misc_RNA (1)...(19): siRNA sense strand
gaagaagaagagggaaaug

SEQ ID NO: 1964160 - RNA, 19 nt, Homo sapiens
  misc_RNA (1)...(19): siRNA sense strand
gcugcaagaugaacaacgu

SEQ ID NO: 1964161 - RNA, 19 nt, Homo sapiens
  misc_RNA (1)...(19): siRNA sense strand
ggucuaaccugaagaaaac

SEQ ID NO: 1964162 - RNA, 19 nt, Homo sapiens
  misc_RNA (1)...(19): siRNA sense strand
uggagaagaaaguaaauga

SEQ ID NO: 1964163 - RNA, 19 nt, Homo sapiens
  misc_RNA (1)...(19): siRNA sense strand
gggcagauaggcuuucaca

SEQ ID NO: 1964164 - RNA, 19 nt, Homo sapiens
  misc_RNA (1)...(19): siRNA sense strand
ggagaagaaaguaaaugag

SEQ ID NO: 1964165 - RNA, 19 nt, Homo sapiens
  misc_RNA (1)...(19): siRNA sense strand
agaagaagagggaaaugga

SEQ ID NO: 1964166 - RNA, 19 nt, Homo sapiens
  misc_RNA (1)...(19): siRNA sense strand
augcagagaucgugaagag

SEQ ID NO: 1964167 - RNA, 19 nt, Homo sapiens
  misc_RNA (1)...(19): siRNA sense strand
ugagauccugaaccgauua

SEQ ID NO: 1964168 - RNA, 19 nt, Homo sapiens
  misc_RNA (1)...(19): siRNA sense strand
ggaugaacuuaggagcuau

SEQ ID NO: 1964169 - RNA, 19 nt, Homo sapiens
  misc_RNA (1)...(19): siRNA sense strand
agagaaagaaugcagagau

SEQ ID NO: 1964170 - RNA, 19 nt, Homo sapiens
  misc_RNA (1)...(19): siRNA sense strand
gacaguggagaagaaagua

SEQ ID NO: 1964171 - RNA, 19 nt, Homo sapiens
  misc_RNA (1)...(19): siRNA sense strand
gaugaacuuaggagcuauu

SEQ ID NO: 1964172 - RNA, 19 nt, Homo sapiens
  misc_RNA (1)...(19): siRNA sense strand
gagggaaauggaugaacuu

SEQ ID NO: 1964173 - RNA, 19 nt, Homo sapiens
  misc_RNA (1)...(19): siRNA sense strand
agagggaaauggaugaacu

SEQ ID NO: 1964174 - RNA, 19 nt, Homo sapiens
  misc_RNA (1)...(19): siRNA sense strand
gaagagaggaaugagaaaa

SEQ ID NO: 1964175 - RNA, 19 nt, Homo sapiens
  misc_RNA (1)...(19): siRNA sense strand
ugaagaagaagagggaaau

SEQ ID NO: 1964176 - RNA, 19 nt, Homo sapiens
  misc_RNA (1)...(19): siRNA sense strand
gcccaaauucaggaaauga

SEQ ID NO: 1964177 - RNA, 19 nt, Homo sapiens
  misc_RNA (1)...(19): siRNA sense strand
ugacaguggagaagaaagu

SEQ ID NO: 1964178 - RNA, 19 nt, Homo sapiens
  misc_RNA (1)...(19): siRNA sense strand
ugugaaggccaauagcauu

SEQ ID NO: 1964179 - RNA, 19 nt, Homo sapiens
  misc_RNA (1)...(19): siRNA sense strand
agaagagggaaauggauga

SEQ ID NO: 1964180 - RNA, 19 nt, Homo sapiens
  misc_RNA (1)...(19): siRNA sense strand
aagcccaaauucaggaaau

SEQ ID NO: 1964181 - RNA, 19 nt, Homo sapiens
  misc_RNA (1)...(19): siRNA sense strand
ugaagagaggaaugagaaa

SEQ ID NO: 1964182 - RNA, 19 nt, Homo sapiens
  misc_RNA (1)...(19): siRNA sense strand
ugcaagaugaacaacguua

SEQ ID NO: 1964183 - RNA, 19 nt, Homo sapiens
  misc_RNA (1)...(19): siRNA sense strand
caguggagaagaaaguaaa

SEQ ID NO: 1964184 - RNA, 19 nt, Homo sapiens
  misc_RNA (1)...(19): siRNA sense strand
gaucgugaagagaggaaug

SEQ ID NO: 1964185 - RNA, 19 nt, Homo sapiens
  misc_RNA (1)...(19): siRNA sense strand
ccuagcagcagagaaagaa

SEQ ID NO: 1964186 - RNA, 19 nt, Homo sapiens
  misc_RNA (1)...(19): siRNA sense strand
gggaaauggaugaacuuag

SEQ ID NO: 1964187 - RNA, 19 nt, Homo sapiens
  misc_RNA (1)...(19): siRNA sense strand
gugaaggccaauagcauuc

SEQ ID NO: 1964188 - RNA, 19 nt, Homo sapiens
  misc_RNA (1)...(19): siRNA sense strand
gaaugcagagaucgugaag

SEQ ID NO: 1964189 - RNA, 19 nt, Homo sapiens
  misc_RNA (1)...(19): siRNA sense strand
uagcagcagagaaagaaug

SEQ ID NO: 1964190 - RNA, 19 nt, Homo sapiens
  misc_RNA (1)...(19): siRNA sense strand
acguuaaugugguauauac

SEQ ID NO: 1964191 - RNA, 19 nt, Homo sapiens
  misc_RNA (1)...(19): siRNA sense strand
gccguggucuaaccugaag

SEQ ID NO: 1964192 - RNA, 19 nt, Homo sapiens
  misc_RNA (1)...(19): siRNA sense strand
ggagcuauucaucacuaau

SEQ ID NO: 1964193 - RNA, 19 nt, Homo sapiens
  misc_RNA (1)...(19): siRNA sense strand
agaagaagaucgucaagua

SEQ ID NO: 1964194 - RNA, 19 nt, Homo sapiens
  misc_RNA (1)...(19): siRNA sense strand
ucaaguaccuguuccaguu

SEQ ID NO: 1964195 - RNA, 19 nt, Homo sapiens
  misc_RNA (1)...(19): siRNA sense strand
ggacaucuaugccaacauc

SEQ ID NO: 1964196 - RNA, 19 nt, Homo sapiens
  misc_RNA (1)...(19): siRNA sense strand
ggaggaggcuggcaucauc

SEQ ID NO: 1964197 - RNA, 19 nt, Homo sapiens
  misc_RNA (1)...(19): siRNA sense strand
gccaacaucuucaucauca

SEQ ID NO: 1964198 - RNA, 19 nt, Homo sapiens
  misc_RNA (1)...(19): siRNA sense strand
aagagaagcugcugaagug

SEQ ID NO: 1964199 - RNA, 19 nt, Homo sapiens
  misc_RNA (1)...(19): siRNA sense strand
ccaaagggcagaagaagaa

SEQ ID NO: 1964200 - RNA, 19 nt, Homo sapiens
  misc_RNA (1)...(19): siRNA sense strand
gagagacagagaagaaaua

SEQ ID NO: 1964201 - RNA, 19 nt, Homo sapiens
  misc_RNA (1)...(19): siRNA sense strand
guaccugccugauuucuuc

SEQ ID NO: 1964202 - RNA, 19 nt, Homo sapiens
  misc_RNA (1)...(19): siRNA sense strand
aaagacagauggagcguau

SEQ ID NO: 1964203 - RNA, 19 nt, Homo sapiens
  misc_RNA (1)...(19): siRNA sense strand
ggaccuuggugccauguug

SEQ ID NO: 1964204 - RNA, 19 nt, Homo sapiens
  misc_RNA (1)...(19): siRNA sense strand
ggcuguaccugccugauuu

SEQ ID NO: 1964205 - RNA, 19 nt, Homo sapiens
  misc_RNA (1)...(19): siRNA sense strand
gggacugccucauucugua

SEQ ID NO: 1964206 - RNA, 19 nt, Homo sapiens
  misc_RNA (1)...(19): siRNA sense strand
ggacagcgucugcuucuuc

SEQ ID NO: 1964207 - RNA, 19 nt, Homo sapiens
  misc_RNA (1)...(19): siRNA sense strand
caaguggacucgugagaag

SEQ ID NO: 1964208 - RNA, 19 nt, Homo sapiens
  misc_RNA (1)...(19): siRNA sense strand
gagccgcuguucaccauga

SEQ ID NO: 1964209 - RNA, 19 nt, Homo sapiens
  misc_RNA (1)...(19): siRNA sense strand
caacuucuucuucuacaaa

SEQ ID NO: 1964210 - RNA, 19 nt, Homo sapiens
  misc_RNA (1)...(19): siRNA sense strand
ggcaggcgcuaguggauga

SEQ ID NO: 1964211 - RNA, 19 nt, Homo sapiens
  misc_RNA (1)...(19): siRNA sense strand
gggacuacuuccuguuuga

SEQ ID NO: 1964212 - RNA, 19 nt, Homo sapiens
  misc_RNA (1)...(19): siRNA sense strand
ggaacaggcaggacagcua

SEQ ID NO: 1964213 - RNA, 19 nt, Homo sapiens
  misc_RNA (1)...(19): siRNA sense strand
cgacgucuaugcccucaug

SEQ ID NO: 1964214 - RNA, 19 nt, Homo sapiens
  misc_RNA (1)...(19): siRNA sense strand
caacaucuucaucaucaaa

SEQ ID NO: 1964215 - RNA, 19 nt, Homo sapiens
  misc_RNA (1)...(19): siRNA sense strand
ggagaucugcuuccugaug

SEQ ID NO: 1964216 - RNA, 19 nt, Homo sapiens
  misc_RNA (1)...(19): siRNA sense strand
ugaaggaggugucggugau

SEQ ID NO: 1964217 - RNA, 19 nt, Homo sapiens
  misc_RNA (1)...(19): siRNA sense strand
agcaagcgcuucuggauga

SEQ ID NO: 1964218 - RNA, 19 nt, Homo sapiens
  misc_RNA (1)...(19): siRNA sense strand
ggaggaggcagagcuguuu

SEQ ID NO: 1964219 - RNA, 19 nt, Homo sapiens
  misc_RNA (1)...(19): siRNA sense strand
gaacuccgcacucaucaag

SEQ ID NO: 1964220 - RNA, 19 nt, Homo sapiens
  misc_RNA (1)...(19): siRNA sense strand
gaaauacccgcagcccaaa

SEQ ID NO: 1964221 - RNA, 19 nt, Homo sapiens
  misc_RNA (1)...(19): siRNA sense strand
gggaggcacuguggaguau

SEQ ID NO: 1964222 - RNA, 19 nt, Homo sapiens
  misc_RNA (1)...(19): siRNA sense strand
caacgucaccgucaucauc

SEQ ID NO: 1964223 - RNA, 19 nt, Homo sapiens
  misc_RNA (1)...(19): siRNA sense strand
acaaucaucucaaccucuu

SEQ ID NO: 1964224 - RNA, 19 nt, Homo sapiens
  misc_RNA (1)...(19): siRNA sense strand
ccaaggagcaugacaagag

SEQ ID NO: 1964225 - RNA, 19 nt, Homo sapiens
  misc_RNA (1)...(19): siRNA sense strand
ccaaugaggaggccgacua

SEQ ID NO: 1964226 - RNA, 19 nt, Homo sapiens
  misc_RNA (1)...(19): siRNA sense strand
ugaaagagaagcugcugaa

SEQ ID NO: 1964227 - RNA, 19 nt, Homo sapiens
  misc_RNA (1)...(19): siRNA sense strand
gacaucacguccucccuau

SEQ ID NO: 1964228 - RNA, 19 nt, Homo sapiens
  misc_RNA (1)...(19): siRNA sense strand
ggacagggaggaagaagag

SEQ ID NO: 1964229 - RNA, 19 nt, Homo sapiens
  misc_RNA (1)...(19): siRNA sense strand
gaggaggacucaccaucca

SEQ ID NO: 1964230 - RNA, 19 nt, Homo sapiens
  misc_RNA (1)...(19): siRNA sense strand
gaagaagaucgucaaguac

SEQ ID NO: 1964231 - RNA, 19 nt, Homo sapiens
  misc_RNA (1)...(19): siRNA sense strand
ccaagccgcucuggaggaa

SEQ ID NO: 1964232 - RNA, 19 nt, Homo sapiens
  misc_RNA (1)...(19): siRNA sense strand
gccaaguacuggaucuaug

SEQ ID NO: 1964233 - RNA, 19 nt, Homo sapiens
  misc_RNA (1)...(19): siRNA sense strand
uggaucagcuguacacaag

SEQ ID NO: 1964234 - RNA, 19 nt, Homo sapiens
  misc_RNA (1)...(19): siRNA sense strand
gggcagcgcaugaacuuuc

SEQ ID NO: 1964235 - RNA, 19 nt, Homo sapiens
  misc_RNA (1)...(19): siRNA sense strand
gaggacaucuaugccaaca

SEQ ID NO: 1964236 - RNA, 19 nt, Homo sapiens
  misc_RNA (1)...(19): siRNA sense strand
caagauugucuacauguuc

SEQ ID NO: 1964237 - RNA, 19 nt, Homo sapiens
  misc_RNA (1)...(19): siRNA sense strand
gcaaguucgugcgcggauu

SEQ ID NO: 1964238 - RNA, 19 nt, Homo sapiens
  misc_RNA (1)...(19): siRNA sense strand
ucgcgguggucgucaagua

SEQ ID NO: 1964239 - RNA, 19 nt, Homo sapiens
  misc_RNA (1)...(19): siRNA sense strand
gucaucaucuccaagaaca

SEQ ID NO: 1964240 - RNA, 19 nt, Homo sapiens
  misc_RNA (1)...(19): siRNA sense strand
caucacguccucccuauca

SEQ ID NO: 1964241 - RNA, 19 nt, Homo sapiens
  misc_RNA (1)...(19): siRNA sense strand
gacuucaucaucaucauuu

SEQ ID NO: 1964242 - RNA, 19 nt, Homo sapiens
  misc_RNA (1)...(19): siRNA sense strand
ugacuuccaccgcaggaua

SEQ ID NO: 1964243 - RNA, 19 nt, Homo sapiens
  misc_RNA (1)...(19): siRNA sense strand
gcuaguggaugagcugaca

SEQ ID NO: 1964244 - RNA, 19 nt, Homo sapiens
  misc_RNA (1)...(19): siRNA sense strand
ggacgcagacgcuguugca

SEQ ID NO: 1964245 - RNA, 19 nt, Homo sapiens
  misc_RNA (1)...(19): siRNA sense strand
gccgagagacagagaagaa

SEQ ID NO: 1964246 - RNA, 19 nt, Homo sapiens
  misc_RNA (1)...(19): siRNA sense strand
ucacugagaggauguucaa

SEQ ID NO: 1964247 - RNA, 19 nt, Homo sapiens
  misc_RNA (1)...(19): siRNA sense strand
guugucgacuucaucauca

SEQ ID NO: 1964248 - RNA, 19 nt, Homo sapiens
  misc_RNA (1)...(19): siRNA sense strand
gcgcaucagucuacguuuu

SEQ ID NO: 1964249 - RNA, 19 nt, Homo sapiens
  misc_RNA (1)...(19): siRNA sense strand
gaagacugacggcuacauc

SEQ ID NO: 1964250 - RNA, 19 nt, Homo sapiens
  misc_RNA (1)...(19): siRNA sense strand
ggaccacgccacagucauc

SEQ ID NO: 1964251 - RNA, 19 nt, Homo sapiens
  misc_RNA (1)...(19): siRNA sense strand
ccaaguacuggaucuaugu

SEQ ID NO: 1964252 - RNA, 19 nt, Homo sapiens
  misc_RNA (1)...(19): siRNA sense strand
ccuaucagacgaccaggua

SEQ ID NO: 1964253 - RNA, 19 nt, Homo sapiens
  misc_RNA (1)...(19): siRNA sense strand
caaguaccuguuccaguuu

SEQ ID NO: 1964254 - RNA, 19 nt, Homo sapiens
  misc_RNA (1)...(19): siRNA sense strand
gagccacucagcagcauga

SEQ ID NO: 1964255 - RNA, 19 nt, Homo sapiens
  misc_RNA (1)...(19): siRNA sense strand
gccaguuugugaaagagaa

SEQ ID NO: 1964256 - RNA, 19 nt, Homo sapiens
  misc_RNA (1)...(19): siRNA sense strand
cggagaccaugaucaagug

SEQ ID NO: 1964257 - RNA, 19 nt, Homo sapiens
  misc_RNA (1)...(19): siRNA sense strand
ggagcugucccggcaguuu

SEQ ID NO: 1964258 - RNA, 19 nt, Homo sapiens
  misc_RNA (1)...(19): siRNA sense strand
gaagaagaagaucgucaag

SEQ ID NO: 1964259 - RNA, 19 nt, Homo sapiens
  misc_RNA (1)...(19): siRNA sense strand
guuccuggcugauguuguc

SEQ ID NO: 1964260 - RNA, 19 nt, Homo sapiens
  misc_RNA (1)...(19): siRNA sense strand
aaagagaagcugcugaagu

SEQ ID NO: 1964261 - RNA, 19 nt, Homo sapiens
  misc_RNA (1)...(19): siRNA sense strand
gcugugggacugccucauu

SEQ ID NO: 1964262 - RNA, 19 nt, Homo sapiens
  misc_RNA (1)...(19): siRNA sense strand
gguccuaccuugacaugcu

SEQ ID NO: 1964263 - RNA, 19 nt, Homo sapiens
  misc_RNA (1)...(19): siRNA sense strand
ucaagcugguggcccugua

SEQ ID NO: 1964264 - RNA, 19 nt, Homo sapiens
  misc_RNA (1)...(19): siRNA sense strand
gagaucucgcacuccauua

SEQ ID NO: 1964265 - RNA, 19 nt, Homo sapiens
  misc_RNA (1)...(19): siRNA sense strand
ucaaccagcccaucgaugu

SEQ ID NO: 1964266 - RNA, 19 nt, Homo sapiens
  misc_RNA (1)...(19): siRNA sense strand
gggcagaagaagaagaaga

SEQ ID NO: 1964267 - RNA, 19 nt, Homo sapiens
  misc_RNA (1)...(19): siRNA sense strand
caaaugcagccgagagaca

SEQ ID NO: 1964268 - RNA, 19 nt, Homo sapiens
  misc_RNA (1)...(19): siRNA sense strand
uggcugauguugucgacuu

SEQ ID NO: 1964269 - RNA, 19 nt, Homo sapiens
  misc_RNA (1)...(19): siRNA sense strand
gcgucuuccuuagccauua

SEQ ID NO: 1964270 - RNA, 19 nt, Homo sapiens
  misc_RNA (1)...(19): siRNA sense strand
ucaucaacuucuucuucua

SEQ ID NO: 1964271 - RNA, 19 nt, Homo sapiens
  misc_RNA (1)...(19): siRNA sense strand
ggcagaagaagaagaagau

SEQ ID NO: 1964272 - RNA, 19 nt, Homo sapiens
  misc_RNA (1)...(19): siRNA sense strand
gcaaccugcugcccauggu

SEQ ID NO: 1964273 - RNA, 19 nt, Homo sapiens
  misc_RNA (1)...(19): siRNA sense strand
guacuggaucuaugugugu

SEQ ID NO: 1964274 - RNA, 19 nt, Homo sapiens
  misc_RNA (1)...(19): siRNA sense strand
gagcugucccggcaguuug

SEQ ID NO: 1964275 - RNA, 19 nt, Homo sapiens
  misc_RNA (1)...(19): siRNA sense strand
ucaugcagcucaccgacau

SEQ ID NO: 1964276 - RNA, 19 nt, Homo sapiens
  misc_RNA (1)...(19): siRNA sense strand
ccaagcucaucuuccucua

SEQ ID NO: 1964277 - RNA, 19 nt, Homo sapiens
  misc_RNA (1)...(19): siRNA sense strand
gaucucgcacuccauuaug

SEQ ID NO: 1964278 - RNA, 19 nt, Homo sapiens
  misc_RNA (1)...(19): siRNA sense strand
ggacccugccaacugguuu

SEQ ID NO: 1964279 - RNA, 19 nt, Homo sapiens
  misc_RNA (1)...(19): siRNA sense strand
uguaccagcucaagguugu

SEQ ID NO: 1964280 - RNA, 19 nt, Homo sapiens
  misc_RNA (1)...(19): siRNA sense strand
ggaccugcgucaucaucgu

SEQ ID NO: 1964281 - RNA, 19 nt, Homo sapiens
  misc_RNA (1)...(19): siRNA sense strand
uguguaagaugcuguacca

SEQ ID NO: 1964282 - RNA, 19 nt, Homo sapiens
  misc_RNA (1)...(19): siRNA sense strand
gcaccucggaccagucugu

SEQ ID NO: 1964283 - RNA, 19 nt, Homo sapiens
  misc_RNA (1)...(19): siRNA sense strand
cgacuucaucaucaucauu

SEQ ID NO: 1964284 - RNA, 19 nt, Homo sapiens
  misc_RNA (1)...(19): siRNA sense strand
gacagcgucugcuucuucu

SEQ ID NO: 1964285 - RNA, 19 nt, Homo sapiens
  misc_RNA (1)...(19): siRNA sense strand
gcuucuaccugcugcucuu

SEQ ID NO: 1964286 - RNA, 19 nt, Homo sapiens
  misc_RNA (1)...(19): siRNA sense strand
ggaguaugccaacgagaag

SEQ ID NO: 1964287 - RNA, 19 nt, Homo sapiens
  misc_RNA (1)...(19): siRNA sense strand
gacaucacccugcgcuuca

SEQ ID NO: 1964288 - RNA, 19 nt, Homo sapiens
  misc_RNA (1)...(19): siRNA sense strand
ucaugcugcugauccaguu

SEQ ID NO: 1964289 - RNA, 19 nt, Homo sapiens
  misc_RNA (1)...(19): siRNA sense strand
aagccgcucuggaggaaga

SEQ ID NO: 1964290 - RNA, 19 nt, Homo sapiens
  misc_RNA (1)...(19): siRNA sense strand
gcucauggcccuuuucuuc

SEQ ID NO: 1964291 - RNA, 19 nt, Homo sapiens
  misc_RNA (1)...(19): siRNA sense strand
cacgcuggcugcaggaguu

SEQ ID NO: 1964292 - RNA, 19 nt, Homo sapiens
  misc_RNA (1)...(19): siRNA sense strand
guacaacgucaccgucauc

SEQ ID NO: 1964293 - RNA, 19 nt, Homo sapiens
  misc_RNA (1)...(19): siRNA sense strand
ggaagugccuccuguauug

SEQ ID NO: 1964294 - RNA, 19 nt, Homo sapiens
  misc_RNA (1)...(19): siRNA sense strand
gaucagcaccuaugaguuc

SEQ ID NO: 1964295 - RNA, 19 nt, Homo sapiens
  misc_RNA (1)...(19): siRNA sense strand
gugguuaccucucucuuca

SEQ ID NO: 1964296 - RNA, 19 nt, Homo sapiens
  misc_RNA (1)...(19): siRNA sense strand
ucucagcccuguacugguu

SEQ ID NO: 1964297 - RNA, 19 nt, Homo sapiens
  misc_RNA (1)...(19): siRNA sense strand
ggagcugggugccuguguu

SEQ ID NO: 1964298 - RNA, 19 nt, Homo sapiens
  misc_RNA (1)...(19): siRNA sense strand
acuaugagcuggugaagag

SEQ ID NO: 1964299 - RNA, 19 nt, Homo sapiens
  misc_RNA (1)...(19): siRNA sense strand
gagccucuccuauaccaaa

SEQ ID NO: 1964300 - RNA, 19 nt, Homo sapiens
  misc_RNA (1)...(19): siRNA sense strand
ccacugcccuucgagaugu

SEQ ID NO: 1964301 - RNA, 19 nt, Homo sapiens
  misc_RNA (1)...(19): siRNA sense strand
gguuaccucucucuucaug

SEQ ID NO: 1964302 - RNA, 19 nt, Homo sapiens
  misc_RNA (1)...(19): siRNA sense strand
gucgagcccugaccucuga

SEQ ID NO: 1964303 - RNA, 19 nt, Homo sapiens
  misc_RNA (1)...(19): siRNA sense strand
uguacugguucaacuauga

SEQ ID NO: 1964304 - RNA, 19 nt, Homo sapiens
  misc_RNA (1)...(19): siRNA sense strand
gggcugugguuaccucucu

SEQ ID NO: 1964305 - RNA, 19 nt, Homo sapiens
  misc_RNA (1)...(19): siRNA sense strand
cuacuucacugccuaugac

SEQ ID NO: 1964306 - RNA, 19 nt, Homo sapiens
  misc_RNA (1)...(19): siRNA sense strand
gggcaccaagggacucuuu

SEQ ID NO: 1964307 - RNA, 19 nt, Homo sapiens
  misc_RNA (1)...(19): siRNA sense strand
uggaagugccuccuguauu

SEQ ID NO: 1964308 - RNA, 19 nt, Homo sapiens
  misc_RNA (1)...(19): siRNA sense strand
aggcucagcaugugucgua

SEQ ID NO: 1964309 - RNA, 19 nt, Homo sapiens
  misc_RNA (1)...(19): siRNA sense strand
agugcugacucuacccuuu

SEQ ID NO: 1964310 - RNA, 19 nt, Homo sapiens
  misc_RNA (1)...(19): siRNA sense strand
gagcugggugccuguguuc

SEQ ID NO: 1964311 - RNA, 19 nt, Homo sapiens
  misc_RNA (1)...(19): siRNA sense strand
cagcuaccgccaucuacuu

SEQ ID NO: 1964312 - RNA, 19 nt, Homo sapiens
  misc_RNA (1)...(19): siRNA sense strand
ccugaccucugaccucuac

SEQ ID NO: 1964313 - RNA, 19 nt, Homo sapiens
  misc_RNA (1)...(19): siRNA sense strand
cgauggaggcugugagagu

SEQ ID NO: 1964314 - RNA, 19 nt, Homo sapiens
  misc_RNA (1)...(19): siRNA sense strand
gaaccaggaccggcuucug

SEQ ID NO: 1964315 - RNA, 19 nt, Homo sapiens
  misc_RNA (1)...(19): siRNA sense strand
gugcugacucuacccuuug

SEQ ID NO: 1964316 - RNA, 19 nt, Homo sapiens
  misc_RNA (1)...(19): siRNA sense strand
ccauggaugccuucgugaa

SEQ ID NO: 1964317 - RNA, 19 nt, Homo sapiens
  misc_RNA (1)...(19): siRNA sense strand
gcaccaagggacucuuugc

SEQ ID NO: 1964318 - RNA, 19 nt, Homo sapiens
  misc_RNA (1)...(19): siRNA sense strand
gcccuguacugguucaacu

SEQ ID NO: 1964319 - RNA, 19 nt, Homo sapiens
  misc_RNA (1)...(19): siRNA sense strand
gaaaguagcuacagaugaa

SEQ ID NO: 1964320 - RNA, 19 nt, Homo sapiens
  misc_RNA (1)...(19): siRNA sense strand
ggaaagagacacuaagaaa

SEQ ID NO: 1964321 - RNA, 19 nt, Homo sapiens
  misc_RNA (1)...(19): siRNA sense strand
guuauacccugaagaauuu

SEQ ID NO: 1964322 - RNA, 19 nt, Homo sapiens
  misc_RNA (1)...(19): siRNA sense strand
gaaaacaucuccccaggua

SEQ ID NO: 1964323 - RNA, 19 nt, Homo sapiens
  misc_RNA (1)...(19): siRNA sense strand
caaacaaacgcacaaauug

SEQ ID NO: 1964324 - RNA, 19 nt, Homo sapiens
  misc_RNA (1)...(19): siRNA sense strand
gaugaaaggucugcugaga

SEQ ID NO: 1964325 - RNA, 19 nt, Homo sapiens
  misc_RNA (1)...(19): siRNA sense strand
aaaggaagccacagauaua

SEQ ID NO: 1964326 - RNA, 19 nt, Homo sapiens
  misc_RNA (1)...(19): siRNA sense strand
gcaaacacaagaagucaaa

SEQ ID NO: 1964327 - RNA, 19 nt, Homo sapiens
  misc_RNA (1)...(19): siRNA sense strand
cacaagaagucaaagaaau

SEQ ID NO: 1964328 - RNA, 19 nt, Homo sapiens
  misc_RNA (1)...(19): siRNA sense strand
ggaaaguagcuacagauga

SEQ ID NO: 1964329 - RNA, 19 nt, Homo sapiens
  misc_RNA (1)...(19): siRNA sense strand
ugaagaaagucaaagauac

SEQ ID NO: 1964330 - RNA, 19 nt, Homo sapiens
  misc_RNA (1)...(19): siRNA sense strand
gcagauuccucgagugagu

SEQ ID NO: 1964331 - RNA, 19 nt, Homo sapiens
  misc_RNA (1)...(19): siRNA sense strand
gagcucagaggaugacuaa

SEQ ID NO: 1964332 - RNA, 19 nt, Homo sapiens
  misc_RNA (1)...(19): siRNA sense strand
guagugaucagcaagauau

SEQ ID NO: 1964333 - RNA, 19 nt, Homo sapiens
  misc_RNA (1)...(19): siRNA sense strand
ucaaagaaaucccacaaaa

SEQ ID NO: 1964334 - RNA, 19 nt, Homo sapiens
  misc_RNA (1)...(19): siRNA sense strand
acaaacaaacgcacaaauu

SEQ ID NO: 1964335 - RNA, 19 nt, Homo sapiens
  misc_RNA (1)...(19): siRNA sense strand
gaggaaagagacacuaaga

SEQ ID NO: 1964336 - RNA, 19 nt, Homo sapiens
  misc_RNA (1)...(19): siRNA sense strand
gcuaaauccuggaauaaaa

SEQ ID NO: 1964337 - RNA, 19 nt, Homo sapiens
  misc_RNA (1)...(19): siRNA sense strand
ucacagugguuauaaagag

SEQ ID NO: 1964338 - RNA, 19 nt, Homo sapiens
  misc_RNA (1)...(19): siRNA sense strand
gaagaaagucaaagauacu

SEQ ID NO: 1964339 - RNA, 19 nt, Homo sapiens
  misc_RNA (1)...(19): siRNA sense strand
gaaaauaagagaacuggaa

SEQ ID NO: 1964340 - RNA, 19 nt, Homo sapiens
  misc_RNA (1)...(19): siRNA sense strand
aaggcuaaauccuggaaua

SEQ ID NO: 1964341 - RNA, 19 nt, Homo sapiens
  misc_RNA (1)...(19): siRNA sense strand
gaaagagacacuaagaaaa

SEQ ID NO: 1964342 - RNA, 19 nt, Homo sapiens
  misc_RNA (1)...(19): siRNA sense strand
gaaacagacaguagugauc

SEQ ID NO: 1964343 - RNA, 19 nt, Homo sapiens
  misc_RNA (1)...(19): siRNA sense strand
ggccaaagaaugaaauuuc

SEQ ID NO: 1964344 - RNA, 19 nt, Homo sapiens
  misc_RNA (1)...(19): siRNA sense strand
ggacaaacaaacgcacaaa

SEQ ID NO: 1964345 - RNA, 19 nt, Homo sapiens
  misc_RNA (1)...(19): siRNA sense strand
ugaggaaagugaggaaaga

SEQ ID NO: 1964346 - RNA, 19 nt, Homo sapiens
  misc_RNA (1)...(19): siRNA sense strand
aaagggaaacaaccacaua

SEQ ID NO: 1964347 - RNA, 19 nt, Homo sapiens
  misc_RNA (1)...(19): siRNA sense strand
ggaauaaaagguucuauga

SEQ ID NO: 1964348 - RNA, 19 nt, Homo sapiens
  misc_RNA (1)...(19): siRNA sense strand
gaagcaaacaugccagaca

SEQ ID NO: 1964349 - RNA, 19 nt, Homo sapiens
  misc_RNA (1)...(19): siRNA sense strand
cugaagaauuugaaacaga

SEQ ID NO: 1964350 - RNA, 19 nt, Homo sapiens
  misc_RNA (1)...(19): siRNA sense strand
agucaaagauacuauugga

SEQ ID NO: 1964351 - RNA, 19 nt, Homo sapiens
  misc_RNA (1)...(19): siRNA sense strand
ggaaacaaccacauaaacg

SEQ ID NO: 1964352 - RNA, 19 nt, Homo sapiens
  misc_RNA (1)...(19): siRNA sense strand
ggaagccacagauauaaca

SEQ ID NO: 1964353 - RNA, 19 nt, Homo sapiens
  misc_RNA (1)...(19): siRNA sense strand
ggacacuggaagaugauuu

SEQ ID NO: 1964354 - RNA, 19 nt, Homo sapiens
  misc_RNA (1)...(19): siRNA sense strand
gcaguucugaggaaaguga

SEQ ID NO: 1964355 - RNA, 19 nt, Homo sapiens
  misc_RNA (1)...(19): siRNA sense strand
acgcacaaauuggaaagua

SEQ ID NO: 1964356 - RNA, 19 nt, Homo sapiens
  misc_RNA (1)...(19): siRNA sense strand
cagcagauuccucgaguga

SEQ ID NO: 1964357 - RNA, 19 nt, Homo sapiens
  misc_RNA (1)...(19): siRNA sense strand
guucuaugauuaugaagca

SEQ ID NO: 1964358 - RNA, 19 nt, Homo sapiens
  misc_RNA (1)...(19): siRNA sense strand
acacuucacauucagauga

SEQ ID NO: 1964359 - RNA, 19 nt, Homo sapiens
  misc_RNA (1)...(19): siRNA sense strand
acacaagaagucaaagaaa

SEQ ID NO: 1964360 - RNA, 19 nt, Homo sapiens
  misc_RNA (1)...(19): siRNA sense strand
cagugguuauaaagaguua

SEQ ID NO: 1964361 - RNA, 19 nt, Homo sapiens
  misc_RNA (1)...(19): siRNA sense strand
gaaauacaggagaggacaa

SEQ ID NO: 1964362 - RNA, 19 nt, Homo sapiens
  misc_RNA (1)...(19): siRNA sense strand
gaauuugaaacagacagua

SEQ ID NO: 1964363 - RNA, 19 nt, Homo sapiens
  misc_RNA (1)...(19): siRNA sense strand
agaguuauacccugaagaa

SEQ ID NO: 1964364 - RNA, 19 nt, Homo sapiens
  misc_RNA (1)...(19): siRNA sense strand
gaugaagaaagucaaagau

SEQ ID NO: 1964365 - RNA, 19 nt, Homo sapiens
  misc_RNA (1)...(19): siRNA sense strand
ccacauaaacgcaagaaaa

SEQ ID NO: 1964366 - RNA, 19 nt, Homo sapiens
  misc_RNA (1)...(19): siRNA sense strand
aaacacaagaagucaaaga

SEQ ID NO: 1964367 - RNA, 19 nt, Homo sapiens
  misc_RNA (1)...(19): siRNA sense strand
gaaagugaggaaagagaca

SEQ ID NO: 1964368 - RNA, 19 nt, Homo sapiens
  misc_RNA (1)...(19): siRNA sense strand
gaaagggaaacaaccacau

SEQ ID NO: 1964369 - RNA, 19 nt, Homo sapiens
  misc_RNA (1)...(19): siRNA sense strand
gcaaacaugccagacagau

SEQ ID NO: 1964370 - RNA, 19 nt, Homo sapiens
  misc_RNA (1)...(19): siRNA sense strand
aaacaaacgcacaaauugg

SEQ ID NO: 1964371 - RNA, 19 nt, Homo sapiens
  misc_RNA (1)...(19): siRNA sense strand
agacaguagugaucagcaa

SEQ ID NO: 1964372 - RNA, 19 nt, Homo sapiens
  misc_RNA (1)...(19): siRNA sense strand
cugggacacuggaagauga

SEQ ID NO: 1964373 - RNA, 19 nt, Homo sapiens
  misc_RNA (1)...(19): siRNA sense strand
cagcaguucugaggaaagu

SEQ ID NO: 1964374 - RNA, 19 nt, Homo sapiens
  misc_RNA (1)...(19): siRNA sense strand
gggucacagugguuauaaa

SEQ ID NO: 1964375 - RNA, 19 nt, Homo sapiens
  misc_RNA (1)...(19): siRNA sense strand
caaacgcacaaauuggaaa

SEQ ID NO: 1964376 - RNA, 19 nt, Homo sapiens
  misc_RNA (1)...(19): siRNA sense strand
gggaaacaaccacauaaac

SEQ ID NO: 1964377 - RNA, 19 nt, Homo sapiens
  misc_RNA (1)...(19): siRNA sense strand
gauauuaccaacgggaaga

SEQ ID NO: 1964378 - RNA, 19 nt, Homo sapiens
  misc_RNA (1)...(19): siRNA sense strand
caaacaugccagacagaug

SEQ ID NO: 1964379 - RNA, 19 nt, Homo sapiens
  misc_RNA (1)...(19): siRNA sense strand
gacaaacaaacgcacaaau

SEQ ID NO: 1964380 - RNA, 19 nt, Homo sapiens
  misc_RNA (1)...(19): siRNA sense strand
gauucagcauccagcaguu

SEQ ID NO: 1964381 - RNA, 19 nt, Homo sapiens
  misc_RNA (1)...(19): siRNA sense strand
aaacagacaguagugauca

SEQ ID NO: 1964382 - RNA, 19 nt, Homo sapiens
  misc_RNA (1)...(19): siRNA sense strand
ggcuaaauccuggaauaaa

SEQ ID NO: 1964383 - RNA, 19 nt, Homo sapiens
  misc_RNA (1)...(19): siRNA sense strand
ggucacagugguuauaaag

SEQ ID NO: 1964384 - RNA, 19 nt, Homo sapiens
  misc_RNA (1)...(19): siRNA sense strand
aguuauacccugaagaauu

SEQ ID NO: 1964385 - RNA, 19 nt, Homo sapiens
  misc_RNA (1)...(19): siRNA sense strand
gugaggaaagagacacuaa

SEQ ID NO: 1964386 - RNA, 19 nt, Homo sapiens
  misc_RNA (1)...(19): siRNA sense strand
acaagaagucaaagaaauc

SEQ ID NO: 1964387 - RNA, 19 nt, Homo sapiens
  misc_RNA (1)...(19): siRNA sense strand
aaaccugcuuuauucuuag

SEQ ID NO: 1964388 - RNA, 19 nt, Homo sapiens
  misc_RNA (1)...(19): siRNA sense strand
ucuuagaggcagaaaguaa

SEQ ID NO: 1964389 - RNA, 19 nt, Homo sapiens
  misc_RNA (1)...(19): siRNA sense strand
caagccggaugcgcaguga

SEQ ID NO: 1964390 - RNA, 19 nt, Homo sapiens
  misc_RNA (1)...(19): siRNA sense strand
gaaacuggggcuucuggua

SEQ ID NO: 1964391 - RNA, 19 nt, Homo sapiens
  misc_RNA (1)...(19): siRNA sense strand
aaggaagccacagauauaa

SEQ ID NO: 1964392 - RNA, 19 nt, Homo sapiens
  misc_RNA (1)...(19): siRNA sense strand
aagggaaacaaccacauaa

SEQ ID NO: 1964393 - RNA, 19 nt, Homo sapiens
  misc_RNA (1)...(19): siRNA sense strand
ugaugaagaaagucaaaga

SEQ ID NO: 1964394 - RNA, 19 nt, Homo sapiens
  misc_RNA (1)...(19): siRNA sense strand
gcagugaugguuuugauga

SEQ ID NO: 1964395 - RNA, 19 nt, Homo sapiens
  misc_RNA (1)...(19): siRNA sense strand
ugaaacagacaguagugau

SEQ ID NO: 1964396 - RNA, 19 nt, Homo sapiens
  misc_RNA (1)...(19): siRNA sense strand
guacaaggaaagggaaaca

SEQ ID NO: 1964397 - RNA, 19 nt, Homo sapiens
  misc_RNA (1)...(19): siRNA sense strand
acagauauaacagcagauu

SEQ ID NO: 1964398 - RNA, 19 nt, Homo sapiens
  misc_RNA (1)...(19): siRNA sense strand
aaagaguuauacccugaag

SEQ ID NO: 1964399 - RNA, 19 nt, Homo sapiens
  misc_RNA (1)...(19): siRNA sense strand
uaacacuucacauucagau

SEQ ID NO: 1964400 - RNA, 19 nt, Homo sapiens
  misc_RNA (1)...(19): siRNA sense strand
gucaaagaaaucccacaaa

SEQ ID NO: 1964401 - RNA, 19 nt, Homo sapiens
  misc_RNA (1)...(19): siRNA sense strand
aaacaucuccccagguaaa

SEQ ID NO: 1964402 - RNA, 19 nt, Homo sapiens
  misc_RNA (1)...(19): siRNA sense strand
uacaggagaggacaaacaa

SEQ ID NO: 1964403 - RNA, 19 nt, Homo sapiens
  misc_RNA (1)...(19): siRNA sense strand
uguagccaacaaugaaaua

SEQ ID NO: 1964404 - RNA, 19 nt, Homo sapiens
  misc_RNA (1)...(19): siRNA sense strand
gggcuucugguacaaggaa

SEQ ID NO: 1964405 - RNA, 19 nt, Homo sapiens
  misc_RNA (1)...(19): siRNA sense strand
gaggccaaagaaugaaauu

SEQ ID NO: 1964406 - RNA, 19 nt, Homo sapiens
  misc_RNA (1)...(19): siRNA sense strand
ggaggccaaagaaugaaau

SEQ ID NO: 1964407 - RNA, 19 nt, Homo sapiens
  misc_RNA (1)...(19): siRNA sense strand
gaaucccgcaaacacaaga

SEQ ID NO: 1964408 - RNA, 19 nt, Homo sapiens
  misc_RNA (1)...(19): siRNA sense strand
uaaagaguuauacccugaa

SEQ ID NO: 1964409 - RNA, 19 nt, Homo sapiens
  misc_RNA (1)...(19): siRNA sense strand
aacaaacgcacaaauugga

SEQ ID NO: 1964410 - RNA, 19 nt, Homo sapiens
  misc_RNA (1)...(19): siRNA sense strand
gaucagcaagauauuacca

SEQ ID NO: 1964411 - RNA, 19 nt, Homo sapiens
  misc_RNA (1)...(19): siRNA sense strand
cacagugguuauaaagagu

SEQ ID NO: 1964412 - RNA, 19 nt, Homo sapiens
  misc_RNA (1)...(19): siRNA sense strand
gaagaauuugaaacagaca

SEQ ID NO: 1964413 - RNA, 19 nt, Homo sapiens
  misc_RNA (1)...(19): siRNA sense strand
agugaucagcaagauauua

SEQ ID NO: 1964414 - RNA, 19 nt, Homo sapiens
  misc_RNA (1)...(19): siRNA sense strand
aaauacaggagaggacaaa

SEQ ID NO: 1964415 - RNA, 19 nt, Homo sapiens
  misc_RNA (1)...(19): siRNA sense strand
ccucuguagccaacaauga

SEQ ID NO: 1964416 - RNA, 19 nt, Homo sapiens
  misc_RNA (1)...(19): siRNA sense strand
aaaaggaagccacagauau

SEQ ID NO: 1964417 - RNA, 19 nt, Homo sapiens
  misc_RNA (1)...(19): siRNA sense strand
ggaugcgcagugaugguuu

SEQ ID NO: 1964418 - RNA, 19 nt, Homo sapiens
  misc_RNA (1)...(19): siRNA sense strand
caggagaggacaaacaaac

SEQ ID NO: 1964419 - RNA, 19 nt, Homo sapiens
  misc_RNA (1)...(19): siRNA sense strand
gcaauuagcugcccagaug

SEQ ID NO: 1964420 - RNA, 19 nt, Homo sapiens
  misc_RNA (1)...(19): siRNA sense strand
aaagagaggugcuguuuga

SEQ ID NO: 1964421 - RNA, 19 nt, Homo sapiens
  misc_RNA (1)...(19): siRNA sense strand
gaucaaagaaggauuagaa

SEQ ID NO: 1964422 - RNA, 19 nt, Homo sapiens
  misc_RNA (1)...(19): siRNA sense strand
gaccagugcugcuuucaaa

SEQ ID NO: 1964423 - RNA, 19 nt, Homo sapiens
  misc_RNA (1)...(19): siRNA sense strand
gguugcagcugaaauuaug

SEQ ID NO: 1964424 - RNA, 19 nt, Homo sapiens
  misc_RNA (1)...(19): siRNA sense strand
ggacgaugauuuccuucug

SEQ ID NO: 1964425 - RNA, 19 nt, Homo sapiens
  misc_RNA (1)...(19): siRNA sense strand
gacgaugauuuccuucuga

SEQ ID NO: 1964426 - RNA, 19 nt, Homo sapiens
  misc_RNA (1)...(19): siRNA sense strand
cagcugaaauuaugcaaag

SEQ ID NO: 1964427 - RNA, 19 nt, Homo sapiens
  misc_RNA (1)...(19): siRNA sense strand
gaaagagaggugcuguuug

SEQ ID NO: 1964428 - RNA, 19 nt, Homo sapiens
  misc_RNA (1)...(19): siRNA sense strand
ugaaagagaggugcuguuu

SEQ ID NO: 1964429 - RNA, 19 nt, Homo sapiens
  misc_RNA (1)...(19): siRNA sense strand
gcgcgcagaugaugugcaa

SEQ ID NO: 1964430 - RNA, 19 nt, Homo sapiens
  misc_RNA (1)...(19): siRNA sense strand
gagcagaugacaaccauag

SEQ ID NO: 1964431 - RNA, 19 nt, Homo sapiens
  misc_RNA (1)...(19): siRNA sense strand
ggagaccagugcugcuuuc

SEQ ID NO: 1964432 - RNA, 19 nt, Homo sapiens
  misc_RNA (1)...(19): siRNA sense strand
gugcaaagccugccguaug

SEQ ID NO: 1964433 - RNA, 19 nt, Homo sapiens
  misc_RNA (1)...(19): siRNA sense strand
ggauuagaaaccgcaauua

SEQ ID NO: 1964434 - RNA, 19 nt, Homo sapiens
  misc_RNA (1)...(19): siRNA sense strand
uggagucucuggacgauga

SEQ ID NO: 1964435 - RNA, 19 nt, Homo sapiens
  misc_RNA (1)...(19): siRNA sense strand
caaugcaucuucuguacuc

SEQ ID NO: 1964436 - RNA, 19 nt, Homo sapiens
  misc_RNA (1)...(19): siRNA sense strand
gauuugggcugcugcucuu

SEQ ID NO: 1964437 - RNA, 19 nt, Homo sapiens
  misc_RNA (1)...(19): siRNA sense strand
gauuagaaaccgcaauuag

SEQ ID NO: 1964438 - RNA, 19 nt, Homo sapiens
  misc_RNA (1)...(19): siRNA sense strand
gccacucccuuuguacuuu

SEQ ID NO: 1964439 - RNA, 19 nt, Homo sapiens
  misc_RNA (1)...(19): siRNA sense strand
gccaaugcaucuucuguac

SEQ ID NO: 1964440 - RNA, 19 nt, Homo sapiens
  misc_RNA (1)...(19): siRNA sense strand
gcgcagaugaugugcaaga

SEQ ID NO: 1964441 - RNA, 19 nt, Homo sapiens
  misc_RNA (1)...(19): siRNA sense strand
cagaugaugugcaagaacu

SEQ ID NO: 1964442 - RNA, 19 nt, Homo sapiens
  misc_RNA (1)...(19): siRNA sense strand
agaacgagauugagugcau

SEQ ID NO: 1964443 - RNA, 19 nt, Homo sapiens
  misc_RNA (1)...(19): siRNA sense strand
gaugcugccugcccuaaac

SEQ ID NO: 1964444 - RNA, 19 nt, Homo sapiens
  misc_RNA (1)...(19): siRNA sense strand
ccacucccuuuguacuuug

SEQ ID NO: 1964445 - RNA, 19 nt, Homo sapiens
  misc_RNA (1)...(19): siRNA sense strand
gaugauuuccuucugauac

SEQ ID NO: 1964446 - RNA, 19 nt, Homo sapiens
  misc_RNA (1)...(19): siRNA sense strand
gguacugccuggagucucu

SEQ ID NO: 1964447 - RNA, 19 nt, Homo sapiens
  misc_RNA (1)...(19): siRNA sense strand
caaagaaggauuagaaacc

SEQ ID NO: 1964448 - RNA, 19 nt, Homo sapiens
  misc_RNA (1)...(19): siRNA sense strand
ccuggccacucccuuugua

SEQ ID NO: 1964449 - RNA, 19 nt, Homo sapiens
  misc_RNA (1)...(19): siRNA sense strand
ggccucaccuuuccuacuc

SEQ ID NO: 1964450 - RNA, 19 nt, Homo sapiens
  misc_RNA (1)...(19): siRNA sense strand
caugguugcagcugaaauu

SEQ ID NO: 1964451 - RNA, 19 nt, Homo sapiens
  misc_RNA (1)...(19): siRNA sense strand
cuacaucgagcgagacgaa

SEQ ID NO: 1964452 - RNA, 19 nt, Homo sapiens
  misc_RNA (1)...(19): siRNA sense strand
caaagccugccguauggaa

SEQ ID NO: 1964453 - RNA, 19 nt, Homo sapiens
  misc_RNA (1)...(19): siRNA sense strand
cuugaucaaagaaggauua

SEQ ID NO: 1964454 - RNA, 19 nt, Homo sapiens
  misc_RNA (1)...(19): siRNA sense strand
gcagcugaaauuaugcaaa

SEQ ID NO: 1964455 - RNA, 19 nt, Homo sapiens
  misc_RNA (1)...(19): siRNA sense strand
gcugaaauuaugcaaagau

SEQ ID NO: 1964456 - RNA, 19 nt, Homo sapiens
  misc_RNA (1)...(19): siRNA sense strand
ugcaaagccugccguaugg

SEQ ID NO: 1964457 - RNA, 19 nt, Homo sapiens
  misc_RNA (1)...(19): siRNA sense strand
uacaggagaacgagauuga

SEQ ID NO: 1964458 - RNA, 19 nt, Homo sapiens
  misc_RNA (1)...(19): siRNA sense strand
ucgacccgcuggugucuug

SEQ ID NO: 1964459 - RNA, 19 nt, Homo sapiens
  misc_RNA (1)...(19): siRNA sense strand
ucuggacgaugauuuccuu

SEQ ID NO: 1964460 - RNA, 19 nt, Homo sapiens
  misc_RNA (1)...(19): siRNA sense strand
gggagaccagugcugcuuu

SEQ ID NO: 1964461 - RNA, 19 nt, Homo sapiens
  misc_RNA (1)...(19): siRNA sense strand
cgagauugagugcaugguu

SEQ ID NO: 1964462 - RNA, 19 nt, Homo sapiens
  misc_RNA (1)...(19): siRNA sense strand
cuucugauacacuacgaua

SEQ ID NO: 1964463 - RNA, 19 nt, Homo sapiens
  misc_RNA (1)...(19): siRNA sense strand
uuugaucccugucggacuu

SEQ ID NO: 1964464 - RNA, 19 nt, Homo sapiens
  misc_RNA (1)...(19): siRNA sense strand
caagugcaaagucuacauc

SEQ ID NO: 1964465 - RNA, 19 nt, Homo sapiens
  misc_RNA (1)...(19): siRNA sense strand
uggagcagaugacaaccau

SEQ ID NO: 1964466 - RNA, 19 nt, Homo sapiens
  misc_RNA (1)...(19): siRNA sense strand
ucaaagaaggauuagaaac

SEQ ID NO: 1964467 - RNA, 19 nt, Homo sapiens
  misc_RNA (1)...(19): siRNA sense strand
ccggagaccaugccgauca

SEQ ID NO: 1964468 - RNA, 19 nt, Homo sapiens
  misc_RNA (1)...(19): siRNA sense strand
cgaugauuuccuucugaua

SEQ ID NO: 1964469 - RNA, 19 nt, Homo sapiens
  misc_RNA (1)...(19): siRNA sense strand
caggagaacgagauugagu

SEQ ID NO: 1964470 - RNA, 19 nt, Homo sapiens
  misc_RNA (1)...(19): siRNA sense strand
ggaauaauaugccgaagga

SEQ ID NO: 1964471 - RNA, 19 nt, Homo sapiens
  misc_RNA (1)...(19): siRNA sense strand
gaaacucucugggaaauug

SEQ ID NO: 1964472 - RNA, 19 nt, Homo sapiens
  misc_RNA (1)...(19): siRNA sense strand
gggaaagacuacuauuauu

SEQ ID NO: 1964473 - RNA, 19 nt, Homo sapiens
  misc_RNA (1)...(19): siRNA sense strand
ggaaagacuacuauuauuc

SEQ ID NO: 1964474 - RNA, 19 nt, Homo sapiens
  misc_RNA (1)...(19): siRNA sense strand
gaaaugagacagaagaucu

SEQ ID NO: 1964475 - RNA, 19 nt, Homo sapiens
  misc_RNA (1)...(19): siRNA sense strand
aaccuuagcuuuggaauau

SEQ ID NO: 1964476 - RNA, 19 nt, Homo sapiens
  misc_RNA (1)...(19): siRNA sense strand
guagacaaagugauaauga

SEQ ID NO: 1964477 - RNA, 19 nt, Homo sapiens
  misc_RNA (1)...(19): siRNA sense strand
gagcugaaauugcagaaaa

SEQ ID NO: 1964478 - RNA, 19 nt, Homo sapiens
  misc_RNA (1)...(19): siRNA sense strand
caaaagauaucgcucacuu

SEQ ID NO: 1964479 - RNA, 19 nt, Homo sapiens
  misc_RNA (1)...(19): siRNA sense strand
ccauguagacaaagugaua

SEQ ID NO: 1964480 - RNA, 19 nt, Homo sapiens
  misc_RNA (1)...(19): siRNA sense strand
gaagaucuggaauaauaug

SEQ ID NO: 1964481 - RNA, 19 nt, Homo sapiens
  misc_RNA (1)...(19): siRNA sense strand
gggaauuaauggaagugaa

SEQ ID NO: 1964482 - RNA, 19 nt, Homo sapiens
  misc_RNA (1)...(19): siRNA sense strand
gaaccucuuuauuggacuu

SEQ ID NO: 1964483 - RNA, 19 nt, Homo sapiens
  misc_RNA (1)...(19): siRNA sense strand
ugauggagcugaaauugca

SEQ ID NO: 1964484 - RNA, 19 nt, Homo sapiens
  misc_RNA (1)...(19): siRNA sense strand
gugaaacucucugggaaau

SEQ ID NO: 1964485 - RNA, 19 nt, Homo sapiens
  misc_RNA (1)...(19): siRNA sense strand
caaccuuagcuuuggaaua

SEQ ID NO: 1964486 - RNA, 19 nt, Homo sapiens
  misc_RNA (1)...(19): siRNA sense strand
ggaauuaauggaagugaag

SEQ ID NO: 1964487 - RNA, 19 nt, Homo sapiens
  misc_RNA (1)...(19): siRNA sense strand
ugaaggugauggagcugaa

SEQ ID NO: 1964488 - RNA, 19 nt, Homo sapiens
  misc_RNA (1)...(19): siRNA sense strand
gaaagacaaaugcuaaagc

SEQ ID NO: 1964489 - RNA, 19 nt, Homo sapiens
  misc_RNA (1)...(19): siRNA sense strand
gggaaagacaaaugcuaaa

SEQ ID NO: 1964490 - RNA, 19 nt, Homo sapiens
  misc_RNA (1)...(19): siRNA sense strand
ggaaagacaaaugcuaaag

SEQ ID NO: 1964491 - RNA, 19 nt, Homo sapiens
  misc_RNA (1)...(19): siRNA sense strand
uaauggaagugaaggugau

SEQ ID NO: 1964492 - RNA, 19 nt, Homo sapiens
  misc_RNA (1)...(19): siRNA sense strand
uuaaucagcauacccauca

SEQ ID NO: 1964493 - RNA, 19 nt, Homo sapiens
  misc_RNA (1)...(19): siRNA sense strand
ugggaaagacaaaugcuaa

SEQ ID NO: 1964494 - RNA, 19 nt, Homo sapiens
  misc_RNA (1)...(19): siRNA sense strand
uaaugaaacugggaaagac

SEQ ID NO: 1964495 - RNA, 19 nt, Homo sapiens
  misc_RNA (1)...(19): siRNA sense strand
ggugauggagcugaaauug

SEQ ID NO: 1964496 - RNA, 19 nt, Homo sapiens
  misc_RNA (1)...(19): siRNA sense strand
aaacugggaaagacaaaug

SEQ ID NO: 1964497 - RNA, 19 nt, Homo sapiens
  misc_RNA (1)...(19): siRNA sense strand
ugcaaaagcugaaguggaa

SEQ ID NO: 1964498 - RNA, 19 nt, Homo sapiens
  misc_RNA (1)...(19): siRNA sense strand
ggggaaagacuacuauuau

SEQ ID NO: 1964499 - RNA, 19 nt, Homo sapiens
  misc_RNA (1)...(19): siRNA sense strand
gcacaacacaccaaaagau

SEQ ID NO: 1964500 - RNA, 19 nt, Homo sapiens
  misc_RNA (1)...(19): siRNA sense strand
uuacggacguuuucucuug

SEQ ID NO: 1964501 - RNA, 19 nt, Homo sapiens
  misc_RNA (1)...(19): siRNA sense strand
gaaacugggaaagacaaau

SEQ ID NO: 1964502 - RNA, 19 nt, Homo sapiens
  misc_RNA (1)...(19): siRNA sense strand
gaaggugauggagcugaaa

SEQ ID NO: 1964503 - RNA, 19 nt, Homo sapiens
  misc_RNA (1)...(19): siRNA sense strand
caaaaccaaccuuagcuuu

SEQ ID NO: 1964504 - RNA, 19 nt, Homo sapiens
  misc_RNA (1)...(19): siRNA sense strand
auaauaugccgaaggauca

SEQ ID NO: 1964505 - RNA, 19 nt, Homo sapiens
  misc_RNA (1)...(19): siRNA sense strand
aaagccauguagacaaagu

SEQ ID NO: 1964506 - RNA, 19 nt, Homo sapiens
  misc_RNA (1)...(19): siRNA sense strand
auaaugaaacugggaaaga

SEQ ID NO: 1964507 - RNA, 19 nt, Homo sapiens
  misc_RNA (1)...(19): siRNA sense strand
gacaaagugauaaugaaac

SEQ ID NO: 1964508 - RNA, 19 nt, Homo sapiens
  misc_RNA (1)...(19): siRNA sense strand
gauaaugaaacugggaaag

SEQ ID NO: 1964509 - RNA, 19 nt, Homo sapiens
  misc_RNA (1)...(19): siRNA sense strand
ccuuagcuuuggaauauac

SEQ ID NO: 1964510 - RNA, 19 nt, Homo sapiens
  misc_RNA (1)...(19): siRNA sense strand
ggagcugaaauugcagaaa

SEQ ID NO: 1964511 - RNA, 19 nt, Homo sapiens
  misc_RNA (1)...(19): siRNA sense strand
ccucuuuauuggacuuaau

SEQ ID NO: 1964512 - RNA, 19 nt, Homo sapiens
  misc_RNA (1)...(19): siRNA sense strand
uuucuucauuggcaguaaa

SEQ ID NO: 1964513 - RNA, 19 nt, Homo sapiens
  misc_RNA (1)...(19): siRNA sense strand
ugaaacugggaaagacaaa

SEQ ID NO: 1964514 - RNA, 19 nt, Homo sapiens
  misc_RNA (1)...(19): siRNA sense strand
cauguagacaaagugauaa

SEQ ID NO: 1964515 - RNA, 19 nt, Homo sapiens
  misc_RNA (1)...(19): siRNA sense strand
ggaauaauaugccgaagga

SEQ ID NO: 1964516 - RNA, 19 nt, Homo sapiens
  misc_RNA (1)...(19): siRNA sense strand
gaaacucucugggaaauug

SEQ ID NO: 1964517 - RNA, 19 nt, Homo sapiens
  misc_RNA (1)...(19): siRNA sense strand
gggaaagacuacuauuauu

SEQ ID NO: 1964518 - RNA, 19 nt, Homo sapiens
  misc_RNA (1)...(19): siRNA sense strand
ggaaagacuacuauuauuc

SEQ ID NO: 1964519 - RNA, 19 nt, Homo sapiens
  misc_RNA (1)...(19): siRNA sense strand
gaaaugagacagaagaucu

SEQ ID NO: 1964520 - RNA, 19 nt, Homo sapiens
  misc_RNA (1)...(19): siRNA sense strand
aaccuuagcuuuggaauau

SEQ ID NO: 1964521 - RNA, 19 nt, Homo sapiens
  misc_RNA (1)...(19): siRNA sense strand
guagacaaagugauaauga

SEQ ID NO: 1964522 - RNA, 19 nt, Homo sapiens
  misc_RNA (1)...(19): siRNA sense strand
gagcugaaauugcagaaaa

SEQ ID NO: 1964523 - RNA, 19 nt, Homo sapiens
  misc_RNA (1)...(19): siRNA sense strand
caaaagauaucgcucacuu

SEQ ID NO: 1964524 - RNA, 19 nt, Homo sapiens
  misc_RNA (1)...(19): siRNA sense strand
ccauguagacaaagugaua

SEQ ID NO: 1964525 - RNA, 19 nt, Homo sapiens
  misc_RNA (1)...(19): siRNA sense strand
gaagaucuggaauaauaug

SEQ ID NO: 1964526 - RNA, 19 nt, Homo sapiens
  misc_RNA (1)...(19): siRNA sense strand
gggaauuaauggaagugaa

SEQ ID NO: 1964527 - RNA, 19 nt, Homo sapiens
  misc_RNA (1)...(19): siRNA sense strand
gaaccucuuuauuggacuu

SEQ ID NO: 1964528 - RNA, 19 nt, Homo sapiens
  misc_RNA (1)...(19): siRNA sense strand
ugauggagcugaaauugca

SEQ ID NO: 1964529 - RNA, 19 nt, Homo sapiens
  misc_RNA (1)...(19): siRNA sense strand
gugaaacucucugggaaau

SEQ ID NO: 1964530 - RNA, 19 nt, Homo sapiens
  misc_RNA (1)...(19): siRNA sense strand
caaccuuagcuuuggaaua

SEQ ID NO: 1964531 - RNA, 19 nt, Homo sapiens
  misc_RNA (1)...(19): siRNA sense strand
ggaauuaauggaagugaag

SEQ ID NO: 1964532 - RNA, 19 nt, Homo sapiens
  misc_RNA (1)...(19): siRNA sense strand
ugaaggugauggagcugaa

SEQ ID NO: 1964533 - RNA, 19 nt, Homo sapiens
  misc_RNA (1)...(19): siRNA sense strand
gaaagacaaaugcuaaagc

SEQ ID NO: 1964534 - RNA, 19 nt, Homo sapiens
  misc_RNA (1)...(19): siRNA sense strand
gggaaagacaaaugcuaaa

SEQ ID NO: 1964535 - RNA, 19 nt, Homo sapiens
  misc_RNA (1)...(19): siRNA sense strand
ggaaagacaaaugcuaaag

SEQ ID NO: 1964536 - RNA, 19 nt, Homo sapiens
  misc_RNA (1)...(19): siRNA sense strand
uaauggaagugaaggugau

SEQ ID NO: 1964537 - RNA, 19 nt, Homo sapiens
  misc_RNA (1)...(19): siRNA sense strand
uuaaucagcauacccauca

SEQ ID NO: 1964538 - RNA, 19 nt, Homo sapiens
  misc_RNA (1)...(19): siRNA sense strand
ugggaaagacaaaugcuaa

SEQ ID NO: 1964539 - RNA, 19 nt, Homo sapiens
  misc_RNA (1)...(19): siRNA sense strand
uaaugaaacugggaaagac

SEQ ID NO: 1964540 - RNA, 19 nt, Homo sapiens
  misc_RNA (1)...(19): siRNA sense strand
ggugauggagcugaaauug

SEQ ID NO: 1964541 - RNA, 19 nt, Homo sapiens
  misc_RNA (1)...(19): siRNA sense strand
aaacugggaaagacaaaug

SEQ ID NO: 1964542 - RNA, 19 nt, Homo sapiens
  misc_RNA (1)...(19): siRNA sense strand
ugcaaaagcugaaguggaa

SEQ ID NO: 1964543 - RNA, 19 nt, Homo sapiens
  misc_RNA (1)...(19): siRNA sense strand
ggggaaagacuacuauuau

SEQ ID NO: 1964544 - RNA, 19 nt, Homo sapiens
  misc_RNA (1)...(19): siRNA sense strand
gcacaacacaccaaaagau

SEQ ID NO: 1964545 - RNA, 19 nt, Homo sapiens
  misc_RNA (1)...(19): siRNA sense strand
uuacggacguuuucucuug

SEQ ID NO: 1964546 - RNA, 19 nt, Homo sapiens
  misc_RNA (1)...(19): siRNA sense strand
gaaacugggaaagacaaau

SEQ ID NO: 1964547 - RNA, 19 nt, Homo sapiens
  misc_RNA (1)...(19): siRNA sense strand
gaaggugauggagcugaaa

SEQ ID NO: 1964548 - RNA, 19 nt, Homo sapiens
  misc_RNA (1)...(19): siRNA sense strand
caaaaccaaccuuagcuuu

SEQ ID NO: 1964549 - RNA, 19 nt, Homo sapiens
  misc_RNA (1)...(19): siRNA sense strand
auaauaugccgaaggauca

SEQ ID NO: 1964550 - RNA, 19 nt, Homo sapiens
  misc_RNA (1)...(19): siRNA sense strand
aaagccauguagacaaagu

SEQ ID NO: 1964551 - RNA, 19 nt, Homo sapiens
  misc_RNA (1)...(19): siRNA sense strand
auaaugaaacugggaaaga

SEQ ID NO: 1964552 - RNA, 19 nt, Homo sapiens
  misc_RNA (1)...(19): siRNA sense strand
gacaaagugauaaugaaac

SEQ ID NO: 1964553 - RNA, 19 nt, Homo sapiens
  misc_RNA (1)...(19): siRNA sense strand
gauaaugaaacugggaaag

SEQ ID NO: 1964554 - RNA, 19 nt, Homo sapiens
  misc_RNA (1)...(19): siRNA sense strand
ccuuagcuuuggaauauac

SEQ ID NO: 1964555 - RNA, 19 nt, Homo sapiens
  misc_RNA (1)...(19): siRNA sense strand
ggagcugaaauugcagaaa

SEQ ID NO: 1964556 - RNA, 19 nt, Homo sapiens
  misc_RNA (1)...(19): siRNA sense strand
ccucuuuauuggacuuaau

SEQ ID NO: 1964557 - RNA, 19 nt, Homo sapiens
  misc_RNA (1)...(19): siRNA sense strand
uuucuucauuggcaguaaa

SEQ ID NO: 1964558 - RNA, 19 nt, Homo sapiens
  misc_RNA (1)...(19): siRNA sense strand
ugaaacugggaaagacaaa

SEQ ID NO: 1964559 - RNA, 19 nt, Homo sapiens
  misc_RNA (1)...(19): siRNA sense strand
cauguagacaaagugauaa

SEQ ID NO: 1964560 - RNA, 19 nt, Homo sapiens
  misc_RNA (1)...(19): siRNA sense strand
gacauacgcugacuacuua

SEQ ID NO: 1964561 - RNA, 19 nt, Homo sapiens
  misc_RNA (1)...(19): siRNA sense strand
uaacagaggcucagaagaa

SEQ ID NO: 1964562 - RNA, 19 nt, Homo sapiens
  misc_RNA (1)...(19): siRNA sense strand
uggaagaccuugugauuga

SEQ ID NO: 1964563 - RNA, 19 nt, Homo sapiens
  misc_RNA (1)...(19): siRNA sense strand
ggacauacgcugacuacuu

SEQ ID NO: 1964564 - RNA, 19 nt, Homo sapiens
  misc_RNA (1)...(19): siRNA sense strand
cacccuggcugcuaaagua

SEQ ID NO: 1964565 - RNA, 19 nt, Homo sapiens
  misc_RNA (1)...(19): siRNA sense strand
cgagggagcgccaagauuu

SEQ ID NO: 1964566 - RNA, 19 nt, Homo sapiens
  misc_RNA (1)...(19): siRNA sense strand
uaaaguguaucccauaugc

SEQ ID NO: 1964567 - RNA, 19 nt, Homo sapiens
  misc_RNA (1)...(19): siRNA sense strand
cagaggcucagaagaauaa

SEQ ID NO: 1964568 - RNA, 19 nt, Homo sapiens
  misc_RNA (1)...(19): siRNA sense strand
gaaucuuccuccacuaaca

SEQ ID NO: 1964569 - RNA, 19 nt, Homo sapiens
  misc_RNA (1)...(19): siRNA sense strand
gcuggaagaccuugugauu

SEQ ID NO: 1964570 - RNA, 19 nt, Homo sapiens
  misc_RNA (1)...(19): siRNA sense strand
gcagaaccaggagcaauuu

SEQ ID NO: 1964571 - RNA, 19 nt, Homo sapiens
  misc_RNA (1)...(19): siRNA sense strand
ucacaguguuugcuuaugg

SEQ ID NO: 1964572 - RNA, 19 nt, Homo sapiens
  misc_RNA (1)...(19): siRNA sense strand
gcucuugcccugcguaaug

SEQ ID NO: 1964573 - RNA, 19 nt, Homo sapiens
  misc_RNA (1)...(19): siRNA sense strand
cugcuaaaguaaaguguau

SEQ ID NO: 1964574 - RNA, 19 nt, Homo sapiens
  misc_RNA (1)...(19): siRNA sense strand
uaucccauaugcaguguug

SEQ ID NO: 1964575 - RNA, 19 nt, Homo sapiens
  misc_RNA (1)...(19): siRNA sense strand
ggcagaaccaggagcaauu

SEQ ID NO: 1964576 - RNA, 19 nt, Homo sapiens
  misc_RNA (1)...(19): siRNA sense strand
ggugagccgugccaaccaa

SEQ ID NO: 1964577 - RNA, 19 nt, Homo sapiens
  misc_RNA (1)...(19): siRNA sense strand
gaaccaggagcaauuucug

SEQ ID NO: 1964578 - RNA, 19 nt, Homo sapiens
  misc_RNA (1)...(19): siRNA sense strand
aguaaaguguaucccauau

SEQ ID NO: 1964579 - RNA, 19 nt, Homo sapiens
  misc_RNA (1)...(19): siRNA sense strand
gagggagcgccaagauuug

SEQ ID NO: 1964580 - RNA, 19 nt, Homo sapiens
  misc_RNA (1)...(19): siRNA sense strand
gcucacaguguuugcuuau

SEQ ID NO: 1964581 - RNA, 19 nt, Homo sapiens
  misc_RNA (1)...(19): siRNA sense strand
guaaaguguaucccauaug

SEQ ID NO: 1964582 - RNA, 19 nt, Homo sapiens
  misc_RNA (1)...(19): siRNA sense strand
agcagcagauugagaguga

SEQ ID NO: 1964583 - RNA, 19 nt, Homo sapiens
  misc_RNA (1)...(19): siRNA sense strand
gagagcuggcugagaguga

SEQ ID NO: 1964584 - RNA, 19 nt, Homo sapiens
  misc_RNA (1)...(19): siRNA sense strand
gcagauugagagugagguu

SEQ ID NO: 1964585 - RNA, 19 nt, Homo sapiens
  misc_RNA (1)...(19): siRNA sense strand
gccugaagcagcagauuga

SEQ ID NO: 1964586 - RNA, 19 nt, Homo sapiens
  misc_RNA (1)...(19): siRNA sense strand
ggaagaccuugugauugag

SEQ ID NO: 1964587 - RNA, 19 nt, Homo sapiens
  misc_RNA (1)...(19): siRNA sense strand
cccgaacccugcaggaaug

SEQ ID NO: 1964588 - RNA, 19 nt, Homo sapiens
  misc_RNA (1)...(19): siRNA sense strand
cuacguguuuggagaacug

SEQ ID NO: 1964589 - RNA, 19 nt, Homo sapiens
  misc_RNA (1)...(19): siRNA sense strand
aacagaggcucagaagaau

SEQ ID NO: 1964590 - RNA, 19 nt, Homo sapiens
  misc_RNA (1)...(19): siRNA sense strand
uggccacacucauccauca

SEQ ID NO: 1964591 - RNA, 19 nt, Homo sapiens
  misc_RNA (1)...(19): siRNA sense strand
gcugcuaaaguaaagugua

SEQ ID NO: 1964592 - RNA, 19 nt, Homo sapiens
  misc_RNA (1)...(19): siRNA sense strand
aaguaaaguguaucccaua

SEQ ID NO: 1964593 - RNA, 19 nt, Homo sapiens
  misc_RNA (1)...(19): siRNA sense strand
ccagcaagaaagccucaaa

SEQ ID NO: 1964594 - RNA, 19 nt, Homo sapiens
  misc_RNA (1)...(19): siRNA sense strand
gcccgaacccugcaggaau

SEQ ID NO: 1964595 - RNA, 19 nt, Homo sapiens
  misc_RNA (1)...(19): siRNA sense strand
acagaggcucagaagaaua

SEQ ID NO: 1964596 - RNA, 19 nt, Homo sapiens
  misc_RNA (1)...(19): siRNA sense strand
ggccugaagcagcagauug

SEQ ID NO: 1964597 - RNA, 19 nt, Homo sapiens
  misc_RNA (1)...(19): siRNA sense strand
uguguaugcugacgugcuu

SEQ ID NO: 1964598 - RNA, 19 nt, Homo sapiens
  misc_RNA (1)...(19): siRNA sense strand
uuggagaacugcuggacau

SEQ ID NO: 1964599 - RNA, 19 nt, Homo sapiens
  misc_RNA (1)...(19): siRNA sense strand
cuucgacaccucucaguug

SEQ ID NO: 1964600 - RNA, 19 nt, Homo sapiens
  misc_RNA (1)...(19): siRNA sense strand
gggcagaaccaggagcaau

SEQ ID NO: 1964601 - RNA, 19 nt, Homo sapiens
  misc_RNA (1)...(19): siRNA sense strand
gcgccagcccagcaagaaa

SEQ ID NO: 1964602 - RNA, 19 nt, Homo sapiens
  misc_RNA (1)...(19): siRNA sense strand
gauugaggcuguguaugcu

SEQ ID NO: 1964603 - RNA, 19 nt, Homo sapiens
  misc_RNA (1)...(19): siRNA sense strand
gcagcuggaagaccuugug

SEQ ID NO: 1964604 - RNA, 19 nt, Homo sapiens
  misc_RNA (1)...(19): siRNA sense strand
ugauugaggcuguguaugc

SEQ ID NO: 1964605 - RNA, 19 nt, Homo sapiens
  misc_RNA (1)...(19): siRNA sense strand
uuacucauccucuugcuua

SEQ ID NO: 1964606 - RNA, 19 nt, Homo sapiens
  misc_RNA (1)...(19): siRNA sense strand
gugcaacagugaugagaga

SEQ ID NO: 1964607 - RNA, 19 nt, Homo sapiens
  misc_RNA (1)...(19): siRNA sense strand
gaaucggcuucuauaacuu

SEQ ID NO: 1964608 - RNA, 19 nt, Homo sapiens
  misc_RNA (1)...(19): siRNA sense strand
gcugagagcaagcuugaga

SEQ ID NO: 1964609 - RNA, 19 nt, Homo sapiens
  misc_RNA (1)...(19): siRNA sense strand
gggcugagagcaagcuuga

SEQ ID NO: 1964610 - RNA, 19 nt, Homo sapiens
  misc_RNA (1)...(19): siRNA sense strand
ucacugaccugcccaaccu

SEQ ID NO: 1964611 - RNA, 19 nt, Homo sapiens
  misc_RNA (1)...(19): siRNA sense strand
ucauaguccucgugauugu

SEQ ID NO: 1964612 - RNA, 19 nt, Homo sapiens
  misc_RNA (1)...(19): siRNA sense strand
ccagcacccuacaguguca

SEQ ID NO: 1964613 - RNA, 19 nt, Homo sapiens
  misc_RNA (1)...(19): siRNA sense strand
caccagcacccuacagugu

SEQ ID NO: 1964614 - RNA, 19 nt, Homo sapiens
  misc_RNA (1)...(19): siRNA sense strand
ccuacagugucaccaguuc

SEQ ID NO: 1964615 - RNA, 19 nt, Homo sapiens
  misc_RNA (1)...(19): siRNA sense strand
cucauccucuugcuuauag

SEQ ID NO: 1964616 - RNA, 19 nt, Homo sapiens
  misc_RNA (1)...(19): siRNA sense strand
caaaguagaugguuuagua

SEQ ID NO: 1964617 - RNA, 19 nt, Homo sapiens
  misc_RNA (1)...(19): siRNA sense strand
gaacuucaauuccauguuu

SEQ ID NO: 1964618 - RNA, 19 nt, Homo sapiens
  misc_RNA (1)...(19): siRNA sense strand
gaacaucagcuuagauuaa

SEQ ID NO: 1964619 - RNA, 19 nt, Homo sapiens
  misc_RNA (1)...(19): siRNA sense strand
ggaaaugacuccaaaguag

SEQ ID NO: 1964620 - RNA, 19 nt, Homo sapiens
  misc_RNA (1)...(19): siRNA sense strand
gagaagggauuugguauuu

SEQ ID NO: 1964621 - RNA, 19 nt, Homo sapiens
  misc_RNA (1)...(19): siRNA sense strand
gagaagaaaugaggacaua

SEQ ID NO: 1964622 - RNA, 19 nt, Homo sapiens
  misc_RNA (1)...(19): siRNA sense strand
caaggaaggugaagcagua

SEQ ID NO: 1964623 - RNA, 19 nt, Homo sapiens
  misc_RNA (1)...(19): siRNA sense strand
ggacuaaaguagaugauug

SEQ ID NO: 1964624 - RNA, 19 nt, Homo sapiens
  misc_RNA (1)...(19): siRNA sense strand
ggagagcgccaaaccauua

SEQ ID NO: 1964625 - RNA, 19 nt, Homo sapiens
  misc_RNA (1)...(19): siRNA sense strand
gguaggagauguagauuug

SEQ ID NO: 1964626 - RNA, 19 nt, Homo sapiens
  misc_RNA (1)...(19): siRNA sense strand
gaagagggagaaauuguua

SEQ ID NO: 1964627 - RNA, 19 nt, Homo sapiens
  misc_RNA (1)...(19): siRNA sense strand
gaaaggaaguaagaaaguu

SEQ ID NO: 1964628 - RNA, 19 nt, Homo sapiens
  misc_RNA (1)...(19): siRNA sense strand
gauaugacauuucuacaug

SEQ ID NO: 1964629 - RNA, 19 nt, Homo sapiens
  misc_RNA (1)...(19): siRNA sense strand
caaaucagcucaaacgaau

SEQ ID NO: 1964630 - RNA, 19 nt, Homo sapiens
  misc_RNA (1)...(19): siRNA sense strand
gaggagaaguuccagauga

SEQ ID NO: 1964631 - RNA, 19 nt, Homo sapiens
  misc_RNA (1)...(19): siRNA sense strand
cuagaaacauggcaaagua

SEQ ID NO: 1964632 - RNA, 19 nt, Homo sapiens
  misc_RNA (1)...(19): siRNA sense strand
caaaguugcuacauuauca

SEQ ID NO: 1964633 - RNA, 19 nt, Homo sapiens
  misc_RNA (1)...(19): siRNA sense strand
gaaacguggugaucagauu

SEQ ID NO: 1964634 - RNA, 19 nt, Homo sapiens
  misc_RNA (1)...(19): siRNA sense strand
caccacagcuaaagaagua

SEQ ID NO: 1964635 - RNA, 19 nt, Homo sapiens
  misc_RNA (1)...(19): siRNA sense strand
ugaagaugcucaagaacua

SEQ ID NO: 1964636 - RNA, 19 nt, Homo sapiens
  misc_RNA (1)...(19): siRNA sense strand
ggaaaucagucauccagau

SEQ ID NO: 1964637 - RNA, 19 nt, Homo sapiens
  misc_RNA (1)...(19): siRNA sense strand
gaacucugcucagugauga

SEQ ID NO: 1964638 - RNA, 19 nt, Homo sapiens
  misc_RNA (1)...(19): siRNA sense strand
uaugaaagccguugaaauu

SEQ ID NO: 1964639 - RNA, 19 nt, Homo sapiens
  misc_RNA (1)...(19): siRNA sense strand
gacacggauuguauuauua

SEQ ID NO: 1964640 - RNA, 19 nt, Homo sapiens
  misc_RNA (1)...(19): siRNA sense strand
gggagaaauuguuauggua

SEQ ID NO: 1964641 - RNA, 19 nt, Homo sapiens
  misc_RNA (1)...(19): siRNA sense strand
ggauccaacuuauauagaa

SEQ ID NO: 1964642 - RNA, 19 nt, Homo sapiens
  misc_RNA (1)...(19): siRNA sense strand
ggacccagcuaugauguuu

SEQ ID NO: 1964643 - RNA, 19 nt, Homo sapiens
  misc_RNA (1)...(19): siRNA sense strand
gaucaguucuccaaauuag

SEQ ID NO: 1964644 - RNA, 19 nt, Homo sapiens
  misc_RNA (1)...(19): siRNA sense strand
guaaagacaccacagcuaa

SEQ ID NO: 1964645 - RNA, 19 nt, Homo sapiens
  misc_RNA (1)...(19): siRNA sense strand
ccaaagcuauuuagugaug

SEQ ID NO: 1964646 - RNA, 19 nt, Homo sapiens
  misc_RNA (1)...(19): siRNA sense strand
ugacacggauuguauuauu

SEQ ID NO: 1964647 - RNA, 19 nt, Homo sapiens
  misc_RNA (1)...(19): siRNA sense strand
gaacuagaccggaguggaa

SEQ ID NO: 1964648 - RNA, 19 nt, Homo sapiens
  misc_RNA (1)...(19): siRNA sense strand
gcauagcccagcaagauua

SEQ ID NO: 1964649 - RNA, 19 nt, Homo sapiens
  misc_RNA (1)...(19): siRNA sense strand
gaaagacgagggagaaaug

SEQ ID NO: 1964650 - RNA, 19 nt, Homo sapiens
  misc_RNA (1)...(19): siRNA sense strand
gcuaugauguuucgacaga

SEQ ID NO: 1964651 - RNA, 19 nt, Homo sapiens
  misc_RNA (1)...(19): siRNA sense strand
gaauggucaucuccgguua

SEQ ID NO: 1964652 - RNA, 19 nt, Homo sapiens
  misc_RNA (1)...(19): siRNA sense strand
ggagaaauguuuuguuuga

SEQ ID NO: 1964653 - RNA, 19 nt, Homo sapiens
  misc_RNA (1)...(19): siRNA sense strand
gaaaugaggacauaucagu

SEQ ID NO: 1964654 - RNA, 19 nt, Homo sapiens
  misc_RNA (1)...(19): siRNA sense strand
ugaaggaaaugacuccaaa

SEQ ID NO: 1964655 - RNA, 19 nt, Homo sapiens
  misc_RNA (1)...(19): siRNA sense strand
agaggaagaugaagagauu

SEQ ID NO: 1964656 - RNA, 19 nt, Homo sapiens
  misc_RNA (1)...(19): siRNA sense strand
gagguuaacagcuaucuuu

SEQ ID NO: 1964657 - RNA, 19 nt, Homo sapiens
  misc_RNA (1)...(19): siRNA sense strand
gaagagguuugaggacauu

SEQ ID NO: 1964658 - RNA, 19 nt, Homo sapiens
  misc_RNA (1)...(19): siRNA sense strand
acaaggcacuguaggcaua

SEQ ID NO: 1964659 - RNA, 19 nt, Homo sapiens
  misc_RNA (1)...(19): siRNA sense strand
ggagaaaggaaguaagaaa

SEQ ID NO: 1964660 - RNA, 19 nt, Homo sapiens
  misc_RNA (1)...(19): siRNA sense strand
gagcuugacucaugguaug

SEQ ID NO: 1964661 - RNA, 19 nt, Homo sapiens
  misc_RNA (1)...(19): siRNA sense strand
gaacaauugcuggaguuua

SEQ ID NO: 1964662 - RNA, 19 nt, Homo sapiens
  misc_RNA (1)...(19): siRNA sense strand
cgacacauauucucucugu

SEQ ID NO: 1964663 - RNA, 19 nt, Homo sapiens
  misc_RNA (1)...(19): siRNA sense strand
ucagggaggugcucacaaa

SEQ ID NO: 1964664 - RNA, 19 nt, Homo sapiens
  misc_RNA (1)...(19): siRNA sense strand
uaagaaugauuuccaagga

SEQ ID NO: 1964665 - RNA, 19 nt, Homo sapiens
  misc_RNA (1)...(19): siRNA sense strand
gcaaaucagcucaaacgaa

SEQ ID NO: 1964666 - RNA, 19 nt, Homo sapiens
  misc_RNA (1)...(19): siRNA sense strand
cagaucaguucuccaaauu

SEQ ID NO: 1964667 - RNA, 19 nt, Homo sapiens
  misc_RNA (1)...(19): siRNA sense strand
cagaaacgauugccagaug

SEQ ID NO: 1964668 - RNA, 19 nt, Homo sapiens
  misc_RNA (1)...(19): siRNA sense strand
gagggacuuugauuuguuu

SEQ ID NO: 1964669 - RNA, 19 nt, Homo sapiens
  misc_RNA (1)...(19): siRNA sense strand
caagagaaaucugguguuc

SEQ ID NO: 1964670 - RNA, 19 nt, Homo sapiens
  misc_RNA (1)...(19): siRNA sense strand
gugauugucuuguauuaga

SEQ ID NO: 1964671 - RNA, 19 nt, Homo sapiens
  misc_RNA (1)...(19): siRNA sense strand
caauggaagguauuacuua

SEQ ID NO: 1964672 - RNA, 19 nt, Homo sapiens
  misc_RNA (1)...(19): siRNA sense strand
ccaccaguauguuggauuu

SEQ ID NO: 1964673 - RNA, 19 nt, Homo sapiens
  misc_RNA (1)...(19): siRNA sense strand
gaauaauacucaucuugca

SEQ ID NO: 1964674 - RNA, 19 nt, Homo sapiens
  misc_RNA (1)...(19): siRNA sense strand
gccaaaccauuacugauga

SEQ ID NO: 1964675 - RNA, 19 nt, Homo sapiens
  misc_RNA (1)...(19): siRNA sense strand
gcacuucauugucgagaau

SEQ ID NO: 1964676 - RNA, 19 nt, Homo sapiens
  misc_RNA (1)...(19): siRNA sense strand
gaaaugacuccaaaguaga

SEQ ID NO: 1964677 - RNA, 19 nt, Homo sapiens
  misc_RNA (1)...(19): siRNA sense strand
uaacagcuaucuuucucuu

SEQ ID NO: 1964678 - RNA, 19 nt, Homo sapiens
  misc_RNA (1)...(19): siRNA sense strand
ggucaucuccgguuauuga

SEQ ID NO: 1964679 - RNA, 19 nt, Homo sapiens
  misc_RNA (1)...(19): siRNA sense strand
gaagauacaaagaugaaug

SEQ ID NO: 1964680 - RNA, 19 nt, Homo sapiens
  misc_RNA (1)...(19): siRNA sense strand
gaaggugacccugcuauga

SEQ ID NO: 1964681 - RNA, 19 nt, Homo sapiens
  misc_RNA (1)...(19): siRNA sense strand
ggaucaaacuauuggaaug

SEQ ID NO: 1964682 - RNA, 19 nt, Homo sapiens
  misc_RNA (1)...(19): siRNA sense strand
gcaagauuauuggagaauu

SEQ ID NO: 1964683 - RNA, 19 nt, Homo sapiens
  misc_RNA (1)...(19): siRNA sense strand
gaagaaaugaggacauauc

SEQ ID NO: 1964684 - RNA, 19 nt, Homo sapiens
  misc_RNA (1)...(19): siRNA sense strand
gauuguauaucaagacugu

SEQ ID NO: 1964685 - RNA, 19 nt, Homo sapiens
  misc_RNA (1)...(19): siRNA sense strand
ggaaauccgccaaguuguu

SEQ ID NO: 1964686 - RNA, 19 nt, Homo sapiens
  misc_RNA (1)...(19): siRNA sense strand
ggaaacagaaaccuuaugu

SEQ ID NO: 1964687 - RNA, 19 nt, Homo sapiens
  misc_RNA (1)...(19): siRNA sense strand
cuccaaagcuauuuaguga

SEQ ID NO: 1964688 - RNA, 19 nt, Homo sapiens
  misc_RNA (1)...(19): siRNA sense strand
ccucuacaauucagccuua

SEQ ID NO: 1964689 - RNA, 19 nt, Homo sapiens
  misc_RNA (1)...(19): siRNA sense strand
gaucugugcuugugaaagg

SEQ ID NO: 1964690 - RNA, 19 nt, Homo sapiens
  misc_RNA (1)...(19): siRNA sense strand
gcaaucagguucucuuuug

SEQ ID NO: 1964691 - RNA, 19 nt, Homo sapiens
  misc_RNA (1)...(19): siRNA sense strand
caaaguggaucagcaaagu

SEQ ID NO: 1964692 - RNA, 19 nt, Homo sapiens
  misc_RNA (1)...(19): siRNA sense strand
guagagaaugccaaagaua

SEQ ID NO: 1964693 - RNA, 19 nt, Homo sapiens
  misc_RNA (1)...(19): siRNA sense strand
caaggaagcacaaauucaa

SEQ ID NO: 1964694 - RNA, 19 nt, Homo sapiens
  misc_RNA (1)...(19): siRNA sense strand
agaugaagaugcucaagaa

SEQ ID NO: 1964695 - RNA, 19 nt, Homo sapiens
  misc_RNA (1)...(19): siRNA sense strand
uaucuugccuccaaagcua

SEQ ID NO: 1964696 - RNA, 19 nt, Homo sapiens
  misc_RNA (1)...(19): siRNA sense strand
guagaugauugucaguuug

SEQ ID NO: 1964697 - RNA, 19 nt, Homo sapiens
  misc_RNA (1)...(19): siRNA sense strand
guacaugcauggaauuguc

SEQ ID NO: 1964698 - RNA, 19 nt, Homo sapiens
  misc_RNA (1)...(19): siRNA sense strand
ggacugaacaagagaaauc

SEQ ID NO: 1964699 - RNA, 19 nt, Homo sapiens
  misc_RNA (1)...(19): siRNA sense strand
agauaucccugaucaaguu

SEQ ID NO: 1964700 - RNA, 19 nt, Homo sapiens
  misc_RNA (1)...(19): siRNA sense strand
guucgagaaugucuugaaa

SEQ ID NO: 1964701 - RNA, 19 nt, Homo sapiens
  misc_RNA (1)...(19): siRNA sense strand
gcaaauacgagaaacaucu

SEQ ID NO: 1964702 - RNA, 19 nt, Homo sapiens
  misc_RNA (1)...(19): siRNA sense strand
cauggaaacagaaaccuua

SEQ ID NO: 1964703 - RNA, 19 nt, Homo sapiens
  misc_RNA (1)...(19): siRNA sense strand
ccagaucaguucuccaaau

SEQ ID NO: 1964704 - RNA, 19 nt, Homo sapiens
  misc_RNA (1)...(19): siRNA sense strand
aaaagaaccugcagacaaa

SEQ ID NO: 1964705 - RNA, 19 nt, Homo sapiens
  misc_RNA (1)...(19): siRNA sense strand
ggaagagggagaaauuguu

SEQ ID NO: 1964706 - RNA, 19 nt, Homo sapiens
  misc_RNA (1)...(19): siRNA sense strand
gcuacauuaucaucaguaa

SEQ ID NO: 1964707 - RNA, 19 nt, Homo sapiens
  misc_RNA (1)...(19): siRNA sense strand
caucguggauccaacuuau

SEQ ID NO: 1964708 - RNA, 19 nt, Homo sapiens
  misc_RNA (1)...(19): siRNA sense strand
gggaacaucagcuuagauu

SEQ ID NO: 1964709 - RNA, 19 nt, Homo sapiens
  misc_RNA (1)...(19): siRNA sense strand
guaagaacuucaauuccau

SEQ ID NO: 1964710 - RNA, 19 nt, Homo sapiens
  misc_RNA (1)...(19): siRNA sense strand
gaaaccuuauguucagaug

SEQ ID NO: 1964711 - RNA, 19 nt, Homo sapiens
  misc_RNA (1)...(19): siRNA sense strand
ucaggaagauuuuggauaa

SEQ ID NO: 1964712 - RNA, 19 nt, Homo sapiens
  misc_RNA (1)...(19): siRNA sense strand
ggaauugucaggacuaaag

SEQ ID NO: 1964713 - RNA, 19 nt, Homo sapiens
  misc_RNA (1)...(19): siRNA sense strand
uagagaaugccaaagauaa

SEQ ID NO: 1964714 - RNA, 19 nt, Homo sapiens
  misc_RNA (1)...(19): siRNA sense strand
ggaugugauugucuuguau

SEQ ID NO: 1964715 - RNA, 19 nt, Homo sapiens
  misc_RNA (1)...(19): siRNA sense strand
guucaugaauuugguuuga

SEQ ID NO: 1964716 - RNA, 19 nt, Homo sapiens
  misc_RNA (1)...(19): siRNA sense strand
caaagugaaugcugacaua

SEQ ID NO: 1964717 - RNA, 19 nt, Homo sapiens
  misc_RNA (1)...(19): siRNA sense strand
ugacaggccucaauuauga

SEQ ID NO: 1964718 - RNA, 19 nt, Homo sapiens
  misc_RNA (1)...(19): siRNA sense strand
gaauggaacugaagaccuu

SEQ ID NO: 1964719 - RNA, 19 nt, Homo sapiens
  misc_RNA (1)...(19): siRNA sense strand
gccaagagaugcacaguga

SEQ ID NO: 1964720 - RNA, 19 nt, Homo sapiens
  misc_RNA (1)...(19): siRNA sense strand
gauaugcugucaauguauu

SEQ ID NO: 1964721 - RNA, 19 nt, Homo sapiens
  misc_RNA (1)...(19): siRNA sense strand
gcaguuagcgagccaauga

SEQ ID NO: 1964722 - RNA, 19 nt, Homo sapiens
  misc_RNA (1)...(19): siRNA sense strand
ggaagaacuugguggacuu

SEQ ID NO: 1964723 - RNA, 19 nt, Homo sapiens
  misc_RNA (1)...(19): siRNA sense strand
ugaaacccauugacuacua

SEQ ID NO: 1964724 - RNA, 19 nt, Homo sapiens
  misc_RNA (1)...(19): siRNA sense strand
gaccauggaugaugcuaug

SEQ ID NO: 1964725 - RNA, 19 nt, Homo sapiens
  misc_RNA (1)...(19): siRNA sense strand
gggaaggcauuucacauca

SEQ ID NO: 1964726 - RNA, 19 nt, Homo sapiens
  misc_RNA (1)...(19): siRNA sense strand
gaggauaugcugucaaugu

SEQ ID NO: 1964727 - RNA, 19 nt, Homo sapiens
  misc_RNA (1)...(19): siRNA sense strand
gcaagaggauaugcuguca

SEQ ID NO: 1964728 - RNA, 19 nt, Homo sapiens
  misc_RNA (1)...(19): siRNA sense strand
ccaacgauccugagaagaa

SEQ ID NO: 1964729 - RNA, 19 nt, Homo sapiens
  misc_RNA (1)...(19): siRNA sense strand
acaaggagcucuuuuauag

SEQ ID NO: 1964730 - RNA, 19 nt, Homo sapiens
  misc_RNA (1)...(19): siRNA sense strand
cagcaaggguuugauaauc

SEQ ID NO: 1964731 - RNA, 19 nt, Homo sapiens
  misc_RNA (1)...(19): siRNA sense strand
uaucaagaauggaacugaa

SEQ ID NO: 1964732 - RNA, 19 nt, Homo sapiens
  misc_RNA (1)...(19): siRNA sense strand
aggauaugcugucaaugua

SEQ ID NO: 1964733 - RNA, 19 nt, Homo sapiens
  misc_RNA (1)...(19): siRNA sense strand
caagaugaaguucgugauu

SEQ ID NO: 1964734 - RNA, 19 nt, Homo sapiens
  misc_RNA (1)...(19): siRNA sense strand
acacagagacuaagaucuu

SEQ ID NO: 1964735 - RNA, 19 nt, Homo sapiens
  misc_RNA (1)...(19): siRNA sense strand
gggcgucgauaucaagaau

SEQ ID NO: 1964736 - RNA, 19 nt, Homo sapiens
  misc_RNA (1)...(19): siRNA sense strand
caacgauccugagaagaau

SEQ ID NO: 1964737 - RNA, 19 nt, Homo sapiens
  misc_RNA (1)...(19): siRNA sense strand
ccaugaaacccauugacua

SEQ ID NO: 1964738 - RNA, 19 nt, Homo sapiens
  misc_RNA (1)...(19): siRNA sense strand
uagaaaagguuaaccagaa

SEQ ID NO: 1964739 - RNA, 19 nt, Homo sapiens
  misc_RNA (1)...(19): siRNA sense strand
gaaaugggaagaacuuggu

SEQ ID NO: 1964740 - RNA, 19 nt, Homo sapiens
  misc_RNA (1)...(19): siRNA sense strand
agugaaugcugacauagaa

SEQ ID NO: 1964741 - RNA, 19 nt, Homo sapiens
  misc_RNA (1)...(19): siRNA sense strand
aagaggauaugcugucaau

SEQ ID NO: 1964742 - RNA, 19 nt, Homo sapiens
  misc_RNA (1)...(19): siRNA sense strand
cauugaaacuugcaaagag

SEQ ID NO: 1964743 - RNA, 19 nt, Homo sapiens
  misc_RNA (1)...(19): siRNA sense strand
ugaaguucgugauuggaaa

SEQ ID NO: 1964744 - RNA, 19 nt, Homo sapiens
  misc_RNA (1)...(19): siRNA sense strand
guacccagcucugaaaggu

SEQ ID NO: 1964745 - RNA, 19 nt, Homo sapiens
  misc_RNA (1)...(19): siRNA sense strand
ggugaucaguccugucauc

SEQ ID NO: 1964746 - RNA, 19 nt, Homo sapiens
  misc_RNA (1)...(19): siRNA sense strand
gaaacccauugacuacuac

SEQ ID NO: 1964747 - RNA, 19 nt, Homo sapiens
  misc_RNA (1)...(19): siRNA sense strand
gaccuucccuaugccauga

SEQ ID NO: 1964748 - RNA, 19 nt, Homo sapiens
  misc_RNA (1)...(19): siRNA sense strand
uaacaacaaggagcucuuu

SEQ ID NO: 1964749 - RNA, 19 nt, Homo sapiens
  misc_RNA (1)...(19): siRNA sense strand
aagaugaaguucgugauug

SEQ ID NO: 1964750 - RNA, 19 nt, Homo sapiens
  misc_RNA (1)...(19): siRNA sense strand
cauccgcccucauggcauu

SEQ ID NO: 1964751 - RNA, 19 nt, Homo sapiens
  misc_RNA (1)...(19): siRNA sense strand
ccuacuggguggccuacua

SEQ ID NO: 1964752 - RNA, 19 nt, Homo sapiens
  misc_RNA (1)...(19): siRNA sense strand
gcacaugguggagcaguug

SEQ ID NO: 1964753 - RNA, 19 nt, Homo sapiens
  misc_RNA (1)...(19): siRNA sense strand
ggaacggcaagaugaaguu

SEQ ID NO: 1964754 - RNA, 19 nt, Homo sapiens
  misc_RNA (1)...(19): siRNA sense strand
gccaggaacggcaagauga

SEQ ID NO: 1964755 - RNA, 19 nt, Homo sapiens
  misc_RNA (1)...(19): siRNA sense strand
gugccagugucaucuuuga

SEQ ID NO: 1964756 - RNA, 19 nt, Homo sapiens
  misc_RNA (1)...(19): siRNA sense strand
caagagaugcacagugauc

SEQ ID NO: 1964757 - RNA, 19 nt, Homo sapiens
  misc_RNA (1)...(19): siRNA sense strand
gaaguucgugauuggaaau

SEQ ID NO: 1964758 - RNA, 19 nt, Homo sapiens
  misc_RNA (1)...(19): siRNA sense strand
ggauaugcugucaauguau

SEQ ID NO: 1964759 - RNA, 19 nt, Homo sapiens
  misc_RNA (1)...(19): siRNA sense strand
gaucgguggcucuggauuc

SEQ ID NO: 1964760 - RNA, 19 nt, Homo sapiens
  misc_RNA (1)...(19): siRNA sense strand
gcacauuccacuacuacag

SEQ ID NO: 1964761 - RNA, 19 nt, Homo sapiens
  misc_RNA (1)...(19): siRNA sense strand
agaaucaggccaagagaug

SEQ ID NO: 1964762 - RNA, 19 nt, Homo sapiens
  misc_RNA (1)...(19): siRNA sense strand
gaucuguacccagcucuga

SEQ ID NO: 1964763 - RNA, 19 nt, Homo sapiens
  misc_RNA (1)...(19): siRNA sense strand
ggagaacgugguccaugga

SEQ ID NO: 1964764 - RNA, 19 nt, Homo sapiens
  misc_RNA (1)...(19): siRNA sense strand
caagggacccgcaguuggu

SEQ ID NO: 1964765 - RNA, 19 nt, Homo sapiens
  misc_RNA (1)...(19): siRNA sense strand
gcgucgauaucaagaaugg

SEQ ID NO: 1964766 - RNA, 19 nt, Homo sapiens
  misc_RNA (1)...(19): siRNA sense strand
caacaaggagcucuuuuau

SEQ ID NO: 1964767 - RNA, 19 nt, Homo sapiens
  misc_RNA (1)...(19): siRNA sense strand
cagugccagugucaucuuu

SEQ ID NO: 1964768 - RNA, 19 nt, Homo sapiens
  misc_RNA (1)...(19): siRNA sense strand
cuaccuggcccuccugcua

SEQ ID NO: 1964769 - RNA, 19 nt, Homo sapiens
  misc_RNA (1)...(19): siRNA sense strand
ggaaggcauuucacaucac

SEQ ID NO: 1964770 - RNA, 19 nt, Homo sapiens
  misc_RNA (1)...(19): siRNA sense strand
caugaaacccauugacuac

SEQ ID NO: 1964771 - RNA, 19 nt, Homo sapiens
  misc_RNA (1)...(19): siRNA sense strand
cagaggacacucccaaagu

SEQ ID NO: 1964772 - RNA, 19 nt, Homo sapiens
  misc_RNA (1)...(19): siRNA sense strand
gacagaggacacucccaaa

SEQ ID NO: 1964773 - RNA, 19 nt, Homo sapiens
  misc_RNA (1)...(19): siRNA sense strand
cgcacuggcuggcacauuc

SEQ ID NO: 1964774 - RNA, 19 nt, Homo sapiens
  misc_RNA (1)...(19): siRNA sense strand
cgccaacgauccugagaag

SEQ ID NO: 1964775 - RNA, 19 nt, Homo sapiens
  misc_RNA (1)...(19): siRNA sense strand
ucaagaauggaacugaaga

SEQ ID NO: 1964776 - RNA, 19 nt, Homo sapiens
  misc_RNA (1)...(19): siRNA sense strand
ccagcaaggguuugauaau

SEQ ID NO: 1964777 - RNA, 19 nt, Homo sapiens
  misc_RNA (1)...(19): siRNA sense strand
agaugaaguucgugauugg

SEQ ID NO: 1964778 - RNA, 19 nt, Homo sapiens
  misc_RNA (1)...(19): siRNA sense strand
ccaggaacggcaagaugaa

SEQ ID NO: 1964779 - RNA, 19 nt, Homo sapiens
  misc_RNA (1)...(19): siRNA sense strand
gcaagaugaaguucgugau

SEQ ID NO: 1964780 - RNA, 19 nt, Homo sapiens
  misc_RNA (1)...(19): siRNA sense strand
gcagugccagugucaucuu

SEQ ID NO: 1964781 - RNA, 19 nt, Homo sapiens
  misc_RNA (1)...(19): siRNA sense strand
gauuggaaaugggaagaac

SEQ ID NO: 1964782 - RNA, 19 nt, Homo sapiens
  misc_RNA (1)...(19): siRNA sense strand
ucauugaaacuugcaaaga

SEQ ID NO: 1964783 - RNA, 19 nt, Homo sapiens
  misc_RNA (1)...(19): siRNA sense strand
cuacuacagcugcgagaga

SEQ ID NO: 1964784 - RNA, 19 nt, Homo sapiens
  misc_RNA (1)...(19): siRNA sense strand
gcucugaaagguguaaaca

SEQ ID NO: 1964785 - RNA, 19 nt, Homo sapiens
  misc_RNA (1)...(19): siRNA sense strand
acaacaaggagcucuuuua

SEQ ID NO: 1964786 - RNA, 19 nt, Homo sapiens
  misc_RNA (1)...(19): siRNA sense strand
gucgauaucaagaauggaa

SEQ ID NO: 1964787 - RNA, 19 nt, Homo sapiens
  misc_RNA (1)...(19): siRNA sense strand
agaggaccgugcagagcuu

SEQ ID NO: 1964788 - RNA, 19 nt, Homo sapiens
  misc_RNA (1)...(19): siRNA sense strand
uuagcgagccaaugagaga

SEQ ID NO: 1964789 - RNA, 19 nt, Homo sapiens
  misc_RNA (1)...(19): siRNA sense strand
ugauauccagcaaggguuu

SEQ ID NO: 1964790 - RNA, 19 nt, Homo sapiens
  misc_RNA (1)...(19): siRNA sense strand
guaacaacaaggagcucuu

SEQ ID NO: 1964791 - RNA, 19 nt, Homo sapiens
  misc_RNA (1)...(19): siRNA sense strand
uguauuugauauccagcaa

SEQ ID NO: 1964792 - RNA, 19 nt, Homo sapiens
  misc_RNA (1)...(19): siRNA sense strand
cuacacagagacuaagauc

SEQ ID NO: 1964793 - RNA, 19 nt, Homo sapiens
  misc_RNA (1)...(19): siRNA sense strand
gcaaagaggcugggguuca

SEQ ID NO: 1964794 - RNA, 19 nt, Homo sapiens
  misc_RNA (1)...(19): siRNA sense strand
caccauccaguaacaacaa

SEQ ID NO: 1964795 - RNA, 19 nt, Homo sapiens
  misc_RNA (1)...(19): siRNA sense strand
gcgccaacgauccugagaa

SEQ ID NO: 1964796 - RNA, 19 nt, Homo sapiens
  misc_RNA (1)...(19): siRNA sense strand
cagcagugccagugucauc

SEQ ID NO: 1964797 - RNA, 19 nt, Homo sapiens
  misc_RNA (1)...(19): siRNA sense strand
gcaacggccucuuccucuu

SEQ ID NO: 1964798 - RNA, 19 nt, Homo sapiens
  misc_RNA (1)...(19): siRNA sense strand
ggacagcaacggccucuuc

SEQ ID NO: 1964799 - RNA, 19 nt, Homo sapiens
  misc_RNA (1)...(19): siRNA sense strand
gcucuacuauuaugaugag

SEQ ID NO: 1964800 - RNA, 19 nt, Homo sapiens
  misc_RNA (1)...(19): siRNA sense strand
gaaguacccgggugucauc

SEQ ID NO: 1964801 - RNA, 19 nt, Homo sapiens
  misc_RNA (1)...(19): siRNA sense strand
caucacgcccuuucucuug

SEQ ID NO: 1964802 - RNA, 19 nt, Homo sapiens
  misc_RNA (1)...(19): siRNA sense strand
ccauugccaugcugguauu

SEQ ID NO: 1964803 - RNA, 19 nt, Homo sapiens
  misc_RNA (1)...(19): siRNA sense strand
ucgccuggcuguggaauga

SEQ ID NO: 1964804 - RNA, 19 nt, Homo sapiens
  misc_RNA (1)...(19): siRNA sense strand
gcuguggaaugacccuguu

SEQ ID NO: 1964805 - RNA, 19 nt, Homo sapiens
  misc_RNA (1)...(19): siRNA sense strand
guacccgggugucaucuac

SEQ ID NO: 1964806 - RNA, 19 nt, Homo sapiens
  misc_RNA (1)...(19): siRNA sense strand
caucaucaucuucaucaug

SEQ ID NO: 1964807 - RNA, 19 nt, Homo sapiens
  misc_RNA (1)...(19): siRNA sense strand
caacggccucuuccucuuc

SEQ ID NO: 1964808 - RNA, 19 nt, Homo sapiens
  misc_RNA (1)...(19): siRNA sense strand
gaccucugguucuacuuca

SEQ ID NO: 1964809 - RNA, 19 nt, Homo sapiens
  misc_RNA (1)...(19): siRNA sense strand
gaucuucauccucuucauc

SEQ ID NO: 1964810 - RNA, 19 nt, Homo sapiens
  misc_RNA (1)...(19): siRNA sense strand
gagcaucaucaucuucauc

SEQ ID NO: 1964811 - RNA, 19 nt, Homo sapiens
  misc_RNA (1)...(19): siRNA sense strand
guacgugagcaucaucauc

SEQ ID NO: 1964812 - RNA, 19 nt, Homo sapiens
  misc_RNA (1)...(19): siRNA sense strand
gcugaucgacuccuuugag

SEQ ID NO: 1964813 - RNA, 19 nt, Homo sapiens
  misc_RNA (1)...(19): siRNA sense strand
gugagcaucaucaucuuca

SEQ ID NO: 1964814 - RNA, 19 nt, Homo sapiens
  misc_RNA (1)...(19): siRNA sense strand
agacgcugaucgacuccuu

SEQ ID NO: 1964815 - RNA, 19 nt, Homo sapiens
  misc_RNA (1)...(19): siRNA sense strand
gagugaaggucuaagguuu

SEQ ID NO: 1964816 - RNA, 19 nt, Homo sapiens
  misc_RNA (1)...(19): siRNA sense strand
ggagagaagcuuuguaugg

SEQ ID NO: 1964817 - RNA, 19 nt, Homo sapiens
  misc_RNA (1)...(19): siRNA sense strand
caaugcaccuucacagaga

SEQ ID NO: 1964818 - RNA, 19 nt, Homo sapiens
  misc_RNA (1)...(19): siRNA sense strand
ggucuaagguuuggaaucu

SEQ ID NO: 1964819 - RNA, 19 nt, Homo sapiens
  misc_RNA (1)...(19): siRNA sense strand
guaauggcccgacuguuga

SEQ ID NO: 1964820 - RNA, 19 nt, Homo sapiens
  misc_RNA (1)...(19): siRNA sense strand
gaaggucuaagguuuggaa

SEQ ID NO: 1964821 - RNA, 19 nt, Homo sapiens
  misc_RNA (1)...(19): siRNA sense strand
uggaguuucuggugucuuu

SEQ ID NO: 1964822 - RNA, 19 nt, Homo sapiens
  misc_RNA (1)...(19): siRNA sense strand
uguaauggcccgacuguug

SEQ ID NO: 1964823 - RNA, 19 nt, Homo sapiens
  misc_RNA (1)...(19): siRNA sense strand
caacuaaugaacucuggaa

SEQ ID NO: 1964824 - RNA, 19 nt, Homo sapiens
  misc_RNA (1)...(19): siRNA sense strand
gacaaugcaccuucacaga

SEQ ID NO: 1964825 - RNA, 19 nt, Homo sapiens
  misc_RNA (1)...(19): siRNA sense strand
caaaacaacuaaugaacuc

SEQ ID NO: 1964826 - RNA, 19 nt, Homo sapiens
  misc_RNA (1)...(19): siRNA sense strand
ugucuuugcuuggaacuga

SEQ ID NO: 1964827 - RNA, 19 nt, Homo sapiens
  misc_RNA (1)...(19): siRNA sense strand
gcuuggaacugaccuagcu

SEQ ID NO: 1964828 - RNA, 19 nt, Homo sapiens
  misc_RNA (1)...(19): siRNA sense strand
uaaucugagugaaggucua

SEQ ID NO: 1964829 - RNA, 19 nt, Homo sapiens
  misc_RNA (1)...(19): siRNA sense strand
guauggcugucaugcuuag

SEQ ID NO: 1964830 - RNA, 19 nt, Homo sapiens
  misc_RNA (1)...(19): siRNA sense strand
cagggacaaugcaccuuca

SEQ ID NO: 1964831 - RNA, 19 nt, Homo sapiens
  misc_RNA (1)...(19): siRNA sense strand
gugaaggucuaagguuugg

SEQ ID NO: 1964832 - RNA, 19 nt, Homo sapiens
  misc_RNA (1)...(19): siRNA sense strand
ugagugaaggucuaagguu

SEQ ID NO: 1964833 - RNA, 19 nt, Homo sapiens
  misc_RNA (1)...(19): siRNA sense strand
uuguauggcugucaugcuu

SEQ ID NO: 1964834 - RNA, 19 nt, Homo sapiens
  misc_RNA (1)...(19): siRNA sense strand
ccucauggagagaagcuuu

SEQ ID NO: 1964835 - RNA, 19 nt, Homo sapiens
  misc_RNA (1)...(19): siRNA sense strand
uggcccgacuguugaguga

SEQ ID NO: 1964836 - RNA, 19 nt, Homo sapiens
  misc_RNA (1)...(19): siRNA sense strand
guugcacacuggaguuucu

SEQ ID NO: 1964837 - RNA, 19 nt, Homo sapiens
  misc_RNA (1)...(19): siRNA sense strand
ugaaagggcugaaguacaa

SEQ ID NO: 1964838 - RNA, 19 nt, Homo sapiens
  misc_RNA (1)...(19): siRNA sense strand
ucaggaaucucuagaaaga

SEQ ID NO: 1964839 - RNA, 19 nt, Homo sapiens
  misc_RNA (1)...(19): siRNA sense strand
caucaugaauucccaagaa

SEQ ID NO: 1964840 - RNA, 19 nt, Homo sapiens
  misc_RNA (1)...(19): siRNA sense strand
ugagagagcuccacaaggu

SEQ ID NO: 1964841 - RNA, 19 nt, Homo sapiens
  misc_RNA (1)...(19): siRNA sense strand
gaaauggguaccaaucaaa

SEQ ID NO: 1964842 - RNA, 19 nt, Homo sapiens
  misc_RNA (1)...(19): siRNA sense strand
ggucuacggcuuaaacuuu

SEQ ID NO: 1964843 - RNA, 19 nt, Homo sapiens
  misc_RNA (1)...(19): siRNA sense strand
cgucaggaaucucuagaaa

SEQ ID NO: 1964844 - RNA, 19 nt, Homo sapiens
  misc_RNA (1)...(19): siRNA sense strand
uagaggagguggugagaga

SEQ ID NO: 1964845 - RNA, 19 nt, Homo sapiens
  misc_RNA (1)...(19): siRNA sense strand
cagccucacucuaggauga

SEQ ID NO: 1964846 - RNA, 19 nt, Homo sapiens
  misc_RNA (1)...(19): siRNA sense strand
gaagaugaaagccaaaugg

SEQ ID NO: 1964847 - RNA, 19 nt, Homo sapiens
  misc_RNA (1)...(19): siRNA sense strand
ggaucaacaucuaccacaa

SEQ ID NO: 1964848 - RNA, 19 nt, Homo sapiens
  misc_RNA (1)...(19): siRNA sense strand
caaauggaagauccuagua

SEQ ID NO: 1964849 - RNA, 19 nt, Homo sapiens
  misc_RNA (1)...(19): siRNA sense strand
agaaauggguaccaaucaa

SEQ ID NO: 1964850 - RNA, 19 nt, Homo sapiens
  misc_RNA (1)...(19): siRNA sense strand
gaugacaccaguaagaaau

SEQ ID NO: 1964851 - RNA, 19 nt, Homo sapiens
  misc_RNA (1)...(19): siRNA sense strand
gaagaaggaagaugaaagc

SEQ ID NO: 1964852 - RNA, 19 nt, Homo sapiens
  misc_RNA (1)...(19): siRNA sense strand
gcccugaacaucaugaauu

SEQ ID NO: 1964853 - RNA, 19 nt, Homo sapiens
  misc_RNA (1)...(19): siRNA sense strand
gggcuuccgugauggucua

SEQ ID NO: 1964854 - RNA, 19 nt, Homo sapiens
  misc_RNA (1)...(19): siRNA sense strand
gcaaagagccccgaagcua

SEQ ID NO: 1964855 - RNA, 19 nt, Homo sapiens
  misc_RNA (1)...(19): siRNA sense strand
ggauucagccggaucaaca

SEQ ID NO: 1964856 - RNA, 19 nt, Homo sapiens
  misc_RNA (1)...(19): siRNA sense strand
gggccaagcugagaagagu

SEQ ID NO: 1964857 - RNA, 19 nt, Homo sapiens
  misc_RNA (1)...(19): siRNA sense strand
gagucaaguugcaggauca

SEQ ID NO: 1964858 - RNA, 19 nt, Homo sapiens
  misc_RNA (1)...(19): siRNA sense strand
gagaagaaggaagaugaaa

SEQ ID NO: 1964859 - RNA, 19 nt, Homo sapiens
  misc_RNA (1)...(19): siRNA sense strand
uaagaaauggguaccaauc

SEQ ID NO: 1964860 - RNA, 19 nt, Homo sapiens
  misc_RNA (1)...(19): siRNA sense strand
ggaagaugaaagccaaaug

SEQ ID NO: 1964861 - RNA, 19 nt, Homo sapiens
  misc_RNA (1)...(19): siRNA sense strand
agcagguugugaucaauua

SEQ ID NO: 1964862 - RNA, 19 nt, Homo sapiens
  misc_RNA (1)...(19): siRNA sense strand
ggccacaagugaacagagu

SEQ ID NO: 1964863 - RNA, 19 nt, Homo sapiens
  misc_RNA (1)...(19): siRNA sense strand
ccagagaagacaagugaug

SEQ ID NO: 1964864 - RNA, 19 nt, Homo sapiens
  misc_RNA (1)...(19): siRNA sense strand
caacaucuaccacaacacu

SEQ ID NO: 1964865 - RNA, 19 nt, Homo sapiens
  misc_RNA (1)...(19): siRNA sense strand
ccgagaagaaggaagauga

SEQ ID NO: 1964866 - RNA, 19 nt, Homo sapiens
  misc_RNA (1)...(19): siRNA sense strand
ggacauccagagaagacaa

SEQ ID NO: 1964867 - RNA, 19 nt, Homo sapiens
  misc_RNA (1)...(19): siRNA sense strand
acaaacugcuggccaagag

SEQ ID NO: 1964868 - RNA, 19 nt, Homo sapiens
  misc_RNA (1)...(19): siRNA sense strand
gucuacggcuuaaacuuug

SEQ ID NO: 1964869 - RNA, 19 nt, Homo sapiens
  misc_RNA (1)...(19): siRNA sense strand
uggaggaaaugaacaaacu

SEQ ID NO: 1964870 - RNA, 19 nt, Homo sapiens
  misc_RNA (1)...(19): siRNA sense strand
gcugggagcgugaaugaca

SEQ ID NO: 1964871 - RNA, 19 nt, Homo sapiens
  misc_RNA (1)...(19): siRNA sense strand
ucagccggaucaacaucua

SEQ ID NO: 1964872 - RNA, 19 nt, Homo sapiens
  misc_RNA (1)...(19): siRNA sense strand
cagagucguuggagucaag

SEQ ID NO: 1964873 - RNA, 19 nt, Homo sapiens
  misc_RNA (1)...(19): siRNA sense strand
ccacaagugaacagaguau

SEQ ID NO: 1964874 - RNA, 19 nt, Homo sapiens
  misc_RNA (1)...(19): siRNA sense strand
cgagaagaaggaagaugaa

SEQ ID NO: 1964875 - RNA, 19 nt, Homo sapiens
  misc_RNA (1)...(19): siRNA sense strand
cagacaagccagccgagaa

SEQ ID NO: 1964876 - RNA, 19 nt, Homo sapiens
  misc_RNA (1)...(19): siRNA sense strand
ccaaauggaagauccuagu

SEQ ID NO: 1964877 - RNA, 19 nt, Homo sapiens
  misc_RNA (1)...(19): siRNA sense strand
caaagagccccgaagcuaa

SEQ ID NO: 1964878 - RNA, 19 nt, Homo sapiens
  misc_RNA (1)...(19): siRNA sense strand
guaagaaauggguaccaau

SEQ ID NO: 1964879 - RNA, 19 nt, Homo sapiens
  misc_RNA (1)...(19): siRNA sense strand
ggagcaacucgguggagaa

SEQ ID NO: 1964880 - RNA, 19 nt, Homo sapiens
  misc_RNA (1)...(19): siRNA sense strand
cgacgagagcuccauguca

SEQ ID NO: 1964881 - RNA, 19 nt, Homo sapiens
  misc_RNA (1)...(19): siRNA sense strand
gaaucucuagaaagaagaa

SEQ ID NO: 1964882 - RNA, 19 nt, Homo sapiens
  misc_RNA (1)...(19): siRNA sense strand
aggaaucucuagaaagaag

SEQ ID NO: 1964883 - RNA, 19 nt, Homo sapiens
  misc_RNA (1)...(19): siRNA sense strand
caugaauucccaagaagga

SEQ ID NO: 1964884 - RNA, 19 nt, Homo sapiens
  misc_RNA (1)...(19): siRNA sense strand
cgaugacaccaguaagaaa

SEQ ID NO: 1964885 - RNA, 19 nt, Homo sapiens
  misc_RNA (1)...(19): siRNA sense strand
cccugaacaucaugaauuc

SEQ ID NO: 1964886 - RNA, 19 nt, Homo sapiens
  misc_RNA (1)...(19): siRNA sense strand
ggugagagagcuccacaag

SEQ ID NO: 1964887 - RNA, 19 nt, Homo sapiens
  misc_RNA (1)...(19): siRNA sense strand
aguaagaaauggguaccaa

SEQ ID NO: 1964888 - RNA, 19 nt, Homo sapiens
  misc_RNA (1)...(19): siRNA sense strand
cagcagguugugaucaauu

SEQ ID NO: 1964889 - RNA, 19 nt, Homo sapiens
  misc_RNA (1)...(19): siRNA sense strand
ugaaggaggagaucaucga

SEQ ID NO: 1964890 - RNA, 19 nt, Homo sapiens
  misc_RNA (1)...(19): siRNA sense strand
gaucaacaucuaccacaac

SEQ ID NO: 1964891 - RNA, 19 nt, Homo sapiens
  misc_RNA (1)...(19): siRNA sense strand
gcagcagcgucaggaaucu

SEQ ID NO: 1964892 - RNA, 19 nt, Homo sapiens
  misc_RNA (1)...(19): siRNA sense strand
gugaaagggcugaaguaca

SEQ ID NO: 1964893 - RNA, 19 nt, Homo sapiens
  misc_RNA (1)...(19): siRNA sense strand
cagccgagaagaaggaaga

SEQ ID NO: 1964894 - RNA, 19 nt, Homo sapiens
  misc_RNA (1)...(19): siRNA sense strand
ccagugggaccucaaaguc

SEQ ID NO: 1964895 - RNA, 19 nt, Homo sapiens
  misc_RNA (1)...(19): siRNA sense strand
cagguugugaucaauuauu

SEQ ID NO: 1964896 - RNA, 19 nt, Homo sapiens
  misc_RNA (1)...(19): siRNA sense strand
caacaccuucagagucguu

SEQ ID NO: 1964897 - RNA, 19 nt, Homo sapiens
  misc_RNA (1)...(19): siRNA sense strand
cgccaggucuacggcuuaa

SEQ ID NO: 1964898 - RNA, 19 nt, Homo sapiens
  misc_RNA (1)...(19): siRNA sense strand
ugacaccaguaagaaaugg

SEQ ID NO: 1964899 - RNA, 19 nt, Homo sapiens
  misc_RNA (1)...(19): siRNA sense strand
ccuguguccucgauucugu

SEQ ID NO: 1964900 - RNA, 19 nt, Homo sapiens
  misc_RNA (1)...(19): siRNA sense strand
gagcaacucgguggagaag

SEQ ID NO: 1964901 - RNA, 19 nt, Homo sapiens
  misc_RNA (1)...(19): siRNA sense strand
gaaagccaaauggaagauc

SEQ ID NO: 1964902 - RNA, 19 nt, Homo sapiens
  misc_RNA (1)...(19): siRNA sense strand
agaugaaagccaaauggaa

SEQ ID NO: 1964903 - RNA, 19 nt, Homo sapiens
  misc_RNA (1)...(19): siRNA sense strand
ggaggaaaugaacaaacug

SEQ ID NO: 1964904 - RNA, 19 nt, Homo sapiens
  misc_RNA (1)...(19): siRNA sense strand
gcagguugugaucaauuau

SEQ ID NO: 1964905 - RNA, 19 nt, Homo sapiens
  misc_RNA (1)...(19): siRNA sense strand
ccgugauggucuacgauga

SEQ ID NO: 1964906 - RNA, 19 nt, Homo sapiens
  misc_RNA (1)...(19): siRNA sense strand
aagaaauggguaccaauca

SEQ ID NO: 1964907 - RNA, 19 nt, Homo sapiens
  misc_RNA (1)...(19): siRNA sense strand
uacgaugacaccaguaaga

SEQ ID NO: 1964908 - RNA, 19 nt, Homo sapiens
  misc_RNA (1)...(19): siRNA sense strand
gugauggucuacgaugaca

SEQ ID NO: 1964909 - RNA, 19 nt, Homo sapiens
  misc_RNA (1)...(19): siRNA sense strand
gugaucaauuauucaaucg

SEQ ID NO: 1964910 - RNA, 19 nt, Homo sapiens
  misc_RNA (1)...(19): siRNA sense strand
ccuggaugccuucgacuug

SEQ ID NO: 1964911 - RNA, 19 nt, Homo sapiens
  misc_RNA (1)...(19): siRNA sense strand
aagccuguguccucgauuc

SEQ ID NO: 1964912 - RNA, 19 nt, Homo sapiens
  misc_RNA (1)...(19): siRNA sense strand
agaagccuguguccucgau

SEQ ID NO: 1964913 - RNA, 19 nt, Homo sapiens
  misc_RNA (1)...(19): siRNA sense strand
ucuacgaugacaccaguaa

SEQ ID NO: 1964914 - RNA, 19 nt, Homo sapiens
  misc_RNA (1)...(19): siRNA sense strand
agaagaaggaagaugaaag

SEQ ID NO: 1964915 - RNA, 19 nt, Homo sapiens
  misc_RNA (1)...(19): siRNA sense strand
ggaaagaaauggaagaauu

SEQ ID NO: 1964916 - RNA, 19 nt, Homo sapiens
  misc_RNA (1)...(19): siRNA sense strand
gaaacuagaaacaccauua

SEQ ID NO: 1964917 - RNA, 19 nt, Homo sapiens
  misc_RNA (1)...(19): siRNA sense strand
aaacugaacuuuacagaug

SEQ ID NO: 1964918 - RNA, 19 nt, Homo sapiens
  misc_RNA (1)...(19): siRNA sense strand
gaaagaaauggaagaauug

SEQ ID NO: 1964919 - RNA, 19 nt, Homo sapiens
  misc_RNA (1)...(19): siRNA sense strand
gauguuggcuucacuuaau

SEQ ID NO: 1964920 - RNA, 19 nt, Homo sapiens
  misc_RNA (1)...(19): siRNA sense strand
gaacaagucaaucagauau

SEQ ID NO: 1964921 - RNA, 19 nt, Homo sapiens
  misc_RNA (1)...(19): siRNA sense strand
ggacacagaugacagugau

SEQ ID NO: 1964922 - RNA, 19 nt, Homo sapiens
  misc_RNA (1)...(19): siRNA sense strand
gauagacgcucugcuguug

SEQ ID NO: 1964923 - RNA, 19 nt, Homo sapiens
  misc_RNA (1)...(19): siRNA sense strand
gagugaaacugcaauggaa

SEQ ID NO: 1964924 - RNA, 19 nt, Homo sapiens
  misc_RNA (1)...(19): siRNA sense strand
gaaggaguaucugcagaaa

SEQ ID NO: 1964925 - RNA, 19 nt, Homo sapiens
  misc_RNA (1)...(19): siRNA sense strand
agaaagaaaugaccucaau

SEQ ID NO: 1964926 - RNA, 19 nt, Homo sapiens
  misc_RNA (1)...(19): siRNA sense strand
ggaacaagucaaucagaua

SEQ ID NO: 1964927 - RNA, 19 nt, Homo sapiens
  misc_RNA (1)...(19): siRNA sense strand
caagugagguugcacaaag

SEQ ID NO: 1964928 - RNA, 19 nt, Homo sapiens
  misc_RNA (1)...(19): siRNA sense strand
gcaacaggauaacaauaau

SEQ ID NO: 1964929 - RNA, 19 nt, Homo sapiens
  misc_RNA (1)...(19): siRNA sense strand
gacaucaucucccacagaa

SEQ ID NO: 1964930 - RNA, 19 nt, Homo sapiens
  misc_RNA (1)...(19): siRNA sense strand
gaaauggaagaauuggaua

SEQ ID NO: 1964931 - RNA, 19 nt, Homo sapiens
  misc_RNA (1)...(19): siRNA sense strand
ggugcuaacuuuguaauga

SEQ ID NO: 1964932 - RNA, 19 nt, Homo sapiens
  misc_RNA (1)...(19): siRNA sense strand
uggaagaauuggauacuuu

SEQ ID NO: 1964933 - RNA, 19 nt, Homo sapiens
  misc_RNA (1)...(19): siRNA sense strand
uuagaagagucaaggauuu

SEQ ID NO: 1964934 - RNA, 19 nt, Homo sapiens
  misc_RNA (1)...(19): siRNA sense strand
ucagauauuucaacucuuc

SEQ ID NO: 1964935 - RNA, 19 nt, Homo sapiens
  misc_RNA (1)...(19): siRNA sense strand
acagaugaauggagcagua

SEQ ID NO: 1964936 - RNA, 19 nt, Homo sapiens
  misc_RNA (1)...(19): siRNA sense strand
aaaugaggaugaggaauaa

SEQ ID NO: 1964937 - RNA, 19 nt, Homo sapiens
  misc_RNA (1)...(19): siRNA sense strand
gcaucaaguucuagaggaa

SEQ ID NO: 1964938 - RNA, 19 nt, Homo sapiens
  misc_RNA (1)...(19): siRNA sense strand
agaaaugaccucaaucuug

SEQ ID NO: 1964939 - RNA, 19 nt, Homo sapiens
  misc_RNA (1)...(19): siRNA sense strand
gaacucaugcuggaagaaa

SEQ ID NO: 1964940 - RNA, 19 nt, Homo sapiens
  misc_RNA (1)...(19): siRNA sense strand
gagcaacaggauaacaaua

SEQ ID NO: 1964941 - RNA, 19 nt, Homo sapiens
  misc_RNA (1)...(19): siRNA sense strand
cagaggaugugacaaaaua

SEQ ID NO: 1964942 - RNA, 19 nt, Homo sapiens
  misc_RNA (1)...(19): siRNA sense strand
ggaaggaguaucugcagaa

SEQ ID NO: 1964943 - RNA, 19 nt, Homo sapiens
  misc_RNA (1)...(19): siRNA sense strand
uggcuucacuuaaucauau

SEQ ID NO: 1964944 - RNA, 19 nt, Homo sapiens
  misc_RNA (1)...(19): siRNA sense strand
gaucccaggugcaagguau

SEQ ID NO: 1964945 - RNA, 19 nt, Homo sapiens
  misc_RNA (1)...(19): siRNA sense strand
gaacuuuacagaugaaugg

SEQ ID NO: 1964946 - RNA, 19 nt, Homo sapiens
  misc_RNA (1)...(19): siRNA sense strand
ccacacacaucaucagucu

SEQ ID NO: 1964947 - RNA, 19 nt, Homo sapiens
  misc_RNA (1)...(19): siRNA sense strand
caacuacaagcacaauaaa

SEQ ID NO: 1964948 - RNA, 19 nt, Homo sapiens
  misc_RNA (1)...(19): siRNA sense strand
aaacugcaauggaaguaga

SEQ ID NO: 1964949 - RNA, 19 nt, Homo sapiens
  misc_RNA (1)...(19): siRNA sense strand
ggaagaauuggauacuuug

SEQ ID NO: 1964950 - RNA, 19 nt, Homo sapiens
  misc_RNA (1)...(19): siRNA sense strand
ugagagugcuaccaaugaa

SEQ ID NO: 1964951 - RNA, 19 nt, Homo sapiens
  misc_RNA (1)...(19): siRNA sense strand
gaauggagcaguauagcau

SEQ ID NO: 1964952 - RNA, 19 nt, Homo sapiens
  misc_RNA (1)...(19): siRNA sense strand
gaaggaacaacuacaagca

SEQ ID NO: 1964953 - RNA, 19 nt, Homo sapiens
  misc_RNA (1)...(19): siRNA sense strand
caucgcaacuccaggacaa

SEQ ID NO: 1964954 - RNA, 19 nt, Homo sapiens
  misc_RNA (1)...(19): siRNA sense strand
ccaaggaaccagaaacuuc

SEQ ID NO: 1964955 - RNA, 19 nt, Homo sapiens
  misc_RNA (1)...(19): siRNA sense strand
caacucaggagaaagaaau

SEQ ID NO: 1964956 - RNA, 19 nt, Homo sapiens
  misc_RNA (1)...(19): siRNA sense strand
ccagaaacuucagaucaga

SEQ ID NO: 1964957 - RNA, 19 nt, Homo sapiens
  misc_RNA (1)...(19): siRNA sense strand
uacuccagcugaacaauuu

SEQ ID NO: 1964958 - RNA, 19 nt, Homo sapiens
  misc_RNA (1)...(19): siRNA sense strand
gaagaauuggauacuuuga

SEQ ID NO: 1964959 - RNA, 19 nt, Homo sapiens
  misc_RNA (1)...(19): siRNA sense strand
caauagaggacgaggaaga

SEQ ID NO: 1964960 - RNA, 19 nt, Homo sapiens
  misc_RNA (1)...(19): siRNA sense strand
gaacaacuacaagcacaau

SEQ ID NO: 1964961 - RNA, 19 nt, Homo sapiens
  misc_RNA (1)...(19): siRNA sense strand
ccacagaaagcccucauuc

SEQ ID NO: 1964962 - RNA, 19 nt, Homo sapiens
  misc_RNA (1)...(19): siRNA sense strand
gcucugcuguugcccguau

SEQ ID NO: 1964963 - RNA, 19 nt, Homo sapiens
  misc_RNA (1)...(19): siRNA sense strand
caaggaaccagaaacuuca

SEQ ID NO: 1964964 - RNA, 19 nt, Homo sapiens
  misc_RNA (1)...(19): siRNA sense strand
aacaaaagcuccugaagaa

SEQ ID NO: 1964965 - RNA, 19 nt, Homo sapiens
  misc_RNA (1)...(19): siRNA sense strand
ugaagaagcaagugagguu

SEQ ID NO: 1964966 - RNA, 19 nt, Homo sapiens
  misc_RNA (1)...(19): siRNA sense strand
acaacuacaagcacaauaa

SEQ ID NO: 1964967 - RNA, 19 nt, Homo sapiens
  misc_RNA (1)...(19): siRNA sense strand
gaaggagacagugaaacaa

SEQ ID NO: 1964968 - RNA, 19 nt, Homo sapiens
  misc_RNA (1)...(19): siRNA sense strand
ggacaccacacacaucauc

SEQ ID NO: 1964969 - RNA, 19 nt, Homo sapiens
  misc_RNA (1)...(19): siRNA sense strand
uuagaaggccgcuaguaaa

SEQ ID NO: 1964970 - RNA, 19 nt, Homo sapiens
  misc_RNA (1)...(19): siRNA sense strand
gaaagaaaugaccucaauc

SEQ ID NO: 1964971 - RNA, 19 nt, Homo sapiens
  misc_RNA (1)...(19): siRNA sense strand
gcacagaaggaacaacuac

SEQ ID NO: 1964972 - RNA, 19 nt, Homo sapiens
  misc_RNA (1)...(19): siRNA sense strand
gaagugagugaaacugcaa

SEQ ID NO: 1964973 - RNA, 19 nt, Homo sapiens
  misc_RNA (1)...(19): siRNA sense strand
ggauguuggcuucacuuaa

SEQ ID NO: 1964974 - RNA, 19 nt, Homo sapiens
  misc_RNA (1)...(19): siRNA sense strand
acaaacagcucggauccau

SEQ ID NO: 1964975 - RNA, 19 nt, Homo sapiens
  misc_RNA (1)...(19): siRNA sense strand
guuccagccucuuucaugu

SEQ ID NO: 1964976 - RNA, 19 nt, Homo sapiens
  misc_RNA (1)...(19): siRNA sense strand
agaaacaccauuacaguuc

SEQ ID NO: 1964977 - RNA, 19 nt, Homo sapiens
  misc_RNA (1)...(19): siRNA sense strand
cagaugacagugaugauga

SEQ ID NO: 1964978 - RNA, 19 nt, Homo sapiens
  misc_RNA (1)...(19): siRNA sense strand
gauuccaacucaggagaaa

SEQ ID NO: 1964979 - RNA, 19 nt, Homo sapiens
  misc_RNA (1)...(19): siRNA sense strand
gcacuacagcacagaagga

SEQ ID NO: 1964980 - RNA, 19 nt, Homo sapiens
  misc_RNA (1)...(19): siRNA sense strand
caacaggauaacaauaaug

SEQ ID NO: 1964981 - RNA, 19 nt, Homo sapiens
  misc_RNA (1)...(19): siRNA sense strand
aaacagcucggauccaugu

SEQ ID NO: 1964982 - RNA, 19 nt, Homo sapiens
  misc_RNA (1)...(19): siRNA sense strand
guuggagggugacagauca

SEQ ID NO: 1964983 - RNA, 19 nt, Homo sapiens
  misc_RNA (1)...(19): siRNA sense strand
ugaagaaucaucagaggau

SEQ ID NO: 1964984 - RNA, 19 nt, Homo sapiens
  misc_RNA (1)...(19): siRNA sense strand
aaaaugaggaugaggaaua

SEQ ID NO: 1964985 - RNA, 19 nt, Homo sapiens
  misc_RNA (1)...(19): siRNA sense strand
uagaaacaccauuacaguu

SEQ ID NO: 1964986 - RNA, 19 nt, Homo sapiens
  misc_RNA (1)...(19): siRNA sense strand
gauaaaagaagccaauuuc

SEQ ID NO: 1964987 - RNA, 19 nt, Homo sapiens
  misc_RNA (1)...(19): siRNA sense strand
aguauagcaucaaguucua

SEQ ID NO: 1964988 - RNA, 19 nt, Homo sapiens
  misc_RNA (1)...(19): siRNA sense strand
caacuccaggacaaugaua

SEQ ID NO: 1964989 - RNA, 19 nt, Homo sapiens
  misc_RNA (1)...(19): siRNA sense strand
gaaccagaaacuucagauc

SEQ ID NO: 1964990 - RNA, 19 nt, Homo sapiens
  misc_RNA (1)...(19): siRNA sense strand
gaauugggagccauugcaa

SEQ ID NO: 1964991 - RNA, 19 nt, Homo sapiens
  misc_RNA (1)...(19): siRNA sense strand
caucaucucccacagaaag

SEQ ID NO: 1964992 - RNA, 19 nt, Homo sapiens
  misc_RNA (1)...(19): siRNA sense strand
aagaaucugcuucaucuga

SEQ ID NO: 1964993 - RNA, 19 nt, Homo sapiens
  misc_RNA (1)...(19): siRNA sense strand
aaagaaaugaccucaaucu

SEQ ID NO: 1964994 - RNA, 19 nt, Homo sapiens
  misc_RNA (1)...(19): siRNA sense strand
gaugaauggagcaguauag

SEQ ID NO: 1964995 - RNA, 19 nt, Homo sapiens
  misc_RNA (1)...(19): siRNA sense strand
ccagaaggagacagugaaa

SEQ ID NO: 1964996 - RNA, 19 nt, Homo sapiens
  misc_RNA (1)...(19): siRNA sense strand
uggaacaagucaaucagau

SEQ ID NO: 1964997 - RNA, 19 nt, Homo sapiens
  misc_RNA (1)...(19): siRNA sense strand
cgacaucaucucccacaga

SEQ ID NO: 1964998 - RNA, 19 nt, Homo sapiens
  misc_RNA (1)...(19): siRNA sense strand
auaaucaugugguaaacug

SEQ ID NO: 1964999 - RNA, 19 nt, Homo sapiens
  misc_RNA (1)...(19): siRNA sense strand
agaauuggauacuuugaac

SEQ ID NO: 1965000 - RNA, 19 nt, Homo sapiens
  misc_RNA (1)...(19): siRNA sense strand
gagagugcuaccaaugaaa

SEQ ID NO: 1965001 - RNA, 19 nt, Homo sapiens
  misc_RNA (1)...(19): siRNA sense strand
gagaaagaaaugaccucaa

SEQ ID NO: 1965002 - RNA, 19 nt, Homo sapiens
  misc_RNA (1)...(19): siRNA sense strand
agaaggagacagugaaaca

SEQ ID NO: 1965003 - RNA, 19 nt, Homo sapiens
  misc_RNA (1)...(19): siRNA sense strand
ggaauugggagccauugca

SEQ ID NO: 1965004 - RNA, 19 nt, Homo sapiens
  misc_RNA (1)...(19): siRNA sense strand
gauauuucaacucuuccua

SEQ ID NO: 1965005 - RNA, 19 nt, Homo sapiens
  misc_RNA (1)...(19): siRNA sense strand
cuucuucugugguuaacaa

SEQ ID NO: 1965006 - RNA, 19 nt, Homo sapiens
  misc_RNA (1)...(19): siRNA sense strand
agaaaggaaagaaauggaa

SEQ ID NO: 1965007 - RNA, 19 nt, Homo sapiens
  misc_RNA (1)...(19): siRNA sense strand
ggagcaguauagcaucaag

SEQ ID NO: 1965008 - RNA, 19 nt, Homo sapiens
  misc_RNA (1)...(19): siRNA sense strand
agcaacaggauaacaauaa

SEQ ID NO: 1965009 - RNA, 19 nt, Homo sapiens
  misc_RNA (1)...(19): siRNA sense strand
ucggauccaugucacuuga

SEQ ID NO: 1965010 - RNA, 19 nt, Homo sapiens
  misc_RNA (1)...(19): siRNA sense strand
uuacaguuccagccucuuu

SEQ ID NO: 1965011 - RNA, 19 nt, Homo sapiens
  misc_RNA (1)...(19): siRNA sense strand
cuagaaacaccauuacagu

SEQ ID NO: 1965012 - RNA, 19 nt, Homo sapiens
  misc_RNA (1)...(19): siRNA sense strand
gugcuaacuuuguaaugag

SEQ ID NO: 1965013 - RNA, 19 nt, Homo sapiens
  misc_RNA (1)...(19): siRNA sense strand
gacaaaauaucaggaagga

SEQ ID NO: 1965014 - RNA, 19 nt, Homo sapiens
  misc_RNA (1)...(19): siRNA sense strand
gugaaccaguuuuaaguuu

SEQ ID NO: 1965015 - RNA, 19 nt, Homo sapiens
  misc_RNA (1)...(19): siRNA sense strand
gcauuuaccuugauaagaa

SEQ ID NO: 1965016 - RNA, 19 nt, Homo sapiens
  misc_RNA (1)...(19): siRNA sense strand
ucacuuggcuggauguuua

SEQ ID NO: 1965017 - RNA, 19 nt, Homo sapiens
  misc_RNA (1)...(19): siRNA sense strand
ggacagugcugguguguug

SEQ ID NO: 1965018 - RNA, 19 nt, Homo sapiens
  misc_RNA (1)...(19): siRNA sense strand
gaaauguagucgccauaaa

SEQ ID NO: 1965019 - RNA, 19 nt, Homo sapiens
  misc_RNA (1)...(19): siRNA sense strand
gagagaagcagauucgaua

SEQ ID NO: 1965020 - RNA, 19 nt, Homo sapiens
  misc_RNA (1)...(19): siRNA sense strand
ugacagauauggaaaugaa

SEQ ID NO: 1965021 - RNA, 19 nt, Homo sapiens
  misc_RNA (1)...(19): siRNA sense strand
gaacaaauuccgagacgaa

SEQ ID NO: 1965022 - RNA, 19 nt, Homo sapiens
  misc_RNA (1)...(19): siRNA sense strand
gauccaugcuuaaagauga

SEQ ID NO: 1965023 - RNA, 19 nt, Homo sapiens
  misc_RNA (1)...(19): siRNA sense strand
aaacagaucucagucaaau

SEQ ID NO: 1965024 - RNA, 19 nt, Homo sapiens
  misc_RNA (1)...(19): siRNA sense strand
uaaaugguguugcagauug

SEQ ID NO: 1965025 - RNA, 19 nt, Homo sapiens
  misc_RNA (1)...(19): siRNA sense strand
gcuuaaagaugaaauguag

SEQ ID NO: 1965026 - RNA, 19 nt, Homo sapiens
  misc_RNA (1)...(19): siRNA sense strand
gaugaaagaagcaggagua

SEQ ID NO: 1965027 - RNA, 19 nt, Homo sapiens
  misc_RNA (1)...(19): siRNA sense strand
gaaagaagcaggaguagac

SEQ ID NO: 1965028 - RNA, 19 nt, Homo sapiens
  misc_RNA (1)...(19): siRNA sense strand
gucaugggauccagaauaa

SEQ ID NO: 1965029 - RNA, 19 nt, Homo sapiens
  misc_RNA (1)...(19): siRNA sense strand
gcugguguguugacagaua

SEQ ID NO: 1965030 - RNA, 19 nt, Homo sapiens
  misc_RNA (1)...(19): siRNA sense strand
aagcagaaauguuaagaga

SEQ ID NO: 1965031 - RNA, 19 nt, Homo sapiens
  misc_RNA (1)...(19): siRNA sense strand
ggacugaugaugaggauga

SEQ ID NO: 1965032 - RNA, 19 nt, Homo sapiens
  misc_RNA (1)...(19): siRNA sense strand
ggaaguggcaaacagauug

SEQ ID NO: 1965033 - RNA, 19 nt, Homo sapiens
  misc_RNA (1)...(19): siRNA sense strand
gagacgaaguagaggauga

SEQ ID NO: 1965034 - RNA, 19 nt, Homo sapiens
  misc_RNA (1)...(19): siRNA sense strand
caaggacaguuuaauaucu

SEQ ID NO: 1965035 - RNA, 19 nt, Homo sapiens
  misc_RNA (1)...(19): siRNA sense strand
gaaaacagaucucagucaa

SEQ ID NO: 1965036 - RNA, 19 nt, Homo sapiens
  misc_RNA (1)...(19): siRNA sense strand
uaacagacuugauacaaac

SEQ ID NO: 1965037 - RNA, 19 nt, Homo sapiens
  misc_RNA (1)...(19): siRNA sense strand
gaugaagacgauauuauga

SEQ ID NO: 1965038 - RNA, 19 nt, Homo sapiens
  misc_RNA (1)...(19): siRNA sense strand
gcccauguccuucagauaa

SEQ ID NO: 1965039 - RNA, 19 nt, Homo sapiens
  misc_RNA (1)...(19): siRNA sense strand
caaauuccgagacgaagua

SEQ ID NO: 1965040 - RNA, 19 nt, Homo sapiens
  misc_RNA (1)...(19): siRNA sense strand
ccaaggcauucuucaauuc

SEQ ID NO: 1965041 - RNA, 19 nt, Homo sapiens
  misc_RNA (1)...(19): siRNA sense strand
ucagaagcauuuaccuuga

SEQ ID NO: 1965042 - RNA, 19 nt, Homo sapiens
  misc_RNA (1)...(19): siRNA sense strand
cgaaguagaggaugauuau

SEQ ID NO: 1965043 - RNA, 19 nt, Homo sapiens
  misc_RNA (1)...(19): siRNA sense strand
cagaauaaaugguguugca

SEQ ID NO: 1965044 - RNA, 19 nt, Homo sapiens
  misc_RNA (1)...(19): siRNA sense strand
gcagugaccuggaguucag

SEQ ID NO: 1965045 - RNA, 19 nt, Homo sapiens
  misc_RNA (1)...(19): siRNA sense strand
ucaccacaaucucucagua

SEQ ID NO: 1965046 - RNA, 19 nt, Homo sapiens
  misc_RNA (1)...(19): siRNA sense strand
gauaagcccaccaguacaa

SEQ ID NO: 1965047 - RNA, 19 nt, Homo sapiens
  misc_RNA (1)...(19): siRNA sense strand
ugaagaugguuacuacaug

SEQ ID NO: 1965048 - RNA, 19 nt, Homo sapiens
  misc_RNA (1)...(19): siRNA sense strand
acacauacaaggacaguuu

SEQ ID NO: 1965049 - RNA, 19 nt, Homo sapiens
  misc_RNA (1)...(19): siRNA sense strand
ucagauaagcccaccagua

SEQ ID NO: 1965050 - RNA, 19 nt, Homo sapiens
  misc_RNA (1)...(19): siRNA sense strand
gugaugaccaugauguaua

SEQ ID NO: 1965051 - RNA, 19 nt, Homo sapiens
  misc_RNA (1)...(19): siRNA sense strand
ugaagaugaugaugaagau

SEQ ID NO: 1965052 - RNA, 19 nt, Homo sapiens
  misc_RNA (1)...(19): siRNA sense strand
aguacaagcagaaauguua

SEQ ID NO: 1965053 - RNA, 19 nt, Homo sapiens
  misc_RNA (1)...(19): siRNA sense strand
agaagcauuuaccuugaua

SEQ ID NO: 1965054 - RNA, 19 nt, Homo sapiens
  misc_RNA (1)...(19): siRNA sense strand
aacaauggcucaccacaau

SEQ ID NO: 1965055 - RNA, 19 nt, Homo sapiens
  misc_RNA (1)...(19): siRNA sense strand
cagauugugcuauagauuu

SEQ ID NO: 1965056 - RNA, 19 nt, Homo sapiens
  misc_RNA (1)...(19): siRNA sense strand
gaugaugaagacgauauua

SEQ ID NO: 1965057 - RNA, 19 nt, Homo sapiens
  misc_RNA (1)...(19): siRNA sense strand
guggaggggucccauauua

SEQ ID NO: 1965058 - RNA, 19 nt, Homo sapiens
  misc_RNA (1)...(19): siRNA sense strand
ucagagcucagaagcauuu

SEQ ID NO: 1965059 - RNA, 19 nt, Homo sapiens
  misc_RNA (1)...(19): siRNA sense strand
accagcaucuugccaauuu

SEQ ID NO: 1965060 - RNA, 19 nt, Homo sapiens
  misc_RNA (1)...(19): siRNA sense strand
guacaagcagaaauguuaa

SEQ ID NO: 1965061 - RNA, 19 nt, Homo sapiens
  misc_RNA (1)...(19): siRNA sense strand
gagcucagcaauauucaga

SEQ ID NO: 1965062 - RNA, 19 nt, Homo sapiens
  misc_RNA (1)...(19): siRNA sense strand
uacaaacuaugaccugcua

SEQ ID NO: 1965063 - RNA, 19 nt, Homo sapiens
  misc_RNA (1)...(19): siRNA sense strand
aaggauccaugcuuaaaga

SEQ ID NO: 1965064 - RNA, 19 nt, Homo sapiens
  misc_RNA (1)...(19): siRNA sense strand
gaagaugaaauugaagaug

SEQ ID NO: 1965065 - RNA, 19 nt, Homo sapiens
  misc_RNA (1)...(19): siRNA sense strand
ugaauggacugaugaugag

SEQ ID NO: 1965066 - RNA, 19 nt, Homo sapiens
  misc_RNA (1)...(19): siRNA sense strand
ugaugaagaugguuacuac

SEQ ID NO: 1965067 - RNA, 19 nt, Homo sapiens
  misc_RNA (1)...(19): siRNA sense strand
gauaagaaugaacagugua

SEQ ID NO: 1965068 - RNA, 19 nt, Homo sapiens
  misc_RNA (1)...(19): siRNA sense strand
ugauaagaaugaacagugu

SEQ ID NO: 1965069 - RNA, 19 nt, Homo sapiens
  misc_RNA (1)...(19): siRNA sense strand
gaagucaugggauccagaa

SEQ ID NO: 1965070 - RNA, 19 nt, Homo sapiens
  misc_RNA (1)...(19): siRNA sense strand
ggucauaccuacucuuuuc

SEQ ID NO: 1965071 - RNA, 19 nt, Homo sapiens
  misc_RNA (1)...(19): siRNA sense strand
gcagauugugcuauagauu

SEQ ID NO: 1965072 - RNA, 19 nt, Homo sapiens
  misc_RNA (1)...(19): siRNA sense strand
gcucagcaauauucagaag

SEQ ID NO: 1965073 - RNA, 19 nt, Homo sapiens
  misc_RNA (1)...(19): siRNA sense strand
cagauaagcccaccaguac

SEQ ID NO: 1965074 - RNA, 19 nt, Homo sapiens
  misc_RNA (1)...(19): siRNA sense strand
uagaauaucaggcaugugu

SEQ ID NO: 1965075 - RNA, 19 nt, Homo sapiens
  misc_RNA (1)...(19): siRNA sense strand
acuaugaccugcuauugga

SEQ ID NO: 1965076 - RNA, 19 nt, Homo sapiens
  misc_RNA (1)...(19): siRNA sense strand
aguagaggaugauuauuuc

SEQ ID NO: 1965077 - RNA, 19 nt, Homo sapiens
  misc_RNA (1)...(19): siRNA sense strand
caugaaaguggaagucaaa

SEQ ID NO: 1965078 - RNA, 19 nt, Homo sapiens
  misc_RNA (1)...(19): siRNA sense strand
ucaggcaugugucuuagga

SEQ ID NO: 1965079 - RNA, 19 nt, Homo sapiens
  misc_RNA (1)...(19): siRNA sense strand
caaacuaugaccugcuauu

SEQ ID NO: 1965080 - RNA, 19 nt, Homo sapiens
  misc_RNA (1)...(19): siRNA sense strand
ccacaaucucucaguauga

SEQ ID NO: 1965081 - RNA, 19 nt, Homo sapiens
  misc_RNA (1)...(19): siRNA sense strand
gaagacgauauuaugaaug

SEQ ID NO: 1965082 - RNA, 19 nt, Homo sapiens
  misc_RNA (1)...(19): siRNA sense strand
gaagcaggaguagaccaua

SEQ ID NO: 1965083 - RNA, 19 nt, Homo sapiens
  misc_RNA (1)...(19): siRNA sense strand
gugcugguguguugacaga

SEQ ID NO: 1965084 - RNA, 19 nt, Homo sapiens
  misc_RNA (1)...(19): siRNA sense strand
cagaagcauuuaccuugau

SEQ ID NO: 1965085 - RNA, 19 nt, Homo sapiens
  misc_RNA (1)...(19): siRNA sense strand
guucagauggucauaccua

SEQ ID NO: 1965086 - RNA, 19 nt, Homo sapiens
  misc_RNA (1)...(19): siRNA sense strand
gaugauuauuuccgcacuu

SEQ ID NO: 1965087 - RNA, 19 nt, Homo sapiens
  misc_RNA (1)...(19): siRNA sense strand
ugaugaagacgauauuaug

SEQ ID NO: 1965088 - RNA, 19 nt, Homo sapiens
  misc_RNA (1)...(19): siRNA sense strand
guugacagauauggaaaug

SEQ ID NO: 1965089 - RNA, 19 nt, Homo sapiens
  misc_RNA (1)...(19): siRNA sense strand
gcucagaagcauuuaccuu

SEQ ID NO: 1965090 - RNA, 19 nt, Homo sapiens
  misc_RNA (1)...(19): siRNA sense strand
uguugcagauugugcuaua

SEQ ID NO: 1965091 - RNA, 19 nt, Homo sapiens
  misc_RNA (1)...(19): siRNA sense strand
caugggauccagaauaaau

SEQ ID NO: 1965092 - RNA, 19 nt, Homo sapiens
  misc_RNA (1)...(19): siRNA sense strand
ggugucagccguacugugu

SEQ ID NO: 1965093 - RNA, 19 nt, Homo sapiens
  misc_RNA (1)...(19): siRNA sense strand
gaaauugaagaugaugaug

SEQ ID NO: 1965094 - RNA, 19 nt, Homo sapiens
  misc_RNA (1)...(19): siRNA sense strand
aauaaaugguguugcagau

SEQ ID NO: 1965095 - RNA, 19 nt, Homo sapiens
  misc_RNA (1)...(19): siRNA sense strand
guuacuacaugccaacaca

SEQ ID NO: 1965096 - RNA, 19 nt, Homo sapiens
  misc_RNA (1)...(19): siRNA sense strand
gacuugauacaaacuauga

SEQ ID NO: 1965097 - RNA, 19 nt, Homo sapiens
  misc_RNA (1)...(19): siRNA sense strand
aggcaugugucuuaggaaa

SEQ ID NO: 1965098 - RNA, 19 nt, Homo sapiens
  misc_RNA (1)...(19): siRNA sense strand
ugaaauguagucgccauaa

SEQ ID NO: 1965099 - RNA, 19 nt, Homo sapiens
  misc_RNA (1)...(19): siRNA sense strand
guaccaaggcauucuucaa

SEQ ID NO: 1965100 - RNA, 19 nt, Homo sapiens
  misc_RNA (1)...(19): siRNA sense strand
ggucggacggcgguaauuu

SEQ ID NO: 1965101 - RNA, 19 nt, Homo sapiens
  misc_RNA (1)...(19): siRNA sense strand
gguaaagaagcuccuagga

SEQ ID NO: 1965102 - RNA, 19 nt, Homo sapiens
  misc_RNA (1)...(19): siRNA sense strand
accaaggcauucuucaauu

SEQ ID NO: 1965103 - RNA, 19 nt, Homo sapiens
  misc_RNA (1)...(19): siRNA sense strand
gaagcauuuaccuugauaa

SEQ ID NO: 1965104 - RNA, 19 nt, Homo sapiens
  misc_RNA (1)...(19): siRNA sense strand
cagacuugauacaaacuau

SEQ ID NO: 1965105 - RNA, 19 nt, Homo sapiens
  misc_RNA (1)...(19): siRNA sense strand
gggaaguggcaaacagauu

SEQ ID NO: 1965106 - RNA, 19 nt, Homo sapiens
  misc_RNA (1)...(19): siRNA sense strand
acagaucucagucaaaugu

SEQ ID NO: 1965107 - RNA, 19 nt, Homo sapiens
  misc_RNA (1)...(19): siRNA sense strand
uaaaguaugcauugcucaa

SEQ ID NO: 1965108 - RNA, 19 nt, Homo sapiens
  misc_RNA (1)...(19): siRNA sense strand
gaaguagaggaugauuauu

SEQ ID NO: 1965109 - RNA, 19 nt, Homo sapiens
  misc_RNA (1)...(19): siRNA sense strand
uuucaugaauggacugaug

SEQ ID NO: 1965110 - RNA, 19 nt, Homo sapiens
  misc_RNA (1)...(19): siRNA sense strand
agucaugggauccagaaua

SEQ ID NO: 1965111 - RNA, 19 nt, Homo sapiens
  misc_RNA (1)...(19): siRNA sense strand
aaacaauggcucaccacaa

SEQ ID NO: 1965112 - RNA, 19 nt, Homo sapiens
  misc_RNA (1)...(19): siRNA sense strand
aaacuaugaccugcuauug

SEQ ID NO: 1965113 - RNA, 19 nt, Homo sapiens
  misc_RNA (1)...(19): siRNA sense strand
gaaaguggaagucaaaaca

SEQ ID NO: 1965114 - RNA, 19 nt, Homo sapiens
  misc_RNA (1)...(19): siRNA sense strand
ucaugaaaguggaagucaa

SEQ ID NO: 1965115 - RNA, 19 nt, Homo sapiens
  misc_RNA (1)...(19): siRNA sense strand
gcaagcaguuucugucuga

SEQ ID NO: 1965116 - RNA, 19 nt, Homo sapiens
  misc_RNA (1)...(19): siRNA sense strand
gaacauggccacccacuuc

SEQ ID NO: 1965117 - RNA, 19 nt, Homo sapiens
  misc_RNA (1)...(19): siRNA sense strand
caacucagccugcacaaug

SEQ ID NO: 1965118 - RNA, 19 nt, Homo sapiens
  misc_RNA (1)...(19): siRNA sense strand
ggacauaauggagcucuga

SEQ ID NO: 1965119 - RNA, 19 nt, Homo sapiens
  misc_RNA (1)...(19): siRNA sense strand
gaggagcugugcccaugag

SEQ ID NO: 1965120 - RNA, 19 nt, Homo sapiens
  misc_RNA (1)...(19): siRNA sense strand
aacucagccugcacaauga

SEQ ID NO: 1965121 - RNA, 19 nt, Homo sapiens
  misc_RNA (1)...(19): siRNA sense strand
cggaggagauguacauuca

SEQ ID NO: 1965122 - RNA, 19 nt, Homo sapiens
  misc_RNA (1)...(19): siRNA sense strand
ggaagaguccggaggagau

SEQ ID NO: 1965123 - RNA, 19 nt, Homo sapiens
  misc_RNA (1)...(19): siRNA sense strand
agauguacauucagcagaa

SEQ ID NO: 1965124 - RNA, 19 nt, Homo sapiens
  misc_RNA (1)...(19): siRNA sense strand
gaagaguccggaggagaug

SEQ ID NO: 1965125 - RNA, 19 nt, Homo sapiens
  misc_RNA (1)...(19): siRNA sense strand
gaugggaucaaaccugaca

SEQ ID NO: 1965126 - RNA, 19 nt, Homo sapiens
  misc_RNA (1)...(19): siRNA sense strand
cggaagaccggaggcagua

SEQ ID NO: 1965127 - RNA, 19 nt, Homo sapiens
  misc_RNA (1)...(19): siRNA sense strand
ugcggaagaugggaucaaa

SEQ ID NO: 1965128 - RNA, 19 nt, Homo sapiens
  misc_RNA (1)...(19): siRNA sense strand
gauguacauucagcagaag

SEQ ID NO: 1965129 - RNA, 19 nt, Homo sapiens
  misc_RNA (1)...(19): siRNA sense strand
ggacguggugauggcguuu

SEQ ID NO: 1965130 - RNA, 19 nt, Homo sapiens
  misc_RNA (1)...(19): siRNA sense strand
ccaggucggagacggaaga

SEQ ID NO: 1965131 - RNA, 19 nt, Homo sapiens
  misc_RNA (1)...(19): siRNA sense strand
gcaaagaucuauaucagaa

SEQ ID NO: 1965132 - RNA, 19 nt, Homo sapiens
  misc_RNA (1)...(19): siRNA sense strand
ugaagacucugaucauuua

SEQ ID NO: 1965133 - RNA, 19 nt, Homo sapiens
  misc_RNA (1)...(19): siRNA sense strand
gagcauagccauagugaua

SEQ ID NO: 1965134 - RNA, 19 nt, Homo sapiens
  misc_RNA (1)...(19): siRNA sense strand
gaacgaaugcuagagauua

SEQ ID NO: 1965135 - RNA, 19 nt, Homo sapiens
  misc_RNA (1)...(19): siRNA sense strand
ggucaccaauuaauaguua

SEQ ID NO: 1965136 - RNA, 19 nt, Homo sapiens
  misc_RNA (1)...(19): siRNA sense strand
gaacuagagcuauccaaua

SEQ ID NO: 1965137 - RNA, 19 nt, Homo sapiens
  misc_RNA (1)...(19): siRNA sense strand
gagaauaagugauagugaa

SEQ ID NO: 1965138 - RNA, 19 nt, Homo sapiens
  misc_RNA (1)...(19): siRNA sense strand
gauccuagcucugcuguaa

SEQ ID NO: 1965139 - RNA, 19 nt, Homo sapiens
  misc_RNA (1)...(19): siRNA sense strand
gaaacagcauuauuagaug

SEQ ID NO: 1965140 - RNA, 19 nt, Homo sapiens
  misc_RNA (1)...(19): siRNA sense strand
gaggaaagaugacugaauc

SEQ ID NO: 1965141 - RNA, 19 nt, Homo sapiens
  misc_RNA (1)...(19): siRNA sense strand
cuucaaagcucaacauuau

SEQ ID NO: 1965142 - RNA, 19 nt, Homo sapiens
  misc_RNA (1)...(19): siRNA sense strand
ggacaaacacugaacaaug

SEQ ID NO: 1965143 - RNA, 19 nt, Homo sapiens
  misc_RNA (1)...(19): siRNA sense strand
gaacccaaauggaaccaaa

SEQ ID NO: 1965144 - RNA, 19 nt, Homo sapiens
  misc_RNA (1)...(19): siRNA sense strand
caggacaacuuucaauaaa

SEQ ID NO: 1965145 - RNA, 19 nt, Homo sapiens
  misc_RNA (1)...(19): siRNA sense strand
caaaggaccacaaaccaua

SEQ ID NO: 1965146 - RNA, 19 nt, Homo sapiens
  misc_RNA (1)...(19): siRNA sense strand
gaagagaguccacaaggaa

SEQ ID NO: 1965147 - RNA, 19 nt, Homo sapiens
  misc_RNA (1)...(19): siRNA sense strand
gaaaugaggaacuggauga

SEQ ID NO: 1965148 - RNA, 19 nt, Homo sapiens
  misc_RNA (1)...(19): siRNA sense strand
ggaaacagcaccacuuaga

SEQ ID NO: 1965149 - RNA, 19 nt, Homo sapiens
  misc_RNA (1)...(19): siRNA sense strand
gauaggcgaucucaacaug

SEQ ID NO: 1965150 - RNA, 19 nt, Homo sapiens
  misc_RNA (1)...(19): siRNA sense strand
gagaagaacuaaaacagua

SEQ ID NO: 1965151 - RNA, 19 nt, Homo sapiens
  misc_RNA (1)...(19): siRNA sense strand
ccaaagaaguacagaaaca

SEQ ID NO: 1965152 - RNA, 19 nt, Homo sapiens
  misc_RNA (1)...(19): siRNA sense strand
aagcagagaugaauacgaa

SEQ ID NO: 1965153 - RNA, 19 nt, Homo sapiens
  misc_RNA (1)...(19): siRNA sense strand
gugaugauguugagauuga

SEQ ID NO: 1965154 - RNA, 19 nt, Homo sapiens
  misc_RNA (1)...(19): siRNA sense strand
gcauggaucacaaaucuuu

SEQ ID NO: 1965155 - RNA, 19 nt, Homo sapiens
  misc_RNA (1)...(19): siRNA sense strand
aaaggaaguuuagcugaua

SEQ ID NO: 1965156 - RNA, 19 nt, Homo sapiens
  misc_RNA (1)...(19): siRNA sense strand
agauggagaucguuuaauu

SEQ ID NO: 1965157 - RNA, 19 nt, Homo sapiens
  misc_RNA (1)...(19): siRNA sense strand
guagauacguguaguagca

SEQ ID NO: 1965158 - RNA, 19 nt, Homo sapiens
  misc_RNA (1)...(19): siRNA sense strand
gcauagugauguuucuuug

SEQ ID NO: 1965159 - RNA, 19 nt, Homo sapiens
  misc_RNA (1)...(19): siRNA sense strand
cagacaagcccaucaagua

SEQ ID NO: 1965160 - RNA, 19 nt, Homo sapiens
  misc_RNA (1)...(19): siRNA sense strand
ggaaccaaacauucauuua

SEQ ID NO: 1965161 - RNA, 19 nt, Homo sapiens
  misc_RNA (1)...(19): siRNA sense strand
ggaagaggauuuggaaugg

SEQ ID NO: 1965162 - RNA, 19 nt, Homo sapiens
  misc_RNA (1)...(19): siRNA sense strand
gacaaacacugaacaaugc

SEQ ID NO: 1965163 - RNA, 19 nt, Homo sapiens
  misc_RNA (1)...(19): siRNA sense strand
gaucgaccaucaaggcaaa

SEQ ID NO: 1965164 - RNA, 19 nt, Homo sapiens
  misc_RNA (1)...(19): siRNA sense strand
gaagaaagagaggaauauu

SEQ ID NO: 1965165 - RNA, 19 nt, Homo sapiens
  misc_RNA (1)...(19): siRNA sense strand
gaccauuauucuccagaua

SEQ ID NO: 1965166 - RNA, 19 nt, Homo sapiens
  misc_RNA (1)...(19): siRNA sense strand
gaacaaguaaugucaucaa

SEQ ID NO: 1965167 - RNA, 19 nt, Homo sapiens
  misc_RNA (1)...(19): siRNA sense strand
gcaaaggucaaagagaaua

SEQ ID NO: 1965168 - RNA, 19 nt, Homo sapiens
  misc_RNA (1)...(19): siRNA sense strand
gagaaggcauagugauguu

SEQ ID NO: 1965169 - RNA, 19 nt, Homo sapiens
  misc_RNA (1)...(19): siRNA sense strand
ggcaaaugcugaucuggaa

SEQ ID NO: 1965170 - RNA, 19 nt, Homo sapiens
  misc_RNA (1)...(19): siRNA sense strand
gauagccaguucagugauu

SEQ ID NO: 1965171 - RNA, 19 nt, Homo sapiens
  misc_RNA (1)...(19): siRNA sense strand
gaagauuccaggauuucua

SEQ ID NO: 1965172 - RNA, 19 nt, Homo sapiens
  misc_RNA (1)...(19): siRNA sense strand
gcacuaugaccggacauua

SEQ ID NO: 1965173 - RNA, 19 nt, Homo sapiens
  misc_RNA (1)...(19): siRNA sense strand
ucagcgaucuuauucaaug

SEQ ID NO: 1965174 - RNA, 19 nt, Homo sapiens
  misc_RNA (1)...(19): siRNA sense strand
aaucaucucuggaaaguuc

SEQ ID NO: 1965175 - RNA, 19 nt, Homo sapiens
  misc_RNA (1)...(19): siRNA sense strand
gaccggacauuauaauaca

SEQ ID NO: 1965176 - RNA, 19 nt, Homo sapiens
  misc_RNA (1)...(19): siRNA sense strand
gaauugguguaguaucaga

SEQ ID NO: 1965177 - RNA, 19 nt, Homo sapiens
  misc_RNA (1)...(19): siRNA sense strand
ugacugugaugauggaauu

SEQ ID NO: 1965178 - RNA, 19 nt, Homo sapiens
  misc_RNA (1)...(19): siRNA sense strand
ggagauauaccgcgaauac

SEQ ID NO: 1965179 - RNA, 19 nt, Homo sapiens
  misc_RNA (1)...(19): siRNA sense strand
uagaccaggugaugaagua

SEQ ID NO: 1965180 - RNA, 19 nt, Homo sapiens
  misc_RNA (1)...(19): siRNA sense strand
aaguuuagcugauacugua

SEQ ID NO: 1965181 - RNA, 19 nt, Homo sapiens
  misc_RNA (1)...(19): siRNA sense strand
ggaaguguaccucgagauu

SEQ ID NO: 1965182 - RNA, 19 nt, Homo sapiens
  misc_RNA (1)...(19): siRNA sense strand
agaggaauauucacaguau

SEQ ID NO: 1965183 - RNA, 19 nt, Homo sapiens
  misc_RNA (1)...(19): siRNA sense strand
ucgaguagauguuauagga

SEQ ID NO: 1965184 - RNA, 19 nt, Homo sapiens
  misc_RNA (1)...(19): siRNA sense strand
ggucaaagagaauaaguga

SEQ ID NO: 1965185 - RNA, 19 nt, Homo sapiens
  misc_RNA (1)...(19): siRNA sense strand
ggaucaagcucguguucga

SEQ ID NO: 1965186 - RNA, 19 nt, Homo sapiens
  misc_RNA (1)...(19): siRNA sense strand
caccaaagccucauaaauc

SEQ ID NO: 1965187 - RNA, 19 nt, Homo sapiens
  misc_RNA (1)...(19): siRNA sense strand
ugaggucgaugccuucauu

SEQ ID NO: 1965188 - RNA, 19 nt, Homo sapiens
  misc_RNA (1)...(19): siRNA sense strand
ccucauaaaucaaagaaag

SEQ ID NO: 1965189 - RNA, 19 nt, Homo sapiens
  misc_RNA (1)...(19): siRNA sense strand
ggaguggcccagauacuuu

SEQ ID NO: 1965190 - RNA, 19 nt, Homo sapiens
  misc_RNA (1)...(19): siRNA sense strand
aaacaaaaguggcaagaaa

SEQ ID NO: 1965191 - RNA, 19 nt, Homo sapiens
  misc_RNA (1)...(19): siRNA sense strand
cgagggacccgcacuauga

SEQ ID NO: 1965192 - RNA, 19 nt, Homo sapiens
  misc_RNA (1)...(19): siRNA sense strand
ugauggaauugguguagua

SEQ ID NO: 1965193 - RNA, 19 nt, Homo sapiens
  misc_RNA (1)...(19): siRNA sense strand
gaagaugggaggccaagga

SEQ ID NO: 1965194 - RNA, 19 nt, Homo sapiens
  misc_RNA (1)...(19): siRNA sense strand
ggaagaaagagaggaauau

SEQ ID NO: 1965195 - RNA, 19 nt, Homo sapiens
  misc_RNA (1)...(19): siRNA sense strand
cgaagagaguccacaagga

SEQ ID NO: 1965196 - RNA, 19 nt, Homo sapiens
  misc_RNA (1)...(19): siRNA sense strand
gagaucagaauagaagaua

SEQ ID NO: 1965197 - RNA, 19 nt, Homo sapiens
  misc_RNA (1)...(19): siRNA sense strand
uugcaaaggucaaagagaa

SEQ ID NO: 1965198 - RNA, 19 nt, Homo sapiens
  misc_RNA (1)...(19): siRNA sense strand
ccacauugguacaaacuuc

SEQ ID NO: 1965199 - RNA, 19 nt, Homo sapiens
  misc_RNA (1)...(19): siRNA sense strand
ggaaguguacaacaucauu

SEQ ID NO: 1965200 - RNA, 19 nt, Homo sapiens
  misc_RNA (1)...(19): siRNA sense strand
gauacuguaggacaucuua

SEQ ID NO: 1965201 - RNA, 19 nt, Homo sapiens
  misc_RNA (1)...(19): siRNA sense strand
uguaguagcacaacccuua

SEQ ID NO: 1965202 - RNA, 19 nt, Homo sapiens
  misc_RNA (1)...(19): siRNA sense strand
gggaagaaagagaggaaua

SEQ ID NO: 1965203 - RNA, 19 nt, Homo sapiens
  misc_RNA (1)...(19): siRNA sense strand
caaagccucauaaaucaaa

SEQ ID NO: 1965204 - RNA, 19 nt, Homo sapiens
  misc_RNA (1)...(19): siRNA sense strand
gaggaaguguacaacauca

SEQ ID NO: 1965205 - RNA, 19 nt, Homo sapiens
  misc_RNA (1)...(19): siRNA sense strand
agaauggaauggaagacua

SEQ ID NO: 1965206 - RNA, 19 nt, Homo sapiens
  misc_RNA (1)...(19): siRNA sense strand
ggucggcuuugugcauuua

SEQ ID NO: 1965207 - RNA, 19 nt, Homo sapiens
  misc_RNA (1)...(19): siRNA sense strand
ucauaggcauuccaaagaa

SEQ ID NO: 1965208 - RNA, 19 nt, Homo sapiens
  misc_RNA (1)...(19): siRNA sense strand
ccaaucaucucuggaaagu

SEQ ID NO: 1965209 - RNA, 19 nt, Homo sapiens
  misc_RNA (1)...(19): siRNA sense strand
gucgaugccuucauuaaug

SEQ ID NO: 1965210 - RNA, 19 nt, Homo sapiens
  misc_RNA (1)...(19): siRNA sense strand
agacagggauugugaagca

SEQ ID NO: 1965211 - RNA, 19 nt, Homo sapiens
  misc_RNA (1)...(19): siRNA sense strand
caugaguccuggaauguug

SEQ ID NO: 1965212 - RNA, 19 nt, Homo sapiens
  misc_RNA (1)...(19): siRNA sense strand
ucuguuaccucucccauga

SEQ ID NO: 1965213 - RNA, 19 nt, Homo sapiens
  misc_RNA (1)...(19): siRNA sense strand
gcaaggagccacauuugag

SEQ ID NO: 1965214 - RNA, 19 nt, Homo sapiens
  misc_RNA (1)...(19): siRNA sense strand
guauuagaauggaauggaa

SEQ ID NO: 1965215 - RNA, 19 nt, Homo sapiens
  misc_RNA (1)...(19): siRNA sense strand
ggucugcaauucuguuuua

SEQ ID NO: 1965216 - RNA, 19 nt, Homo sapiens
  misc_RNA (1)...(19): siRNA sense strand
aaucagcgaucuuauucaa

SEQ ID NO: 1965217 - RNA, 19 nt, Homo sapiens
  misc_RNA (1)...(19): siRNA sense strand
gaaaaucagcgaucuuauu

SEQ ID NO: 1965218 - RNA, 19 nt, Homo sapiens
  misc_RNA (1)...(19): siRNA sense strand
gagagaaggcauagugaug

SEQ ID NO: 1965219 - RNA, 19 nt, Homo sapiens
  misc_RNA (1)...(19): siRNA sense strand
aacuagagcuauccaauau

SEQ ID NO: 1965220 - RNA, 19 nt, Homo sapiens
  misc_RNA (1)...(19): siRNA sense strand
aaggagcacuguccaaaga

SEQ ID NO: 1965221 - RNA, 19 nt, Homo sapiens
  misc_RNA (1)...(19): siRNA sense strand
gagaggaauauucacagua

SEQ ID NO: 1965222 - RNA, 19 nt, Homo sapiens
  misc_RNA (1)...(19): siRNA sense strand
gaauagaagauacgaccaa

SEQ ID NO: 1965223 - RNA, 19 nt, Homo sapiens
  misc_RNA (1)...(19): siRNA sense strand
ucaggacaacuuucaauaa

SEQ ID NO: 1965224 - RNA, 19 nt, Homo sapiens
  misc_RNA (1)...(19): siRNA sense strand
gugaugaaguauuagaaug

SEQ ID NO: 1965225 - RNA, 19 nt, Homo sapiens
  misc_RNA (1)...(19): siRNA sense strand
ggaguccacuacccauaga

SEQ ID NO: 1965226 - RNA, 19 nt, Homo sapiens
  misc_RNA (1)...(19): siRNA sense strand
ggaaagcagagaugaauac

SEQ ID NO: 1965227 - RNA, 19 nt, Homo sapiens
  misc_RNA (1)...(19): siRNA sense strand
agaaagagaggaauauuca

SEQ ID NO: 1965228 - RNA, 19 nt, Homo sapiens
  misc_RNA (1)...(19): siRNA sense strand
gaugaaguauuagaaugga

SEQ ID NO: 1965229 - RNA, 19 nt, Homo sapiens
  misc_RNA (1)...(19): siRNA sense strand
gcaauucuguuuuaucuca

SEQ ID NO: 1965230 - RNA, 19 nt, Homo sapiens
  misc_RNA (1)...(19): siRNA sense strand
ccgcauggaucacaaaucu

SEQ ID NO: 1965231 - RNA, 19 nt, Homo sapiens
  misc_RNA (1)...(19): siRNA sense strand
gcugaaguuugucccuaaa

SEQ ID NO: 1965232 - RNA, 19 nt, Homo sapiens
  misc_RNA (1)...(19): siRNA sense strand
ggagcacaauagaucugaa

SEQ ID NO: 1965233 - RNA, 19 nt, Homo sapiens
  misc_RNA (1)...(19): siRNA sense strand
uuacgugugugccaagugu

SEQ ID NO: 1965234 - RNA, 19 nt, Homo sapiens
  misc_RNA (1)...(19): siRNA sense strand
ugaaguuugucccuaaagg

SEQ ID NO: 1965235 - RNA, 19 nt, Homo sapiens
  misc_RNA (1)...(19): siRNA sense strand
gggcagucccgauucugaa

SEQ ID NO: 1965236 - RNA, 19 nt, Homo sapiens
  misc_RNA (1)...(19): siRNA sense strand
cgcugaaguuugucccuaa

SEQ ID NO: 1965237 - RNA, 19 nt, Homo sapiens
  misc_RNA (1)...(19): siRNA sense strand
gguguccuguggcaagugu

SEQ ID NO: 1965238 - RNA, 19 nt, Homo sapiens
  misc_RNA (1)...(19): siRNA sense strand
gagcacaauagaucugaag

SEQ ID NO: 1965239 - RNA, 19 nt, Homo sapiens
  misc_RNA (1)...(19): siRNA sense strand
guccggagcacaauagauc

SEQ ID NO: 1965240 - RNA, 19 nt, Homo sapiens
  misc_RNA (1)...(19): siRNA sense strand
ccaagcguccggagcacaa

SEQ ID NO: 1965241 - RNA, 19 nt, Homo sapiens
  misc_RNA (1)...(19): siRNA sense strand
cuaaaggcaaagaaacuuc

SEQ ID NO: 1965242 - RNA, 19 nt, Homo sapiens
  misc_RNA (1)...(19): siRNA sense strand
guagagauuucuucagaua

SEQ ID NO: 1965243 - RNA, 19 nt, Homo sapiens
  misc_RNA (1)...(19): siRNA sense strand
ucagauaucuccauuaaug

SEQ ID NO: 1965244 - RNA, 19 nt, Homo sapiens
  misc_RNA (1)...(19): siRNA sense strand
aaacagaccuuuccucuca

SEQ ID NO: 1965245 - RNA, 19 nt, Homo sapiens
  misc_RNA (1)...(19): siRNA sense strand
gcaaguaucucccaaaauu

SEQ ID NO: 1965246 - RNA, 19 nt, Homo sapiens
  misc_RNA (1)...(19): siRNA sense strand
gcaccugcuucucaaauuu

SEQ ID NO: 1965247 - RNA, 19 nt, Homo sapiens
  misc_RNA (1)...(19): siRNA sense strand
aaacucaucuucuucaaug

SEQ ID NO: 1965248 - RNA, 19 nt, Homo sapiens
  misc_RNA (1)...(19): siRNA sense strand
cuucagauaucuccauuaa

SEQ ID NO: 1965249 - RNA, 19 nt, Homo sapiens
  misc_RNA (1)...(19): siRNA sense strand
gaagacgaauacuuggaaa

SEQ ID NO: 1965250 - RNA, 19 nt, Homo sapiens
  misc_RNA (1)...(19): siRNA sense strand
cagcagaauuccaguggua

SEQ ID NO: 1965251 - RNA, 19 nt, Homo sapiens
  misc_RNA (1)...(19): siRNA sense strand
gaacuauccaccauacauu

SEQ ID NO: 1965252 - RNA, 19 nt, Homo sapiens
  misc_RNA (1)...(19): siRNA sense strand
guacaaggaugacaaaaga

SEQ ID NO: 1965253 - RNA, 19 nt, Homo sapiens
  misc_RNA (1)...(19): siRNA sense strand
gaacaugacuaugggaacu

SEQ ID NO: 1965254 - RNA, 19 nt, Homo sapiens
  misc_RNA (1)...(19): siRNA sense strand
gagugaagacgaauacuug

SEQ ID NO: 1965255 - RNA, 19 nt, Homo sapiens
  misc_RNA (1)...(19): siRNA sense strand
agacacaucucucccaaag

SEQ ID NO: 1965256 - RNA, 19 nt, Homo sapiens
  misc_RNA (1)...(19): siRNA sense strand
gaacguggauguguaugac

SEQ ID NO: 1965257 - RNA, 19 nt, Homo sapiens
  misc_RNA (1)...(19): siRNA sense strand
aaagacugauugaaggaaa

SEQ ID NO: 1965258 - RNA, 19 nt, Homo sapiens
  misc_RNA (1)...(19): siRNA sense strand
ccaaagcuauggacaacgu

SEQ ID NO: 1965259 - RNA, 19 nt, Homo sapiens
  misc_RNA (1)...(19): siRNA sense strand
gaccagagccuacgguuac

SEQ ID NO: 1965260 - RNA, 19 nt, Homo sapiens
  misc_RNA (1)...(19): siRNA sense strand
agagauuucuucagauauc

SEQ ID NO: 1965261 - RNA, 19 nt, Homo sapiens
  misc_RNA (1)...(19): siRNA sense strand
gcaacacccaaacgcagua

SEQ ID NO: 1965262 - RNA, 19 nt, Homo sapiens
  misc_RNA (1)...(19): siRNA sense strand
gcaucgagauccagaacgu

SEQ ID NO: 1965263 - RNA, 19 nt, Homo sapiens
  misc_RNA (1)...(19): siRNA sense strand
agacgaauacuuggaaauu

SEQ ID NO: 1965264 - RNA, 19 nt, Homo sapiens
  misc_RNA (1)...(19): siRNA sense strand
ccaccucauugugcaagua

SEQ ID NO: 1965265 - RNA, 19 nt, Homo sapiens
  misc_RNA (1)...(19): siRNA sense strand
uuguagagauuucuucaga

SEQ ID NO: 1965266 - RNA, 19 nt, Homo sapiens
  misc_RNA (1)...(19): siRNA sense strand
gcagcaccauccucuaugc

SEQ ID NO: 1965267 - RNA, 19 nt, Homo sapiens
  misc_RNA (1)...(19): siRNA sense strand
ugaagacgaauacuuggaa

SEQ ID NO: 1965268 - RNA, 19 nt, Homo sapiens
  misc_RNA (1)...(19): siRNA sense strand
agacagacaaccacccaaa

SEQ ID NO: 1965269 - RNA, 19 nt, Homo sapiens
  misc_RNA (1)...(19): siRNA sense strand
acagaccuuuccucucaaa

SEQ ID NO: 1965270 - RNA, 19 nt, Homo sapiens
  misc_RNA (1)...(19): siRNA sense strand
acccucaggugcacuauug

SEQ ID NO: 1965271 - RNA, 19 nt, Homo sapiens
  misc_RNA (1)...(19): siRNA sense strand
ccagaacguggauguguau

SEQ ID NO: 1965272 - RNA, 19 nt, Homo sapiens
  misc_RNA (1)...(19): siRNA sense strand
cgagugcagugccuccaau

SEQ ID NO: 1965273 - RNA, 19 nt, Homo sapiens
  misc_RNA (1)...(19): siRNA sense strand
acagacaaccacccaaaga

SEQ ID NO: 1965274 - RNA, 19 nt, Homo sapiens
  misc_RNA (1)...(19): siRNA sense strand
gaaagaaaggggugaaagu

SEQ ID NO: 1965275 - RNA, 19 nt, Homo sapiens
  misc_RNA (1)...(19): siRNA sense strand
acacuugcguggccuccaa

SEQ ID NO: 1965276 - RNA, 19 nt, Homo sapiens
  misc_RNA (1)...(19): siRNA sense strand
ucucaaaacucaucuucuu

SEQ ID NO: 1965277 - RNA, 19 nt, Homo sapiens
  misc_RNA (1)...(19): siRNA sense strand
gugcaaguaucucccaaaa

SEQ ID NO: 1965278 - RNA, 19 nt, Homo sapiens
  misc_RNA (1)...(19): siRNA sense strand
cagauaucuccauuaauga

SEQ ID NO: 1965279 - RNA, 19 nt, Homo sapiens
  misc_RNA (1)...(19): siRNA sense strand
agaccagagccuacgguua

SEQ ID NO: 1965280 - RNA, 19 nt, Homo sapiens
  misc_RNA (1)...(19): siRNA sense strand
ugagugaagacgaauacuu

SEQ ID NO: 1965281 - RNA, 19 nt, Homo sapiens
  misc_RNA (1)...(19): siRNA sense strand
cgugaacuauccaccauac

SEQ ID NO: 1965282 - RNA, 19 nt, Homo sapiens
  misc_RNA (1)...(19): siRNA sense strand
cauccucuaugcugggaau

SEQ ID NO: 1965283 - RNA, 19 nt, Homo sapiens
  misc_RNA (1)...(19): siRNA sense strand
ucaggcugcuguuccuugu

SEQ ID NO: 1965284 - RNA, 19 nt, Homo sapiens
  misc_RNA (1)...(19): siRNA sense strand
gcagaauuccagugguaca

SEQ ID NO: 1965285 - RNA, 19 nt, Homo sapiens
  misc_RNA (1)...(19): siRNA sense strand
ugaacuauccaccauacau

SEQ ID NO: 1965286 - RNA, 19 nt, Homo sapiens
  misc_RNA (1)...(19): siRNA sense strand
ccgcagcaccauccucuau

SEQ ID NO: 1965287 - RNA, 19 nt, Homo sapiens
  misc_RNA (1)...(19): siRNA sense strand
gacaaaagacugauugaag

SEQ ID NO: 1965288 - RNA, 19 nt, Homo sapiens
  misc_RNA (1)...(19): siRNA sense strand
gagccuacgguuacuugga

SEQ ID NO: 1965289 - RNA, 19 nt, Homo sapiens
  misc_RNA (1)...(19): siRNA sense strand
gcaguacagcaucgagauc

SEQ ID NO: 1965290 - RNA, 19 nt, Homo sapiens
  misc_RNA (1)...(19): siRNA sense strand
ugcaccugcuucucaaauu

SEQ ID NO: 1965291 - RNA, 19 nt, Homo sapiens
  misc_RNA (1)...(19): siRNA sense strand
ucucugaacaugacuaugg

SEQ ID NO: 1965292 - RNA, 19 nt, Homo sapiens
  misc_RNA (1)...(19): siRNA sense strand
gcgugguccuucugagcaa

SEQ ID NO: 1965293 - RNA, 19 nt, Homo sapiens
  misc_RNA (1)...(19): siRNA sense strand
caaaacucaucuucuucaa

SEQ ID NO: 1965294 - RNA, 19 nt, Homo sapiens
  misc_RNA (1)...(19): siRNA sense strand
caggugcacuauugacaac

SEQ ID NO: 1965295 - RNA, 19 nt, Homo sapiens
  misc_RNA (1)...(19): siRNA sense strand
gcucggugcagacagacaa

SEQ ID NO: 1965296 - RNA, 19 nt, Homo sapiens
  misc_RNA (1)...(19): siRNA sense strand
cagagccuacgguuacuug

SEQ ID NO: 1965297 - RNA, 19 nt, Homo sapiens
  misc_RNA (1)...(19): siRNA sense strand
cugcauagcaacugguaga

SEQ ID NO: 1965298 - RNA, 19 nt, Homo sapiens
  misc_RNA (1)...(19): siRNA sense strand
gauaucuccauuaaugaag

SEQ ID NO: 1965299 - RNA, 19 nt, Homo sapiens
  misc_RNA (1)...(19): siRNA sense strand
uguagagauuucuucagau

SEQ ID NO: 1965300 - RNA, 19 nt, Homo sapiens
  misc_RNA (1)...(19): siRNA sense strand
cuucugagcaacacccaaa

SEQ ID NO: 1965301 - RNA, 19 nt, Homo sapiens
  misc_RNA (1)...(19): siRNA sense strand
caagcugggccacaccaau

SEQ ID NO: 1965302 - RNA, 19 nt, Homo sapiens
  misc_RNA (1)...(19): siRNA sense strand
gauaaagcaugccgaaaug

SEQ ID NO: 1965303 - RNA, 19 nt, Homo sapiens
  misc_RNA (1)...(19): siRNA sense strand
ggaaacgcaugcaagcuaa

SEQ ID NO: 1965304 - RNA, 19 nt, Homo sapiens
  misc_RNA (1)...(19): siRNA sense strand
cagcuugucuugcaucuaa

SEQ ID NO: 1965305 - RNA, 19 nt, Homo sapiens
  misc_RNA (1)...(19): siRNA sense strand
gaauacaugcgaaauauga

SEQ ID NO: 1965306 - RNA, 19 nt, Homo sapiens
  misc_RNA (1)...(19): siRNA sense strand
ggaguugucagaagucuua

SEQ ID NO: 1965307 - RNA, 19 nt, Homo sapiens
  misc_RNA (1)...(19): siRNA sense strand
ucacagggaccacaaauaa

SEQ ID NO: 1965308 - RNA, 19 nt, Homo sapiens
  misc_RNA (1)...(19): siRNA sense strand
caacagcagagccauauuu

SEQ ID NO: 1965309 - RNA, 19 nt, Homo sapiens
  misc_RNA (1)...(19): siRNA sense strand
aguaagaaguugucaguaa

SEQ ID NO: 1965310 - RNA, 19 nt, Homo sapiens
  misc_RNA (1)...(19): siRNA sense strand
gaacaggaguauaacaaac

SEQ ID NO: 1965311 - RNA, 19 nt, Homo sapiens
  misc_RNA (1)...(19): siRNA sense strand
uaacaaacuuaccacaaug

SEQ ID NO: 1965312 - RNA, 19 nt, Homo sapiens
  misc_RNA (1)...(19): siRNA sense strand
guaaagcuuugugcaauga

SEQ ID NO: 1965313 - RNA, 19 nt, Homo sapiens
  misc_RNA (1)...(19): siRNA sense strand
gaaagagaacgacaacaug

SEQ ID NO: 1965314 - RNA, 19 nt, Homo sapiens
  misc_RNA (1)...(19): siRNA sense strand
caaagaaugaggaaucaaa

SEQ ID NO: 1965315 - RNA, 19 nt, Homo sapiens
  misc_RNA (1)...(19): siRNA sense strand
gaucgagucaucaacagua

SEQ ID NO: 1965316 - RNA, 19 nt, Homo sapiens
  misc_RNA (1)...(19): siRNA sense strand
aaacagagaccuggagaaa

SEQ ID NO: 1965317 - RNA, 19 nt, Homo sapiens
  misc_RNA (1)...(19): siRNA sense strand
acacuugccuauccagaaa

SEQ ID NO: 1965318 - RNA, 19 nt, Homo sapiens
  misc_RNA (1)...(19): siRNA sense strand
caaguuggagugugaauug

SEQ ID NO: 1965319 - RNA, 19 nt, Homo sapiens
  misc_RNA (1)...(19): siRNA sense strand
gcaacacaguaaagcuuug

SEQ ID NO: 1965320 - RNA, 19 nt, Homo sapiens
  misc_RNA (1)...(19): siRNA sense strand
uaaugaagcaacacaguaa

SEQ ID NO: 1965321 - RNA, 19 nt, Homo sapiens
  misc_RNA (1)...(19): siRNA sense strand
gaaagggagaauucaaaga

SEQ ID NO: 1965322 - RNA, 19 nt, Homo sapiens
  misc_RNA (1)...(19): siRNA sense strand
aaucaaagcacaaucaaga

SEQ ID NO: 1965323 - RNA, 19 nt, Homo sapiens
  misc_RNA (1)...(19): siRNA sense strand
uggaauacaugcgaaauau

SEQ ID NO: 1965324 - RNA, 19 nt, Homo sapiens
  misc_RNA (1)...(19): siRNA sense strand
guaagaaguugucaguaac

SEQ ID NO: 1965325 - RNA, 19 nt, Homo sapiens
  misc_RNA (1)...(19): siRNA sense strand
aaagggagaauucaaagaa

SEQ ID NO: 1965326 - RNA, 19 nt, Homo sapiens
  misc_RNA (1)...(19): siRNA sense strand
caucaacaguauuccuuug

SEQ ID NO: 1965327 - RNA, 19 nt, Homo sapiens
  misc_RNA (1)...(19): siRNA sense strand
auaagaaaguacuggauga

SEQ ID NO: 1965328 - RNA, 19 nt, Homo sapiens
  misc_RNA (1)...(19): siRNA sense strand
gaacgacaacaugaucaaa

SEQ ID NO: 1965329 - RNA, 19 nt, Homo sapiens
  misc_RNA (1)...(19): siRNA sense strand
aaagagaacgacaacauga

SEQ ID NO: 1965330 - RNA, 19 nt, Homo sapiens
  misc_RNA (1)...(19): siRNA sense strand
gaugaacagauacaagaaa

SEQ ID NO: 1965331 - RNA, 19 nt, Homo sapiens
  misc_RNA (1)...(19): siRNA sense strand
agaaaguacuggaugaaca

SEQ ID NO: 1965332 - RNA, 19 nt, Homo sapiens
  misc_RNA (1)...(19): siRNA sense strand
gcaaaagccaaccaaauaa

SEQ ID NO: 1965333 - RNA, 19 nt, Homo sapiens
  misc_RNA (1)...(19): siRNA sense strand
caguaaagcuuugugcaau

SEQ ID NO: 1965334 - RNA, 19 nt, Homo sapiens
  misc_RNA (1)...(19): siRNA sense strand
aguacuggaugaacagaua

SEQ ID NO: 1965335 - RNA, 19 nt, Homo sapiens
  misc_RNA (1)...(19): siRNA sense strand
gcugagccaucaaggucua

SEQ ID NO: 1965336 - RNA, 19 nt, Homo sapiens
  misc_RNA (1)...(19): siRNA sense strand
cuacgacgcuccccaagua

SEQ ID NO: 1965337 - RNA, 19 nt, Homo sapiens
  misc_RNA (1)...(19): siRNA sense strand
ggaccacaaauaagaaaga

SEQ ID NO: 1965338 - RNA, 19 nt, Homo sapiens
  misc_RNA (1)...(19): siRNA sense strand
gaagcagaagaaggaauua

SEQ ID NO: 1965339 - RNA, 19 nt, Homo sapiens
  misc_RNA (1)...(19): siRNA sense strand
gcuuggaacuugagaggau

SEQ ID NO: 1965340 - RNA, 19 nt, Homo sapiens
  misc_RNA (1)...(19): siRNA sense strand
caagaaagggagaauucaa

SEQ ID NO: 1965341 - RNA, 19 nt, Homo sapiens
  misc_RNA (1)...(19): siRNA sense strand
uagagaagcagaagaagga

SEQ ID NO: 1965342 - RNA, 19 nt, Homo sapiens
  misc_RNA (1)...(19): siRNA sense strand
ggaaaggaaacgcaugcaa

SEQ ID NO: 1965343 - RNA, 19 nt, Homo sapiens
  misc_RNA (1)...(19): siRNA sense strand
cccaaugcaagaagaauua

SEQ ID NO: 1965344 - RNA, 19 nt, Homo sapiens
  misc_RNA (1)...(19): siRNA sense strand
aagacaaguuggaguguga

SEQ ID NO: 1965345 - RNA, 19 nt, Homo sapiens
  misc_RNA (1)...(19): siRNA sense strand
gacuuuacaggaugaauuu

SEQ ID NO: 1965346 - RNA, 19 nt, Homo sapiens
  misc_RNA (1)...(19): siRNA sense strand
ggaaucaaagcacaaucaa

SEQ ID NO: 1965347 - RNA, 19 nt, Homo sapiens
  misc_RNA (1)...(19): siRNA sense strand
cagaauucauuacaaagca

SEQ ID NO: 1965348 - RNA, 19 nt, Homo sapiens
  misc_RNA (1)...(19): siRNA sense strand
cuaaugaagcaacacagua

SEQ ID NO: 1965349 - RNA, 19 nt, Homo sapiens
  misc_RNA (1)...(19): siRNA sense strand
ugcaagaguuggaagcaaa

SEQ ID NO: 1965350 - RNA, 19 nt, Homo sapiens
  misc_RNA (1)...(19): siRNA sense strand
ugauaaagcaugccgaaau

SEQ ID NO: 1965351 - RNA, 19 nt, Homo sapiens
  misc_RNA (1)...(19): siRNA sense strand
guuguuagcugcagaaaau

SEQ ID NO: 1965352 - RNA, 19 nt, Homo sapiens
  misc_RNA (1)...(19): siRNA sense strand
gcauacagaauucauuaca

SEQ ID NO: 1965353 - RNA, 19 nt, Homo sapiens
  misc_RNA (1)...(19): siRNA sense strand
gaaacagagaccuggagaa

SEQ ID NO: 1965354 - RNA, 19 nt, Homo sapiens
  misc_RNA (1)...(19): siRNA sense strand
agaaacagaaguuagagaa

SEQ ID NO: 1965355 - RNA, 19 nt, Homo sapiens
  misc_RNA (1)...(19): siRNA sense strand
ggaagcaugguucggcauu

SEQ ID NO: 1965356 - RNA, 19 nt, Homo sapiens
  misc_RNA (1)...(19): siRNA sense strand
cagcagccguucuggaauc

SEQ ID NO: 1965357 - RNA, 19 nt, Homo sapiens
  misc_RNA (1)...(19): siRNA sense strand
ccaaccaaauaacuaaagu

SEQ ID NO: 1965358 - RNA, 19 nt, Homo sapiens
  misc_RNA (1)...(19): siRNA sense strand
gaagcaugguucggcauuc

SEQ ID NO: 1965359 - RNA, 19 nt, Homo sapiens
  misc_RNA (1)...(19): siRNA sense strand
ugggaaggauggaagcaaa

SEQ ID NO: 1965360 - RNA, 19 nt, Homo sapiens
  misc_RNA (1)...(19): siRNA sense strand
aagaagaacaggaaaggaa

SEQ ID NO: 1965361 - RNA, 19 nt, Homo sapiens
  misc_RNA (1)...(19): siRNA sense strand
ggaauacaugcgaaauaug

SEQ ID NO: 1965362 - RNA, 19 nt, Homo sapiens
  misc_RNA (1)...(19): siRNA sense strand
gaccacaaauaagaaagau

SEQ ID NO: 1965363 - RNA, 19 nt, Homo sapiens
  misc_RNA (1)...(19): siRNA sense strand
gaagaagaacaggaaagga

SEQ ID NO: 1965364 - RNA, 19 nt, Homo sapiens
  misc_RNA (1)...(19): siRNA sense strand
gaaaguacuggaugaacag

SEQ ID NO: 1965365 - RNA, 19 nt, Homo sapiens
  misc_RNA (1)...(19): siRNA sense strand
aagcaaaacuccaugaaga

SEQ ID NO: 1965366 - RNA, 19 nt, Homo sapiens
  misc_RNA (1)...(19): siRNA sense strand
ggaugaacagauacaagaa

SEQ ID NO: 1965367 - RNA, 19 nt, Homo sapiens
  misc_RNA (1)...(19): siRNA sense strand
aagaaagggagaauucaaa

SEQ ID NO: 1965368 - RNA, 19 nt, Homo sapiens
  misc_RNA (1)...(19): siRNA sense strand
acagggaccacaaauaaga

SEQ ID NO: 1965369 - RNA, 19 nt, Homo sapiens
  misc_RNA (1)...(19): siRNA sense strand
gaaacagaaguuagagaag

SEQ ID NO: 1965370 - RNA, 19 nt, Homo sapiens
  misc_RNA (1)...(19): siRNA sense strand
gagaaacagaaguuagaga

SEQ ID NO: 1965371 - RNA, 19 nt, Homo sapiens
  misc_RNA (1)...(19): siRNA sense strand
aagcccagcuggagaaaca

SEQ ID NO: 1965372 - RNA, 19 nt, Homo sapiens
  misc_RNA (1)...(19): siRNA sense strand
gaaagacaaguuggagugu

SEQ ID NO: 1965373 - RNA, 19 nt, Homo sapiens
  misc_RNA (1)...(19): siRNA sense strand
ccguugaacugaaagacaa

SEQ ID NO: 1965374 - RNA, 19 nt, Homo sapiens
  misc_RNA (1)...(19): siRNA sense strand
uaacaccucccuccuccaa

SEQ ID NO: 1965375 - RNA, 19 nt, Homo sapiens
  misc_RNA (1)...(19): siRNA sense strand
aucaagaacugacaucuca

SEQ ID NO: 1965376 - RNA, 19 nt, Homo sapiens
  misc_RNA (1)...(19): siRNA sense strand
gaaauggagaggacaucug

SEQ ID NO: 1965377 - RNA, 19 nt, Homo sapiens
  misc_RNA (1)...(19): siRNA sense strand
ugaacaggaguauaacaaa

SEQ ID NO: 1965378 - RNA, 19 nt, Homo sapiens
  misc_RNA (1)...(19): siRNA sense strand
aauuggaucuucuugaaca

SEQ ID NO: 1965379 - RNA, 19 nt, Homo sapiens
  misc_RNA (1)...(19): siRNA sense strand
agaaagagaacgacaacau

SEQ ID NO: 1965380 - RNA, 19 nt, Homo sapiens
  misc_RNA (1)...(19): siRNA sense strand
gguagccaauguucagcuu

SEQ ID NO: 1965381 - RNA, 19 nt, Homo sapiens
  misc_RNA (1)...(19): siRNA sense strand
gcagaagaaggaauuaaaa

SEQ ID NO: 1965382 - RNA, 19 nt, Homo sapiens
  misc_RNA (1)...(19): siRNA sense strand
agaagcagaagaaggaauu

SEQ ID NO: 1965383 - RNA, 19 nt, Homo sapiens
  misc_RNA (1)...(19): siRNA sense strand
uuaaugaggaguugucaga

SEQ ID NO: 1965384 - RNA, 19 nt, Homo sapiens
  misc_RNA (1)...(19): siRNA sense strand
uaaagcaugccgaaaugga

SEQ ID NO: 1965385 - RNA, 19 nt, Homo sapiens
  misc_RNA (1)...(19): siRNA sense strand
ggaaucacagggaccacaa

SEQ ID NO: 1965386 - RNA, 19 nt, Homo sapiens
  misc_RNA (1)...(19): siRNA sense strand
ggcagaagaaagugugaaa

SEQ ID NO: 1965387 - RNA, 19 nt, Homo sapiens
  misc_RNA (1)...(19): siRNA sense strand
aaagccaaccaaauaacua

SEQ ID NO: 1965388 - RNA, 19 nt, Homo sapiens
  misc_RNA (1)...(19): siRNA sense strand
ugaauuggaggcauuagug

SEQ ID NO: 1965389 - RNA, 19 nt, Homo sapiens
  misc_RNA (1)...(19): siRNA sense strand
uggcaaagcaaguaucuuc

SEQ ID NO: 1965390 - RNA, 19 nt, Homo sapiens
  misc_RNA (1)...(19): siRNA sense strand
gagaacgacaacaugauca

SEQ ID NO: 1965391 - RNA, 19 nt, Homo sapiens
  misc_RNA (1)...(19): siRNA sense strand
gcacaaucaagaacugaca

SEQ ID NO: 1965392 - RNA, 19 nt, Homo sapiens
  misc_RNA (1)...(19): siRNA sense strand
uaagaaaguacuggaugaa

SEQ ID NO: 1965393 - RNA, 19 nt, Homo sapiens
  misc_RNA (1)...(19): siRNA sense strand
gugaaaaccuugucuagag

SEQ ID NO: 1965394 - RNA, 19 nt, Homo sapiens
  misc_RNA (1)...(19): siRNA sense strand
acaggaguauaacaaacuu

SEQ ID NO: 1965395 - RNA, 19 nt, Homo sapiens
  misc_RNA (1)...(19): siRNA sense strand
ggaauuaaaagcuaccaaa

SEQ ID NO: 1965396 - RNA, 19 nt, Homo sapiens
  misc_RNA (1)...(19): siRNA sense strand
aaaguaagaaguugucagu

SEQ ID NO: 1965397 - RNA, 19 nt, Homo sapiens
  misc_RNA (1)...(19): siRNA sense strand
ucacuugucgaacagcuuu

SEQ ID NO: 1965398 - RNA, 19 nt, Homo sapiens
  misc_RNA (1)...(19): siRNA sense strand
agaagaacaggaaaggaaa

SEQ ID NO: 1965399 - RNA, 19 nt, Homo sapiens
  misc_RNA (1)...(19): siRNA sense strand
ccaugaagaagaacaggaa

SEQ ID NO: 1965400 - RNA, 19 nt, Homo sapiens
  misc_RNA (1)...(19): siRNA sense strand
gaaguuagagaagcagaag

SEQ ID NO: 1965401 - RNA, 19 nt, Homo sapiens
  misc_RNA (1)...(19): siRNA sense strand
gcaaagcauacagaauuca

SEQ ID NO: 1965402 - RNA, 19 nt, Homo sapiens
  misc_RNA (1)...(19): siRNA sense strand
ggaagucgcuggaggaaug

SEQ ID NO: 1965403 - RNA, 19 nt, Homo sapiens
  misc_RNA (1)...(19): siRNA sense strand
gcagggauaugccuuugaa

SEQ ID NO: 1965404 - RNA, 19 nt, Homo sapiens
  misc_RNA (1)...(19): siRNA sense strand
gucagaagcuggcgaagaa

SEQ ID NO: 1965405 - RNA, 19 nt, Homo sapiens
  misc_RNA (1)...(19): siRNA sense strand
cgagucaacuuacuacaug

SEQ ID NO: 1965406 - RNA, 19 nt, Homo sapiens
  misc_RNA (1)...(19): siRNA sense strand
gcauaaaggcuaucguaga

SEQ ID NO: 1965407 - RNA, 19 nt, Homo sapiens
  misc_RNA (1)...(19): siRNA sense strand
cauaaaggcuaucguagag

SEQ ID NO: 1965408 - RNA, 19 nt, Homo sapiens
  misc_RNA (1)...(19): siRNA sense strand
gcaaggaacucaggaagcu

SEQ ID NO: 1965409 - RNA, 19 nt, Homo sapiens
  misc_RNA (1)...(19): siRNA sense strand
gaagcugccuccagagaag

SEQ ID NO: 1965410 - RNA, 19 nt, Homo sapiens
  misc_RNA (1)...(19): siRNA sense strand
ggaucgcggugaacauuug

SEQ ID NO: 1965411 - RNA, 19 nt, Homo sapiens
  misc_RNA (1)...(19): siRNA sense strand
gcacuucccgaacgaguuu

SEQ ID NO: 1965412 - RNA, 19 nt, Homo sapiens
  misc_RNA (1)...(19): siRNA sense strand
gacagaauuugcugaguca

SEQ ID NO: 1965413 - RNA, 19 nt, Homo sapiens
  misc_RNA (1)...(19): siRNA sense strand
uugcuaagcucgaccuaaa

SEQ ID NO: 1965414 - RNA, 19 nt, Homo sapiens
  misc_RNA (1)...(19): siRNA sense strand
ccaggacuuuggcuacuuu

SEQ ID NO: 1965415 - RNA, 19 nt, Homo sapiens
  misc_RNA (1)...(19): siRNA sense strand
ugaaugaugucuggaacuu

SEQ ID NO: 1965416 - RNA, 19 nt, Homo sapiens
  misc_RNA (1)...(19): siRNA sense strand
agagguggcugcaaugugu

SEQ ID NO: 1965417 - RNA, 19 nt, Homo sapiens
  misc_RNA (1)...(19): siRNA sense strand
gaagcuuccuuggacagaa

SEQ ID NO: 1965418 - RNA, 19 nt, Homo sapiens
  misc_RNA (1)...(19): siRNA sense strand
gaguuuaccucgggagaug

SEQ ID NO: 1965419 - RNA, 19 nt, Homo sapiens
  misc_RNA (1)...(19): siRNA sense strand
gaauacagccguggugauc

SEQ ID NO: 1965420 - RNA, 19 nt, Homo sapiens
  misc_RNA (1)...(19): siRNA sense strand
gucuggaacuucaagauga

SEQ ID NO: 1965421 - RNA, 19 nt, Homo sapiens
  misc_RNA (1)...(19): siRNA sense strand
gccagcaggugaaugaugu

SEQ ID NO: 1965422 - RNA, 19 nt, Homo sapiens
  misc_RNA (1)...(19): siRNA sense strand
ucaacuggcuuauguacag

SEQ ID NO: 1965423 - RNA, 19 nt, Homo sapiens
  misc_RNA (1)...(19): siRNA sense strand
ccaccaucgugaaagagua

SEQ ID NO: 1965424 - RNA, 19 nt, Homo sapiens
  misc_RNA (1)...(19): siRNA sense strand
gaacucaggaagcuugauc

SEQ ID NO: 1965425 - RNA, 19 nt, Homo sapiens
  misc_RNA (1)...(19): siRNA sense strand
cagagaagacuuugaacug

SEQ ID NO: 1965426 - RNA, 19 nt, Homo sapiens
  misc_RNA (1)...(19): siRNA sense strand
caagaugacgggcagguau

SEQ ID NO: 1965427 - RNA, 19 nt, Homo sapiens
  misc_RNA (1)...(19): siRNA sense strand
aaugaugucuggaacuuca

SEQ ID NO: 1965428 - RNA, 19 nt, Homo sapiens
  misc_RNA (1)...(19): siRNA sense strand
acuuugaacugcagggaua

SEQ ID NO: 1965429 - RNA, 19 nt, Homo sapiens
  misc_RNA (1)...(19): siRNA sense strand
cagagugggugauuucaac

SEQ ID NO: 1965430 - RNA, 19 nt, Homo sapiens
  misc_RNA (1)...(19): siRNA sense strand
ggaaggaucgcggugaaca

SEQ ID NO: 1965431 - RNA, 19 nt, Homo sapiens
  misc_RNA (1)...(19): siRNA sense strand
ccgaagcugucaaguccaa

SEQ ID NO: 1965432 - RNA, 19 nt, Homo sapiens
  misc_RNA (1)...(19): siRNA sense strand
ucaacgagucaacuuacua

SEQ ID NO: 1965433 - RNA, 19 nt, Homo sapiens
  misc_RNA (1)...(19): siRNA sense strand
ggccagaaacgcagccauu

SEQ ID NO: 1965434 - RNA, 19 nt, Homo sapiens
  misc_RNA (1)...(19): siRNA sense strand
cucgggagauggaaagaaa

SEQ ID NO: 1965435 - RNA, 19 nt, Homo sapiens
  misc_RNA (1)...(19): siRNA sense strand
gggauaugccuuugaagca

SEQ ID NO: 1965436 - RNA, 19 nt, Homo sapiens
  misc_RNA (1)...(19): siRNA sense strand
gggcagguaugagauguac

SEQ ID NO: 1965437 - RNA, 19 nt, Homo sapiens
  misc_RNA (1)...(19): siRNA sense strand
ggggauguuuuguggaaua

SEQ ID NO: 1965438 - RNA, 19 nt, Homo sapiens
  misc_RNA (1)...(19): siRNA sense strand
ugaagcgcguucucuaugg

SEQ ID NO: 1965439 - RNA, 19 nt, Homo sapiens
  misc_RNA (1)...(19): siRNA sense strand
gaagugaagcgcguucucu

SEQ ID NO: 1965440 - RNA, 19 nt, Homo sapiens
  misc_RNA (1)...(19): siRNA sense strand
gugaagcgcguucucuaug

SEQ ID NO: 1965441 - RNA, 19 nt, Homo sapiens
  misc_RNA (1)...(19): siRNA sense strand
uggcuuauguacagcauca

SEQ ID NO: 1965442 - RNA, 19 nt, Homo sapiens
  misc_RNA (1)...(19): siRNA sense strand
ggaauacagccguggugau

SEQ ID NO: 1965443 - RNA, 19 nt, Homo sapiens
  misc_RNA (1)...(19): siRNA sense strand
ggagcaguccugggaaaga

SEQ ID NO: 1965444 - RNA, 19 nt, Homo sapiens
  misc_RNA (1)...(19): siRNA sense strand
gagcaguccugggaaagac

SEQ ID NO: 1965445 - RNA, 19 nt, Homo sapiens
  misc_RNA (1)...(19): siRNA sense strand
cuuacuacauggagggaaa

SEQ ID NO: 1965446 - RNA, 19 nt, Homo sapiens
  misc_RNA (1)...(19): siRNA sense strand
acgcauaaaggcuaucgua

SEQ ID NO: 1965447 - RNA, 19 nt, Homo sapiens
  misc_RNA (1)...(19): siRNA sense strand
gcugucaaguccaacuaca

SEQ ID NO: 1965448 - RNA, 19 nt, Homo sapiens
  misc_RNA (1)...(19): siRNA sense strand
cgaagcugccuccagagaa

SEQ ID NO: 1965449 - RNA, 19 nt, Homo sapiens
  misc_RNA (1)...(19): siRNA sense strand
caacgagucaacuuacuac

SEQ ID NO: 1965450 - RNA, 19 nt, Homo sapiens
  misc_RNA (1)...(19): siRNA sense strand
ccggagcaguccugggaaa

SEQ ID NO: 1965451 - RNA, 19 nt, Homo sapiens
  misc_RNA (1)...(19): siRNA sense strand
ggucucugcccuucauaga

SEQ ID NO: 1965452 - RNA, 19 nt, Homo sapiens
  misc_RNA (1)...(19): siRNA sense strand
cgggauggacugcuaguug

SEQ ID NO: 1965453 - RNA, 19 nt, Homo sapiens
  misc_RNA (1)...(19): siRNA sense strand
cuucauagacgcauaaagg

SEQ ID NO: 1965454 - RNA, 19 nt, Homo sapiens
  misc_RNA (1)...(19): siRNA sense strand
ucggaaggaucgcggugaa

SEQ ID NO: 1965455 - RNA, 19 nt, Homo sapiens
  misc_RNA (1)...(19): siRNA sense strand
ggaacgagacagcgagcau

SEQ ID NO: 1965456 - RNA, 19 nt, Homo sapiens
  misc_RNA (1)...(19): siRNA sense strand
agagagaagcuuccuugga

SEQ ID NO: 1965457 - RNA, 19 nt, Homo sapiens
  misc_RNA (1)...(19): siRNA sense strand
ucguagagguggcugcaau

SEQ ID NO: 1965458 - RNA, 19 nt, Homo sapiens
  misc_RNA (1)...(19): siRNA sense strand
ggacuuuggcuacuuuuau

SEQ ID NO: 1965459 - RNA, 19 nt, Homo sapiens
  misc_RNA (1)...(19): siRNA sense strand
gcccagggaagcuuucgaa

SEQ ID NO: 1965460 - RNA, 19 nt, Homo sapiens
  misc_RNA (1)...(19): siRNA sense strand
agaaagcucaccaggacuu

SEQ ID NO: 1965461 - RNA, 19 nt, Homo sapiens
  misc_RNA (1)...(19): siRNA sense strand
ggaggaaugcuuggagaag

SEQ ID NO: 1965462 - RNA, 19 nt, Homo sapiens
  misc_RNA (1)...(19): siRNA sense strand
caacggggcugagaucauc

SEQ ID NO: 1965463 - RNA, 19 nt, Homo sapiens
  misc_RNA (1)...(19): siRNA sense strand
gcugcaauguguggaguca

SEQ ID NO: 1965464 - RNA, 19 nt, Homo sapiens
  misc_RNA (1)...(19): siRNA sense strand
ccaggaagcauggacuaug

SEQ ID NO: 1965465 - RNA, 19 nt, Homo sapiens
  misc_RNA (1)...(19): siRNA sense strand
gaaggaucgcggugaacau

SEQ ID NO: 1965466 - RNA, 19 nt, Homo sapiens
  misc_RNA (1)...(19): siRNA sense strand
acaggucucugcccuucau

SEQ ID NO: 1965467 - RNA, 19 nt, Homo sapiens
  misc_RNA (1)...(19): siRNA sense strand
gccagaaacgcagccauug

SEQ ID NO: 1965468 - RNA, 19 nt, Homo sapiens
  misc_RNA (1)...(19): siRNA sense strand
gauggacugcuaguugcua

SEQ ID NO: 1965469 - RNA, 19 nt, Homo sapiens
  misc_RNA (1)...(19): siRNA sense strand
aagcuuccuuggacagaau

SEQ ID NO: 1965470 - RNA, 19 nt, Homo sapiens
  misc_RNA (1)...(19): siRNA sense strand
gauuucaacgagucaacuu

SEQ ID NO: 1965471 - RNA, 19 nt, Homo sapiens
  misc_RNA (1)...(19): siRNA sense strand
ccagagaagacuuugaacu

SEQ ID NO: 1965472 - RNA, 19 nt, Homo sapiens
  misc_RNA (1)...(19): siRNA sense strand
cagccguggugaucuccaa

SEQ ID NO: 1965473 - RNA, 19 nt, Homo sapiens
  misc_RNA (1)...(19): siRNA sense strand
ucaagaugacgggcaggua

SEQ ID NO: 1965474 - RNA, 19 nt, Homo sapiens
  misc_RNA (1)...(19): siRNA sense strand
gcccuucauagacgcauaa

SEQ ID NO: 1965475 - RNA, 19 nt, Homo sapiens
  misc_RNA (1)...(19): siRNA sense strand
ccguggugaucuccaauuc

SEQ ID NO: 1965476 - RNA, 19 nt, Homo sapiens
  misc_RNA (1)...(19): siRNA sense strand
gagcuaagauugcuuguaa

SEQ ID NO: 1965477 - RNA, 19 nt, Homo sapiens
  misc_RNA (1)...(19): siRNA sense strand
gauaguggcuucucaaaga

SEQ ID NO: 1965478 - RNA, 19 nt, Homo sapiens
  misc_RNA (1)...(19): siRNA sense strand
gcgcucagcuuccuuauug

SEQ ID NO: 1965479 - RNA, 19 nt, Homo sapiens
  misc_RNA (1)...(19): siRNA sense strand
gaaggaggcucauuugaca

SEQ ID NO: 1965480 - RNA, 19 nt, Homo sapiens
  misc_RNA (1)...(19): siRNA sense strand
ucaaagaucucuaagacuu

SEQ ID NO: 1965481 - RNA, 19 nt, Homo sapiens
  misc_RNA (1)...(19): siRNA sense strand
caaacaagcagcuggauaa

SEQ ID NO: 1965482 - RNA, 19 nt, Homo sapiens
  misc_RNA (1)...(19): siRNA sense strand
cuaaggacaucuuugauug

SEQ ID NO: 1965483 - RNA, 19 nt, Homo sapiens
  misc_RNA (1)...(19): siRNA sense strand
gaagauauccaccuaugug

SEQ ID NO: 1965484 - RNA, 19 nt, Homo sapiens
  misc_RNA (1)...(19): siRNA sense strand
gcuaagauugcuuguaaua

SEQ ID NO: 1965485 - RNA, 19 nt, Homo sapiens
  misc_RNA (1)...(19): siRNA sense strand
ccucaagucuggaaagaaa

SEQ ID NO: 1965486 - RNA, 19 nt, Homo sapiens
  misc_RNA (1)...(19): siRNA sense strand
ggucugagguucuguccaa

SEQ ID NO: 1965487 - RNA, 19 nt, Homo sapiens
  misc_RNA (1)...(19): siRNA sense strand
ggaauagcaucuuugucuu

SEQ ID NO: 1965488 - RNA, 19 nt, Homo sapiens
  misc_RNA (1)...(19): siRNA sense strand
acaacucacugcaucauuu

SEQ ID NO: 1965489 - RNA, 19 nt, Homo sapiens
  misc_RNA (1)...(19): siRNA sense strand
gaaauuggcuugggcucau

SEQ ID NO: 1965490 - RNA, 19 nt, Homo sapiens
  misc_RNA (1)...(19): siRNA sense strand
gacuuucucuuucuacaaa

SEQ ID NO: 1965491 - RNA, 19 nt, Homo sapiens
  misc_RNA (1)...(19): siRNA sense strand
ucaaagagaacagaagaua

SEQ ID NO: 1965492 - RNA, 19 nt, Homo sapiens
  misc_RNA (1)...(19): siRNA sense strand
cuacagugccuaacuauug

SEQ ID NO: 1965493 - RNA, 19 nt, Homo sapiens
  misc_RNA (1)...(19): siRNA sense strand
ucaggaagauauccaccua

SEQ ID NO: 1965494 - RNA, 19 nt, Homo sapiens
  misc_RNA (1)...(19): siRNA sense strand
gcagcaggcuccaaacaag

SEQ ID NO: 1965495 - RNA, 19 nt, Homo sapiens
  misc_RNA (1)...(19): siRNA sense strand
gugccuaacuauugggaua

SEQ ID NO: 1965496 - RNA, 19 nt, Homo sapiens
  misc_RNA (1)...(19): siRNA sense strand
ggaaccagacaguaacuuu

SEQ ID NO: 1965497 - RNA, 19 nt, Homo sapiens
  misc_RNA (1)...(19): siRNA sense strand
gugcaggaauagcaucuuu

SEQ ID NO: 1965498 - RNA, 19 nt, Homo sapiens
  misc_RNA (1)...(19): siRNA sense strand
gaacaaggucucccuaagg

SEQ ID NO: 1965499 - RNA, 19 nt, Homo sapiens
  misc_RNA (1)...(19): siRNA sense strand
ugacaaaggaucaaaggaa

SEQ ID NO: 1965500 - RNA, 19 nt, Homo sapiens
  misc_RNA (1)...(19): siRNA sense strand
gaauagcaucuuugucuug

SEQ ID NO: 1965501 - RNA, 19 nt, Homo sapiens
  misc_RNA (1)...(19): siRNA sense strand
gaacaaguuuuaugaaugg

SEQ ID NO: 1965502 - RNA, 19 nt, Homo sapiens
  misc_RNA (1)...(19): siRNA sense strand
gggcacauguaaagauuca

SEQ ID NO: 1965503 - RNA, 19 nt, Homo sapiens
  misc_RNA (1)...(19): siRNA sense strand
ggaauggucugagguucug

SEQ ID NO: 1965504 - RNA, 19 nt, Homo sapiens
  misc_RNA (1)...(19): siRNA sense strand
gaaagcacugggucaaaga

SEQ ID NO: 1965505 - RNA, 19 nt, Homo sapiens
  misc_RNA (1)...(19): siRNA sense strand
gaagguacaauaaguagag

SEQ ID NO: 1965506 - RNA, 19 nt, Homo sapiens
  misc_RNA (1)...(19): siRNA sense strand
ucaccaagcuuuugucuau

SEQ ID NO: 1965507 - RNA, 19 nt, Homo sapiens
  misc_RNA (1)...(19): siRNA sense strand
ucucaaagaucucuaagac

SEQ ID NO: 1965508 - RNA, 19 nt, Homo sapiens
  misc_RNA (1)...(19): siRNA sense strand
ggucaaagagaacagaaga

SEQ ID NO: 1965509 - RNA, 19 nt, Homo sapiens
  misc_RNA (1)...(19): siRNA sense strand
auugagaagugcaggaaua

SEQ ID NO: 1965510 - RNA, 19 nt, Homo sapiens
  misc_RNA (1)...(19): siRNA sense strand
gaauccauuugguacauca

SEQ ID NO: 1965511 - RNA, 19 nt, Homo sapiens
  misc_RNA (1)...(19): siRNA sense strand
guccaucucuucuacaaca

SEQ ID NO: 1965512 - RNA, 19 nt, Homo sapiens
  misc_RNA (1)...(19): siRNA sense strand
ccaaacaagcagcuggaua

SEQ ID NO: 1965513 - RNA, 19 nt, Homo sapiens
  misc_RNA (1)...(19): siRNA sense strand
gagaacagaagauacagau

SEQ ID NO: 1965514 - RNA, 19 nt, Homo sapiens
  misc_RNA (1)...(19): siRNA sense strand
gcaggaauagcaucuuugu

SEQ ID NO: 1965515 - RNA, 19 nt, Homo sapiens
  misc_RNA (1)...(19): siRNA sense strand
aaagagaacagaagauaca

SEQ ID NO: 1965516 - RNA, 19 nt, Homo sapiens
  misc_RNA (1)...(19): siRNA sense strand
aacaaggucucccuaagga

SEQ ID NO: 1965517 - RNA, 19 nt, Homo sapiens
  misc_RNA (1)...(19): siRNA sense strand
uuaaagucauugcuguuug

SEQ ID NO: 1965518 - RNA, 19 nt, Homo sapiens
  misc_RNA (1)...(19): siRNA sense strand
ucauuucauucaacccaua

SEQ ID NO: 1965519 - RNA, 19 nt, Homo sapiens
  misc_RNA (1)...(19): siRNA sense strand
uacgaucugugacaauuga

SEQ ID NO: 1965520 - RNA, 19 nt, Homo sapiens
  misc_RNA (1)...(19): siRNA sense strand
ugaacaaggucucccuaag

SEQ ID NO: 1965521 - RNA, 19 nt, Homo sapiens
  misc_RNA (1)...(19): siRNA sense strand
guuaaagucauugcuguuu

SEQ ID NO: 1965522 - RNA, 19 nt, Homo sapiens
  misc_RNA (1)...(19): siRNA sense strand
gagaagugcaggaauagca

SEQ ID NO: 1965523 - RNA, 19 nt, Homo sapiens
  misc_RNA (1)...(19): siRNA sense strand
guagugaugagccagguuu

SEQ ID NO: 1965524 - RNA, 19 nt, Homo sapiens
  misc_RNA (1)...(19): siRNA sense strand
gcagauaguggcuucucaa

SEQ ID NO: 1965525 - RNA, 19 nt, Homo sapiens
  misc_RNA (1)...(19): siRNA sense strand
ccuaaggacaucuuugauu

SEQ ID NO: 1965526 - RNA, 19 nt, Homo sapiens
  misc_RNA (1)...(19): siRNA sense strand
ggcuuuacuucgaaauauu

SEQ ID NO: 1965527 - RNA, 19 nt, Homo sapiens
  misc_RNA (1)...(19): siRNA sense strand
gauauccaccuaugugcaa

SEQ ID NO: 1965528 - RNA, 19 nt, Homo sapiens
  misc_RNA (1)...(19): siRNA sense strand
gcacauguaaagauucauc

SEQ ID NO: 1965529 - RNA, 19 nt, Homo sapiens
  misc_RNA (1)...(19): siRNA sense strand
ugguugagguccuguuuga

SEQ ID NO: 1965530 - RNA, 19 nt, Homo sapiens
  misc_RNA (1)...(19): siRNA sense strand
gagaacagcgacacaagag

SEQ ID NO: 1965531 - RNA, 19 nt, Homo sapiens
  misc_RNA (1)...(19): siRNA sense strand
aggaagauauccaccuaug

SEQ ID NO: 1965532 - RNA, 19 nt, Homo sapiens
  misc_RNA (1)...(19): siRNA sense strand
gggaauccauuugguacau

SEQ ID NO: 1965533 - RNA, 19 nt, Homo sapiens
  misc_RNA (1)...(19): siRNA sense strand
aagcagaacccuuuauagu

SEQ ID NO: 1965534 - RNA, 19 nt, Homo sapiens
  misc_RNA (1)...(19): siRNA sense strand
agaaagcacugggucaaag

SEQ ID NO: 1965535 - RNA, 19 nt, Homo sapiens
  misc_RNA (1)...(19): siRNA sense strand
gaucuauccacuucaugaa

SEQ ID NO: 1965536 - RNA, 19 nt, Homo sapiens
  misc_RNA (1)...(19): siRNA sense strand
ucuaugaucaucugucuga

SEQ ID NO: 1965537 - RNA, 19 nt, Homo sapiens
  misc_RNA (1)...(19): siRNA sense strand
uaaagucauugcuguuugc

SEQ ID NO: 1965538 - RNA, 19 nt, Homo sapiens
  misc_RNA (1)...(19): siRNA sense strand
ggaagauauccaccuaugu

SEQ ID NO: 1965539 - RNA, 19 nt, Homo sapiens
  misc_RNA (1)...(19): siRNA sense strand
gcucagcuuccuuauugaa

SEQ ID NO: 1965540 - RNA, 19 nt, Homo sapiens
  misc_RNA (1)...(19): siRNA sense strand
gaucugugacaauugagaa

SEQ ID NO: 1965541 - RNA, 19 nt, Homo sapiens
  misc_RNA (1)...(19): siRNA sense strand
cuuacgaucugugacaauu

SEQ ID NO: 1965542 - RNA, 19 nt, Homo sapiens
  misc_RNA (1)...(19): siRNA sense strand
cauaauaagaacuggaaug

SEQ ID NO: 1965543 - RNA, 19 nt, Homo sapiens
  misc_RNA (1)...(19): siRNA sense strand
uggcguggcuuuacuucga

SEQ ID NO: 1965544 - RNA, 19 nt, Homo sapiens
  misc_RNA (1)...(19): siRNA sense strand
acacuucaccuccacaguu

SEQ ID NO: 1965545 - RNA, 19 nt, Homo sapiens
  misc_RNA (1)...(19): siRNA sense strand
uggcuuuacuucgaaauau

SEQ ID NO: 1965546 - RNA, 19 nt, Homo sapiens
  misc_RNA (1)...(19): siRNA sense strand
ggucuuccaucuguauauc

SEQ ID NO: 1965547 - RNA, 19 nt, Homo sapiens
  misc_RNA (1)...(19): siRNA sense strand
gaaccagacaguaacuuuu

SEQ ID NO: 1965548 - RNA, 19 nt, Homo sapiens
  misc_RNA (1)...(19): siRNA sense strand
ggaauccauuugguacauc

SEQ ID NO: 1965549 - RNA, 19 nt, Homo sapiens
  misc_RNA (1)...(19): siRNA sense strand
ucaagucuggaaagaaauu

SEQ ID NO: 1965550 - RNA, 19 nt, Homo sapiens
  misc_RNA (1)...(19): siRNA sense strand
uuuaccaccuugugaauuc

SEQ ID NO: 1965551 - RNA, 19 nt, Homo sapiens
  misc_RNA (1)...(19): siRNA sense strand
uugcuacagugccuaacua

SEQ ID NO: 1965552 - RNA, 19 nt, Homo sapiens
  misc_RNA (1)...(19): siRNA sense strand
cacuucaccuccacaguug

SEQ ID NO: 1965553 - RNA, 19 nt, Homo sapiens
  misc_RNA (1)...(19): siRNA sense strand
uaucugcucucucccuuac

SEQ ID NO: 1965554 - RNA, 19 nt, Homo sapiens
  misc_RNA (1)...(19): siRNA sense strand
ugagccagguuuacaagca

SEQ ID NO: 1965555 - RNA, 19 nt, Homo sapiens
  misc_RNA (1)...(19): siRNA sense strand
ccuugugaauucuauguau

SEQ ID NO: 1965556 - RNA, 19 nt, Homo sapiens
  misc_RNA (1)...(19): siRNA sense strand
ccuacacgcccacuuauuc

SEQ ID NO: 1965557 - RNA, 19 nt, Homo sapiens
  misc_RNA (1)...(19): siRNA sense strand
uuucugcucuucuuauaca

SEQ ID NO: 1965558 - RNA, 19 nt, Homo sapiens
  misc_RNA (1)...(19): siRNA sense strand
caaagagaacagaagauac

SEQ ID NO: 1965559 - RNA, 19 nt, Homo sapiens
  misc_RNA (1)...(19): siRNA sense strand
ccauccaaguuuagucuuc

SEQ ID NO: 1965560 - RNA, 19 nt, Homo sapiens
  misc_RNA (1)...(19): siRNA sense strand
gagagaacagcgacacaag

SEQ ID NO: 1965561 - RNA, 19 nt, Homo sapiens
  misc_RNA (1)...(19): siRNA sense strand
guaaagauucaucguugca

SEQ ID NO: 1965562 - RNA, 19 nt, Homo sapiens
  misc_RNA (1)...(19): siRNA sense strand
acaagcagacacuggcuaa

SEQ ID NO: 1965563 - RNA, 19 nt, Homo sapiens
  misc_RNA (1)...(19): siRNA sense strand
aguuucugcucuucuuaua

SEQ ID NO: 1965564 - RNA, 19 nt, Homo sapiens
  misc_RNA (1)...(19): siRNA sense strand
gugaaggaggcucauuuga

SEQ ID NO: 1965565 - RNA, 19 nt, Homo sapiens
  misc_RNA (1)...(19): siRNA sense strand
gauaauccaaugguugugu

SEQ ID NO: 1965566 - RNA, 19 nt, Homo sapiens
  misc_RNA (1)...(19): siRNA sense strand
cugcaugucugaggaggaa

SEQ ID NO: 1965567 - RNA, 19 nt, Homo sapiens
  misc_RNA (1)...(19): siRNA sense strand
cauccaaguuuagucuuca

SEQ ID NO: 1965568 - RNA, 19 nt, Homo sapiens
  misc_RNA (1)...(19): siRNA sense strand
caacucacugcaucauuuc

SEQ ID NO: 1965569 - RNA, 19 nt, Homo sapiens
  misc_RNA (1)...(19): siRNA sense strand
gaucuccucgagcugcuuu

SEQ ID NO: 1965570 - RNA, 19 nt, Homo sapiens
  misc_RNA (1)...(19): siRNA sense strand
aggaauagcaucuuugucu

SEQ ID NO: 1965571 - RNA, 19 nt, Homo sapiens
  misc_RNA (1)...(19): siRNA sense strand
cauguaaagauucaucguu

SEQ ID NO: 1965572 - RNA, 19 nt, Homo sapiens
  misc_RNA (1)...(19): siRNA sense strand
gcaccgacugguagugaug

SEQ ID NO: 1965573 - RNA, 19 nt, Homo sapiens
  misc_RNA (1)...(19): siRNA sense strand
cagauaguggcuucucaaa

SEQ ID NO: 1965574 - RNA, 19 nt, Homo sapiens
  misc_RNA (1)...(19): siRNA sense strand
cagaaagcacugggucaaa

SEQ ID NO: 1965575 - RNA, 19 nt, Homo sapiens
  misc_RNA (1)...(19): siRNA sense strand
caaaggaucaaaggaagca

SEQ ID NO: 1965576 - RNA, 19 nt, Homo sapiens
  misc_RNA (1)...(19): siRNA sense strand
gaaagugaauuuagcaaug

SEQ ID NO: 1965577 - RNA, 19 nt, Homo sapiens
  misc_RNA (1)...(19): siRNA sense strand
gaacaugcuuccauuucua

SEQ ID NO: 1965578 - RNA, 19 nt, Homo sapiens
  misc_RNA (1)...(19): siRNA sense strand
aaacaagucuggagaugua

SEQ ID NO: 1965579 - RNA, 19 nt, Homo sapiens
  misc_RNA (1)...(19): siRNA sense strand
uaagagagaugguucagaa

SEQ ID NO: 1965580 - RNA, 19 nt, Homo sapiens
  misc_RNA (1)...(19): siRNA sense strand
aaacagagaucaacauugu

SEQ ID NO: 1965581 - RNA, 19 nt, Homo sapiens
  misc_RNA (1)...(19): siRNA sense strand
caagagggauguuguagaa

SEQ ID NO: 1965582 - RNA, 19 nt, Homo sapiens
  misc_RNA (1)...(19): siRNA sense strand
cagaagcagugacauguua

SEQ ID NO: 1965583 - RNA, 19 nt, Homo sapiens
  misc_RNA (1)...(19): siRNA sense strand
ugacagccauggauugaua

SEQ ID NO: 1965584 - RNA, 19 nt, Homo sapiens
  misc_RNA (1)...(19): siRNA sense strand
caacagauagugacaauga

SEQ ID NO: 1965585 - RNA, 19 nt, Homo sapiens
  misc_RNA (1)...(19): siRNA sense strand
ggugcaagcucucuccaua

SEQ ID NO: 1965586 - RNA, 19 nt, Homo sapiens
  misc_RNA (1)...(19): siRNA sense strand
gcagugacauguuauaucu

SEQ ID NO: 1965587 - RNA, 19 nt, Homo sapiens
  misc_RNA (1)...(19): siRNA sense strand
ggacguacauuccaucaag

SEQ ID NO: 1965588 - RNA, 19 nt, Homo sapiens
  misc_RNA (1)...(19): siRNA sense strand
ggagacagcugugcccauu

SEQ ID NO: 1965589 - RNA, 19 nt, Homo sapiens
  misc_RNA (1)...(19): siRNA sense strand
ggacaagggaucauacaaa

SEQ ID NO: 1965590 - RNA, 19 nt, Homo sapiens
  misc_RNA (1)...(19): siRNA sense strand
ggaaucagcaccagagaaa

SEQ ID NO: 1965591 - RNA, 19 nt, Homo sapiens
  misc_RNA (1)...(19): siRNA sense strand
gaaacuugguggaccugua

SEQ ID NO: 1965592 - RNA, 19 nt, Homo sapiens
  misc_RNA (1)...(19): siRNA sense strand
gacaagggaucauacaaau

SEQ ID NO: 1965593 - RNA, 19 nt, Homo sapiens
  misc_RNA (1)...(19): siRNA sense strand
ggaagcaacuggagaaggu

SEQ ID NO: 1965594 - RNA, 19 nt, Homo sapiens
  misc_RNA (1)...(19): siRNA sense strand
ccagaaaccuccuaugaca

SEQ ID NO: 1965595 - RNA, 19 nt, Homo sapiens
  misc_RNA (1)...(19): siRNA sense strand
ggaaaccuggaacauauua

SEQ ID NO: 1965596 - RNA, 19 nt, Homo sapiens
  misc_RNA (1)...(19): siRNA sense strand
gauaaugggauuggauuua

SEQ ID NO: 1965597 - RNA, 19 nt, Homo sapiens
  misc_RNA (1)...(19): siRNA sense strand
gcccaucaaugcuuacuuu

SEQ ID NO: 1965598 - RNA, 19 nt, Homo sapiens
  misc_RNA (1)...(19): siRNA sense strand
ggaaacaagucuggagaug

SEQ ID NO: 1965599 - RNA, 19 nt, Homo sapiens
  misc_RNA (1)...(19): siRNA sense strand
caagucagauaaauggaaa

SEQ ID NO: 1965600 - RNA, 19 nt, Homo sapiens
  misc_RNA (1)...(19): siRNA sense strand
ucaaagcaguggcacauga

SEQ ID NO: 1965601 - RNA, 19 nt, Homo sapiens
  misc_RNA (1)...(19): siRNA sense strand
caauaacacucccauucaa

SEQ ID NO: 1965602 - RNA, 19 nt, Homo sapiens
  misc_RNA (1)...(19): siRNA sense strand
gaaaccuccuaugacauua

SEQ ID NO: 1965603 - RNA, 19 nt, Homo sapiens
  misc_RNA (1)...(19): siRNA sense strand
ggcauuagcuguucuuucu

SEQ ID NO: 1965604 - RNA, 19 nt, Homo sapiens
  misc_RNA (1)...(19): siRNA sense strand
ggaagaaucgccagcagaa

SEQ ID NO: 1965605 - RNA, 19 nt, Homo sapiens
  misc_RNA (1)...(19): siRNA sense strand
agacaucccuccuuccaaa

SEQ ID NO: 1965606 - RNA, 19 nt, Homo sapiens
  misc_RNA (1)...(19): siRNA sense strand
ggaaguucguaguuuagaa

SEQ ID NO: 1965607 - RNA, 19 nt, Homo sapiens
  misc_RNA (1)...(19): siRNA sense strand
uguguuaacugccgaaauu

SEQ ID NO: 1965608 - RNA, 19 nt, Homo sapiens
  misc_RNA (1)...(19): siRNA sense strand
gauggaaaccuggaacaua

SEQ ID NO: 1965609 - RNA, 19 nt, Homo sapiens
  misc_RNA (1)...(19): siRNA sense strand
ucauugccaucaaccauua

SEQ ID NO: 1965610 - RNA, 19 nt, Homo sapiens
  misc_RNA (1)...(19): siRNA sense strand
caucaaugcuuacuuugug

SEQ ID NO: 1965611 - RNA, 19 nt, Homo sapiens
  misc_RNA (1)...(19): siRNA sense strand
ccacaaagcauguuauuac

SEQ ID NO: 1965612 - RNA, 19 nt, Homo sapiens
  misc_RNA (1)...(19): siRNA sense strand
ggagccaucuagucuuuau

SEQ ID NO: 1965613 - RNA, 19 nt, Homo sapiens
  misc_RNA (1)...(19): siRNA sense strand
ucucucaacuccucucuuu

SEQ ID NO: 1965614 - RNA, 19 nt, Homo sapiens
  misc_RNA (1)...(19): siRNA sense strand
gcaaugugccuguggaaga

SEQ ID NO: 1965615 - RNA, 19 nt, Homo sapiens
  misc_RNA (1)...(19): siRNA sense strand
caagcucucuccauauuca

SEQ ID NO: 1965616 - RNA, 19 nt, Homo sapiens
  misc_RNA (1)...(19): siRNA sense strand
caagggaucauacaaaugu

SEQ ID NO: 1965617 - RNA, 19 nt, Homo sapiens
  misc_RNA (1)...(19): siRNA sense strand
aagcugaggugcgcuauaa

SEQ ID NO: 1965618 - RNA, 19 nt, Homo sapiens
  misc_RNA (1)...(19): siRNA sense strand
gcagacggagacuuuguua

SEQ ID NO: 1965619 - RNA, 19 nt, Homo sapiens
  misc_RNA (1)...(19): siRNA sense strand
agaagcaucucucaugguu

SEQ ID NO: 1965620 - RNA, 19 nt, Homo sapiens
  misc_RNA (1)...(19): siRNA sense strand
cugcgaagcugcaaaugaa

SEQ ID NO: 1965621 - RNA, 19 nt, Homo sapiens
  misc_RNA (1)...(19): siRNA sense strand
cuaaaggacuacaggauca

SEQ ID NO: 1965622 - RNA, 19 nt, Homo sapiens
  misc_RNA (1)...(19): siRNA sense strand
ggacacacguggauuuuga

SEQ ID NO: 1965623 - RNA, 19 nt, Homo sapiens
  misc_RNA (1)...(19): siRNA sense strand
gaauuuagcaaugugauga

SEQ ID NO: 1965624 - RNA, 19 nt, Homo sapiens
  misc_RNA (1)...(19): siRNA sense strand
caucuagucuuuaugaagu

SEQ ID NO: 1965625 - RNA, 19 nt, Homo sapiens
  misc_RNA (1)...(19): siRNA sense strand
auacaaaugugcagcuuau

SEQ ID NO: 1965626 - RNA, 19 nt, Homo sapiens
  misc_RNA (1)...(19): siRNA sense strand
ggauaucucuaccaaggau

SEQ ID NO: 1965627 - RNA, 19 nt, Homo sapiens
  misc_RNA (1)...(19): siRNA sense strand
gaagcagugacauguuaua

SEQ ID NO: 1965628 - RNA, 19 nt, Homo sapiens
  misc_RNA (1)...(19): siRNA sense strand
gggcacagcaacucucuaa

SEQ ID NO: 1965629 - RNA, 19 nt, Homo sapiens
  misc_RNA (1)...(19): siRNA sense strand
gaaacagagaucaacauug

SEQ ID NO: 1965630 - RNA, 19 nt, Homo sapiens
  misc_RNA (1)...(19): siRNA sense strand
gcacucuacuggaagacuu

SEQ ID NO: 1965631 - RNA, 19 nt, Homo sapiens
  misc_RNA (1)...(19): siRNA sense strand
gugaugaucugcgagacua

SEQ ID NO: 1965632 - RNA, 19 nt, Homo sapiens
  misc_RNA (1)...(19): siRNA sense strand
ggagugguacuuacagauu

SEQ ID NO: 1965633 - RNA, 19 nt, Homo sapiens
  misc_RNA (1)...(19): siRNA sense strand
ugacaauucuuucucucaa

SEQ ID NO: 1965634 - RNA, 19 nt, Homo sapiens
  misc_RNA (1)...(19): siRNA sense strand
gagcaagucagauaaaugg

SEQ ID NO: 1965635 - RNA, 19 nt, Homo sapiens
  misc_RNA (1)...(19): siRNA sense strand
uaccaaggaucagauauga

SEQ ID NO: 1965636 - RNA, 19 nt, Homo sapiens
  misc_RNA (1)...(19): siRNA sense strand
aagaaucgccagcagaaua

SEQ ID NO: 1965637 - RNA, 19 nt, Homo sapiens
  misc_RNA (1)...(19): siRNA sense strand
gguggcagcugaagacauc

SEQ ID NO: 1965638 - RNA, 19 nt, Homo sapiens
  misc_RNA (1)...(19): siRNA sense strand
gcaggguaccggagaguaa

SEQ ID NO: 1965639 - RNA, 19 nt, Homo sapiens
  misc_RNA (1)...(19): siRNA sense strand
gcagagacagucacacuuc

SEQ ID NO: 1965640 - RNA, 19 nt, Homo sapiens
  misc_RNA (1)...(19): siRNA sense strand
cuggaagacuugaaauuga

SEQ ID NO: 1965641 - RNA, 19 nt, Homo sapiens
  misc_RNA (1)...(19): siRNA sense strand
ggaagauguugggauguau

SEQ ID NO: 1965642 - RNA, 19 nt, Homo sapiens
  misc_RNA (1)...(19): siRNA sense strand
acaaaugugcagcuuauaa

SEQ ID NO: 1965643 - RNA, 19 nt, Homo sapiens
  misc_RNA (1)...(19): siRNA sense strand
uccaaucacugccuucaaa

SEQ ID NO: 1965644 - RNA, 19 nt, Homo sapiens
  misc_RNA (1)...(19): siRNA sense strand
gcaagucagauaaauggaa

SEQ ID NO: 1965645 - RNA, 19 nt, Homo sapiens
  misc_RNA (1)...(19): siRNA sense strand
caaugugccuguggaagaa

SEQ ID NO: 1965646 - RNA, 19 nt, Homo sapiens
  misc_RNA (1)...(19): siRNA sense strand
cugaauauccugucaaaga

SEQ ID NO: 1965647 - RNA, 19 nt, Homo sapiens
  misc_RNA (1)...(19): siRNA sense strand
ggaggagaaagugaauuua

SEQ ID NO: 1965648 - RNA, 19 nt, Homo sapiens
  misc_RNA (1)...(19): siRNA sense strand
auacucagaucaugcuaaa

SEQ ID NO: 1965649 - RNA, 19 nt, Homo sapiens
  misc_RNA (1)...(19): siRNA sense strand
aguggaaguucguaguuua

SEQ ID NO: 1965650 - RNA, 19 nt, Homo sapiens
  misc_RNA (1)...(19): siRNA sense strand
uggaagacuugaaauugaa

SEQ ID NO: 1965651 - RNA, 19 nt, Homo sapiens
  misc_RNA (1)...(19): siRNA sense strand
acagagaucaacauuguaa

SEQ ID NO: 1965652 - RNA, 19 nt, Homo sapiens
  misc_RNA (1)...(19): siRNA sense strand
caggaugguuuggaaauga

SEQ ID NO: 1965653 - RNA, 19 nt, Homo sapiens
  misc_RNA (1)...(19): siRNA sense strand
gaacauccucaucaucuag

SEQ ID NO: 1965654 - RNA, 19 nt, Homo sapiens
  misc_RNA (1)...(19): siRNA sense strand
ccaaugcagucaauggaau

SEQ ID NO: 1965655 - RNA, 19 nt, Homo sapiens
  misc_RNA (1)...(19): siRNA sense strand
ggacuacaccacucucuca

SEQ ID NO: 1965656 - RNA, 19 nt, Homo sapiens
  misc_RNA (1)...(19): siRNA sense strand
ccuucaaagucgaauauaa

SEQ ID NO: 1965657 - RNA, 19 nt, Homo sapiens
  misc_RNA (1)...(19): siRNA sense strand
caaaugugcagcuuauaau

SEQ ID NO: 1965658 - RNA, 19 nt, Homo sapiens
  misc_RNA (1)...(19): siRNA sense strand
gaauggugguggaauguac

SEQ ID NO: 1965659 - RNA, 19 nt, Homo sapiens
  misc_RNA (1)...(19): siRNA sense strand
ggacuuggcaccuuauuuu

SEQ ID NO: 1965660 - RNA, 19 nt, Homo sapiens
  misc_RNA (1)...(19): siRNA sense strand
gagagaugguucagaaacu

SEQ ID NO: 1965661 - RNA, 19 nt, Homo sapiens
  misc_RNA (1)...(19): siRNA sense strand
ugcaagcucucuccauauu

SEQ ID NO: 1965662 - RNA, 19 nt, Homo sapiens
  misc_RNA (1)...(19): siRNA sense strand
uggaagauguugggaugua

SEQ ID NO: 1965663 - RNA, 19 nt, Homo sapiens
  misc_RNA (1)...(19): siRNA sense strand
ggagauguagaauauguga

SEQ ID NO: 1965664 - RNA, 19 nt, Homo sapiens
  misc_RNA (1)...(19): siRNA sense strand
gucuggagauguagaauau

SEQ ID NO: 1965665 - RNA, 19 nt, Homo sapiens
  misc_RNA (1)...(19): siRNA sense strand
ccucaaguguauuggcuaa

SEQ ID NO: 1965666 - RNA, 19 nt, Homo sapiens
  misc_RNA (1)...(19): siRNA sense strand
ugaacauccucaucaucua

SEQ ID NO: 1965667 - RNA, 19 nt, Homo sapiens
  misc_RNA (1)...(19): siRNA sense strand
uagcaucggugccauugug

SEQ ID NO: 1965668 - RNA, 19 nt, Homo sapiens
  misc_RNA (1)...(19): siRNA sense strand
agacagcugugcccauuca

SEQ ID NO: 1965669 - RNA, 19 nt, Homo sapiens
  misc_RNA (1)...(19): siRNA sense strand
cagaagauccagcagaguu

SEQ ID NO: 1965670 - RNA, 19 nt, Homo sapiens
  misc_RNA (1)...(19): siRNA sense strand
gaggagaaagugaauuuag

SEQ ID NO: 1965671 - RNA, 19 nt, Homo sapiens
  misc_RNA (1)...(19): siRNA sense strand
ggauucaagccaguuauaa

SEQ ID NO: 1965672 - RNA, 19 nt, Homo sapiens
  misc_RNA (1)...(19): siRNA sense strand
gaaacaagucuggagaugu

SEQ ID NO: 1965673 - RNA, 19 nt, Homo sapiens
  misc_RNA (1)...(19): siRNA sense strand
uccuggagcuucugaauau

SEQ ID NO: 1965674 - RNA, 19 nt, Homo sapiens
  misc_RNA (1)...(19): siRNA sense strand
gagaucaacauuguaaguu

SEQ ID NO: 1965675 - RNA, 19 nt, Homo sapiens
  misc_RNA (1)...(19): siRNA sense strand
ccuggaacauauuaagauu

SEQ ID NO: 1965676 - RNA, 19 nt, Homo sapiens
  misc_RNA (1)...(19): siRNA sense strand
ucaaagagauccucagaaa

SEQ ID NO: 1965677 - RNA, 19 nt, Homo sapiens
  misc_RNA (1)...(19): siRNA sense strand
gaaaagaucuuaugugaag

SEQ ID NO: 1965678 - RNA, 19 nt, Homo sapiens
  misc_RNA (1)...(19): siRNA sense strand
gaagauccuuugccaccua

SEQ ID NO: 1965679 - RNA, 19 nt, Homo sapiens
  misc_RNA (1)...(19): siRNA sense strand
caagguugcucacgugauu

SEQ ID NO: 1965680 - RNA, 19 nt, Homo sapiens
  misc_RNA (1)...(19): siRNA sense strand
cagaagauguugugagaga

SEQ ID NO: 1965681 - RNA, 19 nt, Homo sapiens
  misc_RNA (1)...(19): siRNA sense strand
ggaagggaacaaucaauuu

SEQ ID NO: 1965682 - RNA, 19 nt, Homo sapiens
  misc_RNA (1)...(19): siRNA sense strand
caacauauucaguggauaa

SEQ ID NO: 1965683 - RNA, 19 nt, Homo sapiens
  misc_RNA (1)...(19): siRNA sense strand
ggauaugacucacuguuca

SEQ ID NO: 1965684 - RNA, 19 nt, Homo sapiens
  misc_RNA (1)...(19): siRNA sense strand
ggaauugaccugauuagug

SEQ ID NO: 1965685 - RNA, 19 nt, Homo sapiens
  misc_RNA (1)...(19): siRNA sense strand
ggacucagaucuuguuguc

SEQ ID NO: 1965686 - RNA, 19 nt, Homo sapiens
  misc_RNA (1)...(19): siRNA sense strand
gaaaauguccugaagaaaa

SEQ ID NO: 1965687 - RNA, 19 nt, Homo sapiens
  misc_RNA (1)...(19): siRNA sense strand
gaaucuuccuuugcuauuu

SEQ ID NO: 1965688 - RNA, 19 nt, Homo sapiens
  misc_RNA (1)...(19): siRNA sense strand
gaaacagccaccaguuaaa

SEQ ID NO: 1965689 - RNA, 19 nt, Homo sapiens
  misc_RNA (1)...(19): siRNA sense strand
cauauucaguggauaaguu

SEQ ID NO: 1965690 - RNA, 19 nt, Homo sapiens
  misc_RNA (1)...(19): siRNA sense strand
cugcacaggugguuccuua

SEQ ID NO: 1965691 - RNA, 19 nt, Homo sapiens
  misc_RNA (1)...(19): siRNA sense strand
gcacaggugguuccuuaaa

SEQ ID NO: 1965692 - RNA, 19 nt, Homo sapiens
  misc_RNA (1)...(19): siRNA sense strand
ugaaacagccaccaguuaa

SEQ ID NO: 1965693 - RNA, 19 nt, Homo sapiens
  misc_RNA (1)...(19): siRNA sense strand
ugagagagcuuaucuacac

SEQ ID NO: 1965694 - RNA, 19 nt, Homo sapiens
  misc_RNA (1)...(19): siRNA sense strand
gccauucuuuguacugaua

SEQ ID NO: 1965695 - RNA, 19 nt, Homo sapiens
  misc_RNA (1)...(19): siRNA sense strand
ccaccaggcuccuccauuc

SEQ ID NO: 1965696 - RNA, 19 nt, Homo sapiens
  misc_RNA (1)...(19): siRNA sense strand
ccaaggagcuuuugcagaa

SEQ ID NO: 1965697 - RNA, 19 nt, Homo sapiens
  misc_RNA (1)...(19): siRNA sense strand
uaauuugcuugauggguua

SEQ ID NO: 1965698 - RNA, 19 nt, Homo sapiens
  misc_RNA (1)...(19): siRNA sense strand
ggaaggaggaggugauaau

SEQ ID NO: 1965699 - RNA, 19 nt, Homo sapiens
  misc_RNA (1)...(19): siRNA sense strand
aaacaguuauugcucaaga

SEQ ID NO: 1965700 - RNA, 19 nt, Homo sapiens
  misc_RNA (1)...(19): siRNA sense strand
gaauccauguuucuucuca

SEQ ID NO: 1965701 - RNA, 19 nt, Homo sapiens
  misc_RNA (1)...(19): siRNA sense strand
gagggucaauugaaugaau

SEQ ID NO: 1965702 - RNA, 19 nt, Homo sapiens
  misc_RNA (1)...(19): siRNA sense strand
gaggagaucggaagaggaa

SEQ ID NO: 1965703 - RNA, 19 nt, Homo sapiens
  misc_RNA (1)...(19): siRNA sense strand
gagcagaucaggaaucaag

SEQ ID NO: 1965704 - RNA, 19 nt, Homo sapiens
  misc_RNA (1)...(19): siRNA sense strand
gggaaaauguccugaagaa

SEQ ID NO: 1965705 - RNA, 19 nt, Homo sapiens
  misc_RNA (1)...(19): siRNA sense strand
ugaccugauuaguggauua

SEQ ID NO: 1965706 - RNA, 19 nt, Homo sapiens
  misc_RNA (1)...(19): siRNA sense strand
ugaaagaucaagauuggaa

SEQ ID NO: 1965707 - RNA, 19 nt, Homo sapiens
  misc_RNA (1)...(19): siRNA sense strand
gaagaggaagcaagacugu

SEQ ID NO: 1965708 - RNA, 19 nt, Homo sapiens
  misc_RNA (1)...(19): siRNA sense strand
caagcugaaucuuccuuug

SEQ ID NO: 1965709 - RNA, 19 nt, Homo sapiens
  misc_RNA (1)...(19): siRNA sense strand
ccuaaagcuucuucagauu

SEQ ID NO: 1965710 - RNA, 19 nt, Homo sapiens
  misc_RNA (1)...(19): siRNA sense strand
cccagaagauguugugaga

SEQ ID NO: 1965711 - RNA, 19 nt, Homo sapiens
  misc_RNA (1)...(19): siRNA sense strand
uauugcaucuaccaacaua

SEQ ID NO: 1965712 - RNA, 19 nt, Homo sapiens
  misc_RNA (1)...(19): siRNA sense strand
ggaaucaagcgucgaagau

SEQ ID NO: 1965713 - RNA, 19 nt, Homo sapiens
  misc_RNA (1)...(19): siRNA sense strand
cuaaagcuucuucagauuu

SEQ ID NO: 1965714 - RNA, 19 nt, Homo sapiens
  misc_RNA (1)...(19): siRNA sense strand
gaucaagauuggaaugacu

SEQ ID NO: 1965715 - RNA, 19 nt, Homo sapiens
  misc_RNA (1)...(19): siRNA sense strand
ccaguuaaauuugaugcaa

SEQ ID NO: 1965716 - RNA, 19 nt, Homo sapiens
  misc_RNA (1)...(19): siRNA sense strand
gaugagagagcuuaucuac

SEQ ID NO: 1965717 - RNA, 19 nt, Homo sapiens
  misc_RNA (1)...(19): siRNA sense strand
gcuccaaacugggauauac

SEQ ID NO: 1965718 - RNA, 19 nt, Homo sapiens
  misc_RNA (1)...(19): siRNA sense strand
ucugaaagaucaagauugg

SEQ ID NO: 1965719 - RNA, 19 nt, Homo sapiens
  misc_RNA (1)...(19): siRNA sense strand
gaagauguugugagagaau

SEQ ID NO: 1965720 - RNA, 19 nt, Homo sapiens
  misc_RNA (1)...(19): siRNA sense strand
cagaucgacuccacugaga

SEQ ID NO: 1965721 - RNA, 19 nt, Homo sapiens
  misc_RNA (1)...(19): siRNA sense strand
gaagggaacaaucaauuuu

SEQ ID NO: 1965722 - RNA, 19 nt, Homo sapiens
  misc_RNA (1)...(19): siRNA sense strand
gcugucugcuuuaugaaau

SEQ ID NO: 1965723 - RNA, 19 nt, Homo sapiens
  misc_RNA (1)...(19): siRNA sense strand
gaaggaggaggugauaaug

SEQ ID NO: 1965724 - RNA, 19 nt, Homo sapiens
  misc_RNA (1)...(19): siRNA sense strand
gacaauccaaagauaauga

SEQ ID NO: 1965725 - RNA, 19 nt, Homo sapiens
  misc_RNA (1)...(19): siRNA sense strand
gaggaaggaggaggugaua

SEQ ID NO: 1965726 - RNA, 19 nt, Homo sapiens
  misc_RNA (1)...(19): siRNA sense strand
gaucucagucucagcagaa

SEQ ID NO: 1965727 - RNA, 19 nt, Homo sapiens
  misc_RNA (1)...(19): siRNA sense strand
cagaaaagauugacuugga

SEQ ID NO: 1965728 - RNA, 19 nt, Homo sapiens
  misc_RNA (1)...(19): siRNA sense strand
caaggcuacugcagcauuc

SEQ ID NO: 1965729 - RNA, 19 nt, Homo sapiens
  misc_RNA (1)...(19): siRNA sense strand
ggauuacaucaucuucaua

SEQ ID NO: 1965730 - RNA, 19 nt, Homo sapiens
  misc_RNA (1)...(19): siRNA sense strand
ggauauacgggccaagguu

SEQ ID NO: 1965731 - RNA, 19 nt, Homo sapiens
  misc_RNA (1)...(19): siRNA sense strand
cgacggaagggaacaauca

SEQ ID NO: 1965732 - RNA, 19 nt, Homo sapiens
  misc_RNA (1)...(19): siRNA sense strand
cugaaaagaucuuauguga

SEQ ID NO: 1965733 - RNA, 19 nt, Homo sapiens
  misc_RNA (1)...(19): siRNA sense strand
ucuuugggcugucugcuuu

SEQ ID NO: 1965734 - RNA, 19 nt, Homo sapiens
  misc_RNA (1)...(19): siRNA sense strand
ccauguuucuucucaguuc

SEQ ID NO: 1965735 - RNA, 19 nt, Homo sapiens
  misc_RNA (1)...(19): siRNA sense strand
gaaugaauccauguuucuu

SEQ ID NO: 1965736 - RNA, 19 nt, Homo sapiens
  misc_RNA (1)...(19): siRNA sense strand
gaggauaugacucacuguu

SEQ ID NO: 1965737 - RNA, 19 nt, Homo sapiens
  misc_RNA (1)...(19): siRNA sense strand
aaucuuccuuugcuauuug

SEQ ID NO: 1965738 - RNA, 19 nt, Homo sapiens
  misc_RNA (1)...(19): siRNA sense strand
gcugaaucuuccuuugcua

SEQ ID NO: 1965739 - RNA, 19 nt, Homo sapiens
  misc_RNA (1)...(19): siRNA sense strand
ugggcugucugcuuuauga

SEQ ID NO: 1965740 - RNA, 19 nt, Homo sapiens
  misc_RNA (1)...(19): siRNA sense strand
gaaagaucaagauuggaau

SEQ ID NO: 1965741 - RNA, 19 nt, Homo sapiens
  misc_RNA (1)...(19): siRNA sense strand
uaaacuuggcauucucuuu

SEQ ID NO: 1965742 - RNA, 19 nt, Homo sapiens
  misc_RNA (1)...(19): siRNA sense strand
uccuaaagcuucuucagau

SEQ ID NO: 1965743 - RNA, 19 nt, Homo sapiens
  misc_RNA (1)...(19): siRNA sense strand
ccaccuauuccgaaagauu

SEQ ID NO: 1965744 - RNA, 19 nt, Homo sapiens
  misc_RNA (1)...(19): siRNA sense strand
cggaagggaacaaucaauu

SEQ ID NO: 1965745 - RNA, 19 nt, Homo sapiens
  misc_RNA (1)...(19): siRNA sense strand
ucacgugauugguuuacug

SEQ ID NO: 1965746 - RNA, 19 nt, Homo sapiens
  misc_RNA (1)...(19): siRNA sense strand
ggaguguucugggccacaa

SEQ ID NO: 1965747 - RNA, 19 nt, Homo sapiens
  misc_RNA (1)...(19): siRNA sense strand
ggccugaaauaaccaacug

SEQ ID NO: 1965748 - RNA, 19 nt, Homo sapiens
  misc_RNA (1)...(19): siRNA sense strand
gcaaccaccucuggcuagu

SEQ ID NO: 1965749 - RNA, 19 nt, Homo sapiens
  misc_RNA (1)...(19): siRNA sense strand
caaguggacaccugaguca

SEQ ID NO: 1965750 - RNA, 19 nt, Homo sapiens
  misc_RNA (1)...(19): siRNA sense strand
gcaaaaggccugaaauaac

SEQ ID NO: 1965751 - RNA, 19 nt, Homo sapiens
  misc_RNA (1)...(19): siRNA sense strand
gcacacugaaguuuagcaa

SEQ ID NO: 1965752 - RNA, 19 nt, Homo sapiens
  misc_RNA (1)...(19): siRNA sense strand
gaagggccuggcacacuga

SEQ ID NO: 1965753 - RNA, 19 nt, Homo sapiens
  misc_RNA (1)...(19): siRNA sense strand
agaggaagcaagacuguug

SEQ ID NO: 1965754 - RNA, 19 nt, Homo sapiens
  misc_RNA (1)...(19): siRNA sense strand
aauauugcaucuaccaaca

SEQ ID NO: 1965755 - RNA, 19 nt, Homo sapiens
  misc_RNA (1)...(19): siRNA sense strand
aaacagccaccaguuaaau

SEQ ID NO: 1965756 - RNA, 19 nt, Homo sapiens
  misc_RNA (1)...(19): siRNA sense strand
gaaucaagcgucgaagauc

SEQ ID NO: 1965757 - RNA, 19 nt, Homo sapiens
  misc_RNA (1)...(19): siRNA sense strand
acagccaccaguuaaauuu

SEQ ID NO: 1965758 - RNA, 19 nt, Homo sapiens
  misc_RNA (1)...(19): siRNA sense strand
ggccuaaggguacucuuga

SEQ ID NO: 1965759 - RNA, 19 nt, Homo sapiens
  misc_RNA (1)...(19): siRNA sense strand
aguuauugcucaagaugaa

SEQ ID NO: 1965760 - RNA, 19 nt, Homo sapiens
  misc_RNA (1)...(19): siRNA sense strand
gaacucugcacaggugguu

SEQ ID NO: 1965761 - RNA, 19 nt, Homo sapiens
  misc_RNA (1)...(19): siRNA sense strand
aaucaagcgucgaagaucu

SEQ ID NO: 1965762 - RNA, 19 nt, Homo sapiens
  misc_RNA (1)...(19): siRNA sense strand
gcuacugcagcauucauuu

SEQ ID NO: 1965763 - RNA, 19 nt, Homo sapiens
  misc_RNA (1)...(19): siRNA sense strand
caugaaaaguagagucaaa

SEQ ID NO: 1965764 - RNA, 19 nt, Homo sapiens
  misc_RNA (1)...(19): siRNA sense strand
caucaucuucauaaacuug

SEQ ID NO: 1965765 - RNA, 19 nt, Homo sapiens
  misc_RNA (1)...(19): siRNA sense strand
uggauuacaucaucuucau

SEQ ID NO: 1965766 - RNA, 19 nt, Homo sapiens
  misc_RNA (1)...(19): siRNA sense strand
uggagcagaucaggaauca

SEQ ID NO: 1965767 - RNA, 19 nt, Homo sapiens
  misc_RNA (1)...(19): siRNA sense strand
cuucucaguucucguccua

SEQ ID NO: 1965768 - RNA, 19 nt, Homo sapiens
  misc_RNA (1)...(19): siRNA sense strand
gugaaaauuuggaagaguu

SEQ ID NO: 1965769 - RNA, 19 nt, Homo sapiens
  misc_RNA (1)...(19): siRNA sense strand
uugcucacgugauugguuu

SEQ ID NO: 1965770 - RNA, 19 nt, Homo sapiens
  misc_RNA (1)...(19): siRNA sense strand
gaucgacuccacugagaag

SEQ ID NO: 1965771 - RNA, 19 nt, Homo sapiens
  misc_RNA (1)...(19): siRNA sense strand
gcaucuaccaacauauuca

SEQ ID NO: 1965772 - RNA, 19 nt, Homo sapiens
  misc_RNA (1)...(19): siRNA sense strand
augaaacagccaccaguua

SEQ ID NO: 1965773 - RNA, 19 nt, Homo sapiens
  misc_RNA (1)...(19): siRNA sense strand
uugaaugaauccauguuuc

SEQ ID NO: 1965774 - RNA, 19 nt, Homo sapiens
  misc_RNA (1)...(19): siRNA sense strand
guucugggccacaagauuc

SEQ ID NO: 1965775 - RNA, 19 nt, Homo sapiens
  misc_RNA (1)...(19): siRNA sense strand
caaaaggccugaaauaacc

SEQ ID NO: 1965776 - RNA, 19 nt, Homo sapiens
  misc_RNA (1)...(19): siRNA sense strand
gaaccuaccucaccuuuga

SEQ ID NO: 1965777 - RNA, 19 nt, Homo sapiens
  misc_RNA (1)...(19): siRNA sense strand
gcaaugagcaugagacaca

SEQ ID NO: 1965778 - RNA, 19 nt, Homo sapiens
  misc_RNA (1)...(19): siRNA sense strand
gugaagacauuaccagaga

SEQ ID NO: 1965779 - RNA, 19 nt, Homo sapiens
  misc_RNA (1)...(19): siRNA sense strand
gagaaggaggcauguuaua

SEQ ID NO: 1965780 - RNA, 19 nt, Homo sapiens
  misc_RNA (1)...(19): siRNA sense strand
gaaggaggcauguuauauc

SEQ ID NO: 1965781 - RNA, 19 nt, Homo sapiens
  misc_RNA (1)...(19): siRNA sense strand
ccuaaucucuggucguuau

SEQ ID NO: 1965782 - RNA, 19 nt, Homo sapiens
  misc_RNA (1)...(19): siRNA sense strand
gagaguguaucugggaauu

SEQ ID NO: 1965783 - RNA, 19 nt, Homo sapiens
  misc_RNA (1)...(19): siRNA sense strand
ccucucagcuuaccacaug

SEQ ID NO: 1965784 - RNA, 19 nt, Homo sapiens
  misc_RNA (1)...(19): siRNA sense strand
ggauccuucuggucaauaa

SEQ ID NO: 1965785 - RNA, 19 nt, Homo sapiens
  misc_RNA (1)...(19): siRNA sense strand
gaauguccuuguuccaguu

SEQ ID NO: 1965786 - RNA, 19 nt, Homo sapiens
  misc_RNA (1)...(19): siRNA sense strand
caacuucuguaucgagcuu

SEQ ID NO: 1965787 - RNA, 19 nt, Homo sapiens
  misc_RNA (1)...(19): siRNA sense strand
ggagaaggaggcauguuau

SEQ ID NO: 1965788 - RNA, 19 nt, Homo sapiens
  misc_RNA (1)...(19): siRNA sense strand
ggcagacagugaagacauu

SEQ ID NO: 1965789 - RNA, 19 nt, Homo sapiens
  misc_RNA (1)...(19): siRNA sense strand
cgaccgcauucaucuacua

SEQ ID NO: 1965790 - RNA, 19 nt, Homo sapiens
  misc_RNA (1)...(19): siRNA sense strand
gcagacagugaagacauua

SEQ ID NO: 1965791 - RNA, 19 nt, Homo sapiens
  misc_RNA (1)...(19): siRNA sense strand
uggagaaggaggcauguua

SEQ ID NO: 1965792 - RNA, 19 nt, Homo sapiens
  misc_RNA (1)...(19): siRNA sense strand
gugauggcaccguguguua

SEQ ID NO: 1965793 - RNA, 19 nt, Homo sapiens
  misc_RNA (1)...(19): siRNA sense strand
uuugaggcaugcaagaaua

SEQ ID NO: 1965794 - RNA, 19 nt, Homo sapiens
  misc_RNA (1)...(19): siRNA sense strand
gagacagaguggauacaca

SEQ ID NO: 1965795 - RNA, 19 nt, Homo sapiens
  misc_RNA (1)...(19): siRNA sense strand
agacagaccugggagaucu

SEQ ID NO: 1965796 - RNA, 19 nt, Homo sapiens
  misc_RNA (1)...(19): siRNA sense strand
ggaguguggcuuccuguug

SEQ ID NO: 1965797 - RNA, 19 nt, Homo sapiens
  misc_RNA (1)...(19): siRNA sense strand
uaaaccgaauguccuuguu

SEQ ID NO: 1965798 - RNA, 19 nt, Homo sapiens
  misc_RNA (1)...(19): siRNA sense strand
aaugaggaauuugggauuu

SEQ ID NO: 1965799 - RNA, 19 nt, Homo sapiens
  misc_RNA (1)...(19): siRNA sense strand
ggagcaacuuacucacugu

SEQ ID NO: 1965800 - RNA, 19 nt, Homo sapiens
  misc_RNA (1)...(19): siRNA sense strand
gcccucaacuucuguaucg

SEQ ID NO: 1965801 - RNA, 19 nt, Homo sapiens
  misc_RNA (1)...(19): siRNA sense strand
gagcaacuuacucacugua

SEQ ID NO: 1965802 - RNA, 19 nt, Homo sapiens
  misc_RNA (1)...(19): siRNA sense strand
gccucuaccugcuguguga

SEQ ID NO: 1965803 - RNA, 19 nt, Homo sapiens
  misc_RNA (1)...(19): siRNA sense strand
gaguguaucugggaauuuu

SEQ ID NO: 1965804 - RNA, 19 nt, Homo sapiens
  misc_RNA (1)...(19): siRNA sense strand
uaacauccuuuggcaccuu

SEQ ID NO: 1965805 - RNA, 19 nt, Homo sapiens
  misc_RNA (1)...(19): siRNA sense strand
caaucgcuccuuccuugua

SEQ ID NO: 1965806 - RNA, 19 nt, Homo sapiens
  misc_RNA (1)...(19): siRNA sense strand
ucccaacccucaucacaga

SEQ ID NO: 1965807 - RNA, 19 nt, Homo sapiens
  misc_RNA (1)...(19): siRNA sense strand
cagaguggauacacagaca

SEQ ID NO: 1965808 - RNA, 19 nt, Homo sapiens
  misc_RNA (1)...(19): siRNA sense strand
gacauuaccagagagugua

SEQ ID NO: 1965809 - RNA, 19 nt, Homo sapiens
  misc_RNA (1)...(19): siRNA sense strand
gcaacuuacucacuguacu

SEQ ID NO: 1965810 - RNA, 19 nt, Homo sapiens
  misc_RNA (1)...(19): siRNA sense strand
guggcuuccuguugcauuu

SEQ ID NO: 1965811 - RNA, 19 nt, Homo sapiens
  misc_RNA (1)...(19): siRNA sense strand
acagacagcuuuucacaug

SEQ ID NO: 1965812 - RNA, 19 nt, Homo sapiens
  misc_RNA (1)...(19): siRNA sense strand
ccucaucacagacagcuuu

SEQ ID NO: 1965813 - RNA, 19 nt, Homo sapiens
  misc_RNA (1)...(19): siRNA sense strand
gggcacgcaucugcucuug

SEQ ID NO: 1965814 - RNA, 19 nt, Homo sapiens
  misc_RNA (1)...(19): siRNA sense strand
gaagacauuaccagagagu

SEQ ID NO: 1965815 - RNA, 19 nt, Homo sapiens
  misc_RNA (1)...(19): siRNA sense strand
gcgaggucguuauggcuau

SEQ ID NO: 1965816 - RNA, 19 nt, Homo sapiens
  misc_RNA (1)...(19): siRNA sense strand
agaaggaggcauguuauau

SEQ ID NO: 1965817 - RNA, 19 nt, Homo sapiens
  misc_RNA (1)...(19): siRNA sense strand
gaucagcccgaccgcauuc

SEQ ID NO: 1965818 - RNA, 19 nt, Homo sapiens
  misc_RNA (1)...(19): siRNA sense strand
gauggcaccguguguuaug

SEQ ID NO: 1965819 - RNA, 19 nt, Homo sapiens
  misc_RNA (1)...(19): siRNA sense strand
ccaaaguggcacccuguug

SEQ ID NO: 1965820 - RNA, 19 nt, Homo sapiens
  misc_RNA (1)...(19): siRNA sense strand
ggaugagacagaguggaua

SEQ ID NO: 1965821 - RNA, 19 nt, Homo sapiens
  misc_RNA (1)...(19): siRNA sense strand
ucccaaggcugaggaccua

SEQ ID NO: 1965822 - RNA, 19 nt, Homo sapiens
  misc_RNA (1)...(19): siRNA sense strand
aaucucuggucguuauuug

SEQ ID NO: 1965823 - RNA, 19 nt, Homo sapiens
  misc_RNA (1)...(19): siRNA sense strand
caacuuacucacuguacug

SEQ ID NO: 1965824 - RNA, 19 nt, Homo sapiens
  misc_RNA (1)...(19): siRNA sense strand
cuacagcacugcccaaccu

SEQ ID NO: 1965825 - RNA, 19 nt, Homo sapiens
  misc_RNA (1)...(19): siRNA sense strand
caauggcaaggacguguuu

SEQ ID NO: 1965826 - RNA, 19 nt, Homo sapiens
  misc_RNA (1)...(19): siRNA sense strand
gagcaaugagcaugagaca

SEQ ID NO: 1965827 - RNA, 19 nt, Homo sapiens
  misc_RNA (1)...(19): siRNA sense strand
ggagacagaccugggagau

SEQ ID NO: 1965828 - RNA, 19 nt, Homo sapiens
  misc_RNA (1)...(19): siRNA sense strand
ggcacugugugauggagaa

SEQ ID NO: 1965829 - RNA, 19 nt, Homo sapiens
  misc_RNA (1)...(19): siRNA sense strand
ggugcuuucuacugcguuu

SEQ ID NO: 1965830 - RNA, 19 nt, Homo sapiens
  misc_RNA (1)...(19): siRNA sense strand
ccacuucuugucccaugua

SEQ ID NO: 1965831 - RNA, 19 nt, Homo sapiens
  misc_RNA (1)...(19): siRNA sense strand
ugaggaauuugggauuuua

SEQ ID NO: 1965832 - RNA, 19 nt, Homo sapiens
  misc_RNA (1)...(19): siRNA sense strand
cccacguccucucagcuua

SEQ ID NO: 1965833 - RNA, 19 nt, Homo sapiens
  misc_RNA (1)...(19): siRNA sense strand
caugcgagccgaccaaagu

SEQ ID NO: 1965834 - RNA, 19 nt, Homo sapiens
  misc_RNA (1)...(19): siRNA sense strand
cagcuucguucagccaaug

SEQ ID NO: 1965835 - RNA, 19 nt, Homo sapiens
  misc_RNA (1)...(19): siRNA sense strand
ugccuaaucucuggucguu

SEQ ID NO: 1965836 - RNA, 19 nt, Homo sapiens
  misc_RNA (1)...(19): siRNA sense strand
aaucgcuccuuccuuguau

SEQ ID NO: 1965837 - RNA, 19 nt, Homo sapiens
  misc_RNA (1)...(19): siRNA sense strand
ggaaccuaccucaccuuug

SEQ ID NO: 1965838 - RNA, 19 nt, Homo sapiens
  misc_RNA (1)...(19): siRNA sense strand
gcagcuucguucagccaau

SEQ ID NO: 1965839 - RNA, 19 nt, Homo sapiens
  misc_RNA (1)...(19): siRNA sense strand
gacacguucuuccgaaugc

SEQ ID NO: 1965840 - RNA, 19 nt, Homo sapiens
  misc_RNA (1)...(19): siRNA sense strand
guucaucucagucaucuac

SEQ ID NO: 1965841 - RNA, 19 nt, Homo sapiens
  misc_RNA (1)...(19): siRNA sense strand
ggaucagcccgaccgcauu

SEQ ID NO: 1965842 - RNA, 19 nt, Homo sapiens
  misc_RNA (1)...(19): siRNA sense strand
gaugagacagaguggauac

SEQ ID NO: 1965843 - RNA, 19 nt, Homo sapiens
  misc_RNA (1)...(19): siRNA sense strand
gggagaucuuggugagcaa

SEQ ID NO: 1965844 - RNA, 19 nt, Homo sapiens
  misc_RNA (1)...(19): siRNA sense strand
guauugcgaggucguuaug

SEQ ID NO: 1965845 - RNA, 19 nt, Homo sapiens
  misc_RNA (1)...(19): siRNA sense strand
gaacuguggcaggaucauc

SEQ ID NO: 1965846 - RNA, 19 nt, Homo sapiens
  misc_RNA (1)...(19): siRNA sense strand
gcuuaaaccgaauguccuu

SEQ ID NO: 1965847 - RNA, 19 nt, Homo sapiens
  misc_RNA (1)...(19): siRNA sense strand
gggucagccucaggucaaa

SEQ ID NO: 1965848 - RNA, 19 nt, Homo sapiens
  misc_RNA (1)...(19): siRNA sense strand
cuacacaccacuucuuguc

SEQ ID NO: 1965849 - RNA, 19 nt, Homo sapiens
  misc_RNA (1)...(19): siRNA sense strand
agacauuaccagagagugu

SEQ ID NO: 1965850 - RNA, 19 nt, Homo sapiens
  misc_RNA (1)...(19): siRNA sense strand
ccuguugcauuuccgagau

SEQ ID NO: 1965851 - RNA, 19 nt, Homo sapiens
  misc_RNA (1)...(19): siRNA sense strand
ucaaagacugggcgguuca

SEQ ID NO: 1965852 - RNA, 19 nt, Homo sapiens
  misc_RNA (1)...(19): siRNA sense strand
ggagaugacuugaguuaua

SEQ ID NO: 1965853 - RNA, 19 nt, Homo sapiens
  misc_RNA (1)...(19): siRNA sense strand
gaacuuggcuauugauaaa

SEQ ID NO: 1965854 - RNA, 19 nt, Homo sapiens
  misc_RNA (1)...(19): siRNA sense strand
gcacaaaccuacuuaucua

SEQ ID NO: 1965855 - RNA, 19 nt, Homo sapiens
  misc_RNA (1)...(19): siRNA sense strand
cauagaagcuuaaucauga

SEQ ID NO: 1965856 - RNA, 19 nt, Homo sapiens
  misc_RNA (1)...(19): siRNA sense strand
gaacauagaagcuuaauca

SEQ ID NO: 1965857 - RNA, 19 nt, Homo sapiens
  misc_RNA (1)...(19): siRNA sense strand
gcagugagcuuuccagaga

SEQ ID NO: 1965858 - RNA, 19 nt, Homo sapiens
  misc_RNA (1)...(19): siRNA sense strand
gaaagacagugguuaauca

SEQ ID NO: 1965859 - RNA, 19 nt, Homo sapiens
  misc_RNA (1)...(19): siRNA sense strand
gcggagaucuauucuguuu

SEQ ID NO: 1965860 - RNA, 19 nt, Homo sapiens
  misc_RNA (1)...(19): siRNA sense strand
ccacagagaugguuagugu

SEQ ID NO: 1965861 - RNA, 19 nt, Homo sapiens
  misc_RNA (1)...(19): siRNA sense strand
gcuagaggaugaaguaauu

SEQ ID NO: 1965862 - RNA, 19 nt, Homo sapiens
  misc_RNA (1)...(19): siRNA sense strand
gauggaaagugugacauua

SEQ ID NO: 1965863 - RNA, 19 nt, Homo sapiens
  misc_RNA (1)...(19): siRNA sense strand
ggaaaggacuucuggaucu

SEQ ID NO: 1965864 - RNA, 19 nt, Homo sapiens
  misc_RNA (1)...(19): siRNA sense strand
gaucuauucuguuuccuaa

SEQ ID NO: 1965865 - RNA, 19 nt, Homo sapiens
  misc_RNA (1)...(19): siRNA sense strand
gauaaauacucucuugaug

SEQ ID NO: 1965866 - RNA, 19 nt, Homo sapiens
  misc_RNA (1)...(19): siRNA sense strand
gaagauggauuagccaaug

SEQ ID NO: 1965867 - RNA, 19 nt, Homo sapiens
  misc_RNA (1)...(19): siRNA sense strand
gaaacugacuuaugcaaag

SEQ ID NO: 1965868 - RNA, 19 nt, Homo sapiens
  misc_RNA (1)...(19): siRNA sense strand
caaagucaaagaccaauua

SEQ ID NO: 1965869 - RNA, 19 nt, Homo sapiens
  misc_RNA (1)...(19): siRNA sense strand
gaagaaaucagacagaugu

SEQ ID NO: 1965870 - RNA, 19 nt, Homo sapiens
  misc_RNA (1)...(19): siRNA sense strand
caagagagaaugagaguuu

SEQ ID NO: 1965871 - RNA, 19 nt, Homo sapiens
  misc_RNA (1)...(19): siRNA sense strand
ggaaauucguguacuugaa

SEQ ID NO: 1965872 - RNA, 19 nt, Homo sapiens
  misc_RNA (1)...(19): siRNA sense strand
gaggauauggaacaaauua

SEQ ID NO: 1965873 - RNA, 19 nt, Homo sapiens
  misc_RNA (1)...(19): siRNA sense strand
gggaagaacuacaggauuc

SEQ ID NO: 1965874 - RNA, 19 nt, Homo sapiens
  misc_RNA (1)...(19): siRNA sense strand
gugaacagauugcagaauu

SEQ ID NO: 1965875 - RNA, 19 nt, Homo sapiens
  misc_RNA (1)...(19): siRNA sense strand
caaagcaccucuuauacug

SEQ ID NO: 1965876 - RNA, 19 nt, Homo sapiens
  misc_RNA (1)...(19): siRNA sense strand
gaggagaugacuugaguua

SEQ ID NO: 1965877 - RNA, 19 nt, Homo sapiens
  misc_RNA (1)...(19): siRNA sense strand
gcagaugcuucccuggaua

SEQ ID NO: 1965878 - RNA, 19 nt, Homo sapiens
  misc_RNA (1)...(19): siRNA sense strand
uaaauacucucuugaugug

SEQ ID NO: 1965879 - RNA, 19 nt, Homo sapiens
  misc_RNA (1)...(19): siRNA sense strand
ucaccaaacugaagaucua

SEQ ID NO: 1965880 - RNA, 19 nt, Homo sapiens
  misc_RNA (1)...(19): siRNA sense strand
gaagauuucucuggguauu

SEQ ID NO: 1965881 - RNA, 19 nt, Homo sapiens
  misc_RNA (1)...(19): siRNA sense strand
ccacagaccaaauuaguaa

SEQ ID NO: 1965882 - RNA, 19 nt, Homo sapiens
  misc_RNA (1)...(19): siRNA sense strand
gaaggagacuuuccaucau

SEQ ID NO: 1965883 - RNA, 19 nt, Homo sapiens
  misc_RNA (1)...(19): siRNA sense strand
ugaagaaacugacuuaugc

SEQ ID NO: 1965884 - RNA, 19 nt, Homo sapiens
  misc_RNA (1)...(19): siRNA sense strand
cgucaucuauucuggauaa

SEQ ID NO: 1965885 - RNA, 19 nt, Homo sapiens
  misc_RNA (1)...(19): siRNA sense strand
gaagcuuaaucaugaagaa

SEQ ID NO: 1965886 - RNA, 19 nt, Homo sapiens
  misc_RNA (1)...(19): siRNA sense strand
gacagccucucaucuauug

SEQ ID NO: 1965887 - RNA, 19 nt, Homo sapiens
  misc_RNA (1)...(19): siRNA sense strand
ugacagauccacacacuuu

SEQ ID NO: 1965888 - RNA, 19 nt, Homo sapiens
  misc_RNA (1)...(19): siRNA sense strand
caccauaucugaccucuuc

SEQ ID NO: 1965889 - RNA, 19 nt, Homo sapiens
  misc_RNA (1)...(19): siRNA sense strand
gcaacgccgucaucuauuc

SEQ ID NO: 1965890 - RNA, 19 nt, Homo sapiens
  misc_RNA (1)...(19): siRNA sense strand
gagcagagaagaaaucaga

SEQ ID NO: 1965891 - RNA, 19 nt, Homo sapiens
  misc_RNA (1)...(19): siRNA sense strand
gaagaacggcccugucaga

SEQ ID NO: 1965892 - RNA, 19 nt, Homo sapiens
  misc_RNA (1)...(19): siRNA sense strand
ccaauucugucccuccuaa

SEQ ID NO: 1965893 - RNA, 19 nt, Homo sapiens
  misc_RNA (1)...(19): siRNA sense strand
cgaaugaaguuugccaauu

SEQ ID NO: 1965894 - RNA, 19 nt, Homo sapiens
  misc_RNA (1)...(19): siRNA sense strand
ggagugagacuucaucaga

SEQ ID NO: 1965895 - RNA, 19 nt, Homo sapiens
  misc_RNA (1)...(19): siRNA sense strand
guaagcagcucugaacugu

SEQ ID NO: 1965896 - RNA, 19 nt, Homo sapiens
  misc_RNA (1)...(19): siRNA sense strand
guugaugauugcucaguua

SEQ ID NO: 1965897 - RNA, 19 nt, Homo sapiens
  misc_RNA (1)...(19): siRNA sense strand
caaggaaauucguguacuu

SEQ ID NO: 1965898 - RNA, 19 nt, Homo sapiens
  misc_RNA (1)...(19): siRNA sense strand
gagagaguuuggacaagaa

SEQ ID NO: 1965899 - RNA, 19 nt, Homo sapiens
  misc_RNA (1)...(19): siRNA sense strand
gggaggauauggaacaaau

SEQ ID NO: 1965900 - RNA, 19 nt, Homo sapiens
  misc_RNA (1)...(19): siRNA sense strand
cagcugagauugaagacaa

SEQ ID NO: 1965901 - RNA, 19 nt, Homo sapiens
  misc_RNA (1)...(19): siRNA sense strand
uaucugaccucuucuauac

SEQ ID NO: 1965902 - RNA, 19 nt, Homo sapiens
  misc_RNA (1)...(19): siRNA sense strand
guuagcagcuugacucuuc

SEQ ID NO: 1965903 - RNA, 19 nt, Homo sapiens
  misc_RNA (1)...(19): siRNA sense strand
gaugauaaacccacuguug

SEQ ID NO: 1965904 - RNA, 19 nt, Homo sapiens
  misc_RNA (1)...(19): siRNA sense strand
gauguuuacuaugcaguua

SEQ ID NO: 1965905 - RNA, 19 nt, Homo sapiens
  misc_RNA (1)...(19): siRNA sense strand
gagaagaaaucagacagau

SEQ ID NO: 1965906 - RNA, 19 nt, Homo sapiens
  misc_RNA (1)...(19): siRNA sense strand
uaccaaagcaccucuuaua

SEQ ID NO: 1965907 - RNA, 19 nt, Homo sapiens
  misc_RNA (1)...(19): siRNA sense strand
ucaguaacuucagagauua

SEQ ID NO: 1965908 - RNA, 19 nt, Homo sapiens
  misc_RNA (1)...(19): siRNA sense strand
gaggauggagucacaagua

SEQ ID NO: 1965909 - RNA, 19 nt, Homo sapiens
  misc_RNA (1)...(19): siRNA sense strand
uggcguagauguuuacuau

SEQ ID NO: 1965910 - RNA, 19 nt, Homo sapiens
  misc_RNA (1)...(19): siRNA sense strand
cuuaacaucuucaccauau

SEQ ID NO: 1965911 - RNA, 19 nt, Homo sapiens
  misc_RNA (1)...(19): siRNA sense strand
gaaaucagacagauguaug

SEQ ID NO: 1965912 - RNA, 19 nt, Homo sapiens
  misc_RNA (1)...(19): siRNA sense strand
gacacagucuaccaaauug

SEQ ID NO: 1965913 - RNA, 19 nt, Homo sapiens
  misc_RNA (1)...(19): siRNA sense strand
gcagagaaacugaaagaca

SEQ ID NO: 1965914 - RNA, 19 nt, Homo sapiens
  misc_RNA (1)...(19): siRNA sense strand
caucaggacucuucaagca

SEQ ID NO: 1965915 - RNA, 19 nt, Homo sapiens
  misc_RNA (1)...(19): siRNA sense strand
ggaacaaauuacugaguca

SEQ ID NO: 1965916 - RNA, 19 nt, Homo sapiens
  misc_RNA (1)...(19): siRNA sense strand
ccagaugcauccauggaaa

SEQ ID NO: 1965917 - RNA, 19 nt, Homo sapiens
  misc_RNA (1)...(19): siRNA sense strand
agacauugcagcagaauuu

SEQ ID NO: 1965918 - RNA, 19 nt, Homo sapiens
  misc_RNA (1)...(19): siRNA sense strand
gcaaguuucaggccuguaa

SEQ ID NO: 1965919 - RNA, 19 nt, Homo sapiens
  misc_RNA (1)...(19): siRNA sense strand
ugacacagucuaccaaauu

SEQ ID NO: 1965920 - RNA, 19 nt, Homo sapiens
  misc_RNA (1)...(19): siRNA sense strand
agaaguaccugguguugau

SEQ ID NO: 1965921 - RNA, 19 nt, Homo sapiens
  misc_RNA (1)...(19): siRNA sense strand
gaucucacuugguagaaga

SEQ ID NO: 1965922 - RNA, 19 nt, Homo sapiens
  misc_RNA (1)...(19): siRNA sense strand
agacagugguuaaucagaa

SEQ ID NO: 1965923 - RNA, 19 nt, Homo sapiens
  misc_RNA (1)...(19): siRNA sense strand
guggaaaugucaacaagug

SEQ ID NO: 1965924 - RNA, 19 nt, Homo sapiens
  misc_RNA (1)...(19): siRNA sense strand
caaaccuacuuaucuauag

SEQ ID NO: 1965925 - RNA, 19 nt, Homo sapiens
  misc_RNA (1)...(19): siRNA sense strand
gaagaugaugauucacuuu

SEQ ID NO: 1965926 - RNA, 19 nt, Homo sapiens
  misc_RNA (1)...(19): siRNA sense strand
gcaccuugaagaagaauuu

SEQ ID NO: 1965927 - RNA, 19 nt, Homo sapiens
  misc_RNA (1)...(19): siRNA sense strand
uggcaaaucaugugaagua

SEQ ID NO: 1965928 - RNA, 19 nt, Homo sapiens
  misc_RNA (1)...(19): siRNA sense strand
guaguuauguggaaauguc

SEQ ID NO: 1965929 - RNA, 19 nt, Homo sapiens
  misc_RNA (1)...(19): siRNA sense strand
gugaggaauuugugucuga

SEQ ID NO: 1965930 - RNA, 19 nt, Homo sapiens
  misc_RNA (1)...(19): siRNA sense strand
caagcacugugaggaauuu

SEQ ID NO: 1965931 - RNA, 19 nt, Homo sapiens
  misc_RNA (1)...(19): siRNA sense strand
cugaagaucuaguuuggaa

SEQ ID NO: 1965932 - RNA, 19 nt, Homo sapiens
  misc_RNA (1)...(19): siRNA sense strand
ggaacuguaugccaaugau

SEQ ID NO: 1965933 - RNA, 19 nt, Homo sapiens
  misc_RNA (1)...(19): siRNA sense strand
ucagagagcagcuuggaaa

SEQ ID NO: 1965934 - RNA, 19 nt, Homo sapiens
  misc_RNA (1)...(19): siRNA sense strand
gcuaucaucuacuucuuca

SEQ ID NO: 1965935 - RNA, 19 nt, Homo sapiens
  misc_RNA (1)...(19): siRNA sense strand
agagacauauuggcaagua

SEQ ID NO: 1965936 - RNA, 19 nt, Homo sapiens
  misc_RNA (1)...(19): siRNA sense strand
agccagauaugcaaacuuu

SEQ ID NO: 1965937 - RNA, 19 nt, Homo sapiens
  misc_RNA (1)...(19): siRNA sense strand
gcaaaucaugugaaguauu

SEQ ID NO: 1965938 - RNA, 19 nt, Homo sapiens
  misc_RNA (1)...(19): siRNA sense strand
gaugacagauccacacacu

SEQ ID NO: 1965939 - RNA, 19 nt, Homo sapiens
  misc_RNA (1)...(19): siRNA sense strand
gaacagauugcagaauuca

SEQ ID NO: 1965940 - RNA, 19 nt, Homo sapiens
  misc_RNA (1)...(19): siRNA sense strand
gauggagucacaaguauau

SEQ ID NO: 1965941 - RNA, 19 nt, Homo sapiens
  misc_RNA (1)...(19): siRNA sense strand
gugaaucuguggaacauag

SEQ ID NO: 1965942 - RNA, 19 nt, Homo sapiens
  misc_RNA (1)...(19): siRNA sense strand
gagaugacuugaguuauac

SEQ ID NO: 1965943 - RNA, 19 nt, Homo sapiens
  misc_RNA (1)...(19): siRNA sense strand
gaagaucuaguuuggaaca

SEQ ID NO: 1965944 - RNA, 19 nt, Homo sapiens
  misc_RNA (1)...(19): siRNA sense strand
ggugaggccaucagcaaua

SEQ ID NO: 1965945 - RNA, 19 nt, Homo sapiens
  misc_RNA (1)...(19): siRNA sense strand
gagaguauuagcaaugaaa

SEQ ID NO: 1965946 - RNA, 19 nt, Homo sapiens
  misc_RNA (1)...(19): siRNA sense strand
agguagaucugauuacuug

SEQ ID NO: 1965947 - RNA, 19 nt, Homo sapiens
  misc_RNA (1)...(19): siRNA sense strand
agaaugcugugaaguacaa

SEQ ID NO: 1965948 - RNA, 19 nt, Homo sapiens
  misc_RNA (1)...(19): siRNA sense strand
ccaugaacuuggcuauuga

SEQ ID NO: 1965949 - RNA, 19 nt, Homo sapiens
  misc_RNA (1)...(19): siRNA sense strand
gaaauccucaacuucagaa

SEQ ID NO: 1965950 - RNA, 19 nt, Homo sapiens
  misc_RNA (1)...(19): siRNA sense strand
gaacuuagaaauccucaac

SEQ ID NO: 1965951 - RNA, 19 nt, Homo sapiens
  misc_RNA (1)...(19): siRNA sense strand
gcacauaucagaaguaccu

SEQ ID NO: 1965952 - RNA, 19 nt, Homo sapiens
  misc_RNA (1)...(19): siRNA sense strand
ggaaacagcugaucuauau

SEQ ID NO: 1965953 - RNA, 19 nt, Homo sapiens
  misc_RNA (1)...(19): siRNA sense strand
ggaaguggaugcuuuggaa

SEQ ID NO: 1965954 - RNA, 19 nt, Homo sapiens
  misc_RNA (1)...(19): siRNA sense strand
ggagaucccuuucccauuc

SEQ ID NO: 1965955 - RNA, 19 nt, Homo sapiens
  misc_RNA (1)...(19): siRNA sense strand
gaaacuaggagaucccuuu

SEQ ID NO: 1965956 - RNA, 19 nt, Homo sapiens
  misc_RNA (1)...(19): siRNA sense strand
gagaauagaauacuccaaa

SEQ ID NO: 1965957 - RNA, 19 nt, Homo sapiens
  misc_RNA (1)...(19): siRNA sense strand
caacacauuuccuucauuc

SEQ ID NO: 1965958 - RNA, 19 nt, Homo sapiens
  misc_RNA (1)...(19): siRNA sense strand
gaaugaguaugccuuuaga

SEQ ID NO: 1965959 - RNA, 19 nt, Homo sapiens
  misc_RNA (1)...(19): siRNA sense strand
gaacggcgacugcugcaaa

SEQ ID NO: 1965960 - RNA, 19 nt, Homo sapiens
  misc_RNA (1)...(19): siRNA sense strand
cauaaucacugaaguccuu

SEQ ID NO: 1965961 - RNA, 19 nt, Homo sapiens
  misc_RNA (1)...(19): siRNA sense strand
acacuuacaugucuuacuu

SEQ ID NO: 1965962 - RNA, 19 nt, Homo sapiens
  misc_RNA (1)...(19): siRNA sense strand
ccaauuugaugugaaguuu

SEQ ID NO: 1965963 - RNA, 19 nt, Homo sapiens
  misc_RNA (1)...(19): siRNA sense strand
ggaauccaauuugauguga

SEQ ID NO: 1965964 - RNA, 19 nt, Homo sapiens
  misc_RNA (1)...(19): siRNA sense strand
ccaaggagagaauagaaua

SEQ ID NO: 1965965 - RNA, 19 nt, Homo sapiens
  misc_RNA (1)...(19): siRNA sense strand
gaauaccgcaccauaauca

SEQ ID NO: 1965966 - RNA, 19 nt, Homo sapiens
  misc_RNA (1)...(19): siRNA sense strand
gagcucaucaucuuugaaa

SEQ ID NO: 1965967 - RNA, 19 nt, Homo sapiens
  misc_RNA (1)...(19): siRNA sense strand
gcaguaaguccuccaaugu

SEQ ID NO: 1965968 - RNA, 19 nt, Homo sapiens
  misc_RNA (1)...(19): siRNA sense strand
gaggauugcugaucacucu

SEQ ID NO: 1965969 - RNA, 19 nt, Homo sapiens
  misc_RNA (1)...(19): siRNA sense strand
uggcugaccuuuauguauu

SEQ ID NO: 1965970 - RNA, 19 nt, Homo sapiens
  misc_RNA (1)...(19): siRNA sense strand
gaauaaucaucgucacauc

SEQ ID NO: 1965971 - RNA, 19 nt, Homo sapiens
  misc_RNA (1)...(19): siRNA sense strand
ugaguaugccuuuagaaua

SEQ ID NO: 1965972 - RNA, 19 nt, Homo sapiens
  misc_RNA (1)...(19): siRNA sense strand
caugauuaccucccaaaua

SEQ ID NO: 1965973 - RNA, 19 nt, Homo sapiens
  misc_RNA (1)...(19): siRNA sense strand
gcauacucuuccucuauuu

SEQ ID NO: 1965974 - RNA, 19 nt, Homo sapiens
  misc_RNA (1)...(19): siRNA sense strand
gauaaugggcauguacuuu

SEQ ID NO: 1965975 - RNA, 19 nt, Homo sapiens
  misc_RNA (1)...(19): siRNA sense strand
gccaauuguuuaaagacua

SEQ ID NO: 1965976 - RNA, 19 nt, Homo sapiens
  misc_RNA (1)...(19): siRNA sense strand
ggauugcugaucacucuua

SEQ ID NO: 1965977 - RNA, 19 nt, Homo sapiens
  misc_RNA (1)...(19): siRNA sense strand
ucuuauggcugaccuuuau

SEQ ID NO: 1965978 - RNA, 19 nt, Homo sapiens
  misc_RNA (1)...(19): siRNA sense strand
gauuaccucccaaauacua

SEQ ID NO: 1965979 - RNA, 19 nt, Homo sapiens
  misc_RNA (1)...(19): siRNA sense strand
ccaacacauuuccuucauu

SEQ ID NO: 1965980 - RNA, 19 nt, Homo sapiens
  misc_RNA (1)...(19): siRNA sense strand
ggaagugcauaacaaacca

SEQ ID NO: 1965981 - RNA, 19 nt, Homo sapiens
  misc_RNA (1)...(19): siRNA sense strand
gcaauggcacggagaacaa

SEQ ID NO: 1965982 - RNA, 19 nt, Homo sapiens
  misc_RNA (1)...(19): siRNA sense strand
ucucauggcucuucuuucu

SEQ ID NO: 1965983 - RNA, 19 nt, Homo sapiens
  misc_RNA (1)...(19): siRNA sense strand
cauaaacaacgacugcuuu

SEQ ID NO: 1965984 - RNA, 19 nt, Homo sapiens
  misc_RNA (1)...(19): siRNA sense strand
cacauuuccuucauucuug

SEQ ID NO: 1965985 - RNA, 19 nt, Homo sapiens
  misc_RNA (1)...(19): siRNA sense strand
gaaaacggauccugucaca

SEQ ID NO: 1965986 - RNA, 19 nt, Homo sapiens
  misc_RNA (1)...(19): siRNA sense strand
ucaacugcccauacacuua

SEQ ID NO: 1965987 - RNA, 19 nt, Homo sapiens
  misc_RNA (1)...(19): siRNA sense strand
gaucuucuccgugacguuu

SEQ ID NO: 1965988 - RNA, 19 nt, Homo sapiens
  misc_RNA (1)...(19): siRNA sense strand
uaugccaucucuagcagua

SEQ ID NO: 1965989 - RNA, 19 nt, Homo sapiens
  misc_RNA (1)...(19): siRNA sense strand
gaauagcagcucccguuau

SEQ ID NO: 1965990 - RNA, 19 nt, Homo sapiens
  misc_RNA (1)...(19): siRNA sense strand
gaauccaauuugaugugaa

SEQ ID NO: 1965991 - RNA, 19 nt, Homo sapiens
  misc_RNA (1)...(19): siRNA sense strand
gcugucaacugcccauaca

SEQ ID NO: 1965992 - RNA, 19 nt, Homo sapiens
  misc_RNA (1)...(19): siRNA sense strand
gcacagauaaugggcaugu

SEQ ID NO: 1965993 - RNA, 19 nt, Homo sapiens
  misc_RNA (1)...(19): siRNA sense strand
ugaucacucuuaccaaguu

SEQ ID NO: 1965994 - RNA, 19 nt, Homo sapiens
  misc_RNA (1)...(19): siRNA sense strand
aacaggaaguggaugcuuu

SEQ ID NO: 1965995 - RNA, 19 nt, Homo sapiens
  misc_RNA (1)...(19): siRNA sense strand
aaacggauccugucacaag

SEQ ID NO: 1965996 - RNA, 19 nt, Homo sapiens
  misc_RNA (1)...(19): siRNA sense strand
ugaaaucuuaggaguauug

SEQ ID NO: 1965997 - RNA, 19 nt, Homo sapiens
  misc_RNA (1)...(19): siRNA sense strand
gcaccauaaucacugaagu

SEQ ID NO: 1965998 - RNA, 19 nt, Homo sapiens
  misc_RNA (1)...(19): siRNA sense strand
uagaauaccgcaccauaau

SEQ ID NO: 1965999 - RNA, 19 nt, Homo sapiens
  misc_RNA (1)...(19): siRNA sense strand
ccgaaugaguaugccuuua

SEQ ID NO: 1966000 - RNA, 19 nt, Homo sapiens
  misc_RNA (1)...(19): siRNA sense strand
gacuccagcaucaugauua

SEQ ID NO: 1966001 - RNA, 19 nt, Homo sapiens
  misc_RNA (1)...(19): siRNA sense strand
gaucuuauccauagaacag

SEQ ID NO: 1966002 - RNA, 19 nt, Homo sapiens
  misc_RNA (1)...(19): siRNA sense strand
uguuugagcucaucaucuu

SEQ ID NO: 1966003 - RNA, 19 nt, Homo sapiens
  misc_RNA (1)...(19): siRNA sense strand
uaaugggcauguacuuugu

SEQ ID NO: 1966004 - RNA, 19 nt, Homo sapiens
  misc_RNA (1)...(19): siRNA sense strand
ggcugaccuuuauguauuu

SEQ ID NO: 1966005 - RNA, 19 nt, Homo sapiens
  misc_RNA (1)...(19): siRNA sense strand
ugaauagcagcucccguua

SEQ ID NO: 1966006 - RNA, 19 nt, Homo sapiens
  misc_RNA (1)...(19): siRNA sense strand
cugcugauccgaaugagua

SEQ ID NO: 1966007 - RNA, 19 nt, Homo sapiens
  misc_RNA (1)...(19): siRNA sense strand
ugaauuaucugggaaucca

SEQ ID NO: 1966008 - RNA, 19 nt, Homo sapiens
  misc_RNA (1)...(19): siRNA sense strand
gaucgacuccagcaucaug

SEQ ID NO: 1966009 - RNA, 19 nt, Homo sapiens
  misc_RNA (1)...(19): siRNA sense strand
gcauaaacaacgacugcuu

SEQ ID NO: 1966010 - RNA, 19 nt, Homo sapiens
  misc_RNA (1)...(19): siRNA sense strand
ggaauaaucaucgucacau

SEQ ID NO: 1966011 - RNA, 19 nt, Homo sapiens
  misc_RNA (1)...(19): siRNA sense strand
gcucuucuuucuggauuug

SEQ ID NO: 1966012 - RNA, 19 nt, Homo sapiens
  misc_RNA (1)...(19): siRNA sense strand
gcucaucaucuuugaaauc

SEQ ID NO: 1966013 - RNA, 19 nt, Homo sapiens
  misc_RNA (1)...(19): siRNA sense strand
uagcauacucuuccucuau

SEQ ID NO: 1966014 - RNA, 19 nt, Homo sapiens
  misc_RNA (1)...(19): siRNA sense strand
uuagaauaccgcaccauaa

SEQ ID NO: 1966015 - RNA, 19 nt, Homo sapiens
  misc_RNA (1)...(19): siRNA sense strand
gcuaccaucaauauuguuu

SEQ ID NO: 1966016 - RNA, 19 nt, Homo sapiens
  misc_RNA (1)...(19): siRNA sense strand
aaaaugaaccugugcguaa

SEQ ID NO: 1966017 - RNA, 19 nt, Homo sapiens
  misc_RNA (1)...(19): siRNA sense strand
cgaaugaguaugccuuuag

SEQ ID NO: 1966018 - RNA, 19 nt, Homo sapiens
  misc_RNA (1)...(19): siRNA sense strand
acuaugagauacgucagua

SEQ ID NO: 1966019 - RNA, 19 nt, Homo sapiens
  misc_RNA (1)...(19): siRNA sense strand
augauuaccucccaaauac

SEQ ID NO: 1966020 - RNA, 19 nt, Homo sapiens
  misc_RNA (1)...(19): siRNA sense strand
gaaccugugcguaauucug

SEQ ID NO: 1966021 - RNA, 19 nt, Homo sapiens
  misc_RNA (1)...(19): siRNA sense strand
gaagcaaauggcaccuuga

SEQ ID NO: 1966022 - RNA, 19 nt, Homo sapiens
  misc_RNA (1)...(19): siRNA sense strand
uggaaacagcugaucuaua

SEQ ID NO: 1966023 - RNA, 19 nt, Homo sapiens
  misc_RNA (1)...(19): siRNA sense strand
cagccggguuggugugauu

SEQ ID NO: 1966024 - RNA, 19 nt, Homo sapiens
  misc_RNA (1)...(19): siRNA sense strand
aaaugaaccugugcguaau

SEQ ID NO: 1966025 - RNA, 19 nt, Homo sapiens
  misc_RNA (1)...(19): siRNA sense strand
uaaagacuaugagauacgu

SEQ ID NO: 1966026 - RNA, 19 nt, Homo sapiens
  misc_RNA (1)...(19): siRNA sense strand
uggaugcuuuggaagaauu

SEQ ID NO: 1966027 - RNA, 19 nt, Homo sapiens
  misc_RNA (1)...(19): siRNA sense strand
aguaaguccuccaauguca

SEQ ID NO: 1966028 - RNA, 19 nt, Homo sapiens
  misc_RNA (1)...(19): siRNA sense strand
uggcuaccaucaauauugu

SEQ ID NO: 1966029 - RNA, 19 nt, Homo sapiens
  misc_RNA (1)...(19): siRNA sense strand
caaacaggcaccagagaag

SEQ ID NO: 1966030 - RNA, 19 nt, Homo sapiens
  misc_RNA (1)...(19): siRNA sense strand
ugaaguccuuggagaacug

SEQ ID NO: 1966031 - RNA, 19 nt, Homo sapiens
  misc_RNA (1)...(19): siRNA sense strand
caagaggcauugagaucac

SEQ ID NO: 1966032 - RNA, 19 nt, Homo sapiens
  misc_RNA (1)...(19): siRNA sense strand
gaaaucuuaggaguauuga

SEQ ID NO: 1966033 - RNA, 19 nt, Homo sapiens
  misc_RNA (1)...(19): siRNA sense strand
acaaacaggcaccagagaa

SEQ ID NO: 1966034 - RNA, 19 nt, Homo sapiens
  misc_RNA (1)...(19): siRNA sense strand
acacauuuccuucauucuu

SEQ ID NO: 1966035 - RNA, 19 nt, Homo sapiens
  misc_RNA (1)...(19): siRNA sense strand
uaucugggaauccaauuug

SEQ ID NO: 1966036 - RNA, 19 nt, Homo sapiens
  misc_RNA (1)...(19): siRNA sense strand
cauacacuuacaugucuua

SEQ ID NO: 1966037 - RNA, 19 nt, Homo sapiens
  misc_RNA (1)...(19): siRNA sense strand
cuucaugcgccaauuguuu

SEQ ID NO: 1966038 - RNA, 19 nt, Homo sapiens
  misc_RNA (1)...(19): siRNA sense strand
cugcaaaccauggauauga

SEQ ID NO: 1966039 - RNA, 19 nt, Homo sapiens
  misc_RNA (1)...(19): siRNA sense strand
agcauacucuuccucuauu

SEQ ID NO: 1966040 - RNA, 19 nt, Homo sapiens
  misc_RNA (1)...(19): siRNA sense strand
gaucacucuuaccaaguuc

SEQ ID NO: 1966041 - RNA, 19 nt, Homo sapiens
  misc_RNA (1)...(19): siRNA sense strand
ggaugcuuuggaagaauua

SEQ ID NO: 1966042 - RNA, 19 nt, Homo sapiens
  misc_RNA (1)...(19): siRNA sense strand
aauauccgacuacugcaua

SEQ ID NO: 1966043 - RNA, 19 nt, Homo sapiens
  misc_RNA (1)...(19): siRNA sense strand
auaaugggcauguacuuug

SEQ ID NO: 1966044 - RNA, 19 nt, Homo sapiens
  misc_RNA (1)...(19): siRNA sense strand
ugucauuguccugcuauua

SEQ ID NO: 1966045 - RNA, 19 nt, Homo sapiens
  misc_RNA (1)...(19): siRNA sense strand
caucgucacauccaucaga

SEQ ID NO: 1966046 - RNA, 19 nt, Homo sapiens
  misc_RNA (1)...(19): siRNA sense strand
cccauacacuuacaugucu

SEQ ID NO: 1966047 - RNA, 19 nt, Homo sapiens
  misc_RNA (1)...(19): siRNA sense strand
caacugcccauacacuuac

SEQ ID NO: 1966048 - RNA, 19 nt, Homo sapiens
  misc_RNA (1)...(19): siRNA sense strand
gagaucccuuucccauucu

SEQ ID NO: 1966049 - RNA, 19 nt, Homo sapiens
  misc_RNA (1)...(19): siRNA sense strand
gggaauccaauuugaugug

SEQ ID NO: 1966050 - RNA, 19 nt, Homo sapiens
  misc_RNA (1)...(19): siRNA sense strand
gcaaaccauggauaugauc

SEQ ID NO: 1966051 - RNA, 19 nt, Homo sapiens
  misc_RNA (1)...(19): siRNA sense strand
uuuagaauaccgcaccaua

SEQ ID NO: 1966052 - RNA, 19 nt, Homo sapiens
  misc_RNA (1)...(19): siRNA sense strand
agacaaagaugaccaagaa

SEQ ID NO: 1966053 - RNA, 19 nt, Homo sapiens
  misc_RNA (1)...(19): siRNA sense strand
gugcggagcuccagcauug

SEQ ID NO: 1966054 - RNA, 19 nt, Homo sapiens
  misc_RNA (1)...(19): siRNA sense strand
gaaagccaguucagcgauu

SEQ ID NO: 1966055 - RNA, 19 nt, Homo sapiens
  misc_RNA (1)...(19): siRNA sense strand
gcaaggugcugcaggugau

SEQ ID NO: 1966056 - RNA, 19 nt, Homo sapiens
  misc_RNA (1)...(19): siRNA sense strand
guucagcgauuuccuggau

SEQ ID NO: 1966057 - RNA, 19 nt, Homo sapiens
  misc_RNA (1)...(19): siRNA sense strand
ccaagaagaagacaaagau

SEQ ID NO: 1966058 - RNA, 19 nt, Homo sapiens
  misc_RNA (1)...(19): siRNA sense strand
ggaccaccaccgccaagaa

SEQ ID NO: 1966059 - RNA, 19 nt, Homo sapiens
  misc_RNA (1)...(19): siRNA sense strand
acaaagaugaccaagaaga

SEQ ID NO: 1966060 - RNA, 19 nt, Homo sapiens
  misc_RNA (1)...(19): siRNA sense strand
aagaagaagacaaagauga

SEQ ID NO: 1966061 - RNA, 19 nt, Homo sapiens
  misc_RNA (1)...(19): siRNA sense strand
ugaccaagaagaccuguga

SEQ ID NO: 1966062 - RNA, 19 nt, Homo sapiens
  misc_RNA (1)...(19): siRNA sense strand
caagagcacacuccagcuu

SEQ ID NO: 1966063 - RNA, 19 nt, Homo sapiens
  misc_RNA (1)...(19): siRNA sense strand
cagccugggugccaagaug

SEQ ID NO: 1966064 - RNA, 19 nt, Homo sapiens
  misc_RNA (1)...(19): siRNA sense strand
gcauggaccacaagugcuu

SEQ ID NO: 1966065 - RNA, 19 nt, Homo sapiens
  misc_RNA (1)...(19): siRNA sense strand
gggaccagcucagauugug

SEQ ID NO: 1966066 - RNA, 19 nt, Homo sapiens
  misc_RNA (1)...(19): siRNA sense strand
aaagccaguucagcgauuu

SEQ ID NO: 1966067 - RNA, 19 nt, Homo sapiens
  misc_RNA (1)...(19): siRNA sense strand
cgacggcacguucaucuuc

SEQ ID NO: 1966068 - RNA, 19 nt, Homo sapiens
  misc_RNA (1)...(19): siRNA sense strand
gccaagaagaagacaaaga

SEQ ID NO: 1966069 - RNA, 19 nt, Homo sapiens
  misc_RNA (1)...(19): siRNA sense strand
caagaagaagacaaagaug

SEQ ID NO: 1966070 - RNA, 19 nt, Homo sapiens
  misc_RNA (1)...(19): siRNA sense strand
ggaccacaagugcuucaug

SEQ ID NO: 1966071 - RNA, 19 nt, Homo sapiens
  misc_RNA (1)...(19): siRNA sense strand
ggagguggaagugauugaa

SEQ ID NO: 1966072 - RNA, 19 nt, Homo sapiens
  misc_RNA (1)...(19): siRNA sense strand
cagcauuggcggugaaauc

SEQ ID NO: 1966073 - RNA, 19 nt, Homo sapiens
  misc_RNA (1)...(19): siRNA sense strand
ggucaccggcugguacaaa

SEQ ID NO: 1966074 - RNA, 19 nt, Homo sapiens
  misc_RNA (1)...(19): siRNA sense strand
caaagaugaccaagaagac

SEQ ID NO: 1966075 - RNA, 19 nt, Homo sapiens
  misc_RNA (1)...(19): siRNA sense strand
uggccaagaagaagacaaa

SEQ ID NO: 1966076 - RNA, 19 nt, Homo sapiens
  misc_RNA (1)...(19): siRNA sense strand
gaccaccaccgccaagaag

SEQ ID NO: 1966077 - RNA, 19 nt, Homo sapiens
  misc_RNA (1)...(19): siRNA sense strand
gcuggagguggaagugauu

SEQ ID NO: 1966078 - RNA, 19 nt, Homo sapiens
  misc_RNA (1)...(19): siRNA sense strand
gaacugagaucugcaacua

SEQ ID NO: 1966079 - RNA, 19 nt, Homo sapiens
  misc_RNA (1)...(19): siRNA sense strand
gaagaugugugcauuguag

SEQ ID NO: 1966080 - RNA, 19 nt, Homo sapiens
  misc_RNA (1)...(19): siRNA sense strand
caaggaagcuaaagguuug

SEQ ID NO: 1966081 - RNA, 19 nt, Homo sapiens
  misc_RNA (1)...(19): siRNA sense strand
ugacagaaauguucaacca

SEQ ID NO: 1966082 - RNA, 19 nt, Homo sapiens
  misc_RNA (1)...(19): siRNA sense strand
ccaaggaagcuaaagguuu

SEQ ID NO: 1966083 - RNA, 19 nt, Homo sapiens
  misc_RNA (1)...(19): siRNA sense strand
ggcagaggcugauaguaug

SEQ ID NO: 1966084 - RNA, 19 nt, Homo sapiens
  misc_RNA (1)...(19): siRNA sense strand
ggucuucgauaccauuaau

SEQ ID NO: 1966085 - RNA, 19 nt, Homo sapiens
  misc_RNA (1)...(19): siRNA sense strand
caacgacaacugcuacuug

SEQ ID NO: 1966086 - RNA, 19 nt, Homo sapiens
  misc_RNA (1)...(19): siRNA sense strand
ugacgcaaguggaacuaaa

SEQ ID NO: 1966087 - RNA, 19 nt, Homo sapiens
  misc_RNA (1)...(19): siRNA sense strand
uagcggcacuggccuuuga

SEQ ID NO: 1966088 - RNA, 19 nt, Homo sapiens
  misc_RNA (1)...(19): siRNA sense strand
ugaaggugcugcauacgau

SEQ ID NO: 1966089 - RNA, 19 nt, Homo sapiens
  misc_RNA (1)...(19): siRNA sense strand
ggaagaugugugcauugua

SEQ ID NO: 1966090 - RNA, 19 nt, Homo sapiens
  misc_RNA (1)...(19): siRNA sense strand
gacaugaaggugcugcaua

SEQ ID NO: 1966091 - RNA, 19 nt, Homo sapiens
  misc_RNA (1)...(19): siRNA sense strand
ggaccgugauuaggguauu

SEQ ID NO: 1966092 - RNA, 19 nt, Homo sapiens
  misc_RNA (1)...(19): siRNA sense strand
ccaagugacagaaauguuc

SEQ ID NO: 1966093 - RNA, 19 nt, Homo sapiens
  misc_RNA (1)...(19): siRNA sense strand
gaccgugauuaggguauuu

SEQ ID NO: 1966094 - RNA, 19 nt, Homo sapiens
  misc_RNA (1)...(19): siRNA sense strand
cuaccugccuucccaagug

SEQ ID NO: 1966095 - RNA, 19 nt, Homo sapiens
  misc_RNA (1)...(19): siRNA sense strand
gcaacuacagcuacuccaa

SEQ ID NO: 1966096 - RNA, 19 nt, Homo sapiens
  misc_RNA (1)...(19): siRNA sense strand
cggaagaugugugcauugu

SEQ ID NO: 1966097 - RNA, 19 nt, Homo sapiens
  misc_RNA (1)...(19): siRNA sense strand
ccacaacauucgggacaug

SEQ ID NO: 1966098 - RNA, 19 nt, Homo sapiens
  misc_RNA (1)...(19): siRNA sense strand
acacgauucuggcugugaa

SEQ ID NO: 1966099 - RNA, 19 nt, Homo sapiens
  misc_RNA (1)...(19): siRNA sense strand
caaacucgagacugugaaa

SEQ ID NO: 1966100 - RNA, 19 nt, Homo sapiens
  misc_RNA (1)...(19): siRNA sense strand
ugugugcgcugucaaucaa

SEQ ID NO: 1966101 - RNA, 19 nt, Homo sapiens
  misc_RNA (1)...(19): siRNA sense strand
aggcagaggcugauaguau

SEQ ID NO: 1966102 - RNA, 19 nt, Homo sapiens
  misc_RNA (1)...(19): siRNA sense strand
caacaggcagaggcugaua

SEQ ID NO: 1966103 - RNA, 19 nt, Homo sapiens
  misc_RNA (1)...(19): siRNA sense strand
gcaggucuucgauaccauu

SEQ ID NO: 1966104 - RNA, 19 nt, Homo sapiens
  misc_RNA (1)...(19): siRNA sense strand
acugagaucugcaacuaca

SEQ ID NO: 1966105 - RNA, 19 nt, Homo sapiens
  misc_RNA (1)...(19): siRNA sense strand
gaggugcaggucuucgaua

SEQ ID NO: 1966106 - RNA, 19 nt, Homo sapiens
  misc_RNA (1)...(19): siRNA sense strand
acaugaaggugcugcauac

SEQ ID NO: 1966107 - RNA, 19 nt, Homo sapiens
  misc_RNA (1)...(19): siRNA sense strand
acucgagacugugaaagaa

SEQ ID NO: 1966108 - RNA, 19 nt, Homo sapiens
  misc_RNA (1)...(19): siRNA sense strand
uagccacaauucagaagau

SEQ ID NO: 1966109 - RNA, 19 nt, Homo sapiens
  misc_RNA (1)...(19): siRNA sense strand
ccaugauucuucggacuga

SEQ ID NO: 1966110 - RNA, 19 nt, Homo sapiens
  misc_RNA (1)...(19): siRNA sense strand
ucggagaggugcaggucuu

SEQ ID NO: 1966111 - RNA, 19 nt, Homo sapiens
  misc_RNA (1)...(19): siRNA sense strand
gagagcugcaaacaugauu

SEQ ID NO: 1966112 - RNA, 19 nt, Homo sapiens
  misc_RNA (1)...(19): siRNA sense strand
uacggaagaugugugcauu

SEQ ID NO: 1966113 - RNA, 19 nt, Homo sapiens
  misc_RNA (1)...(19): siRNA sense strand
gaccgugcacaucuucaaa

SEQ ID NO: 1966114 - RNA, 19 nt, Homo sapiens
  misc_RNA (1)...(19): siRNA sense strand
gcaccaaggaagcuaaagg

SEQ ID NO: 1966115 - RNA, 19 nt, Homo sapiens
  misc_RNA (1)...(19): siRNA sense strand
gugcaggucuucgauacca

SEQ ID NO: 1966116 - RNA, 19 nt, Homo sapiens
  misc_RNA (1)...(19): siRNA sense strand
cagcuacuccaacacgauu

SEQ ID NO: 1966117 - RNA, 19 nt, Homo sapiens
  misc_RNA (1)...(19): siRNA sense strand
gcgagugugcccugaugaa

SEQ ID NO: 1966118 - RNA, 19 nt, Homo sapiens
  misc_RNA (1)...(19): siRNA sense strand
ucaacaacgacaacugcua

SEQ ID NO: 1966119 - RNA, 19 nt, Homo sapiens
  misc_RNA (1)...(19): siRNA sense strand
ggaggagucccuguacauc

SEQ ID NO: 1966120 - RNA, 19 nt, Homo sapiens
  misc_RNA (1)...(19): siRNA sense strand
cgauaccauuaauuugaga

SEQ ID NO: 1966121 - RNA, 19 nt, Homo sapiens
  misc_RNA (1)...(19): siRNA sense strand
caagugacagaaauguuca

SEQ ID NO: 1966122 - RNA, 19 nt, Homo sapiens
  misc_RNA (1)...(19): siRNA sense strand
gaccggguacuucgggaaa

SEQ ID NO: 1966123 - RNA, 19 nt, Homo sapiens
  misc_RNA (1)...(19): siRNA sense strand
gagaaggggaccgugauua

SEQ ID NO: 1966124 - RNA, 19 nt, Homo sapiens
  misc_RNA (1)...(19): siRNA sense strand
gcucacgacaguccuuuag

SEQ ID NO: 1966125 - RNA, 19 nt, Homo sapiens
  misc_RNA (1)...(19): siRNA sense strand
cggcgcagcugcaggaaaa

SEQ ID NO: 1966126 - RNA, 19 nt, Homo sapiens
  misc_RNA (1)...(19): siRNA sense strand
uaccugccuucccaaguga

SEQ ID NO: 1966127 - RNA, 19 nt, Homo sapiens
  misc_RNA (1)...(19): siRNA sense strand
gccauucugcggccacaaa

SEQ ID NO: 1966128 - RNA, 19 nt, Homo sapiens
  misc_RNA (1)...(19): siRNA sense strand
gaguuucggagaggaguaa

SEQ ID NO: 1966129 - RNA, 19 nt, Homo sapiens
  misc_RNA (1)...(19): siRNA sense strand
uaagaagggaacugagauc

SEQ ID NO: 1966130 - RNA, 19 nt, Homo sapiens
  misc_RNA (1)...(19): siRNA sense strand
ucuucaaacucgagacugu

SEQ ID NO: 1966131 - RNA, 19 nt, Homo sapiens
  misc_RNA (1)...(19): siRNA sense strand
caacauucgggacaugaag

SEQ ID NO: 1966132 - RNA, 19 nt, Homo sapiens
  misc_RNA (1)...(19): siRNA sense strand
acacugagaccgugcacau

SEQ ID NO: 1966133 - RNA, 19 nt, Homo sapiens
  misc_RNA (1)...(19): siRNA sense strand
ucgauaccauuaauuugag

SEQ ID NO: 1966134 - RNA, 19 nt, Homo sapiens
  misc_RNA (1)...(19): siRNA sense strand
uaaagcaccaaggaagcua

SEQ ID NO: 1966135 - RNA, 19 nt, Homo sapiens
  misc_RNA (1)...(19): siRNA sense strand
gaugugugcauuguagaga

SEQ ID NO: 1966136 - RNA, 19 nt, Homo sapiens
  misc_RNA (1)...(19): siRNA sense strand
gagaggugcaggucuucga

SEQ ID NO: 1966137 - RNA, 19 nt, Homo sapiens
  misc_RNA (1)...(19): siRNA sense strand
aaacgaccaaugagaucuu

SEQ ID NO: 1966138 - RNA, 19 nt, Homo sapiens
  misc_RNA (1)...(19): siRNA sense strand
guggccaucgugagccuua

SEQ ID NO: 1966139 - RNA, 19 nt, Homo sapiens
  misc_RNA (1)...(19): siRNA sense strand
gaacugagaucugcaacua

SEQ ID NO: 1966140 - RNA, 19 nt, Homo sapiens
  misc_RNA (1)...(19): siRNA sense strand
caaggaagcuaaagguuug

SEQ ID NO: 1966141 - RNA, 19 nt, Homo sapiens
  misc_RNA (1)...(19): siRNA sense strand
gaagaugugugcauuguag

SEQ ID NO: 1966142 - RNA, 19 nt, Homo sapiens
  misc_RNA (1)...(19): siRNA sense strand
ugacagaaauguucaacca

SEQ ID NO: 1966143 - RNA, 19 nt, Homo sapiens
  misc_RNA (1)...(19): siRNA sense strand
ccaaggaagcuaaagguuu

SEQ ID NO: 1966144 - RNA, 19 nt, Homo sapiens
  misc_RNA (1)...(19): siRNA sense strand
ggcagaggcugauaguaug

SEQ ID NO: 1966145 - RNA, 19 nt, Homo sapiens
  misc_RNA (1)...(19): siRNA sense strand
ggucuucgauaccauuaau

SEQ ID NO: 1966146 - RNA, 19 nt, Homo sapiens
  misc_RNA (1)...(19): siRNA sense strand
caacgacaacugcuacuug

SEQ ID NO: 1966147 - RNA, 19 nt, Homo sapiens
  misc_RNA (1)...(19): siRNA sense strand
ugacgcaaguggaacuaaa

SEQ ID NO: 1966148 - RNA, 19 nt, Homo sapiens
  misc_RNA (1)...(19): siRNA sense strand
uagcggcacuggccuuuga

SEQ ID NO: 1966149 - RNA, 19 nt, Homo sapiens
  misc_RNA (1)...(19): siRNA sense strand
ugaaggugcugcauacgau

SEQ ID NO: 1966150 - RNA, 19 nt, Homo sapiens
  misc_RNA (1)...(19): siRNA sense strand
gacaugaaggugcugcaua

SEQ ID NO: 1966151 - RNA, 19 nt, Homo sapiens
  misc_RNA (1)...(19): siRNA sense strand
ggaccgugauuaggguauu

SEQ ID NO: 1966152 - RNA, 19 nt, Homo sapiens
  misc_RNA (1)...(19): siRNA sense strand
ccaagugacagaaauguuc

SEQ ID NO: 1966153 - RNA, 19 nt, Homo sapiens
  misc_RNA (1)...(19): siRNA sense strand
gaccgugauuaggguauuu

SEQ ID NO: 1966154 - RNA, 19 nt, Homo sapiens
  misc_RNA (1)...(19): siRNA sense strand
cuaccugccuucccaagug

SEQ ID NO: 1966155 - RNA, 19 nt, Homo sapiens
  misc_RNA (1)...(19): siRNA sense strand
gcaacuacagcuacuccaa

SEQ ID NO: 1966156 - RNA, 19 nt, Homo sapiens
  misc_RNA (1)...(19): siRNA sense strand
ccacaacauucgggacaug

SEQ ID NO: 1966157 - RNA, 19 nt, Homo sapiens
  misc_RNA (1)...(19): siRNA sense strand
acacgauucuggcugugaa

SEQ ID NO: 1966158 - RNA, 19 nt, Homo sapiens
  misc_RNA (1)...(19): siRNA sense strand
caaacucgagacugugaaa

SEQ ID NO: 1966159 - RNA, 19 nt, Homo sapiens
  misc_RNA (1)...(19): siRNA sense strand
ugugugcgcugucaaucaa

SEQ ID NO: 1966160 - RNA, 19 nt, Homo sapiens
  misc_RNA (1)...(19): siRNA sense strand
aggcagaggcugauaguau

SEQ ID NO: 1966161 - RNA, 19 nt, Homo sapiens
  misc_RNA (1)...(19): siRNA sense strand
caacaggcagaggcugaua

SEQ ID NO: 1966162 - RNA, 19 nt, Homo sapiens
  misc_RNA (1)...(19): siRNA sense strand
gcaggucuucgauaccauu

SEQ ID NO: 1966163 - RNA, 19 nt, Homo sapiens
  misc_RNA (1)...(19): siRNA sense strand
acugagaucugcaacuaca

SEQ ID NO: 1966164 - RNA, 19 nt, Homo sapiens
  misc_RNA (1)...(19): siRNA sense strand
gaggugcaggucuucgaua

SEQ ID NO: 1966165 - RNA, 19 nt, Homo sapiens
  misc_RNA (1)...(19): siRNA sense strand
acaugaaggugcugcauac

SEQ ID NO: 1966166 - RNA, 19 nt, Homo sapiens
  misc_RNA (1)...(19): siRNA sense strand
acucgagacugugaaagaa

SEQ ID NO: 1966167 - RNA, 19 nt, Homo sapiens
  misc_RNA (1)...(19): siRNA sense strand
uagccacaauucagaagau

SEQ ID NO: 1966168 - RNA, 19 nt, Homo sapiens
  misc_RNA (1)...(19): siRNA sense strand
ccaugauucuucggacuga

SEQ ID NO: 1966169 - RNA, 19 nt, Homo sapiens
  misc_RNA (1)...(19): siRNA sense strand
ucggagaggugcaggucuu

SEQ ID NO: 1966170 - RNA, 19 nt, Homo sapiens
  misc_RNA (1)...(19): siRNA sense strand
gagagcugcaaacaugauu

SEQ ID NO: 1966171 - RNA, 19 nt, Homo sapiens
  misc_RNA (1)...(19): siRNA sense strand
gcaccaaggaagcuaaagg

SEQ ID NO: 1966172 - RNA, 19 nt, Homo sapiens
  misc_RNA (1)...(19): siRNA sense strand
gaccgugcacaucuucaaa

SEQ ID NO: 1966173 - RNA, 19 nt, Homo sapiens
  misc_RNA (1)...(19): siRNA sense strand
gugcaggucuucgauacca

SEQ ID NO: 1966174 - RNA, 19 nt, Homo sapiens
  misc_RNA (1)...(19): siRNA sense strand
cagcuacuccaacacgauu

SEQ ID NO: 1966175 - RNA, 19 nt, Homo sapiens
  misc_RNA (1)...(19): siRNA sense strand
gcgagugugcccugaugaa

SEQ ID NO: 1966176 - RNA, 19 nt, Homo sapiens
  misc_RNA (1)...(19): siRNA sense strand
ucaacaacgacaacugcua

SEQ ID NO: 1966177 - RNA, 19 nt, Homo sapiens
  misc_RNA (1)...(19): siRNA sense strand
ggaggagucccuguacauc

SEQ ID NO: 1966178 - RNA, 19 nt, Homo sapiens
  misc_RNA (1)...(19): siRNA sense strand
cgauaccauuaauuugaga

SEQ ID NO: 1966179 - RNA, 19 nt, Homo sapiens
  misc_RNA (1)...(19): siRNA sense strand
caagugacagaaauguuca

SEQ ID NO: 1966180 - RNA, 19 nt, Homo sapiens
  misc_RNA (1)...(19): siRNA sense strand
gaccggguacuucgggaaa

SEQ ID NO: 1966181 - RNA, 19 nt, Homo sapiens
  misc_RNA (1)...(19): siRNA sense strand
gagaaggggaccgugauua

SEQ ID NO: 1966182 - RNA, 19 nt, Homo sapiens
  misc_RNA (1)...(19): siRNA sense strand
gcucacgacaguccuuuag

SEQ ID NO: 1966183 - RNA, 19 nt, Homo sapiens
  misc_RNA (1)...(19): siRNA sense strand
cggcgcagcugcaggaaaa

SEQ ID NO: 1966184 - RNA, 19 nt, Homo sapiens
  misc_RNA (1)...(19): siRNA sense strand
uaccugccuucccaaguga

SEQ ID NO: 1966185 - RNA, 19 nt, Homo sapiens
  misc_RNA (1)...(19): siRNA sense strand
gccauucugcggccacaaa

SEQ ID NO: 1966186 - RNA, 19 nt, Homo sapiens
  misc_RNA (1)...(19): siRNA sense strand
gaguuucggagaggaguaa

SEQ ID NO: 1966187 - RNA, 19 nt, Homo sapiens
  misc_RNA (1)...(19): siRNA sense strand
uaagaagggaacugagauc

SEQ ID NO: 1966188 - RNA, 19 nt, Homo sapiens
  misc_RNA (1)...(19): siRNA sense strand
ucuucaaacucgagacugu

SEQ ID NO: 1966189 - RNA, 19 nt, Homo sapiens
  misc_RNA (1)...(19): siRNA sense strand
uaaagcaccaaggaagcua

SEQ ID NO: 1966190 - RNA, 19 nt, Homo sapiens
  misc_RNA (1)...(19): siRNA sense strand
gaugugugcauuguagaga

SEQ ID NO: 1966191 - RNA, 19 nt, Homo sapiens
  misc_RNA (1)...(19): siRNA sense strand
acacugagaccgugcacau

SEQ ID NO: 1966192 - RNA, 19 nt, Homo sapiens
  misc_RNA (1)...(19): siRNA sense strand
ucgauaccauuaauuugag

SEQ ID NO: 1966193 - RNA, 19 nt, Homo sapiens
  misc_RNA (1)...(19): siRNA sense strand
caacauucgggacaugaag

SEQ ID NO: 1966194 - RNA, 19 nt, Homo sapiens
  misc_RNA (1)...(19): siRNA sense strand
gagaggugcaggucuucga

SEQ ID NO: 1966195 - RNA, 19 nt, Homo sapiens
  misc_RNA (1)...(19): siRNA sense strand
aaacgaccaaugagaucuu

SEQ ID NO: 1966196 - RNA, 19 nt, Homo sapiens
  misc_RNA (1)...(19): siRNA sense strand
gaaggugacucgaaugugu

SEQ ID NO: 1966197 - RNA, 19 nt, Homo sapiens
  misc_RNA (1)...(19): siRNA sense strand
caagagagcuaagcagaug

SEQ ID NO: 1966198 - RNA, 19 nt, Homo sapiens
  misc_RNA (1)...(19): siRNA sense strand
cacaggcacuggaccaaua

SEQ ID NO: 1966199 - RNA, 19 nt, Homo sapiens
  misc_RNA (1)...(19): siRNA sense strand
gccaaagcccagccaauua

SEQ ID NO: 1966200 - RNA, 19 nt, Homo sapiens
  misc_RNA (1)...(19): siRNA sense strand
ccaaagcccagccaauuaa

SEQ ID NO: 1966201 - RNA, 19 nt, Homo sapiens
  misc_RNA (1)...(19): siRNA sense strand
gaaaagcccuccagaagca

SEQ ID NO: 1966202 - RNA, 19 nt, Homo sapiens
  misc_RNA (1)...(19): siRNA sense strand
cuaagcagauggcagagaa

SEQ ID NO: 1966203 - RNA, 19 nt, Homo sapiens
  misc_RNA (1)...(19): siRNA sense strand
gagaccagaucaacagcaa

SEQ ID NO: 1966204 - RNA, 19 nt, Homo sapiens
  misc_RNA (1)...(19): siRNA sense strand
caucaacccugugcucuau

SEQ ID NO: 1966205 - RNA, 19 nt, Homo sapiens
  misc_RNA (1)...(19): siRNA sense strand
gcucauagccaaccucaca

SEQ ID NO: 1966206 - RNA, 19 nt, Homo sapiens
  misc_RNA (1)...(19): siRNA sense strand
gcaaugugcucacccuacu

SEQ ID NO: 1966207 - RNA, 19 nt, Homo sapiens
  misc_RNA (1)...(19): siRNA sense strand
gugcugggcuaucguuaug

SEQ ID NO: 1966208 - RNA, 19 nt, Homo sapiens
  misc_RNA (1)...(19): siRNA sense strand
ggacagcagguuagcauca

SEQ ID NO: 1966209 - RNA, 19 nt, Homo sapiens
  misc_RNA (1)...(19): siRNA sense strand
ggccaugccuggucguuuc

SEQ ID NO: 1966210 - RNA, 19 nt, Homo sapiens
  misc_RNA (1)...(19): siRNA sense strand
gcugggcuaucguuauguu

SEQ ID NO: 1966211 - RNA, 19 nt, Homo sapiens
  misc_RNA (1)...(19): siRNA sense strand
gcacuggaccaauacaagu

SEQ ID NO: 1966212 - RNA, 19 nt, Homo sapiens
  misc_RNA (1)...(19): siRNA sense strand
gaccagaucaacagcaaga

SEQ ID NO: 1966213 - RNA, 19 nt, Homo sapiens
  misc_RNA (1)...(19): siRNA sense strand
uggcugaucuccucuacug

SEQ ID NO: 1966214 - RNA, 19 nt, Homo sapiens
  misc_RNA (1)...(19): siRNA sense strand
gcaagagagcuaagcagau

SEQ ID NO: 1966215 - RNA, 19 nt, Homo sapiens
  misc_RNA (1)...(19): siRNA sense strand
caucuucuauugccucauc

SEQ ID NO: 1966216 - RNA, 19 nt, Homo sapiens
  misc_RNA (1)...(19): siRNA sense strand
ggacgcuaccuccucauug

SEQ ID NO: 1966217 - RNA, 19 nt, Homo sapiens
  misc_RNA (1)...(19): siRNA sense strand
guguuggcaucuucuauug

SEQ ID NO: 1966218 - RNA, 19 nt, Homo sapiens
  misc_RNA (1)...(19): siRNA sense strand
ccaauuccgccaagcauau

SEQ ID NO: 1966219 - RNA, 19 nt, Homo sapiens
  misc_RNA (1)...(19): siRNA sense strand
guauuugggcuccuccuuu

SEQ ID NO: 1966220 - RNA, 19 nt, Homo sapiens
  misc_RNA (1)...(19): siRNA sense strand
caacuucuccugcuaccau

SEQ ID NO: 1966221 - RNA, 19 nt, Homo sapiens
  misc_RNA (1)...(19): siRNA sense strand
gcaucaacccugugcucua

SEQ ID NO: 1966222 - RNA, 19 nt, Homo sapiens
  misc_RNA (1)...(19): siRNA sense strand
gaagugggagaccagauca

SEQ ID NO: 1966223 - RNA, 19 nt, Homo sapiens
  misc_RNA (1)...(19): siRNA sense strand
gaaggggacucaucagaag

SEQ ID NO: 1966224 - RNA, 19 nt, Homo sapiens
  misc_RNA (1)...(19): siRNA sense strand
cagcaguguuggcaucuuc

SEQ ID NO: 1966225 - RNA, 19 nt, Homo sapiens
  misc_RNA (1)...(19): siRNA sense strand
ccucaugggcaucuacuuu

SEQ ID NO: 1966226 - RNA, 19 nt, Homo sapiens
  misc_RNA (1)...(19): siRNA sense strand
gagaaaagcccuccagaag

SEQ ID NO: 1966227 - RNA, 19 nt, Homo sapiens
  misc_RNA (1)...(19): siRNA sense strand
caaagcccagccaauuaaa

SEQ ID NO: 1966228 - RNA, 19 nt, Homo sapiens
  misc_RNA (1)...(19): siRNA sense strand
gggcaucuacuuugugcuu

SEQ ID NO: 1966229 - RNA, 19 nt, Homo sapiens
  misc_RNA (1)...(19): siRNA sense strand
ccucuggccuauuuauauc

SEQ ID NO: 1966230 - RNA, 19 nt, Homo sapiens
  misc_RNA (1)...(19): siRNA sense strand
gggaaggugacucgaaugu

SEQ ID NO: 1966231 - RNA, 19 nt, Homo sapiens
  misc_RNA (1)...(19): siRNA sense strand
gacgcuaccuccucauugc

SEQ ID NO: 1966232 - RNA, 19 nt, Homo sapiens
  misc_RNA (1)...(19): siRNA sense strand
gccaauuccgccaagcaua

SEQ ID NO: 1966233 - RNA, 19 nt, Homo sapiens
  misc_RNA (1)...(19): siRNA sense strand
aaccucaccuggcucaaug

SEQ ID NO: 1966234 - RNA, 19 nt, Homo sapiens
  misc_RNA (1)...(19): siRNA sense strand
ccagaagagcuccggauuc

SEQ ID NO: 1966235 - RNA, 19 nt, Homo sapiens
  misc_RNA (1)...(19): siRNA sense strand
gauucaaccugcucauagc

SEQ ID NO: 1966236 - RNA, 19 nt, Homo sapiens
  misc_RNA (1)...(19): siRNA sense strand
gcacaggcacuggaccaau

SEQ ID NO: 1966237 - RNA, 19 nt, Homo sapiens
  misc_RNA (1)...(19): siRNA sense strand
caagcuccguacccgauuc

SEQ ID NO: 1966238 - RNA, 19 nt, Homo sapiens
  misc_RNA (1)...(19): siRNA sense strand
ucaugggcaucuacuuugu

SEQ ID NO: 1966239 - RNA, 19 nt, Homo sapiens
  misc_RNA (1)...(19): siRNA sense strand
gugaggggauuucaucuga

SEQ ID NO: 1966240 - RNA, 19 nt, Homo sapiens
  misc_RNA (1)...(19): siRNA sense strand
gccagaagagcuccggauu

SEQ ID NO: 1966241 - RNA, 19 nt, Homo sapiens
  misc_RNA (1)...(19): siRNA sense strand
ccaauuaaaggagccagaa

SEQ ID NO: 1966242 - RNA, 19 nt, Homo sapiens
  misc_RNA (1)...(19): siRNA sense strand
ugccaaagcccagccaauu

SEQ ID NO: 1966243 - RNA, 19 nt, Homo sapiens
  misc_RNA (1)...(19): siRNA sense strand
ggaaggggacucaucagaa

SEQ ID NO: 1966244 - RNA, 19 nt, Homo sapiens
  misc_RNA (1)...(19): siRNA sense strand
gccuauuuauauccuggua

SEQ ID NO: 1966245 - RNA, 19 nt, Homo sapiens
  misc_RNA (1)...(19): siRNA sense strand
ccagaucaacagcaagaga

SEQ ID NO: 1966246 - RNA, 19 nt, Homo sapiens
  misc_RNA (1)...(19): siRNA sense strand
gcuccccucuggccuauuu

SEQ ID NO: 1966247 - RNA, 19 nt, Homo sapiens
  misc_RNA (1)...(19): siRNA sense strand
cgauucaaccugcucauag

SEQ ID NO: 1966248 - RNA, 19 nt, Homo sapiens
  misc_RNA (1)...(19): siRNA sense strand
gcaguguuggcaucuucua

SEQ ID NO: 1966249 - RNA, 19 nt, Homo sapiens
  misc_RNA (1)...(19): siRNA sense strand
gggcuaucguuauguugca

SEQ ID NO: 1966250 - RNA, 19 nt, Homo sapiens
  misc_RNA (1)...(19): siRNA sense strand
ggaaggugacucgaaugug

SEQ ID NO: 1966251 - RNA, 19 nt, Homo sapiens
  misc_RNA (1)...(19): siRNA sense strand
caaccucaccuggcucaau

SEQ ID NO: 1966252 - RNA, 19 nt, Homo sapiens
  misc_RNA (1)...(19): siRNA sense strand
gggacgcuaccuccucauu

SEQ ID NO: 1966253 - RNA, 19 nt, Homo sapiens
  misc_RNA (1)...(19): siRNA sense strand
aggcaagcauccacuccaa

SEQ ID NO: 1966254 - RNA, 19 nt, Homo sapiens
  misc_RNA (1)...(19): siRNA sense strand
ccaauucugucuccauccu

SEQ ID NO: 1966255 - RNA, 19 nt, Homo sapiens
  misc_RNA (1)...(19): siRNA sense strand
caucggaauuugggaaggu

SEQ ID NO: 1966256 - RNA, 19 nt, Homo sapiens
  misc_RNA (1)...(19): siRNA sense strand
ccgauucaaccugcucaua

SEQ ID NO: 1966257 - RNA, 19 nt, Homo sapiens
  misc_RNA (1)...(19): siRNA sense strand
gcuguguuccucugcuuug

SEQ ID NO: 1966258 - RNA, 19 nt, Homo sapiens
  misc_RNA (1)...(19): siRNA sense strand
gagcuccggauucuucauc

SEQ ID NO: 1966259 - RNA, 19 nt, Homo sapiens
  misc_RNA (1)...(19): siRNA sense strand
aauuaaaggagccagaaga

SEQ ID NO: 1966260 - RNA, 19 nt, Homo sapiens
  misc_RNA (1)...(19): siRNA sense strand
gaauguguuuugcuguguu

SEQ ID NO: 1966261 - RNA, 19 nt, Homo sapiens
  misc_RNA (1)...(19): siRNA sense strand
uugggaaggugacucgaau

SEQ ID NO: 1966262 - RNA, 19 nt, Homo sapiens
  misc_RNA (1)...(19): siRNA sense strand
uauuugggcuccuccuuuu

SEQ ID NO: 1966263 - RNA, 19 nt, Homo sapiens
  misc_RNA (1)...(19): siRNA sense strand
gauaaagacuccagaaauu

SEQ ID NO: 1966264 - RNA, 19 nt, Homo sapiens
  misc_RNA (1)...(19): siRNA sense strand
ggacaaacccaaaguaaua

SEQ ID NO: 1966265 - RNA, 19 nt, Homo sapiens
  misc_RNA (1)...(19): siRNA sense strand
gaaagcaaccacaguaaua

SEQ ID NO: 1966266 - RNA, 19 nt, Homo sapiens
  misc_RNA (1)...(19): siRNA sense strand
gagagcacauugaguguua

SEQ ID NO: 1966267 - RNA, 19 nt, Homo sapiens
  misc_RNA (1)...(19): siRNA sense strand
gaaagaugcucuaagaaca

SEQ ID NO: 1966268 - RNA, 19 nt, Homo sapiens
  misc_RNA (1)...(19): siRNA sense strand
gaaagaugcugagaagauu

SEQ ID NO: 1966269 - RNA, 19 nt, Homo sapiens
  misc_RNA (1)...(19): siRNA sense strand
ggaacuaacuuugaugaaa

SEQ ID NO: 1966270 - RNA, 19 nt, Homo sapiens
  misc_RNA (1)...(19): siRNA sense strand
ugacaaaccuuaaugauag

SEQ ID NO: 1966271 - RNA, 19 nt, Homo sapiens
  misc_RNA (1)...(19): siRNA sense strand
gaacacagacugacuucua

SEQ ID NO: 1966272 - RNA, 19 nt, Homo sapiens
  misc_RNA (1)...(19): siRNA sense strand
gaagguagaugaagaagag

SEQ ID NO: 1966273 - RNA, 19 nt, Homo sapiens
  misc_RNA (1)...(19): siRNA sense strand
gaaagacaguggaugaaug

SEQ ID NO: 1966274 - RNA, 19 nt, Homo sapiens
  misc_RNA (1)...(19): siRNA sense strand
uaacauagccauuguagaa

SEQ ID NO: 1966275 - RNA, 19 nt, Homo sapiens
  misc_RNA (1)...(19): siRNA sense strand
gcacuaagguaaagucaau

SEQ ID NO: 1966276 - RNA, 19 nt, Homo sapiens
  misc_RNA (1)...(19): siRNA sense strand
uaacucaccucaagaagaa

SEQ ID NO: 1966277 - RNA, 19 nt, Homo sapiens
  misc_RNA (1)...(19): siRNA sense strand
gaacacaaaccaucacaaa

SEQ ID NO: 1966278 - RNA, 19 nt, Homo sapiens
  misc_RNA (1)...(19): siRNA sense strand
caacaaaucuguaauucca

SEQ ID NO: 1966279 - RNA, 19 nt, Homo sapiens
  misc_RNA (1)...(19): siRNA sense strand
gcucaaagcaugccuguuu

SEQ ID NO: 1966280 - RNA, 19 nt, Homo sapiens
  misc_RNA (1)...(19): siRNA sense strand
acagaaagaugcucuaaga

SEQ ID NO: 1966281 - RNA, 19 nt, Homo sapiens
  misc_RNA (1)...(19): siRNA sense strand
caagaaaggucagaauaug

SEQ ID NO: 1966282 - RNA, 19 nt, Homo sapiens
  misc_RNA (1)...(19): siRNA sense strand
caaaguuaccuacguguua

SEQ ID NO: 1966283 - RNA, 19 nt, Homo sapiens
  misc_RNA (1)...(19): siRNA sense strand
gcaaaugaauguguuuaug

SEQ ID NO: 1966284 - RNA, 19 nt, Homo sapiens
  misc_RNA (1)...(19): siRNA sense strand
gaagauggauucuaaaaug

SEQ ID NO: 1966285 - RNA, 19 nt, Homo sapiens
  misc_RNA (1)...(19): siRNA sense strand
caagaucuguauugaaaga

SEQ ID NO: 1966286 - RNA, 19 nt, Homo sapiens
  misc_RNA (1)...(19): siRNA sense strand
gaaccaacacacaagauaa

SEQ ID NO: 1966287 - RNA, 19 nt, Homo sapiens
  misc_RNA (1)...(19): siRNA sense strand
gaagagaacaacaagcaaa

SEQ ID NO: 1966288 - RNA, 19 nt, Homo sapiens
  misc_RNA (1)...(19): siRNA sense strand
caagagaaauuacauuguc

SEQ ID NO: 1966289 - RNA, 19 nt, Homo sapiens
  misc_RNA (1)...(19): siRNA sense strand
ugauaaaggugcagaguga

SEQ ID NO: 1966290 - RNA, 19 nt, Homo sapiens
  misc_RNA (1)...(19): siRNA sense strand
gaggaaacaagagaaauua

SEQ ID NO: 1966291 - RNA, 19 nt, Homo sapiens
  misc_RNA (1)...(19): siRNA sense strand
ggcauugucugcaaauaaa

SEQ ID NO: 1966292 - RNA, 19 nt, Homo sapiens
  misc_RNA (1)...(19): siRNA sense strand
caacagauugcaccuagua

SEQ ID NO: 1966293 - RNA, 19 nt, Homo sapiens
  misc_RNA (1)...(19): siRNA sense strand
acagagagaugucagagaa

SEQ ID NO: 1966294 - RNA, 19 nt, Homo sapiens
  misc_RNA (1)...(19): siRNA sense strand
cagaggaaauguaagacua

SEQ ID NO: 1966295 - RNA, 19 nt, Homo sapiens
  misc_RNA (1)...(19): siRNA sense strand
aaacaagcauucagaggaa

SEQ ID NO: 1966296 - RNA, 19 nt, Homo sapiens
  misc_RNA (1)...(19): siRNA sense strand
gcacauaaggcaucuugaa

SEQ ID NO: 1966297 - RNA, 19 nt, Homo sapiens
  misc_RNA (1)...(19): siRNA sense strand
uaagcaaguugaacacaaa

SEQ ID NO: 1966298 - RNA, 19 nt, Homo sapiens
  misc_RNA (1)...(19): siRNA sense strand
cacugaaacugaaacuuua

SEQ ID NO: 1966299 - RNA, 19 nt, Homo sapiens
  misc_RNA (1)...(19): siRNA sense strand
ugucagauauuuccauuga

SEQ ID NO: 1966300 - RNA, 19 nt, Homo sapiens
  misc_RNA (1)...(19): siRNA sense strand
guuaauacuccaacaguua

SEQ ID NO: 1966301 - RNA, 19 nt, Homo sapiens
  misc_RNA (1)...(19): siRNA sense strand
guaaagaaaccuaacauag

SEQ ID NO: 1966302 - RNA, 19 nt, Homo sapiens
  misc_RNA (1)...(19): siRNA sense strand
caacuaaagugacuaugca

SEQ ID NO: 1966303 - RNA, 19 nt, Homo sapiens
  misc_RNA (1)...(19): siRNA sense strand
aaacagaaaucuccuuugg

SEQ ID NO: 1966304 - RNA, 19 nt, Homo sapiens
  misc_RNA (1)...(19): siRNA sense strand
agacuuaacuucugcuaga

SEQ ID NO: 1966305 - RNA, 19 nt, Homo sapiens
  misc_RNA (1)...(19): siRNA sense strand
gcagagaacaucuuaaugg

SEQ ID NO: 1966306 - RNA, 19 nt, Homo sapiens
  misc_RNA (1)...(19): siRNA sense strand
gugcaaacuuggauaaaga

SEQ ID NO: 1966307 - RNA, 19 nt, Homo sapiens
  misc_RNA (1)...(19): siRNA sense strand
gacaguggaugaauggauu

SEQ ID NO: 1966308 - RNA, 19 nt, Homo sapiens
  misc_RNA (1)...(19): siRNA sense strand
ggauaaagacuccagaaau

SEQ ID NO: 1966309 - RNA, 19 nt, Homo sapiens
  misc_RNA (1)...(19): siRNA sense strand
gcuguaauccaucuuuaua

SEQ ID NO: 1966310 - RNA, 19 nt, Homo sapiens
  misc_RNA (1)...(19): siRNA sense strand
ucacugaaacugaaacuuu

SEQ ID NO: 1966311 - RNA, 19 nt, Homo sapiens
  misc_RNA (1)...(19): siRNA sense strand
gguaaagacuccagauucu

SEQ ID NO: 1966312 - RNA, 19 nt, Homo sapiens
  misc_RNA (1)...(19): siRNA sense strand
ccugugaacucaaauguga

SEQ ID NO: 1966313 - RNA, 19 nt, Homo sapiens
  misc_RNA (1)...(19): siRNA sense strand
guaagacuauuggaacaaa

SEQ ID NO: 1966314 - RNA, 19 nt, Homo sapiens
  misc_RNA (1)...(19): siRNA sense strand
uccaagagcuauuguaaug

SEQ ID NO: 1966315 - RNA, 19 nt, Homo sapiens
  misc_RNA (1)...(19): siRNA sense strand
gaucagcaauauuuguuca

SEQ ID NO: 1966316 - RNA, 19 nt, Homo sapiens
  misc_RNA (1)...(19): siRNA sense strand
gauguuaauuuaccaguag

SEQ ID NO: 1966317 - RNA, 19 nt, Homo sapiens
  misc_RNA (1)...(19): siRNA sense strand
ugauuaggaugucccauaa

SEQ ID NO: 1966318 - RNA, 19 nt, Homo sapiens
  misc_RNA (1)...(19): siRNA sense strand
gaaccaauucuggaguuua

SEQ ID NO: 1966319 - RNA, 19 nt, Homo sapiens
  misc_RNA (1)...(19): siRNA sense strand
gcaccuaguaucaguguuu

SEQ ID NO: 1966320 - RNA, 19 nt, Homo sapiens
  misc_RNA (1)...(19): siRNA sense strand
gugaaccacugacuucuga

SEQ ID NO: 1966321 - RNA, 19 nt, Homo sapiens
  misc_RNA (1)...(19): siRNA sense strand
gaagagcuagaaacaacua

SEQ ID NO: 1966322 - RNA, 19 nt, Homo sapiens
  misc_RNA (1)...(19): siRNA sense strand
guaccucacauguguauuu

SEQ ID NO: 1966323 - RNA, 19 nt, Homo sapiens
  misc_RNA (1)...(19): siRNA sense strand
ucaacaaugugauccuaaa

SEQ ID NO: 1966324 - RNA, 19 nt, Homo sapiens
  misc_RNA (1)...(19): siRNA sense strand
gaacuucauccaagagcua

SEQ ID NO: 1966325 - RNA, 19 nt, Homo sapiens
  misc_RNA (1)...(19): siRNA sense strand
gggacuaguuugaauggaa

SEQ ID NO: 1966326 - RNA, 19 nt, Homo sapiens
  misc_RNA (1)...(19): siRNA sense strand
cugcugauauucuggauaa

SEQ ID NO: 1966327 - RNA, 19 nt, Homo sapiens
  misc_RNA (1)...(19): siRNA sense strand
ucaaacaccaccucacuaa

SEQ ID NO: 1966328 - RNA, 19 nt, Homo sapiens
  misc_RNA (1)...(19): siRNA sense strand
gaagauacgaguuuugaua

SEQ ID NO: 1966329 - RNA, 19 nt, Homo sapiens
  misc_RNA (1)...(19): siRNA sense strand
gaaguaaagguacaucugu

SEQ ID NO: 1966330 - RNA, 19 nt, Homo sapiens
  misc_RNA (1)...(19): siRNA sense strand
ucauggagaucauuugguu

SEQ ID NO: 1966331 - RNA, 19 nt, Homo sapiens
  misc_RNA (1)...(19): siRNA sense strand
cacaaaccaucacaaaguu

SEQ ID NO: 1966332 - RNA, 19 nt, Homo sapiens
  misc_RNA (1)...(19): siRNA sense strand
caagagcuauuguaauguc

SEQ ID NO: 1966333 - RNA, 19 nt, Homo sapiens
  misc_RNA (1)...(19): siRNA sense strand
guuaaaggcacuaagguaa

SEQ ID NO: 1966334 - RNA, 19 nt, Homo sapiens
  misc_RNA (1)...(19): siRNA sense strand
ccacaguaauacaagauga

SEQ ID NO: 1966335 - RNA, 19 nt, Homo sapiens
  misc_RNA (1)...(19): siRNA sense strand
gggcaugccugcuucaagu

SEQ ID NO: 1966336 - RNA, 19 nt, Homo sapiens
  misc_RNA (1)...(19): siRNA sense strand
cugcagaaauucaggauga

SEQ ID NO: 1966337 - RNA, 19 nt, Homo sapiens
  misc_RNA (1)...(19): siRNA sense strand
gaagucugaugauguucuu

SEQ ID NO: 1966338 - RNA, 19 nt, Homo sapiens
  misc_RNA (1)...(19): siRNA sense strand
gugaagagcuagaaacaac

SEQ ID NO: 1966339 - RNA, 19 nt, Homo sapiens
  misc_RNA (1)...(19): siRNA sense strand
ggacagaaagaugcucuaa

SEQ ID NO: 1966340 - RNA, 19 nt, Homo sapiens
  misc_RNA (1)...(19): siRNA sense strand
gaaagaaauaugugcugaa

SEQ ID NO: 1966341 - RNA, 19 nt, Homo sapiens
  misc_RNA (1)...(19): siRNA sense strand
gaggaaauguaagacuauu

SEQ ID NO: 1966342 - RNA, 19 nt, Homo sapiens
  misc_RNA (1)...(19): siRNA sense strand
ggaagugucaugucacaga

SEQ ID NO: 1966343 - RNA, 19 nt, Homo sapiens
  misc_RNA (1)...(19): siRNA sense strand
ccagaacacccuaaucuug

SEQ ID NO: 1966344 - RNA, 19 nt, Homo sapiens
  misc_RNA (1)...(19): siRNA sense strand
gcaaaagucaauucuguua

SEQ ID NO: 1966345 - RNA, 19 nt, Homo sapiens
  misc_RNA (1)...(19): siRNA sense strand
aaagguacaucuguuagaa

SEQ ID NO: 1966346 - RNA, 19 nt, Homo sapiens
  misc_RNA (1)...(19): siRNA sense strand
acaacaagaucuguauuga

SEQ ID NO: 1966347 - RNA, 19 nt, Homo sapiens
  misc_RNA (1)...(19): siRNA sense strand
ggacaaagaccccagcuaa

SEQ ID NO: 1966348 - RNA, 19 nt, Homo sapiens
  misc_RNA (1)...(19): siRNA sense strand
gaaaagaaacacuggaaaa

SEQ ID NO: 1966349 - RNA, 19 nt, Homo sapiens
  misc_RNA (1)...(19): siRNA sense strand
ccaagaaaggucagaauau

SEQ ID NO: 1966350 - RNA, 19 nt, Homo sapiens
  misc_RNA (1)...(19): siRNA sense strand
uagcuguaauccaucuuua

SEQ ID NO: 1966351 - RNA, 19 nt, Homo sapiens
  misc_RNA (1)...(19): siRNA sense strand
gacauucucucuauaugca

SEQ ID NO: 1966352 - RNA, 19 nt, Homo sapiens
  misc_RNA (1)...(19): siRNA sense strand
gcaagcagucuaucauuca

SEQ ID NO: 1966353 - RNA, 19 nt, Homo sapiens
  misc_RNA (1)...(19): siRNA sense strand
aaauaaacgucuuccuguu

SEQ ID NO: 1966354 - RNA, 19 nt, Homo sapiens
  misc_RNA (1)...(19): siRNA sense strand
ggccaucgaagcacucuua

SEQ ID NO: 1966355 - RNA, 19 nt, Homo sapiens
  misc_RNA (1)...(19): siRNA sense strand
caacaagaucuguauugaa

SEQ ID NO: 1966356 - RNA, 19 nt, Homo sapiens
  misc_RNA (1)...(19): siRNA sense strand
aaccaauucuggaguuuaa

SEQ ID NO: 1966357 - RNA, 19 nt, Homo sapiens
  misc_RNA (1)...(19): siRNA sense strand
ucacuaauacacagucuuu

SEQ ID NO: 1966358 - RNA, 19 nt, Homo sapiens
  misc_RNA (1)...(19): siRNA sense strand
uuauuuagcuguggucaaa

SEQ ID NO: 1966359 - RNA, 19 nt, Homo sapiens
  misc_RNA (1)...(19): siRNA sense strand
ccaaaagaaucucugagua

SEQ ID NO: 1966360 - RNA, 19 nt, Homo sapiens
  misc_RNA (1)...(19): siRNA sense strand
gaacuuagugaaggacaaa

SEQ ID NO: 1966361 - RNA, 19 nt, Homo sapiens
  misc_RNA (1)...(19): siRNA sense strand
ccacagagaccaaaaguaa

SEQ ID NO: 1966362 - RNA, 19 nt, Homo sapiens
  misc_RNA (1)...(19): siRNA sense strand
caaccacaguaauacaaga

SEQ ID NO: 1966363 - RNA, 19 nt, Homo sapiens
  misc_RNA (1)...(19): siRNA sense strand
gaagugaucgugacaguug

SEQ ID NO: 1966364 - RNA, 19 nt, Homo sapiens
  misc_RNA (1)...(19): siRNA sense strand
ggaguuagccucagcaguu

SEQ ID NO: 1966365 - RNA, 19 nt, Homo sapiens
  misc_RNA (1)...(19): siRNA sense strand
aaacauaugugcaagaaca

SEQ ID NO: 1966366 - RNA, 19 nt, Homo sapiens
  misc_RNA (1)...(19): siRNA sense strand
caaguacgauauccucaaa

SEQ ID NO: 1966367 - RNA, 19 nt, Homo sapiens
  misc_RNA (1)...(19): siRNA sense strand
ggacugccuuccauuguga

SEQ ID NO: 1966368 - RNA, 19 nt, Homo sapiens
  misc_RNA (1)...(19): siRNA sense strand
caauggaacuuaaaucuac

SEQ ID NO: 1966369 - RNA, 19 nt, Homo sapiens
  misc_RNA (1)...(19): siRNA sense strand
gaguuagccucagcaguua

SEQ ID NO: 1966370 - RNA, 19 nt, Homo sapiens
  misc_RNA (1)...(19): siRNA sense strand
ccaggucucuccaaacuga

SEQ ID NO: 1966371 - RNA, 19 nt, Homo sapiens
  misc_RNA (1)...(19): siRNA sense strand
acacaagaagccauaauua

SEQ ID NO: 1966372 - RNA, 19 nt, Homo sapiens
  misc_RNA (1)...(19): siRNA sense strand
gaugagagacuuauauaca

SEQ ID NO: 1966373 - RNA, 19 nt, Homo sapiens
  misc_RNA (1)...(19): siRNA sense strand
uggaauggguaauacauaa

SEQ ID NO: 1966374 - RNA, 19 nt, Homo sapiens
  misc_RNA (1)...(19): siRNA sense strand
gaaaacauaugugcaagaa

SEQ ID NO: 1966375 - RNA, 19 nt, Homo sapiens
  misc_RNA (1)...(19): siRNA sense strand
gcaauggaauggguaauac

SEQ ID NO: 1966376 - RNA, 19 nt, Homo sapiens
  misc_RNA (1)...(19): siRNA sense strand
gagaagugaucgugacagu

SEQ ID NO: 1966377 - RNA, 19 nt, Homo sapiens
  misc_RNA (1)...(19): siRNA sense strand
gcaagaggaaccauaagga

SEQ ID NO: 1966378 - RNA, 19 nt, Homo sapiens
  misc_RNA (1)...(19): siRNA sense strand
gguuggaguugauguguug

SEQ ID NO: 1966379 - RNA, 19 nt, Homo sapiens
  misc_RNA (1)...(19): siRNA sense strand
guagaugagagacuuauau

SEQ ID NO: 1966380 - RNA, 19 nt, Homo sapiens
  misc_RNA (1)...(19): siRNA sense strand
gacacaagaagccauaauu

SEQ ID NO: 1966381 - RNA, 19 nt, Homo sapiens
  misc_RNA (1)...(19): siRNA sense strand
gaaauacccaaacccuaug

SEQ ID NO: 1966382 - RNA, 19 nt, Homo sapiens
  misc_RNA (1)...(19): siRNA sense strand
ggaauggguaauacauaaa

SEQ ID NO: 1966383 - RNA, 19 nt, Homo sapiens
  misc_RNA (1)...(19): siRNA sense strand
ccucagcaguuaccuugaa

SEQ ID NO: 1966384 - RNA, 19 nt, Homo sapiens
  misc_RNA (1)...(19): siRNA sense strand
agaaauacccaaacccuau

SEQ ID NO: 1966385 - RNA, 19 nt, Homo sapiens
  misc_RNA (1)...(19): siRNA sense strand
gaaggacugauggcaagua

SEQ ID NO: 1966386 - RNA, 19 nt, Homo sapiens
  misc_RNA (1)...(19): siRNA sense strand
ggacugauggcaaguacga

SEQ ID NO: 1966387 - RNA, 19 nt, Homo sapiens
  misc_RNA (1)...(19): siRNA sense strand
gaagcaauggaauggguaa

SEQ ID NO: 1966388 - RNA, 19 nt, Homo sapiens
  misc_RNA (1)...(19): siRNA sense strand
gcaaguacgauauccucaa

SEQ ID NO: 1966389 - RNA, 19 nt, Homo sapiens
  misc_RNA (1)...(19): siRNA sense strand
gggacugccuuccauugug

SEQ ID NO: 1966390 - RNA, 19 nt, Homo sapiens
  misc_RNA (1)...(19): siRNA sense strand
gagaaaacaauggaacuua

SEQ ID NO: 1966391 - RNA, 19 nt, Homo sapiens
  misc_RNA (1)...(19): siRNA sense strand
ucagcaagaggaaccauaa

SEQ ID NO: 1966392 - RNA, 19 nt, Homo sapiens
  misc_RNA (1)...(19): siRNA sense strand
caagugugguuggaguuga

SEQ ID NO: 1966393 - RNA, 19 nt, Homo sapiens
  misc_RNA (1)...(19): siRNA sense strand
uaaaugcugagauugaaga

SEQ ID NO: 1966394 - RNA, 19 nt, Homo sapiens
  misc_RNA (1)...(19): siRNA sense strand
auugugaagucucuuauug

SEQ ID NO: 1966395 - RNA, 19 nt, Homo sapiens
  misc_RNA (1)...(19): siRNA sense strand
gaucgugacaguugguaga

SEQ ID NO: 1966396 - RNA, 19 nt, Homo sapiens
  misc_RNA (1)...(19): siRNA sense strand
aguacgauauccucaaaug

SEQ ID NO: 1966397 - RNA, 19 nt, Homo sapiens
  misc_RNA (1)...(19): siRNA sense strand
acgauauccucaaaugcua

SEQ ID NO: 1966398 - RNA, 19 nt, Homo sapiens
  misc_RNA (1)...(19): siRNA sense strand
cuucggagcacgucuuuga

SEQ ID NO: 1966399 - RNA, 19 nt, Homo sapiens
  misc_RNA (1)...(19): siRNA sense strand
guaaaggccgagaagcaau

SEQ ID NO: 1966400 - RNA, 19 nt, Homo sapiens
  misc_RNA (1)...(19): siRNA sense strand
cgugacaguugguagacaa

SEQ ID NO: 1966401 - RNA, 19 nt, Homo sapiens
  misc_RNA (1)...(19): siRNA sense strand
ggacuucggagcacgucuu

SEQ ID NO: 1966402 - RNA, 19 nt, Homo sapiens
  misc_RNA (1)...(19): siRNA sense strand
auauagaucccucuggaaa

SEQ ID NO: 1966403 - RNA, 19 nt, Homo sapiens
  misc_RNA (1)...(19): siRNA sense strand
ugugaagucucuuauuggu

SEQ ID NO: 1966404 - RNA, 19 nt, Homo sapiens
  misc_RNA (1)...(19): siRNA sense strand
uaguugauccuguagagaa

SEQ ID NO: 1966405 - RNA, 19 nt, Homo sapiens
  misc_RNA (1)...(19): siRNA sense strand
cacaagaagccauaauuac

SEQ ID NO: 1966406 - RNA, 19 nt, Homo sapiens
  misc_RNA (1)...(19): siRNA sense strand
uaaaggccgagaagcaaug

SEQ ID NO: 1966407 - RNA, 19 nt, Homo sapiens
  misc_RNA (1)...(19): siRNA sense strand
cagcaagaacgaaaacaua

SEQ ID NO: 1966408 - RNA, 19 nt, Homo sapiens
  misc_RNA (1)...(19): siRNA sense strand
auagaucccucuggaaagu

SEQ ID NO: 1966409 - RNA, 19 nt, Homo sapiens
  misc_RNA (1)...(19): siRNA sense strand
agccauaauuaccgugaaa

SEQ ID NO: 1966410 - RNA, 19 nt, Homo sapiens
  misc_RNA (1)...(19): siRNA sense strand
ggaaccauaaggacuccaa

SEQ ID NO: 1966411 - RNA, 19 nt, Homo sapiens
  misc_RNA (1)...(19): siRNA sense strand
cauaauuaccgugaaagga

SEQ ID NO: 1966412 - RNA, 19 nt, Homo sapiens
  misc_RNA (1)...(19): siRNA sense strand
ucaguagaugagagacuua

SEQ ID NO: 1966413 - RNA, 19 nt, Homo sapiens
  misc_RNA (1)...(19): siRNA sense strand
uguguuggacagacauaua

SEQ ID NO: 1966414 - RNA, 19 nt, Homo sapiens
  misc_RNA (1)...(19): siRNA sense strand
caaugcagaaauacccaaa

SEQ ID NO: 1966415 - RNA, 19 nt, Homo sapiens
  misc_RNA (1)...(19): siRNA sense strand
uauccucaaaugcuaguaa

SEQ ID NO: 1966416 - RNA, 19 nt, Homo sapiens
  misc_RNA (1)...(19): siRNA sense strand
gaacauucuguaguugauc

SEQ ID NO: 1966417 - RNA, 19 nt, Homo sapiens
  misc_RNA (1)...(19): siRNA sense strand
gcacagccacagacuucuc

SEQ ID NO: 1966418 - RNA, 19 nt, Homo sapiens
  misc_RNA (1)...(19): siRNA sense strand
gaaccauaaggacuccaau

SEQ ID NO: 1966419 - RNA, 19 nt, Homo sapiens
  misc_RNA (1)...(19): siRNA sense strand
agaucccucuggaaaguug

SEQ ID NO: 1966420 - RNA, 19 nt, Homo sapiens
  misc_RNA (1)...(19): siRNA sense strand
gcuaguaaaggccgagaag

SEQ ID NO: 1966421 - RNA, 19 nt, Homo sapiens
  misc_RNA (1)...(19): siRNA sense strand
cauauagaucccucuggaa

SEQ ID NO: 1966422 - RNA, 19 nt, Homo sapiens
  misc_RNA (1)...(19): siRNA sense strand
uguaguugauccuguagag

SEQ ID NO: 1966423 - RNA, 19 nt, Homo sapiens
  misc_RNA (1)...(19): siRNA sense strand
aauggcagcagcagcguuu

SEQ ID NO: 1966424 - RNA, 19 nt, Homo sapiens
  misc_RNA (1)...(19): siRNA sense strand
gccgagaagcaauggaaug

SEQ ID NO: 1966425 - RNA, 19 nt, Homo sapiens
  misc_RNA (1)...(19): siRNA sense strand
uaguaaaggccgagaagca

SEQ ID NO: 1966426 - RNA, 19 nt, Homo sapiens
  misc_RNA (1)...(19): siRNA sense strand
acugauggcaaguacgaua

SEQ ID NO: 1966427 - RNA, 19 nt, Homo sapiens
  misc_RNA (1)...(19): siRNA sense strand
ugacacaagaagccauaau

SEQ ID NO: 1966428 - RNA, 19 nt, Homo sapiens
  misc_RNA (1)...(19): siRNA sense strand
cuccaggucucuccaaacu

SEQ ID NO: 1966429 - RNA, 19 nt, Homo sapiens
  misc_RNA (1)...(19): siRNA sense strand
augcugagauugaagaacu

SEQ ID NO: 1966430 - RNA, 19 nt, Homo sapiens
  misc_RNA (1)...(19): siRNA sense strand
ggaggaaucuguaaagaaa

SEQ ID NO: 1966431 - RNA, 19 nt, Homo sapiens
  misc_RNA (1)...(19): siRNA sense strand
ggagaacagugccacaaua

SEQ ID NO: 1966432 - RNA, 19 nt, Homo sapiens
  misc_RNA (1)...(19): siRNA sense strand
gcagaaaggucaaauuggu

SEQ ID NO: 1966433 - RNA, 19 nt, Homo sapiens
  misc_RNA (1)...(19): siRNA sense strand
ggaggaugcccuagaaaua

SEQ ID NO: 1966434 - RNA, 19 nt, Homo sapiens
  misc_RNA (1)...(19): siRNA sense strand
cauagaaacugaugcagaa

SEQ ID NO: 1966435 - RNA, 19 nt, Homo sapiens
  misc_RNA (1)...(19): siRNA sense strand
gcacaaggauacccugcuu

SEQ ID NO: 1966436 - RNA, 19 nt, Homo sapiens
  misc_RNA (1)...(19): siRNA sense strand
gugcugaucuccaggauga

SEQ ID NO: 1966437 - RNA, 19 nt, Homo sapiens
  misc_RNA (1)...(19): siRNA sense strand
ggacauuguuggugacuuc

SEQ ID NO: 1966438 - RNA, 19 nt, Homo sapiens
  misc_RNA (1)...(19): siRNA sense strand
ucacugauguccugacuga

SEQ ID NO: 1966439 - RNA, 19 nt, Homo sapiens
  misc_RNA (1)...(19): siRNA sense strand
gcaugagcauuucaaguau

SEQ ID NO: 1966440 - RNA, 19 nt, Homo sapiens
  misc_RNA (1)...(19): siRNA sense strand
gaaagccugucuggaaguu

SEQ ID NO: 1966441 - RNA, 19 nt, Homo sapiens
  misc_RNA (1)...(19): siRNA sense strand
gcacuggucccauuaggaa

SEQ ID NO: 1966442 - RNA, 19 nt, Homo sapiens
  misc_RNA (1)...(19): siRNA sense strand
ccaaggcacuggucccauu

SEQ ID NO: 1966443 - RNA, 19 nt, Homo sapiens
  misc_RNA (1)...(19): siRNA sense strand
gaacagugccacaauagag

SEQ ID NO: 1966444 - RNA, 19 nt, Homo sapiens
  misc_RNA (1)...(19): siRNA sense strand
ugaggaggaugcccuagaa

SEQ ID NO: 1966445 - RNA, 19 nt, Homo sapiens
  misc_RNA (1)...(19): siRNA sense strand
uguccaagcuggccaaguu

SEQ ID NO: 1966446 - RNA, 19 nt, Homo sapiens
  misc_RNA (1)...(19): siRNA sense strand
cuacaugccucccaaggau

SEQ ID NO: 1966447 - RNA, 19 nt, Homo sapiens
  misc_RNA (1)...(19): siRNA sense strand
gaaggaggaaucuguaaag

SEQ ID NO: 1966448 - RNA, 19 nt, Homo sapiens
  misc_RNA (1)...(19): siRNA sense strand
uggaccagguuuaaaguaa

SEQ ID NO: 1966449 - RNA, 19 nt, Homo sapiens
  misc_RNA (1)...(19): siRNA sense strand
guauccagauggugaaguu

SEQ ID NO: 1966450 - RNA, 19 nt, Homo sapiens
  misc_RNA (1)...(19): siRNA sense strand
ccagcgggcuuccuacaug

SEQ ID NO: 1966451 - RNA, 19 nt, Homo sapiens
  misc_RNA (1)...(19): siRNA sense strand
acaaggaccucaaggacau

SEQ ID NO: 1966452 - RNA, 19 nt, Homo sapiens
  misc_RNA (1)...(19): siRNA sense strand
ugcaugagcauuucaagua

SEQ ID NO: 1966453 - RNA, 19 nt, Homo sapiens
  misc_RNA (1)...(19): siRNA sense strand
gggcagcucagauggauug

SEQ ID NO: 1966454 - RNA, 19 nt, Homo sapiens
  misc_RNA (1)...(19): siRNA sense strand
gagaacagugccacaauag

SEQ ID NO: 1966455 - RNA, 19 nt, Homo sapiens
  misc_RNA (1)...(19): siRNA sense strand
gcugguauccugcauagau

SEQ ID NO: 1966456 - RNA, 19 nt, Homo sapiens
  misc_RNA (1)...(19): siRNA sense strand
ucaaguaucccgugaugau

SEQ ID NO: 1966457 - RNA, 19 nt, Homo sapiens
  misc_RNA (1)...(19): siRNA sense strand
ugcagcaccugauuauauu

SEQ ID NO: 1966458 - RNA, 19 nt, Homo sapiens
  misc_RNA (1)...(19): siRNA sense strand
aaagaaagagagaagcaaa

SEQ ID NO: 1966459 - RNA, 19 nt, Homo sapiens
  misc_RNA (1)...(19): siRNA sense strand
gcauagauuucagguacau

SEQ ID NO: 1966460 - RNA, 19 nt, Homo sapiens
  misc_RNA (1)...(19): siRNA sense strand
uagaaauacugcagaaagg

SEQ ID NO: 1966461 - RNA, 19 nt, Homo sapiens
  misc_RNA (1)...(19): siRNA sense strand
aaacaccaguauccagaug

SEQ ID NO: 1966462 - RNA, 19 nt, Homo sapiens
  misc_RNA (1)...(19): siRNA sense strand
gaaaauagggugugugagu

SEQ ID NO: 1966463 - RNA, 19 nt, Homo sapiens
  misc_RNA (1)...(19): siRNA sense strand
gugccacaauagagugaua

SEQ ID NO: 1966464 - RNA, 19 nt, Homo sapiens
  misc_RNA (1)...(19): siRNA sense strand
cagaaaggucaaauuggua

SEQ ID NO: 1966465 - RNA, 19 nt, Homo sapiens
  misc_RNA (1)...(19): siRNA sense strand
agaaaggucaaauugguaa

SEQ ID NO: 1966466 - RNA, 19 nt, Homo sapiens
  misc_RNA (1)...(19): siRNA sense strand
guaaagaaacaccaguauc

SEQ ID NO: 1966467 - RNA, 19 nt, Homo sapiens
  misc_RNA (1)...(19): siRNA sense strand
ggaguuggccucugugaac

SEQ ID NO: 1966468 - RNA, 19 nt, Homo sapiens
  misc_RNA (1)...(19): siRNA sense strand
caaggcacuggucccauua

SEQ ID NO: 1966469 - RNA, 19 nt, Homo sapiens
  misc_RNA (1)...(19): siRNA sense strand
augcgaagaugccaaauca

SEQ ID NO: 1966470 - RNA, 19 nt, Homo sapiens
  misc_RNA (1)...(19): siRNA sense strand
gcaaaugcuggcacaagga

SEQ ID NO: 1966471 - RNA, 19 nt, Homo sapiens
  misc_RNA (1)...(19): siRNA sense strand
agaaacugaugcagaagau

SEQ ID NO: 1966472 - RNA, 19 nt, Homo sapiens
  misc_RNA (1)...(19): siRNA sense strand
gcacacggacccugacuac

SEQ ID NO: 1966473 - RNA, 19 nt, Homo sapiens
  misc_RNA (1)...(19): siRNA sense strand
guuguugucugugcuguga

SEQ ID NO: 1966474 - RNA, 19 nt, Homo sapiens
  misc_RNA (1)...(19): siRNA sense strand
gaaaggucaaauugguaaa

SEQ ID NO: 1966475 - RNA, 19 nt, Homo sapiens
  misc_RNA (1)...(19): siRNA sense strand
aaaaggcacugaaguuguu

SEQ ID NO: 1966476 - RNA, 19 nt, Homo sapiens
  misc_RNA (1)...(19): siRNA sense strand
uaaagaaacaccaguaucc

SEQ ID NO: 1966477 - RNA, 19 nt, Homo sapiens
  misc_RNA (1)...(19): siRNA sense strand
gggccaagcaggagggaaa

SEQ ID NO: 1966478 - RNA, 19 nt, Homo sapiens
  misc_RNA (1)...(19): siRNA sense strand
ccaaaucauccgagacaug

SEQ ID NO: 1966479 - RNA, 19 nt, Homo sapiens
  misc_RNA (1)...(19): siRNA sense strand
ugaaggaggaaucuguaaa

SEQ ID NO: 1966480 - RNA, 19 nt, Homo sapiens
  misc_RNA (1)...(19): siRNA sense strand
gaggaugcccuagaaauac

SEQ ID NO: 1966481 - RNA, 19 nt, Homo sapiens
  misc_RNA (1)...(19): siRNA sense strand
gaaacaccaguauccagau

SEQ ID NO: 1966482 - RNA, 19 nt, Homo sapiens
  misc_RNA (1)...(19): siRNA sense strand
gauauuuaagcaacuccua

SEQ ID NO: 1966483 - RNA, 19 nt, Homo sapiens
  misc_RNA (1)...(19): siRNA sense strand
cuacucggcugccuauguc

SEQ ID NO: 1966484 - RNA, 19 nt, Homo sapiens
  misc_RNA (1)...(19): siRNA sense strand
agggaaagccugucuggaa

SEQ ID NO: 1966485 - RNA, 19 nt, Homo sapiens
  misc_RNA (1)...(19): siRNA sense strand
gaaagagagaagcaaaugc

SEQ ID NO: 1966486 - RNA, 19 nt, Homo sapiens
  misc_RNA (1)...(19): siRNA sense strand
ggaaaaggcacugaaguug

SEQ ID NO: 1966487 - RNA, 19 nt, Homo sapiens
  misc_RNA (1)...(19): siRNA sense strand
cugcagaaaggucaaauug

SEQ ID NO: 1966488 - RNA, 19 nt, Homo sapiens
  misc_RNA (1)...(19): siRNA sense strand
ggaccucaaggacauuguu

SEQ ID NO: 1966489 - RNA, 19 nt, Homo sapiens
  misc_RNA (1)...(19): siRNA sense strand
aaaauagggugugugagua

SEQ ID NO: 1966490 - RNA, 19 nt, Homo sapiens
  misc_RNA (1)...(19): siRNA sense strand
ugcagaagauggaaucaag

SEQ ID NO: 1966491 - RNA, 19 nt, Homo sapiens
  misc_RNA (1)...(19): siRNA sense strand
gagccaaccuccccugaug

SEQ ID NO: 1966492 - RNA, 19 nt, Homo sapiens
  misc_RNA (1)...(19): siRNA sense strand
gacaugcgaagaugccaaa

SEQ ID NO: 1966493 - RNA, 19 nt, Homo sapiens
  misc_RNA (1)...(19): siRNA sense strand
uaaacgcggugugggacuu

SEQ ID NO: 1966494 - RNA, 19 nt, Homo sapiens
  misc_RNA (1)...(19): siRNA sense strand
aaggaggaaucuguaaaga

SEQ ID NO: 1966495 - RNA, 19 nt, Homo sapiens
  misc_RNA (1)...(19): siRNA sense strand
gcagcaccugauuauauuu

SEQ ID NO: 1966496 - RNA, 19 nt, Homo sapiens
  misc_RNA (1)...(19): siRNA sense strand
cuagaaauacugcagaaag

SEQ ID NO: 1966497 - RNA, 19 nt, Homo sapiens
  misc_RNA (1)...(19): siRNA sense strand
agaaagagagaagcaaaug

SEQ ID NO: 1966498 - RNA, 19 nt, Homo sapiens
  misc_RNA (1)...(19): siRNA sense strand
gaaaaggcacugaaguugu

SEQ ID NO: 1966499 - RNA, 19 nt, Homo sapiens
  misc_RNA (1)...(19): siRNA sense strand
ucaacaaggaccucaagga

SEQ ID NO: 1966500 - RNA, 19 nt, Homo sapiens
  misc_RNA (1)...(19): siRNA sense strand
uuucaaguaucccgugaug

SEQ ID NO: 1966501 - RNA, 19 nt, Homo sapiens
  misc_RNA (1)...(19): siRNA sense strand
ggaaagccugucuggaagu

SEQ ID NO: 1966502 - RNA, 19 nt, Homo sapiens
  misc_RNA (1)...(19): siRNA sense strand
gauggugaaguuuggaaga

SEQ ID NO: 1966503 - RNA, 19 nt, Homo sapiens
  misc_RNA (1)...(19): siRNA sense strand
aggaaucuguaaagaaaca

SEQ ID NO: 1966504 - RNA, 19 nt, Homo sapiens
  misc_RNA (1)...(19): siRNA sense strand
cauuguuggugacuucaga

SEQ ID NO: 1966505 - RNA, 19 nt, Homo sapiens
  misc_RNA (1)...(19): siRNA sense strand
caaggaucccggcuacuca

SEQ ID NO: 1966506 - RNA, 19 nt, Homo sapiens
  misc_RNA (1)...(19): siRNA sense strand
caugagcauuucaaguauc

SEQ ID NO: 1966507 - RNA, 19 nt, Homo sapiens
  misc_RNA (1)...(19): siRNA sense strand
cagaugacacguugaagca

SEQ ID NO: 1966508 - RNA, 19 nt, Homo sapiens
  misc_RNA (1)...(19): siRNA sense strand
gaggaggaugcccuagaaa

SEQ ID NO: 1966509 - RNA, 19 nt, Homo sapiens
  misc_RNA (1)...(19): siRNA sense strand
gugaugggcagcucagaug

SEQ ID NO: 1966510 - RNA, 19 nt, Homo sapiens
  misc_RNA (1)...(19): siRNA sense strand
gaucccggcuacucaacag

SEQ ID NO: 1966511 - RNA, 19 nt, Homo sapiens
  misc_RNA (1)...(19): siRNA sense strand
ccaccugcaugagcauuuc

SEQ ID NO: 1966512 - RNA, 19 nt, Homo sapiens
  misc_RNA (1)...(19): siRNA sense strand
cagcaccugauuauauuug

SEQ ID NO: 1966513 - RNA, 19 nt, Homo sapiens
  misc_RNA (1)...(19): siRNA sense strand
cacugaaguuguugucugu

SEQ ID NO: 1966514 - RNA, 19 nt, Homo sapiens
  misc_RNA (1)...(19): siRNA sense strand
uucaagccauuguggauug

SEQ ID NO: 1966515 - RNA, 19 nt, Homo sapiens
  misc_RNA (1)...(19): siRNA sense strand
aaaggugggugcugaucuc

SEQ ID NO: 1966516 - RNA, 19 nt, Homo sapiens
  misc_RNA (1)...(19): siRNA sense strand
gacuucagaggcuucuaua

SEQ ID NO: 1966517 - RNA, 19 nt, Homo sapiens
  misc_RNA (1)...(19): siRNA sense strand
cugguauccugcauagauu

SEQ ID NO: 1966518 - RNA, 19 nt, Homo sapiens
  misc_RNA (1)...(19): siRNA sense strand
aaaugaaggaggaaucugu

SEQ ID NO: 1966519 - RNA, 19 nt, Homo sapiens
  misc_RNA (1)...(19): siRNA sense strand
gaaaugaaggaggaaucug

SEQ ID NO: 1966520 - RNA, 19 nt, Homo sapiens
  misc_RNA (1)...(19): siRNA sense strand
ugcaguuccuccagauuga

SEQ ID NO: 1966521 - RNA, 19 nt, Homo sapiens
  misc_RNA (1)...(19): siRNA sense strand
ugacuucagaggcuucuau

SEQ ID NO: 1966522 - RNA, 19 nt, Homo sapiens
  misc_RNA (1)...(19): siRNA sense strand
gggaaaaggcacugaaguu

SEQ ID NO: 1966523 - RNA, 19 nt, Homo sapiens
  misc_RNA (1)...(19): siRNA sense strand
caaaugcuggcacaaggau

SEQ ID NO: 1966524 - RNA, 19 nt, Homo sapiens
  misc_RNA (1)...(19): siRNA sense strand
ugacuacucggcugccuau

SEQ ID NO: 1966525 - RNA, 19 nt, Homo sapiens
  misc_RNA (1)...(19): siRNA sense strand
gacaugauuggaccggaaa

SEQ ID NO: 1966526 - RNA, 19 nt, Homo sapiens
  misc_RNA (1)...(19): siRNA sense strand
aguuugaaauuccuguuug

SEQ ID NO: 1966527 - RNA, 19 nt, Homo sapiens
  misc_RNA (1)...(19): siRNA sense strand
uagaaacugaugcagaaga

SEQ ID NO: 1966528 - RNA, 19 nt, Homo sapiens
  misc_RNA (1)...(19): siRNA sense strand
cgaaggcccugcaguuccu

SEQ ID NO: 1966529 - RNA, 19 nt, Homo sapiens
  misc_RNA (1)...(19): siRNA sense strand
aaugaaggaggaaucugua

SEQ ID NO: 1966530 - RNA, 19 nt, Homo sapiens
  misc_RNA (1)...(19): siRNA sense strand
gaacugaaauguccuguga

SEQ ID NO: 1966531 - RNA, 19 nt, Homo sapiens
  misc_RNA (1)...(19): siRNA sense strand
ggaaaucccugcuaaugaa

SEQ ID NO: 1966532 - RNA, 19 nt, Homo sapiens
  misc_RNA (1)...(19): siRNA sense strand
gaaaguaacucugaaagug

SEQ ID NO: 1966533 - RNA, 19 nt, Homo sapiens
  misc_RNA (1)...(19): siRNA sense strand
ccagugagcucucuagaaa

SEQ ID NO: 1966534 - RNA, 19 nt, Homo sapiens
  misc_RNA (1)...(19): siRNA sense strand
guaaauacacucacagaua

SEQ ID NO: 1966535 - RNA, 19 nt, Homo sapiens
  misc_RNA (1)...(19): siRNA sense strand
gcacgugacuggaaacuau

SEQ ID NO: 1966536 - RNA, 19 nt, Homo sapiens
  misc_RNA (1)...(19): siRNA sense strand
gaacaggugugauucugaa

SEQ ID NO: 1966537 - RNA, 19 nt, Homo sapiens
  misc_RNA (1)...(19): siRNA sense strand
acaaagagcuggauagguu

SEQ ID NO: 1966538 - RNA, 19 nt, Homo sapiens
  misc_RNA (1)...(19): siRNA sense strand
uaaaggaacugaaugaauc

SEQ ID NO: 1966539 - RNA, 19 nt, Homo sapiens
  misc_RNA (1)...(19): siRNA sense strand
gcagaaugcucucgcagaa

SEQ ID NO: 1966540 - RNA, 19 nt, Homo sapiens
  misc_RNA (1)...(19): siRNA sense strand
gaaccgaggugccaaugga

SEQ ID NO: 1966541 - RNA, 19 nt, Homo sapiens
  misc_RNA (1)...(19): siRNA sense strand
gagacaagauugaugauuc

SEQ ID NO: 1966542 - RNA, 19 nt, Homo sapiens
  misc_RNA (1)...(19): siRNA sense strand
gaagagacaagauugauga

SEQ ID NO: 1966543 - RNA, 19 nt, Homo sapiens
  misc_RNA (1)...(19): siRNA sense strand
caagggagccgaaauagaa

SEQ ID NO: 1966544 - RNA, 19 nt, Homo sapiens
  misc_RNA (1)...(19): siRNA sense strand
gaagagaacagcugaagau

SEQ ID NO: 1966545 - RNA, 19 nt, Homo sapiens
  misc_RNA (1)...(19): siRNA sense strand
cagaggaaaucaugauaaa

SEQ ID NO: 1966546 - RNA, 19 nt, Homo sapiens
  misc_RNA (1)...(19): siRNA sense strand
gcaaagcucuacuggaaag

SEQ ID NO: 1966547 - RNA, 19 nt, Homo sapiens
  misc_RNA (1)...(19): siRNA sense strand
gaagaaaccaaaccaccua

SEQ ID NO: 1966548 - RNA, 19 nt, Homo sapiens
  misc_RNA (1)...(19): siRNA sense strand
gaacuaaucaccuguccaa

SEQ ID NO: 1966549 - RNA, 19 nt, Homo sapiens
  misc_RNA (1)...(19): siRNA sense strand
gaauagagagugaugaaga

SEQ ID NO: 1966550 - RNA, 19 nt, Homo sapiens
  misc_RNA (1)...(19): siRNA sense strand
gaaugaauccaaccuuaaa

SEQ ID NO: 1966551 - RNA, 19 nt, Homo sapiens
  misc_RNA (1)...(19): siRNA sense strand
ggaaacacauggucacucu

SEQ ID NO: 1966552 - RNA, 19 nt, Homo sapiens
  misc_RNA (1)...(19): siRNA sense strand
ucacagauauguacagcaa

SEQ ID NO: 1966553 - RNA, 19 nt, Homo sapiens
  misc_RNA (1)...(19): siRNA sense strand
ggaaagacccgcagaaugc

SEQ ID NO: 1966554 - RNA, 19 nt, Homo sapiens
  misc_RNA (1)...(19): siRNA sense strand
ccacagacauccucuccaa

SEQ ID NO: 1966555 - RNA, 19 nt, Homo sapiens
  misc_RNA (1)...(19): siRNA sense strand
cgacauggguggaagacaa

SEQ ID NO: 1966556 - RNA, 19 nt, Homo sapiens
  misc_RNA (1)...(19): siRNA sense strand
gaagaacucaugaccauca

SEQ ID NO: 1966557 - RNA, 19 nt, Homo sapiens
  misc_RNA (1)...(19): siRNA sense strand
agaagacccugaacugaaa

SEQ ID NO: 1966558 - RNA, 19 nt, Homo sapiens
  misc_RNA (1)...(19): siRNA sense strand
ggacacuccuaucaacuau

SEQ ID NO: 1966559 - RNA, 19 nt, Homo sapiens
  misc_RNA (1)...(19): siRNA sense strand
gcagaggaaaucaugauaa

SEQ ID NO: 1966560 - RNA, 19 nt, Homo sapiens
  misc_RNA (1)...(19): siRNA sense strand
aaacuaugcuucccacaga

SEQ ID NO: 1966561 - RNA, 19 nt, Homo sapiens
  misc_RNA (1)...(19): siRNA sense strand
ccagugaaauuuccuaauc

SEQ ID NO: 1966562 - RNA, 19 nt, Homo sapiens
  misc_RNA (1)...(19): siRNA sense strand
ggacaaguuuggugaagca

SEQ ID NO: 1966563 - RNA, 19 nt, Homo sapiens
  misc_RNA (1)...(19): siRNA sense strand
aaggaaagguggugucaaa

SEQ ID NO: 1966564 - RNA, 19 nt, Homo sapiens
  misc_RNA (1)...(19): siRNA sense strand
aacaagagcuaccacauug

SEQ ID NO: 1966565 - RNA, 19 nt, Homo sapiens
  misc_RNA (1)...(19): siRNA sense strand
gaaauaaaggaacugaaug

SEQ ID NO: 1966566 - RNA, 19 nt, Homo sapiens
  misc_RNA (1)...(19): siRNA sense strand
agagagugaugaagaaauu

SEQ ID NO: 1966567 - RNA, 19 nt, Homo sapiens
  misc_RNA (1)...(19): siRNA sense strand
caagaaaacuccaguagga

SEQ ID NO: 1966568 - RNA, 19 nt, Homo sapiens
  misc_RNA (1)...(19): siRNA sense strand
gcagauaugaugaaacuuc

SEQ ID NO: 1966569 - RNA, 19 nt, Homo sapiens
  misc_RNA (1)...(19): siRNA sense strand
cugaaugaauccaaccuua

SEQ ID NO: 1966570 - RNA, 19 nt, Homo sapiens
  misc_RNA (1)...(19): siRNA sense strand
gaaaggaggcaaaccaaag

SEQ ID NO: 1966571 - RNA, 19 nt, Homo sapiens
  misc_RNA (1)...(19): siRNA sense strand
gacgagugcuuucugauuc

SEQ ID NO: 1966572 - RNA, 19 nt, Homo sapiens
  misc_RNA (1)...(19): siRNA sense strand
acugaaauguccugugaua

SEQ ID NO: 1966573 - RNA, 19 nt, Homo sapiens
  misc_RNA (1)...(19): siRNA sense strand
gaacaagagaaguuuggaa

SEQ ID NO: 1966574 - RNA, 19 nt, Homo sapiens
  misc_RNA (1)...(19): siRNA sense strand
ugaaggguauccaugugua

SEQ ID NO: 1966575 - RNA, 19 nt, Homo sapiens
  misc_RNA (1)...(19): siRNA sense strand
augcaaagcucuacuggaa

SEQ ID NO: 1966576 - RNA, 19 nt, Homo sapiens
  misc_RNA (1)...(19): siRNA sense strand
ggagaacaaacucauagaa

SEQ ID NO: 1966577 - RNA, 19 nt, Homo sapiens
  misc_RNA (1)...(19): siRNA sense strand
caccgaagcuuaucuggau

SEQ ID NO: 1966578 - RNA, 19 nt, Homo sapiens
  misc_RNA (1)...(19): siRNA sense strand
aaacugaaggugacaaauu

SEQ ID NO: 1966579 - RNA, 19 nt, Homo sapiens
  misc_RNA (1)...(19): siRNA sense strand
caaugaaagucugcugaaa

SEQ ID NO: 1966580 - RNA, 19 nt, Homo sapiens
  misc_RNA (1)...(19): siRNA sense strand
gaacagaacaaugaaaguc

SEQ ID NO: 1966581 - RNA, 19 nt, Homo sapiens
  misc_RNA (1)...(19): siRNA sense strand
agaacaaacucauagaaca

SEQ ID NO: 1966582 - RNA, 19 nt, Homo sapiens
  misc_RNA (1)...(19): siRNA sense strand
ucacauaucagguaaauac

SEQ ID NO: 1966583 - RNA, 19 nt, Homo sapiens
  misc_RNA (1)...(19): siRNA sense strand
ggucacauaucagguaaau

SEQ ID NO: 1966584 - RNA, 19 nt, Homo sapiens
  misc_RNA (1)...(19): siRNA sense strand
gaaagguggugucaaaaug

SEQ ID NO: 1966585 - RNA, 19 nt, Homo sapiens
  misc_RNA (1)...(19): siRNA sense strand
gaaauagaaguggaugaaa

SEQ ID NO: 1966586 - RNA, 19 nt, Homo sapiens
  misc_RNA (1)...(19): siRNA sense strand
aagccaagcucucauuuca

SEQ ID NO: 1966587 - RNA, 19 nt, Homo sapiens
  misc_RNA (1)...(19): siRNA sense strand
ggaggagaacaaacucaua

SEQ ID NO: 1966588 - RNA, 19 nt, Homo sapiens
  misc_RNA (1)...(19): siRNA sense strand
ucacaucuauggagagcaa

SEQ ID NO: 1966589 - RNA, 19 nt, Homo sapiens
  misc_RNA (1)...(19): siRNA sense strand
gaagaaauaaaggaacuga

SEQ ID NO: 1966590 - RNA, 19 nt, Homo sapiens
  misc_RNA (1)...(19): siRNA sense strand
gagccucccucuccuggaa

SEQ ID NO: 1966591 - RNA, 19 nt, Homo sapiens
  misc_RNA (1)...(19): siRNA sense strand
gaagacagaggaggagaaa

SEQ ID NO: 1966592 - RNA, 19 nt, Homo sapiens
  misc_RNA (1)...(19): siRNA sense strand
guaggaaggaagacagaua

SEQ ID NO: 1966593 - RNA, 19 nt, Homo sapiens
  misc_RNA (1)...(19): siRNA sense strand
caaggucacauaucaggua

SEQ ID NO: 1966594 - RNA, 19 nt, Homo sapiens
  misc_RNA (1)...(19): siRNA sense strand
ggaaaggaggcaaaccaaa

SEQ ID NO: 1966595 - RNA, 19 nt, Homo sapiens
  misc_RNA (1)...(19): siRNA sense strand
caccuagagucccaaagua

SEQ ID NO: 1966596 - RNA, 19 nt, Homo sapiens
  misc_RNA (1)...(19): siRNA sense strand
gaaggaagacagauacucu

SEQ ID NO: 1966597 - RNA, 19 nt, Homo sapiens
  misc_RNA (1)...(19): siRNA sense strand
gccaagcucucauuucaag

SEQ ID NO: 1966598 - RNA, 19 nt, Homo sapiens
  misc_RNA (1)...(19): siRNA sense strand
aaacaagagcuaccacauu

SEQ ID NO: 1966599 - RNA, 19 nt, Homo sapiens
  misc_RNA (1)...(19): siRNA sense strand
ccuggaaacugaacaaaca

SEQ ID NO: 1966600 - RNA, 19 nt, Homo sapiens
  misc_RNA (1)...(19): siRNA sense strand
aacugaaggugacaaauuu

SEQ ID NO: 1966601 - RNA, 19 nt, Homo sapiens
  misc_RNA (1)...(19): siRNA sense strand
ggacaguggcuccaacuuc

SEQ ID NO: 1966602 - RNA, 19 nt, Homo sapiens
  misc_RNA (1)...(19): siRNA sense strand
acauuggacuuaagcauga

SEQ ID NO: 1966603 - RNA, 19 nt, Homo sapiens
  misc_RNA (1)...(19): siRNA sense strand
ugcagaggcugaagauaaa

SEQ ID NO: 1966604 - RNA, 19 nt, Homo sapiens
  misc_RNA (1)...(19): siRNA sense strand
ugaagcagauaugaugaaa

SEQ ID NO: 1966605 - RNA, 19 nt, Homo sapiens
  misc_RNA (1)...(19): siRNA sense strand
gggcugggccauguaaaua

SEQ ID NO: 1966606 - RNA, 19 nt, Homo sapiens
  misc_RNA (1)...(19): siRNA sense strand
ggauguccuuuagcagaua

SEQ ID NO: 1966607 - RNA, 19 nt, Homo sapiens
  misc_RNA (1)...(19): siRNA sense strand
cguacucgcucuaaaggaa

SEQ ID NO: 1966608 - RNA, 19 nt, Homo sapiens
  misc_RNA (1)...(19): siRNA sense strand
ccacagaugggaccuauca

SEQ ID NO: 1966609 - RNA, 19 nt, Homo sapiens
  misc_RNA (1)...(19): siRNA sense strand
aauagagagugaugaagaa

SEQ ID NO: 1966610 - RNA, 19 nt, Homo sapiens
  misc_RNA (1)...(19): siRNA sense strand
agacagaggaggagaaaga

SEQ ID NO: 1966611 - RNA, 19 nt, Homo sapiens
  misc_RNA (1)...(19): siRNA sense strand
gacaguggcuccaacuucu

SEQ ID NO: 1966612 - RNA, 19 nt, Homo sapiens
  misc_RNA (1)...(19): siRNA sense strand
caaugaaaguaacucugaa

SEQ ID NO: 1966613 - RNA, 19 nt, Homo sapiens
  misc_RNA (1)...(19): siRNA sense strand
acaguggcauccagucuuu

SEQ ID NO: 1966614 - RNA, 19 nt, Homo sapiens
  misc_RNA (1)...(19): siRNA sense strand
gaacaaacucauagaacag

SEQ ID NO: 1966615 - RNA, 19 nt, Homo sapiens
  misc_RNA (1)...(19): siRNA sense strand
agacagauacucuuguuau

SEQ ID NO: 1966616 - RNA, 19 nt, Homo sapiens
  misc_RNA (1)...(19): siRNA sense strand
aagcagauaugaugaaacu

SEQ ID NO: 1966617 - RNA, 19 nt, Homo sapiens
  misc_RNA (1)...(19): siRNA sense strand
ugaaugaauccaaccuuaa

SEQ ID NO: 1966618 - RNA, 19 nt, Homo sapiens
  misc_RNA (1)...(19): siRNA sense strand
cgaaauagaaguggaugaa

SEQ ID NO: 1966619 - RNA, 19 nt, Homo sapiens
  misc_RNA (1)...(19): siRNA sense strand
ggagcucaguguugccuau

SEQ ID NO: 1966620 - RNA, 19 nt, Homo sapiens
  misc_RNA (1)...(19): siRNA sense strand
gcgagagccuggcaguaau

SEQ ID NO: 1966621 - RNA, 19 nt, Homo sapiens
  misc_RNA (1)...(19): siRNA sense strand
ggaagagacaagauugaug

SEQ ID NO: 1966622 - RNA, 19 nt, Homo sapiens
  misc_RNA (1)...(19): siRNA sense strand
cauaucagguaaauacaca

SEQ ID NO: 1966623 - RNA, 19 nt, Homo sapiens
  misc_RNA (1)...(19): siRNA sense strand
augaaagucugcugaaaga

SEQ ID NO: 1966624 - RNA, 19 nt, Homo sapiens
  misc_RNA (1)...(19): siRNA sense strand
gggaauagagagugaugaa

SEQ ID NO: 1966625 - RNA, 19 nt, Homo sapiens
  misc_RNA (1)...(19): siRNA sense strand
aaaaggaaaucccugcuaa

SEQ ID NO: 1966626 - RNA, 19 nt, Homo sapiens
  misc_RNA (1)...(19): siRNA sense strand
ggaaacugaacaaacaaga

SEQ ID NO: 1966627 - RNA, 19 nt, Homo sapiens
  misc_RNA (1)...(19): siRNA sense strand
uggccaaggucacauauca

SEQ ID NO: 1966628 - RNA, 19 nt, Homo sapiens
  misc_RNA (1)...(19): siRNA sense strand
caagaagaccgcagugaca

SEQ ID NO: 1966629 - RNA, 19 nt, Homo sapiens
  misc_RNA (1)...(19): siRNA sense strand
gggacacuccuaucaacua

SEQ ID NO: 1966630 - RNA, 19 nt, Homo sapiens
  misc_RNA (1)...(19): siRNA sense strand
gaacccagauucacaguau

SEQ ID NO: 1966631 - RNA, 19 nt, Homo sapiens
  misc_RNA (1)...(19): siRNA sense strand
ggaaauggaucagacaaug

SEQ ID NO: 1966632 - RNA, 19 nt, Homo sapiens
  misc_RNA (1)...(19): siRNA sense strand
ugagauaaccaucaguuua

SEQ ID NO: 1966633 - RNA, 19 nt, Homo sapiens
  misc_RNA (1)...(19): siRNA sense strand
ccaaugcucagaagaauaa

SEQ ID NO: 1966634 - RNA, 19 nt, Homo sapiens
  misc_RNA (1)...(19): siRNA sense strand
gaaagauuguaccaguuga

SEQ ID NO: 1966635 - RNA, 19 nt, Homo sapiens
  misc_RNA (1)...(19): siRNA sense strand
ggaaagauuguaccaguug

SEQ ID NO: 1966636 - RNA, 19 nt, Homo sapiens
  misc_RNA (1)...(19): siRNA sense strand
cgagaaauauggcuacaca

SEQ ID NO: 1966637 - RNA, 19 nt, Homo sapiens
  misc_RNA (1)...(19): siRNA sense strand
gaaaggaagaacccagauu

SEQ ID NO: 1966638 - RNA, 19 nt, Homo sapiens
  misc_RNA (1)...(19): siRNA sense strand
gauuguaccaguugagaua

SEQ ID NO: 1966639 - RNA, 19 nt, Homo sapiens
  misc_RNA (1)...(19): siRNA sense strand
ggaagaacccagauucaca

SEQ ID NO: 1966640 - RNA, 19 nt, Homo sapiens
  misc_RNA (1)...(19): siRNA sense strand
caacagagagagcuuggaa

SEQ ID NO: 1966641 - RNA, 19 nt, Homo sapiens
  misc_RNA (1)...(19): siRNA sense strand
cuaaaucuguugaugaagu

SEQ ID NO: 1966642 - RNA, 19 nt, Homo sapiens
  misc_RNA (1)...(19): siRNA sense strand
gagagcugcuucgugauga

SEQ ID NO: 1966643 - RNA, 19 nt, Homo sapiens
  misc_RNA (1)...(19): siRNA sense strand
gaaaucaagacaaccuuca

SEQ ID NO: 1966644 - RNA, 19 nt, Homo sapiens
  misc_RNA (1)...(19): siRNA sense strand
cuucaaggauggaacaaga

SEQ ID NO: 1966645 - RNA, 19 nt, Homo sapiens
  misc_RNA (1)...(19): siRNA sense strand
ggaaagaguagugguagga

SEQ ID NO: 1966646 - RNA, 19 nt, Homo sapiens
  misc_RNA (1)...(19): siRNA sense strand
ggagagcugcuucgugaug

SEQ ID NO: 1966647 - RNA, 19 nt, Homo sapiens
  misc_RNA (1)...(19): siRNA sense strand
ugaagccgcuggucguguu

SEQ ID NO: 1966648 - RNA, 19 nt, Homo sapiens
  misc_RNA (1)...(19): siRNA sense strand
gaauucagaccuaccuuca

SEQ ID NO: 1966649 - RNA, 19 nt, Homo sapiens
  misc_RNA (1)...(19): siRNA sense strand
ggagugaugacaacagaga

SEQ ID NO: 1966650 - RNA, 19 nt, Homo sapiens
  misc_RNA (1)...(19): siRNA sense strand
acaguauggugaacuuauu

SEQ ID NO: 1966651 - RNA, 19 nt, Homo sapiens
  misc_RNA (1)...(19): siRNA sense strand
gaugaaguugugcagauuu

SEQ ID NO: 1966652 - RNA, 19 nt, Homo sapiens
  misc_RNA (1)...(19): siRNA sense strand
gaaauggaucagacaaugg

SEQ ID NO: 1966653 - RNA, 19 nt, Homo sapiens
  misc_RNA (1)...(19): siRNA sense strand
uaggagugaugacaacaga

SEQ ID NO: 1966654 - RNA, 19 nt, Homo sapiens
  misc_RNA (1)...(19): siRNA sense strand
agagagagcuuggaaaaga

SEQ ID NO: 1966655 - RNA, 19 nt, Homo sapiens
  misc_RNA (1)...(19): siRNA sense strand
ugaugaaguugugcagauu

SEQ ID NO: 1966656 - RNA, 19 nt, Homo sapiens
  misc_RNA (1)...(19): siRNA sense strand
aaaggaagaacccagauuc

SEQ ID NO: 1966657 - RNA, 19 nt, Homo sapiens
  misc_RNA (1)...(19): siRNA sense strand
agaccuaccuucagucaac

SEQ ID NO: 1966658 - RNA, 19 nt, Homo sapiens
  misc_RNA (1)...(19): siRNA sense strand
auugauggguuuccaagaa

SEQ ID NO: 1966659 - RNA, 19 nt, Homo sapiens
  misc_RNA (1)...(19): siRNA sense strand
aaaagagaauucagaccua

SEQ ID NO: 1966660 - RNA, 19 nt, Homo sapiens
  misc_RNA (1)...(19): siRNA sense strand
gaagaaauggggaaaguca

SEQ ID NO: 1966661 - RNA, 19 nt, Homo sapiens
  misc_RNA (1)...(19): siRNA sense strand
uaaagagggaaauggauca

SEQ ID NO: 1966662 - RNA, 19 nt, Homo sapiens
  misc_RNA (1)...(19): siRNA sense strand
ggaugggaaggcagaugua

SEQ ID NO: 1966663 - RNA, 19 nt, Homo sapiens
  misc_RNA (1)...(19): siRNA sense strand
gccaaugcucagaagaaua

SEQ ID NO: 1966664 - RNA, 19 nt, Homo sapiens
  misc_RNA (1)...(19): siRNA sense strand
agaaauauggcuacacaca

SEQ ID NO: 1966665 - RNA, 19 nt, Homo sapiens
  misc_RNA (1)...(19): siRNA sense strand
aggaaagauuguaccaguu

SEQ ID NO: 1966666 - RNA, 19 nt, Homo sapiens
  misc_RNA (1)...(19): siRNA sense strand
auugaacgaugucuugaga

SEQ ID NO: 1966667 - RNA, 19 nt, Homo sapiens
  misc_RNA (1)...(19): siRNA sense strand
ugagauuuguauugaacga

SEQ ID NO: 1966668 - RNA, 19 nt, Homo sapiens
  misc_RNA (1)...(19): siRNA sense strand
guugagauaaccaucaguu

SEQ ID NO: 1966669 - RNA, 19 nt, Homo sapiens
  misc_RNA (1)...(19): siRNA sense strand
gggaaauggaucagacaau

SEQ ID NO: 1966670 - RNA, 19 nt, Homo sapiens
  misc_RNA (1)...(19): siRNA sense strand
uccaagaaaucaagacaac

SEQ ID NO: 1966671 - RNA, 19 nt, Homo sapiens
  misc_RNA (1)...(19): siRNA sense strand
gauuuguauugaacgaugu

SEQ ID NO: 1966672 - RNA, 19 nt, Homo sapiens
  misc_RNA (1)...(19): siRNA sense strand
guacauuaaagaaggaaag

SEQ ID NO: 1966673 - RNA, 19 nt, Homo sapiens
  misc_RNA (1)...(19): siRNA sense strand
gcuucuaaaucuguugaug

SEQ ID NO: 1966674 - RNA, 19 nt, Homo sapiens
  misc_RNA (1)...(19): siRNA sense strand
gucaacaaagccaauuauu

SEQ ID NO: 1966675 - RNA, 19 nt, Homo sapiens
  misc_RNA (1)...(19): siRNA sense strand
caagaaaucaagacaaccu

SEQ ID NO: 1966676 - RNA, 19 nt, Homo sapiens
  misc_RNA (1)...(19): siRNA sense strand
gagcugcuucgugaugaaa

SEQ ID NO: 1966677 - RNA, 19 nt, Homo sapiens
  misc_RNA (1)...(19): siRNA sense strand
uugaugaaguugugcagau

SEQ ID NO: 1966678 - RNA, 19 nt, Homo sapiens
  misc_RNA (1)...(19): siRNA sense strand
cuucuaaaucuguugauga

SEQ ID NO: 1966679 - RNA, 19 nt, Homo sapiens
  misc_RNA (1)...(19): siRNA sense strand
cagucaacaaagccaauua

SEQ ID NO: 1966680 - RNA, 19 nt, Homo sapiens
  misc_RNA (1)...(19): siRNA sense strand
auucagaccuaccuucagu

SEQ ID NO: 1966681 - RNA, 19 nt, Homo sapiens
  misc_RNA (1)...(19): siRNA sense strand
gaugggaaggcagauguau

SEQ ID NO: 1966682 - RNA, 19 nt, Homo sapiens
  misc_RNA (1)...(19): siRNA sense strand
uguauugaacgaugucuug

SEQ ID NO: 1966683 - RNA, 19 nt, Homo sapiens
  misc_RNA (1)...(19): siRNA sense strand
uauuaaagagggaaaugga

SEQ ID NO: 1966684 - RNA, 19 nt, Homo sapiens
  misc_RNA (1)...(19): siRNA sense strand
gcucuccacgucucaugaa

SEQ ID NO: 1966685 - RNA, 19 nt, Homo sapiens
  misc_RNA (1)...(19): siRNA sense strand
ccaguugagauaaccauca

SEQ ID NO: 1966686 - RNA, 19 nt, Homo sapiens
  misc_RNA (1)...(19): siRNA sense strand
ccgcaucgucgagaaauau

SEQ ID NO: 1966687 - RNA, 19 nt, Homo sapiens
  misc_RNA (1)...(19): siRNA sense strand
ugccaaugcucagaagaau

SEQ ID NO: 1966688 - RNA, 19 nt, Homo sapiens
  misc_RNA (1)...(19): siRNA sense strand
auucuugauugauggguuu

SEQ ID NO: 1966689 - RNA, 19 nt, Homo sapiens
  misc_RNA (1)...(19): siRNA sense strand
cacaguauggugaacuuau

SEQ ID NO: 1966690 - RNA, 19 nt, Homo sapiens
  misc_RNA (1)...(19): siRNA sense strand
aaagaaggaaagauuguac

SEQ ID NO: 1966691 - RNA, 19 nt, Homo sapiens
  misc_RNA (1)...(19): siRNA sense strand
gaccuaccuucagucaaca

SEQ ID NO: 1966692 - RNA, 19 nt, Homo sapiens
  misc_RNA (1)...(19): siRNA sense strand
guauggugaacuuauugaa

SEQ ID NO: 1966693 - RNA, 19 nt, Homo sapiens
  misc_RNA (1)...(19): siRNA sense strand
gaccagccaucaaguauuu

SEQ ID NO: 1966694 - RNA, 19 nt, Homo sapiens
  misc_RNA (1)...(19): siRNA sense strand
gagcacgguucaagaaauu

SEQ ID NO: 1966695 - RNA, 19 nt, Homo sapiens
  misc_RNA (1)...(19): siRNA sense strand
agucaggaguguuguauua

SEQ ID NO: 1966696 - RNA, 19 nt, Homo sapiens
  misc_RNA (1)...(19): siRNA sense strand
uaacagaacaauacccuaa

SEQ ID NO: 1966697 - RNA, 19 nt, Homo sapiens
  misc_RNA (1)...(19): siRNA sense strand
caggaguguuguauuauuu

SEQ ID NO: 1966698 - RNA, 19 nt, Homo sapiens
  misc_RNA (1)...(19): siRNA sense strand
ggaauuccuguuauuguaa

SEQ ID NO: 1966699 - RNA, 19 nt, Homo sapiens
  misc_RNA (1)...(19): siRNA sense strand
ggagcacgguucaagaaau

SEQ ID NO: 1966700 - RNA, 19 nt, Homo sapiens
  misc_RNA (1)...(19): siRNA sense strand
ucaggaguguuguauuauu

SEQ ID NO: 1966701 - RNA, 19 nt, Homo sapiens
  misc_RNA (1)...(19): siRNA sense strand
gagucgagguucacauugu

SEQ ID NO: 1966702 - RNA, 19 nt, Homo sapiens
  misc_RNA (1)...(19): siRNA sense strand
gaagcaugauggacaggau

SEQ ID NO: 1966703 - RNA, 19 nt, Homo sapiens
  misc_RNA (1)...(19): siRNA sense strand
agaaguagaagcggcauua

SEQ ID NO: 1966704 - RNA, 19 nt, Homo sapiens
  misc_RNA (1)...(19): siRNA sense strand
gcugugauaugcaggaaag

SEQ ID NO: 1966705 - RNA, 19 nt, Homo sapiens
  misc_RNA (1)...(19): siRNA sense strand
gaagcggcauuagcagaga

SEQ ID NO: 1966706 - RNA, 19 nt, Homo sapiens
  misc_RNA (1)...(19): siRNA sense strand
aaacugguacuuccaaaga

SEQ ID NO: 1966707 - RNA, 19 nt, Homo sapiens
  misc_RNA (1)...(19): siRNA sense strand
aaacugcccuggagcuagu

SEQ ID NO: 1966708 - RNA, 19 nt, Homo sapiens
  misc_RNA (1)...(19): siRNA sense strand
ggaaaucuuacaccuucaa

SEQ ID NO: 1966709 - RNA, 19 nt, Homo sapiens
  misc_RNA (1)...(19): siRNA sense strand
ucacuacccugggaaaucu

SEQ ID NO: 1966710 - RNA, 19 nt, Homo sapiens
  misc_RNA (1)...(19): siRNA sense strand
ucagaccagccaucaagua

SEQ ID NO: 1966711 - RNA, 19 nt, Homo sapiens
  misc_RNA (1)...(19): siRNA sense strand
ggaguguuguauuauuugg

SEQ ID NO: 1966712 - RNA, 19 nt, Homo sapiens
  misc_RNA (1)...(19): siRNA sense strand
acaauacccuaaaggucuu

SEQ ID NO: 1966713 - RNA, 19 nt, Homo sapiens
  misc_RNA (1)...(19): siRNA sense strand
acagaacaauacccuaaag

SEQ ID NO: 1966714 - RNA, 19 nt, Homo sapiens
  misc_RNA (1)...(19): siRNA sense strand
ggagucaggaguguuguau

SEQ ID NO: 1966715 - RNA, 19 nt, Homo sapiens
  misc_RNA (1)...(19): siRNA sense strand
gcagagauucccggaguca

SEQ ID NO: 1966716 - RNA, 19 nt, Homo sapiens
  misc_RNA (1)...(19): siRNA sense strand
guucagaccagccaucaag

SEQ ID NO: 1966717 - RNA, 19 nt, Homo sapiens
  misc_RNA (1)...(19): siRNA sense strand
ggagucgagguucacauug

SEQ ID NO: 1966718 - RNA, 19 nt, Homo sapiens
  misc_RNA (1)...(19): siRNA sense strand
gggagcacgguucaagaaa

SEQ ID NO: 1966719 - RNA, 19 nt, Homo sapiens
  misc_RNA (1)...(19): siRNA sense strand
cagaccagccaucaaguau

SEQ ID NO: 1966720 - RNA, 19 nt, Homo sapiens
  misc_RNA (1)...(19): siRNA sense strand
caugugugcauccaacaaa

SEQ ID NO: 1966721 - RNA, 19 nt, Homo sapiens
  misc_RNA (1)...(19): siRNA sense strand
caugauggacaggauguuu

SEQ ID NO: 1966722 - RNA, 19 nt, Homo sapiens
  misc_RNA (1)...(19): siRNA sense strand
agucgagguucacauuguu

SEQ ID NO: 1966723 - RNA, 19 nt, Homo sapiens
  misc_RNA (1)...(19): siRNA sense strand
gaaguagaagcggcauuag

SEQ ID NO: 1966724 - RNA, 19 nt, Homo sapiens
  misc_RNA (1)...(19): siRNA sense strand
gccgaggagucgagguuca

SEQ ID NO: 1966725 - RNA, 19 nt, Homo sapiens
  misc_RNA (1)...(19): siRNA sense strand
gggaaaucuuacaccuuca

SEQ ID NO: 1966726 - RNA, 19 nt, Homo sapiens
  misc_RNA (1)...(19): siRNA sense strand
ucauagugaccacgaguga

SEQ ID NO: 1966727 - RNA, 19 nt, Homo sapiens
  misc_RNA (1)...(19): siRNA sense strand
gugauaugcaggaaagguu

SEQ ID NO: 1966728 - RNA, 19 nt, Homo sapiens
  misc_RNA (1)...(19): siRNA sense strand
gaaaucuuacaccuucaag

SEQ ID NO: 1966729 - RNA, 19 nt, Homo sapiens
  misc_RNA (1)...(19): siRNA sense strand
aaucuuacaccuucaagca

SEQ ID NO: 1966730 - RNA, 19 nt, Homo sapiens
  misc_RNA (1)...(19): siRNA sense strand
uaaaacugguacuuccaaa

SEQ ID NO: 1966731 - RNA, 19 nt, Homo sapiens
  misc_RNA (1)...(19): siRNA sense strand
agaacaauacccuaaaggu

SEQ ID NO: 1966732 - RNA, 19 nt, Homo sapiens
  misc_RNA (1)...(19): siRNA sense strand
aguagaagcggcauuagca

SEQ ID NO: 1966733 - RNA, 19 nt, Homo sapiens
  misc_RNA (1)...(19): siRNA sense strand
ggaagaauaucgaaaugua

SEQ ID NO: 1966734 - RNA, 19 nt, Homo sapiens
  misc_RNA (1)...(19): siRNA sense strand
gcaucacucuggaagaaua

SEQ ID NO: 1966735 - RNA, 19 nt, Homo sapiens
  misc_RNA (1)...(19): siRNA sense strand
ggaaggagaagcugagauu

SEQ ID NO: 1966736 - RNA, 19 nt, Homo sapiens
  misc_RNA (1)...(19): siRNA sense strand
gggaaacccucacaucuag

SEQ ID NO: 1966737 - RNA, 19 nt, Homo sapiens
  misc_RNA (1)...(19): siRNA sense strand
gcaaggagaacuucaacaa

SEQ ID NO: 1966738 - RNA, 19 nt, Homo sapiens
  misc_RNA (1)...(19): siRNA sense strand
aaggagaacuucaacaaug

SEQ ID NO: 1966739 - RNA, 19 nt, Homo sapiens
  misc_RNA (1)...(19): siRNA sense strand
gaaacccucacaucuagaa

SEQ ID NO: 1966740 - RNA, 19 nt, Homo sapiens
  misc_RNA (1)...(19): siRNA sense strand
ggagaucagccuaccauuc

SEQ ID NO: 1966741 - RNA, 19 nt, Homo sapiens
  misc_RNA (1)...(19): siRNA sense strand
ccgcaucacucuggaagaa

SEQ ID NO: 1966742 - RNA, 19 nt, Homo sapiens
  misc_RNA (1)...(19): siRNA sense strand
gaaggagaagcugagauuu

SEQ ID NO: 1966743 - RNA, 19 nt, Homo sapiens
  misc_RNA (1)...(19): siRNA sense strand
gggcaagaccggcuucuca

SEQ ID NO: 1966744 - RNA, 19 nt, Homo sapiens
  misc_RNA (1)...(19): siRNA sense strand
gagaucagccuaccauucg

SEQ ID NO: 1966745 - RNA, 19 nt, Homo sapiens
  misc_RNA (1)...(19): siRNA sense strand
cgggaaacccucacaucua

SEQ ID NO: 1966746 - RNA, 19 nt, Homo sapiens
  misc_RNA (1)...(19): siRNA sense strand
caaggagaacuucaacaau

SEQ ID NO: 1966747 - RNA, 19 nt, Homo sapiens
  misc_RNA (1)...(19): siRNA sense strand
ugagauuucuguuccacau

SEQ ID NO: 1966748 - RNA, 19 nt, Homo sapiens
  misc_RNA (1)...(19): siRNA sense strand
gauuucuguuccacaugua

SEQ ID NO: 1966749 - RNA, 19 nt, Homo sapiens
  misc_RNA (1)...(19): siRNA sense strand
gaagcugagauuucuguuc

SEQ ID NO: 1966750 - RNA, 19 nt, Homo sapiens
  misc_RNA (1)...(19): siRNA sense strand
aggagaacuucaacaaugu

SEQ ID NO: 1966751 - RNA, 19 nt, Homo sapiens
  misc_RNA (1)...(19): siRNA sense strand
gcaagaccggcuucucauc

SEQ ID NO: 1966752 - RNA, 19 nt, Homo sapiens
  misc_RNA (1)...(19): siRNA sense strand
ugaccaucauguccuacuu

SEQ ID NO: 1966753 - RNA, 19 nt, Homo sapiens
  misc_RNA (1)...(19): siRNA sense strand
cuggaagaauaucgaaaug

SEQ ID NO: 1966754 - RNA, 19 nt, Homo sapiens
  misc_RNA (1)...(19): siRNA sense strand
uggccuggcugaugagauc

SEQ ID NO: 1966755 - RNA, 19 nt, Homo sapiens
  misc_RNA (1)...(19): siRNA sense strand
agauuucuguuccacaugu

SEQ ID NO: 1966756 - RNA, 19 nt, Homo sapiens
  misc_RNA (1)...(19): siRNA sense strand
aaggagaagcugagauuuc

SEQ ID NO: 1966757 - RNA, 19 nt, Homo sapiens
  misc_RNA (1)...(19): siRNA sense strand
ggaaacccucacaucuaga

SEQ ID NO: 1966758 - RNA, 19 nt, Homo sapiens
  misc_RNA (1)...(19): siRNA sense strand
gaccaucauguccuacuuc

SEQ ID NO: 1966759 - RNA, 19 nt, Homo sapiens
  misc_RNA (1)...(19): siRNA sense strand
ggagaacuucaacaauguc

SEQ ID NO: 1966760 - RNA, 19 nt, Homo sapiens
  misc_RNA (1)...(19): siRNA sense strand
ggacuuccugaccaucaug

SEQ ID NO: 1966761 - RNA, 19 nt, Homo sapiens
  misc_RNA (1)...(19): siRNA sense strand
ucccggaccuggagcucaa

SEQ ID NO: 1966762 - RNA, 19 nt, Homo sapiens
  misc_RNA (1)...(19): siRNA sense strand
caaaguccauugcuaaguu

SEQ ID NO: 1966763 - RNA, 19 nt, Homo sapiens
  misc_RNA (1)...(19): siRNA sense strand
gaauggauccugaugauau

SEQ ID NO: 1966764 - RNA, 19 nt, Homo sapiens
  misc_RNA (1)...(19): siRNA sense strand
cagcuguccuccagucuua

SEQ ID NO: 1966765 - RNA, 19 nt, Homo sapiens
  misc_RNA (1)...(19): siRNA sense strand
ucacaaaguccauugcuaa

SEQ ID NO: 1966766 - RNA, 19 nt, Homo sapiens
  misc_RNA (1)...(19): siRNA sense strand
gaugacaaauacaccuuga

SEQ ID NO: 1966767 - RNA, 19 nt, Homo sapiens
  misc_RNA (1)...(19): siRNA sense strand
gaccauuuauaccucauau

SEQ ID NO: 1966768 - RNA, 19 nt, Homo sapiens
  misc_RNA (1)...(19): siRNA sense strand
ccaugacagucuugccaua

SEQ ID NO: 1966769 - RNA, 19 nt, Homo sapiens
  misc_RNA (1)...(19): siRNA sense strand
ggaauggauccugaugaua

SEQ ID NO: 1966770 - RNA, 19 nt, Homo sapiens
  misc_RNA (1)...(19): siRNA sense strand
gggauucugaccauuuaua

SEQ ID NO: 1966771 - RNA, 19 nt, Homo sapiens
  misc_RNA (1)...(19): siRNA sense strand
gaagccgaguucacaaagu

SEQ ID NO: 1966772 - RNA, 19 nt, Homo sapiens
  misc_RNA (1)...(19): siRNA sense strand
aaaguccauugcuaaguuu

SEQ ID NO: 1966773 - RNA, 19 nt, Homo sapiens
  misc_RNA (1)...(19): siRNA sense strand
ugacagucuugccauagaa

SEQ ID NO: 1966774 - RNA, 19 nt, Homo sapiens
  misc_RNA (1)...(19): siRNA sense strand
aauggauccugaugauauu

SEQ ID NO: 1966775 - RNA, 19 nt, Homo sapiens
  misc_RNA (1)...(19): siRNA sense strand
gggaagccgaguucacaaa

SEQ ID NO: 1966776 - RNA, 19 nt, Homo sapiens
  misc_RNA (1)...(19): siRNA sense strand
ugacaaauacaccuugaag

SEQ ID NO: 1966777 - RNA, 19 nt, Homo sapiens
  misc_RNA (1)...(19): siRNA sense strand
gugggacacuggucaugga

SEQ ID NO: 1966778 - RNA, 19 nt, Homo sapiens
  misc_RNA (1)...(19): siRNA sense strand
ggaagccgaguucacaaag

SEQ ID NO: 1966779 - RNA, 19 nt, Homo sapiens
  misc_RNA (1)...(19): siRNA sense strand
ugugugucauauccuauuu

SEQ ID NO: 1966780 - RNA, 19 nt, Homo sapiens
  misc_RNA (1)...(19): siRNA sense strand
acaaauacaccuugaagcu

SEQ ID NO: 1966781 - RNA, 19 nt, Homo sapiens
  misc_RNA (1)...(19): siRNA sense strand
aagccgaguucacaaaguc

SEQ ID NO: 1966782 - RNA, 19 nt, Homo sapiens
  misc_RNA (1)...(19): siRNA sense strand
gcagcuguccuccagucuu

SEQ ID NO: 1966783 - RNA, 19 nt, Homo sapiens
  misc_RNA (1)...(19): siRNA sense strand
gacagucuugccauagaaa

SEQ ID NO: 1966784 - RNA, 19 nt, Homo sapiens
  misc_RNA (1)...(19): siRNA sense strand
gcgggaagccgaguucaca

SEQ ID NO: 1966785 - RNA, 19 nt, Homo sapiens
  misc_RNA (1)...(19): siRNA sense strand
ggauucugaccauuuauac

SEQ ID NO: 1966786 - RNA, 19 nt, Homo sapiens
  misc_RNA (1)...(19): siRNA sense strand
gcuguccuccagucuuaaa

SEQ ID NO: 1966787 - RNA, 19 nt, Homo sapiens
  misc_RNA (1)...(19): siRNA sense strand
ggauccugaugauauuugg

SEQ ID NO: 1966788 - RNA, 19 nt, Homo sapiens
  misc_RNA (1)...(19): siRNA sense strand
uucacaaaguccauugcua

SEQ ID NO: 1966789 - RNA, 19 nt, Homo sapiens
  misc_RNA (1)...(19): siRNA sense strand
gagauaaacugaagaucaa

SEQ ID NO: 1966790 - RNA, 19 nt, Homo sapiens
  misc_RNA (1)...(19): siRNA sense strand
uguccgagcugcaguauua

SEQ ID NO: 1966791 - RNA, 19 nt, Homo sapiens
  misc_RNA (1)...(19): siRNA sense strand
gaagauaucaagugcugua

SEQ ID NO: 1966792 - RNA, 19 nt, Homo sapiens
  misc_RNA (1)...(19): siRNA sense strand
ggacaaaucaguucucugu

SEQ ID NO: 1966793 - RNA, 19 nt, Homo sapiens
  misc_RNA (1)...(19): siRNA sense strand
ucaauaagguggccggaaa

SEQ ID NO: 1966794 - RNA, 19 nt, Homo sapiens
  misc_RNA (1)...(19): siRNA sense strand
ggagauaaacugaagauca

SEQ ID NO: 1966795 - RNA, 19 nt, Homo sapiens
  misc_RNA (1)...(19): siRNA sense strand
gaagguggacggagaggua

SEQ ID NO: 1966796 - RNA, 19 nt, Homo sapiens
  misc_RNA (1)...(19): siRNA sense strand
gauaucaagugcuguaaca

SEQ ID NO: 1966797 - RNA, 19 nt, Homo sapiens
  misc_RNA (1)...(19): siRNA sense strand
acaaaucaguucucuguga

SEQ ID NO: 1966798 - RNA, 19 nt, Homo sapiens
  misc_RNA (1)...(19): siRNA sense strand
ggaggacuauccaggcauu

SEQ ID NO: 1966799 - RNA, 19 nt, Homo sapiens
  misc_RNA (1)...(19): siRNA sense strand
caacaugacccacuacauc

SEQ ID NO: 1966800 - RNA, 19 nt, Homo sapiens
  misc_RNA (1)...(19): siRNA sense strand
gaccagacaugagaagguu

SEQ ID NO: 1966801 - RNA, 19 nt, Homo sapiens
  misc_RNA (1)...(19): siRNA sense strand
uaugagcucucgcccauga

SEQ ID NO: 1966802 - RNA, 19 nt, Homo sapiens
  misc_RNA (1)...(19): siRNA sense strand
gaacccagauacuauugag

SEQ ID NO: 1966803 - RNA, 19 nt, Homo sapiens
  misc_RNA (1)...(19): siRNA sense strand
gagagguacugaggacaaa

SEQ ID NO: 1966804 - RNA, 19 nt, Homo sapiens
  misc_RNA (1)...(19): siRNA sense strand
ggcaugagcuugggaaagu

SEQ ID NO: 1966805 - RNA, 19 nt, Homo sapiens
  misc_RNA (1)...(19): siRNA sense strand
ccagguguauggcuucuug

SEQ ID NO: 1966806 - RNA, 19 nt, Homo sapiens
  misc_RNA (1)...(19): siRNA sense strand
caagaacccagauacuauu

SEQ ID NO: 1966807 - RNA, 19 nt, Homo sapiens
  misc_RNA (1)...(19): siRNA sense strand
uaacaccugugaagaugug

SEQ ID NO: 1966808 - RNA, 19 nt, Homo sapiens
  misc_RNA (1)...(19): siRNA sense strand
ggaggcauaucgccguaga

SEQ ID NO: 1966809 - RNA, 19 nt, Homo sapiens
  misc_RNA (1)...(19): siRNA sense strand
ucaagaacccagauacuau

SEQ ID NO: 1966810 - RNA, 19 nt, Homo sapiens
  misc_RNA (1)...(19): siRNA sense strand
gugccuaucugaguauuga

SEQ ID NO: 1966811 - RNA, 19 nt, Homo sapiens
  misc_RNA (1)...(19): siRNA sense strand
gcacgagccauccagaaga

SEQ ID NO: 1966812 - RNA, 19 nt, Homo sapiens
  misc_RNA (1)...(19): siRNA sense strand
uaagguggccggaaacuuc

SEQ ID NO: 1966813 - RNA, 19 nt, Homo sapiens
  misc_RNA (1)...(19): siRNA sense strand
ucaagcaacgacuagauaa

SEQ ID NO: 1966814 - RNA, 19 nt, Homo sapiens
  misc_RNA (1)...(19): siRNA sense strand
cacaguggcuggacucauc

SEQ ID NO: 1966815 - RNA, 19 nt, Homo sapiens
  misc_RNA (1)...(19): siRNA sense strand
ggagagguacugaggacaa

SEQ ID NO: 1966816 - RNA, 19 nt, Homo sapiens
  misc_RNA (1)...(19): siRNA sense strand
gaguauugaugccauggau

SEQ ID NO: 1966817 - RNA, 19 nt, Homo sapiens
  misc_RNA (1)...(19): siRNA sense strand
uggugaagcugacggagaa

SEQ ID NO: 1966818 - RNA, 19 nt, Homo sapiens
  misc_RNA (1)...(19): siRNA sense strand
caagcaacgacuagauaaa

SEQ ID NO: 1966819 - RNA, 19 nt, Homo sapiens
  misc_RNA (1)...(19): siRNA sense strand
cacgagccauccagaagaa

SEQ ID NO: 1966820 - RNA, 19 nt, Homo sapiens
  misc_RNA (1)...(19): siRNA sense strand
uguaacaccugugaagaug

SEQ ID NO: 1966821 - RNA, 19 nt, Homo sapiens
  misc_RNA (1)...(19): siRNA sense strand
uggcuggacucaucgauuc

SEQ ID NO: 1966822 - RNA, 19 nt, Homo sapiens
  misc_RNA (1)...(19): siRNA sense strand
gaggacaaaucaguucucu

SEQ ID NO: 1966823 - RNA, 19 nt, Homo sapiens
  misc_RNA (1)...(19): siRNA sense strand
ugcaggagcagaagaauga

SEQ ID NO: 1966824 - RNA, 19 nt, Homo sapiens
  misc_RNA (1)...(19): siRNA sense strand
gcaacgacuagauaaagau

SEQ ID NO: 1966825 - RNA, 19 nt, Homo sapiens
  misc_RNA (1)...(19): siRNA sense strand
ucgauucgcucaucuacca

SEQ ID NO: 1966826 - RNA, 19 nt, Homo sapiens
  misc_RNA (1)...(19): siRNA sense strand
ccuccaugauguuccagua

SEQ ID NO: 1966827 - RNA, 19 nt, Homo sapiens
  misc_RNA (1)...(19): siRNA sense strand
gugcugaggcagaagauau

SEQ ID NO: 1966828 - RNA, 19 nt, Homo sapiens
  misc_RNA (1)...(19): siRNA sense strand
gagucuucguccucuauga

SEQ ID NO: 1966829 - RNA, 19 nt, Homo sapiens
  misc_RNA (1)...(19): siRNA sense strand
gcuuuggccuugacaacau

SEQ ID NO: 1966830 - RNA, 19 nt, Homo sapiens
  misc_RNA (1)...(19): siRNA sense strand
guauugaugccauggaugu

SEQ ID NO: 1966831 - RNA, 19 nt, Homo sapiens
  misc_RNA (1)...(19): siRNA sense strand
caacgacuagauaaagaug

SEQ ID NO: 1966832 - RNA, 19 nt, Homo sapiens
  misc_RNA (1)...(19): siRNA sense strand
gauaaacugaagaucaaca

SEQ ID NO: 1966833 - RNA, 19 nt, Homo sapiens
  misc_RNA (1)...(19): siRNA sense strand
ggacuauccaggcauugug

SEQ ID NO: 1966834 - RNA, 19 nt, Homo sapiens
  misc_RNA (1)...(19): siRNA sense strand
acaucaacaugacccacua

SEQ ID NO: 1966835 - RNA, 19 nt, Homo sapiens
  misc_RNA (1)...(19): siRNA sense strand
gcagagcuuuggccuugac

SEQ ID NO: 1966836 - RNA, 19 nt, Homo sapiens
  misc_RNA (1)...(19): siRNA sense strand
ccuugugccuaucugagua

SEQ ID NO: 1966837 - RNA, 19 nt, Homo sapiens
  misc_RNA (1)...(19): siRNA sense strand
gcgccaccgugaccauugu

SEQ ID NO: 1966838 - RNA, 19 nt, Homo sapiens
  misc_RNA (1)...(19): siRNA sense strand
augagaagguugccaaugg

SEQ ID NO: 1966839 - RNA, 19 nt, Homo sapiens
  misc_RNA (1)...(19): siRNA sense strand
ggauguggccggagaacag

SEQ ID NO: 1966840 - RNA, 19 nt, Homo sapiens
  misc_RNA (1)...(19): siRNA sense strand
ccaugauguuccaguacuu

SEQ ID NO: 1966841 - RNA, 19 nt, Homo sapiens
  misc_RNA (1)...(19): siRNA sense strand
agcaacgacuagauaaaga

SEQ ID NO: 1966842 - RNA, 19 nt, Homo sapiens
  misc_RNA (1)...(19): siRNA sense strand
ggugugugcgccaucauug

SEQ ID NO: 1966843 - RNA, 19 nt, Homo sapiens
  misc_RNA (1)...(19): siRNA sense strand
gaagaugcaggagcagaag

SEQ ID NO: 1966844 - RNA, 19 nt, Homo sapiens
  misc_RNA (1)...(19): siRNA sense strand
agaagaugcaggagcagaa

SEQ ID NO: 1966845 - RNA, 19 nt, Homo sapiens
  misc_RNA (1)...(19): siRNA sense strand
gagguacugaggacaaauc

SEQ ID NO: 1966846 - RNA, 19 nt, Homo sapiens
  misc_RNA (1)...(19): siRNA sense strand
gguguauggcuucuuggaa

SEQ ID NO: 1966847 - RNA, 19 nt, Homo sapiens
  misc_RNA (1)...(19): siRNA sense strand
gcuguaacaccugugaaga

SEQ ID NO: 1966848 - RNA, 19 nt, Homo sapiens
  misc_RNA (1)...(19): siRNA sense strand
ucaguggccuucucaugcu

SEQ ID NO: 1966849 - RNA, 19 nt, Homo sapiens
  misc_RNA (1)...(19): siRNA sense strand
caugauguuccaguacuuu

SEQ ID NO: 1966850 - RNA, 19 nt, Homo sapiens
  misc_RNA (1)...(19): siRNA sense strand
uucaagcaacgacuagaua

SEQ ID NO: 1966851 - RNA, 19 nt, Homo sapiens
  misc_RNA (1)...(19): siRNA sense strand
gauguuccaguacuuugug

SEQ ID NO: 1966852 - RNA, 19 nt, Homo sapiens
  misc_RNA (1)...(19): siRNA sense strand
gacuauccaggcauuguga

SEQ ID NO: 1966853 - RNA, 19 nt, Homo sapiens
  misc_RNA (1)...(19): siRNA sense strand
cuacauccagcaccuguca

SEQ ID NO: 1966854 - RNA, 19 nt, Homo sapiens
  misc_RNA (1)...(19): siRNA sense strand
uucaagaacccagauacua

SEQ ID NO: 1966855 - RNA, 19 nt, Homo sapiens
  misc_RNA (1)...(19): siRNA sense strand
aagaugugcgggaggcaua

SEQ ID NO: 1966856 - RNA, 19 nt, Homo sapiens
  misc_RNA (1)...(19): siRNA sense strand
guucaagcaacgacuagau

SEQ ID NO: 1966857 - RNA, 19 nt, Homo sapiens
  misc_RNA (1)...(19): siRNA sense strand
acucaucgauucgcucauc

SEQ ID NO: 1966858 - RNA, 19 nt, Homo sapiens
  misc_RNA (1)...(19): siRNA sense strand
ggaccacaccaaugucacu

SEQ ID NO: 1966859 - RNA, 19 nt, Homo sapiens
  misc_RNA (1)...(19): siRNA sense strand
gcaugagcuugggaaaguc

SEQ ID NO: 1966860 - RNA, 19 nt, Homo sapiens
  misc_RNA (1)...(19): siRNA sense strand
cagcacgagccauccagaa

SEQ ID NO: 1966861 - RNA, 19 nt, Homo sapiens
  misc_RNA (1)...(19): siRNA sense strand
uggggaagcugaagcaguu

SEQ ID NO: 1966862 - RNA, 19 nt, Homo sapiens
  misc_RNA (1)...(19): siRNA sense strand
gagauaaacugaagaucaa

SEQ ID NO: 1966863 - RNA, 19 nt, Homo sapiens
  misc_RNA (1)...(19): siRNA sense strand
uguccgagcugcaguauua

SEQ ID NO: 1966864 - RNA, 19 nt, Homo sapiens
  misc_RNA (1)...(19): siRNA sense strand
gaagauaucaagugcugua

SEQ ID NO: 1966865 - RNA, 19 nt, Homo sapiens
  misc_RNA (1)...(19): siRNA sense strand
ggacaaaucaguucucugu

SEQ ID NO: 1966866 - RNA, 19 nt, Homo sapiens
  misc_RNA (1)...(19): siRNA sense strand
ucaauaagguggccggaaa

SEQ ID NO: 1966867 - RNA, 19 nt, Homo sapiens
  misc_RNA (1)...(19): siRNA sense strand
ggagauaaacugaagauca

SEQ ID NO: 1966868 - RNA, 19 nt, Homo sapiens
  misc_RNA (1)...(19): siRNA sense strand
gaagguggacggagaggua

SEQ ID NO: 1966869 - RNA, 19 nt, Homo sapiens
  misc_RNA (1)...(19): siRNA sense strand
gauaucaagugcuguaaca

SEQ ID NO: 1966870 - RNA, 19 nt, Homo sapiens
  misc_RNA (1)...(19): siRNA sense strand
acaaaucaguucucuguga

SEQ ID NO: 1966871 - RNA, 19 nt, Homo sapiens
  misc_RNA (1)...(19): siRNA sense strand
ggaggacuauccaggcauu

SEQ ID NO: 1966872 - RNA, 19 nt, Homo sapiens
  misc_RNA (1)...(19): siRNA sense strand
caacaugacccacuacauc

SEQ ID NO: 1966873 - RNA, 19 nt, Homo sapiens
  misc_RNA (1)...(19): siRNA sense strand
gaccagacaugagaagguu

SEQ ID NO: 1966874 - RNA, 19 nt, Homo sapiens
  misc_RNA (1)...(19): siRNA sense strand
uaugagcucucgcccauga

SEQ ID NO: 1966875 - RNA, 19 nt, Homo sapiens
  misc_RNA (1)...(19): siRNA sense strand
gaacccagauacuauugag

SEQ ID NO: 1966876 - RNA, 19 nt, Homo sapiens
  misc_RNA (1)...(19): siRNA sense strand
gagagguacugaggacaaa

SEQ ID NO: 1966877 - RNA, 19 nt, Homo sapiens
  misc_RNA (1)...(19): siRNA sense strand
ggcaugagcuugggaaagu

SEQ ID NO: 1966878 - RNA, 19 nt, Homo sapiens
  misc_RNA (1)...(19): siRNA sense strand
ccagguguauggcuucuug

SEQ ID NO: 1966879 - RNA, 19 nt, Homo sapiens
  misc_RNA (1)...(19): siRNA sense strand
caagaacccagauacuauu

SEQ ID NO: 1966880 - RNA, 19 nt, Homo sapiens
  misc_RNA (1)...(19): siRNA sense strand
uaacaccugugaagaugug

SEQ ID NO: 1966881 - RNA, 19 nt, Homo sapiens
  misc_RNA (1)...(19): siRNA sense strand
ggaggcauaucgccguaga

SEQ ID NO: 1966882 - RNA, 19 nt, Homo sapiens
  misc_RNA (1)...(19): siRNA sense strand
ucaagaacccagauacuau

SEQ ID NO: 1966883 - RNA, 19 nt, Homo sapiens
  misc_RNA (1)...(19): siRNA sense strand
gugccuaucugaguauuga

SEQ ID NO: 1966884 - RNA, 19 nt, Homo sapiens
  misc_RNA (1)...(19): siRNA sense strand
gcacgagccauccagaaga

SEQ ID NO: 1966885 - RNA, 19 nt, Homo sapiens
  misc_RNA (1)...(19): siRNA sense strand
uaagguggccggaaacuuc

SEQ ID NO: 1966886 - RNA, 19 nt, Homo sapiens
  misc_RNA (1)...(19): siRNA sense strand
ucaagcaacgacuagauaa

SEQ ID NO: 1966887 - RNA, 19 nt, Homo sapiens
  misc_RNA (1)...(19): siRNA sense strand
cacaguggcuggacucauc

SEQ ID NO: 1966888 - RNA, 19 nt, Homo sapiens
  misc_RNA (1)...(19): siRNA sense strand
ggagagguacugaggacaa

SEQ ID NO: 1966889 - RNA, 19 nt, Homo sapiens
  misc_RNA (1)...(19): siRNA sense strand
gaguauugaugccauggau

SEQ ID NO: 1966890 - RNA, 19 nt, Homo sapiens
  misc_RNA (1)...(19): siRNA sense strand
uggugaagcugacggagaa

SEQ ID NO: 1966891 - RNA, 19 nt, Homo sapiens
  misc_RNA (1)...(19): siRNA sense strand
caagcaacgacuagauaaa

SEQ ID NO: 1966892 - RNA, 19 nt, Homo sapiens
  misc_RNA (1)...(19): siRNA sense strand
cacgagccauccagaagaa

SEQ ID NO: 1966893 - RNA, 19 nt, Homo sapiens
  misc_RNA (1)...(19): siRNA sense strand
uguaacaccugugaagaug

SEQ ID NO: 1966894 - RNA, 19 nt, Homo sapiens
  misc_RNA (1)...(19): siRNA sense strand
uggcuggacucaucgauuc

SEQ ID NO: 1966895 - RNA, 19 nt, Homo sapiens
  misc_RNA (1)...(19): siRNA sense strand
gaggacaaaucaguucucu

SEQ ID NO: 1966896 - RNA, 19 nt, Homo sapiens
  misc_RNA (1)...(19): siRNA sense strand
ugcaggagcagaagaauga

SEQ ID NO: 1966897 - RNA, 19 nt, Homo sapiens
  misc_RNA (1)...(19): siRNA sense strand
gcaacgacuagauaaagau

SEQ ID NO: 1966898 - RNA, 19 nt, Homo sapiens
  misc_RNA (1)...(19): siRNA sense strand
ucgauucgcucaucuacca

SEQ ID NO: 1966899 - RNA, 19 nt, Homo sapiens
  misc_RNA (1)...(19): siRNA sense strand
ccuccaugauguuccagua

SEQ ID NO: 1966900 - RNA, 19 nt, Homo sapiens
  misc_RNA (1)...(19): siRNA sense strand
gugcugaggcagaagauau

SEQ ID NO: 1966901 - RNA, 19 nt, Homo sapiens
  misc_RNA (1)...(19): siRNA sense strand
gagucuucguccucuauga

SEQ ID NO: 1966902 - RNA, 19 nt, Homo sapiens
  misc_RNA (1)...(19): siRNA sense strand
gcuuuggccuugacaacau

SEQ ID NO: 1966903 - RNA, 19 nt, Homo sapiens
  misc_RNA (1)...(19): siRNA sense strand
guauugaugccauggaugu

SEQ ID NO: 1966904 - RNA, 19 nt, Homo sapiens
  misc_RNA (1)...(19): siRNA sense strand
caacgacuagauaaagaug

SEQ ID NO: 1966905 - RNA, 19 nt, Homo sapiens
  misc_RNA (1)...(19): siRNA sense strand
gauaaacugaagaucaaca

SEQ ID NO: 1966906 - RNA, 19 nt, Homo sapiens
  misc_RNA (1)...(19): siRNA sense strand
ggacuauccaggcauugug

SEQ ID NO: 1966907 - RNA, 19 nt, Homo sapiens
  misc_RNA (1)...(19): siRNA sense strand
acaucaacaugacccacua

SEQ ID NO: 1966908 - RNA, 19 nt, Homo sapiens
  misc_RNA (1)...(19): siRNA sense strand
gcagagcuuuggccuugac

SEQ ID NO: 1966909 - RNA, 19 nt, Homo sapiens
  misc_RNA (1)...(19): siRNA sense strand
ccuugugccuaucugagua

SEQ ID NO: 1966910 - RNA, 19 nt, Homo sapiens
  misc_RNA (1)...(19): siRNA sense strand
gcgccaccgugaccauugu

SEQ ID NO: 1966911 - RNA, 19 nt, Homo sapiens
  misc_RNA (1)...(19): siRNA sense strand
augagaagguugccaaugg

SEQ ID NO: 1966912 - RNA, 19 nt, Homo sapiens
  misc_RNA (1)...(19): siRNA sense strand
ggauguggccggagaacag

SEQ ID NO: 1966913 - RNA, 19 nt, Homo sapiens
  misc_RNA (1)...(19): siRNA sense strand
ccaugauguuccaguacuu

SEQ ID NO: 1966914 - RNA, 19 nt, Homo sapiens
  misc_RNA (1)...(19): siRNA sense strand
agcaacgacuagauaaaga

SEQ ID NO: 1966915 - RNA, 19 nt, Homo sapiens
  misc_RNA (1)...(19): siRNA sense strand
ggugugugcgccaucauug

SEQ ID NO: 1966916 - RNA, 19 nt, Homo sapiens
  misc_RNA (1)...(19): siRNA sense strand
gaagaugcaggagcagaag

SEQ ID NO: 1966917 - RNA, 19 nt, Homo sapiens
  misc_RNA (1)...(19): siRNA sense strand
agaagaugcaggagcagaa

SEQ ID NO: 1966918 - RNA, 19 nt, Homo sapiens
  misc_RNA (1)...(19): siRNA sense strand
gagguacugaggacaaauc

SEQ ID NO: 1966919 - RNA, 19 nt, Homo sapiens
  misc_RNA (1)...(19): siRNA sense strand
gguguauggcuucuuggaa

SEQ ID NO: 1966920 - RNA, 19 nt, Homo sapiens
  misc_RNA (1)...(19): siRNA sense strand
gcuguaacaccugugaaga

SEQ ID NO: 1966921 - RNA, 19 nt, Homo sapiens
  misc_RNA (1)...(19): siRNA sense strand
ucaguggccuucucaugcu

SEQ ID NO: 1966922 - RNA, 19 nt, Homo sapiens
  misc_RNA (1)...(19): siRNA sense strand
caugauguuccaguacuuu

SEQ ID NO: 1966923 - RNA, 19 nt, Homo sapiens
  misc_RNA (1)...(19): siRNA sense strand
uucaagcaacgacuagaua

SEQ ID NO: 1966924 - RNA, 19 nt, Homo sapiens
  misc_RNA (1)...(19): siRNA sense strand
gauguuccaguacuuugug

SEQ ID NO: 1966925 - RNA, 19 nt, Homo sapiens
  misc_RNA (1)...(19): siRNA sense strand
gacuauccaggcauuguga

SEQ ID NO: 1966926 - RNA, 19 nt, Homo sapiens
  misc_RNA (1)...(19): siRNA sense strand
cuacauccagcaccuguca

SEQ ID NO: 1966927 - RNA, 19 nt, Homo sapiens
  misc_RNA (1)...(19): siRNA sense strand
uucaagaacccagauacua

SEQ ID NO: 1966928 - RNA, 19 nt, Homo sapiens
  misc_RNA (1)...(19): siRNA sense strand
aagaugugcgggaggcaua

SEQ ID NO: 1966929 - RNA, 19 nt, Homo sapiens
  misc_RNA (1)...(19): siRNA sense strand
guucaagcaacgacuagau

SEQ ID NO: 1966930 - RNA, 19 nt, Homo sapiens
  misc_RNA (1)...(19): siRNA sense strand
acucaucgauucgcucauc

SEQ ID NO: 1966931 - RNA, 19 nt, Homo sapiens
  misc_RNA (1)...(19): siRNA sense strand
ggaccacaccaaugucacu

SEQ ID NO: 1966932 - RNA, 19 nt, Homo sapiens
  misc_RNA (1)...(19): siRNA sense strand
gcaugagcuugggaaaguc

SEQ ID NO: 1966933 - RNA, 19 nt, Homo sapiens
  misc_RNA (1)...(19): siRNA sense strand
cagcacgagccauccagaa

SEQ ID NO: 1966934 - RNA, 19 nt, Homo sapiens
  misc_RNA (1)...(19): siRNA sense strand
uggggaagcugaagcaguu

SEQ ID NO: 1966935 - RNA, 19 nt, Homo sapiens
  misc_RNA (1)...(19): siRNA sense strand
gaaacaauuugcucuguaa

SEQ ID NO: 1966936 - RNA, 19 nt, Homo sapiens
  misc_RNA (1)...(19): siRNA sense strand
gcaagcuucugcaggauua

SEQ ID NO: 1966937 - RNA, 19 nt, Homo sapiens
  misc_RNA (1)...(19): siRNA sense strand
gcaaaggaaugagcagauu

SEQ ID NO: 1966938 - RNA, 19 nt, Homo sapiens
  misc_RNA (1)...(19): siRNA sense strand
caagagagacuccuacauu

SEQ ID NO: 1966939 - RNA, 19 nt, Homo sapiens
  misc_RNA (1)...(19): siRNA sense strand
gaaaaucaccucuuuauga

SEQ ID NO: 1966940 - RNA, 19 nt, Homo sapiens
  misc_RNA (1)...(19): siRNA sense strand
cagcagaagccaagaaaua

SEQ ID NO: 1966941 - RNA, 19 nt, Homo sapiens
  misc_RNA (1)...(19): siRNA sense strand
gacuauuacuugaugguua

SEQ ID NO: 1966942 - RNA, 19 nt, Homo sapiens
  misc_RNA (1)...(19): siRNA sense strand
caagaacguuauuggauau

SEQ ID NO: 1966943 - RNA, 19 nt, Homo sapiens
  misc_RNA (1)...(19): siRNA sense strand
cagaggagaugcuucaaga

SEQ ID NO: 1966944 - RNA, 19 nt, Homo sapiens
  misc_RNA (1)...(19): siRNA sense strand
gaaccuguguguagugugu

SEQ ID NO: 1966945 - RNA, 19 nt, Homo sapiens
  misc_RNA (1)...(19): siRNA sense strand
gauuauggccucguuguua

SEQ ID NO: 1966946 - RNA, 19 nt, Homo sapiens
  misc_RNA (1)...(19): siRNA sense strand
cagaggaccagguaauuua

SEQ ID NO: 1966947 - RNA, 19 nt, Homo sapiens
  misc_RNA (1)...(19): siRNA sense strand
ggagaaaagucuuggaaaa

SEQ ID NO: 1966948 - RNA, 19 nt, Homo sapiens
  misc_RNA (1)...(19): siRNA sense strand
acacagacguggucacaga

SEQ ID NO: 1966949 - RNA, 19 nt, Homo sapiens
  misc_RNA (1)...(19): siRNA sense strand
gagaaacaauuugcucugu

SEQ ID NO: 1966950 - RNA, 19 nt, Homo sapiens
  misc_RNA (1)...(19): siRNA sense strand
caacagaaucucagcagaa

SEQ ID NO: 1966951 - RNA, 19 nt, Homo sapiens
  misc_RNA (1)...(19): siRNA sense strand
ggagugggaugcucagaag

SEQ ID NO: 1966952 - RNA, 19 nt, Homo sapiens
  misc_RNA (1)...(19): siRNA sense strand
agaaacaauuugcucugua

SEQ ID NO: 1966953 - RNA, 19 nt, Homo sapiens
  misc_RNA (1)...(19): siRNA sense strand
gaagaaaagcucaguggua

SEQ ID NO: 1966954 - RNA, 19 nt, Homo sapiens
  misc_RNA (1)...(19): siRNA sense strand
aaagagaaccuguguguag

SEQ ID NO: 1966955 - RNA, 19 nt, Homo sapiens
  misc_RNA (1)...(19): siRNA sense strand
caacuacuaugacaaccau

SEQ ID NO: 1966956 - RNA, 19 nt, Homo sapiens
  misc_RNA (1)...(19): siRNA sense strand
gccaugccauuuccaacua

SEQ ID NO: 1966957 - RNA, 19 nt, Homo sapiens
  misc_RNA (1)...(19): siRNA sense strand
caacugggaugcugagacu

SEQ ID NO: 1966958 - RNA, 19 nt, Homo sapiens
  misc_RNA (1)...(19): siRNA sense strand
agaccagaaucuccaauga

SEQ ID NO: 1966959 - RNA, 19 nt, Homo sapiens
  misc_RNA (1)...(19): siRNA sense strand
ccucugcacuugugauaga

SEQ ID NO: 1966960 - RNA, 19 nt, Homo sapiens
  misc_RNA (1)...(19): siRNA sense strand
accagaaucuccaaugaaa

SEQ ID NO: 1966961 - RNA, 19 nt, Homo sapiens
  misc_RNA (1)...(19): siRNA sense strand
gcaggauuauggccucguu

SEQ ID NO: 1966962 - RNA, 19 nt, Homo sapiens
  misc_RNA (1)...(19): siRNA sense strand
uuggugagcuggugaguga

SEQ ID NO: 1966963 - RNA, 19 nt, Homo sapiens
  misc_RNA (1)...(19): siRNA sense strand
aagagagacuccuacauuc

SEQ ID NO: 1966964 - RNA, 19 nt, Homo sapiens
  misc_RNA (1)...(19): siRNA sense strand
aagcuaaucuguggaggaa

SEQ ID NO: 1966965 - RNA, 19 nt, Homo sapiens
  misc_RNA (1)...(19): siRNA sense strand
gaccagaaucuccaaugaa

SEQ ID NO: 1966966 - RNA, 19 nt, Homo sapiens
  misc_RNA (1)...(19): siRNA sense strand
ggauacccuuucucuagga

SEQ ID NO: 1966967 - RNA, 19 nt, Homo sapiens
  misc_RNA (1)...(19): siRNA sense strand
uaagaagucuaagauggau

SEQ ID NO: 1966968 - RNA, 19 nt, Homo sapiens
  misc_RNA (1)...(19): siRNA sense strand
gcacuugugauagaagaaa

SEQ ID NO: 1966969 - RNA, 19 nt, Homo sapiens
  misc_RNA (1)...(19): siRNA sense strand
ugaagguggugcaguguca

SEQ ID NO: 1966970 - RNA, 19 nt, Homo sapiens
  misc_RNA (1)...(19): siRNA sense strand
gagaaccuguguguagugu

SEQ ID NO: 1966971 - RNA, 19 nt, Homo sapiens
  misc_RNA (1)...(19): siRNA sense strand
gcuaaucuguggaggaaaa

SEQ ID NO: 1966972 - RNA, 19 nt, Homo sapiens
  misc_RNA (1)...(19): siRNA sense strand
acaauuugcucuguaaugg

SEQ ID NO: 1966973 - RNA, 19 nt, Homo sapiens
  misc_RNA (1)...(19): siRNA sense strand
ucacagaggagaugcuuca

SEQ ID NO: 1966974 - RNA, 19 nt, Homo sapiens
  misc_RNA (1)...(19): siRNA sense strand
uuaaagagaaccugugugu

SEQ ID NO: 1966975 - RNA, 19 nt, Homo sapiens
  misc_RNA (1)...(19): siRNA sense strand
ccaaguggccugugugucu

SEQ ID NO: 1966976 - RNA, 19 nt, Homo sapiens
  misc_RNA (1)...(19): siRNA sense strand
agaagcugcuccggaaauu

SEQ ID NO: 1966977 - RNA, 19 nt, Homo sapiens
  misc_RNA (1)...(19): siRNA sense strand
cggagagccugccuacuca

SEQ ID NO: 1966978 - RNA, 19 nt, Homo sapiens
  misc_RNA (1)...(19): siRNA sense strand
gccagaaaaucaccucuuu

SEQ ID NO: 1966979 - RNA, 19 nt, Homo sapiens
  misc_RNA (1)...(19): siRNA sense strand
cagaagccaagaaauaaga

SEQ ID NO: 1966980 - RNA, 19 nt, Homo sapiens
  misc_RNA (1)...(19): siRNA sense strand
ugccagggaugcccagauu

SEQ ID NO: 1966981 - RNA, 19 nt, Homo sapiens
  misc_RNA (1)...(19): siRNA sense strand
caaaggaaugagcagauug

SEQ ID NO: 1966982 - RNA, 19 nt, Homo sapiens
  misc_RNA (1)...(19): siRNA sense strand
ucacagaggaccagguaau

SEQ ID NO: 1966983 - RNA, 19 nt, Homo sapiens
  misc_RNA (1)...(19): siRNA sense strand
uggagacuauuacuugaug

SEQ ID NO: 1966984 - RNA, 19 nt, Homo sapiens
  misc_RNA (1)...(19): siRNA sense strand
gauacccuuucucuaggaa

SEQ ID NO: 1966985 - RNA, 19 nt, Homo sapiens
  misc_RNA (1)...(19): siRNA sense strand
caaguggccugugugucuu

SEQ ID NO: 1966986 - RNA, 19 nt, Homo sapiens
  misc_RNA (1)...(19): siRNA sense strand
gcagaagccaagaaauaag

SEQ ID NO: 1966987 - RNA, 19 nt, Homo sapiens
  misc_RNA (1)...(19): siRNA sense strand
ccuggagacuauuacuuga

SEQ ID NO: 1966988 - RNA, 19 nt, Homo sapiens
  misc_RNA (1)...(19): siRNA sense strand
gcucagaagaugccagcaa

SEQ ID NO: 1966989 - RNA, 19 nt, Homo sapiens
  misc_RNA (1)...(19): siRNA sense strand
uaaagagaaccugugugua

SEQ ID NO: 1966990 - RNA, 19 nt, Homo sapiens
  misc_RNA (1)...(19): siRNA sense strand
acagaggaccagguaauuu

SEQ ID NO: 1966991 - RNA, 19 nt, Homo sapiens
  misc_RNA (1)...(19): siRNA sense strand
uaacacagacguggucaca

SEQ ID NO: 1966992 - RNA, 19 nt, Homo sapiens
  misc_RNA (1)...(19): siRNA sense strand
gacaucccauuucgaagca

SEQ ID NO: 1966993 - RNA, 19 nt, Homo sapiens
  misc_RNA (1)...(19): siRNA sense strand
ccagggaugcccagauuuc

SEQ ID NO: 1966994 - RNA, 19 nt, Homo sapiens
  misc_RNA (1)...(19): siRNA sense strand
gcaagagagacuccuacau

SEQ ID NO: 1966995 - RNA, 19 nt, Homo sapiens
  misc_RNA (1)...(19): siRNA sense strand
uguaguguguggcaagaga

SEQ ID NO: 1966996 - RNA, 19 nt, Homo sapiens
  misc_RNA (1)...(19): siRNA sense strand
cacaguagcuggagaaaag

SEQ ID NO: 1966997 - RNA, 19 nt, Homo sapiens
  misc_RNA (1)...(19): siRNA sense strand
gauuucaguggcucucuuu

SEQ ID NO: 1966998 - RNA, 19 nt, Homo sapiens
  misc_RNA (1)...(19): siRNA sense strand
caguggcucucuuucuuca

SEQ ID NO: 1966999 - RNA, 19 nt, Homo sapiens
  misc_RNA (1)...(19): siRNA sense strand
gccaagaaauaagaagucu

SEQ ID NO: 1967000 - RNA, 19 nt, Homo sapiens
  misc_RNA (1)...(19): siRNA sense strand
gggaagcaacagaaucuca

SEQ ID NO: 1967001 - RNA, 19 nt, Homo sapiens
  misc_RNA (1)...(19): siRNA sense strand
caucccauuucgaagcaaa

SEQ ID NO: 1967002 - RNA, 19 nt, Homo sapiens
  misc_RNA (1)...(19): siRNA sense strand
ggauuauggccucguuguu

SEQ ID NO: 1967003 - RNA, 19 nt, Homo sapiens
  misc_RNA (1)...(19): siRNA sense strand
ccauuuccaacuacuauga

SEQ ID NO: 1967004 - RNA, 19 nt, Homo sapiens
  misc_RNA (1)...(19): siRNA sense strand
guaccuggacaaaggcauu

SEQ ID NO: 1967005 - RNA, 19 nt, Homo sapiens
  misc_RNA (1)...(19): siRNA sense strand
gagcagauugggagaagag

SEQ ID NO: 1967006 - RNA, 19 nt, Homo sapiens
  misc_RNA (1)...(19): siRNA sense strand
uacccuuucucuaggaauu

SEQ ID NO: 1967007 - RNA, 19 nt, Homo sapiens
  misc_RNA (1)...(19): siRNA sense strand
ucucacagaggaccaggua

SEQ ID NO: 1967008 - RNA, 19 nt, Homo sapiens
  misc_RNA (1)...(19): siRNA sense strand
ggaccacaaccaucagaag

SEQ ID NO: 1967009 - RNA, 19 nt, Homo sapiens
  misc_RNA (1)...(19): siRNA sense strand
gaccacaguagcuggagaa

SEQ ID NO: 1967010 - RNA, 19 nt, Homo sapiens
  misc_RNA (1)...(19): siRNA sense strand
ggaauucaccuggagaaaa

SEQ ID NO: 1967011 - RNA, 19 nt, Homo sapiens
  misc_RNA (1)...(19): siRNA sense strand
guggcucucuuucuucauc

SEQ ID NO: 1967012 - RNA, 19 nt, Homo sapiens
  misc_RNA (1)...(19): siRNA sense strand
cagaagcugcuccggaaau

SEQ ID NO: 1967013 - RNA, 19 nt, Homo sapiens
  misc_RNA (1)...(19): siRNA sense strand
gcuugcgccugcuggaaga

SEQ ID NO: 1967014 - RNA, 19 nt, Homo sapiens
  misc_RNA (1)...(19): siRNA sense strand
cagaaaaucaccucuuuau

SEQ ID NO: 1967015 - RNA, 19 nt, Homo sapiens
  misc_RNA (1)...(19): siRNA sense strand
agcagaagccaagaaauaa

SEQ ID NO: 1967016 - RNA, 19 nt, Homo sapiens
  misc_RNA (1)...(19): siRNA sense strand
cagauugggagaagagguu

SEQ ID NO: 1967017 - RNA, 19 nt, Homo sapiens
  misc_RNA (1)...(19): siRNA sense strand
gaggaccagguaauuuaug

SEQ ID NO: 1967018 - RNA, 19 nt, Homo sapiens
  misc_RNA (1)...(19): siRNA sense strand
gaaauucggggaagaucuu

SEQ ID NO: 1967019 - RNA, 19 nt, Homo sapiens
  misc_RNA (1)...(19): siRNA sense strand
ggaccacaacucccacgau

SEQ ID NO: 1967020 - RNA, 19 nt, Homo sapiens
  misc_RNA (1)...(19): siRNA sense strand
aagagaaccuguguguagu

SEQ ID NO: 1967021 - RNA, 19 nt, Homo sapiens
  misc_RNA (1)...(19): siRNA sense strand
auaagaagucuaagaugga

SEQ ID NO: 1967022 - RNA, 19 nt, Homo sapiens
  misc_RNA (1)...(19): siRNA sense strand
uucaguggcucucuuucuu

SEQ ID NO: 1967023 - RNA, 19 nt, Homo sapiens
  misc_RNA (1)...(19): siRNA sense strand
gugggaugcucagaagaug

SEQ ID NO: 1967024 - RNA, 19 nt, Homo sapiens
  misc_RNA (1)...(19): siRNA sense strand
gagugaagagcccuuugug

SEQ ID NO: 1967025 - RNA, 19 nt, Homo sapiens
  misc_RNA (1)...(19): siRNA sense strand
agugguaccuggacaaagg

SEQ ID NO: 1967026 - RNA, 19 nt, Homo sapiens
  misc_RNA (1)...(19): siRNA sense strand
ggacagccccucugcacuu

SEQ ID NO: 1967027 - RNA, 19 nt, Homo sapiens
  misc_RNA (1)...(19): siRNA sense strand
uaacugcuuucuccaugcu

SEQ ID NO: 1967028 - RNA, 19 nt, Homo sapiens
  misc_RNA (1)...(19): siRNA sense strand
ccaagaaauaagaagucua

SEQ ID NO: 1967029 - RNA, 19 nt, Homo sapiens
  misc_RNA (1)...(19): siRNA sense strand
cacagaggaccagguaauu

SEQ ID NO: 1967030 - RNA, 19 nt, Homo sapiens
  misc_RNA (1)...(19): siRNA sense strand
ggagagaccccagaaaaca

SEQ ID NO: 1967031 - RNA, 19 nt, Homo sapiens
  misc_RNA (1)...(19): siRNA sense strand
gggaugcccagauuucagu

SEQ ID NO: 1967032 - RNA, 19 nt, Homo sapiens
  misc_RNA (1)...(19): siRNA sense strand
aacagaaucucagcagaag

SEQ ID NO: 1967033 - RNA, 19 nt, Homo sapiens
  misc_RNA (1)...(19): siRNA sense strand
ccauuucgaagcaaaggaa

SEQ ID NO: 1967034 - RNA, 19 nt, Homo sapiens
  misc_RNA (1)...(19): siRNA sense strand
uucuucaucuucuuggaua

SEQ ID NO: 1967035 - RNA, 19 nt, Homo sapiens
  misc_RNA (1)...(19): siRNA sense strand
guugaaguaucuccuuuaa

SEQ ID NO: 1967036 - RNA, 19 nt, Homo sapiens
  misc_RNA (1)...(19): siRNA sense strand
gcagaccuuucacuucgua

SEQ ID NO: 1967037 - RNA, 19 nt, Homo sapiens
  misc_RNA (1)...(19): siRNA sense strand
guagaagaaaguucagaua

SEQ ID NO: 1967038 - RNA, 19 nt, Homo sapiens
  misc_RNA (1)...(19): siRNA sense strand
uagaugaugucacaguuga

SEQ ID NO: 1967039 - RNA, 19 nt, Homo sapiens
  misc_RNA (1)...(19): siRNA sense strand
ugagaaaacuguagaagaa

SEQ ID NO: 1967040 - RNA, 19 nt, Homo sapiens
  misc_RNA (1)...(19): siRNA sense strand
acaggaaagugaaguauca

SEQ ID NO: 1967041 - RNA, 19 nt, Homo sapiens
  misc_RNA (1)...(19): siRNA sense strand
ggacgggcuuccucucaug

SEQ ID NO: 1967042 - RNA, 19 nt, Homo sapiens
  misc_RNA (1)...(19): siRNA sense strand
ugaccaaggugccagcuau

SEQ ID NO: 1967043 - RNA, 19 nt, Homo sapiens
  misc_RNA (1)...(19): siRNA sense strand
gcaaaguugucaucuaucc

SEQ ID NO: 1967044 - RNA, 19 nt, Homo sapiens
  misc_RNA (1)...(19): siRNA sense strand
gaacaguacacaagacucu

SEQ ID NO: 1967045 - RNA, 19 nt, Homo sapiens
  misc_RNA (1)...(19): siRNA sense strand
gaaguaucuccuuuaaaug

SEQ ID NO: 1967046 - RNA, 19 nt, Homo sapiens
  misc_RNA (1)...(19): siRNA sense strand
ggacuagacccagaucuuc

SEQ ID NO: 1967047 - RNA, 19 nt, Homo sapiens
  misc_RNA (1)...(19): siRNA sense strand
caaauugaaacaacucuca

SEQ ID NO: 1967048 - RNA, 19 nt, Homo sapiens
  misc_RNA (1)...(19): siRNA sense strand
gcagaacaguacacaagac

SEQ ID NO: 1967049 - RNA, 19 nt, Homo sapiens
  misc_RNA (1)...(19): siRNA sense strand
augcaaaguugucaucuau

SEQ ID NO: 1967050 - RNA, 19 nt, Homo sapiens
  misc_RNA (1)...(19): siRNA sense strand
caguugaaguaucuccuuu

SEQ ID NO: 1967051 - RNA, 19 nt, Homo sapiens
  misc_RNA (1)...(19): siRNA sense strand
ccagugauggcaauaagaa

SEQ ID NO: 1967052 - RNA, 19 nt, Homo sapiens
  misc_RNA (1)...(19): siRNA sense strand
uagccaaggauccaagaua

SEQ ID NO: 1967053 - RNA, 19 nt, Homo sapiens
  misc_RNA (1)...(19): siRNA sense strand
ugucacaguugaaguaucu

SEQ ID NO: 1967054 - RNA, 19 nt, Homo sapiens
  misc_RNA (1)...(19): siRNA sense strand
aaugauaucagaaggacua

SEQ ID NO: 1967055 - RNA, 19 nt, Homo sapiens
  misc_RNA (1)...(19): siRNA sense strand
gauccaagauaugccagau

SEQ ID NO: 1967056 - RNA, 19 nt, Homo sapiens
  misc_RNA (1)...(19): siRNA sense strand
cuucguauccaacaaauug

SEQ ID NO: 1967057 - RNA, 19 nt, Homo sapiens
  misc_RNA (1)...(19): siRNA sense strand
agccaaggauccaagauau

SEQ ID NO: 1967058 - RNA, 19 nt, Homo sapiens
  misc_RNA (1)...(19): siRNA sense strand
acacaagacucuggacuac

SEQ ID NO: 1967059 - RNA, 19 nt, Homo sapiens
  misc_RNA (1)...(19): siRNA sense strand
ccuagaugaugucacaguu

SEQ ID NO: 1967060 - RNA, 19 nt, Homo sapiens
  misc_RNA (1)...(19): siRNA sense strand
ccaacaaauugaaacaacu

SEQ ID NO: 1967061 - RNA, 19 nt, Homo sapiens
  misc_RNA (1)...(19): siRNA sense strand
acaagacucuggacuacag

SEQ ID NO: 1967062 - RNA, 19 nt, Homo sapiens
  misc_RNA (1)...(19): siRNA sense strand
cagcagaacaguacacaag

SEQ ID NO: 1967063 - RNA, 19 nt, Homo sapiens
  misc_RNA (1)...(19): siRNA sense strand
ugaugucacaguugaagua

SEQ ID NO: 1967064 - RNA, 19 nt, Homo sapiens
  misc_RNA (1)...(19): siRNA sense strand
ucaccagugucacaaaugg

SEQ ID NO: 1967065 - RNA, 19 nt, Homo sapiens
  misc_RNA (1)...(19): siRNA sense strand
uagaagaaaguucagauag

SEQ ID NO: 1967066 - RNA, 19 nt, Homo sapiens
  misc_RNA (1)...(19): siRNA sense strand
ccagauaucucaaaauggu

SEQ ID NO: 1967067 - RNA, 19 nt, Homo sapiens
  misc_RNA (1)...(19): siRNA sense strand
caaccacagcagaacagua

SEQ ID NO: 1967068 - RNA, 19 nt, Homo sapiens
  misc_RNA (1)...(19): siRNA sense strand
ggagaaacuggcagaccuu

SEQ ID NO: 1967069 - RNA, 19 nt, Homo sapiens
  misc_RNA (1)...(19): siRNA sense strand
agaagaaaguucagauagc

SEQ ID NO: 1967070 - RNA, 19 nt, Homo sapiens
  misc_RNA (1)...(19): siRNA sense strand
gagaaacuggcagaccuuu

SEQ ID NO: 1967071 - RNA, 19 nt, Homo sapiens
  misc_RNA (1)...(19): siRNA sense strand
ucacuucguauccaacaaa

SEQ ID NO: 1967072 - RNA, 19 nt, Homo sapiens
  misc_RNA (1)...(19): siRNA sense strand
caaguggguguaccaguga

SEQ ID NO: 1967073 - RNA, 19 nt, Homo sapiens
  misc_RNA (1)...(19): siRNA sense strand
uuaaaugucaccaguguca

SEQ ID NO: 1967074 - RNA, 19 nt, Homo sapiens
  misc_RNA (1)...(19): siRNA sense strand
ugccagcuauucaacagaa

SEQ ID NO: 1967075 - RNA, 19 nt, Homo sapiens
  misc_RNA (1)...(19): siRNA sense strand
aaauggagcacauccugaa

SEQ ID NO: 1967076 - RNA, 19 nt, Homo sapiens
  misc_RNA (1)...(19): siRNA sense strand
caaggugccagcuauucaa

SEQ ID NO: 1967077 - RNA, 19 nt, Homo sapiens
  misc_RNA (1)...(19): siRNA sense strand
caacaaauugaaacaacuc

SEQ ID NO: 1967078 - RNA, 19 nt, Homo sapiens
  misc_RNA (1)...(19): siRNA sense strand
guaccagugauggcaauaa

SEQ ID NO: 1967079 - RNA, 19 nt, Homo sapiens
  misc_RNA (1)...(19): siRNA sense strand
guaucuccuuuaaauguca

SEQ ID NO: 1967080 - RNA, 19 nt, Homo sapiens
  misc_RNA (1)...(19): siRNA sense strand
cuuuaaaugucaccagugu

SEQ ID NO: 1967081 - RNA, 19 nt, Homo sapiens
  misc_RNA (1)...(19): siRNA sense strand
gaacgguggcuuuucuaaa

SEQ ID NO: 1967082 - RNA, 19 nt, Homo sapiens
  misc_RNA (1)...(19): siRNA sense strand
ccaaggugccagcuauuca

SEQ ID NO: 1967083 - RNA, 19 nt, Homo sapiens
  misc_RNA (1)...(19): siRNA sense strand
gagcaaccacagcagaaca

SEQ ID NO: 1967084 - RNA, 19 nt, Homo sapiens
  misc_RNA (1)...(19): siRNA sense strand
gaccaaggugccagcuauu

SEQ ID NO: 1967085 - RNA, 19 nt, Homo sapiens
  misc_RNA (1)...(19): siRNA sense strand
gauaucagaaggacuagac

SEQ ID NO: 1967086 - RNA, 19 nt, Homo sapiens
  misc_RNA (1)...(19): siRNA sense strand
ugucaccagugucacaaau

SEQ ID NO: 1967087 - RNA, 19 nt, Homo sapiens
  misc_RNA (1)...(19): siRNA sense strand
aggccuagaugaugucaca

SEQ ID NO: 1967088 - RNA, 19 nt, Homo sapiens
  misc_RNA (1)...(19): siRNA sense strand
gaaaguucagauagcgaau

SEQ ID NO: 1967089 - RNA, 19 nt, Homo sapiens
  misc_RNA (1)...(19): siRNA sense strand
uaccagugauggcaauaag

SEQ ID NO: 1967090 - RNA, 19 nt, Homo sapiens
  misc_RNA (1)...(19): siRNA sense strand
uacacaagacucuggacua

SEQ ID NO: 1967091 - RNA, 19 nt, Homo sapiens
  misc_RNA (1)...(19): siRNA sense strand
cagagcaaccacagcagaa

SEQ ID NO: 1967092 - RNA, 19 nt, Homo sapiens
  misc_RNA (1)...(19): siRNA sense strand
ggugccagcuauucaacag

SEQ ID NO: 1967093 - RNA, 19 nt, Homo sapiens
  misc_RNA (1)...(19): siRNA sense strand
agacccagaucuucuugag

SEQ ID NO: 1967094 - RNA, 19 nt, Homo sapiens
  misc_RNA (1)...(19): siRNA sense strand
ugucacaaauggagcacau

SEQ ID NO: 1967095 - RNA, 19 nt, Homo sapiens
  misc_RNA (1)...(19): siRNA sense strand
ucccaggccuagaugaugu

SEQ ID NO: 1967096 - RNA, 19 nt, Homo sapiens
  misc_RNA (1)...(19): siRNA sense strand
gaaggacuagacccagauc

SEQ ID NO: 1967097 - RNA, 19 nt, Homo sapiens
  misc_RNA (1)...(19): siRNA sense strand
ccaaggauccaagauaugc

SEQ ID NO: 1967098 - RNA, 19 nt, Homo sapiens
  misc_RNA (1)...(19): siRNA sense strand
agugaaguaucagcagaaa

SEQ ID NO: 1967099 - RNA, 19 nt, Homo sapiens
  misc_RNA (1)...(19): siRNA sense strand
ggacuacaggaaagugaag

SEQ ID NO: 1967100 - RNA, 19 nt, Homo sapiens
  misc_RNA (1)...(19): siRNA sense strand
gaugaugucacaguugaag

SEQ ID NO: 1967101 - RNA, 19 nt, Homo sapiens
  misc_RNA (1)...(19): siRNA sense strand
ugaaguaucagcagaaaau

SEQ ID NO: 1967102 - RNA, 19 nt, Homo sapiens
  misc_RNA (1)...(19): siRNA sense strand
gccagcuauucaacagaaa

SEQ ID NO: 1967103 - RNA, 19 nt, Homo sapiens
  misc_RNA (1)...(19): siRNA sense strand
gauggcaauaagaaacaaa

SEQ ID NO: 1967104 - RNA, 19 nt, Homo sapiens
  misc_RNA (1)...(19): siRNA sense strand
gccaaggauccaagauaug

SEQ ID NO: 1967105 - RNA, 19 nt, Homo sapiens
  misc_RNA (1)...(19): siRNA sense strand
uccaacaaauugaaacaac

SEQ ID NO: 1967106 - RNA, 19 nt, Homo sapiens
  misc_RNA (1)...(19): siRNA sense strand
ugccagauaucucaaaaug

SEQ ID NO: 1967107 - RNA, 19 nt, Homo sapiens
  misc_RNA (1)...(19): siRNA sense strand
gaugucacaguugaaguau

SEQ ID NO: 1967108 - RNA, 19 nt, Homo sapiens
  misc_RNA (1)...(19): siRNA sense strand
cuacaggaaagugaaguau

SEQ ID NO: 1967109 - RNA, 19 nt, Homo sapiens
  misc_RNA (1)...(19): siRNA sense strand
gaaguaucagcagaaaaua

SEQ ID NO: 1967110 - RNA, 19 nt, Homo sapiens
  misc_RNA (1)...(19): siRNA sense strand
gcaagcagaucaaguucga

SEQ ID NO: 1967111 - RNA, 19 nt, Homo sapiens
  misc_RNA (1)...(19): siRNA sense strand
gcagaucaaguucgagaaa

SEQ ID NO: 1967112 - RNA, 19 nt, Homo sapiens
  misc_RNA (1)...(19): siRNA sense strand
gaagaugaaccaccacaag

SEQ ID NO: 1967113 - RNA, 19 nt, Homo sapiens
  misc_RNA (1)...(19): siRNA sense strand
accggaagcuggugaagaa

SEQ ID NO: 1967114 - RNA, 19 nt, Homo sapiens
  misc_RNA (1)...(19): siRNA sense strand
gacgcaagcagaucaaguu

SEQ ID NO: 1967115 - RNA, 19 nt, Homo sapiens
  misc_RNA (1)...(19): siRNA sense strand
agaugaaccaccacaagua

SEQ ID NO: 1967116 - RNA, 19 nt, Homo sapiens
  misc_RNA (1)...(19): siRNA sense strand
agaucaaguucgagaaaga

SEQ ID NO: 1967117 - RNA, 19 nt, Homo sapiens
  misc_RNA (1)...(19): siRNA sense strand
ggaagcuggugaagaagac

SEQ ID NO: 1967118 - RNA, 19 nt, Homo sapiens
  misc_RNA (1)...(19): siRNA sense strand
gcggaugcgccucaaauuc

SEQ ID NO: 1967119 - RNA, 19 nt, Homo sapiens
  misc_RNA (1)...(19): siRNA sense strand
ggaagaugaaccaccacaa

SEQ ID NO: 1967120 - RNA, 19 nt, Homo sapiens
  misc_RNA (1)...(19): siRNA sense strand
cggaugcgccucaaauuca

SEQ ID NO: 1967121 - RNA, 19 nt, Homo sapiens
  misc_RNA (1)...(19): siRNA sense strand
gaugaaccaccacaaguac

SEQ ID NO: 1967122 - RNA, 19 nt, Homo sapiens
  misc_RNA (1)...(19): siRNA sense strand
ggaugcgccucaaauucag

SEQ ID NO: 1967123 - RNA, 19 nt, Homo sapiens
  misc_RNA (1)...(19): siRNA sense strand
cagaucaaguucgagaaag

SEQ ID NO: 1967124 - RNA, 19 nt, Homo sapiens
  misc_RNA (1)...(19): siRNA sense strand
cgccucaaauucagugcaa

SEQ ID NO: 1967125 - RNA, 19 nt, Homo sapiens
  misc_RNA (1)...(19): siRNA sense strand
gaaagcaacucuccuaaag

SEQ ID NO: 1967126 - RNA, 19 nt, Homo sapiens
  misc_RNA (1)...(19): siRNA sense strand
ggaaagcaacucuccuaaa

SEQ ID NO: 1967127 - RNA, 19 nt, Homo sapiens
  misc_RNA (1)...(19): siRNA sense strand
ccagagacuuggcaaaugg

SEQ ID NO: 1967128 - RNA, 19 nt, Homo sapiens
  misc_RNA (1)...(19): siRNA sense strand
guauugcucuaccuaccua

SEQ ID NO: 1967129 - RNA, 19 nt, Homo sapiens
  misc_RNA (1)...(19): siRNA sense strand
ggacucugcucuucuacag

SEQ ID NO: 1967130 - RNA, 19 nt, Homo sapiens
  misc_RNA (1)...(19): siRNA sense strand
aagcaacucuccuaaaguc

SEQ ID NO: 1967131 - RNA, 19 nt, Homo sapiens
  misc_RNA (1)...(19): siRNA sense strand
caaagccucugggaagaau

SEQ ID NO: 1967132 - RNA, 19 nt, Homo sapiens
  misc_RNA (1)...(19): siRNA sense strand
gggaaagcaacucuccuaa

SEQ ID NO: 1967133 - RNA, 19 nt, Homo sapiens
  misc_RNA (1)...(19): siRNA sense strand
acucugagccuuauuagga

SEQ ID NO: 1967134 - RNA, 19 nt, Homo sapiens
  misc_RNA (1)...(19): siRNA sense strand
caacucuccuaaagucaca

SEQ ID NO: 1967135 - RNA, 19 nt, Homo sapiens
  misc_RNA (1)...(19): siRNA sense strand
aaagucacauagcaagcaa

SEQ ID NO: 1967136 - RNA, 19 nt, Homo sapiens
  misc_RNA (1)...(19): siRNA sense strand
agacgcacucugagccuua

SEQ ID NO: 1967137 - RNA, 19 nt, Homo sapiens
  misc_RNA (1)...(19): siRNA sense strand
cgccugaccucccucucaa

SEQ ID NO: 1967138 - RNA, 19 nt, Homo sapiens
  misc_RNA (1)...(19): siRNA sense strand
gcacucugagccuuauuag

SEQ ID NO: 1967139 - RNA, 19 nt, Homo sapiens
  misc_RNA (1)...(19): siRNA sense strand
ccaaagccucugggaagaa

SEQ ID NO: 1967140 - RNA, 19 nt, Homo sapiens
  misc_RNA (1)...(19): siRNA sense strand
ccuccucccuacaagauca

SEQ ID NO: 1967141 - RNA, 19 nt, Homo sapiens
  misc_RNA (1)...(19): siRNA sense strand
uccaaagccucugggaaga

SEQ ID NO: 1967142 - RNA, 19 nt, Homo sapiens
  misc_RNA (1)...(19): siRNA sense strand
uccagagacuuggcaaaug

SEQ ID NO: 1967143 - RNA, 19 nt, Homo sapiens
  misc_RNA (1)...(19): siRNA sense strand
uaaagucacauagcaagca

SEQ ID NO: 1967144 - RNA, 19 nt, Homo sapiens
  misc_RNA (1)...(19): siRNA sense strand
gacgcacucugagccuuau

SEQ ID NO: 1967145 - RNA, 19 nt, Homo sapiens
  misc_RNA (1)...(19): siRNA sense strand
cuccuaaagucacauagca

SEQ ID NO: 1967146 - RNA, 19 nt, Homo sapiens
  misc_RNA (1)...(19): siRNA sense strand
guccagagacuuggcaaau

SEQ ID NO: 1967147 - RNA, 19 nt, Homo sapiens
  misc_RNA (1)...(19): siRNA sense strand
agggaaagcaacucuccua

SEQ ID NO: 1967148 - RNA, 19 nt, Homo sapiens
  misc_RNA (1)...(19): siRNA sense strand
cgcacucugagccuuauua

SEQ ID NO: 1967149 - RNA, 19 nt, Homo sapiens
  misc_RNA (1)...(19): siRNA sense strand
gaaaggagcucuaugaacu

SEQ ID NO: 1967150 - RNA, 19 nt, Homo sapiens
  misc_RNA (1)...(19): siRNA sense strand
gaaagaagcacuaacauag

SEQ ID NO: 1967151 - RNA, 19 nt, Homo sapiens
  misc_RNA (1)...(19): siRNA sense strand
ucaagcaucugaauaugaa

SEQ ID NO: 1967152 - RNA, 19 nt, Homo sapiens
  misc_RNA (1)...(19): siRNA sense strand
gcagaaagaagcacuaaca

SEQ ID NO: 1967153 - RNA, 19 nt, Homo sapiens
  misc_RNA (1)...(19): siRNA sense strand
gcagauaacccagcuccua

SEQ ID NO: 1967154 - RNA, 19 nt, Homo sapiens
  misc_RNA (1)...(19): siRNA sense strand
ugaagcagcuagaccaaug

SEQ ID NO: 1967155 - RNA, 19 nt, Homo sapiens
  misc_RNA (1)...(19): siRNA sense strand
gagauaguccagcuuguuu

SEQ ID NO: 1967156 - RNA, 19 nt, Homo sapiens
  misc_RNA (1)...(19): siRNA sense strand
agaccaaugugaaaugauu

SEQ ID NO: 1967157 - RNA, 19 nt, Homo sapiens
  misc_RNA (1)...(19): siRNA sense strand
agaaagaagcacuaacaua

SEQ ID NO: 1967158 - RNA, 19 nt, Homo sapiens
  misc_RNA (1)...(19): siRNA sense strand
cugcaagacuucuaugauu

SEQ ID NO: 1967159 - RNA, 19 nt, Homo sapiens
  misc_RNA (1)...(19): siRNA sense strand
ucagaaaggagcucuauga

SEQ ID NO: 1967160 - RNA, 19 nt, Homo sapiens
  misc_RNA (1)...(19): siRNA sense strand
gcagaagccaaauuuguga

SEQ ID NO: 1967161 - RNA, 19 nt, Homo sapiens
  misc_RNA (1)...(19): siRNA sense strand
gaagcuaugaagcagauaa

SEQ ID NO: 1967162 - RNA, 19 nt, Homo sapiens
  misc_RNA (1)...(19): siRNA sense strand
ugaagaccuugaacacaaa

SEQ ID NO: 1967163 - RNA, 19 nt, Homo sapiens
  misc_RNA (1)...(19): siRNA sense strand
gaaaugauucuucaagcau

SEQ ID NO: 1967164 - RNA, 19 nt, Homo sapiens
  misc_RNA (1)...(19): siRNA sense strand
gacccaaucuagugcagaa

SEQ ID NO: 1967165 - RNA, 19 nt, Homo sapiens
  misc_RNA (1)...(19): siRNA sense strand
ggauggcaguuauggcuau

SEQ ID NO: 1967166 - RNA, 19 nt, Homo sapiens
  misc_RNA (1)...(19): siRNA sense strand
acaaagacccggaagcuau

SEQ ID NO: 1967167 - RNA, 19 nt, Homo sapiens
  misc_RNA (1)...(19): siRNA sense strand
gaacuugaggcagaaagaa

SEQ ID NO: 1967168 - RNA, 19 nt, Homo sapiens
  misc_RNA (1)...(19): siRNA sense strand
gcagcuagaccaaugugaa

SEQ ID NO: 1967169 - RNA, 19 nt, Homo sapiens
  misc_RNA (1)...(19): siRNA sense strand
ucuaugaacuuugggaaga

SEQ ID NO: 1967170 - RNA, 19 nt, Homo sapiens
  misc_RNA (1)...(19): siRNA sense strand
ggagcucuaugaacuuugg

SEQ ID NO: 1967171 - RNA, 19 nt, Homo sapiens
  misc_RNA (1)...(19): siRNA sense strand
augaagaccuugaacacaa

SEQ ID NO: 1967172 - RNA, 19 nt, Homo sapiens
  misc_RNA (1)...(19): siRNA sense strand
uaguccagcuuguuucuga

SEQ ID NO: 1967173 - RNA, 19 nt, Homo sapiens
  misc_RNA (1)...(19): siRNA sense strand
cuagaccaaugugaaauga

SEQ ID NO: 1967174 - RNA, 19 nt, Homo sapiens
  misc_RNA (1)...(19): siRNA sense strand
cgaacuggcuggguauaca

SEQ ID NO: 1967175 - RNA, 19 nt, Homo sapiens
  misc_RNA (1)...(19): siRNA sense strand
gugcagaagccaaauuugu

SEQ ID NO: 1967176 - RNA, 19 nt, Homo sapiens
  misc_RNA (1)...(19): siRNA sense strand
cagaaaggagcucuaugaa

SEQ ID NO: 1967177 - RNA, 19 nt, Homo sapiens
  misc_RNA (1)...(19): siRNA sense strand
aaggagcucuaugaacuuu

SEQ ID NO: 1967178 - RNA, 19 nt, Homo sapiens
  misc_RNA (1)...(19): siRNA sense strand
uggcuauggugaucaaaga

SEQ ID NO: 1967179 - RNA, 19 nt, Homo sapiens
  misc_RNA (1)...(19): siRNA sense strand
uagggcagcucaagagagu

SEQ ID NO: 1967180 - RNA, 19 nt, Homo sapiens
  misc_RNA (1)...(19): siRNA sense strand
cagcuagaccaaugugaaa

SEQ ID NO: 1967181 - RNA, 19 nt, Homo sapiens
  misc_RNA (1)...(19): siRNA sense strand
caaagacccggaagcuaug

SEQ ID NO: 1967182 - RNA, 19 nt, Homo sapiens
  misc_RNA (1)...(19): siRNA sense strand
agaugaccgucuuaacaaa

SEQ ID NO: 1967183 - RNA, 19 nt, Homo sapiens
  misc_RNA (1)...(19): siRNA sense strand
cuauggugaucaaagauga

SEQ ID NO: 1967184 - RNA, 19 nt, Homo sapiens
  misc_RNA (1)...(19): siRNA sense strand
ggagagcguuucagaucac

SEQ ID NO: 1967185 - RNA, 19 nt, Homo sapiens
  misc_RNA (1)...(19): siRNA sense strand
cggaagcuaugaagcagau

SEQ ID NO: 1967186 - RNA, 19 nt, Homo sapiens
  misc_RNA (1)...(19): siRNA sense strand
ugcaagacuucuaugauuc

SEQ ID NO: 1967187 - RNA, 19 nt, Homo sapiens
  misc_RNA (1)...(19): siRNA sense strand
guacgagacccaaucuagu

SEQ ID NO: 1967188 - RNA, 19 nt, Homo sapiens
  misc_RNA (1)...(19): siRNA sense strand
cggagagcguuucagauca

SEQ ID NO: 1967189 - RNA, 19 nt, Homo sapiens
  misc_RNA (1)...(19): siRNA sense strand
ggagacugcaagacuucua

SEQ ID NO: 1967190 - RNA, 19 nt, Homo sapiens
  misc_RNA (1)...(19): siRNA sense strand
gcuagaccaaugugaaaug

SEQ ID NO: 1967191 - RNA, 19 nt, Homo sapiens
  misc_RNA (1)...(19): siRNA sense strand
caagagagucccacgaacu

SEQ ID NO: 1967192 - RNA, 19 nt, Homo sapiens
  misc_RNA (1)...(19): siRNA sense strand
cagcuuguuucugaacuug

SEQ ID NO: 1967193 - RNA, 19 nt, Homo sapiens
  misc_RNA (1)...(19): siRNA sense strand
ucaaucacccugagauagu

SEQ ID NO: 1967194 - RNA, 19 nt, Homo sapiens
  misc_RNA (1)...(19): siRNA sense strand
gagcguuucagaucacaug

SEQ ID NO: 1967195 - RNA, 19 nt, Homo sapiens
  misc_RNA (1)...(19): siRNA sense strand
uaacaaagacccggaagcu

SEQ ID NO: 1967196 - RNA, 19 nt, Homo sapiens
  misc_RNA (1)...(19): siRNA sense strand
gaagaguacgagacccaau

SEQ ID NO: 1967197 - RNA, 19 nt, Homo sapiens
  misc_RNA (1)...(19): siRNA sense strand
gagacugcaagacuucuau

SEQ ID NO: 1967198 - RNA, 19 nt, Homo sapiens
  misc_RNA (1)...(19): siRNA sense strand
aagaagcacuaacauagcu

SEQ ID NO: 1967199 - RNA, 19 nt, Homo sapiens
  misc_RNA (1)...(19): siRNA sense strand
gcuauggugaucaaagaug

SEQ ID NO: 1967200 - RNA, 19 nt, Homo sapiens
  misc_RNA (1)...(19): siRNA sense strand
ccagcuuguuucugaacuu

SEQ ID NO: 1967201 - RNA, 19 nt, Homo sapiens
  misc_RNA (1)...(19): siRNA sense strand
ugagauaguccagcuuguu

SEQ ID NO: 1967202 - RNA, 19 nt, Homo sapiens
  misc_RNA (1)...(19): siRNA sense strand
ccggagagcguuucagauc

SEQ ID NO: 1967203 - RNA, 19 nt, Homo sapiens
  misc_RNA (1)...(19): siRNA sense strand
ggccggagagcguuucaga

SEQ ID NO: 1967204 - RNA, 19 nt, Homo sapiens
  misc_RNA (1)...(19): siRNA sense strand
ugaauaugaagaccuugaa

SEQ ID NO: 1967205 - RNA, 19 nt, Homo sapiens
  misc_RNA (1)...(19): siRNA sense strand
caaugugaaaugauucuuc

SEQ ID NO: 1967206 - RNA, 19 nt, Homo sapiens
  misc_RNA (1)...(19): siRNA sense strand
gaagcagcuagaccaaugu

SEQ ID NO: 1967207 - RNA, 19 nt, Homo sapiens
  misc_RNA (1)...(19): siRNA sense strand
uagugcagaagccaaauuu

SEQ ID NO: 1967208 - RNA, 19 nt, Homo sapiens
  misc_RNA (1)...(19): siRNA sense strand
caaucacccugagauaguc

SEQ ID NO: 1967209 - RNA, 19 nt, Homo sapiens
  misc_RNA (1)...(19): siRNA sense strand
gaugaccgucuuaacaaag

SEQ ID NO: 1967210 - RNA, 19 nt, Homo sapiens
  misc_RNA (1)...(19): siRNA sense strand
gauaguccagcuuguuucu

SEQ ID NO: 1967211 - RNA, 19 nt, Homo sapiens
  misc_RNA (1)...(19): siRNA sense strand
gaacuggcuggguauacag

SEQ ID NO: 1967212 - RNA, 19 nt, Homo sapiens
  misc_RNA (1)...(19): siRNA sense strand
cguuucagaucacauguac

SEQ ID NO: 1967213 - RNA, 19 nt, Homo sapiens
  misc_RNA (1)...(19): siRNA sense strand
cagaaagaagcacuaacau

SEQ ID NO: 1967214 - RNA, 19 nt, Homo sapiens
  misc_RNA (1)...(19): siRNA sense strand
gauggcaguuauggcuaug

SEQ ID NO: 1967215 - RNA, 19 nt, Homo sapiens
  misc_RNA (1)...(19): siRNA sense strand
gacugcaagacuucuauga

SEQ ID NO: 1967216 - RNA, 19 nt, Homo sapiens
  misc_RNA (1)...(19): siRNA sense strand
aagccaaauuugugaagca

SEQ ID NO: 1967217 - RNA, 19 nt, Homo sapiens
  misc_RNA (1)...(19): siRNA sense strand
uacgagacccaaucuagug

SEQ ID NO: 1967218 - RNA, 19 nt, Homo sapiens
  misc_RNA (1)...(19): siRNA sense strand
gguagggcagcucaagaga

SEQ ID NO: 1967219 - RNA, 19 nt, Homo sapiens
  misc_RNA (1)...(19): siRNA sense strand
ccacgaacuggcuggguau

SEQ ID NO: 1967220 - RNA, 19 nt, Homo sapiens
  misc_RNA (1)...(19): siRNA sense strand
ggcuggguauacagaaaug

SEQ ID NO: 1967221 - RNA, 19 nt, Homo sapiens
  misc_RNA (1)...(19): siRNA sense strand
gaauaugaagaccuugaac

SEQ ID NO: 1967222 - RNA, 19 nt, Homo sapiens
  misc_RNA (1)...(19): siRNA sense strand
aaaggagcucuaugaacuu

SEQ ID NO: 1967223 - RNA, 19 nt, Homo sapiens
  misc_RNA (1)...(19): siRNA sense strand
gcuuguuucugaacuugag

SEQ ID NO: 1967224 - RNA, 19 nt, Homo sapiens
  misc_RNA (1)...(19): siRNA sense strand
gcaagacuucuaugauucc

SEQ ID NO: 1967225 - RNA, 19 nt, Homo sapiens
  misc_RNA (1)...(19): siRNA sense strand
cugggagacugcaagacuu

SEQ ID NO: 1967226 - RNA, 19 nt, Homo sapiens
  misc_RNA (1)...(19): siRNA sense strand
gcguuucagaucacaugua

SEQ ID NO: 1967227 - RNA, 19 nt, Homo sapiens
  misc_RNA (1)...(19): siRNA sense strand
gagagcguuucagaucaca

SEQ ID NO: 1967228 - RNA, 19 nt, Homo sapiens
  misc_RNA (1)...(19): siRNA sense strand
ccauugagauugccaagaa

SEQ ID NO: 1967229 - RNA, 19 nt, Homo sapiens
  misc_RNA (1)...(19): siRNA sense strand
gacgaggucucacuauguu

SEQ ID NO: 1967230 - RNA, 19 nt, Homo sapiens
  misc_RNA (1)...(19): siRNA sense strand
gcaucgcgcucuacgacaa

SEQ ID NO: 1967231 - RNA, 19 nt, Homo sapiens
  misc_RNA (1)...(19): siRNA sense strand
aaaaggggcugguauuuca

SEQ ID NO: 1967232 - RNA, 19 nt, Homo sapiens
  misc_RNA (1)...(19): siRNA sense strand
ccugggcgcuuucgcauuc

SEQ ID NO: 1967233 - RNA, 19 nt, Homo sapiens
  misc_RNA (1)...(19): siRNA sense strand
cggcaaggccauugagauu

SEQ ID NO: 1967234 - RNA, 19 nt, Homo sapiens
  misc_RNA (1)...(19): siRNA sense strand
gagacugccugccuucaac

SEQ ID NO: 1967235 - RNA, 19 nt, Homo sapiens
  misc_RNA (1)...(19): siRNA sense strand
gcagugaggagcagaagag

SEQ ID NO: 1967236 - RNA, 19 nt, Homo sapiens
  misc_RNA (1)...(19): siRNA sense strand
ggcagcagaucccgaugga

SEQ ID NO: 1967237 - RNA, 19 nt, Homo sapiens
  misc_RNA (1)...(19): siRNA sense strand
gagaaaaggggcugguauu

SEQ ID NO: 1967238 - RNA, 19 nt, Homo sapiens
  misc_RNA (1)...(19): siRNA sense strand
cauuggaaccugcaacaug

SEQ ID NO: 1967239 - RNA, 19 nt, Homo sapiens
  misc_RNA (1)...(19): siRNA sense strand
caggauauggccauuggaa

SEQ ID NO: 1967240 - RNA, 19 nt, Homo sapiens
  misc_RNA (1)...(19): siRNA sense strand
caaccucccauccugaauc

SEQ ID NO: 1967241 - RNA, 19 nt, Homo sapiens
  misc_RNA (1)...(19): siRNA sense strand
uggcaacacucuacaucag

SEQ ID NO: 1967242 - RNA, 19 nt, Homo sapiens
  misc_RNA (1)...(19): siRNA sense strand
ggcaaggccauugagauug

SEQ ID NO: 1967243 - RNA, 19 nt, Homo sapiens
  misc_RNA (1)...(19): siRNA sense strand
cucccaaagugcuggaauu

SEQ ID NO: 1967244 - RNA, 19 nt, Homo sapiens
  misc_RNA (1)...(19): siRNA sense strand
gugaggagcagaagagacu

SEQ ID NO: 1967245 - RNA, 19 nt, Homo sapiens
  misc_RNA (1)...(19): siRNA sense strand
aaagcaggauauggccauu

SEQ ID NO: 1967246 - RNA, 19 nt, Homo sapiens
  misc_RNA (1)...(19): siRNA sense strand
ggcuguggccgacgaucua

SEQ ID NO: 1967247 - RNA, 19 nt, Homo sapiens
  misc_RNA (1)...(19): siRNA sense strand
ggagaaagcuuuaaacaag

SEQ ID NO: 1967248 - RNA, 19 nt, Homo sapiens
  misc_RNA (1)...(19): siRNA sense strand
uaaaguggauucaggagua

SEQ ID NO: 1967249 - RNA, 19 nt, Homo sapiens
  misc_RNA (1)...(19): siRNA sense strand
gagaaagcuuuaaacaaga

SEQ ID NO: 1967250 - RNA, 19 nt, Homo sapiens
  misc_RNA (1)...(19): siRNA sense strand
gaacaacaacagacaagug

SEQ ID NO: 1967251 - RNA, 19 nt, Homo sapiens
  misc_RNA (1)...(19): siRNA sense strand
gcauugacccgaagcuaaa

SEQ ID NO: 1967252 - RNA, 19 nt, Homo sapiens
  misc_RNA (1)...(19): siRNA sense strand
aacaagagguucaagaugu

SEQ ID NO: 1967253 - RNA, 19 nt, Homo sapiens
  misc_RNA (1)...(19): siRNA sense strand
ucucaacacuccaaacugu

SEQ ID NO: 1967254 - RNA, 19 nt, Homo sapiens
  misc_RNA (1)...(19): siRNA sense strand
gaagaacaacaacagacaa

SEQ ID NO: 1967255 - RNA, 19 nt, Homo sapiens
  misc_RNA (1)...(19): siRNA sense strand
aaacugugcccuucagauu

SEQ ID NO: 1967256 - RNA, 19 nt, Homo sapiens
  misc_RNA (1)...(19): siRNA sense strand
caacgucaagcaucucaaa

SEQ ID NO: 1967257 - RNA, 19 nt, Homo sapiens
  misc_RNA (1)...(19): siRNA sense strand
gagccaacgucaagcaucu

SEQ ID NO: 1967258 - RNA, 19 nt, Homo sapiens
  misc_RNA (1)...(19): siRNA sense strand
uaaacaagagguucaagau

SEQ ID NO: 1967259 - RNA, 19 nt, Homo sapiens
  misc_RNA (1)...(19): siRNA sense strand
caacagacaagugugcauu

SEQ ID NO: 1967260 - RNA, 19 nt, Homo sapiens
  misc_RNA (1)...(19): siRNA sense strand
guaccuggagaaagcuuua

SEQ ID NO: 1967261 - RNA, 19 nt, Homo sapiens
  misc_RNA (1)...(19): siRNA sense strand
acagacaagugugcauuga

SEQ ID NO: 1967262 - RNA, 19 nt, Homo sapiens
  misc_RNA (1)...(19): siRNA sense strand
acaagagguucaagaugug

SEQ ID NO: 1967263 - RNA, 19 nt, Homo sapiens
  misc_RNA (1)...(19): siRNA sense strand
ccaugccgauucuucgaaa

SEQ ID NO: 1967264 - RNA, 19 nt, Homo sapiens
  misc_RNA (1)...(19): siRNA sense strand
aaacaagagguucaagaug

SEQ ID NO: 1967265 - RNA, 19 nt, Homo sapiens
  misc_RNA (1)...(19): siRNA sense strand
cgucaagcaucucaaaauu

SEQ ID NO: 1967266 - RNA, 19 nt, Homo sapiens
  misc_RNA (1)...(19): siRNA sense strand
uggagaaagcuuuaaacaa

SEQ ID NO: 1967267 - RNA, 19 nt, Homo sapiens
  misc_RNA (1)...(19): siRNA sense strand
agaaagcuuuaaacaagag

SEQ ID NO: 1967268 - RNA, 19 nt, Homo sapiens
  misc_RNA (1)...(19): siRNA sense strand
ugaagaacaacaacagaca

SEQ ID NO: 1967269 - RNA, 19 nt, Homo sapiens
  misc_RNA (1)...(19): siRNA sense strand
gcugaagaacaacaacaga

SEQ ID NO: 1967270 - RNA, 19 nt, Homo sapiens
  misc_RNA (1)...(19): siRNA sense strand
uuaaacaagagguucaaga

SEQ ID NO: 1967271 - RNA, 19 nt, Homo sapiens
  misc_RNA (1)...(19): siRNA sense strand
ucaagcaucucaaaauucu

SEQ ID NO: 1967272 - RNA, 19 nt, Homo sapiens
  misc_RNA (1)...(19): siRNA sense strand
aggaguaccuggagaaagc

SEQ ID NO: 1967273 - RNA, 19 nt, Homo sapiens
  misc_RNA (1)...(19): siRNA sense strand
caaacugugcccuucagau

SEQ ID NO: 1967274 - RNA, 19 nt, Homo sapiens
  misc_RNA (1)...(19): siRNA sense strand
acccgaagcuaaaguggau

SEQ ID NO: 1967275 - RNA, 19 nt, Homo sapiens
  misc_RNA (1)...(19): siRNA sense strand
acugugcccuucagauugu

SEQ ID NO: 1967276 - RNA, 19 nt, Homo sapiens
  misc_RNA (1)...(19): siRNA sense strand
cagaugcccaugccgauuc

SEQ ID NO: 1967277 - RNA, 19 nt, Homo sapiens
  misc_RNA (1)...(19): siRNA sense strand
caagagguucaagauguga

SEQ ID NO: 1967278 - RNA, 19 nt, Homo sapiens
  misc_RNA (1)...(19): siRNA sense strand
ugcauugacccgaagcuaa

SEQ ID NO: 1967279 - RNA, 19 nt, Homo sapiens
  misc_RNA (1)...(19): siRNA sense strand
ggagagagcuguugaguag

SEQ ID NO: 1967280 - RNA, 19 nt, Homo sapiens
  misc_RNA (1)...(19): siRNA sense strand
gagagcagcugcagaguau

SEQ ID NO: 1967281 - RNA, 19 nt, Homo sapiens
  misc_RNA (1)...(19): siRNA sense strand
gcaccaaguuugcaaaguu

SEQ ID NO: 1967282 - RNA, 19 nt, Homo sapiens
  misc_RNA (1)...(19): siRNA sense strand
gcacagacaccaggacuua

SEQ ID NO: 1967283 - RNA, 19 nt, Homo sapiens
  misc_RNA (1)...(19): siRNA sense strand
caagacaacucccagaaga

SEQ ID NO: 1967284 - RNA, 19 nt, Homo sapiens
  misc_RNA (1)...(19): siRNA sense strand
gaaacacacauucuccuua

SEQ ID NO: 1967285 - RNA, 19 nt, Homo sapiens
  misc_RNA (1)...(19): siRNA sense strand
gaaguuugaugcuuucaga

SEQ ID NO: 1967286 - RNA, 19 nt, Homo sapiens
  misc_RNA (1)...(19): siRNA sense strand
aaacacacauucuccuuaa

SEQ ID NO: 1967287 - RNA, 19 nt, Homo sapiens
  misc_RNA (1)...(19): siRNA sense strand
gaagagaaguuugaugcuu

SEQ ID NO: 1967288 - RNA, 19 nt, Homo sapiens
  misc_RNA (1)...(19): siRNA sense strand
ggccagaccuguuggacua

SEQ ID NO: 1967289 - RNA, 19 nt, Homo sapiens
  misc_RNA (1)...(19): siRNA sense strand
ccaaggagguccaggaaga

SEQ ID NO: 1967290 - RNA, 19 nt, Homo sapiens
  misc_RNA (1)...(19): siRNA sense strand
ggagaaaguagcuuccaua

SEQ ID NO: 1967291 - RNA, 19 nt, Homo sapiens
  misc_RNA (1)...(19): siRNA sense strand
ccaagaggauucaggagaa

SEQ ID NO: 1967292 - RNA, 19 nt, Homo sapiens
  misc_RNA (1)...(19): siRNA sense strand
agaaggaggugaagaugaa

SEQ ID NO: 1967293 - RNA, 19 nt, Homo sapiens
  misc_RNA (1)...(19): siRNA sense strand
ggacucaucugggucauca

SEQ ID NO: 1967294 - RNA, 19 nt, Homo sapiens
  misc_RNA (1)...(19): siRNA sense strand
ucacuaagauccugcuuca

SEQ ID NO: 1967295 - RNA, 19 nt, Homo sapiens
  misc_RNA (1)...(19): siRNA sense strand
gcugguggcugaccuucua

SEQ ID NO: 1967296 - RNA, 19 nt, Homo sapiens
  misc_RNA (1)...(19): siRNA sense strand
aggaggaacuagccauuua

SEQ ID NO: 1967297 - RNA, 19 nt, Homo sapiens
  misc_RNA (1)...(19): siRNA sense strand
gaagccagcucaacaacag

SEQ ID NO: 1967298 - RNA, 19 nt, Homo sapiens
  misc_RNA (1)...(19): siRNA sense strand
gcagaaguuuggccgagaa

SEQ ID NO: 1967299 - RNA, 19 nt, Homo sapiens
  misc_RNA (1)...(19): siRNA sense strand
gcaccaagcucagaaacuc

SEQ ID NO: 1967300 - RNA, 19 nt, Homo sapiens
  misc_RNA (1)...(19): siRNA sense strand
aagagaaguuugaugcuuu

SEQ ID NO: 1967301 - RNA, 19 nt, Homo sapiens
  misc_RNA (1)...(19): siRNA sense strand
ucaaggugcuggaagagaa

SEQ ID NO: 1967302 - RNA, 19 nt, Homo sapiens
  misc_RNA (1)...(19): siRNA sense strand
ggaagcagguggcagacau

SEQ ID NO: 1967303 - RNA, 19 nt, Homo sapiens
  misc_RNA (1)...(19): siRNA sense strand
gggcagagauccuguuugc

SEQ ID NO: 1967304 - RNA, 19 nt, Homo sapiens
  misc_RNA (1)...(19): siRNA sense strand
ggacaacagccacuucaug

SEQ ID NO: 1967305 - RNA, 19 nt, Homo sapiens
  misc_RNA (1)...(19): siRNA sense strand
gccgagaaguggaugguuu

SEQ ID NO: 1967306 - RNA, 19 nt, Homo sapiens
  misc_RNA (1)...(19): siRNA sense strand
ggugcuggcuggcuuagaa

SEQ ID NO: 1967307 - RNA, 19 nt, Homo sapiens
  misc_RNA (1)...(19): siRNA sense strand
uacagaagcagcagaauuu

SEQ ID NO: 1967308 - RNA, 19 nt, Homo sapiens
  misc_RNA (1)...(19): siRNA sense strand
ccugggaacuccacacaaa

SEQ ID NO: 1967309 - RNA, 19 nt, Homo sapiens
  misc_RNA (1)...(19): siRNA sense strand
cccgagagcuggacaaugu

SEQ ID NO: 1967310 - RNA, 19 nt, Homo sapiens
  misc_RNA (1)...(19): siRNA sense strand
ggcuggagcugcagaaguu

SEQ ID NO: 1967311 - RNA, 19 nt, Homo sapiens
  misc_RNA (1)...(19): siRNA sense strand
gcaaguacaggaacaagug

SEQ ID NO: 1967312 - RNA, 19 nt, Homo sapiens
  misc_RNA (1)...(19): siRNA sense strand
gagaagacggcccugauga

SEQ ID NO: 1967313 - RNA, 19 nt, Homo sapiens
  misc_RNA (1)...(19): siRNA sense strand
caccaaguuugcaaaguuu

SEQ ID NO: 1967314 - RNA, 19 nt, Homo sapiens
  misc_RNA (1)...(19): siRNA sense strand
cagaggagacucacuaaga

SEQ ID NO: 1967315 - RNA, 19 nt, Homo sapiens
  misc_RNA (1)...(19): siRNA sense strand
caguggagcugcaccaguu

SEQ ID NO: 1967316 - RNA, 19 nt, Homo sapiens
  misc_RNA (1)...(19): siRNA sense strand
gaaccgggacccugaggaa

SEQ ID NO: 1967317 - RNA, 19 nt, Homo sapiens
  misc_RNA (1)...(19): siRNA sense strand
ccaaguggaucaauaacgu

SEQ ID NO: 1967318 - RNA, 19 nt, Homo sapiens
  misc_RNA (1)...(19): siRNA sense strand
ccauggcccuguucgguuu

SEQ ID NO: 1967319 - RNA, 19 nt, Homo sapiens
  misc_RNA (1)...(19): siRNA sense strand
gagaaggaggugaagauga

SEQ ID NO: 1967320 - RNA, 19 nt, Homo sapiens
  misc_RNA (1)...(19): siRNA sense strand
gaacuccacacaaauccaa

SEQ ID NO: 1967321 - RNA, 19 nt, Homo sapiens
  misc_RNA (1)...(19): siRNA sense strand
cuacagagcucggaaacag

SEQ ID NO: 1967322 - RNA, 19 nt, Homo sapiens
  misc_RNA (1)...(19): siRNA sense strand
gaaacauccugcagacacu

SEQ ID NO: 1967323 - RNA, 19 nt, Homo sapiens
  misc_RNA (1)...(19): siRNA sense strand
accaacagcuggagaguga

SEQ ID NO: 1967324 - RNA, 19 nt, Homo sapiens
  misc_RNA (1)...(19): siRNA sense strand
ucaccaaguggaucaauaa

SEQ ID NO: 1967325 - RNA, 19 nt, Homo sapiens
  misc_RNA (1)...(19): siRNA sense strand
uggaagagguagagcaguu

SEQ ID NO: 1967326 - RNA, 19 nt, Homo sapiens
  misc_RNA (1)...(19): siRNA sense strand
gaagcaggcagccaaagga

SEQ ID NO: 1967327 - RNA, 19 nt, Homo sapiens
  misc_RNA (1)...(19): siRNA sense strand
ugaaacaccaggccuuuga

SEQ ID NO: 1967328 - RNA, 19 nt, Homo sapiens
  misc_RNA (1)...(19): siRNA sense strand
gacaacagccacuucaugu

SEQ ID NO: 1967329 - RNA, 19 nt, Homo sapiens
  misc_RNA (1)...(19): siRNA sense strand
aggcaaugcugcaggaauu

SEQ ID NO: 1967330 - RNA, 19 nt, Homo sapiens
  misc_RNA (1)...(19): siRNA sense strand
agacagugcugcuccaaag

SEQ ID NO: 1967331 - RNA, 19 nt, Homo sapiens
  misc_RNA (1)...(19): siRNA sense strand
ggaaacacacauucuccuu

SEQ ID NO: 1967332 - RNA, 19 nt, Homo sapiens
  misc_RNA (1)...(19): siRNA sense strand
gauggcagcggagaaagua

SEQ ID NO: 1967333 - RNA, 19 nt, Homo sapiens
  misc_RNA (1)...(19): siRNA sense strand
ggagaagacggcccugaug

SEQ ID NO: 1967334 - RNA, 19 nt, Homo sapiens
  misc_RNA (1)...(19): siRNA sense strand
ugaccucuguugccaagaa

SEQ ID NO: 1967335 - RNA, 19 nt, Homo sapiens
  misc_RNA (1)...(19): siRNA sense strand
ccucagaguucacagagau

SEQ ID NO: 1967336 - RNA, 19 nt, Homo sapiens
  misc_RNA (1)...(19): siRNA sense strand
gaaguuuggccgagaagug

SEQ ID NO: 1967337 - RNA, 19 nt, Homo sapiens
  misc_RNA (1)...(19): siRNA sense strand
gccaggagcugaagguuuu

SEQ ID NO: 1967338 - RNA, 19 nt, Homo sapiens
  misc_RNA (1)...(19): siRNA sense strand
caacugaggcagagauauc

SEQ ID NO: 1967339 - RNA, 19 nt, Homo sapiens
  misc_RNA (1)...(19): siRNA sense strand
ggucaugcagcucaaauau

SEQ ID NO: 1967340 - RNA, 19 nt, Homo sapiens
  misc_RNA (1)...(19): siRNA sense strand
agaggagacucacuaagau

SEQ ID NO: 1967341 - RNA, 19 nt, Homo sapiens
  misc_RNA (1)...(19): siRNA sense strand
gaggugaagaugaauguug

SEQ ID NO: 1967342 - RNA, 19 nt, Homo sapiens
  misc_RNA (1)...(19): siRNA sense strand
gcuuugaaccgcaagauga

SEQ ID NO: 1967343 - RNA, 19 nt, Homo sapiens
  misc_RNA (1)...(19): siRNA sense strand
agagagcuguugaguagga

SEQ ID NO: 1967344 - RNA, 19 nt, Homo sapiens
  misc_RNA (1)...(19): siRNA sense strand
guacgagacgggccacauu

SEQ ID NO: 1967345 - RNA, 19 nt, Homo sapiens
  misc_RNA (1)...(19): siRNA sense strand
gcgaugggcugggcuucaa

SEQ ID NO: 1967346 - RNA, 19 nt, Homo sapiens
  misc_RNA (1)...(19): siRNA sense strand
gaagagguagagcaguuga

SEQ ID NO: 1967347 - RNA, 19 nt, Homo sapiens
  misc_RNA (1)...(19): siRNA sense strand
ucacccagguccaggagaa

SEQ ID NO: 1967348 - RNA, 19 nt, Homo sapiens
  misc_RNA (1)...(19): siRNA sense strand
ugaccuacgucucccucua

SEQ ID NO: 1967349 - RNA, 19 nt, Homo sapiens
  misc_RNA (1)...(19): siRNA sense strand
gggagagagcuguugagua

SEQ ID NO: 1967350 - RNA, 19 nt, Homo sapiens
  misc_RNA (1)...(19): siRNA sense strand
gagaaaguagcuuccauag

SEQ ID NO: 1967351 - RNA, 19 nt, Homo sapiens
  misc_RNA (1)...(19): siRNA sense strand
uggaggaacuggagaacug

SEQ ID NO: 1967352 - RNA, 19 nt, Homo sapiens
  misc_RNA (1)...(19): siRNA sense strand
gcaccucugcaccaaguuu

SEQ ID NO: 1967353 - RNA, 19 nt, Homo sapiens
  misc_RNA (1)...(19): siRNA sense strand
gcaagugggaagcuuugaa

SEQ ID NO: 1967354 - RNA, 19 nt, Homo sapiens
  misc_RNA (1)...(19): siRNA sense strand
gcaggaagaacccagaaag

SEQ ID NO: 1967355 - RNA, 19 nt, Homo sapiens
  misc_RNA (1)...(19): siRNA sense strand
caacagccacuucaugucu

SEQ ID NO: 1967356 - RNA, 19 nt, Homo sapiens
  misc_RNA (1)...(19): siRNA sense strand
gaaacacaaggcccuggaa

SEQ ID NO: 1967357 - RNA, 19 nt, Homo sapiens
  misc_RNA (1)...(19): siRNA sense strand
gaggauggcagcggagaaa

SEQ ID NO: 1967358 - RNA, 19 nt, Homo sapiens
  misc_RNA (1)...(19): siRNA sense strand
uggaagcuauggagaagga

SEQ ID NO: 1967359 - RNA, 19 nt, Homo sapiens
  misc_RNA (1)...(19): siRNA sense strand
gaagacggcccugaugaag

SEQ ID NO: 1967360 - RNA, 19 nt, Homo sapiens
  misc_RNA (1)...(19): siRNA sense strand
agaagaagguggccaagcu

SEQ ID NO: 1967361 - RNA, 19 nt, Homo sapiens
  misc_RNA (1)...(19): siRNA sense strand
gagccagccucugcaagga

SEQ ID NO: 1967362 - RNA, 19 nt, Homo sapiens
  misc_RNA (1)...(19): siRNA sense strand
acgugaacauuacagauuu

SEQ ID NO: 1967363 - RNA, 19 nt, Homo sapiens
  misc_RNA (1)...(19): siRNA sense strand
gcaagacaacucccagaag

SEQ ID NO: 1967364 - RNA, 19 nt, Homo sapiens
  misc_RNA (1)...(19): siRNA sense strand
uuacagaagcagcagaauu

SEQ ID NO: 1967365 - RNA, 19 nt, Homo sapiens
  misc_RNA (1)...(19): siRNA sense strand
ggagaaggaagcccugauc

SEQ ID NO: 1967366 - RNA, 19 nt, Homo sapiens
  misc_RNA (1)...(19): siRNA sense strand
ccagaugagcgcucuauca

SEQ ID NO: 1967367 - RNA, 19 nt, Homo sapiens
  misc_RNA (1)...(19): siRNA sense strand
ggagaggagggucuacuuc

SEQ ID NO: 1967368 - RNA, 19 nt, Homo sapiens
  misc_RNA (1)...(19): siRNA sense strand
gcuggaagcuauggagaag

SEQ ID NO: 1967369 - RNA, 19 nt, Homo sapiens
  misc_RNA (1)...(19): siRNA sense strand
gaaccuggagagugagaug

SEQ ID NO: 1967370 - RNA, 19 nt, Homo sapiens
  misc_RNA (1)...(19): siRNA sense strand
uaccacagcugggcagaug

SEQ ID NO: 1967371 - RNA, 19 nt, Homo sapiens
  misc_RNA (1)...(19): siRNA sense strand
aggcagcaguggacaagaa

SEQ ID NO: 1967372 - RNA, 19 nt, Homo sapiens
  misc_RNA (1)...(19): siRNA sense strand
gagaccacccucagaguuc

SEQ ID NO: 1967373 - RNA, 19 nt, Homo sapiens
  misc_RNA (1)...(19): siRNA sense strand
acacuauacuccagacaca

SEQ ID NO: 1967374 - RNA, 19 nt, Homo sapiens
  misc_RNA (1)...(19): siRNA sense strand
gaccuucuacgcuggauug

SEQ ID NO: 1967375 - RNA, 19 nt, Homo sapiens
  misc_RNA (1)...(19): siRNA sense strand
ggaaggaugcaggagaaga

SEQ ID NO: 1967376 - RNA, 19 nt, Homo sapiens
  misc_RNA (1)...(19): siRNA sense strand
cagcacaguuacagaagca

SEQ ID NO: 1967377 - RNA, 19 nt, Homo sapiens
  misc_RNA (1)...(19): siRNA sense strand
ggagaaggaggugaagaug

SEQ ID NO: 1967378 - RNA, 19 nt, Homo sapiens
  misc_RNA (1)...(19): siRNA sense strand
ugacugcccaggacaagaa

SEQ ID NO: 1967379 - RNA, 19 nt, Homo sapiens
  misc_RNA (1)...(19): siRNA sense strand
gggcagaucugaacauugu

SEQ ID NO: 1967380 - RNA, 19 nt, Homo sapiens
  misc_RNA (1)...(19): siRNA sense strand
ggauaaaccauuugcauuu

SEQ ID NO: 1967381 - RNA, 19 nt, Homo sapiens
  misc_RNA (1)...(19): siRNA sense strand
ggucuauucuggauucuaa

SEQ ID NO: 1967382 - RNA, 19 nt, Homo sapiens
  misc_RNA (1)...(19): siRNA sense strand
ccaguuaguugaugaaguu

SEQ ID NO: 1967383 - RNA, 19 nt, Homo sapiens
  misc_RNA (1)...(19): siRNA sense strand
caaagaugaugaauuguca

SEQ ID NO: 1967384 - RNA, 19 nt, Homo sapiens
  misc_RNA (1)...(19): siRNA sense strand
gucauuaccuuauggaauu

SEQ ID NO: 1967385 - RNA, 19 nt, Homo sapiens
  misc_RNA (1)...(19): siRNA sense strand
ccaagauacucaugauuug

SEQ ID NO: 1967386 - RNA, 19 nt, Homo sapiens
  misc_RNA (1)...(19): siRNA sense strand
aaucaagugucuagaagua

SEQ ID NO: 1967387 - RNA, 19 nt, Homo sapiens
  misc_RNA (1)...(19): siRNA sense strand
ucccaaagaugaugaauug

SEQ ID NO: 1967388 - RNA, 19 nt, Homo sapiens
  misc_RNA (1)...(19): siRNA sense strand
ccagaaccauugcauuuau

SEQ ID NO: 1967389 - RNA, 19 nt, Homo sapiens
  misc_RNA (1)...(19): siRNA sense strand
gccaagauacucaugauuu

SEQ ID NO: 1967390 - RNA, 19 nt, Homo sapiens
  misc_RNA (1)...(19): siRNA sense strand
ccaaggaauuugugaaaca

SEQ ID NO: 1967391 - RNA, 19 nt, Homo sapiens
  misc_RNA (1)...(19): siRNA sense strand
gacagcaucucaccauguu

SEQ ID NO: 1967392 - RNA, 19 nt, Homo sapiens
  misc_RNA (1)...(19): siRNA sense strand
ggacugcacuaggucuaaa

SEQ ID NO: 1967393 - RNA, 19 nt, Homo sapiens
  misc_RNA (1)...(19): siRNA sense strand
ggacauggaagccuggaaa

SEQ ID NO: 1967394 - RNA, 19 nt, Homo sapiens
  misc_RNA (1)...(19): siRNA sense strand
caacuccuguacauucaaa

SEQ ID NO: 1967395 - RNA, 19 nt, Homo sapiens
  misc_RNA (1)...(19): siRNA sense strand
uguuggaucugaagacaua

SEQ ID NO: 1967396 - RNA, 19 nt, Homo sapiens
  misc_RNA (1)...(19): siRNA sense strand
caauguagucccaucauaa

SEQ ID NO: 1967397 - RNA, 19 nt, Homo sapiens
  misc_RNA (1)...(19): siRNA sense strand
gaugaugaauugucagaag

SEQ ID NO: 1967398 - RNA, 19 nt, Homo sapiens
  misc_RNA (1)...(19): siRNA sense strand
ccucuaacguaccaucuaa

SEQ ID NO: 1967399 - RNA, 19 nt, Homo sapiens
  misc_RNA (1)...(19): siRNA sense strand
acaauguagucccaucaua

SEQ ID NO: 1967400 - RNA, 19 nt, Homo sapiens
  misc_RNA (1)...(19): siRNA sense strand
ugccaaggcuggucucaaa

SEQ ID NO: 1967401 - RNA, 19 nt, Homo sapiens
  misc_RNA (1)...(19): siRNA sense strand
gaagagaaagcagaguuga

SEQ ID NO: 1967402 - RNA, 19 nt, Homo sapiens
  misc_RNA (1)...(19): siRNA sense strand
ggaagagaaagcagaguug

SEQ ID NO: 1967403 - RNA, 19 nt, Homo sapiens
  misc_RNA (1)...(19): siRNA sense strand
gaacgagaaauuaaucaag

SEQ ID NO: 1967404 - RNA, 19 nt, Homo sapiens
  misc_RNA (1)...(19): siRNA sense strand
gaucugaagacauagcaaa

SEQ ID NO: 1967405 - RNA, 19 nt, Homo sapiens
  misc_RNA (1)...(19): siRNA sense strand
cagaaccauugcauuuauu

SEQ ID NO: 1967406 - RNA, 19 nt, Homo sapiens
  misc_RNA (1)...(19): siRNA sense strand
guuaguugaugaaguuguu

SEQ ID NO: 1967407 - RNA, 19 nt, Homo sapiens
  misc_RNA (1)...(19): siRNA sense strand
ccugugacuugacauguuu

SEQ ID NO: 1967408 - RNA, 19 nt, Homo sapiens
  misc_RNA (1)...(19): siRNA sense strand
cagaagaacaaauaaguca

SEQ ID NO: 1967409 - RNA, 19 nt, Homo sapiens
  misc_RNA (1)...(19): siRNA sense strand
gaacaaauaagucauuacc

SEQ ID NO: 1967410 - RNA, 19 nt, Homo sapiens
  misc_RNA (1)...(19): siRNA sense strand
ugacaucucccaguuaguu

SEQ ID NO: 1967411 - RNA, 19 nt, Homo sapiens
  misc_RNA (1)...(19): siRNA sense strand
aguaugggauccuacauug

SEQ ID NO: 1967412 - RNA, 19 nt, Homo sapiens
  misc_RNA (1)...(19): siRNA sense strand
ggagaccaaccuaagagaa

SEQ ID NO: 1967413 - RNA, 19 nt, Homo sapiens
  misc_RNA (1)...(19): siRNA sense strand
cauaaucaagugucuagaa

SEQ ID NO: 1967414 - RNA, 19 nt, Homo sapiens
  misc_RNA (1)...(19): siRNA sense strand
aaccagaaccauugcauuu

SEQ ID NO: 1967415 - RNA, 19 nt, Homo sapiens
  misc_RNA (1)...(19): siRNA sense strand
ucaagugucuagaaguauc

SEQ ID NO: 1967416 - RNA, 19 nt, Homo sapiens
  misc_RNA (1)...(19): siRNA sense strand
agaacuacauaaucaagug

SEQ ID NO: 1967417 - RNA, 19 nt, Homo sapiens
  misc_RNA (1)...(19): siRNA sense strand
caucuaaggcuguucuuuc

SEQ ID NO: 1967418 - RNA, 19 nt, Homo sapiens
  misc_RNA (1)...(19): siRNA sense strand
gugcaacuccuguacauuc

SEQ ID NO: 1967419 - RNA, 19 nt, Homo sapiens
  misc_RNA (1)...(19): siRNA sense strand
gggccaagauacucaugau

SEQ ID NO: 1967420 - RNA, 19 nt, Homo sapiens
  misc_RNA (1)...(19): siRNA sense strand
gauguaaccaguggaaaug

SEQ ID NO: 1967421 - RNA, 19 nt, Homo sapiens
  misc_RNA (1)...(19): siRNA sense strand
uaagagaaccaggaaugaa

SEQ ID NO: 1967422 - RNA, 19 nt, Homo sapiens
  misc_RNA (1)...(19): siRNA sense strand
gagaggagaccaaccuaag

SEQ ID NO: 1967423 - RNA, 19 nt, Homo sapiens
  misc_RNA (1)...(19): siRNA sense strand
aagagaaccaggaaugaaa

SEQ ID NO: 1967424 - RNA, 19 nt, Homo sapiens
  misc_RNA (1)...(19): siRNA sense strand
cugaagacauagcaaagga

SEQ ID NO: 1967425 - RNA, 19 nt, Homo sapiens
  misc_RNA (1)...(19): siRNA sense strand
caaccagaaccauugcauu

SEQ ID NO: 1967426 - RNA, 19 nt, Homo sapiens
  misc_RNA (1)...(19): siRNA sense strand
gaacuacauaaucaagugu

SEQ ID NO: 1967427 - RNA, 19 nt, Homo sapiens
  misc_RNA (1)...(19): siRNA sense strand
ccaaagaugaugaauuguc

SEQ ID NO: 1967428 - RNA, 19 nt, Homo sapiens
  misc_RNA (1)...(19): siRNA sense strand
aaaaugacaucucccaguu

SEQ ID NO: 1967429 - RNA, 19 nt, Homo sapiens
  misc_RNA (1)...(19): siRNA sense strand
ccuaagagaaccaggaaug

SEQ ID NO: 1967430 - RNA, 19 nt, Homo sapiens
  misc_RNA (1)...(19): siRNA sense strand
ggcaucgcauucccaaaga

SEQ ID NO: 1967431 - RNA, 19 nt, Homo sapiens
  misc_RNA (1)...(19): siRNA sense strand
aaugacaucucccaguuag

SEQ ID NO: 1967432 - RNA, 19 nt, Homo sapiens
  misc_RNA (1)...(19): siRNA sense strand
caaaauucuuggucuauuc

SEQ ID NO: 1967433 - RNA, 19 nt, Homo sapiens
  misc_RNA (1)...(19): siRNA sense strand
agaaagcagaguugaagaa

SEQ ID NO: 1967434 - RNA, 19 nt, Homo sapiens
  misc_RNA (1)...(19): siRNA sense strand
gagaaagcagaguugaaga

SEQ ID NO: 1967435 - RNA, 19 nt, Homo sapiens
  misc_RNA (1)...(19): siRNA sense strand
aaaugacaucucccaguua

SEQ ID NO: 1967436 - RNA, 19 nt, Homo sapiens
  misc_RNA (1)...(19): siRNA sense strand
gaaguugcaccucuaacgu

SEQ ID NO: 1967437 - RNA, 19 nt, Homo sapiens
  misc_RNA (1)...(19): siRNA sense strand
gaagccaaggaauuuguga

SEQ ID NO: 1967438 - RNA, 19 nt, Homo sapiens
  misc_RNA (1)...(19): siRNA sense strand
gcacuaggucuaaaagaaa

SEQ ID NO: 1967439 - RNA, 19 nt, Homo sapiens
  misc_RNA (1)...(19): siRNA sense strand
gagagaggagaccaaccua

SEQ ID NO: 1967440 - RNA, 19 nt, Homo sapiens
  misc_RNA (1)...(19): siRNA sense strand
caagaacuacauaaucaag

SEQ ID NO: 1967441 - RNA, 19 nt, Homo sapiens
  misc_RNA (1)...(19): siRNA sense strand
ggaagccuggaaagaugua

SEQ ID NO: 1967442 - RNA, 19 nt, Homo sapiens
  misc_RNA (1)...(19): siRNA sense strand
gaaagcagaguugaagaac

SEQ ID NO: 1967443 - RNA, 19 nt, Homo sapiens
  misc_RNA (1)...(19): siRNA sense strand
gauccuacauugcuuuuag

SEQ ID NO: 1967444 - RNA, 19 nt, Homo sapiens
  misc_RNA (1)...(19): siRNA sense strand
aggcuguucuuuccuguga

SEQ ID NO: 1967445 - RNA, 19 nt, Homo sapiens
  misc_RNA (1)...(19): siRNA sense strand
agacauagcaaaggacaug

SEQ ID NO: 1967446 - RNA, 19 nt, Homo sapiens
  misc_RNA (1)...(19): siRNA sense strand
agaaaacaaucaaccagaa

SEQ ID NO: 1967447 - RNA, 19 nt, Homo sapiens
  misc_RNA (1)...(19): siRNA sense strand
auaaucaagugucuagaag

SEQ ID NO: 1967448 - RNA, 19 nt, Homo sapiens
  misc_RNA (1)...(19): siRNA sense strand
cauggaagccuggaaagau

SEQ ID NO: 1967449 - RNA, 19 nt, Homo sapiens
  misc_RNA (1)...(19): siRNA sense strand
guucuuuccugugacuuga

SEQ ID NO: 1967450 - RNA, 19 nt, Homo sapiens
  misc_RNA (1)...(19): siRNA sense strand
gaggagaccaaccuaagag

SEQ ID NO: 1967451 - RNA, 19 nt, Homo sapiens
  misc_RNA (1)...(19): siRNA sense strand
acaaucaaccagaaccauu

SEQ ID NO: 1967452 - RNA, 19 nt, Homo sapiens
  misc_RNA (1)...(19): siRNA sense strand
gcaucgcauucccaaagau

SEQ ID NO: 1967453 - RNA, 19 nt, Homo sapiens
  misc_RNA (1)...(19): siRNA sense strand
guaaccaguggaaaugcua

SEQ ID NO: 1967454 - RNA, 19 nt, Homo sapiens
  misc_RNA (1)...(19): siRNA sense strand
aaagauguaaccaguggaa

SEQ ID NO: 1967455 - RNA, 19 nt, Homo sapiens
  misc_RNA (1)...(19): siRNA sense strand
ggagagaggagaccaaccu

SEQ ID NO: 1967456 - RNA, 19 nt, Homo sapiens
  misc_RNA (1)...(19): siRNA sense strand
cauaagggcagaucugaac

SEQ ID NO: 1967457 - RNA, 19 nt, Homo sapiens
  misc_RNA (1)...(19): siRNA sense strand
cgaacgagaaauuaaucaa

SEQ ID NO: 1967458 - RNA, 19 nt, Homo sapiens
  misc_RNA (1)...(19): siRNA sense strand
caguggaaaugcuaaaauu

SEQ ID NO: 1967459 - RNA, 19 nt, Homo sapiens
  misc_RNA (1)...(19): siRNA sense strand
cuaagagaaccaggaauga

SEQ ID NO: 1967460 - RNA, 19 nt, Homo sapiens
  misc_RNA (1)...(19): siRNA sense strand
aagggcagaucugaacauu

SEQ ID NO: 1967461 - RNA, 19 nt, Homo sapiens
  misc_RNA (1)...(19): siRNA sense strand
aagcagaguugaagaaccu

SEQ ID NO: 1967462 - RNA, 19 nt, Homo sapiens
  misc_RNA (1)...(19): siRNA sense strand
gucagaagaacaaauaagu

SEQ ID NO: 1967463 - RNA, 19 nt, Homo sapiens
  misc_RNA (1)...(19): siRNA sense strand
caaggcuggucucaaacuc

SEQ ID NO: 1967464 - RNA, 19 nt, Homo sapiens
  misc_RNA (1)...(19): siRNA sense strand
gacuugacauguuuuguug

SEQ ID NO: 1967465 - RNA, 19 nt, Homo sapiens
  misc_RNA (1)...(19): siRNA sense strand
gagaccaaccuaagagaac

SEQ ID NO: 1967466 - RNA, 19 nt, Homo sapiens
  misc_RNA (1)...(19): siRNA sense strand
caguaugggauccuacauu

SEQ ID NO: 1967467 - RNA, 19 nt, Homo sapiens
  misc_RNA (1)...(19): siRNA sense strand
aggauaaaccauuugcauu

SEQ ID NO: 1967468 - RNA, 19 nt, Homo sapiens
  misc_RNA (1)...(19): siRNA sense strand
caggauaaaccauuugcau

SEQ ID NO: 1967469 - RNA, 19 nt, Homo sapiens
  misc_RNA (1)...(19): siRNA sense strand
augaugaauugucagaaga

SEQ ID NO: 1967470 - RNA, 19 nt, Homo sapiens
  misc_RNA (1)...(19): siRNA sense strand
auggaagccuggaaagaug

SEQ ID NO: 1967471 - RNA, 19 nt, Homo sapiens
  misc_RNA (1)...(19): siRNA sense strand
agaggagaccaaccuaaga

SEQ ID NO: 1967472 - RNA, 19 nt, Homo sapiens
  misc_RNA (1)...(19): siRNA sense strand
gcgaacgagaaauuaauca

SEQ ID NO: 1967473 - RNA, 19 nt, Homo sapiens
  misc_RNA (1)...(19): siRNA sense strand
uaaccaguggaaaugcuaa

SEQ ID NO: 1967474 - RNA, 19 nt, Homo sapiens
  misc_RNA (1)...(19): siRNA sense strand
agagaaagcagaguugaag

SEQ ID NO: 1967475 - RNA, 19 nt, Homo sapiens
  misc_RNA (1)...(19): siRNA sense strand
aaacaauguagucccauca

SEQ ID NO: 1967476 - RNA, 19 nt, Homo sapiens
  misc_RNA (1)...(19): siRNA sense strand
gaugaauugucagaagaac

SEQ ID NO: 1967477 - RNA, 19 nt, Homo sapiens
  misc_RNA (1)...(19): siRNA sense strand
cauagcaaaggacauggaa

SEQ ID NO: 1967478 - RNA, 19 nt, Homo sapiens
  misc_RNA (1)...(19): siRNA sense strand
ggccaagauacucaugauu

SEQ ID NO: 1967479 - RNA, 19 nt, Homo sapiens
  misc_RNA (1)...(19): siRNA sense strand
gaacaaguuucaugaagaa

SEQ ID NO: 1967480 - RNA, 19 nt, Homo sapiens
  misc_RNA (1)...(19): siRNA sense strand
guaaucaacuggcauauga

SEQ ID NO: 1967481 - RNA, 19 nt, Homo sapiens
  misc_RNA (1)...(19): siRNA sense strand
caaguggagucuauaaaua

SEQ ID NO: 1967482 - RNA, 19 nt, Homo sapiens
  misc_RNA (1)...(19): siRNA sense strand
gcaaaucacuagaagagaa

SEQ ID NO: 1967483 - RNA, 19 nt, Homo sapiens
  misc_RNA (1)...(19): siRNA sense strand
gaaaguaucacaagauuug

SEQ ID NO: 1967484 - RNA, 19 nt, Homo sapiens
  misc_RNA (1)...(19): siRNA sense strand
gcaaagaaaucaauaacca

SEQ ID NO: 1967485 - RNA, 19 nt, Homo sapiens
  misc_RNA (1)...(19): siRNA sense strand
gguaagagauugcaguuug

SEQ ID NO: 1967486 - RNA, 19 nt, Homo sapiens
  misc_RNA (1)...(19): siRNA sense strand
gacacaaguugaagauuua

SEQ ID NO: 1967487 - RNA, 19 nt, Homo sapiens
  misc_RNA (1)...(19): siRNA sense strand
gaaaagagauggaaccaaa

SEQ ID NO: 1967488 - RNA, 19 nt, Homo sapiens
  misc_RNA (1)...(19): siRNA sense strand
ggagaacauucgaauaauu

SEQ ID NO: 1967489 - RNA, 19 nt, Homo sapiens
  misc_RNA (1)...(19): siRNA sense strand
caagcaagguuaaaucaaa

SEQ ID NO: 1967490 - RNA, 19 nt, Homo sapiens
  misc_RNA (1)...(19): siRNA sense strand
gaagaagaaaguccuguua

SEQ ID NO: 1967491 - RNA, 19 nt, Homo sapiens
  misc_RNA (1)...(19): siRNA sense strand
gcagagaaauuacggauag

SEQ ID NO: 1967492 - RNA, 19 nt, Homo sapiens
  misc_RNA (1)...(19): siRNA sense strand
ggaaauugaucaagagaau

SEQ ID NO: 1967493 - RNA, 19 nt, Homo sapiens
  misc_RNA (1)...(19): siRNA sense strand
ugagagagauuucugauau

SEQ ID NO: 1967494 - RNA, 19 nt, Homo sapiens
  misc_RNA (1)...(19): siRNA sense strand
gaaugcaacugcuagacua

SEQ ID NO: 1967495 - RNA, 19 nt, Homo sapiens
  misc_RNA (1)...(19): siRNA sense strand
acaaugaacugacugcuaa

SEQ ID NO: 1967496 - RNA, 19 nt, Homo sapiens
  misc_RNA (1)...(19): siRNA sense strand
gaagaaaguccuguuaauu

SEQ ID NO: 1967497 - RNA, 19 nt, Homo sapiens
  misc_RNA (1)...(19): siRNA sense strand
gaacaaguggagucuauaa

SEQ ID NO: 1967498 - RNA, 19 nt, Homo sapiens
  misc_RNA (1)...(19): siRNA sense strand
gaacuagaacuggcuaaua

SEQ ID NO: 1967499 - RNA, 19 nt, Homo sapiens
  misc_RNA (1)...(19): siRNA sense strand
uaacuaugcuggaaaugaa

SEQ ID NO: 1967500 - RNA, 19 nt, Homo sapiens
  misc_RNA (1)...(19): siRNA sense strand
gagacaaaguaaucaauga

SEQ ID NO: 1967501 - RNA, 19 nt, Homo sapiens
  misc_RNA (1)...(19): siRNA sense strand
gaaaacaucuccuuaaaag

SEQ ID NO: 1967502 - RNA, 19 nt, Homo sapiens
  misc_RNA (1)...(19): siRNA sense strand
agagaaaucuugacuuaga

SEQ ID NO: 1967503 - RNA, 19 nt, Homo sapiens
  misc_RNA (1)...(19): siRNA sense strand
agacacaaguugaagauuu

SEQ ID NO: 1967504 - RNA, 19 nt, Homo sapiens
  misc_RNA (1)...(19): siRNA sense strand
acaaacggcuugggauuua

SEQ ID NO: 1967505 - RNA, 19 nt, Homo sapiens
  misc_RNA (1)...(19): siRNA sense strand
ugagaucgcucuaaggaaa

SEQ ID NO: 1967506 - RNA, 19 nt, Homo sapiens
  misc_RNA (1)...(19): siRNA sense strand
gaaguagagucccucagaa

SEQ ID NO: 1967507 - RNA, 19 nt, Homo sapiens
  misc_RNA (1)...(19): siRNA sense strand
uaacaaagcaguugaauac

SEQ ID NO: 1967508 - RNA, 19 nt, Homo sapiens
  misc_RNA (1)...(19): siRNA sense strand
ggaacaggaaacuaaauua

SEQ ID NO: 1967509 - RNA, 19 nt, Homo sapiens
  misc_RNA (1)...(19): siRNA sense strand
ugaagaagcuacaggauca

SEQ ID NO: 1967510 - RNA, 19 nt, Homo sapiens
  misc_RNA (1)...(19): siRNA sense strand
ccaugaagaugaagugaaa

SEQ ID NO: 1967511 - RNA, 19 nt, Homo sapiens
  misc_RNA (1)...(19): siRNA sense strand
gaacugaaaaggcaaauua

SEQ ID NO: 1967512 - RNA, 19 nt, Homo sapiens
  misc_RNA (1)...(19): siRNA sense strand
gggaauuagucaaggauaa

SEQ ID NO: 1967513 - RNA, 19 nt, Homo sapiens
  misc_RNA (1)...(19): siRNA sense strand
uaaagggccuggaagaguu

SEQ ID NO: 1967514 - RNA, 19 nt, Homo sapiens
  misc_RNA (1)...(19): siRNA sense strand
gcuucaaguucuuagauua

SEQ ID NO: 1967515 - RNA, 19 nt, Homo sapiens
  misc_RNA (1)...(19): siRNA sense strand
gaacaacagauuaagauuc

SEQ ID NO: 1967516 - RNA, 19 nt, Homo sapiens
  misc_RNA (1)...(19): siRNA sense strand
agaaucugcuuuaagguua

SEQ ID NO: 1967517 - RNA, 19 nt, Homo sapiens
  misc_RNA (1)...(19): siRNA sense strand
caaauggccugggaucaaa

SEQ ID NO: 1967518 - RNA, 19 nt, Homo sapiens
  misc_RNA (1)...(19): siRNA sense strand
aagaacaggcucucuauua

SEQ ID NO: 1967519 - RNA, 19 nt, Homo sapiens
  misc_RNA (1)...(19): siRNA sense strand
gaagaagugaagaagaaua

SEQ ID NO: 1967520 - RNA, 19 nt, Homo sapiens
  misc_RNA (1)...(19): siRNA sense strand
gagagagauuucugauauu

SEQ ID NO: 1967521 - RNA, 19 nt, Homo sapiens
  misc_RNA (1)...(19): siRNA sense strand
caaauacaaugaagaccuu

SEQ ID NO: 1967522 - RNA, 19 nt, Homo sapiens
  misc_RNA (1)...(19): siRNA sense strand
caaagccgauaaagagaaa

SEQ ID NO: 1967523 - RNA, 19 nt, Homo sapiens
  misc_RNA (1)...(19): siRNA sense strand
gaaaaguucuccaaaacaa

SEQ ID NO: 1967524 - RNA, 19 nt, Homo sapiens
  misc_RNA (1)...(19): siRNA sense strand
ggaaauccauugugguuac

SEQ ID NO: 1967525 - RNA, 19 nt, Homo sapiens
  misc_RNA (1)...(19): siRNA sense strand
ggaaguagaggauuuaaag

SEQ ID NO: 1967526 - RNA, 19 nt, Homo sapiens
  misc_RNA (1)...(19): siRNA sense strand
gagcaaagagaaauuguga

SEQ ID NO: 1967527 - RNA, 19 nt, Homo sapiens
  misc_RNA (1)...(19): siRNA sense strand
gaauaugaacguacaauca

SEQ ID NO: 1967528 - RNA, 19 nt, Homo sapiens
  misc_RNA (1)...(19): siRNA sense strand
gagaaaucuugacuuagaa

SEQ ID NO: 1967529 - RNA, 19 nt, Homo sapiens
  misc_RNA (1)...(19): siRNA sense strand
gcaaaccccugacagauaa

SEQ ID NO: 1967530 - RNA, 19 nt, Homo sapiens
  misc_RNA (1)...(19): siRNA sense strand
gagaaauugugaagaaaca

SEQ ID NO: 1967531 - RNA, 19 nt, Homo sapiens
  misc_RNA (1)...(19): siRNA sense strand
ggacuucguuaaagcaaau

SEQ ID NO: 1967532 - RNA, 19 nt, Homo sapiens
  misc_RNA (1)...(19): siRNA sense strand
aacuagaacuggcuaauaa

SEQ ID NO: 1967533 - RNA, 19 nt, Homo sapiens
  misc_RNA (1)...(19): siRNA sense strand
ggaaacugauauugccaaa

SEQ ID NO: 1967534 - RNA, 19 nt, Homo sapiens
  misc_RNA (1)...(19): siRNA sense strand
gaaagacaaucccagaacu

SEQ ID NO: 1967535 - RNA, 19 nt, Homo sapiens
  misc_RNA (1)...(19): siRNA sense strand
caaauuacagcuucaagaa

SEQ ID NO: 1967536 - RNA, 19 nt, Homo sapiens
  misc_RNA (1)...(19): siRNA sense strand
cauuggagauggaauuaaa

SEQ ID NO: 1967537 - RNA, 19 nt, Homo sapiens
  misc_RNA (1)...(19): siRNA sense strand
gaaagcaccauaccugaug

SEQ ID NO: 1967538 - RNA, 19 nt, Homo sapiens
  misc_RNA (1)...(19): siRNA sense strand
ggaccaaaguggagcugaa

SEQ ID NO: 1967539 - RNA, 19 nt, Homo sapiens
  misc_RNA (1)...(19): siRNA sense strand
gcugaagaacguauuauuu

SEQ ID NO: 1967540 - RNA, 19 nt, Homo sapiens
  misc_RNA (1)...(19): siRNA sense strand
ggaaguagagucccucaga

SEQ ID NO: 1967541 - RNA, 19 nt, Homo sapiens
  misc_RNA (1)...(19): siRNA sense strand
ugaaaggcuucguaaagaa

SEQ ID NO: 1967542 - RNA, 19 nt, Homo sapiens
  misc_RNA (1)...(19): siRNA sense strand
gaagaaacaugaggaagac

SEQ ID NO: 1967543 - RNA, 19 nt, Homo sapiens
  misc_RNA (1)...(19): siRNA sense strand
caacagaacaaguuucaug

SEQ ID NO: 1967544 - RNA, 19 nt, Homo sapiens
  misc_RNA (1)...(19): siRNA sense strand
gaacaggcucucuauuaug

SEQ ID NO: 1967545 - RNA, 19 nt, Homo sapiens
  misc_RNA (1)...(19): siRNA sense strand
agaacaggcucucuauuau

SEQ ID NO: 1967546 - RNA, 19 nt, Homo sapiens
  misc_RNA (1)...(19): siRNA sense strand
gaagaaauugugcaacaga

SEQ ID NO: 1967547 - RNA, 19 nt, Homo sapiens
  misc_RNA (1)...(19): siRNA sense strand
ugaaggaaaugugugaauu

SEQ ID NO: 1967548 - RNA, 19 nt, Homo sapiens
  misc_RNA (1)...(19): siRNA sense strand
cuagagagcuaaagacaca

SEQ ID NO: 1967549 - RNA, 19 nt, Homo sapiens
  misc_RNA (1)...(19): siRNA sense strand
guuaagagaugaauuagcu

SEQ ID NO: 1967550 - RNA, 19 nt, Homo sapiens
  misc_RNA (1)...(19): siRNA sense strand
guuugaagaugaagaagaa

SEQ ID NO: 1967551 - RNA, 19 nt, Homo sapiens
  misc_RNA (1)...(19): siRNA sense strand
cugaagaguuugaagauga

SEQ ID NO: 1967552 - RNA, 19 nt, Homo sapiens
  misc_RNA (1)...(19): siRNA sense strand
ugaauuaacuagcccuguu

SEQ ID NO: 1967553 - RNA, 19 nt, Homo sapiens
  misc_RNA (1)...(19): siRNA sense strand
gaauuaauccaucagauag

SEQ ID NO: 1967554 - RNA, 19 nt, Homo sapiens
  misc_RNA (1)...(19): siRNA sense strand
acaaagcaguugaauacuu

SEQ ID NO: 1967555 - RNA, 19 nt, Homo sapiens
  misc_RNA (1)...(19): siRNA sense strand
auaaagaacuggagauuac

SEQ ID NO: 1967556 - RNA, 19 nt, Homo sapiens
  misc_RNA (1)...(19): siRNA sense strand
caacaacuacaaugagaaa

SEQ ID NO: 1967557 - RNA, 19 nt, Homo sapiens
  misc_RNA (1)...(19): siRNA sense strand
gaacugaggcuucgauugc

SEQ ID NO: 1967558 - RNA, 19 nt, Homo sapiens
  misc_RNA (1)...(19): siRNA sense strand
gagcagaaacuugaugaaa

SEQ ID NO: 1967559 - RNA, 19 nt, Homo sapiens
  misc_RNA (1)...(19): siRNA sense strand
gauggaggccuacaacuug

SEQ ID NO: 1967560 - RNA, 19 nt, Homo sapiens
  misc_RNA (1)...(19): siRNA sense strand
gaagugaagaagaauauuc

SEQ ID NO: 1967561 - RNA, 19 nt, Homo sapiens
  misc_RNA (1)...(19): siRNA sense strand
agaagagacugguaagaga

SEQ ID NO: 1967562 - RNA, 19 nt, Homo sapiens
  misc_RNA (1)...(19): siRNA sense strand
ggaauucgaaacaaguuaa

SEQ ID NO: 1967563 - RNA, 19 nt, Homo sapiens
  misc_RNA (1)...(19): siRNA sense strand
gaaagaagcacuuaaaaca

SEQ ID NO: 1967564 - RNA, 19 nt, Homo sapiens
  misc_RNA (1)...(19): siRNA sense strand
gcacuuagucgggcacuuu

SEQ ID NO: 1967565 - RNA, 19 nt, Homo sapiens
  misc_RNA (1)...(19): siRNA sense strand
cagaagacaaguugaaauu

SEQ ID NO: 1967566 - RNA, 19 nt, Homo sapiens
  misc_RNA (1)...(19): siRNA sense strand
agaagaaaguccuguuaau

SEQ ID NO: 1967567 - RNA, 19 nt, Homo sapiens
  misc_RNA (1)...(19): siRNA sense strand
ucaggaauauugacuagug

SEQ ID NO: 1967568 - RNA, 19 nt, Homo sapiens
  misc_RNA (1)...(19): siRNA sense strand
caaaggagcccaaaaggua

SEQ ID NO: 1967569 - RNA, 19 nt, Homo sapiens
  misc_RNA (1)...(19): siRNA sense strand
aggaagaagugaagaagaa

SEQ ID NO: 1967570 - RNA, 19 nt, Homo sapiens
  misc_RNA (1)...(19): siRNA sense strand
uugaagaacuccaaaggaa

SEQ ID NO: 1967571 - RNA, 19 nt, Homo sapiens
  misc_RNA (1)...(19): siRNA sense strand
agagaaugaugaacugaaa

SEQ ID NO: 1967572 - RNA, 19 nt, Homo sapiens
  misc_RNA (1)...(19): siRNA sense strand
gagagaaagaggaaauuga

SEQ ID NO: 1967573 - RNA, 19 nt, Homo sapiens
  misc_RNA (1)...(19): siRNA sense strand
gaaggagaaacaacagaaa

SEQ ID NO: 1967574 - RNA, 19 nt, Homo sapiens
  misc_RNA (1)...(19): siRNA sense strand
gcaaagagaaauugugaag

SEQ ID NO: 1967575 - RNA, 19 nt, Homo sapiens
  misc_RNA (1)...(19): siRNA sense strand
guaucaacgucuucuagaa

SEQ ID NO: 1967576 - RNA, 19 nt, Homo sapiens
  misc_RNA (1)...(19): siRNA sense strand
aagcauuacugaccuuaaa

SEQ ID NO: 1967577 - RNA, 19 nt, Homo sapiens
  misc_RNA (1)...(19): siRNA sense strand
gaauagagucagaugauca

SEQ ID NO: 1967578 - RNA, 19 nt, Homo sapiens
  misc_RNA (1)...(19): siRNA sense strand
gaacguauuauuucugcaa

SEQ ID NO: 1967579 - RNA, 19 nt, Homo sapiens
  misc_RNA (1)...(19): siRNA sense strand
gaauauggcugcccucugu

SEQ ID NO: 1967580 - RNA, 19 nt, Homo sapiens
  misc_RNA (1)...(19): siRNA sense strand
gcaaaggacuauaacaugu

SEQ ID NO: 1967581 - RNA, 19 nt, Homo sapiens
  misc_RNA (1)...(19): siRNA sense strand
ggagagagacuuuguuuau

SEQ ID NO: 1967582 - RNA, 19 nt, Homo sapiens
  misc_RNA (1)...(19): siRNA sense strand
gaaguacauugcuggguuu

SEQ ID NO: 1967583 - RNA, 19 nt, Homo sapiens
  misc_RNA (1)...(19): siRNA sense strand
gaauaucugugccacuuug

SEQ ID NO: 1967584 - RNA, 19 nt, Homo sapiens
  misc_RNA (1)...(19): siRNA sense strand
gaaaccacccuucaugaaa

SEQ ID NO: 1967585 - RNA, 19 nt, Homo sapiens
  misc_RNA (1)...(19): siRNA sense strand
gcacaaaacugacccgauu

SEQ ID NO: 1967586 - RNA, 19 nt, Homo sapiens
  misc_RNA (1)...(19): siRNA sense strand
caaaucagaucucaucaag

SEQ ID NO: 1967587 - RNA, 19 nt, Homo sapiens
  misc_RNA (1)...(19): siRNA sense strand
gagaugccauguugaguug

SEQ ID NO: 1967588 - RNA, 19 nt, Homo sapiens
  misc_RNA (1)...(19): siRNA sense strand
ggccaaauguggacucuga

SEQ ID NO: 1967589 - RNA, 19 nt, Homo sapiens
  misc_RNA (1)...(19): siRNA sense strand
acacagacauucagucaug

SEQ ID NO: 1967590 - RNA, 19 nt, Homo sapiens
  misc_RNA (1)...(19): siRNA sense strand
aaacagcuguggaugcaaa

SEQ ID NO: 1967591 - RNA, 19 nt, Homo sapiens
  misc_RNA (1)...(19): siRNA sense strand
ucaagaauguccacacaga

SEQ ID NO: 1967592 - RNA, 19 nt, Homo sapiens
  misc_RNA (1)...(19): siRNA sense strand
gagagagacuuuguuuaug

SEQ ID NO: 1967593 - RNA, 19 nt, Homo sapiens
  misc_RNA (1)...(19): siRNA sense strand
ggaaagcgagcucgacuug

SEQ ID NO: 1967594 - RNA, 19 nt, Homo sapiens
  misc_RNA (1)...(19): siRNA sense strand
gccaggagcucaagaccuu

SEQ ID NO: 1967595 - RNA, 19 nt, Homo sapiens
  misc_RNA (1)...(19): siRNA sense strand
caacaccuccugccuggua

SEQ ID NO: 1967596 - RNA, 19 nt, Homo sapiens
  misc_RNA (1)...(19): siRNA sense strand
gagcuuagucuccaccuuu

SEQ ID NO: 1967597 - RNA, 19 nt, Homo sapiens
  misc_RNA (1)...(19): siRNA sense strand
ucaagaccuuugccauuaa

SEQ ID NO: 1967598 - RNA, 19 nt, Homo sapiens
  misc_RNA (1)...(19): siRNA sense strand
cucaagaccuuugccauua

SEQ ID NO: 1967599 - RNA, 19 nt, Homo sapiens
  misc_RNA (1)...(19): siRNA sense strand
gcaggaugguguucuggaa

SEQ ID NO: 1967600 - RNA, 19 nt, Homo sapiens
  misc_RNA (1)...(19): siRNA sense strand
gaacacaaggcaguggaua

SEQ ID NO: 1967601 - RNA, 19 nt, Homo sapiens
  misc_RNA (1)...(19): siRNA sense strand
gaggaggaaccaacuauga

SEQ ID NO: 1967602 - RNA, 19 nt, Homo sapiens
  misc_RNA (1)...(19): siRNA sense strand
agagagaucuggcaguuca

SEQ ID NO: 1967603 - RNA, 19 nt, Homo sapiens
  misc_RNA (1)...(19): siRNA sense strand
gauggacuguucauggauu

SEQ ID NO: 1967604 - RNA, 19 nt, Homo sapiens
  misc_RNA (1)...(19): siRNA sense strand
gaugccauguugaguugua

SEQ ID NO: 1967605 - RNA, 19 nt, Homo sapiens
  misc_RNA (1)...(19): siRNA sense strand
caaaggacuauaacaugua

SEQ ID NO: 1967606 - RNA, 19 nt, Homo sapiens
  misc_RNA (1)...(19): siRNA sense strand
aaagcgagcucgacuugga

SEQ ID NO: 1967607 - RNA, 19 nt, Homo sapiens
  misc_RNA (1)...(19): siRNA sense strand
ggagaugccauguugaguu

SEQ ID NO: 1967608 - RNA, 19 nt, Homo sapiens
  misc_RNA (1)...(19): siRNA sense strand
gcucaagaccuuugccauu

SEQ ID NO: 1967609 - RNA, 19 nt, Homo sapiens
  misc_RNA (1)...(19): siRNA sense strand
gaaggaagaacaaccaucu

SEQ ID NO: 1967610 - RNA, 19 nt, Homo sapiens
  misc_RNA (1)...(19): siRNA sense strand
caagaaugacuccgagaaa

SEQ ID NO: 1967611 - RNA, 19 nt, Homo sapiens
  misc_RNA (1)...(19): siRNA sense strand
gcuggaggcucaggaaguu

SEQ ID NO: 1967612 - RNA, 19 nt, Homo sapiens
  misc_RNA (1)...(19): siRNA sense strand
aaucagaucucaucaagac

SEQ ID NO: 1967613 - RNA, 19 nt, Homo sapiens
  misc_RNA (1)...(19): siRNA sense strand
gaaaacaucaugaaagaga

SEQ ID NO: 1967614 - RNA, 19 nt, Homo sapiens
  misc_RNA (1)...(19): siRNA sense strand
uggaaccgcuggccaaaug

SEQ ID NO: 1967615 - RNA, 19 nt, Homo sapiens
  misc_RNA (1)...(19): siRNA sense strand
guuuacaccuucaaaguuc

SEQ ID NO: 1967616 - RNA, 19 nt, Homo sapiens
  misc_RNA (1)...(19): siRNA sense strand
aaagaaagaaccacaggaa

SEQ ID NO: 1967617 - RNA, 19 nt, Homo sapiens
  misc_RNA (1)...(19): siRNA sense strand
gaaugacuccgagaaagaa

SEQ ID NO: 1967618 - RNA, 19 nt, Homo sapiens
  misc_RNA (1)...(19): siRNA sense strand
agagcuaagucaagaagaa

SEQ ID NO: 1967619 - RNA, 19 nt, Homo sapiens
  misc_RNA (1)...(19): siRNA sense strand
gcugggaguuuaaugaagu

SEQ ID NO: 1967620 - RNA, 19 nt, Homo sapiens
  misc_RNA (1)...(19): siRNA sense strand
aucaagagcugggaguuua

SEQ ID NO: 1967621 - RNA, 19 nt, Homo sapiens
  misc_RNA (1)...(19): siRNA sense strand
aaagagguauucccaugga

SEQ ID NO: 1967622 - RNA, 19 nt, Homo sapiens
  misc_RNA (1)...(19): siRNA sense strand
uaucugugccacuuuguua

SEQ ID NO: 1967623 - RNA, 19 nt, Homo sapiens
  misc_RNA (1)...(19): siRNA sense strand
ccugugagcuacuguggaa

SEQ ID NO: 1967624 - RNA, 19 nt, Homo sapiens
  misc_RNA (1)...(19): siRNA sense strand
gaaaacagcuguggaugca

SEQ ID NO: 1967625 - RNA, 19 nt, Homo sapiens
  misc_RNA (1)...(19): siRNA sense strand
agagagacuuuguuuaugg

SEQ ID NO: 1967626 - RNA, 19 nt, Homo sapiens
  misc_RNA (1)...(19): siRNA sense strand
uggcagagcuaagucaaga

SEQ ID NO: 1967627 - RNA, 19 nt, Homo sapiens
  misc_RNA (1)...(19): siRNA sense strand
gagcugggaguuuaaugaa

SEQ ID NO: 1967628 - RNA, 19 nt, Homo sapiens
  misc_RNA (1)...(19): siRNA sense strand
ggaggaaccaacuaugaau

SEQ ID NO: 1967629 - RNA, 19 nt, Homo sapiens
  misc_RNA (1)...(19): siRNA sense strand
cuacuugggauguacauuu

SEQ ID NO: 1967630 - RNA, 19 nt, Homo sapiens
  misc_RNA (1)...(19): siRNA sense strand
ucagaugccugcuuguaca

SEQ ID NO: 1967631 - RNA, 19 nt, Homo sapiens
  misc_RNA (1)...(19): siRNA sense strand
ggucagaugccugcuugua

SEQ ID NO: 1967632 - RNA, 19 nt, Homo sapiens
  misc_RNA (1)...(19): siRNA sense strand
gauacacuuuggucagaug

SEQ ID NO: 1967633 - RNA, 19 nt, Homo sapiens
  misc_RNA (1)...(19): siRNA sense strand
ucaaaguuccugugagcua

SEQ ID NO: 1967634 - RNA, 19 nt, Homo sapiens
  misc_RNA (1)...(19): siRNA sense strand
gaaguccuguccuuucaac

SEQ ID NO: 1967635 - RNA, 19 nt, Homo sapiens
  misc_RNA (1)...(19): siRNA sense strand
acaaggcaguggauacuuc

SEQ ID NO: 1967636 - RNA, 19 nt, Homo sapiens
  misc_RNA (1)...(19): siRNA sense strand
ccacacagacauucaguca

SEQ ID NO: 1967637 - RNA, 19 nt, Homo sapiens
  misc_RNA (1)...(19): siRNA sense strand
ggagauggcagagcuaagu

SEQ ID NO: 1967638 - RNA, 19 nt, Homo sapiens
  misc_RNA (1)...(19): siRNA sense strand
cacuuucacuugcaacaaa

SEQ ID NO: 1967639 - RNA, 19 nt, Homo sapiens
  misc_RNA (1)...(19): siRNA sense strand
ggauaucgguuugguacca

SEQ ID NO: 1967640 - RNA, 19 nt, Homo sapiens
  misc_RNA (1)...(19): siRNA sense strand
cacacaaacauacaacuuu

SEQ ID NO: 1967641 - RNA, 19 nt, Homo sapiens
  misc_RNA (1)...(19): siRNA sense strand
aagcauugauggacuguuc

SEQ ID NO: 1967642 - RNA, 19 nt, Homo sapiens
  misc_RNA (1)...(19): siRNA sense strand
aaaccaguguggaggaaau

SEQ ID NO: 1967643 - RNA, 19 nt, Homo sapiens
  misc_RNA (1)...(19): siRNA sense strand
guccuguccuuucaacauu

SEQ ID NO: 1967644 - RNA, 19 nt, Homo sapiens
  misc_RNA (1)...(19): siRNA sense strand
ugucugugcugaugaggaa

SEQ ID NO: 1967645 - RNA, 19 nt, Homo sapiens
  misc_RNA (1)...(19): siRNA sense strand
ccacacaaacauacaacuu

SEQ ID NO: 1967646 - RNA, 19 nt, Homo sapiens
  misc_RNA (1)...(19): siRNA sense strand
uuaagacuguuuacaccuu

SEQ ID NO: 1967647 - RNA, 19 nt, Homo sapiens
  misc_RNA (1)...(19): siRNA sense strand
gacuauaacauguaucuag

SEQ ID NO: 1967648 - RNA, 19 nt, Homo sapiens
  misc_RNA (1)...(19): siRNA sense strand
gaaguuaagacuguuuaca

SEQ ID NO: 1967649 - RNA, 19 nt, Homo sapiens
  misc_RNA (1)...(19): siRNA sense strand
ggaauaucugugccacuuu

SEQ ID NO: 1967650 - RNA, 19 nt, Homo sapiens
  misc_RNA (1)...(19): siRNA sense strand
ccaggugucugugcugaug

SEQ ID NO: 1967651 - RNA, 19 nt, Homo sapiens
  misc_RNA (1)...(19): siRNA sense strand
caguggauacuucagauuu

SEQ ID NO: 1967652 - RNA, 19 nt, Homo sapiens
  misc_RNA (1)...(19): siRNA sense strand
gaccaggagacacaacaaa

SEQ ID NO: 1967653 - RNA, 19 nt, Homo sapiens
  misc_RNA (1)...(19): siRNA sense strand
ugaaaaugguggaaccuuu

SEQ ID NO: 1967654 - RNA, 19 nt, Homo sapiens
  misc_RNA (1)...(19): siRNA sense strand
uuaaugaagucaccuccau

SEQ ID NO: 1967655 - RNA, 19 nt, Homo sapiens
  misc_RNA (1)...(19): siRNA sense strand
caagaccuuugccauuaag

SEQ ID NO: 1967656 - RNA, 19 nt, Homo sapiens
  misc_RNA (1)...(19): siRNA sense strand
ccaaauguggacucugaaa

SEQ ID NO: 1967657 - RNA, 19 nt, Homo sapiens
  misc_RNA (1)...(19): siRNA sense strand
caagaccacccuccagugu

SEQ ID NO: 1967658 - RNA, 19 nt, Homo sapiens
  misc_RNA (1)...(19): siRNA sense strand
gcccaaaucagaucucauc

SEQ ID NO: 1967659 - RNA, 19 nt, Homo sapiens
  misc_RNA (1)...(19): siRNA sense strand
cagcuccucugcccuuuag

SEQ ID NO: 1967660 - RNA, 19 nt, Homo sapiens
  misc_RNA (1)...(19): siRNA sense strand
gcugugagagcaagaacaa

SEQ ID NO: 1967661 - RNA, 19 nt, Homo sapiens
  misc_RNA (1)...(19): siRNA sense strand
gaggaaccaacuaugaaug

SEQ ID NO: 1967662 - RNA, 19 nt, Homo sapiens
  misc_RNA (1)...(19): siRNA sense strand
caccugaaguccuguccuu

SEQ ID NO: 1967663 - RNA, 19 nt, Homo sapiens
  misc_RNA (1)...(19): siRNA sense strand
aggaauaucugugccacuu

SEQ ID NO: 1967664 - RNA, 19 nt, Homo sapiens
  misc_RNA (1)...(19): siRNA sense strand
gcaaaaggcaaaaguaauc

SEQ ID NO: 1967665 - RNA, 19 nt, Homo sapiens
  misc_RNA (1)...(19): siRNA sense strand
acauguaucuagugcacaa

SEQ ID NO: 1967666 - RNA, 19 nt, Homo sapiens
  misc_RNA (1)...(19): siRNA sense strand
gaaagaaccacaggaaaau

SEQ ID NO: 1967667 - RNA, 19 nt, Homo sapiens
  misc_RNA (1)...(19): siRNA sense strand
agagcaagaacaagaauga

SEQ ID NO: 1967668 - RNA, 19 nt, Homo sapiens
  misc_RNA (1)...(19): siRNA sense strand
ccacauggucugucagcaa

SEQ ID NO: 1967669 - RNA, 19 nt, Homo sapiens
  misc_RNA (1)...(19): siRNA sense strand
agaaugacuccgagaaaga

SEQ ID NO: 1967670 - RNA, 19 nt, Homo sapiens
  misc_RNA (1)...(19): siRNA sense strand
aaucagaccacgaggaaga

SEQ ID NO: 1967671 - RNA, 19 nt, Homo sapiens
  misc_RNA (1)...(19): siRNA sense strand
aaacugacccgauucuuuu

SEQ ID NO: 1967672 - RNA, 19 nt, Homo sapiens
  misc_RNA (1)...(19): siRNA sense strand
aaaccacccuucaugaaaa

SEQ ID NO: 1967673 - RNA, 19 nt, Homo sapiens
  misc_RNA (1)...(19): siRNA sense strand
gaauccagaagcauugaug

SEQ ID NO: 1967674 - RNA, 19 nt, Homo sapiens
  misc_RNA (1)...(19): siRNA sense strand
caaccgccacugccacauu

SEQ ID NO: 1967675 - RNA, 19 nt, Homo sapiens
  misc_RNA (1)...(19): siRNA sense strand
ccaaaucagaucucaucaa

SEQ ID NO: 1967676 - RNA, 19 nt, Homo sapiens
  misc_RNA (1)...(19): siRNA sense strand
gcaguggauacuucagauu

SEQ ID NO: 1967677 - RNA, 19 nt, Homo sapiens
  misc_RNA (1)...(19): siRNA sense strand
agaaucagaccacgaggaa

SEQ ID NO: 1967678 - RNA, 19 nt, Homo sapiens
  misc_RNA (1)...(19): siRNA sense strand
aaacuagagaggcuacuga

SEQ ID NO: 1967679 - RNA, 19 nt, Homo sapiens
  misc_RNA (1)...(19): siRNA sense strand
gcacaagacuuaguuuauu

SEQ ID NO: 1967680 - RNA, 19 nt, Homo sapiens
  misc_RNA (1)...(19): siRNA sense strand
gaggaaagguuauuuguca

SEQ ID NO: 1967681 - RNA, 19 nt, Homo sapiens
  misc_RNA (1)...(19): siRNA sense strand
aaacuacgguucacaauau

SEQ ID NO: 1967682 - RNA, 19 nt, Homo sapiens
  misc_RNA (1)...(19): siRNA sense strand
gagaauaaauugaguacca

SEQ ID NO: 1967683 - RNA, 19 nt, Homo sapiens
  misc_RNA (1)...(19): siRNA sense strand
gaaagaaacagauggagau

SEQ ID NO: 1967684 - RNA, 19 nt, Homo sapiens
  misc_RNA (1)...(19): siRNA sense strand
ggaaagaguaaaugaagaa

SEQ ID NO: 1967685 - RNA, 19 nt, Homo sapiens
  misc_RNA (1)...(19): siRNA sense strand
gaaagucaucuaacugaaa

SEQ ID NO: 1967686 - RNA, 19 nt, Homo sapiens
  misc_RNA (1)...(19): siRNA sense strand
gcaagaauguaguaacucu

SEQ ID NO: 1967687 - RNA, 19 nt, Homo sapiens
  misc_RNA (1)...(19): siRNA sense strand
gaaagguuauuugucaaug

SEQ ID NO: 1967688 - RNA, 19 nt, Homo sapiens
  misc_RNA (1)...(19): siRNA sense strand
gaaccugugauuagcauuu

SEQ ID NO: 1967689 - RNA, 19 nt, Homo sapiens
  misc_RNA (1)...(19): siRNA sense strand
ggaaaggaggaaagaguaa

SEQ ID NO: 1967690 - RNA, 19 nt, Homo sapiens
  misc_RNA (1)...(19): siRNA sense strand
ucaccuaucuucauuacug

SEQ ID NO: 1967691 - RNA, 19 nt, Homo sapiens
  misc_RNA (1)...(19): siRNA sense strand
gcaguuaaagcacuacaaa

SEQ ID NO: 1967692 - RNA, 19 nt, Homo sapiens
  misc_RNA (1)...(19): siRNA sense strand
gaagaaagucaucuaacug

SEQ ID NO: 1967693 - RNA, 19 nt, Homo sapiens
  misc_RNA (1)...(19): siRNA sense strand
gaagagaaagaaacagaug

SEQ ID NO: 1967694 - RNA, 19 nt, Homo sapiens
  misc_RNA (1)...(19): siRNA sense strand
uaaauugaguaccacagaa

SEQ ID NO: 1967695 - RNA, 19 nt, Homo sapiens
  misc_RNA (1)...(19): siRNA sense strand
guccugagcucuccauuca

SEQ ID NO: 1967696 - RNA, 19 nt, Homo sapiens
  misc_RNA (1)...(19): siRNA sense strand
ccugagcucuccauucaaa

SEQ ID NO: 1967697 - RNA, 19 nt, Homo sapiens
  misc_RNA (1)...(19): siRNA sense strand
ugaagaaagucaucuaacu

SEQ ID NO: 1967698 - RNA, 19 nt, Homo sapiens
  misc_RNA (1)...(19): siRNA sense strand
uaacuuaaacgagucagua

SEQ ID NO: 1967699 - RNA, 19 nt, Homo sapiens
  misc_RNA (1)...(19): siRNA sense strand
gaucaccuaucuucauuac

SEQ ID NO: 1967700 - RNA, 19 nt, Homo sapiens
  misc_RNA (1)...(19): siRNA sense strand
caacgauucuuuggaggaa

SEQ ID NO: 1967701 - RNA, 19 nt, Homo sapiens
  misc_RNA (1)...(19): siRNA sense strand
auagauagcuuugguuuag

SEQ ID NO: 1967702 - RNA, 19 nt, Homo sapiens
  misc_RNA (1)...(19): siRNA sense strand
gaaaggaggaaagaguaaa

SEQ ID NO: 1967703 - RNA, 19 nt, Homo sapiens
  misc_RNA (1)...(19): siRNA sense strand
aagaucaugugaccaauug

SEQ ID NO: 1967704 - RNA, 19 nt, Homo sapiens
  misc_RNA (1)...(19): siRNA sense strand
gcaaagucuucaaggagau

SEQ ID NO: 1967705 - RNA, 19 nt, Homo sapiens
  misc_RNA (1)...(19): siRNA sense strand
ggaggaaagaguaaaugaa

SEQ ID NO: 1967706 - RNA, 19 nt, Homo sapiens
  misc_RNA (1)...(19): siRNA sense strand
ggagagagugguauuaugg

SEQ ID NO: 1967707 - RNA, 19 nt, Homo sapiens
  misc_RNA (1)...(19): siRNA sense strand
cacaagacuuaguuuauuc

SEQ ID NO: 1967708 - RNA, 19 nt, Homo sapiens
  misc_RNA (1)...(19): siRNA sense strand
uaguaacucugaucagcua

SEQ ID NO: 1967709 - RNA, 19 nt, Homo sapiens
  misc_RNA (1)...(19): siRNA sense strand
guuaaugaguuucuugaag

SEQ ID NO: 1967710 - RNA, 19 nt, Homo sapiens
  misc_RNA (1)...(19): siRNA sense strand
cuuaaacgagucaguaaua

SEQ ID NO: 1967711 - RNA, 19 nt, Homo sapiens
  misc_RNA (1)...(19): siRNA sense strand
gaggaaagaguaaaugaag

SEQ ID NO: 1967712 - RNA, 19 nt, Homo sapiens
  misc_RNA (1)...(19): siRNA sense strand
guagugugcaggucauuaa

SEQ ID NO: 1967713 - RNA, 19 nt, Homo sapiens
  misc_RNA (1)...(19): siRNA sense strand
ggaaagguuauuugucaau

SEQ ID NO: 1967714 - RNA, 19 nt, Homo sapiens
  misc_RNA (1)...(19): siRNA sense strand
uuacaugcuuucaacaaga

SEQ ID NO: 1967715 - RNA, 19 nt, Homo sapiens
  misc_RNA (1)...(19): siRNA sense strand
gugauuagcauuucuucaa

SEQ ID NO: 1967716 - RNA, 19 nt, Homo sapiens
  misc_RNA (1)...(19): siRNA sense strand
ccaauugugcauucaguuu

SEQ ID NO: 1967717 - RNA, 19 nt, Homo sapiens
  misc_RNA (1)...(19): siRNA sense strand
ccagagagccauggacauu

SEQ ID NO: 1967718 - RNA, 19 nt, Homo sapiens
  misc_RNA (1)...(19): siRNA sense strand
agagugguauuauggugua

SEQ ID NO: 1967719 - RNA, 19 nt, Homo sapiens
  misc_RNA (1)...(19): siRNA sense strand
caacugauucugauucauc

SEQ ID NO: 1967720 - RNA, 19 nt, Homo sapiens
  misc_RNA (1)...(19): siRNA sense strand
gguauuaugguguaaacaa

SEQ ID NO: 1967721 - RNA, 19 nt, Homo sapiens
  misc_RNA (1)...(19): siRNA sense strand
uucaaacaaugcagugaua

SEQ ID NO: 1967722 - RNA, 19 nt, Homo sapiens
  misc_RNA (1)...(19): siRNA sense strand
ggacaaagaaaccuugacu

SEQ ID NO: 1967723 - RNA, 19 nt, Homo sapiens
  misc_RNA (1)...(19): siRNA sense strand
guuaaagcacuacaaauag

SEQ ID NO: 1967724 - RNA, 19 nt, Homo sapiens
  misc_RNA (1)...(19): siRNA sense strand
gugugcaggucauuaaaga

SEQ ID NO: 1967725 - RNA, 19 nt, Homo sapiens
  misc_RNA (1)...(19): siRNA sense strand
agaaagucaucuaacugaa

SEQ ID NO: 1967726 - RNA, 19 nt, Homo sapiens
  misc_RNA (1)...(19): siRNA sense strand
uuaaagaucaugugaccaa

SEQ ID NO: 1967727 - RNA, 19 nt, Homo sapiens
  misc_RNA (1)...(19): siRNA sense strand
uauagcaguuaaagcacua

SEQ ID NO: 1967728 - RNA, 19 nt, Homo sapiens
  misc_RNA (1)...(19): siRNA sense strand
caaacaaugcagugauaga

SEQ ID NO: 1967729 - RNA, 19 nt, Homo sapiens
  misc_RNA (1)...(19): siRNA sense strand
cagaauucuuugcuauaug

SEQ ID NO: 1967730 - RNA, 19 nt, Homo sapiens
  misc_RNA (1)...(19): siRNA sense strand
ugauucaucuauagcaguu

SEQ ID NO: 1967731 - RNA, 19 nt, Homo sapiens
  misc_RNA (1)...(19): siRNA sense strand
aagaaagucaucuaacuga

SEQ ID NO: 1967732 - RNA, 19 nt, Homo sapiens
  misc_RNA (1)...(19): siRNA sense strand
cugaucagcuacaaggaaa

SEQ ID NO: 1967733 - RNA, 19 nt, Homo sapiens
  misc_RNA (1)...(19): siRNA sense strand
guucuucaaguuacugaua

SEQ ID NO: 1967734 - RNA, 19 nt, Homo sapiens
  misc_RNA (1)...(19): siRNA sense strand
gguuauuugucaaugaaga

SEQ ID NO: 1967735 - RNA, 19 nt, Homo sapiens
  misc_RNA (1)...(19): siRNA sense strand
aaacaaugcagugauagaa

SEQ ID NO: 1967736 - RNA, 19 nt, Homo sapiens
  misc_RNA (1)...(19): siRNA sense strand
gccuuuguguccuccguua

SEQ ID NO: 1967737 - RNA, 19 nt, Homo sapiens
  misc_RNA (1)...(19): siRNA sense strand
gaccaauugugcauucagu

SEQ ID NO: 1967738 - RNA, 19 nt, Homo sapiens
  misc_RNA (1)...(19): siRNA sense strand
ccagagaauaaauugagua

SEQ ID NO: 1967739 - RNA, 19 nt, Homo sapiens
  misc_RNA (1)...(19): siRNA sense strand
agauagcuuugguuuaguu

SEQ ID NO: 1967740 - RNA, 19 nt, Homo sapiens
  misc_RNA (1)...(19): siRNA sense strand
ccgcacaagacuuaguuua

SEQ ID NO: 1967741 - RNA, 19 nt, Homo sapiens
  misc_RNA (1)...(19): siRNA sense strand
guaaacaacgauucuuugg

SEQ ID NO: 1967742 - RNA, 19 nt, Homo sapiens
  misc_RNA (1)...(19): siRNA sense strand
ucaaacagucuauguccuu

SEQ ID NO: 1967743 - RNA, 19 nt, Homo sapiens
  misc_RNA (1)...(19): siRNA sense strand
gaucaugugaccaauugug

SEQ ID NO: 1967744 - RNA, 19 nt, Homo sapiens
  misc_RNA (1)...(19): siRNA sense strand
caaaguugcaagaauguag

SEQ ID NO: 1967745 - RNA, 19 nt, Homo sapiens
  misc_RNA (1)...(19): siRNA sense strand
guguaaacaacgauucuuu

SEQ ID NO: 1967746 - RNA, 19 nt, Homo sapiens
  misc_RNA (1)...(19): siRNA sense strand
guuacaugcuuucaacaag

SEQ ID NO: 1967747 - RNA, 19 nt, Homo sapiens
  misc_RNA (1)...(19): siRNA sense strand
uagcuuugguuuaguuaca

SEQ ID NO: 1967748 - RNA, 19 nt, Homo sapiens
  misc_RNA (1)...(19): siRNA sense strand
gauagcuuugguuuaguua

SEQ ID NO: 1967749 - RNA, 19 nt, Homo sapiens
  misc_RNA (1)...(19): siRNA sense strand
gauucugauucaucuauag

SEQ ID NO: 1967750 - RNA, 19 nt, Homo sapiens
  misc_RNA (1)...(19): siRNA sense strand
acaaagaaaccuugacucu

SEQ ID NO: 1967751 - RNA, 19 nt, Homo sapiens
  misc_RNA (1)...(19): siRNA sense strand
uaacucugaucagcuacaa

SEQ ID NO: 1967752 - RNA, 19 nt, Homo sapiens
  misc_RNA (1)...(19): siRNA sense strand
ugauagaacuggcaaaauc

SEQ ID NO: 1967753 - RNA, 19 nt, Homo sapiens
  misc_RNA (1)...(19): siRNA sense strand
ggaggaaagguuauuuguc

SEQ ID NO: 1967754 - RNA, 19 nt, Homo sapiens
  misc_RNA (1)...(19): siRNA sense strand
gauuagcauuucuucaaac

SEQ ID NO: 1967755 - RNA, 19 nt, Homo sapiens
  misc_RNA (1)...(19): siRNA sense strand
gguagugugcaggucauua

SEQ ID NO: 1967756 - RNA, 19 nt, Homo sapiens
  misc_RNA (1)...(19): siRNA sense strand
gacauuggagagaguggua

SEQ ID NO: 1967757 - RNA, 19 nt, Homo sapiens
  misc_RNA (1)...(19): siRNA sense strand
uggagagagugguauuaug

SEQ ID NO: 1967758 - RNA, 19 nt, Homo sapiens
  misc_RNA (1)...(19): siRNA sense strand
aggaaagaguaaaugaaga

SEQ ID NO: 1967759 - RNA, 19 nt, Homo sapiens
  misc_RNA (1)...(19): siRNA sense strand
gccgcaaagucuucaagga

SEQ ID NO: 1967760 - RNA, 19 nt, Homo sapiens
  misc_RNA (1)...(19): siRNA sense strand
cuucuccgcacaagacuua

SEQ ID NO: 1967761 - RNA, 19 nt, Homo sapiens
  misc_RNA (1)...(19): siRNA sense strand
uaaacaacgauucuuugga

SEQ ID NO: 1967762 - RNA, 19 nt, Homo sapiens
  misc_RNA (1)...(19): siRNA sense strand
gcaggucauuaaagaucau

SEQ ID NO: 1967763 - RNA, 19 nt, Homo sapiens
  misc_RNA (1)...(19): siRNA sense strand
agaaacagauggagaucac

SEQ ID NO: 1967764 - RNA, 19 nt, Homo sapiens
  misc_RNA (1)...(19): siRNA sense strand
uuaguuacaugcuuucaac

SEQ ID NO: 1967765 - RNA, 19 nt, Homo sapiens
  misc_RNA (1)...(19): siRNA sense strand
gaauguaguaacucugauc

SEQ ID NO: 1967766 - RNA, 19 nt, Homo sapiens
  misc_RNA (1)...(19): siRNA sense strand
guauuaugguguaaacaac

SEQ ID NO: 1967767 - RNA, 19 nt, Homo sapiens
  misc_RNA (1)...(19): siRNA sense strand
uaacugaagagaaagaaac

SEQ ID NO: 1967768 - RNA, 19 nt, Homo sapiens
  misc_RNA (1)...(19): siRNA sense strand
ucucaaaugauacuuggaa

SEQ ID NO: 1967769 - RNA, 19 nt, Homo sapiens
  misc_RNA (1)...(19): siRNA sense strand
uacaacugauucugauuca

SEQ ID NO: 1967770 - RNA, 19 nt, Homo sapiens
  misc_RNA (1)...(19): siRNA sense strand
cuacaacugauucugauuc

SEQ ID NO: 1967771 - RNA, 19 nt, Homo sapiens
  misc_RNA (1)...(19): siRNA sense strand
gaguaaaugaagaaaguca

SEQ ID NO: 1967772 - RNA, 19 nt, Homo sapiens
  misc_RNA (1)...(19): siRNA sense strand
aagaauguaguaacucuga

SEQ ID NO: 1967773 - RNA, 19 nt, Homo sapiens
  misc_RNA (1)...(19): siRNA sense strand
agagagccauggacauugg

SEQ ID NO: 1967774 - RNA, 19 nt, Homo sapiens
  misc_RNA (1)...(19): siRNA sense strand
aaagaucaugugaccaauu

SEQ ID NO: 1967775 - RNA, 19 nt, Homo sapiens
  misc_RNA (1)...(19): siRNA sense strand
uaaagaucaugugaccaau

SEQ ID NO: 1967776 - RNA, 19 nt, Homo sapiens
  misc_RNA (1)...(19): siRNA sense strand
aaacgagucaguaauaacu

SEQ ID NO: 1967777 - RNA, 19 nt, Homo sapiens
  misc_RNA (1)...(19): siRNA sense strand
guaaucaggacaaagaaac

SEQ ID NO: 1967778 - RNA, 19 nt, Homo sapiens
  misc_RNA (1)...(19): siRNA sense strand
cagaaccugugauuagcau

SEQ ID NO: 1967779 - RNA, 19 nt, Homo sapiens
  misc_RNA (1)...(19): siRNA sense strand
ugaacgagcuggugucugu

SEQ ID NO: 1967780 - RNA, 19 nt, Homo sapiens
  misc_RNA (1)...(19): siRNA sense strand
ggacaagguacaaugauga

SEQ ID NO: 1967781 - RNA, 19 nt, Homo sapiens
  misc_RNA (1)...(19): siRNA sense strand
gaacaaccaggccaaggaa

SEQ ID NO: 1967782 - RNA, 19 nt, Homo sapiens
  misc_RNA (1)...(19): siRNA sense strand
uggaggaccugcugaaguu

SEQ ID NO: 1967783 - RNA, 19 nt, Homo sapiens
  misc_RNA (1)...(19): siRNA sense strand
acaaggccaugaagaaaga

SEQ ID NO: 1967784 - RNA, 19 nt, Homo sapiens
  misc_RNA (1)...(19): siRNA sense strand
ggaacuaccggcucaagga

SEQ ID NO: 1967785 - RNA, 19 nt, Homo sapiens
  misc_RNA (1)...(19): siRNA sense strand
gaacuaccggcucaaggaa

SEQ ID NO: 1967786 - RNA, 19 nt, Homo sapiens
  misc_RNA (1)...(19): siRNA sense strand
ggaauacgagaaggccuua

SEQ ID NO: 1967787 - RNA, 19 nt, Homo sapiens
  misc_RNA (1)...(19): siRNA sense strand
cgagaaggccuuaaaguac

SEQ ID NO: 1967788 - RNA, 19 nt, Homo sapiens
  misc_RNA (1)...(19): siRNA sense strand
acgagaaggccuuaaagua

SEQ ID NO: 1967789 - RNA, 19 nt, Homo sapiens
  misc_RNA (1)...(19): siRNA sense strand
gcggguugcugcagacaga

SEQ ID NO: 1967790 - RNA, 19 nt, Homo sapiens
  misc_RNA (1)...(19): siRNA sense strand
ugacaaggccaugaagaaa

SEQ ID NO: 1967791 - RNA, 19 nt, Homo sapiens
  misc_RNA (1)...(19): siRNA sense strand
acuaccggcucaaggaaua

SEQ ID NO: 1967792 - RNA, 19 nt, Homo sapiens
  misc_RNA (1)...(19): siRNA sense strand
ccaagagcacgcaguuuga

SEQ ID NO: 1967793 - RNA, 19 nt, Homo sapiens
  misc_RNA (1)...(19): siRNA sense strand
cggacaagguacaaugaug

SEQ ID NO: 1967794 - RNA, 19 nt, Homo sapiens
  misc_RNA (1)...(19): siRNA sense strand
gggauuacgucuucuaccu

SEQ ID NO: 1967795 - RNA, 19 nt, Homo sapiens
  misc_RNA (1)...(19): siRNA sense strand
gcucaaggaauacgagaag

SEQ ID NO: 1967796 - RNA, 19 nt, Homo sapiens
  misc_RNA (1)...(19): siRNA sense strand
gacaaggccaugaagaaag

SEQ ID NO: 1967797 - RNA, 19 nt, Homo sapiens
  misc_RNA (1)...(19): siRNA sense strand
acagcgggauuacgucuuc

SEQ ID NO: 1967798 - RNA, 19 nt, Homo sapiens
  misc_RNA (1)...(19): siRNA sense strand
gcugaaguuugaaaagaaa

SEQ ID NO: 1967799 - RNA, 19 nt, Homo sapiens
  misc_RNA (1)...(19): siRNA sense strand
gaggaccugcugaaguuug

SEQ ID NO: 1967800 - RNA, 19 nt, Homo sapiens
  misc_RNA (1)...(19): siRNA sense strand
agacagagccccagaacaa

SEQ ID NO: 1967801 - RNA, 19 nt, Homo sapiens
  misc_RNA (1)...(19): siRNA sense strand
agagcacgcaguuugagua

SEQ ID NO: 1967802 - RNA, 19 nt, Homo sapiens
  misc_RNA (1)...(19): siRNA sense strand
uccaagagcacgcaguuug

SEQ ID NO: 1967803 - RNA, 19 nt, Homo sapiens
  misc_RNA (1)...(19): siRNA sense strand
caagguacaaugaugacau

SEQ ID NO: 1967804 - RNA, 19 nt, Homo sapiens
  misc_RNA (1)...(19): siRNA sense strand
aauacgagaaggccuuaaa

SEQ ID NO: 1967805 - RNA, 19 nt, Homo sapiens
  misc_RNA (1)...(19): siRNA sense strand
aggaggaacagcgggauua

SEQ ID NO: 1967806 - RNA, 19 nt, Homo sapiens
  misc_RNA (1)...(19): siRNA sense strand
agaacaaccaggccaagga

SEQ ID NO: 1967807 - RNA, 19 nt, Homo sapiens
  misc_RNA (1)...(19): siRNA sense strand
gaggagcugcugcccaaag

SEQ ID NO: 1967808 - RNA, 19 nt, Homo sapiens
  misc_RNA (1)...(19): siRNA sense strand
gaccugcugaaguuugaaa

SEQ ID NO: 1967809 - RNA, 19 nt, Homo sapiens
  misc_RNA (1)...(19): siRNA sense strand
ggaggaccugcugaaguuu

SEQ ID NO: 1967810 - RNA, 19 nt, Homo sapiens
  misc_RNA (1)...(19): siRNA sense strand
gugcggacaagguacaaug

SEQ ID NO: 1967811 - RNA, 19 nt, Homo sapiens
  misc_RNA (1)...(19): siRNA sense strand
aggaccugcugaaguuuga

SEQ ID NO: 1967812 - RNA, 19 nt, Homo sapiens
  misc_RNA (1)...(19): siRNA sense strand
uugacaaggccaugaagaa

SEQ ID NO: 1967813 - RNA, 19 nt, Homo sapiens
  misc_RNA (1)...(19): siRNA sense strand
gaggaugacuugggucuua

SEQ ID NO: 1967814 - RNA, 19 nt, Homo sapiens
  misc_RNA (1)...(19): siRNA sense strand
gcagaucaccacuuuauaa

SEQ ID NO: 1967815 - RNA, 19 nt, Homo sapiens
  misc_RNA (1)...(19): siRNA sense strand
agaaagagcugaaugaaag

SEQ ID NO: 1967816 - RNA, 19 nt, Homo sapiens
  misc_RNA (1)...(19): siRNA sense strand
gggaauaucugccuuuauc

SEQ ID NO: 1967817 - RNA, 19 nt, Homo sapiens
  misc_RNA (1)...(19): siRNA sense strand
gagagaggcugcaauaaag

SEQ ID NO: 1967818 - RNA, 19 nt, Homo sapiens
  misc_RNA (1)...(19): siRNA sense strand
ggaagaaacagaauauaug

SEQ ID NO: 1967819 - RNA, 19 nt, Homo sapiens
  misc_RNA (1)...(19): siRNA sense strand
agaaagguguggaagauuu

SEQ ID NO: 1967820 - RNA, 19 nt, Homo sapiens
  misc_RNA (1)...(19): siRNA sense strand
gaacaaagaaauccugauc

SEQ ID NO: 1967821 - RNA, 19 nt, Homo sapiens
  misc_RNA (1)...(19): siRNA sense strand
gggcaucucuugcggauca

SEQ ID NO: 1967822 - RNA, 19 nt, Homo sapiens
  misc_RNA (1)...(19): siRNA sense strand
cagaacaaccaguauauuu

SEQ ID NO: 1967823 - RNA, 19 nt, Homo sapiens
  misc_RNA (1)...(19): siRNA sense strand
uaagaaagguguggaagau

SEQ ID NO: 1967824 - RNA, 19 nt, Homo sapiens
  misc_RNA (1)...(19): siRNA sense strand
ggucuuagcaugcugauug

SEQ ID NO: 1967825 - RNA, 19 nt, Homo sapiens
  misc_RNA (1)...(19): siRNA sense strand
gugcacacguuugaaauuu

SEQ ID NO: 1967826 - RNA, 19 nt, Homo sapiens
  misc_RNA (1)...(19): siRNA sense strand
ccauggagcugggcuguuu

SEQ ID NO: 1967827 - RNA, 19 nt, Homo sapiens
  misc_RNA (1)...(19): siRNA sense strand
caagggccguguuacauga

SEQ ID NO: 1967828 - RNA, 19 nt, Homo sapiens
  misc_RNA (1)...(19): siRNA sense strand
ggacauuguuaccauagga

SEQ ID NO: 1967829 - RNA, 19 nt, Homo sapiens
  misc_RNA (1)...(19): siRNA sense strand
uaaaggacauuguuaccau

SEQ ID NO: 1967830 - RNA, 19 nt, Homo sapiens
  misc_RNA (1)...(19): siRNA sense strand
ggagacauuaggagaauuu

SEQ ID NO: 1967831 - RNA, 19 nt, Homo sapiens
  misc_RNA (1)...(19): siRNA sense strand
ugagagaggcugcaauaaa

SEQ ID NO: 1967832 - RNA, 19 nt, Homo sapiens
  misc_RNA (1)...(19): siRNA sense strand
gccuuuaucuucuuaaugu

SEQ ID NO: 1967833 - RNA, 19 nt, Homo sapiens
  misc_RNA (1)...(19): siRNA sense strand
gaagaaacagaauauaugg

SEQ ID NO: 1967834 - RNA, 19 nt, Homo sapiens
  misc_RNA (1)...(19): siRNA sense strand
ugacaaagaaggcgacauu

SEQ ID NO: 1967835 - RNA, 19 nt, Homo sapiens
  misc_RNA (1)...(19): siRNA sense strand
uuacaaagaugucgugaac

SEQ ID NO: 1967836 - RNA, 19 nt, Homo sapiens
  misc_RNA (1)...(19): siRNA sense strand
aaagaaguaucucauugga

SEQ ID NO: 1967837 - RNA, 19 nt, Homo sapiens
  misc_RNA (1)...(19): siRNA sense strand
aaaggacauuguuaccaua

SEQ ID NO: 1967838 - RNA, 19 nt, Homo sapiens
  misc_RNA (1)...(19): siRNA sense strand
ccauagggcuccacguguu

SEQ ID NO: 1967839 - RNA, 19 nt, Homo sapiens
  misc_RNA (1)...(19): siRNA sense strand
gaauaucugccuuuaucuu

SEQ ID NO: 1967840 - RNA, 19 nt, Homo sapiens
  misc_RNA (1)...(19): siRNA sense strand
ccuacaauguuugguuaua

SEQ ID NO: 1967841 - RNA, 19 nt, Homo sapiens
  misc_RNA (1)...(19): siRNA sense strand
cagaaagagcugaaugaaa

SEQ ID NO: 1967842 - RNA, 19 nt, Homo sapiens
  misc_RNA (1)...(19): siRNA sense strand
ggaccuucaggacuaaaua

SEQ ID NO: 1967843 - RNA, 19 nt, Homo sapiens
  misc_RNA (1)...(19): siRNA sense strand
gugcagaucaccacuuuau

SEQ ID NO: 1967844 - RNA, 19 nt, Homo sapiens
  misc_RNA (1)...(19): siRNA sense strand
ccuuguggcuggcuaugua

SEQ ID NO: 1967845 - RNA, 19 nt, Homo sapiens
  misc_RNA (1)...(19): siRNA sense strand
ccacgugucuguccuuguc

SEQ ID NO: 1967846 - RNA, 19 nt, Homo sapiens
  misc_RNA (1)...(19): siRNA sense strand
ggaggaagagauagaggaa

SEQ ID NO: 1967847 - RNA, 19 nt, Homo sapiens
  misc_RNA (1)...(19): siRNA sense strand
caauaaaggaagaaacaga

SEQ ID NO: 1967848 - RNA, 19 nt, Homo sapiens
  misc_RNA (1)...(19): siRNA sense strand
ucugggaccuucaggacua

SEQ ID NO: 1967849 - RNA, 19 nt, Homo sapiens
  misc_RNA (1)...(19): siRNA sense strand
ugccuacaauguuugguua

SEQ ID NO: 1967850 - RNA, 19 nt, Homo sapiens
  misc_RNA (1)...(19): siRNA sense strand
gaacaaccaguauauuuug

SEQ ID NO: 1967851 - RNA, 19 nt, Homo sapiens
  misc_RNA (1)...(19): siRNA sense strand
ccugagagaggcugcaaua

SEQ ID NO: 1967852 - RNA, 19 nt, Homo sapiens
  misc_RNA (1)...(19): siRNA sense strand
acaaagaaggcgacauuga

SEQ ID NO: 1967853 - RNA, 19 nt, Homo sapiens
  misc_RNA (1)...(19): siRNA sense strand
gcaaguggagacauuagga

SEQ ID NO: 1967854 - RNA, 19 nt, Homo sapiens
  misc_RNA (1)...(19): siRNA sense strand
cagaucaccacuuuauaaa

SEQ ID NO: 1967855 - RNA, 19 nt, Homo sapiens
  misc_RNA (1)...(19): siRNA sense strand
uacaugacacuguuaauga

SEQ ID NO: 1967856 - RNA, 19 nt, Homo sapiens
  misc_RNA (1)...(19): siRNA sense strand
gccaguacaucaaguggau

SEQ ID NO: 1967857 - RNA, 19 nt, Homo sapiens
  misc_RNA (1)...(19): siRNA sense strand
cagugcaucuucuagcauu

SEQ ID NO: 1967858 - RNA, 19 nt, Homo sapiens
  misc_RNA (1)...(19): siRNA sense strand
gaagagauagaggaacaug

SEQ ID NO: 1967859 - RNA, 19 nt, Homo sapiens
  misc_RNA (1)...(19): siRNA sense strand
aacgagaaguggaggauga

SEQ ID NO: 1967860 - RNA, 19 nt, Homo sapiens
  misc_RNA (1)...(19): siRNA sense strand
caaagaaggcgacauugac

SEQ ID NO: 1967861 - RNA, 19 nt, Homo sapiens
  misc_RNA (1)...(19): siRNA sense strand
gagcugaaugaaagugaaa

SEQ ID NO: 1967862 - RNA, 19 nt, Homo sapiens
  misc_RNA (1)...(19): siRNA sense strand
gaucgccaccuccaucgaa

SEQ ID NO: 1967863 - RNA, 19 nt, Homo sapiens
  misc_RNA (1)...(19): siRNA sense strand
uaaagaaguaucucauugg

SEQ ID NO: 1967864 - RNA, 19 nt, Homo sapiens
  misc_RNA (1)...(19): siRNA sense strand
gaggccaauucuaagcaaa

SEQ ID NO: 1967865 - RNA, 19 nt, Homo sapiens
  misc_RNA (1)...(19): siRNA sense strand
ccagaaagagcugaaugaa

SEQ ID NO: 1967866 - RNA, 19 nt, Homo sapiens
  misc_RNA (1)...(19): siRNA sense strand
gguccugucucucauucug

SEQ ID NO: 1967867 - RNA, 19 nt, Homo sapiens
  misc_RNA (1)...(19): siRNA sense strand
guggagacauuaggagaau

SEQ ID NO: 1967868 - RNA, 19 nt, Homo sapiens
  misc_RNA (1)...(19): siRNA sense strand
uuaagucuauugugcaagu

SEQ ID NO: 1967869 - RNA, 19 nt, Homo sapiens
  misc_RNA (1)...(19): siRNA sense strand
aggaagagauagaggaaca

SEQ ID NO: 1967870 - RNA, 19 nt, Homo sapiens
  misc_RNA (1)...(19): siRNA sense strand
gaccaagcccagagauuca

SEQ ID NO: 1967871 - RNA, 19 nt, Homo sapiens
  misc_RNA (1)...(19): siRNA sense strand
ugucagugguggugaugaa

SEQ ID NO: 1967872 - RNA, 19 nt, Homo sapiens
  misc_RNA (1)...(19): siRNA sense strand
ccugucggaugaagagaaa

SEQ ID NO: 1967873 - RNA, 19 nt, Homo sapiens
  misc_RNA (1)...(19): siRNA sense strand
gaagaggccaauucuaagc

SEQ ID NO: 1967874 - RNA, 19 nt, Homo sapiens
  misc_RNA (1)...(19): siRNA sense strand
gcgcugguccugucucuca

SEQ ID NO: 1967875 - RNA, 19 nt, Homo sapiens
  misc_RNA (1)...(19): siRNA sense strand
gaaagagcugaaugaaagu

SEQ ID NO: 1967876 - RNA, 19 nt, Homo sapiens
  misc_RNA (1)...(19): siRNA sense strand
cggaucgucuggaggaaga

SEQ ID NO: 1967877 - RNA, 19 nt, Homo sapiens
  misc_RNA (1)...(19): siRNA sense strand
ggugcacacguuugaaauu

SEQ ID NO: 1967878 - RNA, 19 nt, Homo sapiens
  misc_RNA (1)...(19): siRNA sense strand
cgucaugccgacucucaua

SEQ ID NO: 1967879 - RNA, 19 nt, Homo sapiens
  misc_RNA (1)...(19): siRNA sense strand
acaugacacuguuaaugau

SEQ ID NO: 1967880 - RNA, 19 nt, Homo sapiens
  misc_RNA (1)...(19): siRNA sense strand
ccagaacaaccaguauauu

SEQ ID NO: 1967881 - RNA, 19 nt, Homo sapiens
  misc_RNA (1)...(19): siRNA sense strand
gagaggcugcaauaaagga

SEQ ID NO: 1967882 - RNA, 19 nt, Homo sapiens
  misc_RNA (1)...(19): siRNA sense strand
ugaccaagcccagagauuc

SEQ ID NO: 1967883 - RNA, 19 nt, Homo sapiens
  misc_RNA (1)...(19): siRNA sense strand
cuaagaaagguguggaaga

SEQ ID NO: 1967884 - RNA, 19 nt, Homo sapiens
  misc_RNA (1)...(19): siRNA sense strand
gagacgguccagccucuga

SEQ ID NO: 1967885 - RNA, 19 nt, Homo sapiens
  misc_RNA (1)...(19): siRNA sense strand
gccagugcaucuucuagca

SEQ ID NO: 1967886 - RNA, 19 nt, Homo sapiens
  misc_RNA (1)...(19): siRNA sense strand
uugggaauaucugccuuua

SEQ ID NO: 1967887 - RNA, 19 nt, Homo sapiens
  misc_RNA (1)...(19): siRNA sense strand
cagugguggugaugaaguu

SEQ ID NO: 1967888 - RNA, 19 nt, Homo sapiens
  misc_RNA (1)...(19): siRNA sense strand
uaucugccuuuaucuucuu

SEQ ID NO: 1967889 - RNA, 19 nt, Homo sapiens
  misc_RNA (1)...(19): siRNA sense strand
uauccaugcuugacgagau

SEQ ID NO: 1967890 - RNA, 19 nt, Homo sapiens
  misc_RNA (1)...(19): siRNA sense strand
cguggaaguucuccgaauc

SEQ ID NO: 1967891 - RNA, 19 nt, Homo sapiens
  misc_RNA (1)...(19): siRNA sense strand
uuacaugacacuguuaaug

SEQ ID NO: 1967892 - RNA, 19 nt, Homo sapiens
  misc_RNA (1)...(19): siRNA sense strand
cugauugacucccagaaca

SEQ ID NO: 1967893 - RNA, 19 nt, Homo sapiens
  misc_RNA (1)...(19): siRNA sense strand
acgugcagaucaccacuuu

SEQ ID NO: 1967894 - RNA, 19 nt, Homo sapiens
  misc_RNA (1)...(19): siRNA sense strand
gagcagccaguacaucaag

SEQ ID NO: 1967895 - RNA, 19 nt, Homo sapiens
  misc_RNA (1)...(19): siRNA sense strand
gagcgcucgucuccucuca

SEQ ID NO: 1967896 - RNA, 19 nt, Homo sapiens
  misc_RNA (1)...(19): siRNA sense strand
caggugcacacguuugaaa

SEQ ID NO: 1967897 - RNA, 19 nt, Homo sapiens
  misc_RNA (1)...(19): siRNA sense strand
ggaagcugcacauggaaag

SEQ ID NO: 1967898 - RNA, 19 nt, Homo sapiens
  misc_RNA (1)...(19): siRNA sense strand
gaaagugaaaauuccguuu

SEQ ID NO: 1967899 - RNA, 19 nt, Homo sapiens
  misc_RNA (1)...(19): siRNA sense strand
uuacaagggccguguuaca

SEQ ID NO: 1967900 - RNA, 19 nt, Homo sapiens
  misc_RNA (1)...(19): siRNA sense strand
uuggagcaguggagaaaga

SEQ ID NO: 1967901 - RNA, 19 nt, Homo sapiens
  misc_RNA (1)...(19): siRNA sense strand
ggaggaagaagaggccaau

SEQ ID NO: 1967902 - RNA, 19 nt, Homo sapiens
  misc_RNA (1)...(19): siRNA sense strand
agauagaggaacaugcuuu

SEQ ID NO: 1967903 - RNA, 19 nt, Homo sapiens
  misc_RNA (1)...(19): siRNA sense strand
cagaaaagcuaagaaaggu

SEQ ID NO: 1967904 - RNA, 19 nt, Homo sapiens
  misc_RNA (1)...(19): siRNA sense strand
ggagcagccaguacaucaa

SEQ ID NO: 1967905 - RNA, 19 nt, Homo sapiens
  misc_RNA (1)...(19): siRNA sense strand
auccugaucuugggaauau

SEQ ID NO: 1967906 - RNA, 19 nt, Homo sapiens
  misc_RNA (1)...(19): siRNA sense strand
gcagcucgggcucuucaug

SEQ ID NO: 1967907 - RNA, 19 nt, Homo sapiens
  misc_RNA (1)...(19): siRNA sense strand
caugacacuguuaaugauu

SEQ ID NO: 1967908 - RNA, 19 nt, Homo sapiens
  misc_RNA (1)...(19): siRNA sense strand
ugaccacgcucagccucuu

SEQ ID NO: 1967909 - RNA, 19 nt, Homo sapiens
  misc_RNA (1)...(19): siRNA sense strand
guguaccuccuuauacuga

SEQ ID NO: 1967910 - RNA, 19 nt, Homo sapiens
  misc_RNA (1)...(19): siRNA sense strand
agagcugaaugaaagugaa

SEQ ID NO: 1967911 - RNA, 19 nt, Homo sapiens
  misc_RNA (1)...(19): siRNA sense strand
gacaaagaaggcgacauug

SEQ ID NO: 1967912 - RNA, 19 nt, Homo sapiens
  misc_RNA (1)...(19): siRNA sense strand
cagagcgucuucauuucca

SEQ ID NO: 1967913 - RNA, 19 nt, Homo sapiens
  misc_RNA (1)...(19): siRNA sense strand
gaagggcacugaggaguuu

SEQ ID NO: 1967914 - RNA, 19 nt, Homo sapiens
  misc_RNA (1)...(19): siRNA sense strand
ccaaagaccugcaggaucu

SEQ ID NO: 1967915 - RNA, 19 nt, Homo sapiens
  misc_RNA (1)...(19): siRNA sense strand
ugucugagaucaugaugua

SEQ ID NO: 1967916 - RNA, 19 nt, Homo sapiens
  misc_RNA (1)...(19): siRNA sense strand
gaagauccacauugaggua

SEQ ID NO: 1967917 - RNA, 19 nt, Homo sapiens
  misc_RNA (1)...(19): siRNA sense strand
caucaccucugaaagcaaa

SEQ ID NO: 1967918 - RNA, 19 nt, Homo sapiens
  misc_RNA (1)...(19): siRNA sense strand
uggcagagaugauuuacug

SEQ ID NO: 1967919 - RNA, 19 nt, Homo sapiens
  misc_RNA (1)...(19): siRNA sense strand
gggaugaccuucaaaauuc

SEQ ID NO: 1967920 - RNA, 19 nt, Homo sapiens
  misc_RNA (1)...(19): siRNA sense strand
cagagaugauuuacugcua

SEQ ID NO: 1967921 - RNA, 19 nt, Homo sapiens
  misc_RNA (1)...(19): siRNA sense strand
ucaccaaugucaccuacaa

SEQ ID NO: 1967922 - RNA, 19 nt, Homo sapiens
  misc_RNA (1)...(19): siRNA sense strand
gcacugaggaguuugucaa

SEQ ID NO: 1967923 - RNA, 19 nt, Homo sapiens
  misc_RNA (1)...(19): siRNA sense strand
ucaagauccugcgcuauga

SEQ ID NO: 1967924 - RNA, 19 nt, Homo sapiens
  misc_RNA (1)...(19): siRNA sense strand
uggcauccaucgugucuga

SEQ ID NO: 1967925 - RNA, 19 nt, Homo sapiens
  misc_RNA (1)...(19): siRNA sense strand
caucgugucugagaucaug

SEQ ID NO: 1967926 - RNA, 19 nt, Homo sapiens
  misc_RNA (1)...(19): siRNA sense strand
gagaugauuuacugcuaca

SEQ ID NO: 1967927 - RNA, 19 nt, Homo sapiens
  misc_RNA (1)...(19): siRNA sense strand
ugauguaugugcucauugu

SEQ ID NO: 1967928 - RNA, 19 nt, Homo sapiens
  misc_RNA (1)...(19): siRNA sense strand
gcguccagguggccgaaua

SEQ ID NO: 1967929 - RNA, 19 nt, Homo sapiens
  misc_RNA (1)...(19): siRNA sense strand
caggaucugucuaucuuca

SEQ ID NO: 1967930 - RNA, 19 nt, Homo sapiens
  misc_RNA (1)...(19): siRNA sense strand
gcuaugagaaugagguguu

SEQ ID NO: 1967931 - RNA, 19 nt, Homo sapiens
  misc_RNA (1)...(19): siRNA sense strand
ggaucugucuaucuucauc

SEQ ID NO: 1967932 - RNA, 19 nt, Homo sapiens
  misc_RNA (1)...(19): siRNA sense strand
ggagaaugccucggaauac

SEQ ID NO: 1967933 - RNA, 19 nt, Homo sapiens
  misc_RNA (1)...(19): siRNA sense strand
ggagaccgaggccguguau

SEQ ID NO: 1967934 - RNA, 19 nt, Homo sapiens
  misc_RNA (1)...(19): siRNA sense strand
acaccagcgucgucaagaa

SEQ ID NO: 1967935 - RNA, 19 nt, Homo sapiens
  misc_RNA (1)...(19): siRNA sense strand
cgccugcucuucuucgaaa

SEQ ID NO: 1967936 - RNA, 19 nt, Homo sapiens
  misc_RNA (1)...(19): siRNA sense strand
ugcaggaucugucuaucuu

SEQ ID NO: 1967937 - RNA, 19 nt, Homo sapiens
  misc_RNA (1)...(19): siRNA sense strand
cugaggaguuugucaagau

SEQ ID NO: 1967938 - RNA, 19 nt, Homo sapiens
  misc_RNA (1)...(19): siRNA sense strand
uguaugggaugaccuucaa

SEQ ID NO: 1967939 - RNA, 19 nt, Homo sapiens
  misc_RNA (1)...(19): siRNA sense strand
gcucguggcagagaugauu

SEQ ID NO: 1967940 - RNA, 19 nt, Homo sapiens
  misc_RNA (1)...(19): siRNA sense strand
aggagaaugccucggaaua

SEQ ID NO: 1967941 - RNA, 19 nt, Homo sapiens
  misc_RNA (1)...(19): siRNA sense strand
gucaagauccugcgcuaug

SEQ ID NO: 1967942 - RNA, 19 nt, Homo sapiens
  misc_RNA (1)...(19): siRNA sense strand
gucaagaagauccacauug

SEQ ID NO: 1967943 - RNA, 19 nt, Homo sapiens
  misc_RNA (1)...(19): siRNA sense strand
acauugagguaguggacaa

SEQ ID NO: 1967944 - RNA, 19 nt, Homo sapiens
  misc_RNA (1)...(19): siRNA sense strand
gagaaugccucggaauacc

SEQ ID NO: 1967945 - RNA, 19 nt, Homo sapiens
  misc_RNA (1)...(19): siRNA sense strand
cggaauaccuggccaucac

SEQ ID NO: 1967946 - RNA, 19 nt, Homo sapiens
  misc_RNA (1)...(19): siRNA sense strand
gccaucaccucugaaagca

SEQ ID NO: 1967947 - RNA, 19 nt, Homo sapiens
  misc_RNA (1)...(19): siRNA sense strand
gauccugcgcuaugagaau

SEQ ID NO: 1967948 - RNA, 19 nt, Homo sapiens
  misc_RNA (1)...(19): siRNA sense strand
ugaggaguuugucaagauc

SEQ ID NO: 1967949 - RNA, 19 nt, Homo sapiens
  misc_RNA (1)...(19): siRNA sense strand
gauccacauugagguagug

SEQ ID NO: 1967950 - RNA, 19 nt, Homo sapiens
  misc_RNA (1)...(19): siRNA sense strand
caacaccagcgucgucaag

SEQ ID NO: 1967951 - RNA, 19 nt, Homo sapiens
  misc_RNA (1)...(19): siRNA sense strand
gaugauuuacugcuacaag

SEQ ID NO: 1967952 - RNA, 19 nt, Homo sapiens
  misc_RNA (1)...(19): siRNA sense strand
caaagccaacagagacaug

SEQ ID NO: 1967953 - RNA, 19 nt, Homo sapiens
  misc_RNA (1)...(19): siRNA sense strand
gcauccaucgugucugaga

SEQ ID NO: 1967954 - RNA, 19 nt, Homo sapiens
  misc_RNA (1)...(19): siRNA sense strand
gacaaagccaacagagaca

SEQ ID NO: 1967955 - RNA, 19 nt, Homo sapiens
  misc_RNA (1)...(19): siRNA sense strand
cugagaucaugauguaugu

SEQ ID NO: 1967956 - RNA, 19 nt, Homo sapiens
  misc_RNA (1)...(19): siRNA sense strand
ucugagaucaugauguaug

SEQ ID NO: 1967957 - RNA, 19 nt, Homo sapiens
  misc_RNA (1)...(19): siRNA sense strand
augauuuacugcuacaaga

SEQ ID NO: 1967958 - RNA, 19 nt, Homo sapiens
  misc_RNA (1)...(19): siRNA sense strand
cuaugagaaugagguguug

SEQ ID NO: 1967959 - RNA, 19 nt, Homo sapiens
  misc_RNA (1)...(19): siRNA sense strand
caagaagauccacauugag

SEQ ID NO: 1967960 - RNA, 19 nt, Homo sapiens
  misc_RNA (1)...(19): siRNA sense strand
agaagggcacugaggaguu

SEQ ID NO: 1967961 - RNA, 19 nt, Homo sapiens
  misc_RNA (1)...(19): siRNA sense strand
ugauuuacugcuacaagaa

SEQ ID NO: 1967962 - RNA, 19 nt, Homo sapiens
  misc_RNA (1)...(19): siRNA sense strand
agaccgaggccguguaugg

SEQ ID NO: 1967963 - RNA, 19 nt, Homo sapiens
  misc_RNA (1)...(19): siRNA sense strand
gauuuacugcuacaagaag

SEQ ID NO: 1967964 - RNA, 19 nt, Homo sapiens
  misc_RNA (1)...(19): siRNA sense strand
ggccaucaccucugaaagc

SEQ ID NO: 1967965 - RNA, 19 nt, Homo sapiens
  misc_RNA (1)...(19): siRNA sense strand
guggugagcucucguuucg

SEQ ID NO: 1967966 - RNA, 19 nt, Homo sapiens
  misc_RNA (1)...(19): siRNA sense strand
acucucagcuggacacuag

SEQ ID NO: 1967967 - RNA, 19 nt, Homo sapiens
  misc_RNA (1)...(19): siRNA sense strand
gaacaagaaaacucuagga

SEQ ID NO: 1967968 - RNA, 19 nt, Homo sapiens
  misc_RNA (1)...(19): siRNA sense strand
gaacagauccugagaccua

SEQ ID NO: 1967969 - RNA, 19 nt, Homo sapiens
  misc_RNA (1)...(19): siRNA sense strand
gaauuaagcugggaagauu

SEQ ID NO: 1967970 - RNA, 19 nt, Homo sapiens
  misc_RNA (1)...(19): siRNA sense strand
gcacuuggauuguuacugu

SEQ ID NO: 1967971 - RNA, 19 nt, Homo sapiens
  misc_RNA (1)...(19): siRNA sense strand
gagaacugcucuguacuua

SEQ ID NO: 1967972 - RNA, 19 nt, Homo sapiens
  misc_RNA (1)...(19): siRNA sense strand
gaagcuacguuaugaagga

SEQ ID NO: 1967973 - RNA, 19 nt, Homo sapiens
  misc_RNA (1)...(19): siRNA sense strand
gaacauugguuguauuacu

SEQ ID NO: 1967974 - RNA, 19 nt, Homo sapiens
  misc_RNA (1)...(19): siRNA sense strand
gaagaaguguguguugcua

SEQ ID NO: 1967975 - RNA, 19 nt, Homo sapiens
  misc_RNA (1)...(19): siRNA sense strand
gcacggcgauccuuugugu

SEQ ID NO: 1967976 - RNA, 19 nt, Homo sapiens
  misc_RNA (1)...(19): siRNA sense strand
ggaagaaucagaaauguca

SEQ ID NO: 1967977 - RNA, 19 nt, Homo sapiens
  misc_RNA (1)...(19): siRNA sense strand
gaaauaaggaucgaaguug

SEQ ID NO: 1967978 - RNA, 19 nt, Homo sapiens
  misc_RNA (1)...(19): siRNA sense strand
gcacgaguauauaaacaga

SEQ ID NO: 1967979 - RNA, 19 nt, Homo sapiens
  misc_RNA (1)...(19): siRNA sense strand
cagagucaguuaugauuaa

SEQ ID NO: 1967980 - RNA, 19 nt, Homo sapiens
  misc_RNA (1)...(19): siRNA sense strand
gccauuaccaucuuacuua

SEQ ID NO: 1967981 - RNA, 19 nt, Homo sapiens
  misc_RNA (1)...(19): siRNA sense strand
ccagaaggcaucagagaua

SEQ ID NO: 1967982 - RNA, 19 nt, Homo sapiens
  misc_RNA (1)...(19): siRNA sense strand
ggccauaucuuaacaaagg

SEQ ID NO: 1967983 - RNA, 19 nt, Homo sapiens
  misc_RNA (1)...(19): siRNA sense strand
aaauauugcuguccaaaga

SEQ ID NO: 1967984 - RNA, 19 nt, Homo sapiens
  misc_RNA (1)...(19): siRNA sense strand
ggaaauaaggaucgaaguu

SEQ ID NO: 1967985 - RNA, 19 nt, Homo sapiens
  misc_RNA (1)...(19): siRNA sense strand
caaacaaguuauuggcauu

SEQ ID NO: 1967986 - RNA, 19 nt, Homo sapiens
  misc_RNA (1)...(19): siRNA sense strand
uuaagcacuuggauuguua

SEQ ID NO: 1967987 - RNA, 19 nt, Homo sapiens
  misc_RNA (1)...(19): siRNA sense strand
uauggaagagguagaauua

SEQ ID NO: 1967988 - RNA, 19 nt, Homo sapiens
  misc_RNA (1)...(19): siRNA sense strand
ggaagaggaagagccauua

SEQ ID NO: 1967989 - RNA, 19 nt, Homo sapiens
  misc_RNA (1)...(19): siRNA sense strand
gaucgaaguugcugaaagg

SEQ ID NO: 1967990 - RNA, 19 nt, Homo sapiens
  misc_RNA (1)...(19): siRNA sense strand
gaagcugaguggcaagaga

SEQ ID NO: 1967991 - RNA, 19 nt, Homo sapiens
  misc_RNA (1)...(19): siRNA sense strand
uaagaagccuauaccugaa

SEQ ID NO: 1967992 - RNA, 19 nt, Homo sapiens
  misc_RNA (1)...(19): siRNA sense strand
aaacuggaaugcuguccua

SEQ ID NO: 1967993 - RNA, 19 nt, Homo sapiens
  misc_RNA (1)...(19): siRNA sense strand
ggugugagcagaauaagaa

SEQ ID NO: 1967994 - RNA, 19 nt, Homo sapiens
  misc_RNA (1)...(19): siRNA sense strand
cgacaguccuggcaucuuc

SEQ ID NO: 1967995 - RNA, 19 nt, Homo sapiens
  misc_RNA (1)...(19): siRNA sense strand
cagaaggcaucagagauaa

SEQ ID NO: 1967996 - RNA, 19 nt, Homo sapiens
  misc_RNA (1)...(19): siRNA sense strand
caaguuauuggcauucaua

SEQ ID NO: 1967997 - RNA, 19 nt, Homo sapiens
  misc_RNA (1)...(19): siRNA sense strand
aagaaugcauggacuuaaa

SEQ ID NO: 1967998 - RNA, 19 nt, Homo sapiens
  misc_RNA (1)...(19): siRNA sense strand
ccacagcaguucccuaugg

SEQ ID NO: 1967999 - RNA, 19 nt, Homo sapiens
  misc_RNA (1)...(19): siRNA sense strand
gaugaugauucccuaagug

SEQ ID NO: 1968000 - RNA, 19 nt, Homo sapiens
  misc_RNA (1)...(19): siRNA sense strand
gcaaaccuguaucaaacug

SEQ ID NO: 1968001 - RNA, 19 nt, Homo sapiens
  misc_RNA (1)...(19): siRNA sense strand
ggagguggcugugagaaca

SEQ ID NO: 1968002 - RNA, 19 nt, Homo sapiens
  misc_RNA (1)...(19): siRNA sense strand
gauccagacuagaauguca

SEQ ID NO: 1968003 - RNA, 19 nt, Homo sapiens
  misc_RNA (1)...(19): siRNA sense strand
ccauggauauauuuccuuu

SEQ ID NO: 1968004 - RNA, 19 nt, Homo sapiens
  misc_RNA (1)...(19): siRNA sense strand
caggaaggcugaucucuac

SEQ ID NO: 1968005 - RNA, 19 nt, Homo sapiens
  misc_RNA (1)...(19): siRNA sense strand
gagcacgaguauauaaaca

SEQ ID NO: 1968006 - RNA, 19 nt, Homo sapiens
  misc_RNA (1)...(19): siRNA sense strand
gaaguacuuucugguggaa

SEQ ID NO: 1968007 - RNA, 19 nt, Homo sapiens
  misc_RNA (1)...(19): siRNA sense strand
cauaguaacuuagcuugug

SEQ ID NO: 1968008 - RNA, 19 nt, Homo sapiens
  misc_RNA (1)...(19): siRNA sense strand
ggaugguucuggauaagug

SEQ ID NO: 1968009 - RNA, 19 nt, Homo sapiens
  misc_RNA (1)...(19): siRNA sense strand
gugcuucccuccguuaauu

SEQ ID NO: 1968010 - RNA, 19 nt, Homo sapiens
  misc_RNA (1)...(19): siRNA sense strand
aaagugagauauccacauc

SEQ ID NO: 1968011 - RNA, 19 nt, Homo sapiens
  misc_RNA (1)...(19): siRNA sense strand
cagaucgggugacugaauu

SEQ ID NO: 1968012 - RNA, 19 nt, Homo sapiens
  misc_RNA (1)...(19): siRNA sense strand
guccaaagauauacuucaa

SEQ ID NO: 1968013 - RNA, 19 nt, Homo sapiens
  misc_RNA (1)...(19): siRNA sense strand
gaauuuaaggagaacauga

SEQ ID NO: 1968014 - RNA, 19 nt, Homo sapiens
  misc_RNA (1)...(19): siRNA sense strand
gaucucuccugcuacaguu

SEQ ID NO: 1968015 - RNA, 19 nt, Homo sapiens
  misc_RNA (1)...(19): siRNA sense strand
ccagauagacaaaggagaa

SEQ ID NO: 1968016 - RNA, 19 nt, Homo sapiens
  misc_RNA (1)...(19): siRNA sense strand
cggcaaaccuguaucaaac

SEQ ID NO: 1968017 - RNA, 19 nt, Homo sapiens
  misc_RNA (1)...(19): siRNA sense strand
cagcagaucgggugacuga

SEQ ID NO: 1968018 - RNA, 19 nt, Homo sapiens
  misc_RNA (1)...(19): siRNA sense strand
gaagaauggccuacacauc

SEQ ID NO: 1968019 - RNA, 19 nt, Homo sapiens
  misc_RNA (1)...(19): siRNA sense strand
gguccucacuuuacuuauc

SEQ ID NO: 1968020 - RNA, 19 nt, Homo sapiens
  misc_RNA (1)...(19): siRNA sense strand
ggaugaugauucccuaagu

SEQ ID NO: 1968021 - RNA, 19 nt, Homo sapiens
  misc_RNA (1)...(19): siRNA sense strand
gaccaaauacacacacuau

SEQ ID NO: 1968022 - RNA, 19 nt, Homo sapiens
  misc_RNA (1)...(19): siRNA sense strand
gaaggcugaagcuacguua

SEQ ID NO: 1968023 - RNA, 19 nt, Homo sapiens
  misc_RNA (1)...(19): siRNA sense strand
caaacaguguggugcugaa

SEQ ID NO: 1968024 - RNA, 19 nt, Homo sapiens
  misc_RNA (1)...(19): siRNA sense strand
uuacuuggauccauuucuu

SEQ ID NO: 1968025 - RNA, 19 nt, Homo sapiens
  misc_RNA (1)...(19): siRNA sense strand
ucacuuuacuuaucaaugc

SEQ ID NO: 1968026 - RNA, 19 nt, Homo sapiens
  misc_RNA (1)...(19): siRNA sense strand
ggcuucaccuggacaguaa

SEQ ID NO: 1968027 - RNA, 19 nt, Homo sapiens
  misc_RNA (1)...(19): siRNA sense strand
ccacggaugguucuggaua

SEQ ID NO: 1968028 - RNA, 19 nt, Homo sapiens
  misc_RNA (1)...(19): siRNA sense strand
gaaauuggaagcuguagac

SEQ ID NO: 1968029 - RNA, 19 nt, Homo sapiens
  misc_RNA (1)...(19): siRNA sense strand
ucaagaaugcauggacuua

SEQ ID NO: 1968030 - RNA, 19 nt, Homo sapiens
  misc_RNA (1)...(19): siRNA sense strand
aggaugagcuacaggaaga

SEQ ID NO: 1968031 - RNA, 19 nt, Homo sapiens
  misc_RNA (1)...(19): siRNA sense strand
gaaacgcuccucugcaucu

SEQ ID NO: 1968032 - RNA, 19 nt, Homo sapiens
  misc_RNA (1)...(19): siRNA sense strand
gcagaucgggugacugaau

SEQ ID NO: 1968033 - RNA, 19 nt, Homo sapiens
  misc_RNA (1)...(19): siRNA sense strand
ggcugaagcuacguuauga

SEQ ID NO: 1968034 - RNA, 19 nt, Homo sapiens
  misc_RNA (1)...(19): siRNA sense strand
gcaguggagucugaagaau

SEQ ID NO: 1968035 - RNA, 19 nt, Homo sapiens
  misc_RNA (1)...(19): siRNA sense strand
aagaauggccuacacauca

SEQ ID NO: 1968036 - RNA, 19 nt, Homo sapiens
  misc_RNA (1)...(19): siRNA sense strand
aagaaacgcuccucugcau

SEQ ID NO: 1968037 - RNA, 19 nt, Homo sapiens
  misc_RNA (1)...(19): siRNA sense strand
ccuuugggcuggugugaaa

SEQ ID NO: 1968038 - RNA, 19 nt, Homo sapiens
  misc_RNA (1)...(19): siRNA sense strand
gcuccaggauccagacuag

SEQ ID NO: 1968039 - RNA, 19 nt, Homo sapiens
  misc_RNA (1)...(19): siRNA sense strand
caagaaugcauggacuuaa

SEQ ID NO: 1968040 - RNA, 19 nt, Homo sapiens
  misc_RNA (1)...(19): siRNA sense strand
ggaucgaaguugcugaaag

SEQ ID NO: 1968041 - RNA, 19 nt, Homo sapiens
  misc_RNA (1)...(19): siRNA sense strand
uggaagagguagaauuaag

SEQ ID NO: 1968042 - RNA, 19 nt, Homo sapiens
  misc_RNA (1)...(19): siRNA sense strand
caaaggaaauaaggaucga

SEQ ID NO: 1968043 - RNA, 19 nt, Homo sapiens
  misc_RNA (1)...(19): siRNA sense strand
ccauuaccaucuuacuuau

SEQ ID NO: 1968044 - RNA, 19 nt, Homo sapiens
  misc_RNA (1)...(19): siRNA sense strand
agacuagaaugucaagcuu

SEQ ID NO: 1968045 - RNA, 19 nt, Homo sapiens
  misc_RNA (1)...(19): siRNA sense strand
cacugacugugcuccauua

SEQ ID NO: 1968046 - RNA, 19 nt, Homo sapiens
  misc_RNA (1)...(19): siRNA sense strand
ucugagaacugcucuguac

SEQ ID NO: 1968047 - RNA, 19 nt, Homo sapiens
  misc_RNA (1)...(19): siRNA sense strand
gggcuacuguugagauagu

SEQ ID NO: 1968048 - RNA, 19 nt, Homo sapiens
  misc_RNA (1)...(19): siRNA sense strand
ggaagagccauuaccaucu

SEQ ID NO: 1968049 - RNA, 19 nt, Homo sapiens
  misc_RNA (1)...(19): siRNA sense strand
ugaaagaggaagaggaaga

SEQ ID NO: 1968050 - RNA, 19 nt, Homo sapiens
  misc_RNA (1)...(19): siRNA sense strand
agaauaagaagacccuuga

SEQ ID NO: 1968051 - RNA, 19 nt, Homo sapiens
  misc_RNA (1)...(19): siRNA sense strand
caggaagaaucagaaaugu

SEQ ID NO: 1968052 - RNA, 19 nt, Homo sapiens
  misc_RNA (1)...(19): siRNA sense strand
cuggauaaguguucugaga

SEQ ID NO: 1968053 - RNA, 19 nt, Homo sapiens
  misc_RNA (1)...(19): siRNA sense strand
uguauuacuuggauccauu

SEQ ID NO: 1968054 - RNA, 19 nt, Homo sapiens
  misc_RNA (1)...(19): siRNA sense strand
gcauguaguccuccuguuc

SEQ ID NO: 1968055 - RNA, 19 nt, Homo sapiens
  misc_RNA (1)...(19): siRNA sense strand
auauugcuguccaaagaua

SEQ ID NO: 1968056 - RNA, 19 nt, Homo sapiens
  misc_RNA (1)...(19): siRNA sense strand
gagaggaucaaguuugcuu

SEQ ID NO: 1968057 - RNA, 19 nt, Homo sapiens
  misc_RNA (1)...(19): siRNA sense strand
uagcaagaauauuccuaga

SEQ ID NO: 1968058 - RNA, 19 nt, Homo sapiens
  misc_RNA (1)...(19): siRNA sense strand
ggacacacguuugcaaaau

SEQ ID NO: 1968059 - RNA, 19 nt, Homo sapiens
  misc_RNA (1)...(19): siRNA sense strand
uaucaaugcagccuacaaa

SEQ ID NO: 1968060 - RNA, 19 nt, Homo sapiens
  misc_RNA (1)...(19): siRNA sense strand
ucucagggccauaucuuaa

SEQ ID NO: 1968061 - RNA, 19 nt, Homo sapiens
  misc_RNA (1)...(19): siRNA sense strand
gaaggcaucagagauaaag

SEQ ID NO: 1968062 - RNA, 19 nt, Homo sapiens
  misc_RNA (1)...(19): siRNA sense strand
gaaucagaaaugucagaaa

SEQ ID NO: 1968063 - RNA, 19 nt, Homo sapiens
  misc_RNA (1)...(19): siRNA sense strand
cacggaugguucuggauaa

SEQ ID NO: 1968064 - RNA, 19 nt, Homo sapiens
  misc_RNA (1)...(19): siRNA sense strand
gaauaagaagacccuugaa

SEQ ID NO: 1968065 - RNA, 19 nt, Homo sapiens
  misc_RNA (1)...(19): siRNA sense strand
acaggaagaaucagaaaug

SEQ ID NO: 1968066 - RNA, 19 nt, Homo sapiens
  misc_RNA (1)...(19): siRNA sense strand
cugaauguauugugagugu

SEQ ID NO: 1968067 - RNA, 19 nt, Homo sapiens
  misc_RNA (1)...(19): siRNA sense strand
cuugaaaguucugacaauu

SEQ ID NO: 1968068 - RNA, 19 nt, Homo sapiens
  misc_RNA (1)...(19): siRNA sense strand
caaagaagaugggagaaua

SEQ ID NO: 1968069 - RNA, 19 nt, Homo sapiens
  misc_RNA (1)...(19): siRNA sense strand
caaagaacauggccagauu

SEQ ID NO: 1968070 - RNA, 19 nt, Homo sapiens
  misc_RNA (1)...(19): siRNA sense strand
caaagaaccuggcccauuc

SEQ ID NO: 1968071 - RNA, 19 nt, Homo sapiens
  misc_RNA (1)...(19): siRNA sense strand
gggaauagcuaacccaguu

SEQ ID NO: 1968072 - RNA, 19 nt, Homo sapiens
  misc_RNA (1)...(19): siRNA sense strand
gcacugaaauugccucuca

SEQ ID NO: 1968073 - RNA, 19 nt, Homo sapiens
  misc_RNA (1)...(19): siRNA sense strand
gaucaaggcuaaggaaaug

SEQ ID NO: 1968074 - RNA, 19 nt, Homo sapiens
  misc_RNA (1)...(19): siRNA sense strand
aauaagggcuguaggaauu

SEQ ID NO: 1968075 - RNA, 19 nt, Homo sapiens
  misc_RNA (1)...(19): siRNA sense strand
gggaaugucuguccuccua

SEQ ID NO: 1968076 - RNA, 19 nt, Homo sapiens
  misc_RNA (1)...(19): siRNA sense strand
gcaggugccuuuagaggaa

SEQ ID NO: 1968077 - RNA, 19 nt, Homo sapiens
  misc_RNA (1)...(19): siRNA sense strand
ggaaaugacacaaagaaga

SEQ ID NO: 1968078 - RNA, 19 nt, Homo sapiens
  misc_RNA (1)...(19): siRNA sense strand
acaacuggcuggaauauug

SEQ ID NO: 1968079 - RNA, 19 nt, Homo sapiens
  misc_RNA (1)...(19): siRNA sense strand
gaagaccucagcaaacuaa

SEQ ID NO: 1968080 - RNA, 19 nt, Homo sapiens
  misc_RNA (1)...(19): siRNA sense strand
gaaaggaaacuggaagaaa

SEQ ID NO: 1968081 - RNA, 19 nt, Homo sapiens
  misc_RNA (1)...(19): siRNA sense strand
gaacauggccagauugagu

SEQ ID NO: 1968082 - RNA, 19 nt, Homo sapiens
  misc_RNA (1)...(19): siRNA sense strand
aaaccgagcucgaggaaug

SEQ ID NO: 1968083 - RNA, 19 nt, Homo sapiens
  misc_RNA (1)...(19): siRNA sense strand
cuaaggaaaugguggaauu

SEQ ID NO: 1968084 - RNA, 19 nt, Homo sapiens
  misc_RNA (1)...(19): siRNA sense strand
uaagaacuccuacaucaaa

SEQ ID NO: 1968085 - RNA, 19 nt, Homo sapiens
  misc_RNA (1)...(19): siRNA sense strand
ccaaacaacuggcuggaau

SEQ ID NO: 1968086 - RNA, 19 nt, Homo sapiens
  misc_RNA (1)...(19): siRNA sense strand
gaaaugacacaaagaagau

SEQ ID NO: 1968087 - RNA, 19 nt, Homo sapiens
  misc_RNA (1)...(19): siRNA sense strand
ggaaaugguggaauuauca

SEQ ID NO: 1968088 - RNA, 19 nt, Homo sapiens
  misc_RNA (1)...(19): siRNA sense strand
gaauugcucucaccagaag

SEQ ID NO: 1968089 - RNA, 19 nt, Homo sapiens
  misc_RNA (1)...(19): siRNA sense strand
gcucucaccagaagauuua

SEQ ID NO: 1968090 - RNA, 19 nt, Homo sapiens
  misc_RNA (1)...(19): siRNA sense strand
ggaauuguagguauugaaa

SEQ ID NO: 1968091 - RNA, 19 nt, Homo sapiens
  misc_RNA (1)...(19): siRNA sense strand
aguaagaacuccuacauca

SEQ ID NO: 1968092 - RNA, 19 nt, Homo sapiens
  misc_RNA (1)...(19): siRNA sense strand
gaauauugcaggugccuuu

SEQ ID NO: 1968093 - RNA, 19 nt, Homo sapiens
  misc_RNA (1)...(19): siRNA sense strand
caaacucuccuucaaagaa

SEQ ID NO: 1968094 - RNA, 19 nt, Homo sapiens
  misc_RNA (1)...(19): siRNA sense strand
ucacggagguguacugcuu

SEQ ID NO: 1968095 - RNA, 19 nt, Homo sapiens
  misc_RNA (1)...(19): siRNA sense strand
aaacauuucugaggccuuu

SEQ ID NO: 1968096 - RNA, 19 nt, Homo sapiens
  misc_RNA (1)...(19): siRNA sense strand
gaggaaaugacacaaagaa

SEQ ID NO: 1968097 - RNA, 19 nt, Homo sapiens
  misc_RNA (1)...(19): siRNA sense strand
gggagaauaugccaguuuc

SEQ ID NO: 1968098 - RNA, 19 nt, Homo sapiens
  misc_RNA (1)...(19): siRNA sense strand
gaacaggcggcuggaauug

SEQ ID NO: 1968099 - RNA, 19 nt, Homo sapiens
  misc_RNA (1)...(19): siRNA sense strand
gggacucuccuucuuagua

SEQ ID NO: 1968100 - RNA, 19 nt, Homo sapiens
  misc_RNA (1)...(19): siRNA sense strand
gaauaagggcuguaggaau

SEQ ID NO: 1968101 - RNA, 19 nt, Homo sapiens
  misc_RNA (1)...(19): siRNA sense strand
cgacugauuuggagagauc

SEQ ID NO: 1968102 - RNA, 19 nt, Homo sapiens
  misc_RNA (1)...(19): siRNA sense strand
caucagaagaguuugcuaa

SEQ ID NO: 1968103 - RNA, 19 nt, Homo sapiens
  misc_RNA (1)...(19): siRNA sense strand
gaccucagcaaacuaauga

SEQ ID NO: 1968104 - RNA, 19 nt, Homo sapiens
  misc_RNA (1)...(19): siRNA sense strand
aaaggaaacuggaagaaaa

SEQ ID NO: 1968105 - RNA, 19 nt, Homo sapiens
  misc_RNA (1)...(19): siRNA sense strand
ggacucuccuucuuaguac

SEQ ID NO: 1968106 - RNA, 19 nt, Homo sapiens
  misc_RNA (1)...(19): siRNA sense strand
caucaaacucuccuucaaa

SEQ ID NO: 1968107 - RNA, 19 nt, Homo sapiens
  misc_RNA (1)...(19): siRNA sense strand
gacaguggcgucaugguaa

SEQ ID NO: 1968108 - RNA, 19 nt, Homo sapiens
  misc_RNA (1)...(19): siRNA sense strand
cagaggaaaugacacaaag

SEQ ID NO: 1968109 - RNA, 19 nt, Homo sapiens
  misc_RNA (1)...(19): siRNA sense strand
uaaggaaaugguggaauua

SEQ ID NO: 1968110 - RNA, 19 nt, Homo sapiens
  misc_RNA (1)...(19): siRNA sense strand
cagaagaguuugcuaagcu

SEQ ID NO: 1968111 - RNA, 19 nt, Homo sapiens
  misc_RNA (1)...(19): siRNA sense strand
guacacaccgacugauuug

SEQ ID NO: 1968112 - RNA, 19 nt, Homo sapiens
  misc_RNA (1)...(19): siRNA sense strand
ccuaacaucagaagaguuu

SEQ ID NO: 1968113 - RNA, 19 nt, Homo sapiens
  misc_RNA (1)...(19): siRNA sense strand
gcugggacucuccuucuua

SEQ ID NO: 1968114 - RNA, 19 nt, Homo sapiens
  misc_RNA (1)...(19): siRNA sense strand
caaacaacuggcuggaaua

SEQ ID NO: 1968115 - RNA, 19 nt, Homo sapiens
  misc_RNA (1)...(19): siRNA sense strand
gcuggaagcacugaaauug

SEQ ID NO: 1968116 - RNA, 19 nt, Homo sapiens
  misc_RNA (1)...(19): siRNA sense strand
ucagcaaacuaaugaucaa

SEQ ID NO: 1968117 - RNA, 19 nt, Homo sapiens
  misc_RNA (1)...(19): siRNA sense strand
ggaauugcucucaccagaa

SEQ ID NO: 1968118 - RNA, 19 nt, Homo sapiens
  misc_RNA (1)...(19): siRNA sense strand
gaaaugguggaauuaucaa

SEQ ID NO: 1968119 - RNA, 19 nt, Homo sapiens
  misc_RNA (1)...(19): siRNA sense strand
gcauggccauucuccuuuc

SEQ ID NO: 1968120 - RNA, 19 nt, Homo sapiens
  misc_RNA (1)...(19): siRNA sense strand
uugcuaagcuugugggaau

SEQ ID NO: 1968121 - RNA, 19 nt, Homo sapiens
  misc_RNA (1)...(19): siRNA sense strand
gagaccaucagguuuaaau

SEQ ID NO: 1968122 - RNA, 19 nt, Homo sapiens
  misc_RNA (1)...(19): siRNA sense strand
guaagaacuccuacaucaa

SEQ ID NO: 1968123 - RNA, 19 nt, Homo sapiens
  misc_RNA (1)...(19): siRNA sense strand
cagaagauuuagugaaugc

SEQ ID NO: 1968124 - RNA, 19 nt, Homo sapiens
  misc_RNA (1)...(19): siRNA sense strand
uguaggaauuguagguauu

SEQ ID NO: 1968125 - RNA, 19 nt, Homo sapiens
  misc_RNA (1)...(19): siRNA sense strand
acaugcagcuggccaaaca

SEQ ID NO: 1968126 - RNA, 19 nt, Homo sapiens
  misc_RNA (1)...(19): siRNA sense strand
aaauagugguucaucuuca

SEQ ID NO: 1968127 - RNA, 19 nt, Homo sapiens
  misc_RNA (1)...(19): siRNA sense strand
ccagaagauuuagugaaug

SEQ ID NO: 1968128 - RNA, 19 nt, Homo sapiens
  misc_RNA (1)...(19): siRNA sense strand
accagaagauuuagugaau

SEQ ID NO: 1968129 - RNA, 19 nt, Homo sapiens
  misc_RNA (1)...(19): siRNA sense strand
acaaagaaccuggcccauu

SEQ ID NO: 1968130 - RNA, 19 nt, Homo sapiens
  misc_RNA (1)...(19): siRNA sense strand
ccaucagguuuaaauccua

SEQ ID NO: 1968131 - RNA, 19 nt, Homo sapiens
  misc_RNA (1)...(19): siRNA sense strand
guaaaccgagcucgaggaa

SEQ ID NO: 1968132 - RNA, 19 nt, Homo sapiens
  misc_RNA (1)...(19): siRNA sense strand
cccaaauuguguucauuga

SEQ ID NO: 1968133 - RNA, 19 nt, Homo sapiens
  misc_RNA (1)...(19): siRNA sense strand
gcuucagucucacaaggaa

SEQ ID NO: 1968134 - RNA, 19 nt, Homo sapiens
  misc_RNA (1)...(19): siRNA sense strand
ggaagaauaagggcuguag

SEQ ID NO: 1968135 - RNA, 19 nt, Homo sapiens
  misc_RNA (1)...(19): siRNA sense strand
gccauucuccuuucccaaa

SEQ ID NO: 1968136 - RNA, 19 nt, Homo sapiens
  misc_RNA (1)...(19): siRNA sense strand
cagcuccuccuaacaaaga

SEQ ID NO: 1968137 - RNA, 19 nt, Homo sapiens
  misc_RNA (1)...(19): siRNA sense strand
acaucaaacucuccuucaa

SEQ ID NO: 1968138 - RNA, 19 nt, Homo sapiens
  misc_RNA (1)...(19): siRNA sense strand
ucagaggaaaugacacaaa

SEQ ID NO: 1968139 - RNA, 19 nt, Homo sapiens
  misc_RNA (1)...(19): siRNA sense strand
aaagaagaugggagaauau

SEQ ID NO: 1968140 - RNA, 19 nt, Homo sapiens
  misc_RNA (1)...(19): siRNA sense strand
agaagaguuugcuaagcuu

SEQ ID NO: 1968141 - RNA, 19 nt, Homo sapiens
  misc_RNA (1)...(19): siRNA sense strand
ucacaaggaagaggaaaug

SEQ ID NO: 1968142 - RNA, 19 nt, Homo sapiens
  misc_RNA (1)...(19): siRNA sense strand
gaagaacaggcggcuggaa

SEQ ID NO: 1968143 - RNA, 19 nt, Homo sapiens
  misc_RNA (1)...(19): siRNA sense strand
uauugcaggugccuuuaga

SEQ ID NO: 1968144 - RNA, 19 nt, Homo sapiens
  misc_RNA (1)...(19): siRNA sense strand
aaacaacuggcuggaauau

SEQ ID NO: 1968145 - RNA, 19 nt, Homo sapiens
  misc_RNA (1)...(19): siRNA sense strand
gcacacaguaccacaugca

SEQ ID NO: 1968146 - RNA, 19 nt, Homo sapiens
  misc_RNA (1)...(19): siRNA sense strand
gccaguuucccagucauua

SEQ ID NO: 1968147 - RNA, 19 nt, Homo sapiens
  misc_RNA (1)...(19): siRNA sense strand
gcgaggagaagauaaaauu

SEQ ID NO: 1968148 - RNA, 19 nt, Homo sapiens
  misc_RNA (1)...(19): siRNA sense strand
guaggaauuguagguauug

SEQ ID NO: 1968149 - RNA, 19 nt, Homo sapiens
  misc_RNA (1)...(19): siRNA sense strand
gaagagugccaaaauagug

SEQ ID NO: 1968150 - RNA, 19 nt, Homo sapiens
  misc_RNA (1)...(19): siRNA sense strand
gcagcuggccaaacaacug

SEQ ID NO: 1968151 - RNA, 19 nt, Homo sapiens
  misc_RNA (1)...(19): siRNA sense strand
gaacuccuacaucaaacuc

SEQ ID NO: 1968152 - RNA, 19 nt, Homo sapiens
  misc_RNA (1)...(19): siRNA sense strand
caaagaaagguugcugcuu

SEQ ID NO: 1968153 - RNA, 19 nt, Homo sapiens
  misc_RNA (1)...(19): siRNA sense strand
agacaaacaaggugacauc

SEQ ID NO: 1968154 - RNA, 19 nt, Homo sapiens
  misc_RNA (1)...(19): siRNA sense strand
agaacaggcggcuggaauu

SEQ ID NO: 1968155 - RNA, 19 nt, Homo sapiens
  misc_RNA (1)...(19): siRNA sense strand
caacgagacccuggugauc

SEQ ID NO: 1968156 - RNA, 19 nt, Homo sapiens
  misc_RNA (1)...(19): siRNA sense strand
ucaaagaacauggccagau

SEQ ID NO: 1968157 - RNA, 19 nt, Homo sapiens
  misc_RNA (1)...(19): siRNA sense strand
ucacccagcuccuccuaac

SEQ ID NO: 1968158 - RNA, 19 nt, Homo sapiens
  misc_RNA (1)...(19): siRNA sense strand
aaacucuccuucaaagaac

SEQ ID NO: 1968159 - RNA, 19 nt, Homo sapiens
  misc_RNA (1)...(19): siRNA sense strand
gauuuggagagaucagaaa

SEQ ID NO: 1968160 - RNA, 19 nt, Homo sapiens
  misc_RNA (1)...(19): siRNA sense strand
gaggagaagauaaaauuug

SEQ ID NO: 1968161 - RNA, 19 nt, Homo sapiens
  misc_RNA (1)...(19): siRNA sense strand
aggaaaugguggaauuauc

SEQ ID NO: 1968162 - RNA, 19 nt, Homo sapiens
  misc_RNA (1)...(19): siRNA sense strand
ugaaaggaaacuggaagaa

SEQ ID NO: 1968163 - RNA, 19 nt, Homo sapiens
  misc_RNA (1)...(19): siRNA sense strand
aagaauaagggcuguagga

SEQ ID NO: 1968164 - RNA, 19 nt, Homo sapiens
  misc_RNA (1)...(19): siRNA sense strand
aacuaaugaucaaggcuaa

SEQ ID NO: 1968165 - RNA, 19 nt, Homo sapiens
  misc_RNA (1)...(19): siRNA sense strand
ugggaagagugccaaaaua

SEQ ID NO: 1968166 - RNA, 19 nt, Homo sapiens
  misc_RNA (1)...(19): siRNA sense strand
cauucuccuuucccaaauu

SEQ ID NO: 1968167 - RNA, 19 nt, Homo sapiens
  misc_RNA (1)...(19): siRNA sense strand
ccauucuccuuucccaaau

SEQ ID NO: 1968168 - RNA, 19 nt, Homo sapiens
  misc_RNA (1)...(19): siRNA sense strand
gagcaaagaugaaacaauu

SEQ ID NO: 1968169 - RNA, 19 nt, Homo sapiens
  misc_RNA (1)...(19): siRNA sense strand
uaaaggacauguucaguuu

SEQ ID NO: 1968170 - RNA, 19 nt, Homo sapiens
  misc_RNA (1)...(19): siRNA sense strand
uaacuugccugaaauucua

SEQ ID NO: 1968171 - RNA, 19 nt, Homo sapiens
  misc_RNA (1)...(19): siRNA sense strand
gaaggaagaucagcauuca

SEQ ID NO: 1968172 - RNA, 19 nt, Homo sapiens
  misc_RNA (1)...(19): siRNA sense strand
gaaaguggccugauaucaa

SEQ ID NO: 1968173 - RNA, 19 nt, Homo sapiens
  misc_RNA (1)...(19): siRNA sense strand
uacaauaacuugccugaaa

SEQ ID NO: 1968174 - RNA, 19 nt, Homo sapiens
  misc_RNA (1)...(19): siRNA sense strand
ggagagcaguauguaguua

SEQ ID NO: 1968175 - RNA, 19 nt, Homo sapiens
  misc_RNA (1)...(19): siRNA sense strand
gcagagccuucuccuguaa

SEQ ID NO: 1968176 - RNA, 19 nt, Homo sapiens
  misc_RNA (1)...(19): siRNA sense strand
gaaaagcggucaaaaccua

SEQ ID NO: 1968177 - RNA, 19 nt, Homo sapiens
  misc_RNA (1)...(19): siRNA sense strand
caacaggcauuuaaucagu

SEQ ID NO: 1968178 - RNA, 19 nt, Homo sapiens
  misc_RNA (1)...(19): siRNA sense strand
gggaaugccugaagucaau

SEQ ID NO: 1968179 - RNA, 19 nt, Homo sapiens
  misc_RNA (1)...(19): siRNA sense strand
caaaguggcagacaugaaa

SEQ ID NO: 1968180 - RNA, 19 nt, Homo sapiens
  misc_RNA (1)...(19): siRNA sense strand
gaagaucagcauucauaaa

SEQ ID NO: 1968181 - RNA, 19 nt, Homo sapiens
  misc_RNA (1)...(19): siRNA sense strand
gagaauuuccucuguuaaa

SEQ ID NO: 1968182 - RNA, 19 nt, Homo sapiens
  misc_RNA (1)...(19): siRNA sense strand
gcaucacagugguacaaua

SEQ ID NO: 1968183 - RNA, 19 nt, Homo sapiens
  misc_RNA (1)...(19): siRNA sense strand
aauuaaagcucacaaagga

SEQ ID NO: 1968184 - RNA, 19 nt, Homo sapiens
  misc_RNA (1)...(19): siRNA sense strand
uaucugggaugcaaagaaa

SEQ ID NO: 1968185 - RNA, 19 nt, Homo sapiens
  misc_RNA (1)...(19): siRNA sense strand
gaacguggaaucuuguaga

SEQ ID NO: 1968186 - RNA, 19 nt, Homo sapiens
  misc_RNA (1)...(19): siRNA sense strand
guaaaggacauguucaguu

SEQ ID NO: 1968187 - RNA, 19 nt, Homo sapiens
  misc_RNA (1)...(19): siRNA sense strand
acaaaaugcucacauagua

SEQ ID NO: 1968188 - RNA, 19 nt, Homo sapiens
  misc_RNA (1)...(19): siRNA sense strand
gagcaucauguuauuguuu

SEQ ID NO: 1968189 - RNA, 19 nt, Homo sapiens
  misc_RNA (1)...(19): siRNA sense strand
ucacccaucuggcaaguug

SEQ ID NO: 1968190 - RNA, 19 nt, Homo sapiens
  misc_RNA (1)...(19): siRNA sense strand
ggccugauaucaaccaaga

SEQ ID NO: 1968191 - RNA, 19 nt, Homo sapiens
  misc_RNA (1)...(19): siRNA sense strand
aaaagaaaguggccugaua

SEQ ID NO: 1968192 - RNA, 19 nt, Homo sapiens
  misc_RNA (1)...(19): siRNA sense strand
caucacagugguacaauaa

SEQ ID NO: 1968193 - RNA, 19 nt, Homo sapiens
  misc_RNA (1)...(19): siRNA sense strand
ggaagaucagcauucauaa

SEQ ID NO: 1968194 - RNA, 19 nt, Homo sapiens
  misc_RNA (1)...(19): siRNA sense strand
gaaaugggaaugccugaag

SEQ ID NO: 1968195 - RNA, 19 nt, Homo sapiens
  misc_RNA (1)...(19): siRNA sense strand
ggcuggagaugaagaaguu

SEQ ID NO: 1968196 - RNA, 19 nt, Homo sapiens
  misc_RNA (1)...(19): siRNA sense strand
acaauaacuugccugaaau

SEQ ID NO: 1968197 - RNA, 19 nt, Homo sapiens
  misc_RNA (1)...(19): siRNA sense strand
gaguguggcuagacaaagu

SEQ ID NO: 1968198 - RNA, 19 nt, Homo sapiens
  misc_RNA (1)...(19): siRNA sense strand
ggagaugaagaaguuauaa

SEQ ID NO: 1968199 - RNA, 19 nt, Homo sapiens
  misc_RNA (1)...(19): siRNA sense strand
aggaagaucagcauucaua

SEQ ID NO: 1968200 - RNA, 19 nt, Homo sapiens
  misc_RNA (1)...(19): siRNA sense strand
gaaugccugaagucaauua

SEQ ID NO: 1968201 - RNA, 19 nt, Homo sapiens
  misc_RNA (1)...(19): siRNA sense strand
gaggagagcaguauguagu

SEQ ID NO: 1968202 - RNA, 19 nt, Homo sapiens
  misc_RNA (1)...(19): siRNA sense strand
ggucaaaaccuaacacaaa

SEQ ID NO: 1968203 - RNA, 19 nt, Homo sapiens
  misc_RNA (1)...(19): siRNA sense strand
gcuugacacugcauccauu

SEQ ID NO: 1968204 - RNA, 19 nt, Homo sapiens
  misc_RNA (1)...(19): siRNA sense strand
gaaauuccagagcaucaug

SEQ ID NO: 1968205 - RNA, 19 nt, Homo sapiens
  misc_RNA (1)...(19): siRNA sense strand
gaaaaugguagaaauguug

SEQ ID NO: 1968206 - RNA, 19 nt, Homo sapiens
  misc_RNA (1)...(19): siRNA sense strand
ggaaaaugguagaaauguu

SEQ ID NO: 1968207 - RNA, 19 nt, Homo sapiens
  misc_RNA (1)...(19): siRNA sense strand
aaagaacaguccaaaauug

SEQ ID NO: 1968208 - RNA, 19 nt, Homo sapiens
  misc_RNA (1)...(19): siRNA sense strand
aaagaaaguggccugauau

SEQ ID NO: 1968209 - RNA, 19 nt, Homo sapiens
  misc_RNA (1)...(19): siRNA sense strand
aaaggagccuggugacaca

SEQ ID NO: 1968210 - RNA, 19 nt, Homo sapiens
  misc_RNA (1)...(19): siRNA sense strand
ugaccuuccuuucuauuca

SEQ ID NO: 1968211 - RNA, 19 nt, Homo sapiens
  misc_RNA (1)...(19): siRNA sense strand
guagaaauguuggaaaaga

SEQ ID NO: 1968212 - RNA, 19 nt, Homo sapiens
  misc_RNA (1)...(19): siRNA sense strand
guaaagaacaguccaaaau

SEQ ID NO: 1968213 - RNA, 19 nt, Homo sapiens
  misc_RNA (1)...(19): siRNA sense strand
cacgagcaauggacucuug

SEQ ID NO: 1968214 - RNA, 19 nt, Homo sapiens
  misc_RNA (1)...(19): siRNA sense strand
agcaguagcuguaaauagu

SEQ ID NO: 1968215 - RNA, 19 nt, Homo sapiens
  misc_RNA (1)...(19): siRNA sense strand
aaaguggccugauaucaac

SEQ ID NO: 1968216 - RNA, 19 nt, Homo sapiens
  misc_RNA (1)...(19): siRNA sense strand
ugacacagugcacaaagaa

SEQ ID NO: 1968217 - RNA, 19 nt, Homo sapiens
  misc_RNA (1)...(19): siRNA sense strand
caauaacuugccugaaauu

SEQ ID NO: 1968218 - RNA, 19 nt, Homo sapiens
  misc_RNA (1)...(19): siRNA sense strand
gugacacagugcacaaaga

SEQ ID NO: 1968219 - RNA, 19 nt, Homo sapiens
  misc_RNA (1)...(19): siRNA sense strand
uaagcaggauaagaaaguu

SEQ ID NO: 1968220 - RNA, 19 nt, Homo sapiens
  misc_RNA (1)...(19): siRNA sense strand
ggacucuuguggcugacuu

SEQ ID NO: 1968221 - RNA, 19 nt, Homo sapiens
  misc_RNA (1)...(19): siRNA sense strand
ucacugggagcaaagauga

SEQ ID NO: 1968222 - RNA, 19 nt, Homo sapiens
  misc_RNA (1)...(19): siRNA sense strand
caagaggagagcaguaugu

SEQ ID NO: 1968223 - RNA, 19 nt, Homo sapiens
  misc_RNA (1)...(19): siRNA sense strand
ggcaacaggcauuuaauca

SEQ ID NO: 1968224 - RNA, 19 nt, Homo sapiens
  misc_RNA (1)...(19): siRNA sense strand
guggcaccaucacaaauga

SEQ ID NO: 1968225 - RNA, 19 nt, Homo sapiens
  misc_RNA (1)...(19): siRNA sense strand
ggaagcuuaagcaggauaa

SEQ ID NO: 1968226 - RNA, 19 nt, Homo sapiens
  misc_RNA (1)...(19): siRNA sense strand
ugcaguggcuggagaugaa

SEQ ID NO: 1968227 - RNA, 19 nt, Homo sapiens
  misc_RNA (1)...(19): siRNA sense strand
ucacagugguacaauaacu

SEQ ID NO: 1968228 - RNA, 19 nt, Homo sapiens
  misc_RNA (1)...(19): siRNA sense strand
ggagcaaagaugaaacaau

SEQ ID NO: 1968229 - RNA, 19 nt, Homo sapiens
  misc_RNA (1)...(19): siRNA sense strand
caucuuuacucugugaaau

SEQ ID NO: 1968230 - RNA, 19 nt, Homo sapiens
  misc_RNA (1)...(19): siRNA sense strand
uaacaggugacaguaagaa

SEQ ID NO: 1968231 - RNA, 19 nt, Homo sapiens
  misc_RNA (1)...(19): siRNA sense strand
gagagcaguauguaguuau

SEQ ID NO: 1968232 - RNA, 19 nt, Homo sapiens
  misc_RNA (1)...(19): siRNA sense strand
acacagugcacaaagaaga

SEQ ID NO: 1968233 - RNA, 19 nt, Homo sapiens
  misc_RNA (1)...(19): siRNA sense strand
caucacaaaugaaaagaga

SEQ ID NO: 1968234 - RNA, 19 nt, Homo sapiens
  misc_RNA (1)...(19): siRNA sense strand
agacaaaguggcagacaug

SEQ ID NO: 1968235 - RNA, 19 nt, Homo sapiens
  misc_RNA (1)...(19): siRNA sense strand
gugugccucugcgaauuua

SEQ ID NO: 1968236 - RNA, 19 nt, Homo sapiens
  misc_RNA (1)...(19): siRNA sense strand
ugacuucacucaccaugcu

SEQ ID NO: 1968237 - RNA, 19 nt, Homo sapiens
  misc_RNA (1)...(19): siRNA sense strand
uauggcaacaggcauuuaa

SEQ ID NO: 1968238 - RNA, 19 nt, Homo sapiens
  misc_RNA (1)...(19): siRNA sense strand
ugcagagccuucuccugua

SEQ ID NO: 1968239 - RNA, 19 nt, Homo sapiens
  misc_RNA (1)...(19): siRNA sense strand
gaugaagaaguuauaaggu

SEQ ID NO: 1968240 - RNA, 19 nt, Homo sapiens
  misc_RNA (1)...(19): siRNA sense strand
caauuaaagcucacaaagg

SEQ ID NO: 1968241 - RNA, 19 nt, Homo sapiens
  misc_RNA (1)...(19): siRNA sense strand
ugccugaagucaauuaaag

SEQ ID NO: 1968242 - RNA, 19 nt, Homo sapiens
  misc_RNA (1)...(19): siRNA sense strand
ucacacugccuccuuguca

SEQ ID NO: 1968243 - RNA, 19 nt, Homo sapiens
  misc_RNA (1)...(19): siRNA sense strand
acaguaagaaagcaacaaa

SEQ ID NO: 1968244 - RNA, 19 nt, Homo sapiens
  misc_RNA (1)...(19): siRNA sense strand
gaagaaaagcggucaaaac

SEQ ID NO: 1968245 - RNA, 19 nt, Homo sapiens
  misc_RNA (1)...(19): siRNA sense strand
uccagagcaucauguuauu

SEQ ID NO: 1968246 - RNA, 19 nt, Homo sapiens
  misc_RNA (1)...(19): siRNA sense strand
gcaacaggcauuuaaucag

SEQ ID NO: 1968247 - RNA, 19 nt, Homo sapiens
  misc_RNA (1)...(19): siRNA sense strand
ucaauuaaagcucacaaag

SEQ ID NO: 1968248 - RNA, 19 nt, Homo sapiens
  misc_RNA (1)...(19): siRNA sense strand
cagagcaucauguuauugu

SEQ ID NO: 1968249 - RNA, 19 nt, Homo sapiens
  misc_RNA (1)...(19): siRNA sense strand
gagaugaagaaguuauaag

SEQ ID NO: 1968250 - RNA, 19 nt, Homo sapiens
  misc_RNA (1)...(19): siRNA sense strand
aacguggaaucuuguagaa

SEQ ID NO: 1968251 - RNA, 19 nt, Homo sapiens
  misc_RNA (1)...(19): siRNA sense strand
cuacgagcagguccucuuu

SEQ ID NO: 1968252 - RNA, 19 nt, Homo sapiens
  misc_RNA (1)...(19): siRNA sense strand
gcaucauguuauuguuuca

SEQ ID NO: 1968253 - RNA, 19 nt, Homo sapiens
  misc_RNA (1)...(19): siRNA sense strand
agaaggaagaucagcauuc

SEQ ID NO: 1968254 - RNA, 19 nt, Homo sapiens
  misc_RNA (1)...(19): siRNA sense strand
guagaaggaagaucagcau

SEQ ID NO: 1968255 - RNA, 19 nt, Homo sapiens
  misc_RNA (1)...(19): siRNA sense strand
gaaagcaacaaaagaaagu

SEQ ID NO: 1968256 - RNA, 19 nt, Homo sapiens
  misc_RNA (1)...(19): siRNA sense strand
guaagaaagcaacaaaaga

SEQ ID NO: 1968257 - RNA, 19 nt, Homo sapiens
  misc_RNA (1)...(19): siRNA sense strand
aaaugggaaugccugaagu

SEQ ID NO: 1968258 - RNA, 19 nt, Homo sapiens
  misc_RNA (1)...(19): siRNA sense strand
uaucaaccaagaagaggaa

SEQ ID NO: 1968259 - RNA, 19 nt, Homo sapiens
  misc_RNA (1)...(19): siRNA sense strand
uuuaacaggugacaguaag

SEQ ID NO: 1968260 - RNA, 19 nt, Homo sapiens
  misc_RNA (1)...(19): siRNA sense strand
aaaccuaacacaaagaaac

SEQ ID NO: 1968261 - RNA, 19 nt, Homo sapiens
  misc_RNA (1)...(19): siRNA sense strand
gacaaaguggcagacauga

SEQ ID NO: 1968262 - RNA, 19 nt, Homo sapiens
  misc_RNA (1)...(19): siRNA sense strand
ggcaccaucacaaaugaaa

SEQ ID NO: 1968263 - RNA, 19 nt, Homo sapiens
  misc_RNA (1)...(19): siRNA sense strand
uggagaugaagaaguuaua

SEQ ID NO: 1968264 - RNA, 19 nt, Homo sapiens
  misc_RNA (1)...(19): siRNA sense strand
guuuaacaggugacaguaa

SEQ ID NO: 1968265 - RNA, 19 nt, Homo sapiens
  misc_RNA (1)...(19): siRNA sense strand
uagacaaaguggcagacau

SEQ ID NO: 1968266 - RNA, 19 nt, Homo sapiens
  misc_RNA (1)...(19): siRNA sense strand
cgaauuuaaagcucaugaa

SEQ ID NO: 1968267 - RNA, 19 nt, Homo sapiens
  misc_RNA (1)...(19): siRNA sense strand
gcgaauuuaaagcucauga

SEQ ID NO: 1968268 - RNA, 19 nt, Homo sapiens
  misc_RNA (1)...(19): siRNA sense strand
gaagaaagcuccucacuca

SEQ ID NO: 1968269 - RNA, 19 nt, Homo sapiens
  misc_RNA (1)...(19): siRNA sense strand
gacaaaggcuucuaaagua

SEQ ID NO: 1968270 - RNA, 19 nt, Homo sapiens
  misc_RNA (1)...(19): siRNA sense strand
ggaagaagauuacaaggaa

SEQ ID NO: 1968271 - RNA, 19 nt, Homo sapiens
  misc_RNA (1)...(19): siRNA sense strand
gcacaaggcugacucuuug

SEQ ID NO: 1968272 - RNA, 19 nt, Homo sapiens
  misc_RNA (1)...(19): siRNA sense strand
aaacaucgcugguauaaga

SEQ ID NO: 1968273 - RNA, 19 nt, Homo sapiens
  misc_RNA (1)...(19): siRNA sense strand
gaagaaacaucgcugguau

SEQ ID NO: 1968274 - RNA, 19 nt, Homo sapiens
  misc_RNA (1)...(19): siRNA sense strand
ccacagaacuucauugaug

SEQ ID NO: 1968275 - RNA, 19 nt, Homo sapiens
  misc_RNA (1)...(19): siRNA sense strand
ugaagaagaugaugaaaug

SEQ ID NO: 1968276 - RNA, 19 nt, Homo sapiens
  misc_RNA (1)...(19): siRNA sense strand
gaacaaggacucucuguau

SEQ ID NO: 1968277 - RNA, 19 nt, Homo sapiens
  misc_RNA (1)...(19): siRNA sense strand
gaaagaaguuaaggaagaa

SEQ ID NO: 1968278 - RNA, 19 nt, Homo sapiens
  misc_RNA (1)...(19): siRNA sense strand
guacauggcuuuccuaaaa

SEQ ID NO: 1968279 - RNA, 19 nt, Homo sapiens
  misc_RNA (1)...(19): siRNA sense strand
gaagaaacacagaaagaaa

SEQ ID NO: 1968280 - RNA, 19 nt, Homo sapiens
  misc_RNA (1)...(19): siRNA sense strand
gacagaagauaaugaagaa

SEQ ID NO: 1968281 - RNA, 19 nt, Homo sapiens
  misc_RNA (1)...(19): siRNA sense strand
uaaaguagcagaucuggua

SEQ ID NO: 1968282 - RNA, 19 nt, Homo sapiens
  misc_RNA (1)...(19): siRNA sense strand
gaagagaaaucccaaagcu

SEQ ID NO: 1968283 - RNA, 19 nt, Homo sapiens
  misc_RNA (1)...(19): siRNA sense strand
ggaggaagcugaugaaagc

SEQ ID NO: 1968284 - RNA, 19 nt, Homo sapiens
  misc_RNA (1)...(19): siRNA sense strand
aagaagcgcuguuuaaaug

SEQ ID NO: 1968285 - RNA, 19 nt, Homo sapiens
  misc_RNA (1)...(19): siRNA sense strand
gcuuauagaugccagcuuu

SEQ ID NO: 1968286 - RNA, 19 nt, Homo sapiens
  misc_RNA (1)...(19): siRNA sense strand
ggucagaggauauagauaa

SEQ ID NO: 1968287 - RNA, 19 nt, Homo sapiens
  misc_RNA (1)...(19): siRNA sense strand
ucaaagaggaagaagauua

SEQ ID NO: 1968288 - RNA, 19 nt, Homo sapiens
  misc_RNA (1)...(19): siRNA sense strand
agaaagaaguuaaggaaga

SEQ ID NO: 1968289 - RNA, 19 nt, Homo sapiens
  misc_RNA (1)...(19): siRNA sense strand
ggaagaagacagugaaaug

SEQ ID NO: 1968290 - RNA, 19 nt, Homo sapiens
  misc_RNA (1)...(19): siRNA sense strand
gaaagugggaagaugauaa

SEQ ID NO: 1968291 - RNA, 19 nt, Homo sapiens
  misc_RNA (1)...(19): siRNA sense strand
gaagaugcccggaagagaa

SEQ ID NO: 1968292 - RNA, 19 nt, Homo sapiens
  misc_RNA (1)...(19): siRNA sense strand
ggagaagucuuugcugaug

SEQ ID NO: 1968293 - RNA, 19 nt, Homo sapiens
  misc_RNA (1)...(19): siRNA sense strand
gauguuugaugcagaauau

SEQ ID NO: 1968294 - RNA, 19 nt, Homo sapiens
  misc_RNA (1)...(19): siRNA sense strand
gcaaacuucucacccuuau

SEQ ID NO: 1968295 - RNA, 19 nt, Homo sapiens
  misc_RNA (1)...(19): siRNA sense strand
agaaggcccugccauuuaa

SEQ ID NO: 1968296 - RNA, 19 nt, Homo sapiens
  misc_RNA (1)...(19): siRNA sense strand
gaaaacggcucuagugaug

SEQ ID NO: 1968297 - RNA, 19 nt, Homo sapiens
  misc_RNA (1)...(19): siRNA sense strand
agaagaaagugccaagaaa

SEQ ID NO: 1968298 - RNA, 19 nt, Homo sapiens
  misc_RNA (1)...(19): siRNA sense strand
cagaaggcccugccauuua

SEQ ID NO: 1968299 - RNA, 19 nt, Homo sapiens
  misc_RNA (1)...(19): siRNA sense strand
ggagauguuugaugcagaa

SEQ ID NO: 1968300 - RNA, 19 nt, Homo sapiens
  misc_RNA (1)...(19): siRNA sense strand
ggaaguggccaaauuugaa

SEQ ID NO: 1968301 - RNA, 19 nt, Homo sapiens
  misc_RNA (1)...(19): siRNA sense strand
gaggauauccgaacaaaca

SEQ ID NO: 1968302 - RNA, 19 nt, Homo sapiens
  misc_RNA (1)...(19): siRNA sense strand
gcgcagaauuugaagauca

SEQ ID NO: 1968303 - RNA, 19 nt, Homo sapiens
  misc_RNA (1)...(19): siRNA sense strand
ggacagugacagaagauaa

SEQ ID NO: 1968304 - RNA, 19 nt, Homo sapiens
  misc_RNA (1)...(19): siRNA sense strand
ccaaaccuccgaaagcuua

SEQ ID NO: 1968305 - RNA, 19 nt, Homo sapiens
  misc_RNA (1)...(19): siRNA sense strand
gaagaugacggguuggaaa

SEQ ID NO: 1968306 - RNA, 19 nt, Homo sapiens
  misc_RNA (1)...(19): siRNA sense strand
gaucugguacugaugcuua

SEQ ID NO: 1968307 - RNA, 19 nt, Homo sapiens
  misc_RNA (1)...(19): siRNA sense strand
gaugagcgauauugucuuc

SEQ ID NO: 1968308 - RNA, 19 nt, Homo sapiens
  misc_RNA (1)...(19): siRNA sense strand
gaacugguuucuuggcaau

SEQ ID NO: 1968309 - RNA, 19 nt, Homo sapiens
  misc_RNA (1)...(19): siRNA sense strand
acagggaacugguuucuug

SEQ ID NO: 1968310 - RNA, 19 nt, Homo sapiens
  misc_RNA (1)...(19): siRNA sense strand
acccaaagcugcaaagaaa

SEQ ID NO: 1968311 - RNA, 19 nt, Homo sapiens
  misc_RNA (1)...(19): siRNA sense strand
gaugaaaugucugaagaug

SEQ ID NO: 1968312 - RNA, 19 nt, Homo sapiens
  misc_RNA (1)...(19): siRNA sense strand
gauaaucaagggcuaauga

SEQ ID NO: 1968313 - RNA, 19 nt, Homo sapiens
  misc_RNA (1)...(19): siRNA sense strand
gcucuacggugacuuugaa

SEQ ID NO: 1968314 - RNA, 19 nt, Homo sapiens
  misc_RNA (1)...(19): siRNA sense strand
cagacaggauggaagauuu

SEQ ID NO: 1968315 - RNA, 19 nt, Homo sapiens
  misc_RNA (1)...(19): siRNA sense strand
gaagggcauuucaggauca

SEQ ID NO: 1968316 - RNA, 19 nt, Homo sapiens
  misc_RNA (1)...(19): siRNA sense strand
ucacaggacucaggauuug

SEQ ID NO: 1968317 - RNA, 19 nt, Homo sapiens
  misc_RNA (1)...(19): siRNA sense strand
gaggauaagcugcugauga

SEQ ID NO: 1968318 - RNA, 19 nt, Homo sapiens
  misc_RNA (1)...(19): siRNA sense strand
cagaggauauagauaauca

SEQ ID NO: 1968319 - RNA, 19 nt, Homo sapiens
  misc_RNA (1)...(19): siRNA sense strand
cuaaacaucugucaaguac

SEQ ID NO: 1968320 - RNA, 19 nt, Homo sapiens
  misc_RNA (1)...(19): siRNA sense strand
gacauuaacaugaugauug

SEQ ID NO: 1968321 - RNA, 19 nt, Homo sapiens
  misc_RNA (1)...(19): siRNA sense strand
ccacuugggucagaggaua

SEQ ID NO: 1968322 - RNA, 19 nt, Homo sapiens
  misc_RNA (1)...(19): siRNA sense strand
ucaaagccuucucaaguga

SEQ ID NO: 1968323 - RNA, 19 nt, Homo sapiens
  misc_RNA (1)...(19): siRNA sense strand
gagaagucuuugcugauga

SEQ ID NO: 1968324 - RNA, 19 nt, Homo sapiens
  misc_RNA (1)...(19): siRNA sense strand
gaagacaaagaagcgauua

SEQ ID NO: 1968325 - RNA, 19 nt, Homo sapiens
  misc_RNA (1)...(19): siRNA sense strand
aacaaggacucucuguaua

SEQ ID NO: 1968326 - RNA, 19 nt, Homo sapiens
  misc_RNA (1)...(19): siRNA sense strand
gucccgagauccaaucaua

SEQ ID NO: 1968327 - RNA, 19 nt, Homo sapiens
  misc_RNA (1)...(19): siRNA sense strand
gaagaagacucagaaaaug

SEQ ID NO: 1968328 - RNA, 19 nt, Homo sapiens
  misc_RNA (1)...(19): siRNA sense strand
agagaaaucccaaagcuuu

SEQ ID NO: 1968329 - RNA, 19 nt, Homo sapiens
  misc_RNA (1)...(19): siRNA sense strand
gccaagcuguucuaccuuu

SEQ ID NO: 1968330 - RNA, 19 nt, Homo sapiens
  misc_RNA (1)...(19): siRNA sense strand
guacugaugcuuauagaug

SEQ ID NO: 1968331 - RNA, 19 nt, Homo sapiens
  misc_RNA (1)...(19): siRNA sense strand
agaaggaccucaggaagaa

SEQ ID NO: 1968332 - RNA, 19 nt, Homo sapiens
  misc_RNA (1)...(19): siRNA sense strand
aaacaucugucaaguacau

SEQ ID NO: 1968333 - RNA, 19 nt, Homo sapiens
  misc_RNA (1)...(19): siRNA sense strand
gaaacaagcacagcugaau

SEQ ID NO: 1968334 - RNA, 19 nt, Homo sapiens
  misc_RNA (1)...(19): siRNA sense strand
gaaagaagaaaccagaagu

SEQ ID NO: 1968335 - RNA, 19 nt, Homo sapiens
  misc_RNA (1)...(19): siRNA sense strand
ugacaaacccagaggauau

SEQ ID NO: 1968336 - RNA, 19 nt, Homo sapiens
  misc_RNA (1)...(19): siRNA sense strand
caaaggcuucuaaaguaua

SEQ ID NO: 1968337 - RNA, 19 nt, Homo sapiens
  misc_RNA (1)...(19): siRNA sense strand
ggagaaagcacauauuuug

SEQ ID NO: 1968338 - RNA, 19 nt, Homo sapiens
  misc_RNA (1)...(19): siRNA sense strand
gugggaagaugauaaagau

SEQ ID NO: 1968339 - RNA, 19 nt, Homo sapiens
  misc_RNA (1)...(19): siRNA sense strand
ugauugaucuggcuaaagu

SEQ ID NO: 1968340 - RNA, 19 nt, Homo sapiens
  misc_RNA (1)...(19): siRNA sense strand
acaaaggcuucuaaaguau

SEQ ID NO: 1968341 - RNA, 19 nt, Homo sapiens
  misc_RNA (1)...(19): siRNA sense strand
gaaggagaaagcacauauu

SEQ ID NO: 1968342 - RNA, 19 nt, Homo sapiens
  misc_RNA (1)...(19): siRNA sense strand
gaagaagaagaugaugaua

SEQ ID NO: 1968343 - RNA, 19 nt, Homo sapiens
  misc_RNA (1)...(19): siRNA sense strand
uccgaaagcuuauuuaugg

SEQ ID NO: 1968344 - RNA, 19 nt, Homo sapiens
  misc_RNA (1)...(19): siRNA sense strand
agaaggagaagcugguuua

SEQ ID NO: 1968345 - RNA, 19 nt, Homo sapiens
  misc_RNA (1)...(19): siRNA sense strand
uagcagaucugguacugau

SEQ ID NO: 1968346 - RNA, 19 nt, Homo sapiens
  misc_RNA (1)...(19): siRNA sense strand
agacaaaggcuucuaaagu

SEQ ID NO: 1968347 - RNA, 19 nt, Homo sapiens
  misc_RNA (1)...(19): siRNA sense strand
caauaaagagcacuucaga

SEQ ID NO: 1968348 - RNA, 19 nt, Homo sapiens
  misc_RNA (1)...(19): siRNA sense strand
aaacuucucacccuuauau

SEQ ID NO: 1968349 - RNA, 19 nt, Homo sapiens
  misc_RNA (1)...(19): siRNA sense strand
gcccauggcgucagacuaa

SEQ ID NO: 1968350 - RNA, 19 nt, Homo sapiens
  misc_RNA (1)...(19): siRNA sense strand
gaaguuaaggaagaaauug

SEQ ID NO: 1968351 - RNA, 19 nt, Homo sapiens
  misc_RNA (1)...(19): siRNA sense strand
ugagaccagugauauagaa

SEQ ID NO: 1968352 - RNA, 19 nt, Homo sapiens
  misc_RNA (1)...(19): siRNA sense strand
caaaagaagcgcuguuuaa

SEQ ID NO: 1968353 - RNA, 19 nt, Homo sapiens
  misc_RNA (1)...(19): siRNA sense strand
cagaggauauccgaacaaa

SEQ ID NO: 1968354 - RNA, 19 nt, Homo sapiens
  misc_RNA (1)...(19): siRNA sense strand
gagaagggcauuucaggau

SEQ ID NO: 1968355 - RNA, 19 nt, Homo sapiens
  misc_RNA (1)...(19): siRNA sense strand
aaccagaaguccaguuuga

SEQ ID NO: 1968356 - RNA, 19 nt, Homo sapiens
  misc_RNA (1)...(19): siRNA sense strand
acaaggacucucuguauaa

SEQ ID NO: 1968357 - RNA, 19 nt, Homo sapiens
  misc_RNA (1)...(19): siRNA sense strand
gaagauauagagaaagaag

SEQ ID NO: 1968358 - RNA, 19 nt, Homo sapiens
  misc_RNA (1)...(19): siRNA sense strand
agaagaagaugaugauacu

SEQ ID NO: 1968359 - RNA, 19 nt, Homo sapiens
  misc_RNA (1)...(19): siRNA sense strand
gaagagguguuugcaucug

SEQ ID NO: 1968360 - RNA, 19 nt, Homo sapiens
  misc_RNA (1)...(19): siRNA sense strand
gaaguugaccgagaucaga

SEQ ID NO: 1968361 - RNA, 19 nt, Homo sapiens
  misc_RNA (1)...(19): siRNA sense strand
agaauaugaugaaggagaa

SEQ ID NO: 1968362 - RNA, 19 nt, Homo sapiens
  misc_RNA (1)...(19): siRNA sense strand
ugaaagcagugaagaagag

SEQ ID NO: 1968363 - RNA, 19 nt, Homo sapiens
  misc_RNA (1)...(19): siRNA sense strand
ugaaaugucugaagaugac

SEQ ID NO: 1968364 - RNA, 19 nt, Homo sapiens
  misc_RNA (1)...(19): siRNA sense strand
gaugggaccuccaaaaguu

SEQ ID NO: 1968365 - RNA, 19 nt, Homo sapiens
  misc_RNA (1)...(19): siRNA sense strand
gaugauugaucuggcuaaa

SEQ ID NO: 1968366 - RNA, 19 nt, Homo sapiens
  misc_RNA (1)...(19): siRNA sense strand
ggugugacauuaacaugau

SEQ ID NO: 1968367 - RNA, 19 nt, Homo sapiens
  misc_RNA (1)...(19): siRNA sense strand
cagcggcaccugcacaaua

SEQ ID NO: 1968368 - RNA, 19 nt, Homo sapiens
  misc_RNA (1)...(19): siRNA sense strand
gcaaagagccagccaaugu

SEQ ID NO: 1968369 - RNA, 19 nt, Homo sapiens
  misc_RNA (1)...(19): siRNA sense strand
ggacaucgucuucuccaaa

SEQ ID NO: 1968370 - RNA, 19 nt, Homo sapiens
  misc_RNA (1)...(19): siRNA sense strand
gggccaagcugugcaagga

SEQ ID NO: 1968371 - RNA, 19 nt, Homo sapiens
  misc_RNA (1)...(19): siRNA sense strand
acaaggagcgcuucgauga

SEQ ID NO: 1968372 - RNA, 19 nt, Homo sapiens
  misc_RNA (1)...(19): siRNA sense strand
gacaucgucuucuccaaag

SEQ ID NO: 1968373 - RNA, 19 nt, Homo sapiens
  misc_RNA (1)...(19): siRNA sense strand
gaagucugcucgggucauc

SEQ ID NO: 1968374 - RNA, 19 nt, Homo sapiens
  misc_RNA (1)...(19): siRNA sense strand
ugacggacaccagcagaua

SEQ ID NO: 1968375 - RNA, 19 nt, Homo sapiens
  misc_RNA (1)...(19): siRNA sense strand
caaagagccagccaaugug

SEQ ID NO: 1968376 - RNA, 19 nt, Homo sapiens
  misc_RNA (1)...(19): siRNA sense strand
aaggagcgcuucgaugaga

SEQ ID NO: 1968377 - RNA, 19 nt, Homo sapiens
  misc_RNA (1)...(19): siRNA sense strand
ccaaugugggcgucacuaa

SEQ ID NO: 1968378 - RNA, 19 nt, Homo sapiens
  misc_RNA (1)...(19): siRNA sense strand
caaugugggcgucacuaaa

SEQ ID NO: 1968379 - RNA, 19 nt, Homo sapiens
  misc_RNA (1)...(19): siRNA sense strand
cugcucgggucaucaacua

SEQ ID NO: 1968380 - RNA, 19 nt, Homo sapiens
  misc_RNA (1)...(19): siRNA sense strand
cgugagcgccuacaagaau

SEQ ID NO: 1968381 - RNA, 19 nt, Homo sapiens
  misc_RNA (1)...(19): siRNA sense strand
gggcgucacuaaagcaaaa

SEQ ID NO: 1968382 - RNA, 19 nt, Homo sapiens
  misc_RNA (1)...(19): siRNA sense strand
ccacaaggagcgcuucgau

SEQ ID NO: 1968383 - RNA, 19 nt, Homo sapiens
  misc_RNA (1)...(19): siRNA sense strand
gugagcgccuacaagaaug

SEQ ID NO: 1968384 - RNA, 19 nt, Homo sapiens
  misc_RNA (1)...(19): siRNA sense strand
acuaugaggaguucaagaa

SEQ ID NO: 1968385 - RNA, 19 nt, Homo sapiens
  misc_RNA (1)...(19): siRNA sense strand
agagaugaauggcaagaac

SEQ ID NO: 1968386 - RNA, 19 nt, Homo sapiens
  misc_RNA (1)...(19): siRNA sense strand
gaaugcaggcaccuacgau

SEQ ID NO: 1968387 - RNA, 19 nt, Homo sapiens
  misc_RNA (1)...(19): siRNA sense strand
ggacauccuggacgacagu

SEQ ID NO: 1968388 - RNA, 19 nt, Homo sapiens
  misc_RNA (1)...(19): siRNA sense strand
gcucgggucaucaacuaug

SEQ ID NO: 1968389 - RNA, 19 nt, Homo sapiens
  misc_RNA (1)...(19): siRNA sense strand
caagagaugaauggcaaga

SEQ ID NO: 1968390 - RNA, 19 nt, Homo sapiens
  misc_RNA (1)...(19): siRNA sense strand
augccaaggugaagaagug

SEQ ID NO: 1968391 - RNA, 19 nt, Homo sapiens
  misc_RNA (1)...(19): siRNA sense strand
uacgugagcgccuacaaga

SEQ ID NO: 1968392 - RNA, 19 nt, Homo sapiens
  misc_RNA (1)...(19): siRNA sense strand
gauacacgggcucccacaa

SEQ ID NO: 1968393 - RNA, 19 nt, Homo sapiens
  misc_RNA (1)...(19): siRNA sense strand
gcaagaacugggccaagcu

SEQ ID NO: 1968394 - RNA, 19 nt, Homo sapiens
  misc_RNA (1)...(19): siRNA sense strand
gcaaagagccagccaaugu

SEQ ID NO: 1968395 - RNA, 19 nt, Homo sapiens
  misc_RNA (1)...(19): siRNA sense strand
ggacaucgucuucuccaaa

SEQ ID NO: 1968396 - RNA, 19 nt, Homo sapiens
  misc_RNA (1)...(19): siRNA sense strand
gggccaagcugugcaagga

SEQ ID NO: 1968397 - RNA, 19 nt, Homo sapiens
  misc_RNA (1)...(19): siRNA sense strand
acaaggagcgcuucgauga

SEQ ID NO: 1968398 - RNA, 19 nt, Homo sapiens
  misc_RNA (1)...(19): siRNA sense strand
gacaucgucuucuccaaag

SEQ ID NO: 1968399 - RNA, 19 nt, Homo sapiens
  misc_RNA (1)...(19): siRNA sense strand
gaagucugcucgggucauc

SEQ ID NO: 1968400 - RNA, 19 nt, Homo sapiens
  misc_RNA (1)...(19): siRNA sense strand
ugacggacaccagcagaua

SEQ ID NO: 1968401 - RNA, 19 nt, Homo sapiens
  misc_RNA (1)...(19): siRNA sense strand
caaagagccagccaaugug

SEQ ID NO: 1968402 - RNA, 19 nt, Homo sapiens
  misc_RNA (1)...(19): siRNA sense strand
aaggagcgcuucgaugaga

SEQ ID NO: 1968403 - RNA, 19 nt, Homo sapiens
  misc_RNA (1)...(19): siRNA sense strand
ccaaugugggcgucacuaa

SEQ ID NO: 1968404 - RNA, 19 nt, Homo sapiens
  misc_RNA (1)...(19): siRNA sense strand
caaugugggcgucacuaaa

SEQ ID NO: 1968405 - RNA, 19 nt, Homo sapiens
  misc_RNA (1)...(19): siRNA sense strand
cugcucgggucaucaacua

SEQ ID NO: 1968406 - RNA, 19 nt, Homo sapiens
  misc_RNA (1)...(19): siRNA sense strand
cgugagcgccuacaagaau

SEQ ID NO: 1968407 - RNA, 19 nt, Homo sapiens
  misc_RNA (1)...(19): siRNA sense strand
gggcgucacuaaagcaaaa

SEQ ID NO: 1968408 - RNA, 19 nt, Homo sapiens
  misc_RNA (1)...(19): siRNA sense strand
ccacaaggagcgcuucgau

SEQ ID NO: 1968409 - RNA, 19 nt, Homo sapiens
  misc_RNA (1)...(19): siRNA sense strand
gugagcgccuacaagaaug

SEQ ID NO: 1968410 - RNA, 19 nt, Homo sapiens
  misc_RNA (1)...(19): siRNA sense strand
acuaugaggaguucaagaa

SEQ ID NO: 1968411 - RNA, 19 nt, Homo sapiens
  misc_RNA (1)...(19): siRNA sense strand
agagaugaauggcaagaac

SEQ ID NO: 1968412 - RNA, 19 nt, Homo sapiens
  misc_RNA (1)...(19): siRNA sense strand
gaaugcaggcaccuacgau

SEQ ID NO: 1968413 - RNA, 19 nt, Homo sapiens
  misc_RNA (1)...(19): siRNA sense strand
ggacauccuggacgacagu

SEQ ID NO: 1968414 - RNA, 19 nt, Homo sapiens
  misc_RNA (1)...(19): siRNA sense strand
gcucgggucaucaacuaug

SEQ ID NO: 1968415 - RNA, 19 nt, Homo sapiens
  misc_RNA (1)...(19): siRNA sense strand
caagagaugaauggcaaga

SEQ ID NO: 1968416 - RNA, 19 nt, Homo sapiens
  misc_RNA (1)...(19): siRNA sense strand
augccaaggugaagaagug

SEQ ID NO: 1968417 - RNA, 19 nt, Homo sapiens
  misc_RNA (1)...(19): siRNA sense strand
uacgugagcgccuacaaga

SEQ ID NO: 1968418 - RNA, 19 nt, Homo sapiens
  misc_RNA (1)...(19): siRNA sense strand
gauacacgggcucccacaa

SEQ ID NO: 1968419 - RNA, 19 nt, Homo sapiens
  misc_RNA (1)...(19): siRNA sense strand
gcaagaacugggccaagcu

SEQ ID NO: 1968420 - RNA, 19 nt, Homo sapiens
  misc_RNA (1)...(19): siRNA sense strand
ggccaaagauuaccgagua

SEQ ID NO: 1968421 - RNA, 19 nt, Homo sapiens
  misc_RNA (1)...(19): siRNA sense strand
ggaccaaguuucccaacau

SEQ ID NO: 1968422 - RNA, 19 nt, Homo sapiens
  misc_RNA (1)...(19): siRNA sense strand
gaccaaguuucccaacauu

SEQ ID NO: 1968423 - RNA, 19 nt, Homo sapiens
  misc_RNA (1)...(19): siRNA sense strand
gagggcaaguggaagaaga

SEQ ID NO: 1968424 - RNA, 19 nt, Homo sapiens
  misc_RNA (1)...(19): siRNA sense strand
caaagauuaccgaguauau

SEQ ID NO: 1968425 - RNA, 19 nt, Homo sapiens
  misc_RNA (1)...(19): siRNA sense strand
ggaggugccuaacgucaag

SEQ ID NO: 1968426 - RNA, 19 nt, Homo sapiens
  misc_RNA (1)...(19): siRNA sense strand
acaaccaccuccaacacua

SEQ ID NO: 1968427 - RNA, 19 nt, Homo sapiens
  misc_RNA (1)...(19): siRNA sense strand
ugaaggucguggagaugua

SEQ ID NO: 1968428 - RNA, 19 nt, Homo sapiens
  misc_RNA (1)...(19): siRNA sense strand
ggagacggcggaagcauuc

SEQ ID NO: 1968429 - RNA, 19 nt, Homo sapiens
  misc_RNA (1)...(19): siRNA sense strand
gcauagucgucaagaacug

SEQ ID NO: 1968430 - RNA, 19 nt, Homo sapiens
  misc_RNA (1)...(19): siRNA sense strand
gaugagggcaaguggaaga

SEQ ID NO: 1968431 - RNA, 19 nt, Homo sapiens
  misc_RNA (1)...(19): siRNA sense strand
ggacguguucgacauggaa

SEQ ID NO: 1968432 - RNA, 19 nt, Homo sapiens
  misc_RNA (1)...(19): siRNA sense strand
ccaaagauuaccgaguaua

SEQ ID NO: 1968433 - RNA, 19 nt, Homo sapiens
  misc_RNA (1)...(19): siRNA sense strand
acuaugacaugcugaagga

SEQ ID NO: 1968434 - RNA, 19 nt, Homo sapiens
  misc_RNA (1)...(19): siRNA sense strand
gccaaagauuaccgaguau

SEQ ID NO: 1968435 - RNA, 19 nt, Homo sapiens
  misc_RNA (1)...(19): siRNA sense strand
uucccaacauucccuauaa

SEQ ID NO: 1968436 - RNA, 19 nt, Homo sapiens
  misc_RNA (1)...(19): siRNA sense strand
gaagaacaaaugggagauc

SEQ ID NO: 1968437 - RNA, 19 nt, Homo sapiens
  misc_RNA (1)...(19): siRNA sense strand
ccagcauagucgucaagaa

SEQ ID NO: 1968438 - RNA, 19 nt, Homo sapiens
  misc_RNA (1)...(19): siRNA sense strand
gauaugcugccaccuccuu

SEQ ID NO: 1968439 - RNA, 19 nt, Homo sapiens
  misc_RNA (1)...(19): siRNA sense strand
gccaugggcauuucuguca

SEQ ID NO: 1968440 - RNA, 19 nt, Homo sapiens
  misc_RNA (1)...(19): siRNA sense strand
ggggauggcugaagaugga

SEQ ID NO: 1968441 - RNA, 19 nt, Homo sapiens
  misc_RNA (1)...(19): siRNA sense strand
caaccaccuccaacacuau

SEQ ID NO: 1968442 - RNA, 19 nt, Homo sapiens
  misc_RNA (1)...(19): siRNA sense strand
cgauggacguguucgacau

SEQ ID NO: 1968443 - RNA, 19 nt, Homo sapiens
  misc_RNA (1)...(19): siRNA sense strand
cagcauagucgucaagaac

SEQ ID NO: 1968444 - RNA, 19 nt, Homo sapiens
  misc_RNA (1)...(19): siRNA sense strand
ucaaccagggucugaguga

SEQ ID NO: 1968445 - RNA, 19 nt, Homo sapiens
  misc_RNA (1)...(19): siRNA sense strand
aaagauuaccgaguauaug

SEQ ID NO: 1968446 - RNA, 19 nt, Homo sapiens
  misc_RNA (1)...(19): siRNA sense strand
ccaaguuccugcggacgau

SEQ ID NO: 1968447 - RNA, 19 nt, Homo sapiens
  misc_RNA (1)...(19): siRNA sense strand
ccacuuguacagccuagga

SEQ ID NO: 1968448 - RNA, 19 nt, Homo sapiens
  misc_RNA (1)...(19): siRNA sense strand
ugccuaacgucaaggacuu

SEQ ID NO: 1968449 - RNA, 19 nt, Homo sapiens
  misc_RNA (1)...(19): siRNA sense strand
gauggacguguucgacaug

SEQ ID NO: 1968450 - RNA, 19 nt, Homo sapiens
  misc_RNA (1)...(19): siRNA sense strand
caacgccuucgaggucuuu

SEQ ID NO: 1968451 - RNA, 19 nt, Homo sapiens
  misc_RNA (1)...(19): siRNA sense strand
ggaagaacaaaugggagau

SEQ ID NO: 1968452 - RNA, 19 nt, Homo sapiens
  misc_RNA (1)...(19): siRNA sense strand
gacccuggacaaccacuug

SEQ ID NO: 1968453 - RNA, 19 nt, Homo sapiens
  misc_RNA (1)...(19): siRNA sense strand
ucgaugagggcaaguggaa

SEQ ID NO: 1968454 - RNA, 19 nt, Homo sapiens
  misc_RNA (1)...(19): siRNA sense strand
ggacgauggacguguucga

SEQ ID NO: 1968455 - RNA, 19 nt, Homo sapiens
  misc_RNA (1)...(19): siRNA sense strand
ggaagaagaggagcaugcu

SEQ ID NO: 1968456 - RNA, 19 nt, Homo sapiens
  misc_RNA (1)...(19): siRNA sense strand
gaguggacgggucauagug

SEQ ID NO: 1968457 - RNA, 19 nt, Homo sapiens
  misc_RNA (1)...(19): siRNA sense strand
gaauauaccucauccauug

SEQ ID NO: 1968458 - RNA, 19 nt, Homo sapiens
  misc_RNA (1)...(19): siRNA sense strand
gaacuaggagaaacauuua

SEQ ID NO: 1968459 - RNA, 19 nt, Homo sapiens
  misc_RNA (1)...(19): siRNA sense strand
gccaagaacuccaggauga

SEQ ID NO: 1968460 - RNA, 19 nt, Homo sapiens
  misc_RNA (1)...(19): siRNA sense strand
ccuagaagaugauauagaa

SEQ ID NO: 1968461 - RNA, 19 nt, Homo sapiens
  misc_RNA (1)...(19): siRNA sense strand
gcagagaauuugcuuaugg

SEQ ID NO: 1968462 - RNA, 19 nt, Homo sapiens
  misc_RNA (1)...(19): siRNA sense strand
gcgccacacuaaacuauaa

SEQ ID NO: 1968463 - RNA, 19 nt, Homo sapiens
  misc_RNA (1)...(19): siRNA sense strand
aggaaaugcuucugaacua

SEQ ID NO: 1968464 - RNA, 19 nt, Homo sapiens
  misc_RNA (1)...(19): siRNA sense strand
ggaaaugcuucugaacuag

SEQ ID NO: 1968465 - RNA, 19 nt, Homo sapiens
  misc_RNA (1)...(19): siRNA sense strand
ugaagucuauggcagagaa

SEQ ID NO: 1968466 - RNA, 19 nt, Homo sapiens
  misc_RNA (1)...(19): siRNA sense strand
gagcacggacuuccuagaa

SEQ ID NO: 1968467 - RNA, 19 nt, Homo sapiens
  misc_RNA (1)...(19): siRNA sense strand
ugaacuaggagaaacauuu

SEQ ID NO: 1968468 - RNA, 19 nt, Homo sapiens
  misc_RNA (1)...(19): siRNA sense strand
ucaaucgacuugccuacuu

SEQ ID NO: 1968469 - RNA, 19 nt, Homo sapiens
  misc_RNA (1)...(19): siRNA sense strand
caaaggcaaugcuuaucau

SEQ ID NO: 1968470 - RNA, 19 nt, Homo sapiens
  misc_RNA (1)...(19): siRNA sense strand
caacguguacgacauguau

SEQ ID NO: 1968471 - RNA, 19 nt, Homo sapiens
  misc_RNA (1)...(19): siRNA sense strand
cgaauauaccucauccauu

SEQ ID NO: 1968472 - RNA, 19 nt, Homo sapiens
  misc_RNA (1)...(19): siRNA sense strand
gaauacaaaggcaaugcuu

SEQ ID NO: 1968473 - RNA, 19 nt, Homo sapiens
  misc_RNA (1)...(19): siRNA sense strand
agaguugccucccgaagga

SEQ ID NO: 1968474 - RNA, 19 nt, Homo sapiens
  misc_RNA (1)...(19): siRNA sense strand
cuacuucagcuccuguaua

SEQ ID NO: 1968475 - RNA, 19 nt, Homo sapiens
  misc_RNA (1)...(19): siRNA sense strand
uagaagaacugggaaaaga

SEQ ID NO: 1968476 - RNA, 19 nt, Homo sapiens
  misc_RNA (1)...(19): siRNA sense strand
caaucgacuugccuacuuc

SEQ ID NO: 1968477 - RNA, 19 nt, Homo sapiens
  misc_RNA (1)...(19): siRNA sense strand
cagagaauuugcuuauggu

SEQ ID NO: 1968478 - RNA, 19 nt, Homo sapiens
  misc_RNA (1)...(19): siRNA sense strand
gcccugcagucuaguguca

SEQ ID NO: 1968479 - RNA, 19 nt, Homo sapiens
  misc_RNA (1)...(19): siRNA sense strand
cgacauguauuggaugaac

SEQ ID NO: 1968480 - RNA, 19 nt, Homo sapiens
  misc_RNA (1)...(19): siRNA sense strand
auacaaaggcaaugcuuau

SEQ ID NO: 1968481 - RNA, 19 nt, Homo sapiens
  misc_RNA (1)...(19): siRNA sense strand
acaaaggcaaugcuuauca

SEQ ID NO: 1968482 - RNA, 19 nt, Homo sapiens
  misc_RNA (1)...(19): siRNA sense strand
aauacaaaggcaaugcuua

SEQ ID NO: 1968483 - RNA, 19 nt, Homo sapiens
  misc_RNA (1)...(19): siRNA sense strand
uaguggugcucaacgugua

SEQ ID NO: 1968484 - RNA, 19 nt, Homo sapiens
  misc_RNA (1)...(19): siRNA sense strand
uacgacauguauuggauga

SEQ ID NO: 1968485 - RNA, 19 nt, Homo sapiens
  misc_RNA (1)...(19): siRNA sense strand
cagcuccuguauacccuuu

SEQ ID NO: 1968486 - RNA, 19 nt, Homo sapiens
  misc_RNA (1)...(19): siRNA sense strand
uggcagagaauuugcuuau

SEQ ID NO: 1968487 - RNA, 19 nt, Homo sapiens
  misc_RNA (1)...(19): siRNA sense strand
cccaggaaaugcuucugaa

SEQ ID NO: 1968488 - RNA, 19 nt, Homo sapiens
  misc_RNA (1)...(19): siRNA sense strand
ggcagagaauuugcuuaug

SEQ ID NO: 1968489 - RNA, 19 nt, Homo sapiens
  misc_RNA (1)...(19): siRNA sense strand
gcucaacguguacgacaug

SEQ ID NO: 1968490 - RNA, 19 nt, Homo sapiens
  misc_RNA (1)...(19): siRNA sense strand
uacuucagcuccuguauac

SEQ ID NO: 1968491 - RNA, 19 nt, Homo sapiens
  misc_RNA (1)...(19): siRNA sense strand
aaaugcuucugaacuagga

SEQ ID NO: 1968492 - RNA, 19 nt, Homo sapiens
  misc_RNA (1)...(19): siRNA sense strand
gagauuccucgcuggauca

SEQ ID NO: 1968493 - RNA, 19 nt, Homo sapiens
  misc_RNA (1)...(19): siRNA sense strand
agagauucuuugugggaaa

SEQ ID NO: 1968494 - RNA, 19 nt, Homo sapiens
  misc_RNA (1)...(19): siRNA sense strand
uguacgacauguauuggau

SEQ ID NO: 1968495 - RNA, 19 nt, Homo sapiens
  misc_RNA (1)...(19): siRNA sense strand
gaagaacugggaaaagaau

SEQ ID NO: 1968496 - RNA, 19 nt, Homo sapiens
  misc_RNA (1)...(19): siRNA sense strand
ccaagaacuccaggaugaa

SEQ ID NO: 1968497 - RNA, 19 nt, Homo sapiens
  misc_RNA (1)...(19): siRNA sense strand
ccccuuuucuggaauauuu

SEQ ID NO: 1968498 - RNA, 19 nt, Homo sapiens
  misc_RNA (1)...(19): siRNA sense strand
ggagcacggacuuccuaga

SEQ ID NO: 1968499 - RNA, 19 nt, Homo sapiens
  misc_RNA (1)...(19): siRNA sense strand
caggaaaugcuucugaacu

SEQ ID NO: 1968500 - RNA, 19 nt, Homo sapiens
  misc_RNA (1)...(19): siRNA sense strand
gcuccuguauacccuuucu

SEQ ID NO: 1968501 - RNA, 19 nt, Homo sapiens
  misc_RNA (1)...(19): siRNA sense strand
ggagcugguuguacaguuu

SEQ ID NO: 1968502 - RNA, 19 nt, Homo sapiens
  misc_RNA (1)...(19): siRNA sense strand
uaccaaagcucucaaugga

SEQ ID NO: 1968503 - RNA, 19 nt, Homo sapiens
  misc_RNA (1)...(19): siRNA sense strand
gcagcagccugacccauug

SEQ ID NO: 1968504 - RNA, 19 nt, Homo sapiens
  misc_RNA (1)...(19): siRNA sense strand
cagcaggucuccaggauag

SEQ ID NO: 1968505 - RNA, 19 nt, Homo sapiens
  misc_RNA (1)...(19): siRNA sense strand
aagaggagcugguuguaca

SEQ ID NO: 1968506 - RNA, 19 nt, Homo sapiens
  misc_RNA (1)...(19): siRNA sense strand
caagacagccagcaacauc

SEQ ID NO: 1968507 - RNA, 19 nt, Homo sapiens
  misc_RNA (1)...(19): siRNA sense strand
ccaccgcugccgucucuua

SEQ ID NO: 1968508 - RNA, 19 nt, Homo sapiens
  misc_RNA (1)...(19): siRNA sense strand
gcagcaggucuccaggaua

SEQ ID NO: 1968509 - RNA, 19 nt, Homo sapiens
  misc_RNA (1)...(19): siRNA sense strand
acagugcacuuucucagau

SEQ ID NO: 1968510 - RNA, 19 nt, Homo sapiens
  misc_RNA (1)...(19): siRNA sense strand
gagccgagcccaacuacca

SEQ ID NO: 1968511 - RNA, 19 nt, Homo sapiens
  misc_RNA (1)...(19): siRNA sense strand
ucuccaggauagcugcuua

SEQ ID NO: 1968512 - RNA, 19 nt, Homo sapiens
  misc_RNA (1)...(19): siRNA sense strand
accaagugcuggccaguga

SEQ ID NO: 1968513 - RNA, 19 nt, Homo sapiens
  misc_RNA (1)...(19): siRNA sense strand
ccaucccguucucugauuu

SEQ ID NO: 1968514 - RNA, 19 nt, Homo sapiens
  misc_RNA (1)...(19): siRNA sense strand
gagcugguuguacaguuug

SEQ ID NO: 1968515 - RNA, 19 nt, Homo sapiens
  misc_RNA (1)...(19): siRNA sense strand
cuaccaaagcucucaaugg

SEQ ID NO: 1968516 - RNA, 19 nt, Homo sapiens
  misc_RNA (1)...(19): siRNA sense strand
caaaagaggagcugguugu

SEQ ID NO: 1968517 - RNA, 19 nt, Homo sapiens
  misc_RNA (1)...(19): siRNA sense strand
ccugcucucuuccauccuu

SEQ ID NO: 1968518 - RNA, 19 nt, Homo sapiens
  misc_RNA (1)...(19): siRNA sense strand
cccaucccguucucugauu

SEQ ID NO: 1968519 - RNA, 19 nt, Homo sapiens
  misc_RNA (1)...(19): siRNA sense strand
gccaagacagccagcaaca

SEQ ID NO: 1968520 - RNA, 19 nt, Homo sapiens
  misc_RNA (1)...(19): siRNA sense strand
gaacaucgaugcacugagu

SEQ ID NO: 1968521 - RNA, 19 nt, Homo sapiens
  misc_RNA (1)...(19): siRNA sense strand
gaagagagauacgacauag

SEQ ID NO: 1968522 - RNA, 19 nt, Homo sapiens
  misc_RNA (1)...(19): siRNA sense strand
caagguggaugaagagaga

SEQ ID NO: 1968523 - RNA, 19 nt, Homo sapiens
  misc_RNA (1)...(19): siRNA sense strand
ucaagcaggugaagaagga

SEQ ID NO: 1968524 - RNA, 19 nt, Homo sapiens
  misc_RNA (1)...(19): siRNA sense strand
ccaagaacaucacggagau

SEQ ID NO: 1968525 - RNA, 19 nt, Homo sapiens
  misc_RNA (1)...(19): siRNA sense strand
gauacgacauagaggcaaa

SEQ ID NO: 1968526 - RNA, 19 nt, Homo sapiens
  misc_RNA (1)...(19): siRNA sense strand
gaccuucgaggcaaguuua

SEQ ID NO: 1968527 - RNA, 19 nt, Homo sapiens
  misc_RNA (1)...(19): siRNA sense strand
ucgcggagcugcaggacuu

SEQ ID NO: 1968528 - RNA, 19 nt, Homo sapiens
  misc_RNA (1)...(19): siRNA sense strand
ugaagagagauacgacaua

SEQ ID NO: 1968529 - RNA, 19 nt, Homo sapiens
  misc_RNA (1)...(19): siRNA sense strand
ugacucagaagaucuuuga

SEQ ID NO: 1968530 - RNA, 19 nt, Homo sapiens
  misc_RNA (1)...(19): siRNA sense strand
gaacaucacggagauugca

SEQ ID NO: 1968531 - RNA, 19 nt, Homo sapiens
  misc_RNA (1)...(19): siRNA sense strand
uggacaagguggaugaaga

SEQ ID NO: 1968532 - RNA, 19 nt, Homo sapiens
  misc_RNA (1)...(19): siRNA sense strand
ggacaagguggaugaagag

SEQ ID NO: 1968533 - RNA, 19 nt, Homo sapiens
  misc_RNA (1)...(19): siRNA sense strand
gugggagacuggcggaaga

SEQ ID NO: 1968534 - RNA, 19 nt, Homo sapiens
  misc_RNA (1)...(19): siRNA sense strand
ggaggacaccgagaaggaa

SEQ ID NO: 1968535 - RNA, 19 nt, Homo sapiens
  misc_RNA (1)...(19): siRNA sense strand
gaaggaggacaccgagaag

SEQ ID NO: 1968536 - RNA, 19 nt, Homo sapiens
  misc_RNA (1)...(19): siRNA sense strand
gaggacaccgagaaggaaa

SEQ ID NO: 1968537 - RNA, 19 nt, Homo sapiens
  misc_RNA (1)...(19): siRNA sense strand
agaaggaggacaccgagaa

SEQ ID NO: 1968538 - RNA, 19 nt, Homo sapiens
  misc_RNA (1)...(19): siRNA sense strand
gagacuggcggaagaacau

SEQ ID NO: 1968539 - RNA, 19 nt, Homo sapiens
  misc_RNA (1)...(19): siRNA sense strand
agagagauacgacauagag

SEQ ID NO: 1968540 - RNA, 19 nt, Homo sapiens
  misc_RNA (1)...(19): siRNA sense strand
gcaaaagucaccaagaaca

SEQ ID NO: 1968541 - RNA, 19 nt, Homo sapiens
  misc_RNA (1)...(19): siRNA sense strand
aauugcagcugaagacucu

SEQ ID NO: 1968542 - RNA, 19 nt, Homo sapiens
  misc_RNA (1)...(19): siRNA sense strand
agacgccgcuccuccaacu

SEQ ID NO: 1968543 - RNA, 19 nt, Homo sapiens
  misc_RNA (1)...(19): siRNA sense strand
ggagacuggcggaagaaca

SEQ ID NO: 1968544 - RNA, 19 nt, Homo sapiens
  misc_RNA (1)...(19): siRNA sense strand
ccaacuaccgcgcuuaugc

SEQ ID NO: 1968545 - RNA, 19 nt, Homo sapiens
  misc_RNA (1)...(19): siRNA sense strand
cgagaaaauugcagcugaa

SEQ ID NO: 1968546 - RNA, 19 nt, Homo sapiens
  misc_RNA (1)...(19): siRNA sense strand
gaaaauugcagcugaagac

SEQ ID NO: 1968547 - RNA, 19 nt, Homo sapiens
  misc_RNA (1)...(19): siRNA sense strand
aggcaaaagucaccaagaa

SEQ ID NO: 1968548 - RNA, 19 nt, Homo sapiens
  misc_RNA (1)...(19): siRNA sense strand
ggagccgcacgccaagaaa

SEQ ID NO: 1968549 - RNA, 19 nt, Homo sapiens
  misc_RNA (1)...(19): siRNA sense strand
aaagucaccaagaacauca

SEQ ID NO: 1968550 - RNA, 19 nt, Homo sapiens
  misc_RNA (1)...(19): siRNA sense strand
caagaacaucacggagauu

SEQ ID NO: 1968551 - RNA, 19 nt, Homo sapiens
  misc_RNA (1)...(19): siRNA sense strand
aagaacaucacggagauug

SEQ ID NO: 1968552 - RNA, 19 nt, Homo sapiens
  misc_RNA (1)...(19): siRNA sense strand
ucagaagaucuuugaccuu

SEQ ID NO: 1968553 - RNA, 19 nt, Homo sapiens
  misc_RNA (1)...(19): siRNA sense strand
ggaagaagaugaugaaaua

SEQ ID NO: 1968554 - RNA, 19 nt, Homo sapiens
  misc_RNA (1)...(19): siRNA sense strand
gaccagagguuaauuuauu

SEQ ID NO: 1968555 - RNA, 19 nt, Homo sapiens
  misc_RNA (1)...(19): siRNA sense strand
gcacugauccugaaacuga

SEQ ID NO: 1968556 - RNA, 19 nt, Homo sapiens
  misc_RNA (1)...(19): siRNA sense strand
ggaaggcacugauccugaa

SEQ ID NO: 1968557 - RNA, 19 nt, Homo sapiens
  misc_RNA (1)...(19): siRNA sense strand
cagcauggcuugucuucaa

SEQ ID NO: 1968558 - RNA, 19 nt, Homo sapiens
  misc_RNA (1)...(19): siRNA sense strand
gcacaagguggcccuauug

SEQ ID NO: 1968559 - RNA, 19 nt, Homo sapiens
  misc_RNA (1)...(19): siRNA sense strand
agacagggauguacuagau

SEQ ID NO: 1968560 - RNA, 19 nt, Homo sapiens
  misc_RNA (1)...(19): siRNA sense strand
guugggugguuuccauuua

SEQ ID NO: 1968561 - RNA, 19 nt, Homo sapiens
  misc_RNA (1)...(19): siRNA sense strand
gaaugcugcuccucaagug

SEQ ID NO: 1968562 - RNA, 19 nt, Homo sapiens
  misc_RNA (1)...(19): siRNA sense strand
caucuggugugcaauguga

SEQ ID NO: 1968563 - RNA, 19 nt, Homo sapiens
  misc_RNA (1)...(19): siRNA sense strand
gcagcuacauuuucuguuu

SEQ ID NO: 1968564 - RNA, 19 nt, Homo sapiens
  misc_RNA (1)...(19): siRNA sense strand
caacaauaacuuacaggaa

SEQ ID NO: 1968565 - RNA, 19 nt, Homo sapiens
  misc_RNA (1)...(19): siRNA sense strand
gggccaccguuguuaugua

SEQ ID NO: 1968566 - RNA, 19 nt, Homo sapiens
  misc_RNA (1)...(19): siRNA sense strand
ggaagcuguuguuggauca

SEQ ID NO: 1968567 - RNA, 19 nt, Homo sapiens
  misc_RNA (1)...(19): siRNA sense strand
gacaguacuacaugcaaua

SEQ ID NO: 1968568 - RNA, 19 nt, Homo sapiens
  misc_RNA (1)...(19): siRNA sense strand
cgacaguacuacaugcaau

SEQ ID NO: 1968569 - RNA, 19 nt, Homo sapiens
  misc_RNA (1)...(19): siRNA sense strand
gcagauuccucauggucau

SEQ ID NO: 1968570 - RNA, 19 nt, Homo sapiens
  misc_RNA (1)...(19): siRNA sense strand
gaggaccagagguuaauuu

SEQ ID NO: 1968571 - RNA, 19 nt, Homo sapiens
  misc_RNA (1)...(19): siRNA sense strand
ucagaaugcugcuccucaa

SEQ ID NO: 1968572 - RNA, 19 nt, Homo sapiens
  misc_RNA (1)...(19): siRNA sense strand
ucagggacuugcuuccaaa

SEQ ID NO: 1968573 - RNA, 19 nt, Homo sapiens
  misc_RNA (1)...(19): siRNA sense strand
ggcuucagcuuuccugguu

SEQ ID NO: 1968574 - RNA, 19 nt, Homo sapiens
  misc_RNA (1)...(19): siRNA sense strand
ccagaggaccagagguuaa

SEQ ID NO: 1968575 - RNA, 19 nt, Homo sapiens
  misc_RNA (1)...(19): siRNA sense strand
ggaccagagguuaauuuau

SEQ ID NO: 1968576 - RNA, 19 nt, Homo sapiens
  misc_RNA (1)...(19): siRNA sense strand
gcggaugaaugcacaaggu

SEQ ID NO: 1968577 - RNA, 19 nt, Homo sapiens
  misc_RNA (1)...(19): siRNA sense strand
cugggaagcuguuguugga

SEQ ID NO: 1968578 - RNA, 19 nt, Homo sapiens
  misc_RNA (1)...(19): siRNA sense strand
caaccaguuuccagcugaa

SEQ ID NO: 1968579 - RNA, 19 nt, Homo sapiens
  misc_RNA (1)...(19): siRNA sense strand
guccugguuucuccgguua

SEQ ID NO: 1968580 - RNA, 19 nt, Homo sapiens
  misc_RNA (1)...(19): siRNA sense strand
gaacuucccaaaugauggu

SEQ ID NO: 1968581 - RNA, 19 nt, Homo sapiens
  misc_RNA (1)...(19): siRNA sense strand
cuauucagcagcuacauuu

SEQ ID NO: 1968582 - RNA, 19 nt, Homo sapiens
  misc_RNA (1)...(19): siRNA sense strand
ggagccugcugguucuaau

SEQ ID NO: 1968583 - RNA, 19 nt, Homo sapiens
  misc_RNA (1)...(19): siRNA sense strand
cuccugacguuguaaauca

SEQ ID NO: 1968584 - RNA, 19 nt, Homo sapiens
  misc_RNA (1)...(19): siRNA sense strand
gauauaugcacgacaguac

SEQ ID NO: 1968585 - RNA, 19 nt, Homo sapiens
  misc_RNA (1)...(19): siRNA sense strand
uuccucaagugaugguuua

SEQ ID NO: 1968586 - RNA, 19 nt, Homo sapiens
  misc_RNA (1)...(19): siRNA sense strand
gcaucacguugggugguuu

SEQ ID NO: 1968587 - RNA, 19 nt, Homo sapiens
  misc_RNA (1)...(19): siRNA sense strand
cgagauugguuggauugga

SEQ ID NO: 1968588 - RNA, 19 nt, Homo sapiens
  misc_RNA (1)...(19): siRNA sense strand
agugaugguuuaaggcaaa

SEQ ID NO: 1968589 - RNA, 19 nt, Homo sapiens
  misc_RNA (1)...(19): siRNA sense strand
gaaggcacugauccugaaa

SEQ ID NO: 1968590 - RNA, 19 nt, Homo sapiens
  misc_RNA (1)...(19): siRNA sense strand
gcccuauuguggaagaaga

SEQ ID NO: 1968591 - RNA, 19 nt, Homo sapiens
  misc_RNA (1)...(19): siRNA sense strand
uucagaacuucccaaauga

SEQ ID NO: 1968592 - RNA, 19 nt, Homo sapiens
  misc_RNA (1)...(19): siRNA sense strand
uauaugcacgacaguacua

SEQ ID NO: 1968593 - RNA, 19 nt, Homo sapiens
  misc_RNA (1)...(19): siRNA sense strand
ggccaccguuguuauguac

SEQ ID NO: 1968594 - RNA, 19 nt, Homo sapiens
  misc_RNA (1)...(19): siRNA sense strand
ccaccaagugcacaagaga

SEQ ID NO: 1968595 - RNA, 19 nt, Homo sapiens
  misc_RNA (1)...(19): siRNA sense strand
gagcacagcauggcuuguc

SEQ ID NO: 1968596 - RNA, 19 nt, Homo sapiens
  misc_RNA (1)...(19): siRNA sense strand
cagaacuucccaaaugaug

SEQ ID NO: 1968597 - RNA, 19 nt, Homo sapiens
  misc_RNA (1)...(19): siRNA sense strand
cuccucaagugguuguuaa

SEQ ID NO: 1968598 - RNA, 19 nt, Homo sapiens
  misc_RNA (1)...(19): siRNA sense strand
cuacaugcaauauuuagca

SEQ ID NO: 1968599 - RNA, 19 nt, Homo sapiens
  misc_RNA (1)...(19): siRNA sense strand
gcacagcauggcuugucuu

SEQ ID NO: 1968600 - RNA, 19 nt, Homo sapiens
  misc_RNA (1)...(19): siRNA sense strand
uggaagaagaugaugaaau

SEQ ID NO: 1968601 - RNA, 19 nt, Homo sapiens
  misc_RNA (1)...(19): siRNA sense strand
aggaccagagguuaauuua

SEQ ID NO: 1968602 - RNA, 19 nt, Homo sapiens
  misc_RNA (1)...(19): siRNA sense strand
ugcacaagguggcccuauu

SEQ ID NO: 1968603 - RNA, 19 nt, Homo sapiens
  misc_RNA (1)...(19): siRNA sense strand
gcuccucaagugguuguua

SEQ ID NO: 1968604 - RNA, 19 nt, Homo sapiens
  misc_RNA (1)...(19): siRNA sense strand
aaaccagccugccaaucag

SEQ ID NO: 1968605 - RNA, 19 nt, Homo sapiens
  misc_RNA (1)...(19): siRNA sense strand
accaagugcacaagagaua

SEQ ID NO: 1968606 - RNA, 19 nt, Homo sapiens
  misc_RNA (1)...(19): siRNA sense strand
aaucaggaccccaacaaua

SEQ ID NO: 1968607 - RNA, 19 nt, Homo sapiens
  misc_RNA (1)...(19): siRNA sense strand
ucaagugguuguuaauccu

SEQ ID NO: 1968608 - RNA, 19 nt, Homo sapiens
  misc_RNA (1)...(19): siRNA sense strand
cagcuacauuuucuguuuu

SEQ ID NO: 1968609 - RNA, 19 nt, Homo sapiens
  misc_RNA (1)...(19): siRNA sense strand
ggugugcaaugugaagagu

SEQ ID NO: 1968610 - RNA, 19 nt, Homo sapiens
  misc_RNA (1)...(19): siRNA sense strand
agaggagccugcugguucu

SEQ ID NO: 1968611 - RNA, 19 nt, Homo sapiens
  misc_RNA (1)...(19): siRNA sense strand
uguggaagaagaugaugaa

SEQ ID NO: 1968612 - RNA, 19 nt, Homo sapiens
  misc_RNA (1)...(19): siRNA sense strand
cagaggaccagagguuaau

SEQ ID NO: 1968613 - RNA, 19 nt, Homo sapiens
  misc_RNA (1)...(19): siRNA sense strand
accagagguuaauuuauuc

SEQ ID NO: 1968614 - RNA, 19 nt, Homo sapiens
  misc_RNA (1)...(19): siRNA sense strand
gaagcaacauuccaauaaa

SEQ ID NO: 1968615 - RNA, 19 nt, Homo sapiens
  misc_RNA (1)...(19): siRNA sense strand
caaagaagauggaagacaa

SEQ ID NO: 1968616 - RNA, 19 nt, Homo sapiens
  misc_RNA (1)...(19): siRNA sense strand
gaagagguauccacaagug

SEQ ID NO: 1968617 - RNA, 19 nt, Homo sapiens
  misc_RNA (1)...(19): siRNA sense strand
aaccaaagaugaacgauuu

SEQ ID NO: 1968618 - RNA, 19 nt, Homo sapiens
  misc_RNA (1)...(19): siRNA sense strand
ggaaacucguggacuauga

SEQ ID NO: 1968619 - RNA, 19 nt, Homo sapiens
  misc_RNA (1)...(19): siRNA sense strand
ccaagcaggugcagaagaa

SEQ ID NO: 1968620 - RNA, 19 nt, Homo sapiens
  misc_RNA (1)...(19): siRNA sense strand
ccucuuaccucaccuacua

SEQ ID NO: 1968621 - RNA, 19 nt, Homo sapiens
  misc_RNA (1)...(19): siRNA sense strand
ggaagacaauucugagauc

SEQ ID NO: 1968622 - RNA, 19 nt, Homo sapiens
  misc_RNA (1)...(19): siRNA sense strand
agaaggugcugcagaaauu

SEQ ID NO: 1968623 - RNA, 19 nt, Homo sapiens
  misc_RNA (1)...(19): siRNA sense strand
cguauuggcugcuauguga

SEQ ID NO: 1968624 - RNA, 19 nt, Homo sapiens
  misc_RNA (1)...(19): siRNA sense strand
acaaggaccugaagaacuu

SEQ ID NO: 1968625 - RNA, 19 nt, Homo sapiens
  misc_RNA (1)...(19): siRNA sense strand
ggaaagcuguagaaaccaa

SEQ ID NO: 1968626 - RNA, 19 nt, Homo sapiens
  misc_RNA (1)...(19): siRNA sense strand
gaagauggaagacaaggaa

SEQ ID NO: 1968627 - RNA, 19 nt, Homo sapiens
  misc_RNA (1)...(19): siRNA sense strand
gagaagcaacauuccaaua

SEQ ID NO: 1968628 - RNA, 19 nt, Homo sapiens
  misc_RNA (1)...(19): siRNA sense strand
gaauaaugaucuccuuugg

SEQ ID NO: 1968629 - RNA, 19 nt, Homo sapiens
  misc_RNA (1)...(19): siRNA sense strand
gccacaagcuguacaagga

SEQ ID NO: 1968630 - RNA, 19 nt, Homo sapiens
  misc_RNA (1)...(19): siRNA sense strand
gaucaaggagcucuuagaa

SEQ ID NO: 1968631 - RNA, 19 nt, Homo sapiens
  misc_RNA (1)...(19): siRNA sense strand
gaagacaauucugagauca

SEQ ID NO: 1968632 - RNA, 19 nt, Homo sapiens
  misc_RNA (1)...(19): siRNA sense strand
ggaauaaugaucuccuuug

SEQ ID NO: 1968633 - RNA, 19 nt, Homo sapiens
  misc_RNA (1)...(19): siRNA sense strand
ggagcugccuauucuuuau

SEQ ID NO: 1968634 - RNA, 19 nt, Homo sapiens
  misc_RNA (1)...(19): siRNA sense strand
uaaggaccauggaaaucua

SEQ ID NO: 1968635 - RNA, 19 nt, Homo sapiens
  misc_RNA (1)...(19): siRNA sense strand
ugaaggaucugaacaacca

SEQ ID NO: 1968636 - RNA, 19 nt, Homo sapiens
  misc_RNA (1)...(19): siRNA sense strand
gaucugaacaaccaaagaa

SEQ ID NO: 1968637 - RNA, 19 nt, Homo sapiens
  misc_RNA (1)...(19): siRNA sense strand
uugaagaucugaaccaaga

SEQ ID NO: 1968638 - RNA, 19 nt, Homo sapiens
  misc_RNA (1)...(19): siRNA sense strand
caucucagguugcuucaga

SEQ ID NO: 1968639 - RNA, 19 nt, Homo sapiens
  misc_RNA (1)...(19): siRNA sense strand
uagaggagcugccuauucu

SEQ ID NO: 1968640 - RNA, 19 nt, Homo sapiens
  misc_RNA (1)...(19): siRNA sense strand
gaggagcugccuauucuuu

SEQ ID NO: 1968641 - RNA, 19 nt, Homo sapiens
  misc_RNA (1)...(19): siRNA sense strand
agaagcaacauuccaauaa

SEQ ID NO: 1968642 - RNA, 19 nt, Homo sapiens
  misc_RNA (1)...(19): siRNA sense strand
ugagcaagcugaaccacaa

SEQ ID NO: 1968643 - RNA, 19 nt, Homo sapiens
  misc_RNA (1)...(19): siRNA sense strand
gaggaagaguucaacaaag

SEQ ID NO: 1968644 - RNA, 19 nt, Homo sapiens
  misc_RNA (1)...(19): siRNA sense strand
gaaggaaggaucugaagca

SEQ ID NO: 1968645 - RNA, 19 nt, Homo sapiens
  misc_RNA (1)...(19): siRNA sense strand
gaaccaagaacuacuagag

SEQ ID NO: 1968646 - RNA, 19 nt, Homo sapiens
  misc_RNA (1)...(19): siRNA sense strand
cagaaacccugcaggagau

SEQ ID NO: 1968647 - RNA, 19 nt, Homo sapiens
  misc_RNA (1)...(19): siRNA sense strand
ccucuacacuuuccuugaa

SEQ ID NO: 1968648 - RNA, 19 nt, Homo sapiens
  misc_RNA (1)...(19): siRNA sense strand
acuagucccucuacacuuu

SEQ ID NO: 1968649 - RNA, 19 nt, Homo sapiens
  misc_RNA (1)...(19): siRNA sense strand
ggaaauagagaaggaagga

SEQ ID NO: 1968650 - RNA, 19 nt, Homo sapiens
  misc_RNA (1)...(19): siRNA sense strand
ucaaagugaugcaugaaag

SEQ ID NO: 1968651 - RNA, 19 nt, Homo sapiens
  misc_RNA (1)...(19): siRNA sense strand
ggaaaaggauaauaagcuu

SEQ ID NO: 1968652 - RNA, 19 nt, Homo sapiens
  misc_RNA (1)...(19): siRNA sense strand
gaagaucuggcaccugaug

SEQ ID NO: 1968653 - RNA, 19 nt, Homo sapiens
  misc_RNA (1)...(19): siRNA sense strand
gucggaaacucguggacua

SEQ ID NO: 1968654 - RNA, 19 nt, Homo sapiens
  misc_RNA (1)...(19): siRNA sense strand
gaaaacauccacaaucaga

SEQ ID NO: 1968655 - RNA, 19 nt, Homo sapiens
  misc_RNA (1)...(19): siRNA sense strand
gaagaggaggaaauagaga

SEQ ID NO: 1968656 - RNA, 19 nt, Homo sapiens
  misc_RNA (1)...(19): siRNA sense strand
gagaaggugcugcagaaau

SEQ ID NO: 1968657 - RNA, 19 nt, Homo sapiens
  misc_RNA (1)...(19): siRNA sense strand
gagcugccuauucuuuaua

SEQ ID NO: 1968658 - RNA, 19 nt, Homo sapiens
  misc_RNA (1)...(19): siRNA sense strand
ggaagacuacgaggagaaa

SEQ ID NO: 1968659 - RNA, 19 nt, Homo sapiens
  misc_RNA (1)...(19): siRNA sense strand
caggcgcucuuuagucauu

SEQ ID NO: 1968660 - RNA, 19 nt, Homo sapiens
  misc_RNA (1)...(19): siRNA sense strand
ugagcaaacuggagaagca

SEQ ID NO: 1968661 - RNA, 19 nt, Homo sapiens
  misc_RNA (1)...(19): siRNA sense strand
uagaagaggaggaaauaga

SEQ ID NO: 1968662 - RNA, 19 nt, Homo sapiens
  misc_RNA (1)...(19): siRNA sense strand
caaaacauuuccaacuuga

SEQ ID NO: 1968663 - RNA, 19 nt, Homo sapiens
  misc_RNA (1)...(19): siRNA sense strand
aagaagagguauccacaag

SEQ ID NO: 1968664 - RNA, 19 nt, Homo sapiens
  misc_RNA (1)...(19): siRNA sense strand
aggagaaggugcugcagaa

SEQ ID NO: 1968665 - RNA, 19 nt, Homo sapiens
  misc_RNA (1)...(19): siRNA sense strand
gcaaagaagauggaagaca

SEQ ID NO: 1968666 - RNA, 19 nt, Homo sapiens
  misc_RNA (1)...(19): siRNA sense strand
gaaucugucucagcaacug

SEQ ID NO: 1968667 - RNA, 19 nt, Homo sapiens
  misc_RNA (1)...(19): siRNA sense strand
agaggaagaguucaacaaa

SEQ ID NO: 1968668 - RNA, 19 nt, Homo sapiens
  misc_RNA (1)...(19): siRNA sense strand
ccagagaagccaguaagaa

SEQ ID NO: 1968669 - RNA, 19 nt, Homo sapiens
  misc_RNA (1)...(19): siRNA sense strand
cagucaaagugaugcauga

SEQ ID NO: 1968670 - RNA, 19 nt, Homo sapiens
  misc_RNA (1)...(19): siRNA sense strand
caccugaaccucaagaaga

SEQ ID NO: 1968671 - RNA, 19 nt, Homo sapiens
  misc_RNA (1)...(19): siRNA sense strand
gaacccgcaccgcaaguga

SEQ ID NO: 1968672 - RNA, 19 nt, Homo sapiens
  misc_RNA (1)...(19): siRNA sense strand
aaaucuauguugcccaguu

SEQ ID NO: 1968673 - RNA, 19 nt, Homo sapiens
  misc_RNA (1)...(19): siRNA sense strand
gagcugaaggccaucguau

SEQ ID NO: 1968674 - RNA, 19 nt, Homo sapiens
  misc_RNA (1)...(19): siRNA sense strand
cagcagcaggcgcucuuua

SEQ ID NO: 1968675 - RNA, 19 nt, Homo sapiens
  misc_RNA (1)...(19): siRNA sense strand
ccaaaacauuuccaacuug

SEQ ID NO: 1968676 - RNA, 19 nt, Homo sapiens
  misc_RNA (1)...(19): siRNA sense strand
cagaaggccacaagcugua

SEQ ID NO: 1968677 - RNA, 19 nt, Homo sapiens
  misc_RNA (1)...(19): siRNA sense strand
gcuguaaggaccauggaaa

SEQ ID NO: 1968678 - RNA, 19 nt, Homo sapiens
  misc_RNA (1)...(19): siRNA sense strand
aagcaacauuccaauaaag

SEQ ID NO: 1968679 - RNA, 19 nt, Homo sapiens
  misc_RNA (1)...(19): siRNA sense strand
caacuugagggaugucuuc

SEQ ID NO: 1968680 - RNA, 19 nt, Homo sapiens
  misc_RNA (1)...(19): siRNA sense strand
gcugcuaugugaccaucuu

SEQ ID NO: 1968681 - RNA, 19 nt, Homo sapiens
  misc_RNA (1)...(19): siRNA sense strand
guaaggaccauggaaaucu

SEQ ID NO: 1968682 - RNA, 19 nt, Homo sapiens
  misc_RNA (1)...(19): siRNA sense strand
ccaccuuaaugacaucuca

SEQ ID NO: 1968683 - RNA, 19 nt, Homo sapiens
  misc_RNA (1)...(19): siRNA sense strand
gggaagacaauucugagau

SEQ ID NO: 1968684 - RNA, 19 nt, Homo sapiens
  misc_RNA (1)...(19): siRNA sense strand
gaagagugagagugaaucu

SEQ ID NO: 1968685 - RNA, 19 nt, Homo sapiens
  misc_RNA (1)...(19): siRNA sense strand
gaaagcuguagaaaccaaa

SEQ ID NO: 1968686 - RNA, 19 nt, Homo sapiens
  misc_RNA (1)...(19): siRNA sense strand
ggagaagcaacauuccaau

SEQ ID NO: 1968687 - RNA, 19 nt, Homo sapiens
  misc_RNA (1)...(19): siRNA sense strand
gaugucuucuacagggaaa

SEQ ID NO: 1968688 - RNA, 19 nt, Homo sapiens
  misc_RNA (1)...(19): siRNA sense strand
gaccauggaaaucuauguu

SEQ ID NO: 1968689 - RNA, 19 nt, Homo sapiens
  misc_RNA (1)...(19): siRNA sense strand
ugagaucaaggagcucuua

SEQ ID NO: 1968690 - RNA, 19 nt, Homo sapiens
  misc_RNA (1)...(19): siRNA sense strand
caaggcagaggaagaguuc

SEQ ID NO: 1968691 - RNA, 19 nt, Homo sapiens
  misc_RNA (1)...(19): siRNA sense strand
gaaggugcugcagaaauug

SEQ ID NO: 1968692 - RNA, 19 nt, Homo sapiens
  misc_RNA (1)...(19): siRNA sense strand
gagguauccacaagugaaa

SEQ ID NO: 1968693 - RNA, 19 nt, Homo sapiens
  misc_RNA (1)...(19): siRNA sense strand
caagaagagguauccacaa

SEQ ID NO: 1968694 - RNA, 19 nt, Homo sapiens
  misc_RNA (1)...(19): siRNA sense strand
cuuagaagaggaggaaaua

SEQ ID NO: 1968695 - RNA, 19 nt, Homo sapiens
  misc_RNA (1)...(19): siRNA sense strand
ggagaaggugcugcagaaa

SEQ ID NO: 1968696 - RNA, 19 nt, Homo sapiens
  misc_RNA (1)...(19): siRNA sense strand
ucuacgaggugaugagcaa

SEQ ID NO: 1968697 - RNA, 19 nt, Homo sapiens
  misc_RNA (1)...(19): siRNA sense strand
ugagggaugucuucuacag

SEQ ID NO: 1968698 - RNA, 19 nt, Homo sapiens
  misc_RNA (1)...(19): siRNA sense strand
ggucucuccuaauccagaa

SEQ ID NO: 1968699 - RNA, 19 nt, Homo sapiens
  misc_RNA (1)...(19): siRNA sense strand
gggaagacuacgaggagaa

SEQ ID NO: 1968700 - RNA, 19 nt, Homo sapiens
  misc_RNA (1)...(19): siRNA sense strand
uguagaaaccaaagaugaa

SEQ ID NO: 1968701 - RNA, 19 nt, Homo sapiens
  misc_RNA (1)...(19): siRNA sense strand
gggcagccuucaucaucug

SEQ ID NO: 1968702 - RNA, 19 nt, Homo sapiens
  misc_RNA (1)...(19): siRNA sense strand
gagaaggaaggaucugaag

SEQ ID NO: 1968703 - RNA, 19 nt, Homo sapiens
  misc_RNA (1)...(19): siRNA sense strand
agacaauucugagaucaag

SEQ ID NO: 1968704 - RNA, 19 nt, Homo sapiens
  misc_RNA (1)...(19): siRNA sense strand
gaucugaaccaagaacuac

SEQ ID NO: 1968705 - RNA, 19 nt, Homo sapiens
  misc_RNA (1)...(19): siRNA sense strand
aaaccaaagaugaacgauu

SEQ ID NO: 1968706 - RNA, 19 nt, Homo sapiens
  misc_RNA (1)...(19): siRNA sense strand
ggagcugaaggccaucgua

SEQ ID NO: 1968707 - RNA, 19 nt, Homo sapiens
  misc_RNA (1)...(19): siRNA sense strand
caacuucuaccaacaacag

SEQ ID NO: 1968708 - RNA, 19 nt, Homo sapiens
  misc_RNA (1)...(19): siRNA sense strand
cacagcaccugaaccucaa

SEQ ID NO: 1968709 - RNA, 19 nt, Homo sapiens
  misc_RNA (1)...(19): siRNA sense strand
gccaagaccagcuucaagu

SEQ ID NO: 1968710 - RNA, 19 nt, Homo sapiens
  misc_RNA (1)...(19): siRNA sense strand
agcaggcgcucuuuaguca

SEQ ID NO: 1968711 - RNA, 19 nt, Homo sapiens
  misc_RNA (1)...(19): siRNA sense strand
uaugugaccaucuuccaaa

SEQ ID NO: 1968712 - RNA, 19 nt, Homo sapiens
  misc_RNA (1)...(19): siRNA sense strand
cagaggaagaguucaacaa

SEQ ID NO: 1968713 - RNA, 19 nt, Homo sapiens
  misc_RNA (1)...(19): siRNA sense strand
cagagaagccaguaagaac

SEQ ID NO: 1968714 - RNA, 19 nt, Homo sapiens
  misc_RNA (1)...(19): siRNA sense strand
gaagcaacauuccaauaaa

SEQ ID NO: 1968715 - RNA, 19 nt, Homo sapiens
  misc_RNA (1)...(19): siRNA sense strand
caaagaagauggaagacaa

SEQ ID NO: 1968716 - RNA, 19 nt, Homo sapiens
  misc_RNA (1)...(19): siRNA sense strand
gaagagguauccacaagug

SEQ ID NO: 1968717 - RNA, 19 nt, Homo sapiens
  misc_RNA (1)...(19): siRNA sense strand
aaccaaagaugaacgauuu

SEQ ID NO: 1968718 - RNA, 19 nt, Homo sapiens
  misc_RNA (1)...(19): siRNA sense strand
ggaaacucguggacuauga

SEQ ID NO: 1968719 - RNA, 19 nt, Homo sapiens
  misc_RNA (1)...(19): siRNA sense strand
ccaagcaggugcagaagaa

SEQ ID NO: 1968720 - RNA, 19 nt, Homo sapiens
  misc_RNA (1)...(19): siRNA sense strand
ccucuuaccucaccuacua

SEQ ID NO: 1968721 - RNA, 19 nt, Homo sapiens
  misc_RNA (1)...(19): siRNA sense strand
ggaagacaauucugagauc

SEQ ID NO: 1968722 - RNA, 19 nt, Homo sapiens
  misc_RNA (1)...(19): siRNA sense strand
agaaggugcugcagaaauu

SEQ ID NO: 1968723 - RNA, 19 nt, Homo sapiens
  misc_RNA (1)...(19): siRNA sense strand
cguauuggcugcuauguga

SEQ ID NO: 1968724 - RNA, 19 nt, Homo sapiens
  misc_RNA (1)...(19): siRNA sense strand
acaaggaccugaagaacuu

SEQ ID NO: 1968725 - RNA, 19 nt, Homo sapiens
  misc_RNA (1)...(19): siRNA sense strand
ggaaagcuguagaaaccaa

SEQ ID NO: 1968726 - RNA, 19 nt, Homo sapiens
  misc_RNA (1)...(19): siRNA sense strand
gaagauggaagacaaggaa

SEQ ID NO: 1968727 - RNA, 19 nt, Homo sapiens
  misc_RNA (1)...(19): siRNA sense strand
gagaagcaacauuccaaua

SEQ ID NO: 1968728 - RNA, 19 nt, Homo sapiens
  misc_RNA (1)...(19): siRNA sense strand
gaauaaugaucuccuuugg

SEQ ID NO: 1968729 - RNA, 19 nt, Homo sapiens
  misc_RNA (1)...(19): siRNA sense strand
gccacaagcuguacaagga

SEQ ID NO: 1968730 - RNA, 19 nt, Homo sapiens
  misc_RNA (1)...(19): siRNA sense strand
gaucaaggagcucuuagaa

SEQ ID NO: 1968731 - RNA, 19 nt, Homo sapiens
  misc_RNA (1)...(19): siRNA sense strand
gaagacaauucugagauca

SEQ ID NO: 1968732 - RNA, 19 nt, Homo sapiens
  misc_RNA (1)...(19): siRNA sense strand
ggaauaaugaucuccuuug

SEQ ID NO: 1968733 - RNA, 19 nt, Homo sapiens
  misc_RNA (1)...(19): siRNA sense strand
ggagcugccuauucuuuau

SEQ ID NO: 1968734 - RNA, 19 nt, Homo sapiens
  misc_RNA (1)...(19): siRNA sense strand
uaaggaccauggaaaucua

SEQ ID NO: 1968735 - RNA, 19 nt, Homo sapiens
  misc_RNA (1)...(19): siRNA sense strand
ugaaggaucugaacaacca

SEQ ID NO: 1968736 - RNA, 19 nt, Homo sapiens
  misc_RNA (1)...(19): siRNA sense strand
gaucugaacaaccaaagaa

SEQ ID NO: 1968737 - RNA, 19 nt, Homo sapiens
  misc_RNA (1)...(19): siRNA sense strand
uugaagaucugaaccaaga

SEQ ID NO: 1968738 - RNA, 19 nt, Homo sapiens
  misc_RNA (1)...(19): siRNA sense strand
caucucagguugcuucaga

SEQ ID NO: 1968739 - RNA, 19 nt, Homo sapiens
  misc_RNA (1)...(19): siRNA sense strand
uagaggagcugccuauucu

SEQ ID NO: 1968740 - RNA, 19 nt, Homo sapiens
  misc_RNA (1)...(19): siRNA sense strand
gaggagcugccuauucuuu

SEQ ID NO: 1968741 - RNA, 19 nt, Homo sapiens
  misc_RNA (1)...(19): siRNA sense strand
agaagcaacauuccaauaa

SEQ ID NO: 1968742 - RNA, 19 nt, Homo sapiens
  misc_RNA (1)...(19): siRNA sense strand
ugagcaagcugaaccacaa

SEQ ID NO: 1968743 - RNA, 19 nt, Homo sapiens
  misc_RNA (1)...(19): siRNA sense strand
gaggaagaguucaacaaag

SEQ ID NO: 1968744 - RNA, 19 nt, Homo sapiens
  misc_RNA (1)...(19): siRNA sense strand
gaaggaaggaucugaagca

SEQ ID NO: 1968745 - RNA, 19 nt, Homo sapiens
  misc_RNA (1)...(19): siRNA sense strand
gaaccaagaacuacuagag

SEQ ID NO: 1968746 - RNA, 19 nt, Homo sapiens
  misc_RNA (1)...(19): siRNA sense strand
cagaaacccugcaggagau

SEQ ID NO: 1968747 - RNA, 19 nt, Homo sapiens
  misc_RNA (1)...(19): siRNA sense strand
ccucuacacuuuccuugaa

SEQ ID NO: 1968748 - RNA, 19 nt, Homo sapiens
  misc_RNA (1)...(19): siRNA sense strand
acuagucccucuacacuuu

SEQ ID NO: 1968749 - RNA, 19 nt, Homo sapiens
  misc_RNA (1)...(19): siRNA sense strand
ggaaauagagaaggaagga

SEQ ID NO: 1968750 - RNA, 19 nt, Homo sapiens
  misc_RNA (1)...(19): siRNA sense strand
ucaaagugaugcaugaaag

SEQ ID NO: 1968751 - RNA, 19 nt, Homo sapiens
  misc_RNA (1)...(19): siRNA sense strand
ggaaaaggauaauaagcuu

SEQ ID NO: 1968752 - RNA, 19 nt, Homo sapiens
  misc_RNA (1)...(19): siRNA sense strand
gaagaucuggcaccugaug

SEQ ID NO: 1968753 - RNA, 19 nt, Homo sapiens
  misc_RNA (1)...(19): siRNA sense strand
gucggaaacucguggacua

SEQ ID NO: 1968754 - RNA, 19 nt, Homo sapiens
  misc_RNA (1)...(19): siRNA sense strand
gaaaacauccacaaucaga

SEQ ID NO: 1968755 - RNA, 19 nt, Homo sapiens
  misc_RNA (1)...(19): siRNA sense strand
gaagaggaggaaauagaga

SEQ ID NO: 1968756 - RNA, 19 nt, Homo sapiens
  misc_RNA (1)...(19): siRNA sense strand
gagaaggugcugcagaaau

SEQ ID NO: 1968757 - RNA, 19 nt, Homo sapiens
  misc_RNA (1)...(19): siRNA sense strand
gagcugccuauucuuuaua

SEQ ID NO: 1968758 - RNA, 19 nt, Homo sapiens
  misc_RNA (1)...(19): siRNA sense strand
ggaagacuacgaggagaaa

SEQ ID NO: 1968759 - RNA, 19 nt, Homo sapiens
  misc_RNA (1)...(19): siRNA sense strand
caggcgcucuuuagucauu

SEQ ID NO: 1968760 - RNA, 19 nt, Homo sapiens
  misc_RNA (1)...(19): siRNA sense strand
ugagcaaacuggagaagca

SEQ ID NO: 1968761 - RNA, 19 nt, Homo sapiens
  misc_RNA (1)...(19): siRNA sense strand
uagaagaggaggaaauaga

SEQ ID NO: 1968762 - RNA, 19 nt, Homo sapiens
  misc_RNA (1)...(19): siRNA sense strand
caaaacauuuccaacuuga

SEQ ID NO: 1968763 - RNA, 19 nt, Homo sapiens
  misc_RNA (1)...(19): siRNA sense strand
aagaagagguauccacaag

SEQ ID NO: 1968764 - RNA, 19 nt, Homo sapiens
  misc_RNA (1)...(19): siRNA sense strand
aggagaaggugcugcagaa

SEQ ID NO: 1968765 - RNA, 19 nt, Homo sapiens
  misc_RNA (1)...(19): siRNA sense strand
gcaaagaagauggaagaca

SEQ ID NO: 1968766 - RNA, 19 nt, Homo sapiens
  misc_RNA (1)...(19): siRNA sense strand
gaaucugucucagcaacug

SEQ ID NO: 1968767 - RNA, 19 nt, Homo sapiens
  misc_RNA (1)...(19): siRNA sense strand
agaggaagaguucaacaaa

SEQ ID NO: 1968768 - RNA, 19 nt, Homo sapiens
  misc_RNA (1)...(19): siRNA sense strand
ccagagaagccaguaagaa

SEQ ID NO: 1968769 - RNA, 19 nt, Homo sapiens
  misc_RNA (1)...(19): siRNA sense strand
cagucaaagugaugcauga

SEQ ID NO: 1968770 - RNA, 19 nt, Homo sapiens
  misc_RNA (1)...(19): siRNA sense strand
caccugaaccucaagaaga

SEQ ID NO: 1968771 - RNA, 19 nt, Homo sapiens
  misc_RNA (1)...(19): siRNA sense strand
gaacccgcaccgcaaguga

SEQ ID NO: 1968772 - RNA, 19 nt, Homo sapiens
  misc_RNA (1)...(19): siRNA sense strand
aaaucuauguugcccaguu

SEQ ID NO: 1968773 - RNA, 19 nt, Homo sapiens
  misc_RNA (1)...(19): siRNA sense strand
gagcugaaggccaucguau

SEQ ID NO: 1968774 - RNA, 19 nt, Homo sapiens
  misc_RNA (1)...(19): siRNA sense strand
cagcagcaggcgcucuuua

SEQ ID NO: 1968775 - RNA, 19 nt, Homo sapiens
  misc_RNA (1)...(19): siRNA sense strand
ccaaaacauuuccaacuug

SEQ ID NO: 1968776 - RNA, 19 nt, Homo sapiens
  misc_RNA (1)...(19): siRNA sense strand
cagaaggccacaagcugua

SEQ ID NO: 1968777 - RNA, 19 nt, Homo sapiens
  misc_RNA (1)...(19): siRNA sense strand
gcuguaaggaccauggaaa

SEQ ID NO: 1968778 - RNA, 19 nt, Homo sapiens
  misc_RNA (1)...(19): siRNA sense strand
aagcaacauuccaauaaag

SEQ ID NO: 1968779 - RNA, 19 nt, Homo sapiens
  misc_RNA (1)...(19): siRNA sense strand
caacuugagggaugucuuc

SEQ ID NO: 1968780 - RNA, 19 nt, Homo sapiens
  misc_RNA (1)...(19): siRNA sense strand
gcugcuaugugaccaucuu

SEQ ID NO: 1968781 - RNA, 19 nt, Homo sapiens
  misc_RNA (1)...(19): siRNA sense strand
guaaggaccauggaaaucu

SEQ ID NO: 1968782 - RNA, 19 nt, Homo sapiens
  misc_RNA (1)...(19): siRNA sense strand
ccaccuuaaugacaucuca

SEQ ID NO: 1968783 - RNA, 19 nt, Homo sapiens
  misc_RNA (1)...(19): siRNA sense strand
gggaagacaauucugagau

SEQ ID NO: 1968784 - RNA, 19 nt, Homo sapiens
  misc_RNA (1)...(19): siRNA sense strand
gaagagugagagugaaucu

SEQ ID NO: 1968785 - RNA, 19 nt, Homo sapiens
  misc_RNA (1)...(19): siRNA sense strand
gaaagcuguagaaaccaaa

SEQ ID NO: 1968786 - RNA, 19 nt, Homo sapiens
  misc_RNA (1)...(19): siRNA sense strand
ggagaagcaacauuccaau

SEQ ID NO: 1968787 - RNA, 19 nt, Homo sapiens
  misc_RNA (1)...(19): siRNA sense strand
gaugucuucuacagggaaa

SEQ ID NO: 1968788 - RNA, 19 nt, Homo sapiens
  misc_RNA (1)...(19): siRNA sense strand
gaccauggaaaucuauguu

SEQ ID NO: 1968789 - RNA, 19 nt, Homo sapiens
  misc_RNA (1)...(19): siRNA sense strand
ugagaucaaggagcucuua

SEQ ID NO: 1968790 - RNA, 19 nt, Homo sapiens
  misc_RNA (1)...(19): siRNA sense strand
caaggcagaggaagaguuc

SEQ ID NO: 1968791 - RNA, 19 nt, Homo sapiens
  misc_RNA (1)...(19): siRNA sense strand
gaaggugcugcagaaauug

SEQ ID NO: 1968792 - RNA, 19 nt, Homo sapiens
  misc_RNA (1)...(19): siRNA sense strand
gagguauccacaagugaaa

SEQ ID NO: 1968793 - RNA, 19 nt, Homo sapiens
  misc_RNA (1)...(19): siRNA sense strand
caagaagagguauccacaa

SEQ ID NO: 1968794 - RNA, 19 nt, Homo sapiens
  misc_RNA (1)...(19): siRNA sense strand
cuuagaagaggaggaaaua

SEQ ID NO: 1968795 - RNA, 19 nt, Homo sapiens
  misc_RNA (1)...(19): siRNA sense strand
ggagaaggugcugcagaaa

SEQ ID NO: 1968796 - RNA, 19 nt, Homo sapiens
  misc_RNA (1)...(19): siRNA sense strand
ucuacgaggugaugagcaa

SEQ ID NO: 1968797 - RNA, 19 nt, Homo sapiens
  misc_RNA (1)...(19): siRNA sense strand
ugagggaugucuucuacag

SEQ ID NO: 1968798 - RNA, 19 nt, Homo sapiens
  misc_RNA (1)...(19): siRNA sense strand
ggucucuccuaauccagaa

SEQ ID NO: 1968799 - RNA, 19 nt, Homo sapiens
  misc_RNA (1)...(19): siRNA sense strand
gggaagacuacgaggagaa

SEQ ID NO: 1968800 - RNA, 19 nt, Homo sapiens
  misc_RNA (1)...(19): siRNA sense strand
uguagaaaccaaagaugaa

SEQ ID NO: 1968801 - RNA, 19 nt, Homo sapiens
  misc_RNA (1)...(19): siRNA sense strand
gggcagccuucaucaucug

SEQ ID NO: 1968802 - RNA, 19 nt, Homo sapiens
  misc_RNA (1)...(19): siRNA sense strand
gagaaggaaggaucugaag

SEQ ID NO: 1968803 - RNA, 19 nt, Homo sapiens
  misc_RNA (1)...(19): siRNA sense strand
agacaauucugagaucaag

SEQ ID NO: 1968804 - RNA, 19 nt, Homo sapiens
  misc_RNA (1)...(19): siRNA sense strand
gaucugaaccaagaacuac

SEQ ID NO: 1968805 - RNA, 19 nt, Homo sapiens
  misc_RNA (1)...(19): siRNA sense strand
aaaccaaagaugaacgauu

SEQ ID NO: 1968806 - RNA, 19 nt, Homo sapiens
  misc_RNA (1)...(19): siRNA sense strand
ggagcugaaggccaucgua

SEQ ID NO: 1968807 - RNA, 19 nt, Homo sapiens
  misc_RNA (1)...(19): siRNA sense strand
caacuucuaccaacaacag

SEQ ID NO: 1968808 - RNA, 19 nt, Homo sapiens
  misc_RNA (1)...(19): siRNA sense strand
cacagcaccugaaccucaa

SEQ ID NO: 1968809 - RNA, 19 nt, Homo sapiens
  misc_RNA (1)...(19): siRNA sense strand
gccaagaccagcuucaagu

SEQ ID NO: 1968810 - RNA, 19 nt, Homo sapiens
  misc_RNA (1)...(19): siRNA sense strand
agcaggcgcucuuuaguca

SEQ ID NO: 1968811 - RNA, 19 nt, Homo sapiens
  misc_RNA (1)...(19): siRNA sense strand
uaugugaccaucuuccaaa

SEQ ID NO: 1968812 - RNA, 19 nt, Homo sapiens
  misc_RNA (1)...(19): siRNA sense strand
cagaggaagaguucaacaa

SEQ ID NO: 1968813 - RNA, 19 nt, Homo sapiens
  misc_RNA (1)...(19): siRNA sense strand
cagagaagccaguaagaac

SEQ ID NO: 1968814 - RNA, 19 nt, Homo sapiens
  misc_RNA (1)...(19): siRNA sense strand
gcucagaauuccaguaaua

SEQ ID NO: 1968815 - RNA, 19 nt, Homo sapiens
  misc_RNA (1)...(19): siRNA sense strand
cagcacagauugagaauaa

SEQ ID NO: 1968816 - RNA, 19 nt, Homo sapiens
  misc_RNA (1)...(19): siRNA sense strand
gcaaguccauuuccaguuu

SEQ ID NO: 1968817 - RNA, 19 nt, Homo sapiens
  misc_RNA (1)...(19): siRNA sense strand
gaaagaggcugugaugguu

SEQ ID NO: 1968818 - RNA, 19 nt, Homo sapiens
  misc_RNA (1)...(19): siRNA sense strand
ccacacagcucaaagaugu

SEQ ID NO: 1968819 - RNA, 19 nt, Homo sapiens
  misc_RNA (1)...(19): siRNA sense strand
gcaacaaccucaaguccaa

SEQ ID NO: 1968820 - RNA, 19 nt, Homo sapiens
  misc_RNA (1)...(19): siRNA sense strand
gcagcuauauggauaaugu

SEQ ID NO: 1968821 - RNA, 19 nt, Homo sapiens
  misc_RNA (1)...(19): siRNA sense strand
uaagacgcauacaauguua

SEQ ID NO: 1968822 - RNA, 19 nt, Homo sapiens
  misc_RNA (1)...(19): siRNA sense strand
gauacaagguuacaaagca

SEQ ID NO: 1968823 - RNA, 19 nt, Homo sapiens
  misc_RNA (1)...(19): siRNA sense strand
gaggcgacaucuagacuaa

SEQ ID NO: 1968824 - RNA, 19 nt, Homo sapiens
  misc_RNA (1)...(19): siRNA sense strand
ugcaagaggugauagauuu

SEQ ID NO: 1968825 - RNA, 19 nt, Homo sapiens
  misc_RNA (1)...(19): siRNA sense strand
aaagggagaucugugauuu

SEQ ID NO: 1968826 - RNA, 19 nt, Homo sapiens
  misc_RNA (1)...(19): siRNA sense strand
ccacagccauggugacuga

SEQ ID NO: 1968827 - RNA, 19 nt, Homo sapiens
  misc_RNA (1)...(19): siRNA sense strand
gugagcagcuauauggaua

SEQ ID NO: 1968828 - RNA, 19 nt, Homo sapiens
  misc_RNA (1)...(19): siRNA sense strand
ugagaaggguaugaacuua

SEQ ID NO: 1968829 - RNA, 19 nt, Homo sapiens
  misc_RNA (1)...(19): siRNA sense strand
gcaggucugucuccucuug

SEQ ID NO: 1968830 - RNA, 19 nt, Homo sapiens
  misc_RNA (1)...(19): siRNA sense strand
ccacacaccugaaguagag

SEQ ID NO: 1968831 - RNA, 19 nt, Homo sapiens
  misc_RNA (1)...(19): siRNA sense strand
ccgacaaucugaaacuuaa

SEQ ID NO: 1968832 - RNA, 19 nt, Homo sapiens
  misc_RNA (1)...(19): siRNA sense strand
gaaauggaaacaaaucuuc

SEQ ID NO: 1968833 - RNA, 19 nt, Homo sapiens
  misc_RNA (1)...(19): siRNA sense strand
uaagauagcucuggaaagc

SEQ ID NO: 1968834 - RNA, 19 nt, Homo sapiens
  misc_RNA (1)...(19): siRNA sense strand
caaaauaccccuuccaaaa

SEQ ID NO: 1968835 - RNA, 19 nt, Homo sapiens
  misc_RNA (1)...(19): siRNA sense strand
ugggagagauucugccuuu

SEQ ID NO: 1968836 - RNA, 19 nt, Homo sapiens
  misc_RNA (1)...(19): siRNA sense strand
ggaaaugcaagaggugaua

SEQ ID NO: 1968837 - RNA, 19 nt, Homo sapiens
  misc_RNA (1)...(19): siRNA sense strand
guaauacaguggccaaugg

SEQ ID NO: 1968838 - RNA, 19 nt, Homo sapiens
  misc_RNA (1)...(19): siRNA sense strand
caggaacucucacuacuca

SEQ ID NO: 1968839 - RNA, 19 nt, Homo sapiens
  misc_RNA (1)...(19): siRNA sense strand
gcagggaccuagaaauaac

SEQ ID NO: 1968840 - RNA, 19 nt, Homo sapiens
  misc_RNA (1)...(19): siRNA sense strand
ccgcagggaccuagaaaua

SEQ ID NO: 1968841 - RNA, 19 nt, Homo sapiens
  misc_RNA (1)...(19): siRNA sense strand
ggaacucucacuacucaaa

SEQ ID NO: 1968842 - RNA, 19 nt, Homo sapiens
  misc_RNA (1)...(19): siRNA sense strand
gcagugcccaggacaguaa

SEQ ID NO: 1968843 - RNA, 19 nt, Homo sapiens
  misc_RNA (1)...(19): siRNA sense strand
aaacugacaucccgguuca

SEQ ID NO: 1968844 - RNA, 19 nt, Homo sapiens
  misc_RNA (1)...(19): siRNA sense strand
ggcgacaucuagacuaaga

SEQ ID NO: 1968845 - RNA, 19 nt, Homo sapiens
  misc_RNA (1)...(19): siRNA sense strand
ggagaggcgugagaacuuc

SEQ ID NO: 1968846 - RNA, 19 nt, Homo sapiens
  misc_RNA (1)...(19): siRNA sense strand
ggaaauggaaacaaaucuu

SEQ ID NO: 1968847 - RNA, 19 nt, Homo sapiens
  misc_RNA (1)...(19): siRNA sense strand
guacuuuccucacagaucu

SEQ ID NO: 1968848 - RNA, 19 nt, Homo sapiens
  misc_RNA (1)...(19): siRNA sense strand
gggcucagacccagaguuu

SEQ ID NO: 1968849 - RNA, 19 nt, Homo sapiens
  misc_RNA (1)...(19): siRNA sense strand
gcaaggaugagaaggguau

SEQ ID NO: 1968850 - RNA, 19 nt, Homo sapiens
  misc_RNA (1)...(19): siRNA sense strand
cauggugccugaaagaaga

SEQ ID NO: 1968851 - RNA, 19 nt, Homo sapiens
  misc_RNA (1)...(19): siRNA sense strand
cggcugaccucggccauaa

SEQ ID NO: 1968852 - RNA, 19 nt, Homo sapiens
  misc_RNA (1)...(19): siRNA sense strand
gagaugacggcaaggauga

SEQ ID NO: 1968853 - RNA, 19 nt, Homo sapiens
  misc_RNA (1)...(19): siRNA sense strand
uggauaaugugaugucaga

SEQ ID NO: 1968854 - RNA, 19 nt, Homo sapiens
  misc_RNA (1)...(19): siRNA sense strand
gcuuuacccugcauacaga

SEQ ID NO: 1968855 - RNA, 19 nt, Homo sapiens
  misc_RNA (1)...(19): siRNA sense strand
guaugaacuuaccaacuga

SEQ ID NO: 1968856 - RNA, 19 nt, Homo sapiens
  misc_RNA (1)...(19): siRNA sense strand
gaagacauucuccaaacug

SEQ ID NO: 1968857 - RNA, 19 nt, Homo sapiens
  misc_RNA (1)...(19): siRNA sense strand
ugaccugccuucuggaaau

SEQ ID NO: 1968858 - RNA, 19 nt, Homo sapiens
  misc_RNA (1)...(19): siRNA sense strand
gagcagcuauauggauaau

SEQ ID NO: 1968859 - RNA, 19 nt, Homo sapiens
  misc_RNA (1)...(19): siRNA sense strand
gcagauaggaucgcacuuc

SEQ ID NO: 1968860 - RNA, 19 nt, Homo sapiens
  misc_RNA (1)...(19): siRNA sense strand
caacugaucaggaaaugca

SEQ ID NO: 1968861 - RNA, 19 nt, Homo sapiens
  misc_RNA (1)...(19): siRNA sense strand
caaagggagaucugugauu

SEQ ID NO: 1968862 - RNA, 19 nt, Homo sapiens
  misc_RNA (1)...(19): siRNA sense strand
gcucuagaaucgugguuca

SEQ ID NO: 1968863 - RNA, 19 nt, Homo sapiens
  misc_RNA (1)...(19): siRNA sense strand
gcacagauugagaauaaag

SEQ ID NO: 1968864 - RNA, 19 nt, Homo sapiens
  misc_RNA (1)...(19): siRNA sense strand
uguuacagcugaugaagga

SEQ ID NO: 1968865 - RNA, 19 nt, Homo sapiens
  misc_RNA (1)...(19): siRNA sense strand
caccgucccugugcagaua

SEQ ID NO: 1968866 - RNA, 19 nt, Homo sapiens
  misc_RNA (1)...(19): siRNA sense strand
gaacgacaccaugcagaug

SEQ ID NO: 1968867 - RNA, 19 nt, Homo sapiens
  misc_RNA (1)...(19): siRNA sense strand
gcaccacucuaugcaguca

SEQ ID NO: 1968868 - RNA, 19 nt, Homo sapiens
  misc_RNA (1)...(19): siRNA sense strand
gccaggcgaugcagcagaa

SEQ ID NO: 1968869 - RNA, 19 nt, Homo sapiens
  misc_RNA (1)...(19): siRNA sense strand
ccaauacuaccaacaccua

SEQ ID NO: 1968870 - RNA, 19 nt, Homo sapiens
  misc_RNA (1)...(19): siRNA sense strand
cagcucagaauuccaguaa

SEQ ID NO: 1968871 - RNA, 19 nt, Homo sapiens
  misc_RNA (1)...(19): siRNA sense strand
ugacugaagugcugaacca

SEQ ID NO: 1968872 - RNA, 19 nt, Homo sapiens
  misc_RNA (1)...(19): siRNA sense strand
uuacggaucagaaggaauu

SEQ ID NO: 1968873 - RNA, 19 nt, Homo sapiens
  misc_RNA (1)...(19): siRNA sense strand
cuauauggauaaugugaug

SEQ ID NO: 1968874 - RNA, 19 nt, Homo sapiens
  misc_RNA (1)...(19): siRNA sense strand
ucaguggccuggcauaucu

SEQ ID NO: 1968875 - RNA, 19 nt, Homo sapiens
  misc_RNA (1)...(19): siRNA sense strand
gccgacaaucugaaacuua

SEQ ID NO: 1968876 - RNA, 19 nt, Homo sapiens
  misc_RNA (1)...(19): siRNA sense strand
acacagcaguggagagcaa

SEQ ID NO: 1968877 - RNA, 19 nt, Homo sapiens
  misc_RNA (1)...(19): siRNA sense strand
aaacuuaagacgcauacaa

SEQ ID NO: 1968878 - RNA, 19 nt, Homo sapiens
  misc_RNA (1)...(19): siRNA sense strand
gaggucaucgugccagaaa

SEQ ID NO: 1968879 - RNA, 19 nt, Homo sapiens
  misc_RNA (1)...(19): siRNA sense strand
gcccaaccgugaccaaagu

SEQ ID NO: 1968880 - RNA, 19 nt, Homo sapiens
  misc_RNA (1)...(19): siRNA sense strand
gaacuuaccaacugaucag

SEQ ID NO: 1968881 - RNA, 19 nt, Homo sapiens
  misc_RNA (1)...(19): siRNA sense strand
ccaauggcuuucucaugga

SEQ ID NO: 1968882 - RNA, 19 nt, Homo sapiens
  misc_RNA (1)...(19): siRNA sense strand
ccagcagcagcacaaauua

SEQ ID NO: 1968883 - RNA, 19 nt, Homo sapiens
  misc_RNA (1)...(19): siRNA sense strand
ccacauggugccugaaaga

SEQ ID NO: 1968884 - RNA, 19 nt, Homo sapiens
  misc_RNA (1)...(19): siRNA sense strand
uauaagauagcucuggaaa

SEQ ID NO: 1968885 - RNA, 19 nt, Homo sapiens
  misc_RNA (1)...(19): siRNA sense strand
gagagauucugccuuuuga

SEQ ID NO: 1968886 - RNA, 19 nt, Homo sapiens
  misc_RNA (1)...(19): siRNA sense strand
gauggagucuuuggaaugc

SEQ ID NO: 1968887 - RNA, 19 nt, Homo sapiens
  misc_RNA (1)...(19): siRNA sense strand
gaaggcaggagccaugcaa

SEQ ID NO: 1968888 - RNA, 19 nt, Homo sapiens
  misc_RNA (1)...(19): siRNA sense strand
ccaguacuuuccucacaga

SEQ ID NO: 1968889 - RNA, 19 nt, Homo sapiens
  misc_RNA (1)...(19): siRNA sense strand
gcaauauugauacaagguu

SEQ ID NO: 1968890 - RNA, 19 nt, Homo sapiens
  misc_RNA (1)...(19): siRNA sense strand
ccaagaaagcuucauguac

SEQ ID NO: 1968891 - RNA, 19 nt, Homo sapiens
  misc_RNA (1)...(19): siRNA sense strand
ggaaagcuuaggacacugu

SEQ ID NO: 1968892 - RNA, 19 nt, Homo sapiens
  misc_RNA (1)...(19): siRNA sense strand
ggaacgacaccaugcagau

SEQ ID NO: 1968893 - RNA, 19 nt, Homo sapiens
  misc_RNA (1)...(19): siRNA sense strand
guucugacuuguacagcuu

SEQ ID NO: 1968894 - RNA, 19 nt, Homo sapiens
  misc_RNA (1)...(19): siRNA sense strand
aaccucaaguccaauacua

SEQ ID NO: 1968895 - RNA, 19 nt, Homo sapiens
  misc_RNA (1)...(19): siRNA sense strand
uacagacccuucacaguca

SEQ ID NO: 1968896 - RNA, 19 nt, Homo sapiens
  misc_RNA (1)...(19): siRNA sense strand
ccaagaugcuaauggaacu

SEQ ID NO: 1968897 - RNA, 19 nt, Homo sapiens
  misc_RNA (1)...(19): siRNA sense strand
uggaagggagcaagcuuua

SEQ ID NO: 1968898 - RNA, 19 nt, Homo sapiens
  misc_RNA (1)...(19): siRNA sense strand
acacagcacagauugagaa

SEQ ID NO: 1968899 - RNA, 19 nt, Homo sapiens
  misc_RNA (1)...(19): siRNA sense strand
uuaagacgcauacaauguu

SEQ ID NO: 1968900 - RNA, 19 nt, Homo sapiens
  misc_RNA (1)...(19): siRNA sense strand
gggccacacaccugaagua

SEQ ID NO: 1968901 - RNA, 19 nt, Homo sapiens
  misc_RNA (1)...(19): siRNA sense strand
gacaaucugaaacuuaaga

SEQ ID NO: 1968902 - RNA, 19 nt, Homo sapiens
  misc_RNA (1)...(19): siRNA sense strand
gcuuccaccugaauccaaa

SEQ ID NO: 1968903 - RNA, 19 nt, Homo sapiens
  misc_RNA (1)...(19): siRNA sense strand
auacagauccagcugcaaa

SEQ ID NO: 1968904 - RNA, 19 nt, Homo sapiens
  misc_RNA (1)...(19): siRNA sense strand
gcacaaauuauuccaucca

SEQ ID NO: 1968905 - RNA, 19 nt, Homo sapiens
  misc_RNA (1)...(19): siRNA sense strand
aagacauucuccaaacuga

SEQ ID NO: 1968906 - RNA, 19 nt, Homo sapiens
  misc_RNA (1)...(19): siRNA sense strand
agagaaagaggcugugaug

SEQ ID NO: 1968907 - RNA, 19 nt, Homo sapiens
  misc_RNA (1)...(19): siRNA sense strand
gugauggagucuuuggaau

SEQ ID NO: 1968908 - RNA, 19 nt, Homo sapiens
  misc_RNA (1)...(19): siRNA sense strand
cacaaauuauuccauccaa

SEQ ID NO: 1968909 - RNA, 19 nt, Homo sapiens
  misc_RNA (1)...(19): siRNA sense strand
gcagggcaucuccaaguau

SEQ ID NO: 1968910 - RNA, 19 nt, Homo sapiens
  misc_RNA (1)...(19): siRNA sense strand
cugugaauaugcaaugaaa

SEQ ID NO: 1968911 - RNA, 19 nt, Homo sapiens
  misc_RNA (1)...(19): siRNA sense strand
gcaaagggagaucugugau

SEQ ID NO: 1968912 - RNA, 19 nt, Homo sapiens
  misc_RNA (1)...(19): siRNA sense strand
gaggaugugaaccaggaua

SEQ ID NO: 1968913 - RNA, 19 nt, Homo sapiens
  misc_RNA (1)...(19): siRNA sense strand
cagcuuguucuccauguuu

SEQ ID NO: 1968914 - RNA, 19 nt, Homo sapiens
  misc_RNA (1)...(19): siRNA sense strand
uaaccagccucucagaaua

SEQ ID NO: 1968915 - RNA, 19 nt, Homo sapiens
  misc_RNA (1)...(19): siRNA sense strand
gcuacacccugcacuauaa

SEQ ID NO: 1968916 - RNA, 19 nt, Homo sapiens
  misc_RNA (1)...(19): siRNA sense strand
agaagaagcugaucucugu

SEQ ID NO: 1968917 - RNA, 19 nt, Homo sapiens
  misc_RNA (1)...(19): siRNA sense strand
gaagaaagacacagagguu

SEQ ID NO: 1968918 - RNA, 19 nt, Homo sapiens
  misc_RNA (1)...(19): siRNA sense strand
ugagaaguaugcaaaguuu

SEQ ID NO: 1968919 - RNA, 19 nt, Homo sapiens
  misc_RNA (1)...(19): siRNA sense strand
ugaaugagcugcuugucaa

SEQ ID NO: 1968920 - RNA, 19 nt, Homo sapiens
  misc_RNA (1)...(19): siRNA sense strand
gagaugugguaacgaagua

SEQ ID NO: 1968921 - RNA, 19 nt, Homo sapiens
  misc_RNA (1)...(19): siRNA sense strand
gcagaccaaugccgagaaa

SEQ ID NO: 1968922 - RNA, 19 nt, Homo sapiens
  misc_RNA (1)...(19): siRNA sense strand
gagguucucuucugcuuug

SEQ ID NO: 1968923 - RNA, 19 nt, Homo sapiens
  misc_RNA (1)...(19): siRNA sense strand
gccaagcacugccagaaau

SEQ ID NO: 1968924 - RNA, 19 nt, Homo sapiens
  misc_RNA (1)...(19): siRNA sense strand
aggaagagcugguguccaa

SEQ ID NO: 1968925 - RNA, 19 nt, Homo sapiens
  misc_RNA (1)...(19): siRNA sense strand
ggcacgcgcucaucaagaa

SEQ ID NO: 1968926 - RNA, 19 nt, Homo sapiens
  misc_RNA (1)...(19): siRNA sense strand
gaggugugguggacaguga

SEQ ID NO: 1968927 - RNA, 19 nt, Homo sapiens
  misc_RNA (1)...(19): siRNA sense strand
gucacaaacuggugucuga

SEQ ID NO: 1968928 - RNA, 19 nt, Homo sapiens
  misc_RNA (1)...(19): siRNA sense strand
agcagaggcugaucaaauu

SEQ ID NO: 1968929 - RNA, 19 nt, Homo sapiens
  misc_RNA (1)...(19): siRNA sense strand
gcagagcacucacccuacu

SEQ ID NO: 1968930 - RNA, 19 nt, Homo sapiens
  misc_RNA (1)...(19): siRNA sense strand
caagaucaucggccaguuu

SEQ ID NO: 1968931 - RNA, 19 nt, Homo sapiens
  misc_RNA (1)...(19): siRNA sense strand
gcuuugagcaguuugauga

SEQ ID NO: 1968932 - RNA, 19 nt, Homo sapiens
  misc_RNA (1)...(19): siRNA sense strand
caugauugcugcuggacuu

SEQ ID NO: 1968933 - RNA, 19 nt, Homo sapiens
  misc_RNA (1)...(19): siRNA sense strand
guucuggaguguuugaaau

SEQ ID NO: 1968934 - RNA, 19 nt, Homo sapiens
  misc_RNA (1)...(19): siRNA sense strand
acaaggaggagaaguuuga

SEQ ID NO: 1968935 - RNA, 19 nt, Homo sapiens
  misc_RNA (1)...(19): siRNA sense strand
ucaaggaggacauagcaaa

SEQ ID NO: 1968936 - RNA, 19 nt, Homo sapiens
  misc_RNA (1)...(19): siRNA sense strand
aaauggagauucacuugca

SEQ ID NO: 1968937 - RNA, 19 nt, Homo sapiens
  misc_RNA (1)...(19): siRNA sense strand
gaagauuacggccuguuca

SEQ ID NO: 1968938 - RNA, 19 nt, Homo sapiens
  misc_RNA (1)...(19): siRNA sense strand
cugaucaaauucuucauug

SEQ ID NO: 1968939 - RNA, 19 nt, Homo sapiens
  misc_RNA (1)...(19): siRNA sense strand
gcaagaucaucggccaguu

SEQ ID NO: 1968940 - RNA, 19 nt, Homo sapiens
  misc_RNA (1)...(19): siRNA sense strand
caggagagcgcacucauca

SEQ ID NO: 1968941 - RNA, 19 nt, Homo sapiens
  misc_RNA (1)...(19): siRNA sense strand
cuacgugcccgacaugaaa

SEQ ID NO: 1968942 - RNA, 19 nt, Homo sapiens
  misc_RNA (1)...(19): siRNA sense strand
gcuccagcguugcacugua

SEQ ID NO: 1968943 - RNA, 19 nt, Homo sapiens
  misc_RNA (1)...(19): siRNA sense strand
ugccagaaauggagauuca

SEQ ID NO: 1968944 - RNA, 19 nt, Homo sapiens
  misc_RNA (1)...(19): siRNA sense strand
gauugcugcuggacuuguu

SEQ ID NO: 1968945 - RNA, 19 nt, Homo sapiens
  misc_RNA (1)...(19): siRNA sense strand
gcugaucaaauucuucauu

SEQ ID NO: 1968946 - RNA, 19 nt, Homo sapiens
  misc_RNA (1)...(19): siRNA sense strand
caacauccgcagcaucuuc

SEQ ID NO: 1968947 - RNA, 19 nt, Homo sapiens
  misc_RNA (1)...(19): siRNA sense strand
agaugguucuggaguguuu

SEQ ID NO: 1968948 - RNA, 19 nt, Homo sapiens
  misc_RNA (1)...(19): siRNA sense strand
ggacgcaccgcucaacauc

SEQ ID NO: 1968949 - RNA, 19 nt, Homo sapiens
  misc_RNA (1)...(19): siRNA sense strand
ccaaguggcugcgcuucau

SEQ ID NO: 1968950 - RNA, 19 nt, Homo sapiens
  misc_RNA (1)...(19): siRNA sense strand
gcagcuaaccagccucuca

SEQ ID NO: 1968951 - RNA, 19 nt, Homo sapiens
  misc_RNA (1)...(19): siRNA sense strand
gcugagaaguaugcaaagu

SEQ ID NO: 1968952 - RNA, 19 nt, Homo sapiens
  misc_RNA (1)...(19): siRNA sense strand
ugaagaagaaagacacaga

SEQ ID NO: 1968953 - RNA, 19 nt, Homo sapiens
  misc_RNA (1)...(19): siRNA sense strand
ccgagugccuaucagagaa

SEQ ID NO: 1968954 - RNA, 19 nt, Homo sapiens
  misc_RNA (1)...(19): siRNA sense strand
cuacaaggaggagaaguuu

SEQ ID NO: 1968955 - RNA, 19 nt, Homo sapiens
  misc_RNA (1)...(19): siRNA sense strand
agaaauggagauucacuug

SEQ ID NO: 1968956 - RNA, 19 nt, Homo sapiens
  misc_RNA (1)...(19): siRNA sense strand
gcugcaccuucgugaguuu

SEQ ID NO: 1968957 - RNA, 19 nt, Homo sapiens
  misc_RNA (1)...(19): siRNA sense strand
caaagcugcugcgcuacga

SEQ ID NO: 1968958 - RNA, 19 nt, Homo sapiens
  misc_RNA (1)...(19): siRNA sense strand
ggaggucaaggaggacaua

SEQ ID NO: 1968959 - RNA, 19 nt, Homo sapiens
  misc_RNA (1)...(19): siRNA sense strand
gaucaucggccaguuugga

SEQ ID NO: 1968960 - RNA, 19 nt, Homo sapiens
  misc_RNA (1)...(19): siRNA sense strand
gcaggcaggacgacuguuc

SEQ ID NO: 1968961 - RNA, 19 nt, Homo sapiens
  misc_RNA (1)...(19): siRNA sense strand
acuaugaggccaugaagaa

SEQ ID NO: 1968962 - RNA, 19 nt, Homo sapiens
  misc_RNA (1)...(19): siRNA sense strand
guaacgaaguacagcaacu

SEQ ID NO: 1968963 - RNA, 19 nt, Homo sapiens
  misc_RNA (1)...(19): siRNA sense strand
agagcgcacucaucaggaa

SEQ ID NO: 1968964 - RNA, 19 nt, Homo sapiens
  misc_RNA (1)...(19): siRNA sense strand
ugccagcgaugccuuggaa

SEQ ID NO: 1968965 - RNA, 19 nt, Homo sapiens
  misc_RNA (1)...(19): siRNA sense strand
ggccaagcacugccagaaa

SEQ ID NO: 1968966 - RNA, 19 nt, Homo sapiens
  misc_RNA (1)...(19): siRNA sense strand
ugcgagaugugguaacgaa

SEQ ID NO: 1968967 - RNA, 19 nt, Homo sapiens
  misc_RNA (1)...(19): siRNA sense strand
gaggaccacagcccaguug

SEQ ID NO: 1968968 - RNA, 19 nt, Homo sapiens
  misc_RNA (1)...(19): siRNA sense strand
cuaaccagccucucagaau

SEQ ID NO: 1968969 - RNA, 19 nt, Homo sapiens
  misc_RNA (1)...(19): siRNA sense strand
ggucaaggaggacauagca

SEQ ID NO: 1968970 - RNA, 19 nt, Homo sapiens
  misc_RNA (1)...(19): siRNA sense strand
gcaggguuccacuuccaaa

SEQ ID NO: 1968971 - RNA, 19 nt, Homo sapiens
  misc_RNA (1)...(19): siRNA sense strand
gcagaggcugaucaaauuc

SEQ ID NO: 1968972 - RNA, 19 nt, Homo sapiens
  misc_RNA (1)...(19): siRNA sense strand
ggaguuagaaccgggacaa

SEQ ID NO: 1968973 - RNA, 19 nt, Homo sapiens
  misc_RNA (1)...(19): siRNA sense strand
gcuaaccagccucucagaa

SEQ ID NO: 1968974 - RNA, 19 nt, Homo sapiens
  misc_RNA (1)...(19): siRNA sense strand
uacgagaacgccaugauug

SEQ ID NO: 1968975 - RNA, 19 nt, Homo sapiens
  misc_RNA (1)...(19): siRNA sense strand
gcacccgcaacaucuacua

SEQ ID NO: 1968976 - RNA, 19 nt, Homo sapiens
  misc_RNA (1)...(19): siRNA sense strand
ugacagaguggaggucuau

SEQ ID NO: 1968977 - RNA, 19 nt, Homo sapiens
  misc_RNA (1)...(19): siRNA sense strand
gucaaaggccuuccuggau

SEQ ID NO: 1968978 - RNA, 19 nt, Homo sapiens
  misc_RNA (1)...(19): siRNA sense strand
gcaggagagcgcacucauc

SEQ ID NO: 1968979 - RNA, 19 nt, Homo sapiens
  misc_RNA (1)...(19): siRNA sense strand
gaggccagcagcaagauca

SEQ ID NO: 1968980 - RNA, 19 nt, Homo sapiens
  misc_RNA (1)...(19): siRNA sense strand
aaaagaugcugagaaguau

SEQ ID NO: 1968981 - RNA, 19 nt, Homo sapiens
  misc_RNA (1)...(19): siRNA sense strand
gccgagugccuaucagaga

SEQ ID NO: 1968982 - RNA, 19 nt, Homo sapiens
  misc_RNA (1)...(19): siRNA sense strand
gaaagacacagagguucuc

SEQ ID NO: 1968983 - RNA, 19 nt, Homo sapiens
  misc_RNA (1)...(19): siRNA sense strand
aaucaucauccaccugaaa

SEQ ID NO: 1968984 - RNA, 19 nt, Homo sapiens
  misc_RNA (1)...(19): siRNA sense strand
uaugaggccaugaagaaga

SEQ ID NO: 1968985 - RNA, 19 nt, Homo sapiens
  misc_RNA (1)...(19): siRNA sense strand
caaggaggacauagcaaag

SEQ ID NO: 1968986 - RNA, 19 nt, Homo sapiens
  misc_RNA (1)...(19): siRNA sense strand
ccaccgagcaggaggucaa

SEQ ID NO: 1968987 - RNA, 19 nt, Homo sapiens
  misc_RNA (1)...(19): siRNA sense strand
gcacuguacagccgcaaag

SEQ ID NO: 1968988 - RNA, 19 nt, Homo sapiens
  misc_RNA (1)...(19): siRNA sense strand
ggcaacaugaggaguucua

SEQ ID NO: 1968989 - RNA, 19 nt, Homo sapiens
  misc_RNA (1)...(19): siRNA sense strand
ggaggaccacagcccaguu

SEQ ID NO: 1968990 - RNA, 19 nt, Homo sapiens
  misc_RNA (1)...(19): siRNA sense strand
uucgugaguuugacaagaa

SEQ ID NO: 1968991 - RNA, 19 nt, Homo sapiens
  misc_RNA (1)...(19): siRNA sense strand
ggguuccacuuccaaacau

SEQ ID NO: 1968992 - RNA, 19 nt, Homo sapiens
  misc_RNA (1)...(19): siRNA sense strand
ggaggaaaaccaauucugu

SEQ ID NO: 1968993 - RNA, 19 nt, Homo sapiens
  misc_RNA (1)...(19): siRNA sense strand
agucguggaucacuacaag

SEQ ID NO: 1968994 - RNA, 19 nt, Homo sapiens
  misc_RNA (1)...(19): siRNA sense strand
augaggccaugaagaagaa

SEQ ID NO: 1968995 - RNA, 19 nt, Homo sapiens
  misc_RNA (1)...(19): siRNA sense strand
uggaugcucugcagaacca

SEQ ID NO: 1968996 - RNA, 19 nt, Homo sapiens
  misc_RNA (1)...(19): siRNA sense strand
ccaagcacugccagaaaug

SEQ ID NO: 1968997 - RNA, 19 nt, Homo sapiens
  misc_RNA (1)...(19): siRNA sense strand
ucaucaagaagcugaauca

SEQ ID NO: 1968998 - RNA, 19 nt, Homo sapiens
  misc_RNA (1)...(19): siRNA sense strand
cccggucccuguacucaga

SEQ ID NO: 1968999 - RNA, 19 nt, Homo sapiens
  misc_RNA (1)...(19): siRNA sense strand
aaccguccauguuugaugu

SEQ ID NO: 1969000 - RNA, 19 nt, Homo sapiens
  misc_RNA (1)...(19): siRNA sense strand
cagaaauggagauucacuu

SEQ ID NO: 1969001 - RNA, 19 nt, Homo sapiens
  misc_RNA (1)...(19): siRNA sense strand
auacgagaacgccaugauu

SEQ ID NO: 1969002 - RNA, 19 nt, Homo sapiens
  misc_RNA (1)...(19): siRNA sense strand
ggacauagucguggaucac

SEQ ID NO: 1969003 - RNA, 19 nt, Homo sapiens
  misc_RNA (1)...(19): siRNA sense strand
gacaagaagaagcugaucu

SEQ ID NO: 1969004 - RNA, 19 nt, Homo sapiens
  misc_RNA (1)...(19): siRNA sense strand
gugcaggguuccacuucca

SEQ ID NO: 1969005 - RNA, 19 nt, Homo sapiens
  misc_RNA (1)...(19): siRNA sense strand
gagcgcacucaucaggaaa

SEQ ID NO: 1969006 - RNA, 19 nt, Homo sapiens
  misc_RNA (1)...(19): siRNA sense strand
ccacuuccaaacaugaguu

SEQ ID NO: 1969007 - RNA, 19 nt, Homo sapiens
  misc_RNA (1)...(19): siRNA sense strand
gaaccccugcacucgauua

SEQ ID NO: 1969008 - RNA, 19 nt, Homo sapiens
  misc_RNA (1)...(19): siRNA sense strand
cugagaaguaugcaaaguu

SEQ ID NO: 1969009 - RNA, 19 nt, Homo sapiens
  misc_RNA (1)...(19): siRNA sense strand
gaccaaggccacggacauc

SEQ ID NO: 1969010 - RNA, 19 nt, Homo sapiens
  misc_RNA (1)...(19): siRNA sense strand
ggagacggaggagcucaug

SEQ ID NO: 1969011 - RNA, 19 nt, Homo sapiens
  misc_RNA (1)...(19): siRNA sense strand
agaggcugaucaaauucuu

SEQ ID NO: 1969012 - RNA, 19 nt, Homo sapiens
  misc_RNA (1)...(19): siRNA sense strand
gaacaaagcagcugaauuu

SEQ ID NO: 1969013 - RNA, 19 nt, Homo sapiens
  misc_RNA (1)...(19): siRNA sense strand
gaaacuagcugaaggaaga

SEQ ID NO: 1969014 - RNA, 19 nt, Homo sapiens
  misc_RNA (1)...(19): siRNA sense strand
gaacaagaaucuccaguga

SEQ ID NO: 1969015 - RNA, 19 nt, Homo sapiens
  misc_RNA (1)...(19): siRNA sense strand
gaaaguaaagcccaaauuu

SEQ ID NO: 1969016 - RNA, 19 nt, Homo sapiens
  misc_RNA (1)...(19): siRNA sense strand
ggauacaucugauuuaaug

SEQ ID NO: 1969017 - RNA, 19 nt, Homo sapiens
  misc_RNA (1)...(19): siRNA sense strand
gcagauacaugaacaacuu

SEQ ID NO: 1969018 - RNA, 19 nt, Homo sapiens
  misc_RNA (1)...(19): siRNA sense strand
gaagauguaucgaaugugu

SEQ ID NO: 1969019 - RNA, 19 nt, Homo sapiens
  misc_RNA (1)...(19): siRNA sense strand
gcaaggcuaucaugccaua

SEQ ID NO: 1969020 - RNA, 19 nt, Homo sapiens
  misc_RNA (1)...(19): siRNA sense strand
caaccaugauguucgauua

SEQ ID NO: 1969021 - RNA, 19 nt, Homo sapiens
  misc_RNA (1)...(19): siRNA sense strand
gaacaacuuugauagugaa

SEQ ID NO: 1969022 - RNA, 19 nt, Homo sapiens
  misc_RNA (1)...(19): siRNA sense strand
ucgauuaccugccaauuua

SEQ ID NO: 1969023 - RNA, 19 nt, Homo sapiens
  misc_RNA (1)...(19): siRNA sense strand
ccugaaagcugucaauaaa

SEQ ID NO: 1969024 - RNA, 19 nt, Homo sapiens
  misc_RNA (1)...(19): siRNA sense strand
gaauguguauggugaugua

SEQ ID NO: 1969025 - RNA, 19 nt, Homo sapiens
  misc_RNA (1)...(19): siRNA sense strand
gaagaaaucgucacauugu

SEQ ID NO: 1969026 - RNA, 19 nt, Homo sapiens
  misc_RNA (1)...(19): siRNA sense strand
aaacguagcucucagaagu

SEQ ID NO: 1969027 - RNA, 19 nt, Homo sapiens
  misc_RNA (1)...(19): siRNA sense strand
gcagauggauaaaggaaga

SEQ ID NO: 1969028 - RNA, 19 nt, Homo sapiens
  misc_RNA (1)...(19): siRNA sense strand
gagagguuguuuaagauuu

SEQ ID NO: 1969029 - RNA, 19 nt, Homo sapiens
  misc_RNA (1)...(19): siRNA sense strand
ggaggaauuugccuacuug

SEQ ID NO: 1969030 - RNA, 19 nt, Homo sapiens
  misc_RNA (1)...(19): siRNA sense strand
gaaauguugcuucuacuuu

SEQ ID NO: 1969031 - RNA, 19 nt, Homo sapiens
  misc_RNA (1)...(19): siRNA sense strand
agacgaagcuauggagaua

SEQ ID NO: 1969032 - RNA, 19 nt, Homo sapiens
  misc_RNA (1)...(19): siRNA sense strand
gaauuugccuacuugagaa

SEQ ID NO: 1969033 - RNA, 19 nt, Homo sapiens
  misc_RNA (1)...(19): siRNA sense strand
gacaaagaauuuacaagga

SEQ ID NO: 1969034 - RNA, 19 nt, Homo sapiens
  misc_RNA (1)...(19): siRNA sense strand
caaagcagcugaauuuuau

SEQ ID NO: 1969035 - RNA, 19 nt, Homo sapiens
  misc_RNA (1)...(19): siRNA sense strand
caggauacaucugauuuaa

SEQ ID NO: 1969036 - RNA, 19 nt, Homo sapiens
  misc_RNA (1)...(19): siRNA sense strand
ggaauuugccuacuugaga

SEQ ID NO: 1969037 - RNA, 19 nt, Homo sapiens
  misc_RNA (1)...(19): siRNA sense strand
ggaagaaaucgucacauug

SEQ ID NO: 1969038 - RNA, 19 nt, Homo sapiens
  misc_RNA (1)...(19): siRNA sense strand
uagaauuccuugacaaaga

SEQ ID NO: 1969039 - RNA, 19 nt, Homo sapiens
  misc_RNA (1)...(19): siRNA sense strand
ugggagagguuguuuaaga

SEQ ID NO: 1969040 - RNA, 19 nt, Homo sapiens
  misc_RNA (1)...(19): siRNA sense strand
guauggugauguagaaauu

SEQ ID NO: 1969041 - RNA, 19 nt, Homo sapiens
  misc_RNA (1)...(19): siRNA sense strand
gugaauggcagauggauaa

SEQ ID NO: 1969042 - RNA, 19 nt, Homo sapiens
  misc_RNA (1)...(19): siRNA sense strand
gaaucuuccucacugauau

SEQ ID NO: 1969043 - RNA, 19 nt, Homo sapiens
  misc_RNA (1)...(19): siRNA sense strand
ggagauauuuugcauagaa

SEQ ID NO: 1969044 - RNA, 19 nt, Homo sapiens
  misc_RNA (1)...(19): siRNA sense strand
gcugggaguugcucuauuc

SEQ ID NO: 1969045 - RNA, 19 nt, Homo sapiens
  misc_RNA (1)...(19): siRNA sense strand
gagccaaguuccacugguu

SEQ ID NO: 1969046 - RNA, 19 nt, Homo sapiens
  misc_RNA (1)...(19): siRNA sense strand
ugaacaacuuugauaguga

SEQ ID NO: 1969047 - RNA, 19 nt, Homo sapiens
  misc_RNA (1)...(19): siRNA sense strand
cacuaggucuacucaaaua

SEQ ID NO: 1969048 - RNA, 19 nt, Homo sapiens
  misc_RNA (1)...(19): siRNA sense strand
gaauguuguuggaaugaga

SEQ ID NO: 1969049 - RNA, 19 nt, Homo sapiens
  misc_RNA (1)...(19): siRNA sense strand
aggaagaaaucgucacauu

SEQ ID NO: 1969050 - RNA, 19 nt, Homo sapiens
  misc_RNA (1)...(19): siRNA sense strand
gggagagguuguuuaagau

SEQ ID NO: 1969051 - RNA, 19 nt, Homo sapiens
  misc_RNA (1)...(19): siRNA sense strand
ugauguccuuccucuaaua

SEQ ID NO: 1969052 - RNA, 19 nt, Homo sapiens
  misc_RNA (1)...(19): siRNA sense strand
ucucagaaguacauaauag

SEQ ID NO: 1969053 - RNA, 19 nt, Homo sapiens
  misc_RNA (1)...(19): siRNA sense strand
gauuuaaugucaccuagca

SEQ ID NO: 1969054 - RNA, 19 nt, Homo sapiens
  misc_RNA (1)...(19): siRNA sense strand
gucacuaggucuacucaaa

SEQ ID NO: 1969055 - RNA, 19 nt, Homo sapiens
  misc_RNA (1)...(19): siRNA sense strand
acaagaaucuccagugaac

SEQ ID NO: 1969056 - RNA, 19 nt, Homo sapiens
  misc_RNA (1)...(19): siRNA sense strand
agaauuccuugacaaagaa

SEQ ID NO: 1969057 - RNA, 19 nt, Homo sapiens
  misc_RNA (1)...(19): siRNA sense strand
ggcugaaacuauugaagaa

SEQ ID NO: 1969058 - RNA, 19 nt, Homo sapiens
  misc_RNA (1)...(19): siRNA sense strand
gcacagguucugcauuaau

SEQ ID NO: 1969059 - RNA, 19 nt, Homo sapiens
  misc_RNA (1)...(19): siRNA sense strand
caacuuugauagugaagca

SEQ ID NO: 1969060 - RNA, 19 nt, Homo sapiens
  misc_RNA (1)...(19): siRNA sense strand
ccaggauacaucugauuua

SEQ ID NO: 1969061 - RNA, 19 nt, Homo sapiens
  misc_RNA (1)...(19): siRNA sense strand
cauacugccuccauuuaau

SEQ ID NO: 1969062 - RNA, 19 nt, Homo sapiens
  misc_RNA (1)...(19): siRNA sense strand
gaaguguuagaaagcuuua

SEQ ID NO: 1969063 - RNA, 19 nt, Homo sapiens
  misc_RNA (1)...(19): siRNA sense strand
aagaaaucgucacauugua

SEQ ID NO: 1969064 - RNA, 19 nt, Homo sapiens
  misc_RNA (1)...(19): siRNA sense strand
ggagagguuguuuaagauu

SEQ ID NO: 1969065 - RNA, 19 nt, Homo sapiens
  misc_RNA (1)...(19): siRNA sense strand
gccauacugccuccauuua

SEQ ID NO: 1969066 - RNA, 19 nt, Homo sapiens
  misc_RNA (1)...(19): siRNA sense strand
cguaauaaacacauccaua

SEQ ID NO: 1969067 - RNA, 19 nt, Homo sapiens
  misc_RNA (1)...(19): siRNA sense strand
gaucaucuaucagggucaa

SEQ ID NO: 1969068 - RNA, 19 nt, Homo sapiens
  misc_RNA (1)...(19): siRNA sense strand
uuagaacgaucagaaaugu

SEQ ID NO: 1969069 - RNA, 19 nt, Homo sapiens
  misc_RNA (1)...(19): siRNA sense strand
uagaagggcugacggaaaa

SEQ ID NO: 1969070 - RNA, 19 nt, Homo sapiens
  misc_RNA (1)...(19): siRNA sense strand
cacagguucugcauuaaug

SEQ ID NO: 1969071 - RNA, 19 nt, Homo sapiens
  misc_RNA (1)...(19): siRNA sense strand
uugaggcgcuucccugaaa

SEQ ID NO: 1969072 - RNA, 19 nt, Homo sapiens
  misc_RNA (1)...(19): siRNA sense strand
acgaagcuauggagauauu

SEQ ID NO: 1969073 - RNA, 19 nt, Homo sapiens
  misc_RNA (1)...(19): siRNA sense strand
gcaaacguagcucucagaa

SEQ ID NO: 1969074 - RNA, 19 nt, Homo sapiens
  misc_RNA (1)...(19): siRNA sense strand
ggaauuacuacccaaucaa

SEQ ID NO: 1969075 - RNA, 19 nt, Homo sapiens
  misc_RNA (1)...(19): siRNA sense strand
uaaaggaagacgaagcuau

SEQ ID NO: 1969076 - RNA, 19 nt, Homo sapiens
  misc_RNA (1)...(19): siRNA sense strand
cgaaaguaaagcccaaauu

SEQ ID NO: 1969077 - RNA, 19 nt, Homo sapiens
  misc_RNA (1)...(19): siRNA sense strand
ucuaucagggucaauauaa

SEQ ID NO: 1969078 - RNA, 19 nt, Homo sapiens
  misc_RNA (1)...(19): siRNA sense strand
gauacuuggcuuugguuaa

SEQ ID NO: 1969079 - RNA, 19 nt, Homo sapiens
  misc_RNA (1)...(19): siRNA sense strand
ggauuugcuuggccuggaa

SEQ ID NO: 1969080 - RNA, 19 nt, Homo sapiens
  misc_RNA (1)...(19): siRNA sense strand
auuagaggcugaaacuauu

SEQ ID NO: 1969081 - RNA, 19 nt, Homo sapiens
  misc_RNA (1)...(19): siRNA sense strand
caauaaagccgaacuugcu

SEQ ID NO: 1969082 - RNA, 19 nt, Homo sapiens
  misc_RNA (1)...(19): siRNA sense strand
uguccuuccucuaauaauu

SEQ ID NO: 1969083 - RNA, 19 nt, Homo sapiens
  misc_RNA (1)...(19): siRNA sense strand
gcgagaaucuuuuccugaa

SEQ ID NO: 1969084 - RNA, 19 nt, Homo sapiens
  misc_RNA (1)...(19): siRNA sense strand
ccauacugccuccauuuaa

SEQ ID NO: 1969085 - RNA, 19 nt, Homo sapiens
  misc_RNA (1)...(19): siRNA sense strand
cauucaagauggaggcaaa

SEQ ID NO: 1969086 - RNA, 19 nt, Homo sapiens
  misc_RNA (1)...(19): siRNA sense strand
cuaucagggucaauauaaa

SEQ ID NO: 1969087 - RNA, 19 nt, Homo sapiens
  misc_RNA (1)...(19): siRNA sense strand
uauuagaggcugaaacuau

SEQ ID NO: 1969088 - RNA, 19 nt, Homo sapiens
  misc_RNA (1)...(19): siRNA sense strand
gauguccuuccucuaauaa

SEQ ID NO: 1969089 - RNA, 19 nt, Homo sapiens
  misc_RNA (1)...(19): siRNA sense strand
gaaaucgucacauuguagu

SEQ ID NO: 1969090 - RNA, 19 nt, Homo sapiens
  misc_RNA (1)...(19): siRNA sense strand
ccaugcuggucuucuuuaa

SEQ ID NO: 1969091 - RNA, 19 nt, Homo sapiens
  misc_RNA (1)...(19): siRNA sense strand
uugaagauguaucgaaugu

SEQ ID NO: 1969092 - RNA, 19 nt, Homo sapiens
  misc_RNA (1)...(19): siRNA sense strand
uugauaugcuggaggaauu

SEQ ID NO: 1969093 - RNA, 19 nt, Homo sapiens
  misc_RNA (1)...(19): siRNA sense strand
ugugauguccuuccucuaa

SEQ ID NO: 1969094 - RNA, 19 nt, Homo sapiens
  misc_RNA (1)...(19): siRNA sense strand
aaaggaagacgaagcuaug

SEQ ID NO: 1969095 - RNA, 19 nt, Homo sapiens
  misc_RNA (1)...(19): siRNA sense strand
uggaauuacuacccaauca

SEQ ID NO: 1969096 - RNA, 19 nt, Homo sapiens
  misc_RNA (1)...(19): siRNA sense strand
agaacgaucagaaauguug

SEQ ID NO: 1969097 - RNA, 19 nt, Homo sapiens
  misc_RNA (1)...(19): siRNA sense strand
gcauacagccaucucucuu

SEQ ID NO: 1969098 - RNA, 19 nt, Homo sapiens
  misc_RNA (1)...(19): siRNA sense strand
gaauuacuacccaaucaag

SEQ ID NO: 1969099 - RNA, 19 nt, Homo sapiens
  misc_RNA (1)...(19): siRNA sense strand
gcagcugaauuuuauauca

SEQ ID NO: 1969100 - RNA, 19 nt, Homo sapiens
  misc_RNA (1)...(19): siRNA sense strand
ugaagcacaugcaaaauau

SEQ ID NO: 1969101 - RNA, 19 nt, Homo sapiens
  misc_RNA (1)...(19): siRNA sense strand
cugaaacuauugaagaaca

SEQ ID NO: 1969102 - RNA, 19 nt, Homo sapiens
  misc_RNA (1)...(19): siRNA sense strand
gcauuaaugagaagaucuu

SEQ ID NO: 1969103 - RNA, 19 nt, Homo sapiens
  misc_RNA (1)...(19): siRNA sense strand
gauuaccugccaauuuauu

SEQ ID NO: 1969104 - RNA, 19 nt, Homo sapiens
  misc_RNA (1)...(19): siRNA sense strand
agaaucuuccucacugaua

SEQ ID NO: 1969105 - RNA, 19 nt, Homo sapiens
  misc_RNA (1)...(19): siRNA sense strand
gauacaugaacaacuuuga

SEQ ID NO: 1969106 - RNA, 19 nt, Homo sapiens
  misc_RNA (1)...(19): siRNA sense strand
guuagaacgaucagaaaug

SEQ ID NO: 1969107 - RNA, 19 nt, Homo sapiens
  misc_RNA (1)...(19): siRNA sense strand
gcucucagaaguacauaau

SEQ ID NO: 1969108 - RNA, 19 nt, Homo sapiens
  misc_RNA (1)...(19): siRNA sense strand
gaggaaacuagcugaagga

SEQ ID NO: 1969109 - RNA, 19 nt, Homo sapiens
  misc_RNA (1)...(19): siRNA sense strand
acaaagcagcugaauuuua

SEQ ID NO: 1969110 - RNA, 19 nt, Homo sapiens
  misc_RNA (1)...(19): siRNA sense strand
uggaggaauuugccuacuu

SEQ ID NO: 1969111 - RNA, 19 nt, Homo sapiens
  misc_RNA (1)...(19): siRNA sense strand
cugaagcuccugccuugua

SEQ ID NO: 1969112 - RNA, 19 nt, Homo sapiens
  misc_RNA (1)...(19): siRNA sense strand
gaacaaagauccaaucaga

SEQ ID NO: 1969113 - RNA, 19 nt, Homo sapiens
  misc_RNA (1)...(19): siRNA sense strand
gaagaugguuccaaguauu

SEQ ID NO: 1969114 - RNA, 19 nt, Homo sapiens
  misc_RNA (1)...(19): siRNA sense strand
ggauauaccuguguuuaaa

SEQ ID NO: 1969115 - RNA, 19 nt, Homo sapiens
  misc_RNA (1)...(19): siRNA sense strand
ccaaucagaugaacaauau

SEQ ID NO: 1969116 - RNA, 19 nt, Homo sapiens
  misc_RNA (1)...(19): siRNA sense strand
gcaacaauaugauguguca

SEQ ID NO: 1969117 - RNA, 19 nt, Homo sapiens
  misc_RNA (1)...(19): siRNA sense strand
gcagaaauccucagccauu

SEQ ID NO: 1969118 - RNA, 19 nt, Homo sapiens
  misc_RNA (1)...(19): siRNA sense strand
gaaauuggacuaccugaug

SEQ ID NO: 1969119 - RNA, 19 nt, Homo sapiens
  misc_RNA (1)...(19): siRNA sense strand
gauccacccuccuguacua

SEQ ID NO: 1969120 - RNA, 19 nt, Homo sapiens
  misc_RNA (1)...(19): siRNA sense strand
ggaagcagcucuccaagac

SEQ ID NO: 1969121 - RNA, 19 nt, Homo sapiens
  misc_RNA (1)...(19): siRNA sense strand
cugcaaaccuuaugucauu

SEQ ID NO: 1969122 - RNA, 19 nt, Homo sapiens
  misc_RNA (1)...(19): siRNA sense strand
ggaguuugcuagccagauu

SEQ ID NO: 1969123 - RNA, 19 nt, Homo sapiens
  misc_RNA (1)...(19): siRNA sense strand
uugaagagcuccagaaguu

SEQ ID NO: 1969124 - RNA, 19 nt, Homo sapiens
  misc_RNA (1)...(19): siRNA sense strand
gaacucaacaaccuucauu

SEQ ID NO: 1969125 - RNA, 19 nt, Homo sapiens
  misc_RNA (1)...(19): siRNA sense strand
caagaggaauggucugaug

SEQ ID NO: 1969126 - RNA, 19 nt, Homo sapiens
  misc_RNA (1)...(19): siRNA sense strand
uaacagcacagacuuuaaa

SEQ ID NO: 1969127 - RNA, 19 nt, Homo sapiens
  misc_RNA (1)...(19): siRNA sense strand
cuacauugauucugcauau

SEQ ID NO: 1969128 - RNA, 19 nt, Homo sapiens
  misc_RNA (1)...(19): siRNA sense strand
gaagagcuccagaaguuug

SEQ ID NO: 1969129 - RNA, 19 nt, Homo sapiens
  misc_RNA (1)...(19): siRNA sense strand
gcucagaguuuagugaaga

SEQ ID NO: 1969130 - RNA, 19 nt, Homo sapiens
  misc_RNA (1)...(19): siRNA sense strand
ggaagacgacaacuacaaa

SEQ ID NO: 1969131 - RNA, 19 nt, Homo sapiens
  misc_RNA (1)...(19): siRNA sense strand
caaaggcaauguuuacaag

SEQ ID NO: 1969132 - RNA, 19 nt, Homo sapiens
  misc_RNA (1)...(19): siRNA sense strand
acaaagugcucccaucuuc

SEQ ID NO: 1969133 - RNA, 19 nt, Homo sapiens
  misc_RNA (1)...(19): siRNA sense strand
gcacaagcauuuggaugau

SEQ ID NO: 1969134 - RNA, 19 nt, Homo sapiens
  misc_RNA (1)...(19): siRNA sense strand
aagcagcucuccaagacua

SEQ ID NO: 1969135 - RNA, 19 nt, Homo sapiens
  misc_RNA (1)...(19): siRNA sense strand
ggaguaagaaggagaaaca

SEQ ID NO: 1969136 - RNA, 19 nt, Homo sapiens
  misc_RNA (1)...(19): siRNA sense strand
ugaagaugguuccaaguau

SEQ ID NO: 1969137 - RNA, 19 nt, Homo sapiens
  misc_RNA (1)...(19): siRNA sense strand
agacuaccuuugagaaauu

SEQ ID NO: 1969138 - RNA, 19 nt, Homo sapiens
  misc_RNA (1)...(19): siRNA sense strand
ucaacaaccuucauucucu

SEQ ID NO: 1969139 - RNA, 19 nt, Homo sapiens
  misc_RNA (1)...(19): siRNA sense strand
ugucuucgaugucuugaaa

SEQ ID NO: 1969140 - RNA, 19 nt, Homo sapiens
  misc_RNA (1)...(19): siRNA sense strand
aauaugaugugucaguuga

SEQ ID NO: 1969141 - RNA, 19 nt, Homo sapiens
  misc_RNA (1)...(19): siRNA sense strand
gaaaauagccaagaaacuu

SEQ ID NO: 1969142 - RNA, 19 nt, Homo sapiens
  misc_RNA (1)...(19): siRNA sense strand
gacgacaacuacaaacugu

SEQ ID NO: 1969143 - RNA, 19 nt, Homo sapiens
  misc_RNA (1)...(19): siRNA sense strand
ggccagagcugcgacuaug

SEQ ID NO: 1969144 - RNA, 19 nt, Homo sapiens
  misc_RNA (1)...(19): siRNA sense strand
gauccaaucagaugaacaa

SEQ ID NO: 1969145 - RNA, 19 nt, Homo sapiens
  misc_RNA (1)...(19): siRNA sense strand
ggagaaagcaaggcaccua

SEQ ID NO: 1969146 - RNA, 19 nt, Homo sapiens
  misc_RNA (1)...(19): siRNA sense strand
gaacuagccagcuguggau

SEQ ID NO: 1969147 - RNA, 19 nt, Homo sapiens
  misc_RNA (1)...(19): siRNA sense strand
ucagacugguucccgauuu

SEQ ID NO: 1969148 - RNA, 19 nt, Homo sapiens
  misc_RNA (1)...(19): siRNA sense strand
ugaguguaguugagaguaa

SEQ ID NO: 1969149 - RNA, 19 nt, Homo sapiens
  misc_RNA (1)...(19): siRNA sense strand
acaaagauccaaucagaug

SEQ ID NO: 1969150 - RNA, 19 nt, Homo sapiens
  misc_RNA (1)...(19): siRNA sense strand
caaguuuccugcagcuaug

SEQ ID NO: 1969151 - RNA, 19 nt, Homo sapiens
  misc_RNA (1)...(19): siRNA sense strand
gguaucagcauuacaaagu

SEQ ID NO: 1969152 - RNA, 19 nt, Homo sapiens
  misc_RNA (1)...(19): siRNA sense strand
gaugaacaauauucuucga

SEQ ID NO: 1969153 - RNA, 19 nt, Homo sapiens
  misc_RNA (1)...(19): siRNA sense strand
caagacuaccuuugagaaa

SEQ ID NO: 1969154 - RNA, 19 nt, Homo sapiens
  misc_RNA (1)...(19): siRNA sense strand
caaccuucauucucucaug

SEQ ID NO: 1969155 - RNA, 19 nt, Homo sapiens
  misc_RNA (1)...(19): siRNA sense strand
gaguguaguugagaguaaa

SEQ ID NO: 1969156 - RNA, 19 nt, Homo sapiens
  misc_RNA (1)...(19): siRNA sense strand
ucugauggcuagcguguug

SEQ ID NO: 1969157 - RNA, 19 nt, Homo sapiens
  misc_RNA (1)...(19): siRNA sense strand
gaaauucuaacagcacaga

SEQ ID NO: 1969158 - RNA, 19 nt, Homo sapiens
  misc_RNA (1)...(19): siRNA sense strand
ucucaugucugugguauca

SEQ ID NO: 1969159 - RNA, 19 nt, Homo sapiens
  misc_RNA (1)...(19): siRNA sense strand
uggacuaccugaugucgaa

SEQ ID NO: 1969160 - RNA, 19 nt, Homo sapiens
  misc_RNA (1)...(19): siRNA sense strand
ggcacaagcauuuggauga

SEQ ID NO: 1969161 - RNA, 19 nt, Homo sapiens
  misc_RNA (1)...(19): siRNA sense strand
aggcaauguuuacaaguuu

SEQ ID NO: 1969162 - RNA, 19 nt, Homo sapiens
  misc_RNA (1)...(19): siRNA sense strand
gaaagcaaggcaccuacug

SEQ ID NO: 1969163 - RNA, 19 nt, Homo sapiens
  misc_RNA (1)...(19): siRNA sense strand
ugacaaaggcaauguuuac

SEQ ID NO: 1969164 - RNA, 19 nt, Homo sapiens
  misc_RNA (1)...(19): siRNA sense strand
uaauggauauaccuguguu

SEQ ID NO: 1969165 - RNA, 19 nt, Homo sapiens
  misc_RNA (1)...(19): siRNA sense strand
gagcuaugaugccguuguc

SEQ ID NO: 1969166 - RNA, 19 nt, Homo sapiens
  misc_RNA (1)...(19): siRNA sense strand
gcugaacaacccugacaaa

SEQ ID NO: 1969167 - RNA, 19 nt, Homo sapiens
  misc_RNA (1)...(19): siRNA sense strand
uacaaacugucgcucagaa

SEQ ID NO: 1969168 - RNA, 19 nt, Homo sapiens
  misc_RNA (1)...(19): siRNA sense strand
gccuuuacccggagguuua

SEQ ID NO: 1969169 - RNA, 19 nt, Homo sapiens
  misc_RNA (1)...(19): siRNA sense strand
ucuaacagcacagacuuua

SEQ ID NO: 1969170 - RNA, 19 nt, Homo sapiens
  misc_RNA (1)...(19): siRNA sense strand
aaggcaauguuuacaaguu

SEQ ID NO: 1969171 - RNA, 19 nt, Homo sapiens
  misc_RNA (1)...(19): siRNA sense strand
gagcucagaguuuagugaa

SEQ ID NO: 1969172 - RNA, 19 nt, Homo sapiens
  misc_RNA (1)...(19): siRNA sense strand
gugcagaaguaccugaagu

SEQ ID NO: 1969173 - RNA, 19 nt, Homo sapiens
  misc_RNA (1)...(19): siRNA sense strand
caaagauccaaucagauga

SEQ ID NO: 1969174 - RNA, 19 nt, Homo sapiens
  misc_RNA (1)...(19): siRNA sense strand
gaaguccguacgcuacauu

SEQ ID NO: 1969175 - RNA, 19 nt, Homo sapiens
  misc_RNA (1)...(19): siRNA sense strand
guaucagcauuacaaagug

SEQ ID NO: 1969176 - RNA, 19 nt, Homo sapiens
  misc_RNA (1)...(19): siRNA sense strand
ccaggaagcagcucuccaa

SEQ ID NO: 1969177 - RNA, 19 nt, Homo sapiens
  misc_RNA (1)...(19): siRNA sense strand
cagaugaacaauauucuuc

SEQ ID NO: 1969178 - RNA, 19 nt, Homo sapiens
  misc_RNA (1)...(19): siRNA sense strand
ccaaguauucccuaucuag

SEQ ID NO: 1969179 - RNA, 19 nt, Homo sapiens
  misc_RNA (1)...(19): siRNA sense strand
cugaagaugguuccaagua

SEQ ID NO: 1969180 - RNA, 19 nt, Homo sapiens
  misc_RNA (1)...(19): siRNA sense strand
agacaagacuaccuuugag

SEQ ID NO: 1969181 - RNA, 19 nt, Homo sapiens
  misc_RNA (1)...(19): siRNA sense strand
gaaaagacaagacuaccuu

SEQ ID NO: 1969182 - RNA, 19 nt, Homo sapiens
  misc_RNA (1)...(19): siRNA sense strand
aaauuggacuaccugaugu

SEQ ID NO: 1969183 - RNA, 19 nt, Homo sapiens
  misc_RNA (1)...(19): siRNA sense strand
caacaggccucagguaccu

SEQ ID NO: 1969184 - RNA, 19 nt, Homo sapiens
  misc_RNA (1)...(19): siRNA sense strand
aagacaagacuaccuuuga

SEQ ID NO: 1969185 - RNA, 19 nt, Homo sapiens
  misc_RNA (1)...(19): siRNA sense strand
gacaagacuaccuuugaga

SEQ ID NO: 1969186 - RNA, 19 nt, Homo sapiens
  misc_RNA (1)...(19): siRNA sense strand
aagacuaccuuugagaaau

SEQ ID NO: 1969187 - RNA, 19 nt, Homo sapiens
  misc_RNA (1)...(19): siRNA sense strand
acaauaugaugugucaguu

SEQ ID NO: 1969188 - RNA, 19 nt, Homo sapiens
  misc_RNA (1)...(19): siRNA sense strand
auaccuguguuuaaagcua

SEQ ID NO: 1969189 - RNA, 19 nt, Homo sapiens
  misc_RNA (1)...(19): siRNA sense strand
uucgaugucuugaaaguga

SEQ ID NO: 1969190 - RNA, 19 nt, Homo sapiens
  misc_RNA (1)...(19): siRNA sense strand
cauggaaaaugaacaaaga

SEQ ID NO: 1969191 - RNA, 19 nt, Homo sapiens
  misc_RNA (1)...(19): siRNA sense strand
ccuuaugucauuugaguaa

SEQ ID NO: 1969192 - RNA, 19 nt, Homo sapiens
  misc_RNA (1)...(19): siRNA sense strand
gcuagccagauuacauuaa

SEQ ID NO: 1969193 - RNA, 19 nt, Homo sapiens
  misc_RNA (1)...(19): siRNA sense strand
uaaauccacaccuggcaaa

SEQ ID NO: 1969194 - RNA, 19 nt, Homo sapiens
  misc_RNA (1)...(19): siRNA sense strand
uggauauaccuguguuuaa

SEQ ID NO: 1969195 - RNA, 19 nt, Homo sapiens
  misc_RNA (1)...(19): siRNA sense strand
gaguuugcuagccagauua

SEQ ID NO: 1969196 - RNA, 19 nt, Homo sapiens
  misc_RNA (1)...(19): siRNA sense strand
uaccugaugucgaaagaag

SEQ ID NO: 1969197 - RNA, 19 nt, Homo sapiens
  misc_RNA (1)...(19): siRNA sense strand
aaccuuaugucauuugagu

SEQ ID NO: 1969198 - RNA, 19 nt, Homo sapiens
  misc_RNA (1)...(19): siRNA sense strand
cagacugguucccgauuuc

SEQ ID NO: 1969199 - RNA, 19 nt, Homo sapiens
  misc_RNA (1)...(19): siRNA sense strand
acaaaggcaauguuuacaa

SEQ ID NO: 1969200 - RNA, 19 nt, Homo sapiens
  misc_RNA (1)...(19): siRNA sense strand
uggugcagcugcccgauga

SEQ ID NO: 1969201 - RNA, 19 nt, Homo sapiens
  misc_RNA (1)...(19): siRNA sense strand
ggacucucccuaggcagua

SEQ ID NO: 1969202 - RNA, 19 nt, Homo sapiens
  misc_RNA (1)...(19): siRNA sense strand
cgacauucccaucggagaa

SEQ ID NO: 1969203 - RNA, 19 nt, Homo sapiens
  misc_RNA (1)...(19): siRNA sense strand
gaaggagaaacacagucuu

SEQ ID NO: 1969204 - RNA, 19 nt, Homo sapiens
  misc_RNA (1)...(19): siRNA sense strand
aaagauccaaucagaugaa

SEQ ID NO: 1969205 - RNA, 19 nt, Homo sapiens
  misc_RNA (1)...(19): siRNA sense strand
acaagacuaccuuugagaa

SEQ ID NO: 1969206 - RNA, 19 nt, Homo sapiens
  misc_RNA (1)...(19): siRNA sense strand
ggcaauguuuacaaguuuc

SEQ ID NO: 1969207 - RNA, 19 nt, Homo sapiens
  misc_RNA (1)...(19): siRNA sense strand
ugaacaacccugacaaagg

SEQ ID NO: 1969208 - RNA, 19 nt, Homo sapiens
  misc_RNA (1)...(19): siRNA sense strand
caauaugaugugucaguug

SEQ ID NO: 1969209 - RNA, 19 nt, Homo sapiens
  misc_RNA (1)...(19): siRNA sense strand
caaacugucgcucagaauc

SEQ ID NO: 1969210 - RNA, 19 nt, Homo sapiens
  misc_RNA (1)...(19): siRNA sense strand
gcuaugaugccguugucuu

SEQ ID NO: 1969211 - RNA, 19 nt, Homo sapiens
  misc_RNA (1)...(19): siRNA sense strand
guacugggucauacucuca

SEQ ID NO: 1969212 - RNA, 19 nt, Homo sapiens
  misc_RNA (1)...(19): siRNA sense strand
cauggaagauguagaagua

SEQ ID NO: 1969213 - RNA, 19 nt, Homo sapiens
  misc_RNA (1)...(19): siRNA sense strand
ggaaggaagugagucuaua

SEQ ID NO: 1969214 - RNA, 19 nt, Homo sapiens
  misc_RNA (1)...(19): siRNA sense strand
gaaugaaacuggcaaggau

SEQ ID NO: 1969215 - RNA, 19 nt, Homo sapiens
  misc_RNA (1)...(19): siRNA sense strand
ggauaaagaucugaccauu

SEQ ID NO: 1969216 - RNA, 19 nt, Homo sapiens
  misc_RNA (1)...(19): siRNA sense strand
gaaggaagugagucuauaa

SEQ ID NO: 1969217 - RNA, 19 nt, Homo sapiens
  misc_RNA (1)...(19): siRNA sense strand
ccauacaccuggagaauug

SEQ ID NO: 1969218 - RNA, 19 nt, Homo sapiens
  misc_RNA (1)...(19): siRNA sense strand
ggagaaugcuauugaaugg

SEQ ID NO: 1969219 - RNA, 19 nt, Homo sapiens
  misc_RNA (1)...(19): siRNA sense strand
caaacagugugaaggaauu

SEQ ID NO: 1969220 - RNA, 19 nt, Homo sapiens
  misc_RNA (1)...(19): siRNA sense strand
ggaagugagucuauaagca

SEQ ID NO: 1969221 - RNA, 19 nt, Homo sapiens
  misc_RNA (1)...(19): siRNA sense strand
aaacaaaggucaagaaucc

SEQ ID NO: 1969222 - RNA, 19 nt, Homo sapiens
  misc_RNA (1)...(19): siRNA sense strand
gcuauugaauggaguguga

SEQ ID NO: 1969223 - RNA, 19 nt, Homo sapiens
  misc_RNA (1)...(19): siRNA sense strand
ggaccuuccuccuccaauu

SEQ ID NO: 1969224 - RNA, 19 nt, Homo sapiens
  misc_RNA (1)...(19): siRNA sense strand
gaagugagucuauaagcaa

SEQ ID NO: 1969225 - RNA, 19 nt, Homo sapiens
  misc_RNA (1)...(19): siRNA sense strand
ggucaagaauccugaagau

SEQ ID NO: 1969226 - RNA, 19 nt, Homo sapiens
  misc_RNA (1)...(19): siRNA sense strand
caugauugauguuguagaa

SEQ ID NO: 1969227 - RNA, 19 nt, Homo sapiens
  misc_RNA (1)...(19): siRNA sense strand
gcucuuggcugguguugau

SEQ ID NO: 1969228 - RNA, 19 nt, Homo sapiens
  misc_RNA (1)...(19): siRNA sense strand
gaagucauggugaaacaaa

SEQ ID NO: 1969229 - RNA, 19 nt, Homo sapiens
  misc_RNA (1)...(19): siRNA sense strand
auaaagaucugaccauugg

SEQ ID NO: 1969230 - RNA, 19 nt, Homo sapiens
  misc_RNA (1)...(19): siRNA sense strand
caagaaagaccauccauac

SEQ ID NO: 1969231 - RNA, 19 nt, Homo sapiens
  misc_RNA (1)...(19): siRNA sense strand
gugcaugauugauguugua

SEQ ID NO: 1969232 - RNA, 19 nt, Homo sapiens
  misc_RNA (1)...(19): siRNA sense strand
uccaaucucuuucuuaguu

SEQ ID NO: 1969233 - RNA, 19 nt, Homo sapiens
  misc_RNA (1)...(19): siRNA sense strand
gauaaagaucugaccauug

SEQ ID NO: 1969234 - RNA, 19 nt, Homo sapiens
  misc_RNA (1)...(19): siRNA sense strand
gaccuuccuccuccaauua

SEQ ID NO: 1969235 - RNA, 19 nt, Homo sapiens
  misc_RNA (1)...(19): siRNA sense strand
cggcagcgauuauuaguag

SEQ ID NO: 1969236 - RNA, 19 nt, Homo sapiens
  misc_RNA (1)...(19): siRNA sense strand
guugauagauuggauaaag

SEQ ID NO: 1969237 - RNA, 19 nt, Homo sapiens
  misc_RNA (1)...(19): siRNA sense strand
ccaagaaagaccauccaua

SEQ ID NO: 1969238 - RNA, 19 nt, Homo sapiens
  misc_RNA (1)...(19): siRNA sense strand
agaagaagaugaggaagga

SEQ ID NO: 1969239 - RNA, 19 nt, Homo sapiens
  misc_RNA (1)...(19): siRNA sense strand
ccagaaggcucaaaaucua

SEQ ID NO: 1969240 - RNA, 19 nt, Homo sapiens
  misc_RNA (1)...(19): siRNA sense strand
cuuaauagcaugcagaauu

SEQ ID NO: 1969241 - RNA, 19 nt, Homo sapiens
  misc_RNA (1)...(19): siRNA sense strand
caagaauccugaagaucug

SEQ ID NO: 1969242 - RNA, 19 nt, Homo sapiens
  misc_RNA (1)...(19): siRNA sense strand
gaaacaaaggucaagaauc

SEQ ID NO: 1969243 - RNA, 19 nt, Homo sapiens
  misc_RNA (1)...(19): siRNA sense strand
aaucauagaggaagaagaa

SEQ ID NO: 1969244 - RNA, 19 nt, Homo sapiens
  misc_RNA (1)...(19): siRNA sense strand
uauccaaucucuuucuuag

SEQ ID NO: 1969245 - RNA, 19 nt, Homo sapiens
  misc_RNA (1)...(19): siRNA sense strand
gauuguagcuuuggaucug

SEQ ID NO: 1969246 - RNA, 19 nt, Homo sapiens
  misc_RNA (1)...(19): siRNA sense strand
cugaagcuguugccacuuu

SEQ ID NO: 1969247 - RNA, 19 nt, Homo sapiens
  misc_RNA (1)...(19): siRNA sense strand
ggaagaagaagaagaugag

SEQ ID NO: 1969248 - RNA, 19 nt, Homo sapiens
  misc_RNA (1)...(19): siRNA sense strand
gcgaagucauggugaaaca

SEQ ID NO: 1969249 - RNA, 19 nt, Homo sapiens
  misc_RNA (1)...(19): siRNA sense strand
ggaaggaaucauagaggaa

SEQ ID NO: 1969250 - RNA, 19 nt, Homo sapiens
  misc_RNA (1)...(19): siRNA sense strand
gcuauggaugcacuuaaua

SEQ ID NO: 1969251 - RNA, 19 nt, Homo sapiens
  misc_RNA (1)...(19): siRNA sense strand
uauaguggaaggaaucaua

SEQ ID NO: 1969252 - RNA, 19 nt, Homo sapiens
  misc_RNA (1)...(19): siRNA sense strand
ggaauuacaaguccagaag

SEQ ID NO: 1969253 - RNA, 19 nt, Homo sapiens
  misc_RNA (1)...(19): siRNA sense strand
agaguucaguguaggauug

SEQ ID NO: 1969254 - RNA, 19 nt, Homo sapiens
  misc_RNA (1)...(19): siRNA sense strand
ucaagaauccugaagaucu

SEQ ID NO: 1969255 - RNA, 19 nt, Homo sapiens
  misc_RNA (1)...(19): siRNA sense strand
ggaggucauucugcccuuu

SEQ ID NO: 1969256 - RNA, 19 nt, Homo sapiens
  misc_RNA (1)...(19): siRNA sense strand
cgaaugggcccuggaagaa

SEQ ID NO: 1969257 - RNA, 19 nt, Homo sapiens
  misc_RNA (1)...(19): siRNA sense strand
caaaagacguuggcaaugu

SEQ ID NO: 1969258 - RNA, 19 nt, Homo sapiens
  misc_RNA (1)...(19): siRNA sense strand
gcgaaugggcccuggaaga

SEQ ID NO: 1969259 - RNA, 19 nt, Homo sapiens
  misc_RNA (1)...(19): siRNA sense strand
gaaugggcccuggaagaaa

SEQ ID NO: 1969260 - RNA, 19 nt, Homo sapiens
  misc_RNA (1)...(19): siRNA sense strand
aaacuggcaaggauacuuu

SEQ ID NO: 1969261 - RNA, 19 nt, Homo sapiens
  misc_RNA (1)...(19): siRNA sense strand
guugucccauuccuaaauu

SEQ ID NO: 1969262 - RNA, 19 nt, Homo sapiens
  misc_RNA (1)...(19): siRNA sense strand
agaagaagaagaugaggaa

SEQ ID NO: 1969263 - RNA, 19 nt, Homo sapiens
  misc_RNA (1)...(19): siRNA sense strand
cauagaggaagaagaagaa

SEQ ID NO: 1969264 - RNA, 19 nt, Homo sapiens
  misc_RNA (1)...(19): siRNA sense strand
uggcugguguugauagauu

SEQ ID NO: 1969265 - RNA, 19 nt, Homo sapiens
  misc_RNA (1)...(19): siRNA sense strand
aagaugacauggagaccaa

SEQ ID NO: 1969266 - RNA, 19 nt, Homo sapiens
  misc_RNA (1)...(19): siRNA sense strand
gaaacuggcaaggauacuu

SEQ ID NO: 1969267 - RNA, 19 nt, Homo sapiens
  misc_RNA (1)...(19): siRNA sense strand
ugacauggagaccaagaaa

SEQ ID NO: 1969268 - RNA, 19 nt, Homo sapiens
  misc_RNA (1)...(19): siRNA sense strand
guagaaguagagaaugaaa

SEQ ID NO: 1969269 - RNA, 19 nt, Homo sapiens
  misc_RNA (1)...(19): siRNA sense strand
aguguaggauuguagcuuu

SEQ ID NO: 1969270 - RNA, 19 nt, Homo sapiens
  misc_RNA (1)...(19): siRNA sense strand
uggaagauguagaaguaga

SEQ ID NO: 1969271 - RNA, 19 nt, Homo sapiens
  misc_RNA (1)...(19): siRNA sense strand
ccaaucucuuucuuaguug

SEQ ID NO: 1969272 - RNA, 19 nt, Homo sapiens
  misc_RNA (1)...(19): siRNA sense strand
cagaaacaauggcaaaaga

SEQ ID NO: 1969273 - RNA, 19 nt, Homo sapiens
  misc_RNA (1)...(19): siRNA sense strand
ugugaagaguggccagauu

SEQ ID NO: 1969274 - RNA, 19 nt, Homo sapiens
  misc_RNA (1)...(19): siRNA sense strand
aggcuuauccaaucucuuu

SEQ ID NO: 1969275 - RNA, 19 nt, Homo sapiens
  misc_RNA (1)...(19): siRNA sense strand
uuucuuaguugucccauuc

SEQ ID NO: 1969276 - RNA, 19 nt, Homo sapiens
  misc_RNA (1)...(19): siRNA sense strand
gugaaacaaaggucaagaa

SEQ ID NO: 1969277 - RNA, 19 nt, Homo sapiens
  misc_RNA (1)...(19): siRNA sense strand
acauggagaccaagaaaga

SEQ ID NO: 1969278 - RNA, 19 nt, Homo sapiens
  misc_RNA (1)...(19): siRNA sense strand
aaacagugugaaggaauua

SEQ ID NO: 1969279 - RNA, 19 nt, Homo sapiens
  misc_RNA (1)...(19): siRNA sense strand
gaagauguagaaguagaga

SEQ ID NO: 1969280 - RNA, 19 nt, Homo sapiens
  misc_RNA (1)...(19): siRNA sense strand
ugaaacaaaggucaagaau

SEQ ID NO: 1969281 - RNA, 19 nt, Homo sapiens
  misc_RNA (1)...(19): siRNA sense strand
uuaguagaguucaguguag

SEQ ID NO: 1969282 - RNA, 19 nt, Homo sapiens
  misc_RNA (1)...(19): siRNA sense strand
ggucugugcaugauugaug

SEQ ID NO: 1969283 - RNA, 19 nt, Homo sapiens
  misc_RNA (1)...(19): siRNA sense strand
gcgauuauuaguagaguuc

SEQ ID NO: 1969284 - RNA, 19 nt, Homo sapiens
  misc_RNA (1)...(19): siRNA sense strand
ggagucugcccgugucuca

SEQ ID NO: 1969285 - RNA, 19 nt, Homo sapiens
  misc_RNA (1)...(19): siRNA sense strand
guccauggaagauguagaa

SEQ ID NO: 1969286 - RNA, 19 nt, Homo sapiens
  misc_RNA (1)...(19): siRNA sense strand
gugaagaguggccagauuc

SEQ ID NO: 1969287 - RNA, 19 nt, Homo sapiens
  misc_RNA (1)...(19): siRNA sense strand
gucaaacagugugaaggaa

SEQ ID NO: 1969288 - RNA, 19 nt, Homo sapiens
  misc_RNA (1)...(19): siRNA sense strand
ucuggagaaugcuauugaa

SEQ ID NO: 1969289 - RNA, 19 nt, Homo sapiens
  misc_RNA (1)...(19): siRNA sense strand
ggaugccccugacaaggua

SEQ ID NO: 1969290 - RNA, 19 nt, Homo sapiens
  misc_RNA (1)...(19): siRNA sense strand
gcauggaggaggucauucu

SEQ ID NO: 1969291 - RNA, 19 nt, Homo sapiens
  misc_RNA (1)...(19): siRNA sense strand
gaagaugaggaaggaagug

SEQ ID NO: 1969292 - RNA, 19 nt, Homo sapiens
  misc_RNA (1)...(19): siRNA sense strand
agaggaagaagaagaagau

SEQ ID NO: 1969293 - RNA, 19 nt, Homo sapiens
  misc_RNA (1)...(19): siRNA sense strand
ugaauggagugugaagagu

SEQ ID NO: 1969294 - RNA, 19 nt, Homo sapiens
  misc_RNA (1)...(19): siRNA sense strand
uggagaaugcuauugaaug

SEQ ID NO: 1969295 - RNA, 19 nt, Homo sapiens
  misc_RNA (1)...(19): siRNA sense strand
guaggauuguagcuuugga

SEQ ID NO: 1969296 - RNA, 19 nt, Homo sapiens
  misc_RNA (1)...(19): siRNA sense strand
cagaacccaucgguggauu

SEQ ID NO: 1969297 - RNA, 19 nt, Homo sapiens
  misc_RNA (1)...(19): siRNA sense strand
auguagaaguagagaauga

SEQ ID NO: 1969298 - RNA, 19 nt, Homo sapiens
  misc_RNA (1)...(19): siRNA sense strand
ucauagaggaagaagaaga

SEQ ID NO: 1969299 - RNA, 19 nt, Homo sapiens
  misc_RNA (1)...(19): siRNA sense strand
gaagaguggccagauucga

SEQ ID NO: 1969300 - RNA, 19 nt, Homo sapiens
  misc_RNA (1)...(19): siRNA sense strand
gauugauguuguagaaggu

SEQ ID NO: 1969301 - RNA, 19 nt, Homo sapiens
  misc_RNA (1)...(19): siRNA sense strand
ucacggcagcgauuauuag

SEQ ID NO: 1969302 - RNA, 19 nt, Homo sapiens
  misc_RNA (1)...(19): siRNA sense strand
caaucucuuucuuaguugu

SEQ ID NO: 1969303 - RNA, 19 nt, Homo sapiens
  misc_RNA (1)...(19): siRNA sense strand
ucaaacagugugaaggaau

SEQ ID NO: 1969304 - RNA, 19 nt, Homo sapiens
  misc_RNA (1)...(19): siRNA sense strand
guguaggauuguagcuuug

SEQ ID NO: 1969305 - RNA, 19 nt, Homo sapiens
  misc_RNA (1)...(19): siRNA sense strand
cagcuauggaugcacuuaa

SEQ ID NO: 1969306 - RNA, 19 nt, Homo sapiens
  misc_RNA (1)...(19): siRNA sense strand
gguguugauagauuggaua

SEQ ID NO: 1969307 - RNA, 19 nt, Homo sapiens
  misc_RNA (1)...(19): siRNA sense strand
ggagaauugaacuggcaaa

SEQ ID NO: 1969308 - RNA, 19 nt, Homo sapiens
  misc_RNA (1)...(19): siRNA sense strand
gaugacauggagaccaaga

SEQ ID NO: 1969309 - RNA, 19 nt, Homo sapiens
  misc_RNA (1)...(19): siRNA sense strand
gaggaaggaagugagucua

SEQ ID NO: 1969310 - RNA, 19 nt, Homo sapiens
  misc_RNA (1)...(19): siRNA sense strand
aagaguggccagauucgaa

SEQ ID NO: 1969311 - RNA, 19 nt, Homo sapiens
  misc_RNA (1)...(19): siRNA sense strand
gcagaacccaucgguggau

SEQ ID NO: 1969312 - RNA, 19 nt, Homo sapiens
  misc_RNA (1)...(19): siRNA sense strand
gaagaggagacgacuaaua

SEQ ID NO: 1969313 - RNA, 19 nt, Homo sapiens
  misc_RNA (1)...(19): siRNA sense strand
gaagauguuucacuguuug

SEQ ID NO: 1969314 - RNA, 19 nt, Homo sapiens
  misc_RNA (1)...(19): siRNA sense strand
gcaaucaucgucuaucuuc

SEQ ID NO: 1969315 - RNA, 19 nt, Homo sapiens
  misc_RNA (1)...(19): siRNA sense strand
ucacauugaugaagaugga

SEQ ID NO: 1969316 - RNA, 19 nt, Homo sapiens
  misc_RNA (1)...(19): siRNA sense strand
gguguaaggugcgcaagaa

SEQ ID NO: 1969317 - RNA, 19 nt, Homo sapiens
  misc_RNA (1)...(19): siRNA sense strand
aaagagccauuggguguuu

SEQ ID NO: 1969318 - RNA, 19 nt, Homo sapiens
  misc_RNA (1)...(19): siRNA sense strand
gaaugucacagguagacua

SEQ ID NO: 1969319 - RNA, 19 nt, Homo sapiens
  misc_RNA (1)...(19): siRNA sense strand
gcagcuuuauuaccuguau

SEQ ID NO: 1969320 - RNA, 19 nt, Homo sapiens
  misc_RNA (1)...(19): siRNA sense strand
guaaugaugacacugaaga

SEQ ID NO: 1969321 - RNA, 19 nt, Homo sapiens
  misc_RNA (1)...(19): siRNA sense strand
ggugauauuugccuuuagu

SEQ ID NO: 1969322 - RNA, 19 nt, Homo sapiens
  misc_RNA (1)...(19): siRNA sense strand
cggaagaggagacgacuaa

SEQ ID NO: 1969323 - RNA, 19 nt, Homo sapiens
  misc_RNA (1)...(19): siRNA sense strand
ugaugacacugaagauguu

SEQ ID NO: 1969324 - RNA, 19 nt, Homo sapiens
  misc_RNA (1)...(19): siRNA sense strand
ugucacagguagacuaaug

SEQ ID NO: 1969325 - RNA, 19 nt, Homo sapiens
  misc_RNA (1)...(19): siRNA sense strand
aaucagacauccaguagca

SEQ ID NO: 1969326 - RNA, 19 nt, Homo sapiens
  misc_RNA (1)...(19): siRNA sense strand
uaucauggguguggugcua

SEQ ID NO: 1969327 - RNA, 19 nt, Homo sapiens
  misc_RNA (1)...(19): siRNA sense strand
caucgucuaucuucucugu

SEQ ID NO: 1969328 - RNA, 19 nt, Homo sapiens
  misc_RNA (1)...(19): siRNA sense strand
gccauuggguguuugaauc

SEQ ID NO: 1969329 - RNA, 19 nt, Homo sapiens
  misc_RNA (1)...(19): siRNA sense strand
gcagcaggauaguaaugau

SEQ ID NO: 1969330 - RNA, 19 nt, Homo sapiens
  misc_RNA (1)...(19): siRNA sense strand
cgacuaauagaccaagaaa

SEQ ID NO: 1969331 - RNA, 19 nt, Homo sapiens
  misc_RNA (1)...(19): siRNA sense strand
ugggugauauuugccuuua

SEQ ID NO: 1969332 - RNA, 19 nt, Homo sapiens
  misc_RNA (1)...(19): siRNA sense strand
cucagcagcagcuuuauua

SEQ ID NO: 1969333 - RNA, 19 nt, Homo sapiens
  misc_RNA (1)...(19): siRNA sense strand
ucagugcaaucaucgucua

SEQ ID NO: 1969334 - RNA, 19 nt, Homo sapiens
  misc_RNA (1)...(19): siRNA sense strand
gaaagagccauuggguguu

SEQ ID NO: 1969335 - RNA, 19 nt, Homo sapiens
  misc_RNA (1)...(19): siRNA sense strand
gaggcugaaucaagaaucu

SEQ ID NO: 1969336 - RNA, 19 nt, Homo sapiens
  misc_RNA (1)...(19): siRNA sense strand
aagaggagacgacuaauag

SEQ ID NO: 1969337 - RNA, 19 nt, Homo sapiens
  misc_RNA (1)...(19): siRNA sense strand
guacugugggugauauuug

SEQ ID NO: 1969338 - RNA, 19 nt, Homo sapiens
  misc_RNA (1)...(19): siRNA sense strand
gcucagcagcagcuuuauu

SEQ ID NO: 1969339 - RNA, 19 nt, Homo sapiens
  misc_RNA (1)...(19): siRNA sense strand
uuagugcacucuucuccuu

SEQ ID NO: 1969340 - RNA, 19 nt, Homo sapiens
  misc_RNA (1)...(19): siRNA sense strand
ccaguacugugggugauau

SEQ ID NO: 1969341 - RNA, 19 nt, Homo sapiens
  misc_RNA (1)...(19): siRNA sense strand
ggauaguaaugaugacacu

SEQ ID NO: 1969342 - RNA, 19 nt, Homo sapiens
  misc_RNA (1)...(19): siRNA sense strand
gugcaaucaucgucuaucu

SEQ ID NO: 1969343 - RNA, 19 nt, Homo sapiens
  misc_RNA (1)...(19): siRNA sense strand
gaagaaugucacagguaga

SEQ ID NO: 1969344 - RNA, 19 nt, Homo sapiens
  misc_RNA (1)...(19): siRNA sense strand
ccuguauggugacaauuau

SEQ ID NO: 1969345 - RNA, 19 nt, Homo sapiens
  misc_RNA (1)...(19): siRNA sense strand
ucgucuaucuucucuguga

SEQ ID NO: 1969346 - RNA, 19 nt, Homo sapiens
  misc_RNA (1)...(19): siRNA sense strand
guuguugucgugugacuuu

SEQ ID NO: 1969347 - RNA, 19 nt, Homo sapiens
  misc_RNA (1)...(19): siRNA sense strand
cuacguugguggaaucaca

SEQ ID NO: 1969348 - RNA, 19 nt, Homo sapiens
  misc_RNA (1)...(19): siRNA sense strand
caaaaucagacauccagua

SEQ ID NO: 1969349 - RNA, 19 nt, Homo sapiens
  misc_RNA (1)...(19): siRNA sense strand
gacauccaguagcaucguu

SEQ ID NO: 1969350 - RNA, 19 nt, Homo sapiens
  misc_RNA (1)...(19): siRNA sense strand
uuaccuguauggugacaau

SEQ ID NO: 1969351 - RNA, 19 nt, Homo sapiens
  misc_RNA (1)...(19): siRNA sense strand
ggccuacguugguggaauc

SEQ ID NO: 1969352 - RNA, 19 nt, Homo sapiens
  misc_RNA (1)...(19): siRNA sense strand
uaguaaugaugacacugaa

SEQ ID NO: 1969353 - RNA, 19 nt, Homo sapiens
  misc_RNA (1)...(19): siRNA sense strand
gauguuucacuguuugaug

SEQ ID NO: 1969354 - RNA, 19 nt, Homo sapiens
  misc_RNA (1)...(19): siRNA sense strand
cuuauugccuguccaguac

SEQ ID NO: 1969355 - RNA, 19 nt, Homo sapiens
  misc_RNA (1)...(19): siRNA sense strand
gaggagacgacuaauagac

SEQ ID NO: 1969356 - RNA, 19 nt, Homo sapiens
  misc_RNA (1)...(19): siRNA sense strand
guugguggaaucacauuga

SEQ ID NO: 1969357 - RNA, 19 nt, Homo sapiens
  misc_RNA (1)...(19): siRNA sense strand
ucgagucagugcaaucauc

SEQ ID NO: 1969358 - RNA, 19 nt, Homo sapiens
  misc_RNA (1)...(19): siRNA sense strand
gacgacuaauagaccaaga

SEQ ID NO: 1969359 - RNA, 19 nt, Homo sapiens
  misc_RNA (1)...(19): siRNA sense strand
gguuggcggugguuaucau

SEQ ID NO: 1969360 - RNA, 19 nt, Homo sapiens
  misc_RNA (1)...(19): siRNA sense strand
cauuggguguuugaaucua

SEQ ID NO: 1969361 - RNA, 19 nt, Homo sapiens
  misc_RNA (1)...(19): siRNA sense strand
auaguaaugaugacacuga

SEQ ID NO: 1969362 - RNA, 19 nt, Homo sapiens
  misc_RNA (1)...(19): siRNA sense strand
cacuuauucuuucgaguca

SEQ ID NO: 1969363 - RNA, 19 nt, Homo sapiens
  misc_RNA (1)...(19): siRNA sense strand
aagaaaagccaaaaucaga

SEQ ID NO: 1969364 - RNA, 19 nt, Homo sapiens
  misc_RNA (1)...(19): siRNA sense strand
ccaagaaaagccaaaauca

SEQ ID NO: 1969365 - RNA, 19 nt, Homo sapiens
  misc_RNA (1)...(19): siRNA sense strand
gaugacacugaagauguuu

SEQ ID NO: 1969366 - RNA, 19 nt, Homo sapiens
  misc_RNA (1)...(19): siRNA sense strand
guguuugaaucuagaaagg

SEQ ID NO: 1969367 - RNA, 19 nt, Homo sapiens
  misc_RNA (1)...(19): siRNA sense strand
cagcaggauaguaaugaug

SEQ ID NO: 1969368 - RNA, 19 nt, Homo sapiens
  misc_RNA (1)...(19): siRNA sense strand
gcaggauaguaaugaugac

SEQ ID NO: 1969369 - RNA, 19 nt, Homo sapiens
  misc_RNA (1)...(19): siRNA sense strand
caauuaucuuguuguuguc

SEQ ID NO: 1969370 - RNA, 19 nt, Homo sapiens
  misc_RNA (1)...(19): siRNA sense strand
uauggugacaauuaucuug

SEQ ID NO: 1969371 - RNA, 19 nt, Homo sapiens
  misc_RNA (1)...(19): siRNA sense strand
ggaaggagcugcuguguuu

SEQ ID NO: 1969372 - RNA, 19 nt, Homo sapiens
  misc_RNA (1)...(19): siRNA sense strand
gaaacuaucucaugaagaa

SEQ ID NO: 1969373 - RNA, 19 nt, Homo sapiens
  misc_RNA (1)...(19): siRNA sense strand
ggccagaucucaucauaua

SEQ ID NO: 1969374 - RNA, 19 nt, Homo sapiens
  misc_RNA (1)...(19): siRNA sense strand
ccacggauauguugaagua

SEQ ID NO: 1969375 - RNA, 19 nt, Homo sapiens
  misc_RNA (1)...(19): siRNA sense strand
ggaaucaccugaaugagaa

SEQ ID NO: 1969376 - RNA, 19 nt, Homo sapiens
  misc_RNA (1)...(19): siRNA sense strand
gaaaaucggugaacucuuu

SEQ ID NO: 1969377 - RNA, 19 nt, Homo sapiens
  misc_RNA (1)...(19): siRNA sense strand
ggauuuagaugaugccauu

SEQ ID NO: 1969378 - RNA, 19 nt, Homo sapiens
  misc_RNA (1)...(19): siRNA sense strand
gaaguuugcuuucuccaau

SEQ ID NO: 1969379 - RNA, 19 nt, Homo sapiens
  misc_RNA (1)...(19): siRNA sense strand
aagcaucacuggauaaauu

SEQ ID NO: 1969380 - RNA, 19 nt, Homo sapiens
  misc_RNA (1)...(19): siRNA sense strand
ggaagaaagugaaacuauc

SEQ ID NO: 1969381 - RNA, 19 nt, Homo sapiens
  misc_RNA (1)...(19): siRNA sense strand
ggaacaauauucuucuuca

SEQ ID NO: 1969382 - RNA, 19 nt, Homo sapiens
  misc_RNA (1)...(19): siRNA sense strand
guaacaagcuugccuagag

SEQ ID NO: 1969383 - RNA, 19 nt, Homo sapiens
  misc_RNA (1)...(19): siRNA sense strand
uggaaggacuuuacgauaa

SEQ ID NO: 1969384 - RNA, 19 nt, Homo sapiens
  misc_RNA (1)...(19): siRNA sense strand
ccauagagguaauguuuga

SEQ ID NO: 1969385 - RNA, 19 nt, Homo sapiens
  misc_RNA (1)...(19): siRNA sense strand
cgaagaaucggucaucuaa

SEQ ID NO: 1969386 - RNA, 19 nt, Homo sapiens
  misc_RNA (1)...(19): siRNA sense strand
ggugaacucuuugcucuaa

SEQ ID NO: 1969387 - RNA, 19 nt, Homo sapiens
  misc_RNA (1)...(19): siRNA sense strand
ggaacuaacagaucuaaug

SEQ ID NO: 1969388 - RNA, 19 nt, Homo sapiens
  misc_RNA (1)...(19): siRNA sense strand
gcucuaaggcaccguauaa

SEQ ID NO: 1969389 - RNA, 19 nt, Homo sapiens
  misc_RNA (1)...(19): siRNA sense strand
aagaaucggucaucuaaug

SEQ ID NO: 1969390 - RNA, 19 nt, Homo sapiens
  misc_RNA (1)...(19): siRNA sense strand
ggaccaaccuuccaguucu

SEQ ID NO: 1969391 - RNA, 19 nt, Homo sapiens
  misc_RNA (1)...(19): siRNA sense strand
uaacaagcuugccuagaga

SEQ ID NO: 1969392 - RNA, 19 nt, Homo sapiens
  misc_RNA (1)...(19): siRNA sense strand
gcucuaugccuuucuguaa

SEQ ID NO: 1969393 - RNA, 19 nt, Homo sapiens
  misc_RNA (1)...(19): siRNA sense strand
auucagagcuggauuuaga

SEQ ID NO: 1969394 - RNA, 19 nt, Homo sapiens
  misc_RNA (1)...(19): siRNA sense strand
ccacaaaccaaaucuguug

SEQ ID NO: 1969395 - RNA, 19 nt, Homo sapiens
  misc_RNA (1)...(19): siRNA sense strand
ugggaaaucugucucaaga

SEQ ID NO: 1969396 - RNA, 19 nt, Homo sapiens
  misc_RNA (1)...(19): siRNA sense strand
gcuagugguuugaauaagu

SEQ ID NO: 1969397 - RNA, 19 nt, Homo sapiens
  misc_RNA (1)...(19): siRNA sense strand
gcauggaacuaacagaucu

SEQ ID NO: 1969398 - RNA, 19 nt, Homo sapiens
  misc_RNA (1)...(19): siRNA sense strand
gaagaaagugaaacuaucu

SEQ ID NO: 1969399 - RNA, 19 nt, Homo sapiens
  misc_RNA (1)...(19): siRNA sense strand
aaucggucaucuaauguua

SEQ ID NO: 1969400 - RNA, 19 nt, Homo sapiens
  misc_RNA (1)...(19): siRNA sense strand
gggaagaaagugaaacuau

SEQ ID NO: 1969401 - RNA, 19 nt, Homo sapiens
  misc_RNA (1)...(19): siRNA sense strand
ccagaucucaucauauauu

SEQ ID NO: 1969402 - RNA, 19 nt, Homo sapiens
  misc_RNA (1)...(19): siRNA sense strand
gaacaauauucuucuucag

SEQ ID NO: 1969403 - RNA, 19 nt, Homo sapiens
  misc_RNA (1)...(19): siRNA sense strand
ugaagaaguuaugcagaaa

SEQ ID NO: 1969404 - RNA, 19 nt, Homo sapiens
  misc_RNA (1)...(19): siRNA sense strand
ugaagcaugugaugaaagu

SEQ ID NO: 1969405 - RNA, 19 nt, Homo sapiens
  misc_RNA (1)...(19): siRNA sense strand
guggccagaucucaucaua

SEQ ID NO: 1969406 - RNA, 19 nt, Homo sapiens
  misc_RNA (1)...(19): siRNA sense strand
ggaagcaucacuggauaaa

SEQ ID NO: 1969407 - RNA, 19 nt, Homo sapiens
  misc_RNA (1)...(19): siRNA sense strand
caaaucuguuggguucuaa

SEQ ID NO: 1969408 - RNA, 19 nt, Homo sapiens
  misc_RNA (1)...(19): siRNA sense strand
gaacuaacagaucuaaugc

SEQ ID NO: 1969409 - RNA, 19 nt, Homo sapiens
  misc_RNA (1)...(19): siRNA sense strand
gaugaugccauucuagaga

SEQ ID NO: 1969410 - RNA, 19 nt, Homo sapiens
  misc_RNA (1)...(19): siRNA sense strand
gccuagagaugcagcaaau

SEQ ID NO: 1969411 - RNA, 19 nt, Homo sapiens
  misc_RNA (1)...(19): siRNA sense strand
uaaagaggcauuucucauc

SEQ ID NO: 1969412 - RNA, 19 nt, Homo sapiens
  misc_RNA (1)...(19): siRNA sense strand
caugcugucuccauuaaau

SEQ ID NO: 1969413 - RNA, 19 nt, Homo sapiens
  misc_RNA (1)...(19): siRNA sense strand
gcauuucucaucuguauca

SEQ ID NO: 1969414 - RNA, 19 nt, Homo sapiens
  misc_RNA (1)...(19): siRNA sense strand
gauuuguuccuuccugaua

SEQ ID NO: 1969415 - RNA, 19 nt, Homo sapiens
  misc_RNA (1)...(19): siRNA sense strand
gugaaacuaucucaugaag

SEQ ID NO: 1969416 - RNA, 19 nt, Homo sapiens
  misc_RNA (1)...(19): siRNA sense strand
gcacaccuuccaaccauga

SEQ ID NO: 1969417 - RNA, 19 nt, Homo sapiens
  misc_RNA (1)...(19): siRNA sense strand
cagcuagugguuugaauaa

SEQ ID NO: 1969418 - RNA, 19 nt, Homo sapiens
  misc_RNA (1)...(19): siRNA sense strand
gaagaguuaaggucaugaa

SEQ ID NO: 1969419 - RNA, 19 nt, Homo sapiens
  misc_RNA (1)...(19): siRNA sense strand
gucaauuccugaggcuuua

SEQ ID NO: 1969420 - RNA, 19 nt, Homo sapiens
  misc_RNA (1)...(19): siRNA sense strand
ccacuuaaggaauuugaaa

SEQ ID NO: 1969421 - RNA, 19 nt, Homo sapiens
  misc_RNA (1)...(19): siRNA sense strand
aaagaggcauuucucaucu

SEQ ID NO: 1969422 - RNA, 19 nt, Homo sapiens
  misc_RNA (1)...(19): siRNA sense strand
ucucagauccuggaaauga

SEQ ID NO: 1969423 - RNA, 19 nt, Homo sapiens
  misc_RNA (1)...(19): siRNA sense strand
agagaugcagcaaauauuu

SEQ ID NO: 1969424 - RNA, 19 nt, Homo sapiens
  misc_RNA (1)...(19): siRNA sense strand
aaagugaaacuaucucaug

SEQ ID NO: 1969425 - RNA, 19 nt, Homo sapiens
  misc_RNA (1)...(19): siRNA sense strand
aagugaaacuaucucauga

SEQ ID NO: 1969426 - RNA, 19 nt, Homo sapiens
  misc_RNA (1)...(19): siRNA sense strand
ugggaagcaucacuggaua

SEQ ID NO: 1969427 - RNA, 19 nt, Homo sapiens
  misc_RNA (1)...(19): siRNA sense strand
augaagaaguuaugcagaa

SEQ ID NO: 1969428 - RNA, 19 nt, Homo sapiens
  misc_RNA (1)...(19): siRNA sense strand
aggcauuucucaucuguau

SEQ ID NO: 1969429 - RNA, 19 nt, Homo sapiens
  misc_RNA (1)...(19): siRNA sense strand
gagcuggauuuagaugaug

SEQ ID NO: 1969430 - RNA, 19 nt, Homo sapiens
  misc_RNA (1)...(19): siRNA sense strand
gugaugaaaguucuagaaa

SEQ ID NO: 1969431 - RNA, 19 nt, Homo sapiens
  misc_RNA (1)...(19): siRNA sense strand
uaugaagcaugugaugaaa

SEQ ID NO: 1969432 - RNA, 19 nt, Homo sapiens
  misc_RNA (1)...(19): siRNA sense strand
cuagagaugcagcaaauau

SEQ ID NO: 1969433 - RNA, 19 nt, Homo sapiens
  misc_RNA (1)...(19): siRNA sense strand
caacggcagaugaguauca

SEQ ID NO: 1969434 - RNA, 19 nt, Homo sapiens
  misc_RNA (1)...(19): siRNA sense strand
uuucucaucuguaucaaug

SEQ ID NO: 1969435 - RNA, 19 nt, Homo sapiens
  misc_RNA (1)...(19): siRNA sense strand
agcauuggccgaagaguua

SEQ ID NO: 1969436 - RNA, 19 nt, Homo sapiens
  misc_RNA (1)...(19): siRNA sense strand
gcacugguacacugggaaa

SEQ ID NO: 1969437 - RNA, 19 nt, Homo sapiens
  misc_RNA (1)...(19): siRNA sense strand
ugaaauccuuugguacuca

SEQ ID NO: 1969438 - RNA, 19 nt, Homo sapiens
  misc_RNA (1)...(19): siRNA sense strand
cggaaucaccugaaugaga

SEQ ID NO: 1969439 - RNA, 19 nt, Homo sapiens
  misc_RNA (1)...(19): siRNA sense strand
ccugauuacuccugauuuc

SEQ ID NO: 1969440 - RNA, 19 nt, Homo sapiens
  misc_RNA (1)...(19): siRNA sense strand
ucggucaucuaauguuaaa

SEQ ID NO: 1969441 - RNA, 19 nt, Homo sapiens
  misc_RNA (1)...(19): siRNA sense strand
gaaucggucaucuaauguu

SEQ ID NO: 1969442 - RNA, 19 nt, Homo sapiens
  misc_RNA (1)...(19): siRNA sense strand
gcaucacuggauaaauuua

SEQ ID NO: 1969443 - RNA, 19 nt, Homo sapiens
  misc_RNA (1)...(19): siRNA sense strand
uaaggcaccguauaaacuu

SEQ ID NO: 1969444 - RNA, 19 nt, Homo sapiens
  misc_RNA (1)...(19): siRNA sense strand
gaagagaccacuaaaagca

SEQ ID NO: 1969445 - RNA, 19 nt, Homo sapiens
  misc_RNA (1)...(19): siRNA sense strand
gggaagcaucacuggauaa

SEQ ID NO: 1969446 - RNA, 19 nt, Homo sapiens
  misc_RNA (1)...(19): siRNA sense strand
guuggguucuaaaugguuu

SEQ ID NO: 1969447 - RNA, 19 nt, Homo sapiens
  misc_RNA (1)...(19): siRNA sense strand
gauuacuccugauuucuac

SEQ ID NO: 1969448 - RNA, 19 nt, Homo sapiens
  misc_RNA (1)...(19): siRNA sense strand
gaaagugaaacuaucucau

SEQ ID NO: 1969449 - RNA, 19 nt, Homo sapiens
  misc_RNA (1)...(19): siRNA sense strand
ccaaugcucuaugccuuuc

SEQ ID NO: 1969450 - RNA, 19 nt, Homo sapiens
  misc_RNA (1)...(19): siRNA sense strand
gggaaaucaaguuaaauuc

SEQ ID NO: 1969451 - RNA, 19 nt, Homo sapiens
  misc_RNA (1)...(19): siRNA sense strand
aaauagagggacagucaaa

SEQ ID NO: 1969452 - RNA, 19 nt, Homo sapiens
  misc_RNA (1)...(19): siRNA sense strand
gcagcacacugacaauacg

SEQ ID NO: 1969453 - RNA, 19 nt, Homo sapiens
  misc_RNA (1)...(19): siRNA sense strand
ugauuacuccugauuucua

SEQ ID NO: 1969454 - RNA, 19 nt, Homo sapiens
  misc_RNA (1)...(19): siRNA sense strand
gaagaaucggucaucuaau

SEQ ID NO: 1969455 - RNA, 19 nt, Homo sapiens
  misc_RNA (1)...(19): siRNA sense strand
cuaugaagcaugugaugaa

SEQ ID NO: 1969456 - RNA, 19 nt, Homo sapiens
  misc_RNA (1)...(19): siRNA sense strand
gagagugacccacaaacca

SEQ ID NO: 1969457 - RNA, 19 nt, Homo sapiens
  misc_RNA (1)...(19): siRNA sense strand
caggugaagagaccacuaa

SEQ ID NO: 1969458 - RNA, 19 nt, Homo sapiens
  misc_RNA (1)...(19): siRNA sense strand
gaccaaccuuccaguucug

SEQ ID NO: 1969459 - RNA, 19 nt, Homo sapiens
  misc_RNA (1)...(19): siRNA sense strand
gcacugcauggaacuaaca

SEQ ID NO: 1969460 - RNA, 19 nt, Homo sapiens
  misc_RNA (1)...(19): siRNA sense strand
agucucagauccuggaaau

SEQ ID NO: 1969461 - RNA, 19 nt, Homo sapiens
  misc_RNA (1)...(19): siRNA sense strand
uagagaugcagcaaauauu

SEQ ID NO: 1969462 - RNA, 19 nt, Homo sapiens
  misc_RNA (1)...(19): siRNA sense strand
ucagagccguggccagauc

SEQ ID NO: 1969463 - RNA, 19 nt, Homo sapiens
  misc_RNA (1)...(19): siRNA sense strand
ucuguuggguucuaaaugg

SEQ ID NO: 1969464 - RNA, 19 nt, Homo sapiens
  misc_RNA (1)...(19): siRNA sense strand
ccgaagaguuaaggucaug

SEQ ID NO: 1969465 - RNA, 19 nt, Homo sapiens
  misc_RNA (1)...(19): siRNA sense strand
gagcugcuguguuuuggaa

SEQ ID NO: 1969466 - RNA, 19 nt, Homo sapiens
  misc_RNA (1)...(19): siRNA sense strand
agaaggugauccuggaaca

SEQ ID NO: 1969467 - RNA, 19 nt, Homo sapiens
  misc_RNA (1)...(19): siRNA sense strand
agcaugcugucuccauuaa

SEQ ID NO: 1969468 - RNA, 19 nt, Homo sapiens
  misc_RNA (1)...(19): siRNA sense strand
ugagcugggacgaguauuu

SEQ ID NO: 1969469 - RNA, 19 nt, Homo sapiens
  misc_RNA (1)...(19): siRNA sense strand
cuggaaggacuuuacgaua

SEQ ID NO: 1969470 - RNA, 19 nt, Homo sapiens
  misc_RNA (1)...(19): siRNA sense strand
ggacagagaaaaccuggaa

SEQ ID NO: 1969471 - RNA, 19 nt, Homo sapiens
  misc_RNA (1)...(19): siRNA sense strand
caaagaagguuauagagau

SEQ ID NO: 1969472 - RNA, 19 nt, Homo sapiens
  misc_RNA (1)...(19): siRNA sense strand
caacagggcuucaaucaag

SEQ ID NO: 1969473 - RNA, 19 nt, Homo sapiens
  misc_RNA (1)...(19): siRNA sense strand
gaaagacucugugaaaaua

SEQ ID NO: 1969474 - RNA, 19 nt, Homo sapiens
  misc_RNA (1)...(19): siRNA sense strand
gcaaagcaguuacucuuca

SEQ ID NO: 1969475 - RNA, 19 nt, Homo sapiens
  misc_RNA (1)...(19): siRNA sense strand
gaugaaagacucugugaaa

SEQ ID NO: 1969476 - RNA, 19 nt, Homo sapiens
  misc_RNA (1)...(19): siRNA sense strand
uaagaaaggugcagaaguc

SEQ ID NO: 1969477 - RNA, 19 nt, Homo sapiens
  misc_RNA (1)...(19): siRNA sense strand
gcaaagacgagucaaagaa

SEQ ID NO: 1969478 - RNA, 19 nt, Homo sapiens
  misc_RNA (1)...(19): siRNA sense strand
ggacguguuugacgaagaa

SEQ ID NO: 1969479 - RNA, 19 nt, Homo sapiens
  misc_RNA (1)...(19): siRNA sense strand
gaaaggugcagaagucauu

SEQ ID NO: 1969480 - RNA, 19 nt, Homo sapiens
  misc_RNA (1)...(19): siRNA sense strand
gcucaaacaucugaaauca

SEQ ID NO: 1969481 - RNA, 19 nt, Homo sapiens
  misc_RNA (1)...(19): siRNA sense strand
guucauauguagaauguug

SEQ ID NO: 1969482 - RNA, 19 nt, Homo sapiens
  misc_RNA (1)...(19): siRNA sense strand
gaacagacagccaguuuag

SEQ ID NO: 1969483 - RNA, 19 nt, Homo sapiens
  misc_RNA (1)...(19): siRNA sense strand
caagagccauagugggaua

SEQ ID NO: 1969484 - RNA, 19 nt, Homo sapiens
  misc_RNA (1)...(19): siRNA sense strand
uggaauagaugcuggcaaa

SEQ ID NO: 1969485 - RNA, 19 nt, Homo sapiens
  misc_RNA (1)...(19): siRNA sense strand
ugggauagauuguucauau

SEQ ID NO: 1969486 - RNA, 19 nt, Homo sapiens
  misc_RNA (1)...(19): siRNA sense strand
ggaacagacagccaguuua

SEQ ID NO: 1969487 - RNA, 19 nt, Homo sapiens
  misc_RNA (1)...(19): siRNA sense strand
ugaugaagcuaaagaugaa

SEQ ID NO: 1969488 - RNA, 19 nt, Homo sapiens
  misc_RNA (1)...(19): siRNA sense strand
ggaccuuugucauguaguu

SEQ ID NO: 1969489 - RNA, 19 nt, Homo sapiens
  misc_RNA (1)...(19): siRNA sense strand
gauauggaccuuugucaug

SEQ ID NO: 1969490 - RNA, 19 nt, Homo sapiens
  misc_RNA (1)...(19): siRNA sense strand
caaagcaguuacucuucaa

SEQ ID NO: 1969491 - RNA, 19 nt, Homo sapiens
  misc_RNA (1)...(19): siRNA sense strand
gggcuucaaucaagguuau

SEQ ID NO: 1969492 - RNA, 19 nt, Homo sapiens
  misc_RNA (1)...(19): siRNA sense strand
cgaggaacauugagugcuu

SEQ ID NO: 1969493 - RNA, 19 nt, Homo sapiens
  misc_RNA (1)...(19): siRNA sense strand
cagcgggaauggcagagua

SEQ ID NO: 1969494 - RNA, 19 nt, Homo sapiens
  misc_RNA (1)...(19): siRNA sense strand
ucaaagaagguuauagaga

SEQ ID NO: 1969495 - RNA, 19 nt, Homo sapiens
  misc_RNA (1)...(19): siRNA sense strand
gagcaugcacauucagaaa

SEQ ID NO: 1969496 - RNA, 19 nt, Homo sapiens
  misc_RNA (1)...(19): siRNA sense strand
aaagaagguuauagagaug

SEQ ID NO: 1969497 - RNA, 19 nt, Homo sapiens
  misc_RNA (1)...(19): siRNA sense strand
gggauagauuguucauaug

SEQ ID NO: 1969498 - RNA, 19 nt, Homo sapiens
  misc_RNA (1)...(19): siRNA sense strand
ccuaucaguagauguauua

SEQ ID NO: 1969499 - RNA, 19 nt, Homo sapiens
  misc_RNA (1)...(19): siRNA sense strand
gaggaacauugagugcuuu

SEQ ID NO: 1969500 - RNA, 19 nt, Homo sapiens
  misc_RNA (1)...(19): siRNA sense strand
ugaagaguaugugcucaaa

SEQ ID NO: 1969501 - RNA, 19 nt, Homo sapiens
  misc_RNA (1)...(19): siRNA sense strand
aagaguaugugcucaaaca

SEQ ID NO: 1969502 - RNA, 19 nt, Homo sapiens
  misc_RNA (1)...(19): siRNA sense strand
ggauagauuguucauaugu

SEQ ID NO: 1969503 - RNA, 19 nt, Homo sapiens
  misc_RNA (1)...(19): siRNA sense strand
cagacagccaguuuaguua

SEQ ID NO: 1969504 - RNA, 19 nt, Homo sapiens
  misc_RNA (1)...(19): siRNA sense strand
gggccuaucaguagaugua

SEQ ID NO: 1969505 - RNA, 19 nt, Homo sapiens
  misc_RNA (1)...(19): siRNA sense strand
gugcagaagucauuuuaaa

SEQ ID NO: 1969506 - RNA, 19 nt, Homo sapiens
  misc_RNA (1)...(19): siRNA sense strand
ggaugcaguuggccagugu

SEQ ID NO: 1969507 - RNA, 19 nt, Homo sapiens
  misc_RNA (1)...(19): siRNA sense strand
caacaccucaaacaacuau

SEQ ID NO: 1969508 - RNA, 19 nt, Homo sapiens
  misc_RNA (1)...(19): siRNA sense strand
cgucccauguuguagauuu

SEQ ID NO: 1969509 - RNA, 19 nt, Homo sapiens
  misc_RNA (1)...(19): siRNA sense strand
acagacagccaguuuaguu

SEQ ID NO: 1969510 - RNA, 19 nt, Homo sapiens
  misc_RNA (1)...(19): siRNA sense strand
caaagacgagucaaagaag

SEQ ID NO: 1969511 - RNA, 19 nt, Homo sapiens
  misc_RNA (1)...(19): siRNA sense strand
gucccauguuguagauuua

SEQ ID NO: 1969512 - RNA, 19 nt, Homo sapiens
  misc_RNA (1)...(19): siRNA sense strand
gcaguuggccagugugaag

SEQ ID NO: 1969513 - RNA, 19 nt, Homo sapiens
  misc_RNA (1)...(19): siRNA sense strand
cagcugggccuaucaguag

SEQ ID NO: 1969514 - RNA, 19 nt, Homo sapiens
  misc_RNA (1)...(19): siRNA sense strand
uuaaacagcugggccuauc

SEQ ID NO: 1969515 - RNA, 19 nt, Homo sapiens
  misc_RNA (1)...(19): siRNA sense strand
ccacauggauuuuggaaca

SEQ ID NO: 1969516 - RNA, 19 nt, Homo sapiens
  misc_RNA (1)...(19): siRNA sense strand
uauggaccuuugucaugua

SEQ ID NO: 1969517 - RNA, 19 nt, Homo sapiens
  misc_RNA (1)...(19): siRNA sense strand
ggacuccauugaggauaug

SEQ ID NO: 1969518 - RNA, 19 nt, Homo sapiens
  misc_RNA (1)...(19): siRNA sense strand
agacagccaguuuaguuaa

SEQ ID NO: 1969519 - RNA, 19 nt, Homo sapiens
  misc_RNA (1)...(19): siRNA sense strand
cacaggagcaugcacauuc

SEQ ID NO: 1969520 - RNA, 19 nt, Homo sapiens
  misc_RNA (1)...(19): siRNA sense strand
uacaacaccucaaacaacu

SEQ ID NO: 1969521 - RNA, 19 nt, Homo sapiens
  misc_RNA (1)...(19): siRNA sense strand
gaacauugagugcuuugcu

SEQ ID NO: 1969522 - RNA, 19 nt, Homo sapiens
  misc_RNA (1)...(19): siRNA sense strand
acaccucaaacaacuauaa

SEQ ID NO: 1969523 - RNA, 19 nt, Homo sapiens
  misc_RNA (1)...(19): siRNA sense strand
ggaauggcagaguaacaug

SEQ ID NO: 1969524 - RNA, 19 nt, Homo sapiens
  misc_RNA (1)...(19): siRNA sense strand
ggagcaugcacauucagaa

SEQ ID NO: 1969525 - RNA, 19 nt, Homo sapiens
  misc_RNA (1)...(19): siRNA sense strand
uugaggauauggaccuuug

SEQ ID NO: 1969526 - RNA, 19 nt, Homo sapiens
  misc_RNA (1)...(19): siRNA sense strand
agucaaagaagguuauaga

SEQ ID NO: 1969527 - RNA, 19 nt, Homo sapiens
  misc_RNA (1)...(19): siRNA sense strand
acaggagcaugcacauuca

SEQ ID NO: 1969528 - RNA, 19 nt, Homo sapiens
  misc_RNA (1)...(19): siRNA sense strand
ggacgacuccgaggaacau

SEQ ID NO: 1969529 - RNA, 19 nt, Homo sapiens
  misc_RNA (1)...(19): siRNA sense strand
uggaacagacagccaguuu

SEQ ID NO: 1969530 - RNA, 19 nt, Homo sapiens
  misc_RNA (1)...(19): siRNA sense strand
cgacuccgaggaacauuga

SEQ ID NO: 1969531 - RNA, 19 nt, Homo sapiens
  misc_RNA (1)...(19): siRNA sense strand
uggcaaagcaguuacucuu

SEQ ID NO: 1969532 - RNA, 19 nt, Homo sapiens
  misc_RNA (1)...(19): siRNA sense strand
ggauauggaccuuugucau

SEQ ID NO: 1969533 - RNA, 19 nt, Homo sapiens
  misc_RNA (1)...(19): siRNA sense strand
auagugggauagauuguuc

SEQ ID NO: 1969534 - RNA, 19 nt, Homo sapiens
  misc_RNA (1)...(19): siRNA sense strand
gaauagaugcuggcaaagc

SEQ ID NO: 1969535 - RNA, 19 nt, Homo sapiens
  misc_RNA (1)...(19): siRNA sense strand
gggacguguuugacgaaga

SEQ ID NO: 1969536 - RNA, 19 nt, Homo sapiens
  misc_RNA (1)...(19): siRNA sense strand
uugaugaagcuaaagauga

SEQ ID NO: 1969537 - RNA, 19 nt, Homo sapiens
  misc_RNA (1)...(19): siRNA sense strand
gggaauggcagaguaacau

SEQ ID NO: 1969538 - RNA, 19 nt, Homo sapiens
  misc_RNA (1)...(19): siRNA sense strand
gccuaucaguagauguauu

SEQ ID NO: 1969539 - RNA, 19 nt, Homo sapiens
  misc_RNA (1)...(19): siRNA sense strand
uuacaacaccucaaacaac

SEQ ID NO: 1969540 - RNA, 19 nt, Homo sapiens
  misc_RNA (1)...(19): siRNA sense strand
gcagaguaacaugcaaaga

SEQ ID NO: 1969541 - RNA, 19 nt, Homo sapiens
  misc_RNA (1)...(19): siRNA sense strand
agacaaaggggacguguuu

SEQ ID NO: 1969542 - RNA, 19 nt, Homo sapiens
  misc_RNA (1)...(19): siRNA sense strand
cagaguaacaugcaaagac

SEQ ID NO: 1969543 - RNA, 19 nt, Homo sapiens
  misc_RNA (1)...(19): siRNA sense strand
ucaacagggcuucaaucaa

SEQ ID NO: 1969544 - RNA, 19 nt, Homo sapiens
  misc_RNA (1)...(19): siRNA sense strand
uggccagugugaagaguau

SEQ ID NO: 1969545 - RNA, 19 nt, Homo sapiens
  misc_RNA (1)...(19): siRNA sense strand
ggcaaagcaguuacucuuc

SEQ ID NO: 1969546 - RNA, 19 nt, Homo sapiens
  misc_RNA (1)...(19): siRNA sense strand
auauggaccuuugucaugu

SEQ ID NO: 1969547 - RNA, 19 nt, Homo sapiens
  misc_RNA (1)...(19): siRNA sense strand
gccauagugggauagauug

SEQ ID NO: 1969548 - RNA, 19 nt, Homo sapiens
  misc_RNA (1)...(19): siRNA sense strand
acagcugggccuaucagua

SEQ ID NO: 1969549 - RNA, 19 nt, Homo sapiens
  misc_RNA (1)...(19): siRNA sense strand
gcuucaaucaagguuauaa

SEQ ID NO: 1969550 - RNA, 19 nt, Homo sapiens
  misc_RNA (1)...(19): siRNA sense strand
gugaagaguaugugcucaa

SEQ ID NO: 1969551 - RNA, 19 nt, Homo sapiens
  misc_RNA (1)...(19): siRNA sense strand
uaaagaugaaagacucugu

SEQ ID NO: 1969552 - RNA, 19 nt, Homo sapiens
  misc_RNA (1)...(19): siRNA sense strand
ucacuccaccgucccaugu

SEQ ID NO: 1969553 - RNA, 19 nt, Homo sapiens
  misc_RNA (1)...(19): siRNA sense strand
gacgagucaaagaagguua

SEQ ID NO: 1969554 - RNA, 19 nt, Homo sapiens
  misc_RNA (1)...(19): siRNA sense strand
agaagguuauagagaugga

SEQ ID NO: 1969555 - RNA, 19 nt, Homo sapiens
  misc_RNA (1)...(19): siRNA sense strand
gagccauagugggauagau

SEQ ID NO: 1969556 - RNA, 19 nt, Homo sapiens
  misc_RNA (1)...(19): siRNA sense strand
caugcaaagacgagucaaa

SEQ ID NO: 1969557 - RNA, 19 nt, Homo sapiens
  misc_RNA (1)...(19): siRNA sense strand
ugaaagacucugugaaaau

SEQ ID NO: 1969558 - RNA, 19 nt, Homo sapiens
  misc_RNA (1)...(19): siRNA sense strand
aagaugaaagacucuguga

SEQ ID NO: 1969559 - RNA, 19 nt, Homo sapiens
  misc_RNA (1)...(19): siRNA sense strand
gguuauagagauggaauag

SEQ ID NO: 1969560 - RNA, 19 nt, Homo sapiens
  misc_RNA (1)...(19): siRNA sense strand
gaggauauggaccuuuguc

SEQ ID NO: 1969561 - RNA, 19 nt, Homo sapiens
  misc_RNA (1)...(19): siRNA sense strand
ccauguuguagauuuauug

SEQ ID NO: 1969562 - RNA, 19 nt, Homo sapiens
  misc_RNA (1)...(19): siRNA sense strand
gcagaagucauuuuaaacu

SEQ ID NO: 1969563 - RNA, 19 nt, Homo sapiens
  misc_RNA (1)...(19): siRNA sense strand
cccauguuguagauuuauu

SEQ ID NO: 1969564 - RNA, 19 nt, Homo sapiens
  misc_RNA (1)...(19): siRNA sense strand
ggaagaacuuguagaauuu

SEQ ID NO: 1969565 - RNA, 19 nt, Homo sapiens
  misc_RNA (1)...(19): siRNA sense strand
caagggaccuguauaguaa

SEQ ID NO: 1969566 - RNA, 19 nt, Homo sapiens
  misc_RNA (1)...(19): siRNA sense strand
ggaccuguauaguaaauua

SEQ ID NO: 1969567 - RNA, 19 nt, Homo sapiens
  misc_RNA (1)...(19): siRNA sense strand
caagaaaucuacacaaguu

SEQ ID NO: 1969568 - RNA, 19 nt, Homo sapiens
  misc_RNA (1)...(19): siRNA sense strand
ggagcgagcugaaauaguu

SEQ ID NO: 1969569 - RNA, 19 nt, Homo sapiens
  misc_RNA (1)...(19): siRNA sense strand
gagcugaaauaguugcuaa

SEQ ID NO: 1969570 - RNA, 19 nt, Homo sapiens
  misc_RNA (1)...(19): siRNA sense strand
uggaagaacuuguagaauu

SEQ ID NO: 1969571 - RNA, 19 nt, Homo sapiens
  misc_RNA (1)...(19): siRNA sense strand
ggaagaugcugauuaccuu

SEQ ID NO: 1969572 - RNA, 19 nt, Homo sapiens
  misc_RNA (1)...(19): siRNA sense strand
ugaaagaacuaccaaaugg

SEQ ID NO: 1969573 - RNA, 19 nt, Homo sapiens
  misc_RNA (1)...(19): siRNA sense strand
caaagucacagauagauuu

SEQ ID NO: 1969574 - RNA, 19 nt, Homo sapiens
  misc_RNA (1)...(19): siRNA sense strand
caagaacacugaaaaguuu

SEQ ID NO: 1969575 - RNA, 19 nt, Homo sapiens
  misc_RNA (1)...(19): siRNA sense strand
gaaacaagggaccuguaua

SEQ ID NO: 1969576 - RNA, 19 nt, Homo sapiens
  misc_RNA (1)...(19): siRNA sense strand
gauagucccgugagauaua

SEQ ID NO: 1969577 - RNA, 19 nt, Homo sapiens
  misc_RNA (1)...(19): siRNA sense strand
acacuaaaccucagaauau

SEQ ID NO: 1969578 - RNA, 19 nt, Homo sapiens
  misc_RNA (1)...(19): siRNA sense strand
agagagaacugccaaauac

SEQ ID NO: 1969579 - RNA, 19 nt, Homo sapiens
  misc_RNA (1)...(19): siRNA sense strand
ccucaugguucuacucuuu

SEQ ID NO: 1969580 - RNA, 19 nt, Homo sapiens
  misc_RNA (1)...(19): siRNA sense strand
guggauuacuugccagaua

SEQ ID NO: 1969581 - RNA, 19 nt, Homo sapiens
  misc_RNA (1)...(19): siRNA sense strand
aaauuucuguccaagcuua

SEQ ID NO: 1969582 - RNA, 19 nt, Homo sapiens
  misc_RNA (1)...(19): siRNA sense strand
caacgccacuucaaauauc

SEQ ID NO: 1969583 - RNA, 19 nt, Homo sapiens
  misc_RNA (1)...(19): siRNA sense strand
gaaauuguccauggaagaa

SEQ ID NO: 1969584 - RNA, 19 nt, Homo sapiens
  misc_RNA (1)...(19): siRNA sense strand
caacuucagauuucuauga

SEQ ID NO: 1969585 - RNA, 19 nt, Homo sapiens
  misc_RNA (1)...(19): siRNA sense strand
ggucagaaguuaguuauac

SEQ ID NO: 1969586 - RNA, 19 nt, Homo sapiens
  misc_RNA (1)...(19): siRNA sense strand
agagacagauaugguguua

SEQ ID NO: 1969587 - RNA, 19 nt, Homo sapiens
  misc_RNA (1)...(19): siRNA sense strand
guacugccgucuagucgaa

SEQ ID NO: 1969588 - RNA, 19 nt, Homo sapiens
  misc_RNA (1)...(19): siRNA sense strand
cagcuuuacuccucaugua

SEQ ID NO: 1969589 - RNA, 19 nt, Homo sapiens
  misc_RNA (1)...(19): siRNA sense strand
ggauguagcacucaaacuu

SEQ ID NO: 1969590 - RNA, 19 nt, Homo sapiens
  misc_RNA (1)...(19): siRNA sense strand
gaaacucucccaaacacuu

SEQ ID NO: 1969591 - RNA, 19 nt, Homo sapiens
  misc_RNA (1)...(19): siRNA sense strand
ucacgcagcugccaaccaa

SEQ ID NO: 1969592 - RNA, 19 nt, Homo sapiens
  misc_RNA (1)...(19): siRNA sense strand
agacagauaugguguuaag

SEQ ID NO: 1969593 - RNA, 19 nt, Homo sapiens
  misc_RNA (1)...(19): siRNA sense strand
cguacucccuuuacacuaa

SEQ ID NO: 1969594 - RNA, 19 nt, Homo sapiens
  misc_RNA (1)...(19): siRNA sense strand
acaagggaccuguauagua

SEQ ID NO: 1969595 - RNA, 19 nt, Homo sapiens
  misc_RNA (1)...(19): siRNA sense strand
uagagcaacuucagauuuc

SEQ ID NO: 1969596 - RNA, 19 nt, Homo sapiens
  misc_RNA (1)...(19): siRNA sense strand
aaauagaccuggaugucaa

SEQ ID NO: 1969597 - RNA, 19 nt, Homo sapiens
  misc_RNA (1)...(19): siRNA sense strand
gcaacgccacuucaaauau

SEQ ID NO: 1969598 - RNA, 19 nt, Homo sapiens
  misc_RNA (1)...(19): siRNA sense strand
gaggagcucccagaucaua

SEQ ID NO: 1969599 - RNA, 19 nt, Homo sapiens
  misc_RNA (1)...(19): siRNA sense strand
cagagagaacugccaaaua

SEQ ID NO: 1969600 - RNA, 19 nt, Homo sapiens
  misc_RNA (1)...(19): siRNA sense strand
gcaacaauccuuauuccau

SEQ ID NO: 1969601 - RNA, 19 nt, Homo sapiens
  misc_RNA (1)...(19): siRNA sense strand
uggauuacuugccagauaa

SEQ ID NO: 1969602 - RNA, 19 nt, Homo sapiens
  misc_RNA (1)...(19): siRNA sense strand
gaacuaaagcgggcaaagu

SEQ ID NO: 1969603 - RNA, 19 nt, Homo sapiens
  misc_RNA (1)...(19): siRNA sense strand
cuacaucuuugaaggagaa

SEQ ID NO: 1969604 - RNA, 19 nt, Homo sapiens
  misc_RNA (1)...(19): siRNA sense strand
uagauagucccgugagaua

SEQ ID NO: 1969605 - RNA, 19 nt, Homo sapiens
  misc_RNA (1)...(19): siRNA sense strand
gaacauggucagaaguuag

SEQ ID NO: 1969606 - RNA, 19 nt, Homo sapiens
  misc_RNA (1)...(19): siRNA sense strand
uaacagaacauggucagaa

SEQ ID NO: 1969607 - RNA, 19 nt, Homo sapiens
  misc_RNA (1)...(19): siRNA sense strand
acgagaaggugcagagauu

SEQ ID NO: 1969608 - RNA, 19 nt, Homo sapiens
  misc_RNA (1)...(19): siRNA sense strand
ggacgggcuuuccauccaa

SEQ ID NO: 1969609 - RNA, 19 nt, Homo sapiens
  misc_RNA (1)...(19): siRNA sense strand
uuaaagaugaggcagauuu

SEQ ID NO: 1969610 - RNA, 19 nt, Homo sapiens
  misc_RNA (1)...(19): siRNA sense strand
aaaguuagaccuuccagaa

SEQ ID NO: 1969611 - RNA, 19 nt, Homo sapiens
  misc_RNA (1)...(19): siRNA sense strand
gaauucagaccaggaugua

SEQ ID NO: 1969612 - RNA, 19 nt, Homo sapiens
  misc_RNA (1)...(19): siRNA sense strand
acacggaagucggguauug

SEQ ID NO: 1969613 - RNA, 19 nt, Homo sapiens
  misc_RNA (1)...(19): siRNA sense strand
gauugaaccuugggaagau

SEQ ID NO: 1969614 - RNA, 19 nt, Homo sapiens
  misc_RNA (1)...(19): siRNA sense strand
ugggauaucuacaucuuug

SEQ ID NO: 1969615 - RNA, 19 nt, Homo sapiens
  misc_RNA (1)...(19): siRNA sense strand
gagaaggugcagagauuga

SEQ ID NO: 1969616 - RNA, 19 nt, Homo sapiens
  misc_RNA (1)...(19): siRNA sense strand
uagaaguccucccuguuga

SEQ ID NO: 1969617 - RNA, 19 nt, Homo sapiens
  misc_RNA (1)...(19): siRNA sense strand
ugagccagaucacagcuuu

SEQ ID NO: 1969618 - RNA, 19 nt, Homo sapiens
  misc_RNA (1)...(19): siRNA sense strand
gcgaauuuacaaaggaaua

SEQ ID NO: 1969619 - RNA, 19 nt, Homo sapiens
  misc_RNA (1)...(19): siRNA sense strand
agaacauggucagaaguua

SEQ ID NO: 1969620 - RNA, 19 nt, Homo sapiens
  misc_RNA (1)...(19): siRNA sense strand
uguccaagcuuaagcaaca

SEQ ID NO: 1969621 - RNA, 19 nt, Homo sapiens
  misc_RNA (1)...(19): siRNA sense strand
aaacaagggaccuguauag

SEQ ID NO: 1969622 - RNA, 19 nt, Homo sapiens
  misc_RNA (1)...(19): siRNA sense strand
gcucccagaucauaaugug

SEQ ID NO: 1969623 - RNA, 19 nt, Homo sapiens
  misc_RNA (1)...(19): siRNA sense strand
gcaauucagggucaccaaa

SEQ ID NO: 1969624 - RNA, 19 nt, Homo sapiens
  misc_RNA (1)...(19): siRNA sense strand
caggagaccucaugguucu

SEQ ID NO: 1969625 - RNA, 19 nt, Homo sapiens
  misc_RNA (1)...(19): siRNA sense strand
ccacggaaacucucccaaa

SEQ ID NO: 1969626 - RNA, 19 nt, Homo sapiens
  misc_RNA (1)...(19): siRNA sense strand
gauagagcaacuucagauu

SEQ ID NO: 1969627 - RNA, 19 nt, Homo sapiens
  misc_RNA (1)...(19): siRNA sense strand
gaaauugaaagaacuacca

SEQ ID NO: 1969628 - RNA, 19 nt, Homo sapiens
  misc_RNA (1)...(19): siRNA sense strand
aaaagcaccuggaaauuga

SEQ ID NO: 1969629 - RNA, 19 nt, Homo sapiens
  misc_RNA (1)...(19): siRNA sense strand
caaauagaccuggauguca

SEQ ID NO: 1969630 - RNA, 19 nt, Homo sapiens
  misc_RNA (1)...(19): siRNA sense strand
gauguagcacucaaacuug

SEQ ID NO: 1969631 - RNA, 19 nt, Homo sapiens
  misc_RNA (1)...(19): siRNA sense strand
gagccaaguucuaguccau

SEQ ID NO: 1969632 - RNA, 19 nt, Homo sapiens
  misc_RNA (1)...(19): siRNA sense strand
ggacaguuccaggcaauau

SEQ ID NO: 1969633 - RNA, 19 nt, Homo sapiens
  misc_RNA (1)...(19): siRNA sense strand
cagauaugguguuaagcaa

SEQ ID NO: 1969634 - RNA, 19 nt, Homo sapiens
  misc_RNA (1)...(19): siRNA sense strand
gaugcuagccguggcaauu

SEQ ID NO: 1969635 - RNA, 19 nt, Homo sapiens
  misc_RNA (1)...(19): siRNA sense strand
gaugcugauuaccuuguuu

SEQ ID NO: 1969636 - RNA, 19 nt, Homo sapiens
  misc_RNA (1)...(19): siRNA sense strand
uaaugaaauuguccaugga

SEQ ID NO: 1969637 - RNA, 19 nt, Homo sapiens
  misc_RNA (1)...(19): siRNA sense strand
ugaacaaauuucuguccaa

SEQ ID NO: 1969638 - RNA, 19 nt, Homo sapiens
  misc_RNA (1)...(19): siRNA sense strand
gcuuuacuccucauguaua

SEQ ID NO: 1969639 - RNA, 19 nt, Homo sapiens
  misc_RNA (1)...(19): siRNA sense strand
gcaccuggaaauugaaaga

SEQ ID NO: 1969640 - RNA, 19 nt, Homo sapiens
  misc_RNA (1)...(19): siRNA sense strand
caaguucuaguccaucaaa

SEQ ID NO: 1969641 - RNA, 19 nt, Homo sapiens
  misc_RNA (1)...(19): siRNA sense strand
cauggaagaacuuguagaa

SEQ ID NO: 1969642 - RNA, 19 nt, Homo sapiens
  misc_RNA (1)...(19): siRNA sense strand
uaugggauaucuacaucuu

SEQ ID NO: 1969643 - RNA, 19 nt, Homo sapiens
  misc_RNA (1)...(19): siRNA sense strand
ggauaucuacaucuuugaa

SEQ ID NO: 1969644 - RNA, 19 nt, Homo sapiens
  misc_RNA (1)...(19): siRNA sense strand
gacaguuccaggcaauaua

SEQ ID NO: 1969645 - RNA, 19 nt, Homo sapiens
  misc_RNA (1)...(19): siRNA sense strand
gcuuaaagaugaggcagau

SEQ ID NO: 1969646 - RNA, 19 nt, Homo sapiens
  misc_RNA (1)...(19): siRNA sense strand
gagcaacuucagauuucua

SEQ ID NO: 1969647 - RNA, 19 nt, Homo sapiens
  misc_RNA (1)...(19): siRNA sense strand
ccaggagcgagcugaaaua

SEQ ID NO: 1969648 - RNA, 19 nt, Homo sapiens
  misc_RNA (1)...(19): siRNA sense strand
gccaaguucuaguccauca

SEQ ID NO: 1969649 - RNA, 19 nt, Homo sapiens
  misc_RNA (1)...(19): siRNA sense strand
cacuaaaccucagaauaug

SEQ ID NO: 1969650 - RNA, 19 nt, Homo sapiens
  misc_RNA (1)...(19): siRNA sense strand
uuccuaaacucuugagguu

SEQ ID NO: 1969651 - RNA, 19 nt, Homo sapiens
  misc_RNA (1)...(19): siRNA sense strand
cccaaacacuucccuacug

SEQ ID NO: 1969652 - RNA, 19 nt, Homo sapiens
  misc_RNA (1)...(19): siRNA sense strand
guacagccuccaagucaug

SEQ ID NO: 1969653 - RNA, 19 nt, Homo sapiens
  misc_RNA (1)...(19): siRNA sense strand
uagcaacgccacuucaaau

SEQ ID NO: 1969654 - RNA, 19 nt, Homo sapiens
  misc_RNA (1)...(19): siRNA sense strand
ugucuuacaccaucuuaaa

SEQ ID NO: 1969655 - RNA, 19 nt, Homo sapiens
  misc_RNA (1)...(19): siRNA sense strand
acaaauuucuguccaagcu

SEQ ID NO: 1969656 - RNA, 19 nt, Homo sapiens
  misc_RNA (1)...(19): siRNA sense strand
ugagaucccuaaaaugaaa

SEQ ID NO: 1969657 - RNA, 19 nt, Homo sapiens
  misc_RNA (1)...(19): siRNA sense strand
cgugagauauaaagcuuca

SEQ ID NO: 1969658 - RNA, 19 nt, Homo sapiens
  misc_RNA (1)...(19): siRNA sense strand
cagaacauggucagaaguu

SEQ ID NO: 1969659 - RNA, 19 nt, Homo sapiens
  misc_RNA (1)...(19): siRNA sense strand
caaaagcaccuggaaauug

SEQ ID NO: 1969660 - RNA, 19 nt, Homo sapiens
  misc_RNA (1)...(19): siRNA sense strand
uacacuaaaccucagaaua

SEQ ID NO: 1969661 - RNA, 19 nt, Homo sapiens
  misc_RNA (1)...(19): siRNA sense strand
uuacaaagucacagauaga

SEQ ID NO: 1969662 - RNA, 19 nt, Homo sapiens
  misc_RNA (1)...(19): siRNA sense strand
ccagauaacagaacauggu

SEQ ID NO: 1969663 - RNA, 19 nt, Homo sapiens
  misc_RNA (1)...(19): siRNA sense strand
cauccaagagucaguguug

SEQ ID NO: 1969664 - RNA, 19 nt, Homo sapiens
  misc_RNA (1)...(19): siRNA sense strand
gaagaaaggugaugucaag

SEQ ID NO: 1969665 - RNA, 19 nt, Homo sapiens
  misc_RNA (1)...(19): siRNA sense strand
gaaagugucucuguucuug

SEQ ID NO: 1969666 - RNA, 19 nt, Homo sapiens
  misc_RNA (1)...(19): siRNA sense strand
gaacauuccucucaagcuu

SEQ ID NO: 1969667 - RNA, 19 nt, Homo sapiens
  misc_RNA (1)...(19): siRNA sense strand
ucucagagcuauuuacaaa

SEQ ID NO: 1969668 - RNA, 19 nt, Homo sapiens
  misc_RNA (1)...(19): siRNA sense strand
gcagagccguggagcuuug

SEQ ID NO: 1969669 - RNA, 19 nt, Homo sapiens
  misc_RNA (1)...(19): siRNA sense strand
ugaagaaugccaccuugua

SEQ ID NO: 1969670 - RNA, 19 nt, Homo sapiens
  misc_RNA (1)...(19): siRNA sense strand
gcaguuaaucucagagcua

SEQ ID NO: 1969671 - RNA, 19 nt, Homo sapiens
  misc_RNA (1)...(19): siRNA sense strand
gaagaaugccaccuuguac

SEQ ID NO: 1969672 - RNA, 19 nt, Homo sapiens
  misc_RNA (1)...(19): siRNA sense strand
guuaaucucagagcuauuu

SEQ ID NO: 1969673 - RNA, 19 nt, Homo sapiens
  misc_RNA (1)...(19): siRNA sense strand
caagcuuucugaagacugu

SEQ ID NO: 1969674 - RNA, 19 nt, Homo sapiens
  misc_RNA (1)...(19): siRNA sense strand
uuacacuccugcugacuug

SEQ ID NO: 1969675 - RNA, 19 nt, Homo sapiens
  misc_RNA (1)...(19): siRNA sense strand
caguuaaucucagagcuau

SEQ ID NO: 1969676 - RNA, 19 nt, Homo sapiens
  misc_RNA (1)...(19): siRNA sense strand
ggacaccgugcauggcaaa

SEQ ID NO: 1969677 - RNA, 19 nt, Homo sapiens
  misc_RNA (1)...(19): siRNA sense strand
gacugucuuuaccucaaua

SEQ ID NO: 1969678 - RNA, 19 nt, Homo sapiens
  misc_RNA (1)...(19): siRNA sense strand
ccguggagcuuugugaaga

SEQ ID NO: 1969679 - RNA, 19 nt, Homo sapiens
  misc_RNA (1)...(19): siRNA sense strand
gcguggcccucacuucugu

SEQ ID NO: 1969680 - RNA, 19 nt, Homo sapiens
  misc_RNA (1)...(19): siRNA sense strand
ggcccuugcugcccaugaa

SEQ ID NO: 1969681 - RNA, 19 nt, Homo sapiens
  misc_RNA (1)...(19): siRNA sense strand
ggagcuuugugaagaaugc

SEQ ID NO: 1969682 - RNA, 19 nt, Homo sapiens
  misc_RNA (1)...(19): siRNA sense strand
aagugucucuguucuuguu

SEQ ID NO: 1969683 - RNA, 19 nt, Homo sapiens
  misc_RNA (1)...(19): siRNA sense strand
cuuguacccuccuauguuc

SEQ ID NO: 1969684 - RNA, 19 nt, Homo sapiens
  misc_RNA (1)...(19): siRNA sense strand
gcccuuggcugagguaggu

SEQ ID NO: 1969685 - RNA, 19 nt, Homo sapiens
  misc_RNA (1)...(19): siRNA sense strand
caccgugcauggcaaagug

SEQ ID NO: 1969686 - RNA, 19 nt, Homo sapiens
  misc_RNA (1)...(19): siRNA sense strand
ucagagcuauuuacaaacc

SEQ ID NO: 1969687 - RNA, 19 nt, Homo sapiens
  misc_RNA (1)...(19): siRNA sense strand
cguggagcuuugugaagaa

SEQ ID NO: 1969688 - RNA, 19 nt, Homo sapiens
  misc_RNA (1)...(19): siRNA sense strand
caauaucgccugggcaucu

SEQ ID NO: 1969689 - RNA, 19 nt, Homo sapiens
  misc_RNA (1)...(19): siRNA sense strand
cagcuuagaaggauuugca

SEQ ID NO: 1969690 - RNA, 19 nt, Homo sapiens
  misc_RNA (1)...(19): siRNA sense strand
ugaagaaaggugaugucaa

SEQ ID NO: 1969691 - RNA, 19 nt, Homo sapiens
  misc_RNA (1)...(19): siRNA sense strand
ggcccucacuucuguucug

SEQ ID NO: 1969692 - RNA, 19 nt, Homo sapiens
  misc_RNA (1)...(19): siRNA sense strand
cucucaagcuuucugaaga

SEQ ID NO: 1969693 - RNA, 19 nt, Homo sapiens
  misc_RNA (1)...(19): siRNA sense strand
gggaacccaggcucuguga

SEQ ID NO: 1969694 - RNA, 19 nt, Homo sapiens
  misc_RNA (1)...(19): siRNA sense strand
gagccguggagcuuuguga

SEQ ID NO: 1969695 - RNA, 19 nt, Homo sapiens
  misc_RNA (1)...(19): siRNA sense strand
ggugcggcaucaaccuaug

SEQ ID NO: 1969696 - RNA, 19 nt, Homo sapiens
  misc_RNA (1)...(19): siRNA sense strand
acauuccucucaagcuuuc

SEQ ID NO: 1969697 - RNA, 19 nt, Homo sapiens
  misc_RNA (1)...(19): siRNA sense strand
ccuuguacccuccuauguu

SEQ ID NO: 1969698 - RNA, 19 nt, Homo sapiens
  misc_RNA (1)...(19): siRNA sense strand
gugaagaaaggugauguca

SEQ ID NO: 1969699 - RNA, 19 nt, Homo sapiens
  misc_RNA (1)...(19): siRNA sense strand
gagaguagcuggaguguac

SEQ ID NO: 1969700 - RNA, 19 nt, Homo sapiens
  misc_RNA (1)...(19): siRNA sense strand
gcugugaacugccauguga

SEQ ID NO: 1969701 - RNA, 19 nt, Homo sapiens
  misc_RNA (1)...(19): siRNA sense strand
ccaagccagucauccauua

SEQ ID NO: 1969702 - RNA, 19 nt, Homo sapiens
  misc_RNA (1)...(19): siRNA sense strand
gcaaggaugaugugaacua

SEQ ID NO: 1969703 - RNA, 19 nt, Homo sapiens
  misc_RNA (1)...(19): siRNA sense strand
aagcagaugucauggagua

SEQ ID NO: 1969704 - RNA, 19 nt, Homo sapiens
  misc_RNA (1)...(19): siRNA sense strand
ugacugagcucuucuucau

SEQ ID NO: 1969705 - RNA, 19 nt, Homo sapiens
  misc_RNA (1)...(19): siRNA sense strand
ggacaucaccauugacuuc

SEQ ID NO: 1969706 - RNA, 19 nt, Homo sapiens
  misc_RNA (1)...(19): siRNA sense strand
cagguuaaaucucuaaugu

SEQ ID NO: 1969707 - RNA, 19 nt, Homo sapiens
  misc_RNA (1)...(19): siRNA sense strand
uugaauaccuucuucuuga

SEQ ID NO: 1969708 - RNA, 19 nt, Homo sapiens
  misc_RNA (1)...(19): siRNA sense strand
ugacugaguugaauaccuu

SEQ ID NO: 1969709 - RNA, 19 nt, Homo sapiens
  misc_RNA (1)...(19): siRNA sense strand
guagaauucucuuuauugg

SEQ ID NO: 1969710 - RNA, 19 nt, Homo sapiens
  misc_RNA (1)...(19): siRNA sense strand
ggguagaauucucuuuauu

SEQ ID NO: 1969711 - RNA, 19 nt, Homo sapiens
  misc_RNA (1)...(19): siRNA sense strand
ggaccuauguucgaugguu

SEQ ID NO: 1969712 - RNA, 19 nt, Homo sapiens
  misc_RNA (1)...(19): siRNA sense strand
gguagaauucucuuuauug

SEQ ID NO: 1969713 - RNA, 19 nt, Homo sapiens
  misc_RNA (1)...(19): siRNA sense strand
caauggcguuggaaagaaa

SEQ ID NO: 1969714 - RNA, 19 nt, Homo sapiens
  misc_RNA (1)...(19): siRNA sense strand
ggaggccauuguuugcaua

SEQ ID NO: 1969715 - RNA, 19 nt, Homo sapiens
  misc_RNA (1)...(19): siRNA sense strand
ggucucugcuggacaauca

SEQ ID NO: 1969716 - RNA, 19 nt, Homo sapiens
  misc_RNA (1)...(19): siRNA sense strand
ggcauccucucuguuauuu

SEQ ID NO: 1969717 - RNA, 19 nt, Homo sapiens
  misc_RNA (1)...(19): siRNA sense strand
ugaagcauaucuuuguguu

SEQ ID NO: 1969718 - RNA, 19 nt, Homo sapiens
  misc_RNA (1)...(19): siRNA sense strand
gaccuauguucgaugguuu

SEQ ID NO: 1969719 - RNA, 19 nt, Homo sapiens
  misc_RNA (1)...(19): siRNA sense strand
ugaauaccuucuucuugaa

SEQ ID NO: 1969720 - RNA, 19 nt, Homo sapiens
  misc_RNA (1)...(19): siRNA sense strand
uggaggacaucaccauuga

SEQ ID NO: 1969721 - RNA, 19 nt, Homo sapiens
  misc_RNA (1)...(19): siRNA sense strand
gcagcugacugaguugaau

SEQ ID NO: 1969722 - RNA, 19 nt, Homo sapiens
  misc_RNA (1)...(19): siRNA sense strand
ccaaauacucuauguugug

SEQ ID NO: 1969723 - RNA, 19 nt, Homo sapiens
  misc_RNA (1)...(19): siRNA sense strand
ccacuuuccucugucugua

SEQ ID NO: 1969724 - RNA, 19 nt, Homo sapiens
  misc_RNA (1)...(19): siRNA sense strand
agagagcuguucugcaguu

SEQ ID NO: 1969725 - RNA, 19 nt, Homo sapiens
  misc_RNA (1)...(19): siRNA sense strand
gagcagguuaaaucucuaa

SEQ ID NO: 1969726 - RNA, 19 nt, Homo sapiens
  misc_RNA (1)...(19): siRNA sense strand
ugagacaguacuacgcuua

SEQ ID NO: 1969727 - RNA, 19 nt, Homo sapiens
  misc_RNA (1)...(19): siRNA sense strand
cauggucguuugccgguuu

SEQ ID NO: 1969728 - RNA, 19 nt, Homo sapiens
  misc_RNA (1)...(19): siRNA sense strand
gaauuucgagcagguuaaa

SEQ ID NO: 1969729 - RNA, 19 nt, Homo sapiens
  misc_RNA (1)...(19): siRNA sense strand
acacuauggucaccgagaa

SEQ ID NO: 1969730 - RNA, 19 nt, Homo sapiens
  misc_RNA (1)...(19): siRNA sense strand
guugugcuuuggcuucuuu

SEQ ID NO: 1969731 - RNA, 19 nt, Homo sapiens
  misc_RNA (1)...(19): siRNA sense strand
aggaugaugugaacuacaa

SEQ ID NO: 1969732 - RNA, 19 nt, Homo sapiens
  misc_RNA (1)...(19): siRNA sense strand
gacauccuguugugcaaug

SEQ ID NO: 1969733 - RNA, 19 nt, Homo sapiens
  misc_RNA (1)...(19): siRNA sense strand
ucuggcagcugacugaguu

SEQ ID NO: 1969734 - RNA, 19 nt, Homo sapiens
  misc_RNA (1)...(19): siRNA sense strand
ccagucauccauuaaguug

SEQ ID NO: 1969735 - RNA, 19 nt, Homo sapiens
  misc_RNA (1)...(19): siRNA sense strand
uaccagggaugacucuguu

SEQ ID NO: 1969736 - RNA, 19 nt, Homo sapiens
  misc_RNA (1)...(19): siRNA sense strand
gagaucuccuggcaucaca

SEQ ID NO: 1969737 - RNA, 19 nt, Homo sapiens
  misc_RNA (1)...(19): siRNA sense strand
caucaccauugacuucuuc

SEQ ID NO: 1969738 - RNA, 19 nt, Homo sapiens
  misc_RNA (1)...(19): siRNA sense strand
gcauaucuuuguguuccaa

SEQ ID NO: 1969739 - RNA, 19 nt, Homo sapiens
  misc_RNA (1)...(19): siRNA sense strand
gaagaucaagagagcuguu

SEQ ID NO: 1969740 - RNA, 19 nt, Homo sapiens
  misc_RNA (1)...(19): siRNA sense strand
ccugcuagcuggaccuaug

SEQ ID NO: 1969741 - RNA, 19 nt, Homo sapiens
  misc_RNA (1)...(19): siRNA sense strand
ugaguugaauaccuucuuc

SEQ ID NO: 1969742 - RNA, 19 nt, Homo sapiens
  misc_RNA (1)...(19): siRNA sense strand
gcauuuggcugggcauggu

SEQ ID NO: 1969743 - RNA, 19 nt, Homo sapiens
  misc_RNA (1)...(19): siRNA sense strand
ggacaaaagguucugaaga

SEQ ID NO: 1969744 - RNA, 19 nt, Homo sapiens
  misc_RNA (1)...(19): siRNA sense strand
aagcaaggaugaugugaac

SEQ ID NO: 1969745 - RNA, 19 nt, Homo sapiens
  misc_RNA (1)...(19): siRNA sense strand
gcagguuaaaucucuaaug

SEQ ID NO: 1969746 - RNA, 19 nt, Homo sapiens
  misc_RNA (1)...(19): siRNA sense strand
uguacggcaugauuuggua

SEQ ID NO: 1969747 - RNA, 19 nt, Homo sapiens
  misc_RNA (1)...(19): siRNA sense strand
guugaauaccuucuucuug

SEQ ID NO: 1969748 - RNA, 19 nt, Homo sapiens
  misc_RNA (1)...(19): siRNA sense strand
ccucauguacuucgccuuu

SEQ ID NO: 1969749 - RNA, 19 nt, Homo sapiens
  misc_RNA (1)...(19): siRNA sense strand
gacaaaagguucugaagac

SEQ ID NO: 1969750 - RNA, 19 nt, Homo sapiens
  misc_RNA (1)...(19): siRNA sense strand
gaucaacgagcagcaagug

SEQ ID NO: 1969751 - RNA, 19 nt, Homo sapiens
  misc_RNA (1)...(19): siRNA sense strand
ccacagugagacaguacua

SEQ ID NO: 1969752 - RNA, 19 nt, Homo sapiens
  misc_RNA (1)...(19): siRNA sense strand
cuggugggaucaagucauu

SEQ ID NO: 1969753 - RNA, 19 nt, Homo sapiens
  misc_RNA (1)...(19): siRNA sense strand
ucaucaguguguuagcuuu

SEQ ID NO: 1969754 - RNA, 19 nt, Homo sapiens
  misc_RNA (1)...(19): siRNA sense strand
uuccuacucuuccugaauu

SEQ ID NO: 1969755 - RNA, 19 nt, Homo sapiens
  misc_RNA (1)...(19): siRNA sense strand
caacaacgaaagccauucu

SEQ ID NO: 1969756 - RNA, 19 nt, Homo sapiens
  misc_RNA (1)...(19): siRNA sense strand
caagccagucauccauuaa

SEQ ID NO: 1969757 - RNA, 19 nt, Homo sapiens
  misc_RNA (1)...(19): siRNA sense strand
caaaucuucuuuucagaga

SEQ ID NO: 1969758 - RNA, 19 nt, Homo sapiens
  misc_RNA (1)...(19): siRNA sense strand
gcagaugucauggaguaug

SEQ ID NO: 1969759 - RNA, 19 nt, Homo sapiens
  misc_RNA (1)...(19): siRNA sense strand
gggcaagcuucaaggacau

SEQ ID NO: 1969760 - RNA, 19 nt, Homo sapiens
  misc_RNA (1)...(19): siRNA sense strand
agacccaaauacucuaugu

SEQ ID NO: 1969761 - RNA, 19 nt, Homo sapiens
  misc_RNA (1)...(19): siRNA sense strand
caaggaugaugugaacuac

SEQ ID NO: 1969762 - RNA, 19 nt, Homo sapiens
  misc_RNA (1)...(19): siRNA sense strand
ucgagcagguuaaaucucu

SEQ ID NO: 1969763 - RNA, 19 nt, Homo sapiens
  misc_RNA (1)...(19): siRNA sense strand
gcaugcaggcaacaacgaa

SEQ ID NO: 1969764 - RNA, 19 nt, Homo sapiens
  misc_RNA (1)...(19): siRNA sense strand
gcaccuacaguccagagau

SEQ ID NO: 1969765 - RNA, 19 nt, Homo sapiens
  misc_RNA (1)...(19): siRNA sense strand
cccaaauacucuauguugu

SEQ ID NO: 1969766 - RNA, 19 nt, Homo sapiens
  misc_RNA (1)...(19): siRNA sense strand
guagcuggaguguaccuuu

SEQ ID NO: 1969767 - RNA, 19 nt, Homo sapiens
  misc_RNA (1)...(19): siRNA sense strand
cagcugacugaguugaaua

SEQ ID NO: 1969768 - RNA, 19 nt, Homo sapiens
  misc_RNA (1)...(19): siRNA sense strand
uaagcaaggaugaugugaa

SEQ ID NO: 1969769 - RNA, 19 nt, Homo sapiens
  misc_RNA (1)...(19): siRNA sense strand
gaugugaacuacaaaaugc

SEQ ID NO: 1969770 - RNA, 19 nt, Homo sapiens
  misc_RNA (1)...(19): siRNA sense strand
gaccucauccagccuuaug

SEQ ID NO: 1969771 - RNA, 19 nt, Homo sapiens
  misc_RNA (1)...(19): siRNA sense strand
uuucaccacuuuccucugu

SEQ ID NO: 1969772 - RNA, 19 nt, Homo sapiens
  misc_RNA (1)...(19): siRNA sense strand
gaguguaccuuuucaugau

SEQ ID NO: 1969773 - RNA, 19 nt, Homo sapiens
  misc_RNA (1)...(19): siRNA sense strand
guggaggacaucaccauug

SEQ ID NO: 1969774 - RNA, 19 nt, Homo sapiens
  misc_RNA (1)...(19): siRNA sense strand
ccacaagggaagcagaugu

SEQ ID NO: 1969775 - RNA, 19 nt, Homo sapiens
  misc_RNA (1)...(19): siRNA sense strand
cgagcagguuaaaucucua

SEQ ID NO: 1969776 - RNA, 19 nt, Homo sapiens
  misc_RNA (1)...(19): siRNA sense strand
gcauaaaauuuggacaaga

SEQ ID NO: 1969777 - RNA, 19 nt, Homo sapiens
  misc_RNA (1)...(19): siRNA sense strand
ggccauuguuugcauaaaa

SEQ ID NO: 1969778 - RNA, 19 nt, Homo sapiens
  misc_RNA (1)...(19): siRNA sense strand
aagggaagcagaugucaug

SEQ ID NO: 1969779 - RNA, 19 nt, Homo sapiens
  misc_RNA (1)...(19): siRNA sense strand
acccaaauacucuauguug

SEQ ID NO: 1969780 - RNA, 19 nt, Homo sapiens
  misc_RNA (1)...(19): siRNA sense strand
gaagcauaucuuuguguuc

SEQ ID NO: 1969781 - RNA, 19 nt, Homo sapiens
  misc_RNA (1)...(19): siRNA sense strand
gaucaagagagcuguucug

SEQ ID NO: 1969782 - RNA, 19 nt, Homo sapiens
  misc_RNA (1)...(19): siRNA sense strand
gaggauuaucagccacuuu

SEQ ID NO: 1969783 - RNA, 19 nt, Homo sapiens
  misc_RNA (1)...(19): siRNA sense strand
gagcuguucugcaguucac

SEQ ID NO: 1969784 - RNA, 19 nt, Homo sapiens
  misc_RNA (1)...(19): siRNA sense strand
ccaucacccugcucagcuu

SEQ ID NO: 1969785 - RNA, 19 nt, Homo sapiens
  misc_RNA (1)...(19): siRNA sense strand
caccuacaguccagagauc

SEQ ID NO: 1969786 - RNA, 19 nt, Homo sapiens
  misc_RNA (1)...(19): siRNA sense strand
gaggacaucaccauugacu

SEQ ID NO: 1969787 - RNA, 19 nt, Homo sapiens
  misc_RNA (1)...(19): siRNA sense strand
ggcaacaacgaaagccauu

SEQ ID NO: 1969788 - RNA, 19 nt, Homo sapiens
  misc_RNA (1)...(19): siRNA sense strand
aauacucuauguugugcuu

SEQ ID NO: 1969789 - RNA, 19 nt, Homo sapiens
  misc_RNA (1)...(19): siRNA sense strand
ucuaagacccaaauacucu

SEQ ID NO: 1969790 - RNA, 19 nt, Homo sapiens
  misc_RNA (1)...(19): siRNA sense strand
gggaagcagaugucaugga

SEQ ID NO: 1969791 - RNA, 19 nt, Homo sapiens
  misc_RNA (1)...(19): siRNA sense strand
ucauguacuucgccuuuac

SEQ ID NO: 1969792 - RNA, 19 nt, Homo sapiens
  misc_RNA (1)...(19): siRNA sense strand
gaggccauuguuugcauaa

SEQ ID NO: 1969793 - RNA, 19 nt, Homo sapiens
  misc_RNA (1)...(19): siRNA sense strand
gccagucauccauuaaguu

SEQ ID NO: 1969794 - RNA, 19 nt, Homo sapiens
  misc_RNA (1)...(19): siRNA sense strand
ggaguguaccuuuucauga

SEQ ID NO: 1969795 - RNA, 19 nt, Homo sapiens
  misc_RNA (1)...(19): siRNA sense strand
ggauuaucagccacuuuga

SEQ ID NO: 1969796 - RNA, 19 nt, Homo sapiens
  misc_RNA (1)...(19): siRNA sense strand
cagaugucauggaguaugc

SEQ ID NO: 1969797 - RNA, 19 nt, Homo sapiens
  misc_RNA (1)...(19): siRNA sense strand
gggguagaauucucuuuau

SEQ ID NO: 1969798 - RNA, 19 nt, Homo sapiens
  misc_RNA (1)...(19): siRNA sense strand
gcaagcgcguaggaacaca

SEQ ID NO: 1969799 - RNA, 19 nt, Homo sapiens
  misc_RNA (1)...(19): siRNA sense strand
ggagagacaguuucuauua

SEQ ID NO: 1969800 - RNA, 19 nt, Homo sapiens
  misc_RNA (1)...(19): siRNA sense strand
ggaauuccuuauagaguua

SEQ ID NO: 1969801 - RNA, 19 nt, Homo sapiens
  misc_RNA (1)...(19): siRNA sense strand
gagaagaaguggaacaaga

SEQ ID NO: 1969802 - RNA, 19 nt, Homo sapiens
  misc_RNA (1)...(19): siRNA sense strand
gaacaagaagcagauaaua

SEQ ID NO: 1969803 - RNA, 19 nt, Homo sapiens
  misc_RNA (1)...(19): siRNA sense strand
cacaaugccuccauaauga

SEQ ID NO: 1969804 - RNA, 19 nt, Homo sapiens
  misc_RNA (1)...(19): siRNA sense strand
gagagacaguuucuauuau

SEQ ID NO: 1969805 - RNA, 19 nt, Homo sapiens
  misc_RNA (1)...(19): siRNA sense strand
gggaauuccuuauagaguu

SEQ ID NO: 1969806 - RNA, 19 nt, Homo sapiens
  misc_RNA (1)...(19): siRNA sense strand
gaaccuccacgguauauga

SEQ ID NO: 1969807 - RNA, 19 nt, Homo sapiens
  misc_RNA (1)...(19): siRNA sense strand
caacaaagcugggaauucc

SEQ ID NO: 1969808 - RNA, 19 nt, Homo sapiens
  misc_RNA (1)...(19): siRNA sense strand
ggagaagaaccagcaguua

SEQ ID NO: 1969809 - RNA, 19 nt, Homo sapiens
  misc_RNA (1)...(19): siRNA sense strand
gcuguaggcugcugugguu

SEQ ID NO: 1969810 - RNA, 19 nt, Homo sapiens
  misc_RNA (1)...(19): siRNA sense strand
gaaaauagcucagaaucuc

SEQ ID NO: 1969811 - RNA, 19 nt, Homo sapiens
  misc_RNA (1)...(19): siRNA sense strand
acacagugaucuuguucua

SEQ ID NO: 1969812 - RNA, 19 nt, Homo sapiens
  misc_RNA (1)...(19): siRNA sense strand
ggacuugggagaaccauug

SEQ ID NO: 1969813 - RNA, 19 nt, Homo sapiens
  misc_RNA (1)...(19): siRNA sense strand
ucacaaugccuccauaaug

SEQ ID NO: 1969814 - RNA, 19 nt, Homo sapiens
  misc_RNA (1)...(19): siRNA sense strand
gcaggcacuuuaaggcaaa

SEQ ID NO: 1969815 - RNA, 19 nt, Homo sapiens
  misc_RNA (1)...(19): siRNA sense strand
ggaacaagaagcagauaau

SEQ ID NO: 1969816 - RNA, 19 nt, Homo sapiens
  misc_RNA (1)...(19): siRNA sense strand
guauaugaguguaaaccaa

SEQ ID NO: 1969817 - RNA, 19 nt, Homo sapiens
  misc_RNA (1)...(19): siRNA sense strand
ccaaggacaucacagucaa

SEQ ID NO: 1969818 - RNA, 19 nt, Homo sapiens
  misc_RNA (1)...(19): siRNA sense strand
agagacaguuucuauuaug

SEQ ID NO: 1969819 - RNA, 19 nt, Homo sapiens
  misc_RNA (1)...(19): siRNA sense strand
ggaagaaaauugguuguug

SEQ ID NO: 1969820 - RNA, 19 nt, Homo sapiens
  misc_RNA (1)...(19): siRNA sense strand
gcugggaauuccuuauaga

SEQ ID NO: 1969821 - RNA, 19 nt, Homo sapiens
  misc_RNA (1)...(19): siRNA sense strand
gguuguugcugauagagaa

SEQ ID NO: 1969822 - RNA, 19 nt, Homo sapiens
  misc_RNA (1)...(19): siRNA sense strand
ucaagggccuggaaguugu

SEQ ID NO: 1969823 - RNA, 19 nt, Homo sapiens
  misc_RNA (1)...(19): siRNA sense strand
gagaaccauugcauuccuu

SEQ ID NO: 1969824 - RNA, 19 nt, Homo sapiens
  misc_RNA (1)...(19): siRNA sense strand
ggaggcagcauacauccaa

SEQ ID NO: 1969825 - RNA, 19 nt, Homo sapiens
  misc_RNA (1)...(19): siRNA sense strand
acagugaucuuguucuaag

SEQ ID NO: 1969826 - RNA, 19 nt, Homo sapiens
  misc_RNA (1)...(19): siRNA sense strand
cuaugaaccuccacgguau

SEQ ID NO: 1969827 - RNA, 19 nt, Homo sapiens
  misc_RNA (1)...(19): siRNA sense strand
gcaacaaagcugggaauuc

SEQ ID NO: 1969828 - RNA, 19 nt, Homo sapiens
  misc_RNA (1)...(19): siRNA sense strand
gagaagaaccagcaguuac

SEQ ID NO: 1969829 - RNA, 19 nt, Homo sapiens
  misc_RNA (1)...(19): siRNA sense strand
caucacaggaggcagcaua

SEQ ID NO: 1969830 - RNA, 19 nt, Homo sapiens
  misc_RNA (1)...(19): siRNA sense strand
ggagaugcuaagucuguuu

SEQ ID NO: 1969831 - RNA, 19 nt, Homo sapiens
  misc_RNA (1)...(19): siRNA sense strand
ggaagaguuuuauggaaga

SEQ ID NO: 1969832 - RNA, 19 nt, Homo sapiens
  misc_RNA (1)...(19): siRNA sense strand
caauggagauggagaugcu

SEQ ID NO: 1969833 - RNA, 19 nt, Homo sapiens
  misc_RNA (1)...(19): siRNA sense strand
ggaaggaagaucuaugaac

SEQ ID NO: 1969834 - RNA, 19 nt, Homo sapiens
  misc_RNA (1)...(19): siRNA sense strand
agaagaaguggaacaagaa

SEQ ID NO: 1969835 - RNA, 19 nt, Homo sapiens
  misc_RNA (1)...(19): siRNA sense strand
uuuaaaggaugcugauauc

SEQ ID NO: 1969836 - RNA, 19 nt, Homo sapiens
  misc_RNA (1)...(19): siRNA sense strand
ggagaaccauugcauuccu

SEQ ID NO: 1969837 - RNA, 19 nt, Homo sapiens
  misc_RNA (1)...(19): siRNA sense strand
gagacaguuucuauuaugc

SEQ ID NO: 1969838 - RNA, 19 nt, Homo sapiens
  misc_RNA (1)...(19): siRNA sense strand
ggaagccuuggaagaguuu

SEQ ID NO: 1969839 - RNA, 19 nt, Homo sapiens
  misc_RNA (1)...(19): siRNA sense strand
caacacacagugaucuugu

SEQ ID NO: 1969840 - RNA, 19 nt, Homo sapiens
  misc_RNA (1)...(19): siRNA sense strand
ugauagagaagaaguggaa

SEQ ID NO: 1969841 - RNA, 19 nt, Homo sapiens
  misc_RNA (1)...(19): siRNA sense strand
ucaaagaauacgaggagaa

SEQ ID NO: 1969842 - RNA, 19 nt, Homo sapiens
  misc_RNA (1)...(19): siRNA sense strand
aaggagcagucuuuggaaa

SEQ ID NO: 1969843 - RNA, 19 nt, Homo sapiens
  misc_RNA (1)...(19): siRNA sense strand
ugugguuggugauccauuu

SEQ ID NO: 1969844 - RNA, 19 nt, Homo sapiens
  misc_RNA (1)...(19): siRNA sense strand
aagaauacgaggagaagaa

SEQ ID NO: 1969845 - RNA, 19 nt, Homo sapiens
  misc_RNA (1)...(19): siRNA sense strand
uugacaaagugaagaagaa

SEQ ID NO: 1969846 - RNA, 19 nt, Homo sapiens
  misc_RNA (1)...(19): siRNA sense strand
ugugguuggugauccauuu

SEQ ID NO: 1969847 - RNA, 19 nt, Homo sapiens
  misc_RNA (1)...(19): siRNA sense strand
aagcugggaauuccuuaua

SEQ ID NO: 1969848 - RNA, 19 nt, Homo sapiens
  misc_RNA (1)...(19): siRNA sense strand
gaagaaguggaacaagaag

SEQ ID NO: 1969849 - RNA, 19 nt, Homo sapiens
  misc_RNA (1)...(19): siRNA sense strand
agauggagaugcuaagucu

SEQ ID NO: 1969850 - RNA, 19 nt, Homo sapiens
  misc_RNA (1)...(19): siRNA sense strand
gccuacaccucaguccuaa

SEQ ID NO: 1969851 - RNA, 19 nt, Homo sapiens
  misc_RNA (1)...(19): siRNA sense strand
uaaggcaaaugugcacugu

SEQ ID NO: 1969852 - RNA, 19 nt, Homo sapiens
  misc_RNA (1)...(19): siRNA sense strand
gugaagaagaacagacaaa

SEQ ID NO: 1969853 - RNA, 19 nt, Homo sapiens
  misc_RNA (1)...(19): siRNA sense strand
caaagcugggaauuccuua

SEQ ID NO: 1969854 - RNA, 19 nt, Homo sapiens
  misc_RNA (1)...(19): siRNA sense strand
caaagaauacgaggagaag

SEQ ID NO: 1969855 - RNA, 19 nt, Homo sapiens
  misc_RNA (1)...(19): siRNA sense strand
gaaccauugcauuccuuga

SEQ ID NO: 1969856 - RNA, 19 nt, Homo sapiens
  misc_RNA (1)...(19): siRNA sense strand
gagcaacaaagcugggaau

SEQ ID NO: 1969857 - RNA, 19 nt, Homo sapiens
  misc_RNA (1)...(19): siRNA sense strand
ccauugcauuccuugauca

SEQ ID NO: 1969858 - RNA, 19 nt, Homo sapiens
  misc_RNA (1)...(19): siRNA sense strand
gaagaagaacagacaaaau

SEQ ID NO: 1969859 - RNA, 19 nt, Homo sapiens
  misc_RNA (1)...(19): siRNA sense strand
gccaaggacaucacaguca

SEQ ID NO: 1969860 - RNA, 19 nt, Homo sapiens
  misc_RNA (1)...(19): siRNA sense strand
cacgguauaugaguguaaa

SEQ ID NO: 1969861 - RNA, 19 nt, Homo sapiens
  misc_RNA (1)...(19): siRNA sense strand
uguaggcugcugugguuua

SEQ ID NO: 1969862 - RNA, 19 nt, Homo sapiens
  misc_RNA (1)...(19): siRNA sense strand
gaaucucaaagcaucaaug

SEQ ID NO: 1969863 - RNA, 19 nt, Homo sapiens
  misc_RNA (1)...(19): siRNA sense strand
gcucagaaucucaaagcau

SEQ ID NO: 1969864 - RNA, 19 nt, Homo sapiens
  misc_RNA (1)...(19): siRNA sense strand
aaugugcacuguggacuug

SEQ ID NO: 1969865 - RNA, 19 nt, Homo sapiens
  misc_RNA (1)...(19): siRNA sense strand
gucaagggccuggaaguug

SEQ ID NO: 1969866 - RNA, 19 nt, Homo sapiens
  misc_RNA (1)...(19): siRNA sense strand
gcacuuuaaggcaaaugug

SEQ ID NO: 1969867 - RNA, 19 nt, Homo sapiens
  misc_RNA (1)...(19): siRNA sense strand
ucaagggaaggaagaucua

SEQ ID NO: 1969868 - RNA, 19 nt, Homo sapiens
  misc_RNA (1)...(19): siRNA sense strand
uauucacaaugccuccaua

SEQ ID NO: 1969869 - RNA, 19 nt, Homo sapiens
  misc_RNA (1)...(19): siRNA sense strand
gggaaggaagaucuaugaa

SEQ ID NO: 1969870 - RNA, 19 nt, Homo sapiens
  misc_RNA (1)...(19): siRNA sense strand
aauugcagcaggcacuuua

SEQ ID NO: 1969871 - RNA, 19 nt, Homo sapiens
  misc_RNA (1)...(19): siRNA sense strand
gagauggagaugcuaaguc

SEQ ID NO: 1969872 - RNA, 19 nt, Homo sapiens
  misc_RNA (1)...(19): siRNA sense strand
ggagcagucuuuggaaaau

SEQ ID NO: 1969873 - RNA, 19 nt, Homo sapiens
  misc_RNA (1)...(19): siRNA sense strand
ggagauggagaugcuaagu

SEQ ID NO: 1969874 - RNA, 19 nt, Homo sapiens
  misc_RNA (1)...(19): siRNA sense strand
acgcugcagucgaguguau

SEQ ID NO: 1969875 - RNA, 19 nt, Homo sapiens
  misc_RNA (1)...(19): siRNA sense strand
caaaguaaaggagcagucu

SEQ ID NO: 1969876 - RNA, 19 nt, Homo sapiens
  misc_RNA (1)...(19): siRNA sense strand
aggaagccuuggaagaguu

SEQ ID NO: 1969877 - RNA, 19 nt, Homo sapiens
  misc_RNA (1)...(19): siRNA sense strand
ccacgguauaugaguguaa

SEQ ID NO: 1969878 - RNA, 19 nt, Homo sapiens
  misc_RNA (1)...(19): siRNA sense strand
uaugaaccuccacgguaua

SEQ ID NO: 1969879 - RNA, 19 nt, Homo sapiens
  misc_RNA (1)...(19): siRNA sense strand
agggaaggaagaucuauga

SEQ ID NO: 1969880 - RNA, 19 nt, Homo sapiens
  misc_RNA (1)...(19): siRNA sense strand
gaggcagcauacauccaau

SEQ ID NO: 1969881 - RNA, 19 nt, Homo sapiens
  misc_RNA (1)...(19): siRNA sense strand
ugggagaaccauugcauuc

SEQ ID NO: 1969882 - RNA, 19 nt, Homo sapiens
  misc_RNA (1)...(19): siRNA sense strand
guaggcugcugugguuuac

SEQ ID NO: 1969883 - RNA, 19 nt, Homo sapiens
  misc_RNA (1)...(19): siRNA sense strand
cuaaucaagggaaggaaga

SEQ ID NO: 1969884 - RNA, 19 nt, Homo sapiens
  misc_RNA (1)...(19): siRNA sense strand
uagagaagaaguggaacaa

SEQ ID NO: 1969885 - RNA, 19 nt, Homo sapiens
  misc_RNA (1)...(19): siRNA sense strand
ccacaacacacagugaucu

SEQ ID NO: 1969886 - RNA, 19 nt, Homo sapiens
  misc_RNA (1)...(19): siRNA sense strand
uggaacaagaagcagauaa

SEQ ID NO: 1969887 - RNA, 19 nt, Homo sapiens
  misc_RNA (1)...(19): siRNA sense strand
gggccuggaaguuguuaga

SEQ ID NO: 1969888 - RNA, 19 nt, Homo sapiens
  misc_RNA (1)...(19): siRNA sense strand
ucagugauguugcauuccu

SEQ ID NO: 1969889 - RNA, 19 nt, Homo sapiens
  misc_RNA (1)...(19): siRNA sense strand
caagggaaggaagaucuau

SEQ ID NO: 1969890 - RNA, 19 nt, Homo sapiens
  misc_RNA (1)...(19): siRNA sense strand
ucagugauguugcauuccu

SEQ ID NO: 1969891 - RNA, 19 nt, Homo sapiens
  misc_RNA (1)...(19): siRNA sense strand
acaaugccuccauaaugaa

SEQ ID NO: 1969892 - RNA, 19 nt, Homo sapiens
  misc_RNA (1)...(19): siRNA sense strand
ccuuauagaguuauucaca

SEQ ID NO: 1969893 - RNA, 19 nt, Homo sapiens
  misc_RNA (1)...(19): siRNA sense strand
acaaagcugggaauuccuu

SEQ ID NO: 1969894 - RNA, 19 nt, Homo sapiens
  misc_RNA (1)...(19): siRNA sense strand
aaauagcucagaaucucaa

SEQ ID NO: 1969895 - RNA, 19 nt, Homo sapiens
  misc_RNA (1)...(19): siRNA sense strand
caaaauggcaugcacacau

SEQ ID NO: 1969896 - RNA, 19 nt, Homo sapiens
  misc_RNA (1)...(19): siRNA sense strand
caaagugaagaagaacaga

SEQ ID NO: 1969897 - RNA, 19 nt, Homo sapiens
  misc_RNA (1)...(19): siRNA sense strand
caguuucuauuaugcugau

SEQ ID NO: 1969898 - RNA, 19 nt, Homo sapiens
  misc_RNA (1)...(19): siRNA sense strand
caaugccuccauaaugaau

SEQ ID NO: 1969899 - RNA, 19 nt, Homo sapiens
  misc_RNA (1)...(19): siRNA sense strand
caacccagcuugcaugaaa

SEQ ID NO: 1969900 - RNA, 19 nt, Homo sapiens
  misc_RNA (1)...(19): siRNA sense strand
ggacaccacuuccauucuu

SEQ ID NO: 1969901 - RNA, 19 nt, Homo sapiens
  misc_RNA (1)...(19): siRNA sense strand
gaaggugucugacgucaca

SEQ ID NO: 1969902 - RNA, 19 nt, Homo sapiens
  misc_RNA (1)...(19): siRNA sense strand
gagcaaacucgaacugauu

SEQ ID NO: 1969903 - RNA, 19 nt, Homo sapiens
  misc_RNA (1)...(19): siRNA sense strand
gcaacuacagugacaacua

SEQ ID NO: 1969904 - RNA, 19 nt, Homo sapiens
  misc_RNA (1)...(19): siRNA sense strand
caacuacagugacaacuac

SEQ ID NO: 1969905 - RNA, 19 nt, Homo sapiens
  misc_RNA (1)...(19): siRNA sense strand
gcaucaaccucuccaugga

SEQ ID NO: 1969906 - RNA, 19 nt, Homo sapiens
  misc_RNA (1)...(19): siRNA sense strand
gagaagacccugagauguc

SEQ ID NO: 1969907 - RNA, 19 nt, Homo sapiens
  misc_RNA (1)...(19): siRNA sense strand
ccaaccagcuucaggauac

SEQ ID NO: 1969908 - RNA, 19 nt, Homo sapiens
  misc_RNA (1)...(19): siRNA sense strand
ugaaggaccaugugacaaa

SEQ ID NO: 1969909 - RNA, 19 nt, Homo sapiens
  misc_RNA (1)...(19): siRNA sense strand
aagcuuaagcgaaacuuua

SEQ ID NO: 1969910 - RNA, 19 nt, Homo sapiens
  misc_RNA (1)...(19): siRNA sense strand
gaaggaccaugugacaaag

SEQ ID NO: 1969911 - RNA, 19 nt, Homo sapiens
  misc_RNA (1)...(19): siRNA sense strand
gccacaggauccuaucuug

SEQ ID NO: 1969912 - RNA, 19 nt, Homo sapiens
  misc_RNA (1)...(19): siRNA sense strand
gcgagaaggaggcacguuu

SEQ ID NO: 1969913 - RNA, 19 nt, Homo sapiens
  misc_RNA (1)...(19): siRNA sense strand
uuccgaagcuuaagcgaaa

SEQ ID NO: 1969914 - RNA, 19 nt, Homo sapiens
  misc_RNA (1)...(19): siRNA sense strand
ggaggacaccacuuccauu

SEQ ID NO: 1969915 - RNA, 19 nt, Homo sapiens
  misc_RNA (1)...(19): siRNA sense strand
ggugugcaguccuuugaug

SEQ ID NO: 1969916 - RNA, 19 nt, Homo sapiens
  misc_RNA (1)...(19): siRNA sense strand
ggaagacaccagcuguuca

SEQ ID NO: 1969917 - RNA, 19 nt, Homo sapiens
  misc_RNA (1)...(19): siRNA sense strand
gcgaaacuuuaacgccuau

SEQ ID NO: 1969918 - RNA, 19 nt, Homo sapiens
  misc_RNA (1)...(19): siRNA sense strand
gaggacaccacuuccauuc

SEQ ID NO: 1969919 - RNA, 19 nt, Homo sapiens
  misc_RNA (1)...(19): siRNA sense strand
ggugaggacaugaguguga

SEQ ID NO: 1969920 - RNA, 19 nt, Homo sapiens
  misc_RNA (1)...(19): siRNA sense strand
gaagcuuaagcgaaacuuu

SEQ ID NO: 1969921 - RNA, 19 nt, Homo sapiens
  misc_RNA (1)...(19): siRNA sense strand
ccauugggcugcaacuaca

SEQ ID NO: 1969922 - RNA, 19 nt, Homo sapiens
  misc_RNA (1)...(19): siRNA sense strand
auggauggccucacucuua

SEQ ID NO: 1969923 - RNA, 19 nt, Homo sapiens
  misc_RNA (1)...(19): siRNA sense strand
ugagcaaacucgaacugau

SEQ ID NO: 1969924 - RNA, 19 nt, Homo sapiens
  misc_RNA (1)...(19): siRNA sense strand
ggccuggucuuccauggau

SEQ ID NO: 1969925 - RNA, 19 nt, Homo sapiens
  misc_RNA (1)...(19): siRNA sense strand
caacuaccaggaacugaug

SEQ ID NO: 1969926 - RNA, 19 nt, Homo sapiens
  misc_RNA (1)...(19): siRNA sense strand
ccucagcgauggcgagaag

SEQ ID NO: 1969927 - RNA, 19 nt, Homo sapiens
  misc_RNA (1)...(19): siRNA sense strand
gaaggaggcacguuuucua

SEQ ID NO: 1969928 - RNA, 19 nt, Homo sapiens
  misc_RNA (1)...(19): siRNA sense strand
gaagacaccagcuguucag

SEQ ID NO: 1969929 - RNA, 19 nt, Homo sapiens
  misc_RNA (1)...(19): siRNA sense strand
ccacaacacagccaugagu

SEQ ID NO: 1969930 - RNA, 19 nt, Homo sapiens
  misc_RNA (1)...(19): siRNA sense strand
ggccaagucaucauucuca

SEQ ID NO: 1969931 - RNA, 19 nt, Homo sapiens
  misc_RNA (1)...(19): siRNA sense strand
ccucaggugugcaguccuu

SEQ ID NO: 1969932 - RNA, 19 nt, Homo sapiens
  misc_RNA (1)...(19): siRNA sense strand
gggaagacaccagcuguuc

SEQ ID NO: 1969933 - RNA, 19 nt, Homo sapiens
  misc_RNA (1)...(19): siRNA sense strand
gugaggacaugagugugaa

SEQ ID NO: 1969934 - RNA, 19 nt, Homo sapiens
  misc_RNA (1)...(19): siRNA sense strand
gacaccacuuccauucuuc

SEQ ID NO: 1969935 - RNA, 19 nt, Homo sapiens
  misc_RNA (1)...(19): siRNA sense strand
gaaacuuuaacgccuaugg

SEQ ID NO: 1969936 - RNA, 19 nt, Homo sapiens
  misc_RNA (1)...(19): siRNA sense strand
cgagaagacccugagaugu

SEQ ID NO: 1969937 - RNA, 19 nt, Homo sapiens
  misc_RNA (1)...(19): siRNA sense strand
gaggagaagaggccauugg

SEQ ID NO: 1969938 - RNA, 19 nt, Homo sapiens
  misc_RNA (1)...(19): siRNA sense strand
ggaaggcgaggccaacaac

SEQ ID NO: 1969939 - RNA, 19 nt, Homo sapiens
  misc_RNA (1)...(19): siRNA sense strand
ccauggaggacaccacuuc

SEQ ID NO: 1969940 - RNA, 19 nt, Homo sapiens
  misc_RNA (1)...(19): siRNA sense strand
ggaggcacguuuucuagca

SEQ ID NO: 1969941 - RNA, 19 nt, Homo sapiens
  misc_RNA (1)...(19): siRNA sense strand
aaggcgaggccaacaacua

SEQ ID NO: 1969942 - RNA, 19 nt, Homo sapiens
  misc_RNA (1)...(19): siRNA sense strand
caggugugcaguccuuuga

SEQ ID NO: 1969943 - RNA, 19 nt, Homo sapiens
  misc_RNA (1)...(19): siRNA sense strand
acgagaagacccugagaug

SEQ ID NO: 1969944 - RNA, 19 nt, Homo sapiens
  misc_RNA (1)...(19): siRNA sense strand
uggauggccucacucuuac

SEQ ID NO: 1969945 - RNA, 19 nt, Homo sapiens
  misc_RNA (1)...(19): siRNA sense strand
gcaaacucgaacugauuuc

SEQ ID NO: 1969946 - RNA, 19 nt, Homo sapiens
  misc_RNA (1)...(19): siRNA sense strand
uaucuugggccugcauuug

SEQ ID NO: 1969947 - RNA, 19 nt, Homo sapiens
  misc_RNA (1)...(19): siRNA sense strand
ggccacaggauccuaucuu

SEQ ID NO: 1969948 - RNA, 19 nt, Homo sapiens
  misc_RNA (1)...(19): siRNA sense strand
gcauugaaggagagaauua

SEQ ID NO: 1969949 - RNA, 19 nt, Homo sapiens
  misc_RNA (1)...(19): siRNA sense strand
uuaccucccucaaccaaua

SEQ ID NO: 1969950 - RNA, 19 nt, Homo sapiens
  misc_RNA (1)...(19): siRNA sense strand
cauagcaucuuuccuguca

SEQ ID NO: 1969951 - RNA, 19 nt, Homo sapiens
  misc_RNA (1)...(19): siRNA sense strand
gcuggaaucuggucaccuu

SEQ ID NO: 1969952 - RNA, 19 nt, Homo sapiens
  misc_RNA (1)...(19): siRNA sense strand
caaccaauauauagacaca

SEQ ID NO: 1969953 - RNA, 19 nt, Homo sapiens
  misc_RNA (1)...(19): siRNA sense strand
gaguacaugcggguuauua

SEQ ID NO: 1969954 - RNA, 19 nt, Homo sapiens
  misc_RNA (1)...(19): siRNA sense strand
gagaaccaguguaugucaa

SEQ ID NO: 1969955 - RNA, 19 nt, Homo sapiens
  misc_RNA (1)...(19): siRNA sense strand
gaagcucaaugugcauaug

SEQ ID NO: 1969956 - RNA, 19 nt, Homo sapiens
  misc_RNA (1)...(19): siRNA sense strand
acaaugaaaugaagcucaa

SEQ ID NO: 1969957 - RNA, 19 nt, Homo sapiens
  misc_RNA (1)...(19): siRNA sense strand
ugagcaacaugauugagaa

SEQ ID NO: 1969958 - RNA, 19 nt, Homo sapiens
  misc_RNA (1)...(19): siRNA sense strand
gaggaguacaugcggguua

SEQ ID NO: 1969959 - RNA, 19 nt, Homo sapiens
  misc_RNA (1)...(19): siRNA sense strand
gcaacaugauugagaacca

SEQ ID NO: 1969960 - RNA, 19 nt, Homo sapiens
  misc_RNA (1)...(19): siRNA sense strand
auagacacauagcaucuuu

SEQ ID NO: 1969961 - RNA, 19 nt, Homo sapiens
  misc_RNA (1)...(19): siRNA sense strand
cugcucaaguuccagauuu

SEQ ID NO: 1969962 - RNA, 19 nt, Homo sapiens
  misc_RNA (1)...(19): siRNA sense strand
guuauaggcggguguuuga

SEQ ID NO: 1969963 - RNA, 19 nt, Homo sapiens
  misc_RNA (1)...(19): siRNA sense strand
caacuuguucaaauucuug

SEQ ID NO: 1969964 - RNA, 19 nt, Homo sapiens
  misc_RNA (1)...(19): siRNA sense strand
acaggugcauuugagauaa

SEQ ID NO: 1969965 - RNA, 19 nt, Homo sapiens
  misc_RNA (1)...(19): siRNA sense strand
gaaccaguguaugucaaca

SEQ ID NO: 1969966 - RNA, 19 nt, Homo sapiens
  misc_RNA (1)...(19): siRNA sense strand
uaagguuuaugcauguaug

SEQ ID NO: 1969967 - RNA, 19 nt, Homo sapiens
  misc_RNA (1)...(19): siRNA sense strand
caacaggugcauuugagau

SEQ ID NO: 1969968 - RNA, 19 nt, Homo sapiens
  misc_RNA (1)...(19): siRNA sense strand
ccagacauccgcauugaag

SEQ ID NO: 1969969 - RNA, 19 nt, Homo sapiens
  misc_RNA (1)...(19): siRNA sense strand
ucaaugugcauauggauuc

SEQ ID NO: 1969970 - RNA, 19 nt, Homo sapiens
  misc_RNA (1)...(19): siRNA sense strand
caucuuuccugucagucuu

SEQ ID NO: 1969971 - RNA, 19 nt, Homo sapiens
  misc_RNA (1)...(19): siRNA sense strand
uaugucaacaggugcauuu

SEQ ID NO: 1969972 - RNA, 19 nt, Homo sapiens
  misc_RNA (1)...(19): siRNA sense strand
gagaauuaccucccucaac

SEQ ID NO: 1969973 - RNA, 19 nt, Homo sapiens
  misc_RNA (1)...(19): siRNA sense strand
gugcauuugagauaacuuu

SEQ ID NO: 1969974 - RNA, 19 nt, Homo sapiens
  misc_RNA (1)...(19): siRNA sense strand
uagcaucuuuccugucagu

SEQ ID NO: 1969975 - RNA, 19 nt, Homo sapiens
  misc_RNA (1)...(19): siRNA sense strand
ugauugagaaccaguguau

SEQ ID NO: 1969976 - RNA, 19 nt, Homo sapiens
  misc_RNA (1)...(19): siRNA sense strand
uaauaauuguuggcaagga

SEQ ID NO: 1969977 - RNA, 19 nt, Homo sapiens
  misc_RNA (1)...(19): siRNA sense strand
uguguuuccugagguuaua

SEQ ID NO: 1969978 - RNA, 19 nt, Homo sapiens
  misc_RNA (1)...(19): siRNA sense strand
guaccuguguggucuaagc

SEQ ID NO: 1969979 - RNA, 19 nt, Homo sapiens
  misc_RNA (1)...(19): siRNA sense strand
gccaagaaaauaagguuua

SEQ ID NO: 1969980 - RNA, 19 nt, Homo sapiens
  misc_RNA (1)...(19): siRNA sense strand
ugaaaugaagcucaaugug

SEQ ID NO: 1969981 - RNA, 19 nt, Homo sapiens
  misc_RNA (1)...(19): siRNA sense strand
aauaauuguuggcaaggau

SEQ ID NO: 1969982 - RNA, 19 nt, Homo sapiens
  misc_RNA (1)...(19): siRNA sense strand
ggcggguguuugaggagua

SEQ ID NO: 1969983 - RNA, 19 nt, Homo sapiens
  misc_RNA (1)...(19): siRNA sense strand
guacccagacauccgcauu

SEQ ID NO: 1969984 - RNA, 19 nt, Homo sapiens
  misc_RNA (1)...(19): siRNA sense strand
gguuauaggcggguguuug

SEQ ID NO: 1969985 - RNA, 19 nt, Homo sapiens
  misc_RNA (1)...(19): siRNA sense strand
caaugugcauauggauuca

SEQ ID NO: 1969986 - RNA, 19 nt, Homo sapiens
  misc_RNA (1)...(19): siRNA sense strand
aacaggugcauuugagaua

SEQ ID NO: 1969987 - RNA, 19 nt, Homo sapiens
  misc_RNA (1)...(19): siRNA sense strand
uaugaugguuuucuucuug

SEQ ID NO: 1969988 - RNA, 19 nt, Homo sapiens
  misc_RNA (1)...(19): siRNA sense strand
ccugucagucuucaaacua

SEQ ID NO: 1969989 - RNA, 19 nt, Homo sapiens
  misc_RNA (1)...(19): siRNA sense strand
ugagaaccaguguauguca

SEQ ID NO: 1969990 - RNA, 19 nt, Homo sapiens
  misc_RNA (1)...(19): siRNA sense strand
agacauccgcauugaagga

SEQ ID NO: 1969991 - RNA, 19 nt, Homo sapiens
  misc_RNA (1)...(19): siRNA sense strand
ucaaguuccagauuugugu

SEQ ID NO: 1969992 - RNA, 19 nt, Homo sapiens
  misc_RNA (1)...(19): siRNA sense strand
acccagacauccgcauuga

SEQ ID NO: 1969993 - RNA, 19 nt, Homo sapiens
  misc_RNA (1)...(19): siRNA sense strand
gcaguggggccaagaaaau

SEQ ID NO: 1969994 - RNA, 19 nt, Homo sapiens
  misc_RNA (1)...(19): siRNA sense strand
gguuuaugcauguaugaug

SEQ ID NO: 1969995 - RNA, 19 nt, Homo sapiens
  misc_RNA (1)...(19): siRNA sense strand
gaaagaagccuaccgauau

SEQ ID NO: 1969996 - RNA, 19 nt, Homo sapiens
  misc_RNA (1)...(19): siRNA sense strand
gaacauguuuguagucuga

SEQ ID NO: 1969997 - RNA, 19 nt, Homo sapiens
  misc_RNA (1)...(19): siRNA sense strand
gaaggcugcugauaugaua

SEQ ID NO: 1969998 - RNA, 19 nt, Homo sapiens
  misc_RNA (1)...(19): siRNA sense strand
gagacuggcuuucagauuu

SEQ ID NO: 1969999 - RNA, 19 nt, Homo sapiens
  misc_RNA (1)...(19): siRNA sense strand
gagaaaugcugaagagaga

SEQ ID NO: 1970000 - RNA, 19 nt, Homo sapiens
  misc_RNA (1)...(19): siRNA sense strand
ggaaagaagccuaccgaua

SEQ ID NO: 1970001 - RNA, 19 nt, Homo sapiens
  misc_RNA (1)...(19): siRNA sense strand
ggagaaauuuccacaaagu

SEQ ID NO: 1970002 - RNA, 19 nt, Homo sapiens
  misc_RNA (1)...(19): siRNA sense strand
gauaugauacggagaaauu

SEQ ID NO: 1970003 - RNA, 19 nt, Homo sapiens
  misc_RNA (1)...(19): siRNA sense strand
ggguaaaucugccacauau

SEQ ID NO: 1970004 - RNA, 19 nt, Homo sapiens
  misc_RNA (1)...(19): siRNA sense strand
ucugagagcugagaauaua

SEQ ID NO: 1970005 - RNA, 19 nt, Homo sapiens
  misc_RNA (1)...(19): siRNA sense strand
gcucucagauugaaugcua

SEQ ID NO: 1970006 - RNA, 19 nt, Homo sapiens
  misc_RNA (1)...(19): siRNA sense strand
gggaagcucuauagcauug

SEQ ID NO: 1970007 - RNA, 19 nt, Homo sapiens
  misc_RNA (1)...(19): siRNA sense strand
gaugaaaccuaccuaccuu

SEQ ID NO: 1970008 - RNA, 19 nt, Homo sapiens
  misc_RNA (1)...(19): siRNA sense strand
gaaauggguucagagaaau

SEQ ID NO: 1970009 - RNA, 19 nt, Homo sapiens
  misc_RNA (1)...(19): siRNA sense strand
gugccaagcucucagauug

SEQ ID NO: 1970010 - RNA, 19 nt, Homo sapiens
  misc_RNA (1)...(19): siRNA sense strand
ggacacugaagauggauua

SEQ ID NO: 1970011 - RNA, 19 nt, Homo sapiens
  misc_RNA (1)...(19): siRNA sense strand
uaaaggcuguaauuacuug

SEQ ID NO: 1970012 - RNA, 19 nt, Homo sapiens
  misc_RNA (1)...(19): siRNA sense strand
aaagaagccuaccgauauu

SEQ ID NO: 1970013 - RNA, 19 nt, Homo sapiens
  misc_RNA (1)...(19): siRNA sense strand
acaaagugauucaggauga

SEQ ID NO: 1970014 - RNA, 19 nt, Homo sapiens
  misc_RNA (1)...(19): siRNA sense strand
guaaaucugccacauauuc

SEQ ID NO: 1970015 - RNA, 19 nt, Homo sapiens
  misc_RNA (1)...(19): siRNA sense strand
gagauacuuugaagaacuu

SEQ ID NO: 1970016 - RNA, 19 nt, Homo sapiens
  misc_RNA (1)...(19): siRNA sense strand
ccaagugucugaugagauc

SEQ ID NO: 1970017 - RNA, 19 nt, Homo sapiens
  misc_RNA (1)...(19): siRNA sense strand
ccaaaugucuguggucaau

SEQ ID NO: 1970018 - RNA, 19 nt, Homo sapiens
  misc_RNA (1)...(19): siRNA sense strand
gaagaccgguuuguauaca

SEQ ID NO: 1970019 - RNA, 19 nt, Homo sapiens
  misc_RNA (1)...(19): siRNA sense strand
uaacagaauccuacgugua

SEQ ID NO: 1970020 - RNA, 19 nt, Homo sapiens
  misc_RNA (1)...(19): siRNA sense strand
cauguugucccaagaguua

SEQ ID NO: 1970021 - RNA, 19 nt, Homo sapiens
  misc_RNA (1)...(19): siRNA sense strand
gcagaaggaccgcaucaga

SEQ ID NO: 1970022 - RNA, 19 nt, Homo sapiens
  misc_RNA (1)...(19): siRNA sense strand
gaggacagauggguaaauc

SEQ ID NO: 1970023 - RNA, 19 nt, Homo sapiens
  misc_RNA (1)...(19): siRNA sense strand
ucccaagaguuauuguuua

SEQ ID NO: 1970024 - RNA, 19 nt, Homo sapiens
  misc_RNA (1)...(19): siRNA sense strand
gguauaacccaaauuugaa

SEQ ID NO: 1970025 - RNA, 19 nt, Homo sapiens
  misc_RNA (1)...(19): siRNA sense strand
ggacauggcaacuuuaguc

SEQ ID NO: 1970026 - RNA, 19 nt, Homo sapiens
  misc_RNA (1)...(19): siRNA sense strand
uggaggacauggcaacuuu

SEQ ID NO: 1970027 - RNA, 19 nt, Homo sapiens
  misc_RNA (1)...(19): siRNA sense strand
guauguugcuggaucaaug

SEQ ID NO: 1970028 - RNA, 19 nt, Homo sapiens
  misc_RNA (1)...(19): siRNA sense strand
aaacgaagaggcaguaaga

SEQ ID NO: 1970029 - RNA, 19 nt, Homo sapiens
  misc_RNA (1)...(19): siRNA sense strand
gaugaggacagauggguaa

SEQ ID NO: 1970030 - RNA, 19 nt, Homo sapiens
  misc_RNA (1)...(19): siRNA sense strand
guagucugaugacaagaaa

SEQ ID NO: 1970031 - RNA, 19 nt, Homo sapiens
  misc_RNA (1)...(19): siRNA sense strand
gagcugagaauauacaauc

SEQ ID NO: 1970032 - RNA, 19 nt, Homo sapiens
  misc_RNA (1)...(19): siRNA sense strand
ucagacagaugcaagagau

SEQ ID NO: 1970033 - RNA, 19 nt, Homo sapiens
  misc_RNA (1)...(19): siRNA sense strand
gaugugaucaugguuauug

SEQ ID NO: 1970034 - RNA, 19 nt, Homo sapiens
  misc_RNA (1)...(19): siRNA sense strand
ucugaaggcugcugauaug

SEQ ID NO: 1970035 - RNA, 19 nt, Homo sapiens
  misc_RNA (1)...(19): siRNA sense strand
acacagagauacccuaugc

SEQ ID NO: 1970036 - RNA, 19 nt, Homo sapiens
  misc_RNA (1)...(19): siRNA sense strand
ugaaguuugugucaaguug

SEQ ID NO: 1970037 - RNA, 19 nt, Homo sapiens
  misc_RNA (1)...(19): siRNA sense strand
agagagauacuuugaagaa

SEQ ID NO: 1970038 - RNA, 19 nt, Homo sapiens
  misc_RNA (1)...(19): siRNA sense strand
gcccagaagccgaggauuu

SEQ ID NO: 1970039 - RNA, 19 nt, Homo sapiens
  misc_RNA (1)...(19): siRNA sense strand
uaaacaguaucggaaagaa

SEQ ID NO: 1970040 - RNA, 19 nt, Homo sapiens
  misc_RNA (1)...(19): siRNA sense strand
gcugguagccaauaaugaa

SEQ ID NO: 1970041 - RNA, 19 nt, Homo sapiens
  misc_RNA (1)...(19): siRNA sense strand
acggagaaauuuccacaaa

SEQ ID NO: 1970042 - RNA, 19 nt, Homo sapiens
  misc_RNA (1)...(19): siRNA sense strand
gccaagcucucagauugaa

SEQ ID NO: 1970043 - RNA, 19 nt, Homo sapiens
  misc_RNA (1)...(19): siRNA sense strand
gcacacagagauacccuau

SEQ ID NO: 1970044 - RNA, 19 nt, Homo sapiens
  misc_RNA (1)...(19): siRNA sense strand
gaagcucuauagcauugga

SEQ ID NO: 1970045 - RNA, 19 nt, Homo sapiens
  misc_RNA (1)...(19): siRNA sense strand
uaaugaaguuugugucaag

SEQ ID NO: 1970046 - RNA, 19 nt, Homo sapiens
  misc_RNA (1)...(19): siRNA sense strand
agagagagauacuuugaag

SEQ ID NO: 1970047 - RNA, 19 nt, Homo sapiens
  misc_RNA (1)...(19): siRNA sense strand
ggaaauuacaguugauucu

SEQ ID NO: 1970048 - RNA, 19 nt, Homo sapiens
  misc_RNA (1)...(19): siRNA sense strand
auccugagcuugauaaaug

SEQ ID NO: 1970049 - RNA, 19 nt, Homo sapiens
  misc_RNA (1)...(19): siRNA sense strand
agaaagguauaacccaaau

SEQ ID NO: 1970050 - RNA, 19 nt, Homo sapiens
  misc_RNA (1)...(19): siRNA sense strand
cuucaucucucaaauugug

SEQ ID NO: 1970051 - RNA, 19 nt, Homo sapiens
  misc_RNA (1)...(19): siRNA sense strand
uguggucaauucaaacuuu

SEQ ID NO: 1970052 - RNA, 19 nt, Homo sapiens
  misc_RNA (1)...(19): siRNA sense strand
aaaugucuguggucaauuc

SEQ ID NO: 1970053 - RNA, 19 nt, Homo sapiens
  misc_RNA (1)...(19): siRNA sense strand
gccgacagguuccuacuca

SEQ ID NO: 1970054 - RNA, 19 nt, Homo sapiens
  misc_RNA (1)...(19): siRNA sense strand
gguagccaauaaugaaguu

SEQ ID NO: 1970055 - RNA, 19 nt, Homo sapiens
  misc_RNA (1)...(19): siRNA sense strand
gaaaugcugaagagagaga

SEQ ID NO: 1970056 - RNA, 19 nt, Homo sapiens
  misc_RNA (1)...(19): siRNA sense strand
gaagagagagagagauacu

SEQ ID NO: 1970057 - RNA, 19 nt, Homo sapiens
  misc_RNA (1)...(19): siRNA sense strand
ugucaaagcacuagccauu

SEQ ID NO: 1970058 - RNA, 19 nt, Homo sapiens
  misc_RNA (1)...(19): siRNA sense strand
ggaggacauggcaacuuua

SEQ ID NO: 1970059 - RNA, 19 nt, Homo sapiens
  misc_RNA (1)...(19): siRNA sense strand
ucaaagggaagcucuauag

SEQ ID NO: 1970060 - RNA, 19 nt, Homo sapiens
  misc_RNA (1)...(19): siRNA sense strand
ggcugcaucucuucaggua

SEQ ID NO: 1970061 - RNA, 19 nt, Homo sapiens
  misc_RNA (1)...(19): siRNA sense strand
agagagagagagauacuuu

SEQ ID NO: 1970062 - RNA, 19 nt, Homo sapiens
  misc_RNA (1)...(19): siRNA sense strand
agacuggcuuucagauuug

SEQ ID NO: 1970063 - RNA, 19 nt, Homo sapiens
  misc_RNA (1)...(19): siRNA sense strand
gauauugugcggagaggaa

SEQ ID NO: 1970064 - RNA, 19 nt, Homo sapiens
  misc_RNA (1)...(19): siRNA sense strand
ccagccaagugucugauga

SEQ ID NO: 1970065 - RNA, 19 nt, Homo sapiens
  misc_RNA (1)...(19): siRNA sense strand
ggacaugcuguugcaguaa

SEQ ID NO: 1970066 - RNA, 19 nt, Homo sapiens
  misc_RNA (1)...(19): siRNA sense strand
ugccacauauucauaauca

SEQ ID NO: 1970067 - RNA, 19 nt, Homo sapiens
  misc_RNA (1)...(19): siRNA sense strand
gaaauuacaguugauucug

SEQ ID NO: 1970068 - RNA, 19 nt, Homo sapiens
  misc_RNA (1)...(19): siRNA sense strand
gaaauuuccacaaagugau

SEQ ID NO: 1970069 - RNA, 19 nt, Homo sapiens
  misc_RNA (1)...(19): siRNA sense strand
cgacagguuccuacucauu

SEQ ID NO: 1970070 - RNA, 19 nt, Homo sapiens
  misc_RNA (1)...(19): siRNA sense strand
aaaccuaccuaccuuacuc

SEQ ID NO: 1970071 - RNA, 19 nt, Homo sapiens
  misc_RNA (1)...(19): siRNA sense strand
ugucuguggucaauucaaa

SEQ ID NO: 1970072 - RNA, 19 nt, Homo sapiens
  misc_RNA (1)...(19): siRNA sense strand
aagggaagcucuauagcau

SEQ ID NO: 1970073 - RNA, 19 nt, Homo sapiens
  misc_RNA (1)...(19): siRNA sense strand
gaaagguauaacccaaauu

SEQ ID NO: 1970074 - RNA, 19 nt, Homo sapiens
  misc_RNA (1)...(19): siRNA sense strand
uggaagccguaaucgagua

SEQ ID NO: 1970075 - RNA, 19 nt, Homo sapiens
  misc_RNA (1)...(19): siRNA sense strand
uggacaugcuguugcagua

SEQ ID NO: 1970076 - RNA, 19 nt, Homo sapiens
  misc_RNA (1)...(19): siRNA sense strand
uaagugaaugugugggaua

SEQ ID NO: 1970077 - RNA, 19 nt, Homo sapiens
  misc_RNA (1)...(19): siRNA sense strand
gcugauaugauacggagaa

SEQ ID NO: 1970078 - RNA, 19 nt, Homo sapiens
  misc_RNA (1)...(19): siRNA sense strand
ggaugcuucuuccuccuau

SEQ ID NO: 1970079 - RNA, 19 nt, Homo sapiens
  misc_RNA (1)...(19): siRNA sense strand
cugaugagauccuugaaag

SEQ ID NO: 1970080 - RNA, 19 nt, Homo sapiens
  misc_RNA (1)...(19): siRNA sense strand
ggccucuucugcgacauua

SEQ ID NO: 1970081 - RNA, 19 nt, Homo sapiens
  misc_RNA (1)...(19): siRNA sense strand
guggaaucuuugccgcuua

SEQ ID NO: 1970082 - RNA, 19 nt, Homo sapiens
  misc_RNA (1)...(19): siRNA sense strand
cacugaagauggauuaaag

SEQ ID NO: 1970083 - RNA, 19 nt, Homo sapiens
  misc_RNA (1)...(19): siRNA sense strand
gagagagagauacuuugaa

SEQ ID NO: 1970084 - RNA, 19 nt, Homo sapiens
  misc_RNA (1)...(19): siRNA sense strand
agaaauuuccacaaaguga

SEQ ID NO: 1970085 - RNA, 19 nt, Homo sapiens
  misc_RNA (1)...(19): siRNA sense strand
gcagccauuugcuauuaca

SEQ ID NO: 1970086 - RNA, 19 nt, Homo sapiens
  misc_RNA (1)...(19): siRNA sense strand
cccaagaguuauuguuuag

SEQ ID NO: 1970087 - RNA, 19 nt, Homo sapiens
  misc_RNA (1)...(19): siRNA sense strand
uguggcaauucauagcuua

SEQ ID NO: 1970088 - RNA, 19 nt, Homo sapiens
  misc_RNA (1)...(19): siRNA sense strand
uugaagaccgguuuguaua

SEQ ID NO: 1970089 - RNA, 19 nt, Homo sapiens
  misc_RNA (1)...(19): siRNA sense strand
gggaacauguuuguagucu

SEQ ID NO: 1970090 - RNA, 19 nt, Homo sapiens
  misc_RNA (1)...(19): siRNA sense strand
cgacaugucaaaccagaga

SEQ ID NO: 1970091 - RNA, 19 nt, Homo sapiens
  misc_RNA (1)...(19): siRNA sense strand
agagagagagauacuuuga

SEQ ID NO: 1970092 - RNA, 19 nt, Homo sapiens
  misc_RNA (1)...(19): siRNA sense strand
aacuucaucucucaaauug

SEQ ID NO: 1970093 - RNA, 19 nt, Homo sapiens
  misc_RNA (1)...(19): siRNA sense strand
cugaagagagagagagaua

SEQ ID NO: 1970094 - RNA, 19 nt, Homo sapiens
  misc_RNA (1)...(19): siRNA sense strand
guagagccacugcuuguca

SEQ ID NO: 1970095 - RNA, 19 nt, Homo sapiens
  misc_RNA (1)...(19): siRNA sense strand
ggaaagaggugcuggagua

SEQ ID NO: 1970096 - RNA, 19 nt, Homo sapiens
  misc_RNA (1)...(19): siRNA sense strand
ugacagggaucaaguuugu

SEQ ID NO: 1970097 - RNA, 19 nt, Homo sapiens
  misc_RNA (1)...(19): siRNA sense strand
ggagacagacacauucaaa

SEQ ID NO: 1970098 - RNA, 19 nt, Homo sapiens
  misc_RNA (1)...(19): siRNA sense strand
uagauucucuucuccgaaa

SEQ ID NO: 1970099 - RNA, 19 nt, Homo sapiens
  misc_RNA (1)...(19): siRNA sense strand
cagggaagcucaggcauug

SEQ ID NO: 1970100 - RNA, 19 nt, Homo sapiens
  misc_RNA (1)...(19): siRNA sense strand
gaucaaguuugugguucua

SEQ ID NO: 1970101 - RNA, 19 nt, Homo sapiens
  misc_RNA (1)...(19): siRNA sense strand
agacagacacauucaaauu

SEQ ID NO: 1970102 - RNA, 19 nt, Homo sapiens
  misc_RNA (1)...(19): siRNA sense strand
gacagacacauucaaauug

SEQ ID NO: 1970103 - RNA, 19 nt, Homo sapiens
  misc_RNA (1)...(19): siRNA sense strand
ccgaaagauuuaugagauu

SEQ ID NO: 1970104 - RNA, 19 nt, Homo sapiens
  misc_RNA (1)...(19): siRNA sense strand
gagauuuacucagacuuug

SEQ ID NO: 1970105 - RNA, 19 nt, Homo sapiens
  misc_RNA (1)...(19): siRNA sense strand
guacacggccgacgggaaa

SEQ ID NO: 1970106 - RNA, 19 nt, Homo sapiens
  misc_RNA (1)...(19): siRNA sense strand
uaggcaagcuggaauagau

SEQ ID NO: 1970107 - RNA, 19 nt, Homo sapiens
  misc_RNA (1)...(19): siRNA sense strand
uaucaggugugagcucuuu

SEQ ID NO: 1970108 - RNA, 19 nt, Homo sapiens
  misc_RNA (1)...(19): siRNA sense strand
cagagaaggcuggaacuuu

SEQ ID NO: 1970109 - RNA, 19 nt, Homo sapiens
  misc_RNA (1)...(19): siRNA sense strand
ucaauggcauggacgugaa

SEQ ID NO: 1970110 - RNA, 19 nt, Homo sapiens
  misc_RNA (1)...(19): siRNA sense strand
agagaaggcuggaacuuuu

SEQ ID NO: 1970111 - RNA, 19 nt, Homo sapiens
  misc_RNA (1)...(19): siRNA sense strand
gaaagaggugcuggaguau

SEQ ID NO: 1970112 - RNA, 19 nt, Homo sapiens
  misc_RNA (1)...(19): siRNA sense strand
uccgaaagauuuaugagau

SEQ ID NO: 1970113 - RNA, 19 nt, Homo sapiens
  misc_RNA (1)...(19): siRNA sense strand
gagcguguguugguugcuu

SEQ ID NO: 1970114 - RNA, 19 nt, Homo sapiens
  misc_RNA (1)...(19): siRNA sense strand
guguguauguggugaacaa

SEQ ID NO: 1970115 - RNA, 19 nt, Homo sapiens
  misc_RNA (1)...(19): siRNA sense strand
ggaucaaguuugugguucu

SEQ ID NO: 1970116 - RNA, 19 nt, Homo sapiens
  misc_RNA (1)...(19): siRNA sense strand
gagacagacacauucaaau

SEQ ID NO: 1970117 - RNA, 19 nt, Homo sapiens
  misc_RNA (1)...(19): siRNA sense strand
gcagagaaggcuggaacuu

SEQ ID NO: 1970118 - RNA, 19 nt, Homo sapiens
  misc_RNA (1)...(19): siRNA sense strand
cggcuugauuuaccaguug

SEQ ID NO: 1970119 - RNA, 19 nt, Homo sapiens
  misc_RNA (1)...(19): siRNA sense strand
aagaggugcuggaguaucu

SEQ ID NO: 1970120 - RNA, 19 nt, Homo sapiens
  misc_RNA (1)...(19): siRNA sense strand
acagacacauucaaauugc

SEQ ID NO: 1970121 - RNA, 19 nt, Homo sapiens
  misc_RNA (1)...(19): siRNA sense strand
gcggcuugauuuaccaguu

SEQ ID NO: 1970122 - RNA, 19 nt, Homo sapiens
  misc_RNA (1)...(19): siRNA sense strand
agacuuugcccucaagaau

SEQ ID NO: 1970123 - RNA, 19 nt, Homo sapiens
  misc_RNA (1)...(19): siRNA sense strand
gcagugcuggccaucaaug

SEQ ID NO: 1970124 - RNA, 19 nt, Homo sapiens
  misc_RNA (1)...(19): siRNA sense strand
cuaauuacccgguguccau

SEQ ID NO: 1970125 - RNA, 19 nt, Homo sapiens
  misc_RNA (1)...(19): siRNA sense strand
uugagaugcuggagacaga

SEQ ID NO: 1970126 - RNA, 19 nt, Homo sapiens
  misc_RNA (1)...(19): siRNA sense strand
cauucaaauugcacugcua

SEQ ID NO: 1970127 - RNA, 19 nt, Homo sapiens
  misc_RNA (1)...(19): siRNA sense strand
gcuggagacagacacauuc

SEQ ID NO: 1970128 - RNA, 19 nt, Homo sapiens
  misc_RNA (1)...(19): siRNA sense strand
gauccuaggcaagcuggaa

SEQ ID NO: 1970129 - RNA, 19 nt, Homo sapiens
  misc_RNA (1)...(19): siRNA sense strand
acagggaagcucaggcauu

SEQ ID NO: 1970130 - RNA, 19 nt, Homo sapiens
  misc_RNA (1)...(19): siRNA sense strand
ugcucaagcuacacgauga

SEQ ID NO: 1970131 - RNA, 19 nt, Homo sapiens
  misc_RNA (1)...(19): siRNA sense strand
acucagacuuugcccucaa

SEQ ID NO: 1970132 - RNA, 19 nt, Homo sapiens
  misc_RNA (1)...(19): siRNA sense strand
cgaugagcguguguugguu

SEQ ID NO: 1970133 - RNA, 19 nt, Homo sapiens
  misc_RNA (1)...(19): siRNA sense strand
augcagugcuggccaucaa

SEQ ID NO: 1970134 - RNA, 19 nt, Homo sapiens
  misc_RNA (1)...(19): siRNA sense strand
ucaggugugagcucuuuga

SEQ ID NO: 1970135 - RNA, 19 nt, Homo sapiens
  misc_RNA (1)...(19): siRNA sense strand
aaaugccuaucagguguga

SEQ ID NO: 1970136 - RNA, 19 nt, Homo sapiens
  misc_RNA (1)...(19): siRNA sense strand
cgccuaagcucgcacuuca

SEQ ID NO: 1970137 - RNA, 19 nt, Homo sapiens
  misc_RNA (1)...(19): siRNA sense strand
agucggcgcugaccaaaca

SEQ ID NO: 1970138 - RNA, 19 nt, Homo sapiens
  misc_RNA (1)...(19): siRNA sense strand
ccuaagcucgcacuucauu

SEQ ID NO: 1970139 - RNA, 19 nt, Homo sapiens
  misc_RNA (1)...(19): siRNA sense strand
gaagucggcgcugaccaaa

SEQ ID NO: 1970140 - RNA, 19 nt, Homo sapiens
  misc_RNA (1)...(19): siRNA sense strand
agaagucggcgcugaccaa

SEQ ID NO: 1970141 - RNA, 19 nt, Homo sapiens
  misc_RNA (1)...(19): siRNA sense strand
caacagacauucagccuuu

SEQ ID NO: 1970142 - RNA, 19 nt, Homo sapiens
  misc_RNA (1)...(19): siRNA sense strand
gcacuacgcuaaggaauuu

SEQ ID NO: 1970143 - RNA, 19 nt, Homo sapiens
  misc_RNA (1)...(19): siRNA sense strand
cauaguggcucaucugaua

SEQ ID NO: 1970144 - RNA, 19 nt, Homo sapiens
  misc_RNA (1)...(19): siRNA sense strand
guucaucuguguacauuua

SEQ ID NO: 1970145 - RNA, 19 nt, Homo sapiens
  misc_RNA (1)...(19): siRNA sense strand
caggauaucucuacucaaa

SEQ ID NO: 1970146 - RNA, 19 nt, Homo sapiens
  misc_RNA (1)...(19): siRNA sense strand
gaacaaaucaugaagagau

SEQ ID NO: 1970147 - RNA, 19 nt, Homo sapiens
  misc_RNA (1)...(19): siRNA sense strand
ggagaagacuggguuugua

SEQ ID NO: 1970148 - RNA, 19 nt, Homo sapiens
  misc_RNA (1)...(19): siRNA sense strand
gaacuagaaucucugaaca

SEQ ID NO: 1970149 - RNA, 19 nt, Homo sapiens
  misc_RNA (1)...(19): siRNA sense strand
uuacagggauuaaagagua

SEQ ID NO: 1970150 - RNA, 19 nt, Homo sapiens
  misc_RNA (1)...(19): siRNA sense strand
ggucagcgcugcauacaau

SEQ ID NO: 1970151 - RNA, 19 nt, Homo sapiens
  misc_RNA (1)...(19): siRNA sense strand
gauaucugcucuguuauuu

SEQ ID NO: 1970152 - RNA, 19 nt, Homo sapiens
  misc_RNA (1)...(19): siRNA sense strand
uugcagaccucgcuacuua

SEQ ID NO: 1970153 - RNA, 19 nt, Homo sapiens
  misc_RNA (1)...(19): siRNA sense strand
ggauaaugcugacuacaga

SEQ ID NO: 1970154 - RNA, 19 nt, Homo sapiens
  misc_RNA (1)...(19): siRNA sense strand
ggaguuggcugcuagaaca

SEQ ID NO: 1970155 - RNA, 19 nt, Homo sapiens
  misc_RNA (1)...(19): siRNA sense strand
ggaagcaacugagucacua

SEQ ID NO: 1970156 - RNA, 19 nt, Homo sapiens
  misc_RNA (1)...(19): siRNA sense strand
uuggauaucugcucuguua

SEQ ID NO: 1970157 - RNA, 19 nt, Homo sapiens
  misc_RNA (1)...(19): siRNA sense strand
ucacaaguguuaccaaaga

SEQ ID NO: 1970158 - RNA, 19 nt, Homo sapiens
  misc_RNA (1)...(19): siRNA sense strand
acacaggaauccaucauuu

SEQ ID NO: 1970159 - RNA, 19 nt, Homo sapiens
  misc_RNA (1)...(19): siRNA sense strand
gaaauuauucgaugacaug

SEQ ID NO: 1970160 - RNA, 19 nt, Homo sapiens
  misc_RNA (1)...(19): siRNA sense strand
ucagucagcugcucacauu

SEQ ID NO: 1970161 - RNA, 19 nt, Homo sapiens
  misc_RNA (1)...(19): siRNA sense strand
gagcaggagucguacuuug

SEQ ID NO: 1970162 - RNA, 19 nt, Homo sapiens
  misc_RNA (1)...(19): siRNA sense strand
gaaaggauggauaagcuaa

SEQ ID NO: 1970163 - RNA, 19 nt, Homo sapiens
  misc_RNA (1)...(19): siRNA sense strand
uaaugugacuguagaagaa

SEQ ID NO: 1970164 - RNA, 19 nt, Homo sapiens
  misc_RNA (1)...(19): siRNA sense strand
ggaacaaacuguccaugag

SEQ ID NO: 1970165 - RNA, 19 nt, Homo sapiens
  misc_RNA (1)...(19): siRNA sense strand
cuaauaugaucaccucuuu

SEQ ID NO: 1970166 - RNA, 19 nt, Homo sapiens
  misc_RNA (1)...(19): siRNA sense strand
uaugaucaccucuuuguua

SEQ ID NO: 1970167 - RNA, 19 nt, Homo sapiens
  misc_RNA (1)...(19): siRNA sense strand
aauuagagcuuccugacua

SEQ ID NO: 1970168 - RNA, 19 nt, Homo sapiens
  misc_RNA (1)...(19): siRNA sense strand
ggucaucuuuacagccuua

SEQ ID NO: 1970169 - RNA, 19 nt, Homo sapiens
  misc_RNA (1)...(19): siRNA sense strand
caaccuguccuguauguuu

SEQ ID NO: 1970170 - RNA, 19 nt, Homo sapiens
  misc_RNA (1)...(19): siRNA sense strand
gguagcagaucaaccuuau

SEQ ID NO: 1970171 - RNA, 19 nt, Homo sapiens
  misc_RNA (1)...(19): siRNA sense strand
agaccucgcuacuuaaauu

SEQ ID NO: 1970172 - RNA, 19 nt, Homo sapiens
  misc_RNA (1)...(19): siRNA sense strand
gacuacagauuauuucaga

SEQ ID NO: 1970173 - RNA, 19 nt, Homo sapiens
  misc_RNA (1)...(19): siRNA sense strand
uggauaagcugccaucuca

SEQ ID NO: 1970174 - RNA, 19 nt, Homo sapiens
  misc_RNA (1)...(19): siRNA sense strand
accaaagacugugaaauua

SEQ ID NO: 1970175 - RNA, 19 nt, Homo sapiens
  misc_RNA (1)...(19): siRNA sense strand
gcaggugcuuuccuaguga

SEQ ID NO: 1970176 - RNA, 19 nt, Homo sapiens
  misc_RNA (1)...(19): siRNA sense strand
uaccaaagacugugaaauu

SEQ ID NO: 1970177 - RNA, 19 nt, Homo sapiens
  misc_RNA (1)...(19): siRNA sense strand
gaaauccagaccacucuaa

SEQ ID NO: 1970178 - RNA, 19 nt, Homo sapiens
  misc_RNA (1)...(19): siRNA sense strand
aagcaccaguccauaauaa

SEQ ID NO: 1970179 - RNA, 19 nt, Homo sapiens
  misc_RNA (1)...(19): siRNA sense strand
gaaacgacaaccaggauau

SEQ ID NO: 1970180 - RNA, 19 nt, Homo sapiens
  misc_RNA (1)...(19): siRNA sense strand
aauuagaccugccauguga

SEQ ID NO: 1970181 - RNA, 19 nt, Homo sapiens
  misc_RNA (1)...(19): siRNA sense strand
caaaguggaacgugugaaa

SEQ ID NO: 1970182 - RNA, 19 nt, Homo sapiens
  misc_RNA (1)...(19): siRNA sense strand
gaagagauaguuccacagu

SEQ ID NO: 1970183 - RNA, 19 nt, Homo sapiens
  misc_RNA (1)...(19): siRNA sense strand
gcagaucaaccuuauguuc

SEQ ID NO: 1970184 - RNA, 19 nt, Homo sapiens
  misc_RNA (1)...(19): siRNA sense strand
gcaauuaucgaaguuguga

SEQ ID NO: 1970185 - RNA, 19 nt, Homo sapiens
  misc_RNA (1)...(19): siRNA sense strand
ggagaauguuaucaacuca

SEQ ID NO: 1970186 - RNA, 19 nt, Homo sapiens
  misc_RNA (1)...(19): siRNA sense strand
agacuggguuuguagauga

SEQ ID NO: 1970187 - RNA, 19 nt, Homo sapiens
  misc_RNA (1)...(19): siRNA sense strand
gggaacaaaucaugaagag

SEQ ID NO: 1970188 - RNA, 19 nt, Homo sapiens
  misc_RNA (1)...(19): siRNA sense strand
ugagucagcuuugggcuuu

SEQ ID NO: 1970189 - RNA, 19 nt, Homo sapiens
  misc_RNA (1)...(19): siRNA sense strand
uagaaucucugaacacagu

SEQ ID NO: 1970190 - RNA, 19 nt, Homo sapiens
  misc_RNA (1)...(19): siRNA sense strand
ggauaucugcucuguuauu

SEQ ID NO: 1970191 - RNA, 19 nt, Homo sapiens
  misc_RNA (1)...(19): siRNA sense strand
agagauaguuccacagugu

SEQ ID NO: 1970192 - RNA, 19 nt, Homo sapiens
  misc_RNA (1)...(19): siRNA sense strand
gaaguugugagucagcuuu

SEQ ID NO: 1970193 - RNA, 19 nt, Homo sapiens
  misc_RNA (1)...(19): siRNA sense strand
gcugaaugcuguacuuagu

SEQ ID NO: 1970194 - RNA, 19 nt, Homo sapiens
  misc_RNA (1)...(19): siRNA sense strand
caggauguguucagcauau

SEQ ID NO: 1970195 - RNA, 19 nt, Homo sapiens
  misc_RNA (1)...(19): siRNA sense strand
uagcuugugugaagacauu

SEQ ID NO: 1970196 - RNA, 19 nt, Homo sapiens
  misc_RNA (1)...(19): siRNA sense strand
gcagaccucgcuacuuaaa

SEQ ID NO: 1970197 - RNA, 19 nt, Homo sapiens
  misc_RNA (1)...(19): siRNA sense strand
acaguuagcugagcagaug

SEQ ID NO: 1970198 - RNA, 19 nt, Homo sapiens
  misc_RNA (1)...(19): siRNA sense strand
gaauagugaaucuguguau

SEQ ID NO: 1970199 - RNA, 19 nt, Homo sapiens
  misc_RNA (1)...(19): siRNA sense strand
uuaaacagguagcagauca

SEQ ID NO: 1970200 - RNA, 19 nt, Homo sapiens
  misc_RNA (1)...(19): siRNA sense strand
aaacugcaauuaucgaagu

SEQ ID NO: 1970201 - RNA, 19 nt, Homo sapiens
  misc_RNA (1)...(19): siRNA sense strand
gggaacaaacuguccauga

SEQ ID NO: 1970202 - RNA, 19 nt, Homo sapiens
  misc_RNA (1)...(19): siRNA sense strand
cccaucagcuggaguuuau

SEQ ID NO: 1970203 - RNA, 19 nt, Homo sapiens
  misc_RNA (1)...(19): siRNA sense strand
gcucuguuauuuccaguau

SEQ ID NO: 1970204 - RNA, 19 nt, Homo sapiens
  misc_RNA (1)...(19): siRNA sense strand
guaagaauagugaaucugu

SEQ ID NO: 1970205 - RNA, 19 nt, Homo sapiens
  misc_RNA (1)...(19): siRNA sense strand
ccaaagacugugaaauuau

SEQ ID NO: 1970206 - RNA, 19 nt, Homo sapiens
  misc_RNA (1)...(19): siRNA sense strand
ucagauacacagcaaguuu

SEQ ID NO: 1970207 - RNA, 19 nt, Homo sapiens
  misc_RNA (1)...(19): siRNA sense strand
ccauucuuguuuacaguua

SEQ ID NO: 1970208 - RNA, 19 nt, Homo sapiens
  misc_RNA (1)...(19): siRNA sense strand
gcauggacccuuuaguaga

SEQ ID NO: 1970209 - RNA, 19 nt, Homo sapiens
  misc_RNA (1)...(19): siRNA sense strand
gaacugcuggacaugguuu

SEQ ID NO: 1970210 - RNA, 19 nt, Homo sapiens
  misc_RNA (1)...(19): siRNA sense strand
cauggacccuuuaguagau

SEQ ID NO: 1970211 - RNA, 19 nt, Homo sapiens
  misc_RNA (1)...(19): siRNA sense strand
uggauaagcuaaaacguua

SEQ ID NO: 1970212 - RNA, 19 nt, Homo sapiens
  misc_RNA (1)...(19): siRNA sense strand
gauccuaaacugauacuuc

SEQ ID NO: 1970213 - RNA, 19 nt, Homo sapiens
  misc_RNA (1)...(19): siRNA sense strand
ggauaucucuacucaaagc

SEQ ID NO: 1970214 - RNA, 19 nt, Homo sapiens
  misc_RNA (1)...(19): siRNA sense strand
guacuuugcaccaacugua

SEQ ID NO: 1970215 - RNA, 19 nt, Homo sapiens
  misc_RNA (1)...(19): siRNA sense strand
ccagaccacucuaaggaau

SEQ ID NO: 1970216 - RNA, 19 nt, Homo sapiens
  misc_RNA (1)...(19): siRNA sense strand
ccucaguccuucauauaau

SEQ ID NO: 1970217 - RNA, 19 nt, Homo sapiens
  misc_RNA (1)...(19): siRNA sense strand
ggaacagacuuucuuuuca

SEQ ID NO: 1970218 - RNA, 19 nt, Homo sapiens
  misc_RNA (1)...(19): siRNA sense strand
ucuagauccuaaacugaua

SEQ ID NO: 1970219 - RNA, 19 nt, Homo sapiens
  misc_RNA (1)...(19): siRNA sense strand
ggaaaacaaacugcaauua

SEQ ID NO: 1970220 - RNA, 19 nt, Homo sapiens
  misc_RNA (1)...(19): siRNA sense strand
ugaacucucucuaccuguu

SEQ ID NO: 1970221 - RNA, 19 nt, Homo sapiens
  misc_RNA (1)...(19): siRNA sense strand
uaaauuagaccugccaugu

SEQ ID NO: 1970222 - RNA, 19 nt, Homo sapiens
  misc_RNA (1)...(19): siRNA sense strand
uaauggaacugcuggacau

SEQ ID NO: 1970223 - RNA, 19 nt, Homo sapiens
  misc_RNA (1)...(19): siRNA sense strand
ggaggccuauucucuucaa

SEQ ID NO: 1970224 - RNA, 19 nt, Homo sapiens
  misc_RNA (1)...(19): siRNA sense strand
guagaugacaaugaugaua

SEQ ID NO: 1970225 - RNA, 19 nt, Homo sapiens
  misc_RNA (1)...(19): siRNA sense strand
aaacaauggugcagcucuu

SEQ ID NO: 1970226 - RNA, 19 nt, Homo sapiens
  misc_RNA (1)...(19): siRNA sense strand
gggaacccuuugcuaaugu

SEQ ID NO: 1970227 - RNA, 19 nt, Homo sapiens
  misc_RNA (1)...(19): siRNA sense strand
gaacgugugaaacaggaaa

SEQ ID NO: 1970228 - RNA, 19 nt, Homo sapiens
  misc_RNA (1)...(19): siRNA sense strand
ugacaggaguuggcugcua

SEQ ID NO: 1970229 - RNA, 19 nt, Homo sapiens
  misc_RNA (1)...(19): siRNA sense strand
ugaaccaccugacauugga

SEQ ID NO: 1970230 - RNA, 19 nt, Homo sapiens
  misc_RNA (1)...(19): siRNA sense strand
caaggaggccuauucucuu

SEQ ID NO: 1970231 - RNA, 19 nt, Homo sapiens
  misc_RNA (1)...(19): siRNA sense strand
guuuggcaauguuggauuu

SEQ ID NO: 1970232 - RNA, 19 nt, Homo sapiens
  misc_RNA (1)...(19): siRNA sense strand
ggcguuaccuccugagcuu

SEQ ID NO: 1970233 - RNA, 19 nt, Homo sapiens
  misc_RNA (1)...(19): siRNA sense strand
gucaugcccuggagaaugu

SEQ ID NO: 1970234 - RNA, 19 nt, Homo sapiens
  misc_RNA (1)...(19): siRNA sense strand
ccuccaagccuuuaugcua

SEQ ID NO: 1970235 - RNA, 19 nt, Homo sapiens
  misc_RNA (1)...(19): siRNA sense strand
uaaagcacaccaagaggaa

SEQ ID NO: 1970236 - RNA, 19 nt, Homo sapiens
  misc_RNA (1)...(19): siRNA sense strand
ggugcuuccuugcucgaua

SEQ ID NO: 1970237 - RNA, 19 nt, Homo sapiens
  misc_RNA (1)...(19): siRNA sense strand
uuucaucccucacuguuug

SEQ ID NO: 1970238 - RNA, 19 nt, Homo sapiens
  misc_RNA (1)...(19): siRNA sense strand
gacacuggauccacuuauc

SEQ ID NO: 1970239 - RNA, 19 nt, Homo sapiens
  misc_RNA (1)...(19): siRNA sense strand
gaagaaacuaagaacaaag

SEQ ID NO: 1970240 - RNA, 19 nt, Homo sapiens
  misc_RNA (1)...(19): siRNA sense strand
aaacugaagcugccaaagu

SEQ ID NO: 1970241 - RNA, 19 nt, Homo sapiens
  misc_RNA (1)...(19): siRNA sense strand
gucagugucucuaagauug

SEQ ID NO: 1970242 - RNA, 19 nt, Homo sapiens
  misc_RNA (1)...(19): siRNA sense strand
ucacgcgggucuccaacua

SEQ ID NO: 1970243 - RNA, 19 nt, Homo sapiens
  misc_RNA (1)...(19): siRNA sense strand
gcaccauucuacccaacaa

SEQ ID NO: 1970244 - RNA, 19 nt, Homo sapiens
  misc_RNA (1)...(19): siRNA sense strand
uacaacgacuggaucaauu

SEQ ID NO: 1970245 - RNA, 19 nt, Homo sapiens
  misc_RNA (1)...(19): siRNA sense strand
gcagcaccgugaagacgaa

SEQ ID NO: 1970246 - RNA, 19 nt, Homo sapiens
  misc_RNA (1)...(19): siRNA sense strand
gaagacgaauaugaucugu

SEQ ID NO: 1970247 - RNA, 19 nt, Homo sapiens
  misc_RNA (1)...(19): siRNA sense strand
ccacuuacgcgccugauau

SEQ ID NO: 1970248 - RNA, 19 nt, Homo sapiens
  misc_RNA (1)...(19): siRNA sense strand
ggugauugcaaauaacuaa

SEQ ID NO: 1970249 - RNA, 19 nt, Homo sapiens
  misc_RNA (1)...(19): siRNA sense strand
cgacauugcccugcucaaa

SEQ ID NO: 1970250 - RNA, 19 nt, Homo sapiens
  misc_RNA (1)...(19): siRNA sense strand
cuacaagcccuccaucuuc

SEQ ID NO: 1970251 - RNA, 19 nt, Homo sapiens
  misc_RNA (1)...(19): siRNA sense strand
uacaagcccuccaucuuca

SEQ ID NO: 1970252 - RNA, 19 nt, Homo sapiens
  misc_RNA (1)...(19): siRNA sense strand
auucggugauugcaaauaa

SEQ ID NO: 1970253 - RNA, 19 nt, Homo sapiens
  misc_RNA (1)...(19): siRNA sense strand
ccaaccaggucuccaaagg

SEQ ID NO: 1970254 - RNA, 19 nt, Homo sapiens
  misc_RNA (1)...(19): siRNA sense strand
gcaccgugaagacgaauau

SEQ ID NO: 1970255 - RNA, 19 nt, Homo sapiens
  misc_RNA (1)...(19): siRNA sense strand
gaagaagcgaggcccaaca

SEQ ID NO: 1970256 - RNA, 19 nt, Homo sapiens
  misc_RNA (1)...(19): siRNA sense strand
gcuccaauggccaguggua

SEQ ID NO: 1970257 - RNA, 19 nt, Homo sapiens
  misc_RNA (1)...(19): siRNA sense strand
caacggggcucucccugau

SEQ ID NO: 1970258 - RNA, 19 nt, Homo sapiens
  misc_RNA (1)...(19): siRNA sense strand
cuacaacgacuggaucaau

SEQ ID NO: 1970259 - RNA, 19 nt, Homo sapiens
  misc_RNA (1)...(19): siRNA sense strand
cgccugauaugucuaggau

SEQ ID NO: 1970260 - RNA, 19 nt, Homo sapiens
  misc_RNA (1)...(19): siRNA sense strand
ggugauggcgugauaugca

SEQ ID NO: 1970261 - RNA, 19 nt, Homo sapiens
  misc_RNA (1)...(19): siRNA sense strand
uuacgcgccugauaugucu

SEQ ID NO: 1970262 - RNA, 19 nt, Homo sapiens
  misc_RNA (1)...(19): siRNA sense strand
gguccuugguugcaacuac

SEQ ID NO: 1970263 - RNA, 19 nt, Homo sapiens
  misc_RNA (1)...(19): siRNA sense strand
ccaaagggaacgacauugc

SEQ ID NO: 1970264 - RNA, 19 nt, Homo sapiens
  misc_RNA (1)...(19): siRNA sense strand
ugauaugucuaggaugcuu

SEQ ID NO: 1970265 - RNA, 19 nt, Homo sapiens
  misc_RNA (1)...(19): siRNA sense strand
cgucagugucucuaagauu

SEQ ID NO: 1970266 - RNA, 19 nt, Homo sapiens
  misc_RNA (1)...(19): siRNA sense strand
gguugcaacuacuacuaca

SEQ ID NO: 1970267 - RNA, 19 nt, Homo sapiens
  misc_RNA (1)...(19): siRNA sense strand
uaggaugcuuggaggugaa

SEQ ID NO: 1970268 - RNA, 19 nt, Homo sapiens
  misc_RNA (1)...(19): siRNA sense strand
gacauugcccugcucaaac

SEQ ID NO: 1970269 - RNA, 19 nt, Homo sapiens
  misc_RNA (1)...(19): siRNA sense strand
gguugcugguuguggacua

SEQ ID NO: 1970270 - RNA, 19 nt, Homo sapiens
  misc_RNA (1)...(19): siRNA sense strand
acauugcccugcucaaacu

SEQ ID NO: 1970271 - RNA, 19 nt, Homo sapiens
  misc_RNA (1)...(19): siRNA sense strand
ugaagacgaauaugaucug

SEQ ID NO: 1970272 - RNA, 19 nt, Homo sapiens
  misc_RNA (1)...(19): siRNA sense strand
caggaucuaccgcgugaug

SEQ ID NO: 1970273 - RNA, 19 nt, Homo sapiens
  misc_RNA (1)...(19): siRNA sense strand
gcuggagcccucaguugug

SEQ ID NO: 1970274 - RNA, 19 nt, Homo sapiens
  misc_RNA (1)...(19): siRNA sense strand
ccauucuacccaacaacua

SEQ ID NO: 1970275 - RNA, 19 nt, Homo sapiens
  misc_RNA (1)...(19): siRNA sense strand
ggccgucagugucucuaag

SEQ ID NO: 1970276 - RNA, 19 nt, Homo sapiens
  misc_RNA (1)...(19): siRNA sense strand
ggaggaaagugacaaagga

SEQ ID NO: 1970277 - RNA, 19 nt, Homo sapiens
  misc_RNA (1)...(19): siRNA sense strand
ggacagcaccacauuauug

SEQ ID NO: 1970278 - RNA, 19 nt, Homo sapiens
  misc_RNA (1)...(19): siRNA sense strand
gaaucaaaguuguauccua

SEQ ID NO: 1970279 - RNA, 19 nt, Homo sapiens
  misc_RNA (1)...(19): siRNA sense strand
caagagggcacaugaagua

SEQ ID NO: 1970280 - RNA, 19 nt, Homo sapiens
  misc_RNA (1)...(19): siRNA sense strand
cgaauaagguggauuugga

SEQ ID NO: 1970281 - RNA, 19 nt, Homo sapiens
  misc_RNA (1)...(19): siRNA sense strand
gggagacccuucaugauca

SEQ ID NO: 1970282 - RNA, 19 nt, Homo sapiens
  misc_RNA (1)...(19): siRNA sense strand
gagaauggaauugaaguuu

SEQ ID NO: 1970283 - RNA, 19 nt, Homo sapiens
  misc_RNA (1)...(19): siRNA sense strand
auaaagacgucacucaaga

SEQ ID NO: 1970284 - RNA, 19 nt, Homo sapiens
  misc_RNA (1)...(19): siRNA sense strand
gaaggagaaugaagaccau

SEQ ID NO: 1970285 - RNA, 19 nt, Homo sapiens
  misc_RNA (1)...(19): siRNA sense strand
gcacggaaucaaaguugua

SEQ ID NO: 1970286 - RNA, 19 nt, Homo sapiens
  misc_RNA (1)...(19): siRNA sense strand
gcaccacauuauuggguaa

SEQ ID NO: 1970287 - RNA, 19 nt, Homo sapiens
  misc_RNA (1)...(19): siRNA sense strand
gcaaagaggaaguuagaag

SEQ ID NO: 1970288 - RNA, 19 nt, Homo sapiens
  misc_RNA (1)...(19): siRNA sense strand
caccaaguccuuucuguuu

SEQ ID NO: 1970289 - RNA, 19 nt, Homo sapiens
  misc_RNA (1)...(19): siRNA sense strand
agaagagaauggaauugaa

SEQ ID NO: 1970290 - RNA, 19 nt, Homo sapiens
  misc_RNA (1)...(19): siRNA sense strand
gacaacaaauagaagugaa

SEQ ID NO: 1970291 - RNA, 19 nt, Homo sapiens
  misc_RNA (1)...(19): siRNA sense strand
caaagaggaaguuagaaga

SEQ ID NO: 1970292 - RNA, 19 nt, Homo sapiens
  misc_RNA (1)...(19): siRNA sense strand
gacccuucaugaucagaua

SEQ ID NO: 1970293 - RNA, 19 nt, Homo sapiens
  misc_RNA (1)...(19): siRNA sense strand
gaagagaauggaauugaag

SEQ ID NO: 1970294 - RNA, 19 nt, Homo sapiens
  misc_RNA (1)...(19): siRNA sense strand
ccacucagaucugcaaaca

SEQ ID NO: 1970295 - RNA, 19 nt, Homo sapiens
  misc_RNA (1)...(19): siRNA sense strand
uccaggcccucuuucuuua

SEQ ID NO: 1970296 - RNA, 19 nt, Homo sapiens
  misc_RNA (1)...(19): siRNA sense strand
gaaguuagaagagaaugga

SEQ ID NO: 1970297 - RNA, 19 nt, Homo sapiens
  misc_RNA (1)...(19): siRNA sense strand
gauauuccaggcccucuuu

SEQ ID NO: 1970298 - RNA, 19 nt, Homo sapiens
  misc_RNA (1)...(19): siRNA sense strand
gcccuuugcucguggagaa

SEQ ID NO: 1970299 - RNA, 19 nt, Homo sapiens
  misc_RNA (1)...(19): siRNA sense strand
ccaaguccuuucuguuugu

SEQ ID NO: 1970300 - RNA, 19 nt, Homo sapiens
  misc_RNA (1)...(19): siRNA sense strand
caaaggaccgggaccuguu

SEQ ID NO: 1970301 - RNA, 19 nt, Homo sapiens
  misc_RNA (1)...(19): siRNA sense strand
aaacgcacacaaucagaua

SEQ ID NO: 1970302 - RNA, 19 nt, Homo sapiens
  misc_RNA (1)...(19): siRNA sense strand
agaauggaauugaaguuuc

SEQ ID NO: 1970303 - RNA, 19 nt, Homo sapiens
  misc_RNA (1)...(19): siRNA sense strand
gugcaaagaggaaguuaga

SEQ ID NO: 1970304 - RNA, 19 nt, Homo sapiens
  misc_RNA (1)...(19): siRNA sense strand
gcaccaaguccuuucuguu

SEQ ID NO: 1970305 - RNA, 19 nt, Homo sapiens
  misc_RNA (1)...(19): siRNA sense strand
guauaaagacgucacucaa

SEQ ID NO: 1970306 - RNA, 19 nt, Homo sapiens
  misc_RNA (1)...(19): siRNA sense strand
gaacugcuccugguuaucg

SEQ ID NO: 1970307 - RNA, 19 nt, Homo sapiens
  misc_RNA (1)...(19): siRNA sense strand
agaggaaguuagaagagaa

SEQ ID NO: 1970308 - RNA, 19 nt, Homo sapiens
  misc_RNA (1)...(19): siRNA sense strand
gcaaagcccagaugcugau

SEQ ID NO: 1970309 - RNA, 19 nt, Homo sapiens
  misc_RNA (1)...(19): siRNA sense strand
guacggcguccuccacauu

SEQ ID NO: 1970310 - RNA, 19 nt, Homo sapiens
  misc_RNA (1)...(19): siRNA sense strand
ucaagacgcagaagucaug

SEQ ID NO: 1970311 - RNA, 19 nt, Homo sapiens
  misc_RNA (1)...(19): siRNA sense strand
uagaagagaauggaauuga

SEQ ID NO: 1970312 - RNA, 19 nt, Homo sapiens
  misc_RNA (1)...(19): siRNA sense strand
guuagaagagaauggaauu

SEQ ID NO: 1970313 - RNA, 19 nt, Homo sapiens
  misc_RNA (1)...(19): siRNA sense strand
gcaagagggcacaugaagu

SEQ ID NO: 1970314 - RNA, 19 nt, Homo sapiens
  misc_RNA (1)...(19): siRNA sense strand
gguauaaagacgucacuca

SEQ ID NO: 1970315 - RNA, 19 nt, Homo sapiens
  misc_RNA (1)...(19): siRNA sense strand
ggacuguuuugaccacuuu

SEQ ID NO: 1970316 - RNA, 19 nt, Homo sapiens
  misc_RNA (1)...(19): siRNA sense strand
aagaggaaguuagaagaga

SEQ ID NO: 1970317 - RNA, 19 nt, Homo sapiens
  misc_RNA (1)...(19): siRNA sense strand
ugaccacuuuccaggauau

SEQ ID NO: 1970318 - RNA, 19 nt, Homo sapiens
  misc_RNA (1)...(19): siRNA sense strand
ggauuuggagcacuacaug

SEQ ID NO: 1970319 - RNA, 19 nt, Homo sapiens
  misc_RNA (1)...(19): siRNA sense strand
acgcagaagucauggaagu

SEQ ID NO: 1970320 - RNA, 19 nt, Homo sapiens
  misc_RNA (1)...(19): siRNA sense strand
uuuacuccgugccgaauaa

SEQ ID NO: 1970321 - RNA, 19 nt, Homo sapiens
  misc_RNA (1)...(19): siRNA sense strand
caacaaauagaagugaaca

SEQ ID NO: 1970322 - RNA, 19 nt, Homo sapiens
  misc_RNA (1)...(19): siRNA sense strand
ggaaaagacaacaaauaga

SEQ ID NO: 1970323 - RNA, 19 nt, Homo sapiens
  misc_RNA (1)...(19): siRNA sense strand
cggaaucccugcccuuugc

SEQ ID NO: 1970324 - RNA, 19 nt, Homo sapiens
  misc_RNA (1)...(19): siRNA sense strand
aaacagcaaagcccagaug

SEQ ID NO: 1970325 - RNA, 19 nt, Homo sapiens
  misc_RNA (1)...(19): siRNA sense strand
uuaagcaucaggcagauau

SEQ ID NO: 1970326 - RNA, 19 nt, Homo sapiens
  misc_RNA (1)...(19): siRNA sense strand
ugccaggacugugcaaaga

SEQ ID NO: 1970327 - RNA, 19 nt, Homo sapiens
  misc_RNA (1)...(19): siRNA sense strand
gggcaagagggcacaugaa

SEQ ID NO: 1970328 - RNA, 19 nt, Homo sapiens
  misc_RNA (1)...(19): siRNA sense strand
ggaccgggaccuguugguu

SEQ ID NO: 1970329 - RNA, 19 nt, Homo sapiens
  misc_RNA (1)...(19): siRNA sense strand
ggcaagagggcacaugaag

SEQ ID NO: 1970330 - RNA, 19 nt, Homo sapiens
  misc_RNA (1)...(19): siRNA sense strand
uauaaagacgucacucaag

SEQ ID NO: 1970331 - RNA, 19 nt, Homo sapiens
  misc_RNA (1)...(19): siRNA sense strand
guggaaaagacaacaaaua

SEQ ID NO: 1970332 - RNA, 19 nt, Homo sapiens
  misc_RNA (1)...(19): siRNA sense strand
gaggaaguuagaagagaau

SEQ ID NO: 1970333 - RNA, 19 nt, Homo sapiens
  misc_RNA (1)...(19): siRNA sense strand
agacaacaaauagaaguga

SEQ ID NO: 1970334 - RNA, 19 nt, Homo sapiens
  misc_RNA (1)...(19): siRNA sense strand
agacgcagaagucauggaa

SEQ ID NO: 1970335 - RNA, 19 nt, Homo sapiens
  misc_RNA (1)...(19): siRNA sense strand
ggaaacagccccaggaacu

SEQ ID NO: 1970336 - RNA, 19 nt, Homo sapiens
  misc_RNA (1)...(19): siRNA sense strand
ggagacccuucaugaucag

SEQ ID NO: 1970337 - RNA, 19 nt, Homo sapiens
  misc_RNA (1)...(19): siRNA sense strand
accaaguccuuucuguuug

SEQ ID NO: 1970338 - RNA, 19 nt, Homo sapiens
  misc_RNA (1)...(19): siRNA sense strand
gacagcaccacauuauugg

SEQ ID NO: 1970339 - RNA, 19 nt, Homo sapiens
  misc_RNA (1)...(19): siRNA sense strand
uuccaggcccucuuucuuu

SEQ ID NO: 1970340 - RNA, 19 nt, Homo sapiens
  misc_RNA (1)...(19): siRNA sense strand
ugaaggacaagaccaaggu

SEQ ID NO: 1970341 - RNA, 19 nt, Homo sapiens
  misc_RNA (1)...(19): siRNA sense strand
ggaaguuagaagagaaugg

SEQ ID NO: 1970342 - RNA, 19 nt, Homo sapiens
  misc_RNA (1)...(19): siRNA sense strand
acuacaugcuugugcugaa

SEQ ID NO: 1970343 - RNA, 19 nt, Homo sapiens
  misc_RNA (1)...(19): siRNA sense strand
aaagaggaaguuagaagag

SEQ ID NO: 1970344 - RNA, 19 nt, Homo sapiens
  misc_RNA (1)...(19): siRNA sense strand
ccacuuuccaggauaugug

SEQ ID NO: 1970345 - RNA, 19 nt, Homo sapiens
  misc_RNA (1)...(19): siRNA sense strand
cuacaugcuugugcugaag

SEQ ID NO: 1970346 - RNA, 19 nt, Homo sapiens
  misc_RNA (1)...(19): siRNA sense strand
gcaaacgagugcagucaau

SEQ ID NO: 1970347 - RNA, 19 nt, Homo sapiens
  misc_RNA (1)...(19): siRNA sense strand
gcacagaggaauuuaaagu

SEQ ID NO: 1970348 - RNA, 19 nt, Homo sapiens
  misc_RNA (1)...(19): siRNA sense strand
gcaagaggagaaagagaaa

SEQ ID NO: 1970349 - RNA, 19 nt, Homo sapiens
  misc_RNA (1)...(19): siRNA sense strand
gcgcacagaggaauuuaaa

SEQ ID NO: 1970350 - RNA, 19 nt, Homo sapiens
  misc_RNA (1)...(19): siRNA sense strand
acagaggaauuuaaagugu

SEQ ID NO: 1970351 - RNA, 19 nt, Homo sapiens
  misc_RNA (1)...(19): siRNA sense strand
gaaaggcgcacagaggaau

SEQ ID NO: 1970352 - RNA, 19 nt, Homo sapiens
  misc_RNA (1)...(19): siRNA sense strand
ggguagccauucucuguuc

SEQ ID NO: 1970353 - RNA, 19 nt, Homo sapiens
  misc_RNA (1)...(19): siRNA sense strand
caauuuaacagacagaaag

SEQ ID NO: 1970354 - RNA, 19 nt, Homo sapiens
  misc_RNA (1)...(19): siRNA sense strand
acuguggaauggaaaguuu

SEQ ID NO: 1970355 - RNA, 19 nt, Homo sapiens
  misc_RNA (1)...(19): siRNA sense strand
gagcaaacgagugcaguca

SEQ ID NO: 1970356 - RNA, 19 nt, Homo sapiens
  misc_RNA (1)...(19): siRNA sense strand
caaacgagugcagucaauu

SEQ ID NO: 1970357 - RNA, 19 nt, Homo sapiens
  misc_RNA (1)...(19): siRNA sense strand
aaacgagugcagucaauuc

SEQ ID NO: 1970358 - RNA, 19 nt, Homo sapiens
  misc_RNA (1)...(19): siRNA sense strand
ccaauuuaacagacagaaa

SEQ ID NO: 1970359 - RNA, 19 nt, Homo sapiens
  misc_RNA (1)...(19): siRNA sense strand
aaaagacuguggaauggaa

SEQ ID NO: 1970360 - RNA, 19 nt, Homo sapiens
  misc_RNA (1)...(19): siRNA sense strand
gaacaccguuuuccaagcu

SEQ ID NO: 1970361 - RNA, 19 nt, Homo sapiens
  misc_RNA (1)...(19): siRNA sense strand
ugcaagaggagaaagagaa

SEQ ID NO: 1970362 - RNA, 19 nt, Homo sapiens
  misc_RNA (1)...(19): siRNA sense strand
cacagaggaauuuaaagug

SEQ ID NO: 1970363 - RNA, 19 nt, Homo sapiens
  misc_RNA (1)...(19): siRNA sense strand
guagccauucucuguucua

SEQ ID NO: 1970364 - RNA, 19 nt, Homo sapiens
  misc_RNA (1)...(19): siRNA sense strand
agaaaggcgcacagaggaa

SEQ ID NO: 1970365 - RNA, 19 nt, Homo sapiens
  misc_RNA (1)...(19): siRNA sense strand
caacuacacugugcugaua

SEQ ID NO: 1970366 - RNA, 19 nt, Homo sapiens
  misc_RNA (1)...(19): siRNA sense strand
ucaacgagcuguauuucua

SEQ ID NO: 1970367 - RNA, 19 nt, Homo sapiens
  misc_RNA (1)...(19): siRNA sense strand
ccaccaagaucgaguguga

SEQ ID NO: 1970368 - RNA, 19 nt, Homo sapiens
  misc_RNA (1)...(19): siRNA sense strand
gcacaucuaucuccugagu

SEQ ID NO: 1970369 - RNA, 19 nt, Homo sapiens
  misc_RNA (1)...(19): siRNA sense strand
ggaagaggcucaacucacu

SEQ ID NO: 1970370 - RNA, 19 nt, Homo sapiens
  misc_RNA (1)...(19): siRNA sense strand
gcagugaaccgagucuuua

SEQ ID NO: 1970371 - RNA, 19 nt, Homo sapiens
  misc_RNA (1)...(19): siRNA sense strand
ggacagcgagugccaguuu

SEQ ID NO: 1970372 - RNA, 19 nt, Homo sapiens
  misc_RNA (1)...(19): siRNA sense strand
gagcaggucuacagcuuug

SEQ ID NO: 1970373 - RNA, 19 nt, Homo sapiens
  misc_RNA (1)...(19): siRNA sense strand
ucaaugagcugacuaacca

SEQ ID NO: 1970374 - RNA, 19 nt, Homo sapiens
  misc_RNA (1)...(19): siRNA sense strand
gagccucucuuccugcuuu

SEQ ID NO: 1970375 - RNA, 19 nt, Homo sapiens
  misc_RNA (1)...(19): siRNA sense strand
caacaucaaugcccacauc

SEQ ID NO: 1970376 - RNA, 19 nt, Homo sapiens
  misc_RNA (1)...(19): siRNA sense strand
guucguggaugaccucuuu

SEQ ID NO: 1970377 - RNA, 19 nt, Homo sapiens
  misc_RNA (1)...(19): siRNA sense strand
ggaccgagaugccucuugu

SEQ ID NO: 1970378 - RNA, 19 nt, Homo sapiens
  misc_RNA (1)...(19): siRNA sense strand
gcacacggcuuaccaucuc

SEQ ID NO: 1970379 - RNA, 19 nt, Homo sapiens
  misc_RNA (1)...(19): siRNA sense strand
ucacguuccugcugcauaa

SEQ ID NO: 1970380 - RNA, 19 nt, Homo sapiens
  misc_RNA (1)...(19): siRNA sense strand
aaacaagugucugccuaua

SEQ ID NO: 1970381 - RNA, 19 nt, Homo sapiens
  misc_RNA (1)...(19): siRNA sense strand
ggagacaggcaccaaauug

SEQ ID NO: 1970382 - RNA, 19 nt, Homo sapiens
  misc_RNA (1)...(19): siRNA sense strand
cgagcacccugaugaguuu

SEQ ID NO: 1970383 - RNA, 19 nt, Homo sapiens
  misc_RNA (1)...(19): siRNA sense strand
ugaagguucucaacuguga

SEQ ID NO: 1970384 - RNA, 19 nt, Homo sapiens
  misc_RNA (1)...(19): siRNA sense strand
gagcugcccugcaucaaca

SEQ ID NO: 1970385 - RNA, 19 nt, Homo sapiens
  misc_RNA (1)...(19): siRNA sense strand
agaagaaccucgagagcaa

SEQ ID NO: 1970386 - RNA, 19 nt, Homo sapiens
  misc_RNA (1)...(19): siRNA sense strand
gggugaaugugaucaagaa

SEQ ID NO: 1970387 - RNA, 19 nt, Homo sapiens
  misc_RNA (1)...(19): siRNA sense strand
ggacucgcccuccaacaaa

SEQ ID NO: 1970388 - RNA, 19 nt, Homo sapiens
  misc_RNA (1)...(19): siRNA sense strand
ggcagaaacuggaacagau

SEQ ID NO: 1970389 - RNA, 19 nt, Homo sapiens
  misc_RNA (1)...(19): siRNA sense strand
gagaggaucgugugugaga

SEQ ID NO: 1970390 - RNA, 19 nt, Homo sapiens
  misc_RNA (1)...(19): siRNA sense strand
gagguauuaucgagacauu

SEQ ID NO: 1970391 - RNA, 19 nt, Homo sapiens
  misc_RNA (1)...(19): siRNA sense strand
gcagaucgacuacaagaca

SEQ ID NO: 1970392 - RNA, 19 nt, Homo sapiens
  misc_RNA (1)...(19): siRNA sense strand
gagcccaccuggagcauca

SEQ ID NO: 1970393 - RNA, 19 nt, Homo sapiens
  misc_RNA (1)...(19): siRNA sense strand
ucaacucacuggcccacua

SEQ ID NO: 1970394 - RNA, 19 nt, Homo sapiens
  misc_RNA (1)...(19): siRNA sense strand
ucacgggcacccaugauua

SEQ ID NO: 1970395 - RNA, 19 nt, Homo sapiens
  misc_RNA (1)...(19): siRNA sense strand
acaaggagcugcccugcau

SEQ ID NO: 1970396 - RNA, 19 nt, Homo sapiens
  misc_RNA (1)...(19): siRNA sense strand
gaagacagcgcggacaugu

SEQ ID NO: 1970397 - RNA, 19 nt, Homo sapiens
  misc_RNA (1)...(19): siRNA sense strand
cucaaccgcuccuccuuua

SEQ ID NO: 1970398 - RNA, 19 nt, Homo sapiens
  misc_RNA (1)...(19): siRNA sense strand
gugcugacuuugucuucua

SEQ ID NO: 1970399 - RNA, 19 nt, Homo sapiens
  misc_RNA (1)...(19): siRNA sense strand
cuccauggcuggugucauu

SEQ ID NO: 1970400 - RNA, 19 nt, Homo sapiens
  misc_RNA (1)...(19): siRNA sense strand
ggagacaggcgugagguuu

SEQ ID NO: 1970401 - RNA, 19 nt, Homo sapiens
  misc_RNA (1)...(19): siRNA sense strand
acaucuaucuccugaguga

SEQ ID NO: 1970402 - RNA, 19 nt, Homo sapiens
  misc_RNA (1)...(19): siRNA sense strand
agaagaugcuuaccaacug

SEQ ID NO: 1970403 - RNA, 19 nt, Homo sapiens
  misc_RNA (1)...(19): siRNA sense strand
gaacgccucguacuccuau

SEQ ID NO: 1970404 - RNA, 19 nt, Homo sapiens
  misc_RNA (1)...(19): siRNA sense strand
gaucaacggcaacuucugu

SEQ ID NO: 1970405 - RNA, 19 nt, Homo sapiens
  misc_RNA (1)...(19): siRNA sense strand
acaagacacugacccuuca

SEQ ID NO: 1970406 - RNA, 19 nt, Homo sapiens
  misc_RNA (1)...(19): siRNA sense strand
ggacaucaaugagcugacu

SEQ ID NO: 1970407 - RNA, 19 nt, Homo sapiens
  misc_RNA (1)...(19): siRNA sense strand
ccaucacacuugccauuga

SEQ ID NO: 1970408 - RNA, 19 nt, Homo sapiens
  misc_RNA (1)...(19): siRNA sense strand
gcgcggacauguucagucu

SEQ ID NO: 1970409 - RNA, 19 nt, Homo sapiens
  misc_RNA (1)...(19): siRNA sense strand
gagcuguauuucuauguca

SEQ ID NO: 1970410 - RNA, 19 nt, Homo sapiens
  misc_RNA (1)...(19): siRNA sense strand
ucaacaagcugcugcucau

SEQ ID NO: 1970411 - RNA, 19 nt, Homo sapiens
  misc_RNA (1)...(19): siRNA sense strand
ggaugcaccugagccagaa

SEQ ID NO: 1970412 - RNA, 19 nt, Homo sapiens
  misc_RNA (1)...(19): siRNA sense strand
accaauacaugccaaguga

SEQ ID NO: 1970413 - RNA, 19 nt, Homo sapiens
  misc_RNA (1)...(19): siRNA sense strand
gagaagaugcuuaccaacu

SEQ ID NO: 1970414 - RNA, 19 nt, Homo sapiens
  misc_RNA (1)...(19): siRNA sense strand
gcuccuccuuuaccuacua

SEQ ID NO: 1970415 - RNA, 19 nt, Homo sapiens
  misc_RNA (1)...(19): siRNA sense strand
cugagaagaugcuuaccaa

SEQ ID NO: 1970416 - RNA, 19 nt, Homo sapiens
  misc_RNA (1)...(19): siRNA sense strand
ccaaggacauccccaacua

SEQ ID NO: 1970417 - RNA, 19 nt, Homo sapiens
  misc_RNA (1)...(19): siRNA sense strand
ucacccaggccaaagauaa

SEQ ID NO: 1970418 - RNA, 19 nt, Homo sapiens
  misc_RNA (1)...(19): siRNA sense strand
cccgcaagcucaucaguga

SEQ ID NO: 1970419 - RNA, 19 nt, Homo sapiens
  misc_RNA (1)...(19): siRNA sense strand
gaggaugucaccaccaaga

SEQ ID NO: 1970420 - RNA, 19 nt, Homo sapiens
  misc_RNA (1)...(19): siRNA sense strand
ucccaaagcugaggacaug

SEQ ID NO: 1970421 - RNA, 19 nt, Homo sapiens
  misc_RNA (1)...(19): siRNA sense strand
ucaagcagcagauggagaa

SEQ ID NO: 1970422 - RNA, 19 nt, Homo sapiens
  misc_RNA (1)...(19): siRNA sense strand
ccaaggcgaucgugugcau

SEQ ID NO: 1970423 - RNA, 19 nt, Homo sapiens
  misc_RNA (1)...(19): siRNA sense strand
acaagcugcugcucauaga

SEQ ID NO: 1970424 - RNA, 19 nt, Homo sapiens
  misc_RNA (1)...(19): siRNA sense strand
gucagcagaucgacuacaa

SEQ ID NO: 1970425 - RNA, 19 nt, Homo sapiens
  misc_RNA (1)...(19): siRNA sense strand
cugagaggaucguguguga

SEQ ID NO: 1970426 - RNA, 19 nt, Homo sapiens
  misc_RNA (1)...(19): siRNA sense strand
ucugugggcugguguugaa

SEQ ID NO: 1970427 - RNA, 19 nt, Homo sapiens
  misc_RNA (1)...(19): siRNA sense strand
gaagggcaagaaccugauu

SEQ ID NO: 1970428 - RNA, 19 nt, Homo sapiens
  misc_RNA (1)...(19): siRNA sense strand
caacaagcugcugcucaua

SEQ ID NO: 1970429 - RNA, 19 nt, Homo sapiens
  misc_RNA (1)...(19): siRNA sense strand
agagcuggguggagaggua

SEQ ID NO: 1970430 - RNA, 19 nt, Homo sapiens
  misc_RNA (1)...(19): siRNA sense strand
ugcagaaguucguggauga

SEQ ID NO: 1970431 - RNA, 19 nt, Homo sapiens
  misc_RNA (1)...(19): siRNA sense strand
gagacaggcaccaaauugu

SEQ ID NO: 1970432 - RNA, 19 nt, Homo sapiens
  misc_RNA (1)...(19): siRNA sense strand
acaagugucugccuauaac

SEQ ID NO: 1970433 - RNA, 19 nt, Homo sapiens
  misc_RNA (1)...(19): siRNA sense strand
cagcagaucgacuacaaga

SEQ ID NO: 1970434 - RNA, 19 nt, Homo sapiens
  misc_RNA (1)...(19): siRNA sense strand
gcgagcacccugaugaguu

SEQ ID NO: 1970435 - RNA, 19 nt, Homo sapiens
  misc_RNA (1)...(19): siRNA sense strand
guaccaggaugaguuugug

SEQ ID NO: 1970436 - RNA, 19 nt, Homo sapiens
  misc_RNA (1)...(19): siRNA sense strand
gcagaaacuggaacagauc

SEQ ID NO: 1970437 - RNA, 19 nt, Homo sapiens
  misc_RNA (1)...(19): siRNA sense strand
agacagcgcggacauguuc

SEQ ID NO: 1970438 - RNA, 19 nt, Homo sapiens
  misc_RNA (1)...(19): siRNA sense strand
ggaaggacucgcccuccaa

SEQ ID NO: 1970439 - RNA, 19 nt, Homo sapiens
  misc_RNA (1)...(19): siRNA sense strand
ugcauaaguuucugaagga

SEQ ID NO: 1970440 - RNA, 19 nt, Homo sapiens
  misc_RNA (1)...(19): siRNA sense strand
gcagcucccgccucaacua

SEQ ID NO: 1970441 - RNA, 19 nt, Homo sapiens
  misc_RNA (1)...(19): siRNA sense strand
ggagcaggucuacagcuuu

SEQ ID NO: 1970442 - RNA, 19 nt, Homo sapiens
  misc_RNA (1)...(19): siRNA sense strand
gagacaggcgugagguuug

SEQ ID NO: 1970443 - RNA, 19 nt, Homo sapiens
  misc_RNA (1)...(19): siRNA sense strand
cugaggagcugagcaagug

SEQ ID NO: 1970444 - RNA, 19 nt, Homo sapiens
  misc_RNA (1)...(19): siRNA sense strand
caacgagcuguauuucuau

SEQ ID NO: 1970445 - RNA, 19 nt, Homo sapiens
  misc_RNA (1)...(19): siRNA sense strand
caaacaagugucugccuau

SEQ ID NO: 1970446 - RNA, 19 nt, Homo sapiens
  misc_RNA (1)...(19): siRNA sense strand
uggccgaccucaucgagaa

SEQ ID NO: 1970447 - RNA, 19 nt, Homo sapiens
  misc_RNA (1)...(19): siRNA sense strand
guacuccuaugaaggugau

SEQ ID NO: 1970448 - RNA, 19 nt, Homo sapiens
  misc_RNA (1)...(19): siRNA sense strand
ccucuugucggaagcauaa

SEQ ID NO: 1970449 - RNA, 19 nt, Homo sapiens
  misc_RNA (1)...(19): siRNA sense strand
gaagcacugccaucacugu

SEQ ID NO: 1970450 - RNA, 19 nt, Homo sapiens
  misc_RNA (1)...(19): siRNA sense strand
gggcucaucuacaccuaca

SEQ ID NO: 1970451 - RNA, 19 nt, Homo sapiens
  misc_RNA (1)...(19): siRNA sense strand
acaccgagcuggacuucuc

SEQ ID NO: 1970452 - RNA, 19 nt, Homo sapiens
  misc_RNA (1)...(19): siRNA sense strand
gacagcgagugccaguuug

SEQ ID NO: 1970453 - RNA, 19 nt, Homo sapiens
  misc_RNA (1)...(19): siRNA sense strand
guggaugaccucuuugaga

SEQ ID NO: 1970454 - RNA, 19 nt, Homo sapiens
  misc_RNA (1)...(19): siRNA sense strand
ugacaucuacuacaucuac

SEQ ID NO: 1970455 - RNA, 19 nt, Homo sapiens
  misc_RNA (1)...(19): siRNA sense strand
ccaaguaccgccaggagau

SEQ ID NO: 1970456 - RNA, 19 nt, Homo sapiens
  misc_RNA (1)...(19): siRNA sense strand
ccuauaacauggccaacuc

SEQ ID NO: 1970457 - RNA, 19 nt, Homo sapiens
  misc_RNA (1)...(19): siRNA sense strand
gcucauccgucagcagauc

SEQ ID NO: 1970458 - RNA, 19 nt, Homo sapiens
  misc_RNA (1)...(19): siRNA sense strand
cggagcaggucuacagcuu

SEQ ID NO: 1970459 - RNA, 19 nt, Homo sapiens
  misc_RNA (1)...(19): siRNA sense strand
gagcccuccuguacaagug

SEQ ID NO: 1970460 - RNA, 19 nt, Homo sapiens
  misc_RNA (1)...(19): siRNA sense strand
ggcugcagcuucucuccaa

SEQ ID NO: 1970461 - RNA, 19 nt, Homo sapiens
  misc_RNA (1)...(19): siRNA sense strand
guuugccggugcugacuuu

SEQ ID NO: 1970462 - RNA, 19 nt, Homo sapiens
  misc_RNA (1)...(19): siRNA sense strand
cuaugaaggugaugagcau

SEQ ID NO: 1970463 - RNA, 19 nt, Homo sapiens
  misc_RNA (1)...(19): siRNA sense strand
gaaacuggaacagaucauc

SEQ ID NO: 1970464 - RNA, 19 nt, Homo sapiens
  misc_RNA (1)...(19): siRNA sense strand
ugagcugacuaaccacaug

SEQ ID NO: 1970465 - RNA, 19 nt, Homo sapiens
  misc_RNA (1)...(19): siRNA sense strand
ggacgcagggccuugaaua

SEQ ID NO: 1970466 - RNA, 19 nt, Homo sapiens
  misc_RNA (1)...(19): siRNA sense strand
ucaagaagcuuuucacuga

SEQ ID NO: 1970467 - RNA, 19 nt, Homo sapiens
  misc_RNA (1)...(19): siRNA sense strand
caaacugccucgccacaug

SEQ ID NO: 1970468 - RNA, 19 nt, Homo sapiens
  misc_RNA (1)...(19): siRNA sense strand
ggucugcgguguucgauuc

SEQ ID NO: 1970469 - RNA, 19 nt, Homo sapiens
  misc_RNA (1)...(19): siRNA sense strand
ugugugagcuggacuuugu

SEQ ID NO: 1970470 - RNA, 19 nt, Homo sapiens
  misc_RNA (1)...(19): siRNA sense strand
gcccaucccuugaccuaug

SEQ ID NO: 1970471 - RNA, 19 nt, Homo sapiens
  misc_RNA (1)...(19): siRNA sense strand
gcagggcagugggcuagaa

SEQ ID NO: 1970472 - RNA, 19 nt, Homo sapiens
  misc_RNA (1)...(19): siRNA sense strand
gcuacgaccucaagaacca

SEQ ID NO: 1970473 - RNA, 19 nt, Homo sapiens
  misc_RNA (1)...(19): siRNA sense strand
aagaagaggagcugguaua

SEQ ID NO: 1970474 - RNA, 19 nt, Homo sapiens
  misc_RNA (1)...(19): siRNA sense strand
aagaggagcugguauaucc

SEQ ID NO: 1970475 - RNA, 19 nt, Homo sapiens
  misc_RNA (1)...(19): siRNA sense strand
gcacagcuacgaccucaag

SEQ ID NO: 1970476 - RNA, 19 nt, Homo sapiens
  misc_RNA (1)...(19): siRNA sense strand
ggagaucccgugugucauc

SEQ ID NO: 1970477 - RNA, 19 nt, Homo sapiens
  misc_RNA (1)...(19): siRNA sense strand
ggccagagcaaaccaccua

SEQ ID NO: 1970478 - RNA, 19 nt, Homo sapiens
  misc_RNA (1)...(19): siRNA sense strand
gaagaagaggagcugguau

SEQ ID NO: 1970479 - RNA, 19 nt, Homo sapiens
  misc_RNA (1)...(19): siRNA sense strand
ggaacgacaagcugaagau

SEQ ID NO: 1970480 - RNA, 19 nt, Homo sapiens
  misc_RNA (1)...(19): siRNA sense strand
gaccugauggccuaccuaa

SEQ ID NO: 1970481 - RNA, 19 nt, Homo sapiens
  misc_RNA (1)...(19): siRNA sense strand
gaagaggagcugguauauc

SEQ ID NO: 1970482 - RNA, 19 nt, Homo sapiens
  misc_RNA (1)...(19): siRNA sense strand
gcaaacgccgcucccagau

SEQ ID NO: 1970483 - RNA, 19 nt, Homo sapiens
  misc_RNA (1)...(19): siRNA sense strand
agaagaagaggagcuggua

SEQ ID NO: 1970484 - RNA, 19 nt, Homo sapiens
  misc_RNA (1)...(19): siRNA sense strand
ccagagcuacgaacccuau

SEQ ID NO: 1970485 - RNA, 19 nt, Homo sapiens
  misc_RNA (1)...(19): siRNA sense strand
gaacgacaagcugaagauc

SEQ ID NO: 1970486 - RNA, 19 nt, Homo sapiens
  misc_RNA (1)...(19): siRNA sense strand
ccucuggaguucccaaugg

SEQ ID NO: 1970487 - RNA, 19 nt, Homo sapiens
  misc_RNA (1)...(19): siRNA sense strand
cuaugagggugaggaagaa

SEQ ID NO: 1970488 - RNA, 19 nt, Homo sapiens
  misc_RNA (1)...(19): siRNA sense strand
aagcuuuccugcaaaccaa

SEQ ID NO: 1970489 - RNA, 19 nt, Homo sapiens
  misc_RNA (1)...(19): siRNA sense strand
ccuaugagggugaggaaga

SEQ ID NO: 1970490 - RNA, 19 nt, Homo sapiens
  misc_RNA (1)...(19): siRNA sense strand
aaacugccucgccacauga

SEQ ID NO: 1970491 - RNA, 19 nt, Homo sapiens
  misc_RNA (1)...(19): siRNA sense strand
ugaugacgaugaggaggaa

SEQ ID NO: 1970492 - RNA, 19 nt, Homo sapiens
  misc_RNA (1)...(19): siRNA sense strand
caaacgccgcucccagaug

SEQ ID NO: 1970493 - RNA, 19 nt, Homo sapiens
  misc_RNA (1)...(19): siRNA sense strand
gccucgaccucuccaaugg

SEQ ID NO: 1970494 - RNA, 19 nt, Homo sapiens
  misc_RNA (1)...(19): siRNA sense strand
agaagaggagcugguauau

SEQ ID NO: 1970495 - RNA, 19 nt, Homo sapiens
  misc_RNA (1)...(19): siRNA sense strand
acgacaagcugaagaucca

SEQ ID NO: 1970496 - RNA, 19 nt, Homo sapiens
  misc_RNA (1)...(19): siRNA sense strand
cuggagaucccguguguca

SEQ ID NO: 1970497 - RNA, 19 nt, Homo sapiens
  misc_RNA (1)...(19): siRNA sense strand
gugccauggaguccucuua

SEQ ID NO: 1970498 - RNA, 19 nt, Homo sapiens
  misc_RNA (1)...(19): siRNA sense strand
ccagcugggccaccuaugu

SEQ ID NO: 1970499 - RNA, 19 nt, Homo sapiens
  misc_RNA (1)...(19): siRNA sense strand
gagcuacgaacccuaugag

SEQ ID NO: 1970500 - RNA, 19 nt, Homo sapiens
  misc_RNA (1)...(19): siRNA sense strand
cggacgaggaugacuguga

SEQ ID NO: 1970501 - RNA, 19 nt, Homo sapiens
  misc_RNA (1)...(19): siRNA sense strand
acagggcuuucgccaagga

SEQ ID NO: 1970502 - RNA, 19 nt, Homo sapiens
  misc_RNA (1)...(19): siRNA sense strand
ccaggaacgacaagcugaa

SEQ ID NO: 1970503 - RNA, 19 nt, Homo sapiens
  misc_RNA (1)...(19): siRNA sense strand
gcaaacugccucgccacau

SEQ ID NO: 1970504 - RNA, 19 nt, Homo sapiens
  misc_RNA (1)...(19): siRNA sense strand
cagcugggccaccuaugug

SEQ ID NO: 1970505 - RNA, 19 nt, Homo sapiens
  misc_RNA (1)...(19): siRNA sense strand
ucccugaggugcccacagu

SEQ ID NO: 1970506 - RNA, 19 nt, Homo sapiens
  misc_RNA (1)...(19): siRNA sense strand
gccuauacagccacacuga

SEQ ID NO: 1970507 - RNA, 19 nt, Homo sapiens
  misc_RNA (1)...(19): siRNA sense strand
cccaucccuugaccuauga

SEQ ID NO: 1970508 - RNA, 19 nt, Homo sapiens
  misc_RNA (1)...(19): siRNA sense strand
ggacaccuuccgccucucu

SEQ ID NO: 1970509 - RNA, 19 nt, Homo sapiens
  misc_RNA (1)...(19): siRNA sense strand
gggagaagguggagacuga

SEQ ID NO: 1970510 - RNA, 19 nt, Homo sapiens
  misc_RNA (1)...(19): siRNA sense strand
ggagggugcuguccaguau

SEQ ID NO: 1970511 - RNA, 19 nt, Homo sapiens
  misc_RNA (1)...(19): siRNA sense strand
gaugaagggugacuacuac

SEQ ID NO: 1970512 - RNA, 19 nt, Homo sapiens
  misc_RNA (1)...(19): siRNA sense strand
ggagagagccagucugauc

SEQ ID NO: 1970513 - RNA, 19 nt, Homo sapiens
  misc_RNA (1)...(19): siRNA sense strand
gacaagaagcgcaucauug

SEQ ID NO: 1970514 - RNA, 19 nt, Homo sapiens
  misc_RNA (1)...(19): siRNA sense strand
acaagaagcgcaucauuga

SEQ ID NO: 1970515 - RNA, 19 nt, Homo sapiens
  misc_RNA (1)...(19): siRNA sense strand
ggacagccaccucaucaag

SEQ ID NO: 1970516 - RNA, 19 nt, Homo sapiens
  misc_RNA (1)...(19): siRNA sense strand
cgacaagaagcgcaucauu

SEQ ID NO: 1970517 - RNA, 19 nt, Homo sapiens
  misc_RNA (1)...(19): siRNA sense strand
gaagaugaagggugacuac

SEQ ID NO: 1970518 - RNA, 19 nt, Homo sapiens
  misc_RNA (1)...(19): siRNA sense strand
cgagacaaccugacacugu

SEQ ID NO: 1970519 - RNA, 19 nt, Homo sapiens
  misc_RNA (1)...(19): siRNA sense strand
aaagacagcacccucauca

SEQ ID NO: 1970520 - RNA, 19 nt, Homo sapiens
  misc_RNA (1)...(19): siRNA sense strand
ccauggacaucagcaagaa

SEQ ID NO: 1970521 - RNA, 19 nt, Homo sapiens
  misc_RNA (1)...(19): siRNA sense strand
agacagcacccucaucaug

SEQ ID NO: 1970522 - RNA, 19 nt, Homo sapiens
  misc_RNA (1)...(19): siRNA sense strand
acagccaccucaucaagga

SEQ ID NO: 1970523 - RNA, 19 nt, Homo sapiens
  misc_RNA (1)...(19): siRNA sense strand
gcgaaaccugcucucagua

SEQ ID NO: 1970524 - RNA, 19 nt, Homo sapiens
  misc_RNA (1)...(19): siRNA sense strand
agaugaagggugacuacua

SEQ ID NO: 1970525 - RNA, 19 nt, Homo sapiens
  misc_RNA (1)...(19): siRNA sense strand
cgaaaccugcucucaguag

SEQ ID NO: 1970526 - RNA, 19 nt, Homo sapiens
  misc_RNA (1)...(19): siRNA sense strand
cgaacgcuaugaggacaug

SEQ ID NO: 1970527 - RNA, 19 nt, Homo sapiens
  misc_RNA (1)...(19): siRNA sense strand
agggugcuguccaguauug

SEQ ID NO: 1970528 - RNA, 19 nt, Homo sapiens
  misc_RNA (1)...(19): siRNA sense strand
gagcaggccgaacgcuaug

SEQ ID NO: 1970529 - RNA, 19 nt, Homo sapiens
  misc_RNA (1)...(19): siRNA sense strand
uguccaguauugagcagaa

SEQ ID NO: 1970530 - RNA, 19 nt, Homo sapiens
  misc_RNA (1)...(19): siRNA sense strand
caaagacagcacccucauc

SEQ ID NO: 1970531 - RNA, 19 nt, Homo sapiens
  misc_RNA (1)...(19): siRNA sense strand
gccauggacaucagcaaga

SEQ ID NO: 1970532 - RNA, 19 nt, Homo sapiens
  misc_RNA (1)...(19): siRNA sense strand
agcgaaaccugcucucagu

SEQ ID NO: 1970533 - RNA, 19 nt, Homo sapiens
  misc_RNA (1)...(19): siRNA sense strand
gaagcgcaucauugacuca

SEQ ID NO: 1970534 - RNA, 19 nt, Homo sapiens
  misc_RNA (1)...(19): siRNA sense strand
ucucaguagccuauaagaa

SEQ ID NO: 1970535 - RNA, 19 nt, Homo sapiens
  misc_RNA (1)...(19): siRNA sense strand
gugaguaccgggagaaggu

SEQ ID NO: 1970536 - RNA, 19 nt, Homo sapiens
  misc_RNA (1)...(19): siRNA sense strand
gcacagguauucuuaugua

SEQ ID NO: 1970537 - RNA, 19 nt, Homo sapiens
  misc_RNA (1)...(19): siRNA sense strand
gugaagagauccacuugua

SEQ ID NO: 1970538 - RNA, 19 nt, Homo sapiens
  misc_RNA (1)...(19): siRNA sense strand
ccagaugugucacccauua

SEQ ID NO: 1970539 - RNA, 19 nt, Homo sapiens
  misc_RNA (1)...(19): siRNA sense strand
gaacacagaggucaguuaa

SEQ ID NO: 1970540 - RNA, 19 nt, Homo sapiens
  misc_RNA (1)...(19): siRNA sense strand
ggaaauauaaugcaacaug

SEQ ID NO: 1970541 - RNA, 19 nt, Homo sapiens
  misc_RNA (1)...(19): siRNA sense strand
gaaccaaauuuaccaccaa

SEQ ID NO: 1970542 - RNA, 19 nt, Homo sapiens
  misc_RNA (1)...(19): siRNA sense strand
gagcacagguauucuuaug

SEQ ID NO: 1970543 - RNA, 19 nt, Homo sapiens
  misc_RNA (1)...(19): siRNA sense strand
gaagagauccacuuguaug

SEQ ID NO: 1970544 - RNA, 19 nt, Homo sapiens
  misc_RNA (1)...(19): siRNA sense strand
acaacaaucucuugacuau

SEQ ID NO: 1970545 - RNA, 19 nt, Homo sapiens
  misc_RNA (1)...(19): siRNA sense strand
gacaacugaugcacuauga

SEQ ID NO: 1970546 - RNA, 19 nt, Homo sapiens
  misc_RNA (1)...(19): siRNA sense strand
aaaccaaucuuaccaccuu

SEQ ID NO: 1970547 - RNA, 19 nt, Homo sapiens
  misc_RNA (1)...(19): siRNA sense strand
gacgagaaauagauaaauc

SEQ ID NO: 1970548 - RNA, 19 nt, Homo sapiens
  misc_RNA (1)...(19): siRNA sense strand
ggauuccggucacaauuug

SEQ ID NO: 1970549 - RNA, 19 nt, Homo sapiens
  misc_RNA (1)...(19): siRNA sense strand
caagaauaguguucggauu

SEQ ID NO: 1970550 - RNA, 19 nt, Homo sapiens
  misc_RNA (1)...(19): siRNA sense strand
caacugaugcacuaugauu

SEQ ID NO: 1970551 - RNA, 19 nt, Homo sapiens
  misc_RNA (1)...(19): siRNA sense strand
aacaaucucuugacuauuc

SEQ ID NO: 1970552 - RNA, 19 nt, Homo sapiens
  misc_RNA (1)...(19): siRNA sense strand
gcaugucgauguaauaaaa

SEQ ID NO: 1970553 - RNA, 19 nt, Homo sapiens
  misc_RNA (1)...(19): siRNA sense strand
aaagagauguuggaaggaa

SEQ ID NO: 1970554 - RNA, 19 nt, Homo sapiens
  misc_RNA (1)...(19): siRNA sense strand
ggaaggaaaaccaaucuua

SEQ ID NO: 1970555 - RNA, 19 nt, Homo sapiens
  misc_RNA (1)...(19): siRNA sense strand
gggaagggcucaccaagcu

SEQ ID NO: 1970556 - RNA, 19 nt, Homo sapiens
  misc_RNA (1)...(19): siRNA sense strand
cccaggaacuccaagagaa

SEQ ID NO: 1970557 - RNA, 19 nt, Homo sapiens
  misc_RNA (1)...(19): siRNA sense strand
ucaggaccguaacaacuuu

SEQ ID NO: 1970558 - RNA, 19 nt, Homo sapiens
  misc_RNA (1)...(19): siRNA sense strand
ggucacuucuuccagaugu

SEQ ID NO: 1970559 - RNA, 19 nt, Homo sapiens
  misc_RNA (1)...(19): siRNA sense strand
ggucacaauuugcgcugaa

SEQ ID NO: 1970560 - RNA, 19 nt, Homo sapiens
  misc_RNA (1)...(19): siRNA sense strand
gggauuccggucacaauuu

SEQ ID NO: 1970561 - RNA, 19 nt, Homo sapiens
  misc_RNA (1)...(19): siRNA sense strand
aaacauuugucaccuaaac

SEQ ID NO: 1970562 - RNA, 19 nt, Homo sapiens
  misc_RNA (1)...(19): siRNA sense strand
acacagaggucaguuaaaa

SEQ ID NO: 1970563 - RNA, 19 nt, Homo sapiens
  misc_RNA (1)...(19): siRNA sense strand
agugggauccugacauuua

SEQ ID NO: 1970564 - RNA, 19 nt, Homo sapiens
  misc_RNA (1)...(19): siRNA sense strand
ggacaacugaugcacuaug

SEQ ID NO: 1970565 - RNA, 19 nt, Homo sapiens
  misc_RNA (1)...(19): siRNA sense strand
uaauauuugugcugugguu

SEQ ID NO: 1970566 - RNA, 19 nt, Homo sapiens
  misc_RNA (1)...(19): siRNA sense strand
ugcaacaugucaacaggua

SEQ ID NO: 1970567 - RNA, 19 nt, Homo sapiens
  misc_RNA (1)...(19): siRNA sense strand
caucaaaggcaagaaauuc

SEQ ID NO: 1970568 - RNA, 19 nt, Homo sapiens
  misc_RNA (1)...(19): siRNA sense strand
auagugggauccugacauu

SEQ ID NO: 1970569 - RNA, 19 nt, Homo sapiens
  misc_RNA (1)...(19): siRNA sense strand
cagcaugucgauguaauaa

SEQ ID NO: 1970570 - RNA, 19 nt, Homo sapiens
  misc_RNA (1)...(19): siRNA sense strand
caacacaagggaagaucuu

SEQ ID NO: 1970571 - RNA, 19 nt, Homo sapiens
  misc_RNA (1)...(19): siRNA sense strand
ggacgagaaauagauaaau

SEQ ID NO: 1970572 - RNA, 19 nt, Homo sapiens
  misc_RNA (1)...(19): siRNA sense strand
ccaguguggacgagaaaua

SEQ ID NO: 1970573 - RNA, 19 nt, Homo sapiens
  misc_RNA (1)...(19): siRNA sense strand
ccauuaugaacaagcauua

SEQ ID NO: 1970574 - RNA, 19 nt, Homo sapiens
  misc_RNA (1)...(19): siRNA sense strand
gaauaguguucggauugga

SEQ ID NO: 1970575 - RNA, 19 nt, Homo sapiens
  misc_RNA (1)...(19): siRNA sense strand
gcaauaacuuccggucacu

SEQ ID NO: 1970576 - RNA, 19 nt, Homo sapiens
  misc_RNA (1)...(19): siRNA sense strand
gaugugucacccauuauga

SEQ ID NO: 1970577 - RNA, 19 nt, Homo sapiens
  misc_RNA (1)...(19): siRNA sense strand
uuggacaacugaugcacua

SEQ ID NO: 1970578 - RNA, 19 nt, Homo sapiens
  misc_RNA (1)...(19): siRNA sense strand
ugaacacagaggucaguua

SEQ ID NO: 1970579 - RNA, 19 nt, Homo sapiens
  misc_RNA (1)...(19): siRNA sense strand
gugggauccugacauuuau

SEQ ID NO: 1970580 - RNA, 19 nt, Homo sapiens
  misc_RNA (1)...(19): siRNA sense strand
ccaggaacuccaagagaaa

SEQ ID NO: 1970581 - RNA, 19 nt, Homo sapiens
  misc_RNA (1)...(19): siRNA sense strand
gaucuuccauaccauuacu

SEQ ID NO: 1970582 - RNA, 19 nt, Homo sapiens
  misc_RNA (1)...(19): siRNA sense strand
caucagcaauaugugaaga

SEQ ID NO: 1970583 - RNA, 19 nt, Homo sapiens
  misc_RNA (1)...(19): siRNA sense strand
aagaauaguguucggauug

SEQ ID NO: 1970584 - RNA, 19 nt, Homo sapiens
  misc_RNA (1)...(19): siRNA sense strand
uuacaacaaucucuugacu

SEQ ID NO: 1970585 - RNA, 19 nt, Homo sapiens
  misc_RNA (1)...(19): siRNA sense strand
ccaaauuuaccaccaagug

SEQ ID NO: 1970586 - RNA, 19 nt, Homo sapiens
  misc_RNA (1)...(19): siRNA sense strand
cgggaaauauaaugcaaca

SEQ ID NO: 1970587 - RNA, 19 nt, Homo sapiens
  misc_RNA (1)...(19): siRNA sense strand
ugucacccauuaugaacaa

SEQ ID NO: 1970588 - RNA, 19 nt, Homo sapiens
  misc_RNA (1)...(19): siRNA sense strand
uuacaucaaaggcaagaaa

SEQ ID NO: 1970589 - RNA, 19 nt, Homo sapiens
  misc_RNA (1)...(19): siRNA sense strand
ucagcaauaugugaagaga

SEQ ID NO: 1970590 - RNA, 19 nt, Homo sapiens
  misc_RNA (1)...(19): siRNA sense strand
caacugugaccaggacauu

SEQ ID NO: 1970591 - RNA, 19 nt, Homo sapiens
  misc_RNA (1)...(19): siRNA sense strand
gccgggaaauauaaugcaa

SEQ ID NO: 1970592 - RNA, 19 nt, Homo sapiens
  misc_RNA (1)...(19): siRNA sense strand
agcaauaugugaagagauc

SEQ ID NO: 1970593 - RNA, 19 nt, Homo sapiens
  misc_RNA (1)...(19): siRNA sense strand
ugacuauucaggaccguaa

SEQ ID NO: 1970594 - RNA, 19 nt, Homo sapiens
  misc_RNA (1)...(19): siRNA sense strand
aaacggcugagcacaggua

SEQ ID NO: 1970595 - RNA, 19 nt, Homo sapiens
  misc_RNA (1)...(19): siRNA sense strand
ugaagagauccacuuguau

SEQ ID NO: 1970596 - RNA, 19 nt, Homo sapiens
  misc_RNA (1)...(19): siRNA sense strand
ucagcaugucgauguaaua

SEQ ID NO: 1970597 - RNA, 19 nt, Homo sapiens
  misc_RNA (1)...(19): siRNA sense strand
acaauuugcgcugaaguuu

SEQ ID NO: 1970598 - RNA, 19 nt, Homo sapiens
  misc_RNA (1)...(19): siRNA sense strand
gaacuccaagagaaaccuu

SEQ ID NO: 1970599 - RNA, 19 nt, Homo sapiens
  misc_RNA (1)...(19): siRNA sense strand
gcugagcacagguauucuu

SEQ ID NO: 1970600 - RNA, 19 nt, Homo sapiens
  misc_RNA (1)...(19): siRNA sense strand
caggacauuaguugacuuu

SEQ ID NO: 1970601 - RNA, 19 nt, Homo sapiens
  misc_RNA (1)...(19): siRNA sense strand
aagagauguuggaaggaaa

SEQ ID NO: 1970602 - RNA, 19 nt, Homo sapiens
  misc_RNA (1)...(19): siRNA sense strand
gugcugugguuggaaauag

SEQ ID NO: 1970603 - RNA, 19 nt, Homo sapiens
  misc_RNA (1)...(19): siRNA sense strand
cugaugcacuaugauuauu

SEQ ID NO: 1970604 - RNA, 19 nt, Homo sapiens
  misc_RNA (1)...(19): siRNA sense strand
aauuugcgcugaaguuucu

SEQ ID NO: 1970605 - RNA, 19 nt, Homo sapiens
  misc_RNA (1)...(19): siRNA sense strand
cugagcacagguauucuua

SEQ ID NO: 1970606 - RNA, 19 nt, Homo sapiens
  misc_RNA (1)...(19): siRNA sense strand
caacaaucucuugacuauu

SEQ ID NO: 1970607 - RNA, 19 nt, Homo sapiens
  misc_RNA (1)...(19): siRNA sense strand
aagaucuuccauaccauua

SEQ ID NO: 1970608 - RNA, 19 nt, Homo sapiens
  misc_RNA (1)...(19): siRNA sense strand
cggcugagcacagguauuc

SEQ ID NO: 1970609 - RNA, 19 nt, Homo sapiens
  misc_RNA (1)...(19): siRNA sense strand
uaacuuccggucacuucuu

SEQ ID NO: 1970610 - RNA, 19 nt, Homo sapiens
  misc_RNA (1)...(19): siRNA sense strand
uauguacacccuugcauca

SEQ ID NO: 1970611 - RNA, 19 nt, Homo sapiens
  misc_RNA (1)...(19): siRNA sense strand
ccaggacauuaguugacuu

SEQ ID NO: 1970612 - RNA, 19 nt, Homo sapiens
  misc_RNA (1)...(19): siRNA sense strand
guucggauuggacaacuga

SEQ ID NO: 1970613 - RNA, 19 nt, Homo sapiens
  misc_RNA (1)...(19): siRNA sense strand
cagcuacgugucccugaaa

SEQ ID NO: 1970614 - RNA, 19 nt, Homo sapiens
  misc_RNA (1)...(19): siRNA sense strand
cuucaccacucccaaguac

SEQ ID NO: 1970615 - RNA, 19 nt, Homo sapiens
  misc_RNA (1)...(19): siRNA sense strand
ugaccaggacauuaguuga

SEQ ID NO: 1970616 - RNA, 19 nt, Homo sapiens
  misc_RNA (1)...(19): siRNA sense strand
caauuugcgcugaaguuuc

SEQ ID NO: 1970617 - RNA, 19 nt, Homo sapiens
  misc_RNA (1)...(19): siRNA sense strand
gaugcacuaugauuauucc

SEQ ID NO: 1970618 - RNA, 19 nt, Homo sapiens
  misc_RNA (1)...(19): siRNA sense strand
agaauaguguucggauugg

SEQ ID NO: 1970619 - RNA, 19 nt, Homo sapiens
  misc_RNA (1)...(19): siRNA sense strand
caacaugucaacagguacu

SEQ ID NO: 1970620 - RNA, 19 nt, Homo sapiens
  misc_RNA (1)...(19): siRNA sense strand
uacaacaaucucuugacua

SEQ ID NO: 1970621 - RNA, 19 nt, Homo sapiens
  misc_RNA (1)...(19): siRNA sense strand
cacaauuugcgcugaaguu

SEQ ID NO: 1970622 - RNA, 19 nt, Homo sapiens
  misc_RNA (1)...(19): siRNA sense strand
gaaggaaaaccaaucuuac

SEQ ID NO: 1970623 - RNA, 19 nt, Homo sapiens
  misc_RNA (1)...(19): siRNA sense strand
gugaccaggacauuaguug

SEQ ID NO: 1970624 - RNA, 19 nt, Homo sapiens
  misc_RNA (1)...(19): siRNA sense strand
aaaggaaccaaauuuacca

SEQ ID NO: 1970625 - RNA, 19 nt, Homo sapiens
  misc_RNA (1)...(19): siRNA sense strand
cgucauucgugcccauuac

SEQ ID NO: 1970626 - RNA, 19 nt, Homo sapiens
  misc_RNA (1)...(19): siRNA sense strand
gggcaggugacccaaggaa

SEQ ID NO: 1970627 - RNA, 19 nt, Homo sapiens
  misc_RNA (1)...(19): siRNA sense strand
gagggaaggacaggagaug

SEQ ID NO: 1970628 - RNA, 19 nt, Homo sapiens
  misc_RNA (1)...(19): siRNA sense strand
ggaggaagccgcaguauug

SEQ ID NO: 1970629 - RNA, 19 nt, Homo sapiens
  misc_RNA (1)...(19): siRNA sense strand
guaagugccuccaaauuuc

SEQ ID NO: 1970630 - RNA, 19 nt, Homo sapiens
  misc_RNA (1)...(19): siRNA sense strand
gcacaacugcuccaucuuu

SEQ ID NO: 1970631 - RNA, 19 nt, Homo sapiens
  misc_RNA (1)...(19): siRNA sense strand
gguaagugccuccaaauuu

SEQ ID NO: 1970632 - RNA, 19 nt, Homo sapiens
  misc_RNA (1)...(19): siRNA sense strand
ggagguugcuguuuggaaa

SEQ ID NO: 1970633 - RNA, 19 nt, Homo sapiens
  misc_RNA (1)...(19): siRNA sense strand
gagcugacguucuauuaca

SEQ ID NO: 1970634 - RNA, 19 nt, Homo sapiens
  misc_RNA (1)...(19): siRNA sense strand
cuucagagcuggagaacuu

SEQ ID NO: 1970635 - RNA, 19 nt, Homo sapiens
  misc_RNA (1)...(19): siRNA sense strand
cacaacugcuccaucuuua

SEQ ID NO: 1970636 - RNA, 19 nt, Homo sapiens
  misc_RNA (1)...(19): siRNA sense strand
gagcaugggcgguucguuu

SEQ ID NO: 1970637 - RNA, 19 nt, Homo sapiens
  misc_RNA (1)...(19): siRNA sense strand
uagauaacauugcuucaga

SEQ ID NO: 1970638 - RNA, 19 nt, Homo sapiens
  misc_RNA (1)...(19): siRNA sense strand
ggucuuggguggagucaug

SEQ ID NO: 1970639 - RNA, 19 nt, Homo sapiens
  misc_RNA (1)...(19): siRNA sense strand
aaacuguguugcagaggua

SEQ ID NO: 1970640 - RNA, 19 nt, Homo sapiens
  misc_RNA (1)...(19): siRNA sense strand
aaacuuggcuucccuagcu

SEQ ID NO: 1970641 - RNA, 19 nt, Homo sapiens
  misc_RNA (1)...(19): siRNA sense strand
ccaaguaugucacccuuac

SEQ ID NO: 1970642 - RNA, 19 nt, Homo sapiens
  misc_RNA (1)...(19): siRNA sense strand
uacaggauuugcacuauug

SEQ ID NO: 1970643 - RNA, 19 nt, Homo sapiens
  misc_RNA (1)...(19): siRNA sense strand
gcagcgugcuuaugaaacu

SEQ ID NO: 1970644 - RNA, 19 nt, Homo sapiens
  misc_RNA (1)...(19): siRNA sense strand
ucacuugucguuuguaaga

SEQ ID NO: 1970645 - RNA, 19 nt, Homo sapiens
  misc_RNA (1)...(19): siRNA sense strand
cuuaggagguugcuguuug

SEQ ID NO: 1970646 - RNA, 19 nt, Homo sapiens
  misc_RNA (1)...(19): siRNA sense strand
uucaugagcugacguucua

SEQ ID NO: 1970647 - RNA, 19 nt, Homo sapiens
  misc_RNA (1)...(19): siRNA sense strand
uuacaggauuugcacuauu

SEQ ID NO: 1970648 - RNA, 19 nt, Homo sapiens
  misc_RNA (1)...(19): siRNA sense strand
guugaauuguucucacuug

SEQ ID NO: 1970649 - RNA, 19 nt, Homo sapiens
  misc_RNA (1)...(19): siRNA sense strand
ugacugggcuacgugaaga

SEQ ID NO: 1970650 - RNA, 19 nt, Homo sapiens
  misc_RNA (1)...(19): siRNA sense strand
gauguuaucacccuuacug

SEQ ID NO: 1970651 - RNA, 19 nt, Homo sapiens
  misc_RNA (1)...(19): siRNA sense strand
caacugcuccaucuuuaag

SEQ ID NO: 1970652 - RNA, 19 nt, Homo sapiens
  misc_RNA (1)...(19): siRNA sense strand
ucucacuugucguuuguaa

SEQ ID NO: 1970653 - RNA, 19 nt, Homo sapiens
  misc_RNA (1)...(19): siRNA sense strand
uaucacccuuacuggauuu

SEQ ID NO: 1970654 - RNA, 19 nt, Homo sapiens
  misc_RNA (1)...(19): siRNA sense strand
gaagauccgccauucucau

SEQ ID NO: 1970655 - RNA, 19 nt, Homo sapiens
  misc_RNA (1)...(19): siRNA sense strand
ccugugaaaucauuguuag

SEQ ID NO: 1970656 - RNA, 19 nt, Homo sapiens
  misc_RNA (1)...(19): siRNA sense strand
ggguaagugccuccaaauu

SEQ ID NO: 1970657 - RNA, 19 nt, Homo sapiens
  misc_RNA (1)...(19): siRNA sense strand
aaggguaagugccuccaaa

SEQ ID NO: 1970658 - RNA, 19 nt, Homo sapiens
  misc_RNA (1)...(19): siRNA sense strand
gagauguuaucacccuuac

SEQ ID NO: 1970659 - RNA, 19 nt, Homo sapiens
  misc_RNA (1)...(19): siRNA sense strand
caccugccguugaauuguu

SEQ ID NO: 1970660 - RNA, 19 nt, Homo sapiens
  misc_RNA (1)...(19): siRNA sense strand
agcccucccugccuuguua

SEQ ID NO: 1970661 - RNA, 19 nt, Homo sapiens
  misc_RNA (1)...(19): siRNA sense strand
ugccugugcugcucgagua

SEQ ID NO: 1970662 - RNA, 19 nt, Homo sapiens
  misc_RNA (1)...(19): siRNA sense strand
uguaagaauccaaguaugu

SEQ ID NO: 1970663 - RNA, 19 nt, Homo sapiens
  misc_RNA (1)...(19): siRNA sense strand
aaaggaggaagccgcagua

SEQ ID NO: 1970664 - RNA, 19 nt, Homo sapiens
  misc_RNA (1)...(19): siRNA sense strand
guucucacuugucguuugu

SEQ ID NO: 1970665 - RNA, 19 nt, Homo sapiens
  misc_RNA (1)...(19): siRNA sense strand
guaagaauccaaguauguc

SEQ ID NO: 1970666 - RNA, 19 nt, Homo sapiens
  misc_RNA (1)...(19): siRNA sense strand
ucaggaugcuguacucacu

SEQ ID NO: 1970667 - RNA, 19 nt, Homo sapiens
  misc_RNA (1)...(19): siRNA sense strand
caaggguugcguugucuga

SEQ ID NO: 1970668 - RNA, 19 nt, Homo sapiens
  misc_RNA (1)...(19): siRNA sense strand
agagauguuaucacccuua

SEQ ID NO: 1970669 - RNA, 19 nt, Homo sapiens
  misc_RNA (1)...(19): siRNA sense strand
acgcacaacugcuccaucu

SEQ ID NO: 1970670 - RNA, 19 nt, Homo sapiens
  misc_RNA (1)...(19): siRNA sense strand
gugaagauccgccauucuc

SEQ ID NO: 1970671 - RNA, 19 nt, Homo sapiens
  misc_RNA (1)...(19): siRNA sense strand
gcugacguucuauuacaaa

SEQ ID NO: 1970672 - RNA, 19 nt, Homo sapiens
  misc_RNA (1)...(19): siRNA sense strand
gcagcuagaaggguaagug

SEQ ID NO: 1970673 - RNA, 19 nt, Homo sapiens
  misc_RNA (1)...(19): siRNA sense strand
uuaagauauuggagugaga

SEQ ID NO: 1970674 - RNA, 19 nt, Homo sapiens
  misc_RNA (1)...(19): siRNA sense strand
uuaucacccuuacuggauu

SEQ ID NO: 1970675 - RNA, 19 nt, Homo sapiens
  misc_RNA (1)...(19): siRNA sense strand
guuaucacccuuacuggau

SEQ ID NO: 1970676 - RNA, 19 nt, Homo sapiens
  misc_RNA (1)...(19): siRNA sense strand
ggagaggagcagcuagaag

SEQ ID NO: 1970677 - RNA, 19 nt, Homo sapiens
  misc_RNA (1)...(19): siRNA sense strand
gauuuugccucaucaguca

SEQ ID NO: 1970678 - RNA, 19 nt, Homo sapiens
  misc_RNA (1)...(19): siRNA sense strand
uaagaauccaaguauguca

SEQ ID NO: 1970679 - RNA, 19 nt, Homo sapiens
  misc_RNA (1)...(19): siRNA sense strand
uaagugccuccaaauuuca

SEQ ID NO: 1970680 - RNA, 19 nt, Homo sapiens
  misc_RNA (1)...(19): siRNA sense strand
agucaaggguugcguuguc

SEQ ID NO: 1970681 - RNA, 19 nt, Homo sapiens
  misc_RNA (1)...(19): siRNA sense strand
cucccugccuuguuaaaga

SEQ ID NO: 1970682 - RNA, 19 nt, Homo sapiens
  misc_RNA (1)...(19): siRNA sense strand
gcaccugccguugaauugu

SEQ ID NO: 1970683 - RNA, 19 nt, Homo sapiens
  misc_RNA (1)...(19): siRNA sense strand
acaacugcuccaucuuuaa

SEQ ID NO: 1970684 - RNA, 19 nt, Homo sapiens
  misc_RNA (1)...(19): siRNA sense strand
gaaggguaagugccuccaa

SEQ ID NO: 1970685 - RNA, 19 nt, Homo sapiens
  misc_RNA (1)...(19): siRNA sense strand
guuuacaggauuugcacua

SEQ ID NO: 1970686 - RNA, 19 nt, Homo sapiens
  misc_RNA (1)...(19): siRNA sense strand
guuuguaagaauccaagua

SEQ ID NO: 1970687 - RNA, 19 nt, Homo sapiens
  misc_RNA (1)...(19): siRNA sense strand
guagauaacauugcuucag

SEQ ID NO: 1970688 - RNA, 19 nt, Homo sapiens
  misc_RNA (1)...(19): siRNA sense strand
ggagcagcuagaaggguaa

SEQ ID NO: 1970689 - RNA, 19 nt, Homo sapiens
  misc_RNA (1)...(19): siRNA sense strand
uaggagaggagcagcuaga

SEQ ID NO: 1970690 - RNA, 19 nt, Homo sapiens
  misc_RNA (1)...(19): siRNA sense strand
ugaagauccgccauucuca

SEQ ID NO: 1970691 - RNA, 19 nt, Homo sapiens
  misc_RNA (1)...(19): siRNA sense strand
uuaggagguugcuguuugg

SEQ ID NO: 1970692 - RNA, 19 nt, Homo sapiens
  misc_RNA (1)...(19): siRNA sense strand
gagucguuguugagaguca

SEQ ID NO: 1970693 - RNA, 19 nt, Homo sapiens
  misc_RNA (1)...(19): siRNA sense strand
caugagcugacguucuauu

SEQ ID NO: 1970694 - RNA, 19 nt, Homo sapiens
  misc_RNA (1)...(19): siRNA sense strand
uaugucacccuuacaccaa

SEQ ID NO: 1970695 - RNA, 19 nt, Homo sapiens
  misc_RNA (1)...(19): siRNA sense strand
caucaugacuuucuuccaa

SEQ ID NO: 1970696 - RNA, 19 nt, Homo sapiens
  misc_RNA (1)...(19): siRNA sense strand
ggacacauguggcauuaac

SEQ ID NO: 1970697 - RNA, 19 nt, Homo sapiens
  misc_RNA (1)...(19): siRNA sense strand
aagaagggcuuguccauuc

SEQ ID NO: 1970698 - RNA, 19 nt, Homo sapiens
  misc_RNA (1)...(19): siRNA sense strand
gcaaggagagacagaauuc

SEQ ID NO: 1970699 - RNA, 19 nt, Homo sapiens
  misc_RNA (1)...(19): siRNA sense strand
ggaccucuuugccaugauu

SEQ ID NO: 1970700 - RNA, 19 nt, Homo sapiens
  misc_RNA (1)...(19): siRNA sense strand
ggacaaccuucagaugaga

SEQ ID NO: 1970701 - RNA, 19 nt, Homo sapiens
  misc_RNA (1)...(19): siRNA sense strand
caggacacauguggcauua

SEQ ID NO: 1970702 - RNA, 19 nt, Homo sapiens
  misc_RNA (1)...(19): siRNA sense strand
uggcauuccuggcaucaua

SEQ ID NO: 1970703 - RNA, 19 nt, Homo sapiens
  misc_RNA (1)...(19): siRNA sense strand
ccagauuuauggucucuug

SEQ ID NO: 1970704 - RNA, 19 nt, Homo sapiens
  misc_RNA (1)...(19): siRNA sense strand
gaaaguuccagauuuaugg

SEQ ID NO: 1970705 - RNA, 19 nt, Homo sapiens
  misc_RNA (1)...(19): siRNA sense strand
gagccgccaucaacaccua

SEQ ID NO: 1970706 - RNA, 19 nt, Homo sapiens
  misc_RNA (1)...(19): siRNA sense strand
ggacuggaccgcaagaaca

SEQ ID NO: 1970707 - RNA, 19 nt, Homo sapiens
  misc_RNA (1)...(19): siRNA sense strand
gggcugguuccacuucuua

SEQ ID NO: 1970708 - RNA, 19 nt, Homo sapiens
  misc_RNA (1)...(19): siRNA sense strand
ccaugaccauccacacauu

SEQ ID NO: 1970709 - RNA, 19 nt, Homo sapiens
  misc_RNA (1)...(19): siRNA sense strand
gggacaaccuucagaugag

SEQ ID NO: 1970710 - RNA, 19 nt, Homo sapiens
  misc_RNA (1)...(19): siRNA sense strand
ggguaccgcugcugagaug

SEQ ID NO: 1970711 - RNA, 19 nt, Homo sapiens
  misc_RNA (1)...(19): siRNA sense strand
guaccagucggaccucuuu

SEQ ID NO: 1970712 - RNA, 19 nt, Homo sapiens
  misc_RNA (1)...(19): siRNA sense strand
cgacauggagaacgaauuc

SEQ ID NO: 1970713 - RNA, 19 nt, Homo sapiens
  misc_RNA (1)...(19): siRNA sense strand
caagaacacagggaaaguu

SEQ ID NO: 1970714 - RNA, 19 nt, Homo sapiens
  misc_RNA (1)...(19): siRNA sense strand
ggucagagaggacgcacaa

SEQ ID NO: 1970715 - RNA, 19 nt, Homo sapiens
  misc_RNA (1)...(19): siRNA sense strand
caucgugggugcugugaca

SEQ ID NO: 1970716 - RNA, 19 nt, Homo sapiens
  misc_RNA (1)...(19): siRNA sense strand
cagagaggacgcacaagaa

SEQ ID NO: 1970717 - RNA, 19 nt, Homo sapiens
  misc_RNA (1)...(19): siRNA sense strand
ccauucagcugcucaucau

SEQ ID NO: 1970718 - RNA, 19 nt, Homo sapiens
  misc_RNA (1)...(19): siRNA sense strand
gggcaguucuggguaaagu

SEQ ID NO: 1970719 - RNA, 19 nt, Homo sapiens
  misc_RNA (1)...(19): siRNA sense strand
gcaggugauuauggugauu

SEQ ID NO: 1970720 - RNA, 19 nt, Homo sapiens
  misc_RNA (1)...(19): siRNA sense strand
gccuugaagucuauggaaa

SEQ ID NO: 1970721 - RNA, 19 nt, Homo sapiens
  misc_RNA (1)...(19): siRNA sense strand
cagcuucaacucagccaua

SEQ ID NO: 1970722 - RNA, 19 nt, Homo sapiens
  misc_RNA (1)...(19): siRNA sense strand
ucagagaggacgcacaaga

SEQ ID NO: 1970723 - RNA, 19 nt, Homo sapiens
  misc_RNA (1)...(19): siRNA sense strand
cauguggcauuaacaaucu

SEQ ID NO: 1970724 - RNA, 19 nt, Homo sapiens
  misc_RNA (1)...(19): siRNA sense strand
ggcuucggcuuccucauga

SEQ ID NO: 1970725 - RNA, 19 nt, Homo sapiens
  misc_RNA (1)...(19): siRNA sense strand
gagcaaggagagacagaau

SEQ ID NO: 1970726 - RNA, 19 nt, Homo sapiens
  misc_RNA (1)...(19): siRNA sense strand
gcaguucuggguaaaguca

SEQ ID NO: 1970727 - RNA, 19 nt, Homo sapiens
  misc_RNA (1)...(19): siRNA sense strand
ugaagucuauggaaaagaa

SEQ ID NO: 1970728 - RNA, 19 nt, Homo sapiens
  misc_RNA (1)...(19): siRNA sense strand
gggcuucggcuuccucaug

SEQ ID NO: 1970729 - RNA, 19 nt, Homo sapiens
  misc_RNA (1)...(19): siRNA sense strand
gcaagaacacagggaaagu

SEQ ID NO: 1970730 - RNA, 19 nt, Homo sapiens
  misc_RNA (1)...(19): siRNA sense strand
cagaugagaacugcuuuga

SEQ ID NO: 1970731 - RNA, 19 nt, Homo sapiens
  misc_RNA (1)...(19): siRNA sense strand
ugagcgacauggagaacga

SEQ ID NO: 1970732 - RNA, 19 nt, Homo sapiens
  misc_RNA (1)...(19): siRNA sense strand
gggcuuguccauuccuuug

SEQ ID NO: 1970733 - RNA, 19 nt, Homo sapiens
  misc_RNA (1)...(19): siRNA sense strand
acacauguggcauuaacaa

SEQ ID NO: 1970734 - RNA, 19 nt, Homo sapiens
  misc_RNA (1)...(19): siRNA sense strand
aaagaagggcuuguccauu

SEQ ID NO: 1970735 - RNA, 19 nt, Homo sapiens
  misc_RNA (1)...(19): siRNA sense strand
ccgccagccuugaagucua

SEQ ID NO: 1970736 - RNA, 19 nt, Homo sapiens
  misc_RNA (1)...(19): siRNA sense strand
uuaccucgguggcaauauc

SEQ ID NO: 1970737 - RNA, 19 nt, Homo sapiens
  misc_RNA (1)...(19): siRNA sense strand
ccaggacacauguggcauu

SEQ ID NO: 1970738 - RNA, 19 nt, Homo sapiens
  misc_RNA (1)...(19): siRNA sense strand
gcagggcugguuccacuuc

SEQ ID NO: 1970739 - RNA, 19 nt, Homo sapiens
  misc_RNA (1)...(19): siRNA sense strand
cgccagccuugaagucuau

SEQ ID NO: 1970740 - RNA, 19 nt, Homo sapiens
  misc_RNA (1)...(19): siRNA sense strand
ucaacucagccauauccua

SEQ ID NO: 1970741 - RNA, 19 nt, Homo sapiens
  misc_RNA (1)...(19): siRNA sense strand
cacauuuggcgccuacuuu

SEQ ID NO: 1970742 - RNA, 19 nt, Homo sapiens
  misc_RNA (1)...(19): siRNA sense strand
agaggacgcacaagaacuu

SEQ ID NO: 1970743 - RNA, 19 nt, Homo sapiens
  misc_RNA (1)...(19): siRNA sense strand
gcccucaggacccucagua

SEQ ID NO: 1970744 - RNA, 19 nt, Homo sapiens
  misc_RNA (1)...(19): siRNA sense strand
ucggcuuccucaugacuuu

SEQ ID NO: 1970745 - RNA, 19 nt, Homo sapiens
  misc_RNA (1)...(19): siRNA sense strand
ccucaucaacgcugacuuc

SEQ ID NO: 1970746 - RNA, 19 nt, Homo sapiens
  misc_RNA (1)...(19): siRNA sense strand
gaagggcaagcuggacaug

SEQ ID NO: 1970747 - RNA, 19 nt, Homo sapiens
  misc_RNA (1)...(19): siRNA sense strand
caugaccauccacacauuu

SEQ ID NO: 1970748 - RNA, 19 nt, Homo sapiens
  misc_RNA (1)...(19): siRNA sense strand
ccucuucgcugugaaugag

SEQ ID NO: 1970749 - RNA, 19 nt, Homo sapiens
  misc_RNA (1)...(19): siRNA sense strand
ucggaccucuuugccauga

SEQ ID NO: 1970750 - RNA, 19 nt, Homo sapiens
  misc_RNA (1)...(19): siRNA sense strand
ugagaacugcuuugaggau

SEQ ID NO: 1970751 - RNA, 19 nt, Homo sapiens
  misc_RNA (1)...(19): siRNA sense strand
ugauuauggugauucucuu

SEQ ID NO: 1970752 - RNA, 19 nt, Homo sapiens
  misc_RNA (1)...(19): siRNA sense strand
uaacaaucugcauggcauu

SEQ ID NO: 1970753 - RNA, 19 nt, Homo sapiens
  misc_RNA (1)...(19): siRNA sense strand
gugacccucuucgcuguga

SEQ ID NO: 1970754 - RNA, 19 nt, Homo sapiens
  misc_RNA (1)...(19): siRNA sense strand
guccauuccuuugacuuuc

SEQ ID NO: 1970755 - RNA, 19 nt, Homo sapiens
  misc_RNA (1)...(19): siRNA sense strand
ugaguucauucuccuuaac

SEQ ID NO: 1970756 - RNA, 19 nt, Homo sapiens
  misc_RNA (1)...(19): siRNA sense strand
gcuuugaggaugcggucua

SEQ ID NO: 1970757 - RNA, 19 nt, Homo sapiens
  misc_RNA (1)...(19): siRNA sense strand
ggggacaaccuucagauga

SEQ ID NO: 1970758 - RNA, 19 nt, Homo sapiens
  misc_RNA (1)...(19): siRNA sense strand
uguccauuccuuugacuuu

SEQ ID NO: 1970759 - RNA, 19 nt, Homo sapiens
  misc_RNA (1)...(19): siRNA sense strand
gauuauggugauucucuuc

SEQ ID NO: 1970760 - RNA, 19 nt, Homo sapiens
  misc_RNA (1)...(19): siRNA sense strand
gagaggacgcacaagaacu

SEQ ID NO: 1970761 - RNA, 19 nt, Homo sapiens
  misc_RNA (1)...(19): siRNA sense strand
ggaaggagcucuuuaugua

SEQ ID NO: 1970762 - RNA, 19 nt, Homo sapiens
  misc_RNA (1)...(19): siRNA sense strand
caacagagaauaagaauga

SEQ ID NO: 1970763 - RNA, 19 nt, Homo sapiens
  misc_RNA (1)...(19): siRNA sense strand
ggaccaggcuguacucuga

SEQ ID NO: 1970764 - RNA, 19 nt, Homo sapiens
  misc_RNA (1)...(19): siRNA sense strand
ucaauaagcccucuucuaa

SEQ ID NO: 1970765 - RNA, 19 nt, Homo sapiens
  misc_RNA (1)...(19): siRNA sense strand
gaagacaacaaacgauaua

SEQ ID NO: 1970766 - RNA, 19 nt, Homo sapiens
  misc_RNA (1)...(19): siRNA sense strand
guaaacauaucaccuacaa

SEQ ID NO: 1970767 - RNA, 19 nt, Homo sapiens
  misc_RNA (1)...(19): siRNA sense strand
gauacuagaugaggaguuu

SEQ ID NO: 1970768 - RNA, 19 nt, Homo sapiens
  misc_RNA (1)...(19): siRNA sense strand
ccacccagcuguuaaaguu

SEQ ID NO: 1970769 - RNA, 19 nt, Homo sapiens
  misc_RNA (1)...(19): siRNA sense strand
gcuaauggaucagaacgua

SEQ ID NO: 1970770 - RNA, 19 nt, Homo sapiens
  misc_RNA (1)...(19): siRNA sense strand
gaaagccaacagagaauaa

SEQ ID NO: 1970771 - RNA, 19 nt, Homo sapiens
  misc_RNA (1)...(19): siRNA sense strand
gaugcuaggugaugugcua

SEQ ID NO: 1970772 - RNA, 19 nt, Homo sapiens
  misc_RNA (1)...(19): siRNA sense strand
gagcagaaagugaaguuaa

SEQ ID NO: 1970773 - RNA, 19 nt, Homo sapiens
  misc_RNA (1)...(19): siRNA sense strand
gaacguauugccuggagua

SEQ ID NO: 1970774 - RNA, 19 nt, Homo sapiens
  misc_RNA (1)...(19): siRNA sense strand
caacaaacgauauaacuca

SEQ ID NO: 1970775 - RNA, 19 nt, Homo sapiens
  misc_RNA (1)...(19): siRNA sense strand
gcaauaaauccaguacuuu

SEQ ID NO: 1970776 - RNA, 19 nt, Homo sapiens
  misc_RNA (1)...(19): siRNA sense strand
uaacucaacuauccagcaa

SEQ ID NO: 1970777 - RNA, 19 nt, Homo sapiens
  misc_RNA (1)...(19): siRNA sense strand
ggaaagccaacagagaaua

SEQ ID NO: 1970778 - RNA, 19 nt, Homo sapiens
  misc_RNA (1)...(19): siRNA sense strand
gaaaacagcccacuacuca

SEQ ID NO: 1970779 - RNA, 19 nt, Homo sapiens
  misc_RNA (1)...(19): siRNA sense strand
gcuaguguguguuugaaug

SEQ ID NO: 1970780 - RNA, 19 nt, Homo sapiens
  misc_RNA (1)...(19): siRNA sense strand
gaaaaugggccaggaauaa

SEQ ID NO: 1970781 - RNA, 19 nt, Homo sapiens
  misc_RNA (1)...(19): siRNA sense strand
cugcugcacugaauaauga

SEQ ID NO: 1970782 - RNA, 19 nt, Homo sapiens
  misc_RNA (1)...(19): siRNA sense strand
caacuauccagcaaaguaa

SEQ ID NO: 1970783 - RNA, 19 nt, Homo sapiens
  misc_RNA (1)...(19): siRNA sense strand
caauaaauccaguacuuug

SEQ ID NO: 1970784 - RNA, 19 nt, Homo sapiens
  misc_RNA (1)...(19): siRNA sense strand
gauacgugauuucagcauu

SEQ ID NO: 1970785 - RNA, 19 nt, Homo sapiens
  misc_RNA (1)...(19): siRNA sense strand
aaacauaucaccuacaauc

SEQ ID NO: 1970786 - RNA, 19 nt, Homo sapiens
  misc_RNA (1)...(19): siRNA sense strand
ucaacuauccagcaaagua

SEQ ID NO: 1970787 - RNA, 19 nt, Homo sapiens
  misc_RNA (1)...(19): siRNA sense strand
caacucuugucuugacuga

SEQ ID NO: 1970788 - RNA, 19 nt, Homo sapiens
  misc_RNA (1)...(19): siRNA sense strand
ggcaagcguuccaccauga

SEQ ID NO: 1970789 - RNA, 19 nt, Homo sapiens
  misc_RNA (1)...(19): siRNA sense strand
auacagaagucaagaucaa

SEQ ID NO: 1970790 - RNA, 19 nt, Homo sapiens
  misc_RNA (1)...(19): siRNA sense strand
agauggcccucguaccuua

SEQ ID NO: 1970791 - RNA, 19 nt, Homo sapiens
  misc_RNA (1)...(19): siRNA sense strand
gaacucagaaacucaaugg

SEQ ID NO: 1970792 - RNA, 19 nt, Homo sapiens
  misc_RNA (1)...(19): siRNA sense strand
gguguguacuuuaaucaau

SEQ ID NO: 1970793 - RNA, 19 nt, Homo sapiens
  misc_RNA (1)...(19): siRNA sense strand
acaguggcguggaaacuuu

SEQ ID NO: 1970794 - RNA, 19 nt, Homo sapiens
  misc_RNA (1)...(19): siRNA sense strand
acucuugucuugacugauu

SEQ ID NO: 1970795 - RNA, 19 nt, Homo sapiens
  misc_RNA (1)...(19): siRNA sense strand
uuaaugaaguacccgugua

SEQ ID NO: 1970796 - RNA, 19 nt, Homo sapiens
  misc_RNA (1)...(19): siRNA sense strand
gcaagcuaccgacuagaaa

SEQ ID NO: 1970797 - RNA, 19 nt, Homo sapiens
  misc_RNA (1)...(19): siRNA sense strand
caggguggaucauguuaug

SEQ ID NO: 1970798 - RNA, 19 nt, Homo sapiens
  misc_RNA (1)...(19): siRNA sense strand
gggaaggagcucuuuaugu

SEQ ID NO: 1970799 - RNA, 19 nt, Homo sapiens
  misc_RNA (1)...(19): siRNA sense strand
aauaagcccucuucuaagg

SEQ ID NO: 1970800 - RNA, 19 nt, Homo sapiens
  misc_RNA (1)...(19): siRNA sense strand
ggaccugugugguguguac

SEQ ID NO: 1970801 - RNA, 19 nt, Homo sapiens
  misc_RNA (1)...(19): siRNA sense strand
gacuugcucucucuaaaca

SEQ ID NO: 1970802 - RNA, 19 nt, Homo sapiens
  misc_RNA (1)...(19): siRNA sense strand
aaaugaagcucucuuugac

SEQ ID NO: 1970803 - RNA, 19 nt, Homo sapiens
  misc_RNA (1)...(19): siRNA sense strand
cagagaauaagaaugauga

SEQ ID NO: 1970804 - RNA, 19 nt, Homo sapiens
  misc_RNA (1)...(19): siRNA sense strand
cucagaaacucaauggaaa

SEQ ID NO: 1970805 - RNA, 19 nt, Homo sapiens
  misc_RNA (1)...(19): siRNA sense strand
gacaauaacagaaugacau

SEQ ID NO: 1970806 - RNA, 19 nt, Homo sapiens
  misc_RNA (1)...(19): siRNA sense strand
caaacgauauaacucaacu

SEQ ID NO: 1970807 - RNA, 19 nt, Homo sapiens
  misc_RNA (1)...(19): siRNA sense strand
auaaucaguuggacaucua

SEQ ID NO: 1970808 - RNA, 19 nt, Homo sapiens
  misc_RNA (1)...(19): siRNA sense strand
ugauuaauccacuugagua

SEQ ID NO: 1970809 - RNA, 19 nt, Homo sapiens
  misc_RNA (1)...(19): siRNA sense strand
uauugaagauuggaccuaa

SEQ ID NO: 1970810 - RNA, 19 nt, Homo sapiens
  misc_RNA (1)...(19): siRNA sense strand
cauaucaccuacaaucagu

SEQ ID NO: 1970811 - RNA, 19 nt, Homo sapiens
  misc_RNA (1)...(19): siRNA sense strand
aagaagacaacaaacgaua

SEQ ID NO: 1970812 - RNA, 19 nt, Homo sapiens
  misc_RNA (1)...(19): siRNA sense strand
ccaagaagacaacaaacga

SEQ ID NO: 1970813 - RNA, 19 nt, Homo sapiens
  misc_RNA (1)...(19): siRNA sense strand
acagauccaucaccucaug

SEQ ID NO: 1970814 - RNA, 19 nt, Homo sapiens
  misc_RNA (1)...(19): siRNA sense strand
ggaagugcagcucaccaaa

SEQ ID NO: 1970815 - RNA, 19 nt, Homo sapiens
  misc_RNA (1)...(19): siRNA sense strand
ugugugguguguacuuuaa

SEQ ID NO: 1970816 - RNA, 19 nt, Homo sapiens
  misc_RNA (1)...(19): siRNA sense strand
gcuaggugaugugcuaaug

SEQ ID NO: 1970817 - RNA, 19 nt, Homo sapiens
  misc_RNA (1)...(19): siRNA sense strand
aagugcagcucaccaaaga

SEQ ID NO: 1970818 - RNA, 19 nt, Homo sapiens
  misc_RNA (1)...(19): siRNA sense strand
gagagcagaaagugaaguu

SEQ ID NO: 1970819 - RNA, 19 nt, Homo sapiens
  misc_RNA (1)...(19): siRNA sense strand
acaaucaguucagaaucua

SEQ ID NO: 1970820 - RNA, 19 nt, Homo sapiens
  misc_RNA (1)...(19): siRNA sense strand
agcaauaaauccaguacuu

SEQ ID NO: 1970821 - RNA, 19 nt, Homo sapiens
  misc_RNA (1)...(19): siRNA sense strand
uaaugaaguacccguguaa

SEQ ID NO: 1970822 - RNA, 19 nt, Homo sapiens
  misc_RNA (1)...(19): siRNA sense strand
auucagugcucaagaguga

SEQ ID NO: 1970823 - RNA, 19 nt, Homo sapiens
  misc_RNA (1)...(19): siRNA sense strand
gagccuguuuaauggauau

SEQ ID NO: 1970824 - RNA, 19 nt, Homo sapiens
  misc_RNA (1)...(19): siRNA sense strand
agcagaaagugaaguuaaa

SEQ ID NO: 1970825 - RNA, 19 nt, Homo sapiens
  misc_RNA (1)...(19): siRNA sense strand
ggaccuaacaauggaaaga

SEQ ID NO: 1970826 - RNA, 19 nt, Homo sapiens
  misc_RNA (1)...(19): siRNA sense strand
uacaaucaguucagaaucu

SEQ ID NO: 1970827 - RNA, 19 nt, Homo sapiens
  misc_RNA (1)...(19): siRNA sense strand
cagcaaaguaaacauauca

SEQ ID NO: 1970828 - RNA, 19 nt, Homo sapiens
  misc_RNA (1)...(19): siRNA sense strand
uaauggaucagaacguauu

SEQ ID NO: 1970829 - RNA, 19 nt, Homo sapiens
  misc_RNA (1)...(19): siRNA sense strand
gaagugcagcucaccaaag

SEQ ID NO: 1970830 - RNA, 19 nt, Homo sapiens
  misc_RNA (1)...(19): siRNA sense strand
aauuauuccuggaugcuaa

SEQ ID NO: 1970831 - RNA, 19 nt, Homo sapiens
  misc_RNA (1)...(19): siRNA sense strand
ggagcucuuuauguacuuu

SEQ ID NO: 1970832 - RNA, 19 nt, Homo sapiens
  misc_RNA (1)...(19): siRNA sense strand
gcucaagagugaagaaaau

SEQ ID NO: 1970833 - RNA, 19 nt, Homo sapiens
  misc_RNA (1)...(19): siRNA sense strand
caaggccuauugauucagu

SEQ ID NO: 1970834 - RNA, 19 nt, Homo sapiens
  misc_RNA (1)...(19): siRNA sense strand
ggucuccacccagcuguua

SEQ ID NO: 1970835 - RNA, 19 nt, Homo sapiens
  misc_RNA (1)...(19): siRNA sense strand
gugcagcucaccaaagauu

SEQ ID NO: 1970836 - RNA, 19 nt, Homo sapiens
  misc_RNA (1)...(19): siRNA sense strand
uaggugaugugcuaaugga

SEQ ID NO: 1970837 - RNA, 19 nt, Homo sapiens
  misc_RNA (1)...(19): siRNA sense strand
ccgacuagaaauacuauaa

SEQ ID NO: 1970838 - RNA, 19 nt, Homo sapiens
  misc_RNA (1)...(19): siRNA sense strand
uaugcaagcuaccgacuag

SEQ ID NO: 1970839 - RNA, 19 nt, Homo sapiens
  misc_RNA (1)...(19): siRNA sense strand
uggaaaaccucauacagaa

SEQ ID NO: 1970840 - RNA, 19 nt, Homo sapiens
  misc_RNA (1)...(19): siRNA sense strand
aaacaguauugaagauugg

SEQ ID NO: 1970841 - RNA, 19 nt, Homo sapiens
  misc_RNA (1)...(19): siRNA sense strand
caucaugauuaauccacuu

SEQ ID NO: 1970842 - RNA, 19 nt, Homo sapiens
  misc_RNA (1)...(19): siRNA sense strand
guagaacucagaaacucaa

SEQ ID NO: 1970843 - RNA, 19 nt, Homo sapiens
  misc_RNA (1)...(19): siRNA sense strand
ccagcaaaguaaacauauc

SEQ ID NO: 1970844 - RNA, 19 nt, Homo sapiens
  misc_RNA (1)...(19): siRNA sense strand
gacaacaaacgauauaacu

SEQ ID NO: 1970845 - RNA, 19 nt, Homo sapiens
  misc_RNA (1)...(19): siRNA sense strand
ugaaguacccguguaauac

SEQ ID NO: 1970846 - RNA, 19 nt, Homo sapiens
  misc_RNA (1)...(19): siRNA sense strand
ggacaauaacagaaugaca

SEQ ID NO: 1970847 - RNA, 19 nt, Homo sapiens
  misc_RNA (1)...(19): siRNA sense strand
gaaggagcucuuuauguac

SEQ ID NO: 1970848 - RNA, 19 nt, Homo sapiens
  misc_RNA (1)...(19): siRNA sense strand
ucaccugaauuuaguuucu

SEQ ID NO: 1970849 - RNA, 19 nt, Homo sapiens
  misc_RNA (1)...(19): siRNA sense strand
aaacagcccacuacucauc

SEQ ID NO: 1970850 - RNA, 19 nt, Homo sapiens
  misc_RNA (1)...(19): siRNA sense strand
gucuuuagccacuuaauga

SEQ ID NO: 1970851 - RNA, 19 nt, Homo sapiens
  misc_RNA (1)...(19): siRNA sense strand
ucaauuaacagaugaacag

SEQ ID NO: 1970852 - RNA, 19 nt, Homo sapiens
  misc_RNA (1)...(19): siRNA sense strand
gucuugagccuguuuaaug

SEQ ID NO: 1970853 - RNA, 19 nt, Homo sapiens
  misc_RNA (1)...(19): siRNA sense strand
caggaaaacugcauuugga

SEQ ID NO: 1970854 - RNA, 19 nt, Homo sapiens
  misc_RNA (1)...(19): siRNA sense strand
gauuaauccacuugaguau

SEQ ID NO: 1970855 - RNA, 19 nt, Homo sapiens
  misc_RNA (1)...(19): siRNA sense strand
aagcuaccgacuagaaaua

SEQ ID NO: 1970856 - RNA, 19 nt, Homo sapiens
  misc_RNA (1)...(19): siRNA sense strand
gcuguuaaaguuugucaau

SEQ ID NO: 1970857 - RNA, 19 nt, Homo sapiens
  misc_RNA (1)...(19): siRNA sense strand
cugcaacccuggauauucu

SEQ ID NO: 1970858 - RNA, 19 nt, Homo sapiens
  misc_RNA (1)...(19): siRNA sense strand
caagaagacaacaaacgau

SEQ ID NO: 1970859 - RNA, 19 nt, Homo sapiens
  misc_RNA (1)...(19): siRNA sense strand
auuaacagaugaacagauc

SEQ ID NO: 1970860 - RNA, 19 nt, Homo sapiens
  misc_RNA (1)...(19): siRNA sense strand
guuugucaauuaacagaug

SEQ ID NO: 1970861 - RNA, 19 nt, Homo sapiens
  misc_RNA (1)...(19): siRNA sense strand
acaucaauccugccuggua

SEQ ID NO: 1970862 - RNA, 19 nt, Homo sapiens
  misc_RNA (1)...(19): siRNA sense strand
ggaaauaaauggugaggaa

SEQ ID NO: 1970863 - RNA, 19 nt, Homo sapiens
  misc_RNA (1)...(19): siRNA sense strand
gaaggaagauagaauggaa

SEQ ID NO: 1970864 - RNA, 19 nt, Homo sapiens
  misc_RNA (1)...(19): siRNA sense strand
gagauagacugcagcauau

SEQ ID NO: 1970865 - RNA, 19 nt, Homo sapiens
  misc_RNA (1)...(19): siRNA sense strand
gaauugaugugggaacuuu

SEQ ID NO: 1970866 - RNA, 19 nt, Homo sapiens
  misc_RNA (1)...(19): siRNA sense strand
gaacuuugcugaaaucaac

SEQ ID NO: 1970867 - RNA, 19 nt, Homo sapiens
  misc_RNA (1)...(19): siRNA sense strand
caacugguguguccaauuc

SEQ ID NO: 1970868 - RNA, 19 nt, Homo sapiens
  misc_RNA (1)...(19): siRNA sense strand
gaauaacgcauaugguaaa

SEQ ID NO: 1970869 - RNA, 19 nt, Homo sapiens
  misc_RNA (1)...(19): siRNA sense strand
gaagaaugcaugcagauug

SEQ ID NO: 1970870 - RNA, 19 nt, Homo sapiens
  misc_RNA (1)...(19): siRNA sense strand
ggaagaaauccuaaugaaa

SEQ ID NO: 1970871 - RNA, 19 nt, Homo sapiens
  misc_RNA (1)...(19): siRNA sense strand
gaaaucaaccuguaauacu

SEQ ID NO: 1970872 - RNA, 19 nt, Homo sapiens
  misc_RNA (1)...(19): siRNA sense strand
ggaggaaggcaaagaaguu

SEQ ID NO: 1970873 - RNA, 19 nt, Homo sapiens
  misc_RNA (1)...(19): siRNA sense strand
agagauagacugcagcaua

SEQ ID NO: 1970874 - RNA, 19 nt, Homo sapiens
  misc_RNA (1)...(19): siRNA sense strand
cguccaaggugaaauaaug

SEQ ID NO: 1970875 - RNA, 19 nt, Homo sapiens
  misc_RNA (1)...(19): siRNA sense strand
gaggaaggcaaagaaguua

SEQ ID NO: 1970876 - RNA, 19 nt, Homo sapiens
  misc_RNA (1)...(19): siRNA sense strand
ucaaguugcucuccagaau

SEQ ID NO: 1970877 - RNA, 19 nt, Homo sapiens
  misc_RNA (1)...(19): siRNA sense strand
gaguugagcacuugugaaa

SEQ ID NO: 1970878 - RNA, 19 nt, Homo sapiens
  misc_RNA (1)...(19): siRNA sense strand
gcugugaccuccuuguuca

SEQ ID NO: 1970879 - RNA, 19 nt, Homo sapiens
  misc_RNA (1)...(19): siRNA sense strand
aaacggaguugagcacuug

SEQ ID NO: 1970880 - RNA, 19 nt, Homo sapiens
  misc_RNA (1)...(19): siRNA sense strand
gggcaacuccauccuauga

SEQ ID NO: 1970881 - RNA, 19 nt, Homo sapiens
  misc_RNA (1)...(19): siRNA sense strand
gaaacauccuauuauacca

SEQ ID NO: 1970882 - RNA, 19 nt, Homo sapiens
  misc_RNA (1)...(19): siRNA sense strand
cauacuggacgcuuuauaa

SEQ ID NO: 1970883 - RNA, 19 nt, Homo sapiens
  misc_RNA (1)...(19): siRNA sense strand
gcaacuccauccuaugaag

SEQ ID NO: 1970884 - RNA, 19 nt, Homo sapiens
  misc_RNA (1)...(19): siRNA sense strand
aaacuuggcccuacagugu

SEQ ID NO: 1970885 - RNA, 19 nt, Homo sapiens
  misc_RNA (1)...(19): siRNA sense strand
gugaaauaaugaaggaaga

SEQ ID NO: 1970886 - RNA, 19 nt, Homo sapiens
  misc_RNA (1)...(19): siRNA sense strand
ggaagaaugcaugcagauu

SEQ ID NO: 1970887 - RNA, 19 nt, Homo sapiens
  misc_RNA (1)...(19): siRNA sense strand
ugaauaacgcauaugguaa

SEQ ID NO: 1970888 - RNA, 19 nt, Homo sapiens
  misc_RNA (1)...(19): siRNA sense strand
caaacggaguugagcacuu

SEQ ID NO: 1970889 - RNA, 19 nt, Homo sapiens
  misc_RNA (1)...(19): siRNA sense strand
cugaauaacgcauauggua

SEQ ID NO: 1970890 - RNA, 19 nt, Homo sapiens
  misc_RNA (1)...(19): siRNA sense strand
uaauauaaccguccaaggu

SEQ ID NO: 1970891 - RNA, 19 nt, Homo sapiens
  misc_RNA (1)...(19): siRNA sense strand
caccauggcuggguaguuc

SEQ ID NO: 1970892 - RNA, 19 nt, Homo sapiens
  misc_RNA (1)...(19): siRNA sense strand
ugaagaccuuggaagaaug

SEQ ID NO: 1970893 - RNA, 19 nt, Homo sapiens
  misc_RNA (1)...(19): siRNA sense strand
ggaaaaggauauccagaca

SEQ ID NO: 1970894 - RNA, 19 nt, Homo sapiens
  misc_RNA (1)...(19): siRNA sense strand
cugaagaccuuggaagaau

SEQ ID NO: 1970895 - RNA, 19 nt, Homo sapiens
  misc_RNA (1)...(19): siRNA sense strand
aacacaagcuuuagugaca

SEQ ID NO: 1970896 - RNA, 19 nt, Homo sapiens
  misc_RNA (1)...(19): siRNA sense strand
cagcauaucaagugaggaa

SEQ ID NO: 1970897 - RNA, 19 nt, Homo sapiens
  misc_RNA (1)...(19): siRNA sense strand
uugcugaaaucaaccugua

SEQ ID NO: 1970898 - RNA, 19 nt, Homo sapiens
  misc_RNA (1)...(19): siRNA sense strand
aauaaauggugaggaagaa

SEQ ID NO: 1970899 - RNA, 19 nt, Homo sapiens
  misc_RNA (1)...(19): siRNA sense strand
gcucaaguccagcaagaug

SEQ ID NO: 1970900 - RNA, 19 nt, Homo sapiens
  misc_RNA (1)...(19): siRNA sense strand
ugugggaacuuugcugaaa

SEQ ID NO: 1970901 - RNA, 19 nt, Homo sapiens
  misc_RNA (1)...(19): siRNA sense strand
gaagaagcagauggccaua

SEQ ID NO: 1970902 - RNA, 19 nt, Homo sapiens
  misc_RNA (1)...(19): siRNA sense strand
ggccauacuggacgcuuua

SEQ ID NO: 1970903 - RNA, 19 nt, Homo sapiens
  misc_RNA (1)...(19): siRNA sense strand
gaaaggcaaacggaguuga

SEQ ID NO: 1970904 - RNA, 19 nt, Homo sapiens
  misc_RNA (1)...(19): siRNA sense strand
caaaagaagugaccacaac

SEQ ID NO: 1970905 - RNA, 19 nt, Homo sapiens
  misc_RNA (1)...(19): siRNA sense strand
gcggauguagcccagguua

SEQ ID NO: 1970906 - RNA, 19 nt, Homo sapiens
  misc_RNA (1)...(19): siRNA sense strand
uuaccacucuccagaagau

SEQ ID NO: 1970907 - RNA, 19 nt, Homo sapiens
  misc_RNA (1)...(19): siRNA sense strand
gugcugugguuccaguauu

SEQ ID NO: 1970908 - RNA, 19 nt, Homo sapiens
  misc_RNA (1)...(19): siRNA sense strand
uaucccaacuuucuuuagu

SEQ ID NO: 1970909 - RNA, 19 nt, Homo sapiens
  misc_RNA (1)...(19): siRNA sense strand
ggaaggcaaagaaguuauc

SEQ ID NO: 1970910 - RNA, 19 nt, Homo sapiens
  misc_RNA (1)...(19): siRNA sense strand
cacaagcuuuagugacauu

SEQ ID NO: 1970911 - RNA, 19 nt, Homo sapiens
  misc_RNA (1)...(19): siRNA sense strand
agacaaacuuggcccuaca

SEQ ID NO: 1970912 - RNA, 19 nt, Homo sapiens
  misc_RNA (1)...(19): siRNA sense strand
ccaacuuucuuuaguacca

SEQ ID NO: 1970913 - RNA, 19 nt, Homo sapiens
  misc_RNA (1)...(19): siRNA sense strand
ugcugugguuccaguauua

SEQ ID NO: 1970914 - RNA, 19 nt, Homo sapiens
  misc_RNA (1)...(19): siRNA sense strand
aaggugaaauaaugaagga

SEQ ID NO: 1970915 - RNA, 19 nt, Homo sapiens
  misc_RNA (1)...(19): siRNA sense strand
aaauaaauggugaggaaga

SEQ ID NO: 1970916 - RNA, 19 nt, Homo sapiens
  misc_RNA (1)...(19): siRNA sense strand
uaagggcaacuccauccua

SEQ ID NO: 1970917 - RNA, 19 nt, Homo sapiens
  misc_RNA (1)...(19): siRNA sense strand
uaacgcauaugguaaaaca

SEQ ID NO: 1970918 - RNA, 19 nt, Homo sapiens
  misc_RNA (1)...(19): siRNA sense strand
cgacugaagcccucuugug

SEQ ID NO: 1970919 - RNA, 19 nt, Homo sapiens
  misc_RNA (1)...(19): siRNA sense strand
uaaauggugaggaagaaau

SEQ ID NO: 1970920 - RNA, 19 nt, Homo sapiens
  misc_RNA (1)...(19): siRNA sense strand
gugggaacuuugcugaaau

SEQ ID NO: 1970921 - RNA, 19 nt, Homo sapiens
  misc_RNA (1)...(19): siRNA sense strand
ugacauugaacuucuggaa

SEQ ID NO: 1970922 - RNA, 19 nt, Homo sapiens
  misc_RNA (1)...(19): siRNA sense strand
aagggcaacuccauccuau

SEQ ID NO: 1970923 - RNA, 19 nt, Homo sapiens
  misc_RNA (1)...(19): siRNA sense strand
agaagcagauggccauacu

SEQ ID NO: 1970924 - RNA, 19 nt, Homo sapiens
  misc_RNA (1)...(19): siRNA sense strand
ggaaaggcaaacggaguug

SEQ ID NO: 1970925 - RNA, 19 nt, Homo sapiens
  misc_RNA (1)...(19): siRNA sense strand
gcugaaaucaaccuguaau

SEQ ID NO: 1970926 - RNA, 19 nt, Homo sapiens
  misc_RNA (1)...(19): siRNA sense strand
gaagcauucuuggcaucau

SEQ ID NO: 1970927 - RNA, 19 nt, Homo sapiens
  misc_RNA (1)...(19): siRNA sense strand
accaugaacacaagcuuua

SEQ ID NO: 1970928 - RNA, 19 nt, Homo sapiens
  misc_RNA (1)...(19): siRNA sense strand
guugagcacuugugaaaau

SEQ ID NO: 1970929 - RNA, 19 nt, Homo sapiens
  misc_RNA (1)...(19): siRNA sense strand
guuaucccaacuuucuuua

SEQ ID NO: 1970930 - RNA, 19 nt, Homo sapiens
  misc_RNA (1)...(19): siRNA sense strand
caacuccauccuaugaaga

SEQ ID NO: 1970931 - RNA, 19 nt, Homo sapiens
  misc_RNA (1)...(19): siRNA sense strand
uuagugacauugaacuucu

SEQ ID NO: 1970932 - RNA, 19 nt, Homo sapiens
  misc_RNA (1)...(19): siRNA sense strand
aagcuuuagugacauugaa

SEQ ID NO: 1970933 - RNA, 19 nt, Homo sapiens
  misc_RNA (1)...(19): siRNA sense strand
caccacagcuggccaugcu

SEQ ID NO: 1970934 - RNA, 19 nt, Homo sapiens
  misc_RNA (1)...(19): siRNA sense strand
ggaacuuugcugaaaucaa

SEQ ID NO: 1970935 - RNA, 19 nt, Homo sapiens
  misc_RNA (1)...(19): siRNA sense strand
ugaaaucaaccuguaauac

SEQ ID NO: 1970936 - RNA, 19 nt, Homo sapiens
  misc_RNA (1)...(19): siRNA sense strand
ggaguugagcacuugugaa

SEQ ID NO: 1970937 - RNA, 19 nt, Homo sapiens
  misc_RNA (1)...(19): siRNA sense strand
cgaaguggaggcggaugua

SEQ ID NO: 1970938 - RNA, 19 nt, Homo sapiens
  misc_RNA (1)...(19): siRNA sense strand
uaaccaacaaagaagaguu

SEQ ID NO: 1970939 - RNA, 19 nt, Homo sapiens
  misc_RNA (1)...(19): siRNA sense strand
caaguugcucuccagaaug

SEQ ID NO: 1970940 - RNA, 19 nt, Homo sapiens
  misc_RNA (1)...(19): siRNA sense strand
ggaucagacucaaguugcu

SEQ ID NO: 1970941 - RNA, 19 nt, Homo sapiens
  misc_RNA (1)...(19): siRNA sense strand
aagaaugcaugcagauugc

SEQ ID NO: 1970942 - RNA, 19 nt, Homo sapiens
  misc_RNA (1)...(19): siRNA sense strand
ggauguagcccagguuagg

SEQ ID NO: 1970943 - RNA, 19 nt, Homo sapiens
  misc_RNA (1)...(19): siRNA sense strand
cugaaaucaaccuguaaua

SEQ ID NO: 1970944 - RNA, 19 nt, Homo sapiens
  misc_RNA (1)...(19): siRNA sense strand
uuaguaccaugaacacaag

SEQ ID NO: 1970945 - RNA, 19 nt, Homo sapiens
  misc_RNA (1)...(19): siRNA sense strand
uuaccucccugccaugaag

SEQ ID NO: 1970946 - RNA, 19 nt, Homo sapiens
  misc_RNA (1)...(19): siRNA sense strand
ugaacacaagcuuuaguga

SEQ ID NO: 1970947 - RNA, 19 nt, Homo sapiens
  misc_RNA (1)...(19): siRNA sense strand
gacugcagcauaucaagug

SEQ ID NO: 1970948 - RNA, 19 nt, Homo sapiens
  misc_RNA (1)...(19): siRNA sense strand
gggaauugaugugggaacu

SEQ ID NO: 1970949 - RNA, 19 nt, Homo sapiens
  misc_RNA (1)...(19): siRNA sense strand
ugaaacauccuauuauacc

SEQ ID NO: 1970950 - RNA, 19 nt, Homo sapiens
  misc_RNA (1)...(19): siRNA sense strand
aaccaacaaagaagaguuu

SEQ ID NO: 1970951 - RNA, 19 nt, Homo sapiens
  misc_RNA (1)...(19): siRNA sense strand
ucaaguccagcaagaugaa

SEQ ID NO: 1970952 - RNA, 19 nt, Homo sapiens
  misc_RNA (1)...(19): siRNA sense strand
ugggaacuuugcugaaauc

SEQ ID NO: 1970953 - RNA, 19 nt, Homo sapiens
  misc_RNA (1)...(19): siRNA sense strand
ccauacuggacgcuuuaua

SEQ ID NO: 1970954 - RNA, 19 nt, Homo sapiens
  misc_RNA (1)...(19): siRNA sense strand
uggccauacuggacgcuuu

SEQ ID NO: 1970955 - RNA, 19 nt, Homo sapiens
  misc_RNA (1)...(19): siRNA sense strand
cauccuauuauaccaauuc

SEQ ID NO: 1970956 - RNA, 19 nt, Homo sapiens
  misc_RNA (1)...(19): siRNA sense strand
ugaccuccuuguucagcaa

SEQ ID NO: 1970957 - RNA, 19 nt, Homo sapiens
  misc_RNA (1)...(19): siRNA sense strand
gggaggaaggcaaagaagu

SEQ ID NO: 1970958 - RNA, 19 nt, Homo sapiens
  misc_RNA (1)...(19): siRNA sense strand
gaagaccuuggaagaaugc

SEQ ID NO: 1970959 - RNA, 19 nt, Homo sapiens
  misc_RNA (1)...(19): siRNA sense strand
cgcguuaaccguaaaggaa

SEQ ID NO: 1970960 - RNA, 19 nt, Homo sapiens
  misc_RNA (1)...(19): siRNA sense strand
guuuaccacucuccagaag

SEQ ID NO: 1970961 - RNA, 19 nt, Homo sapiens
  misc_RNA (1)...(19): siRNA sense strand
aagcauucuuggcaucaug

SEQ ID NO: 1970962 - RNA, 19 nt, Homo sapiens
  misc_RNA (1)...(19): siRNA sense strand
gaaugagccuuuggaagua

SEQ ID NO: 1970963 - RNA, 19 nt, Homo sapiens
  misc_RNA (1)...(19): siRNA sense strand
ggaaacagacaaauccaaa

SEQ ID NO: 1970964 - RNA, 19 nt, Homo sapiens
  misc_RNA (1)...(19): siRNA sense strand
caaaguggagaaagaguua

SEQ ID NO: 1970965 - RNA, 19 nt, Homo sapiens
  misc_RNA (1)...(19): siRNA sense strand
gaauucugcuugugugcaa

SEQ ID NO: 1970966 - RNA, 19 nt, Homo sapiens
  misc_RNA (1)...(19): siRNA sense strand
caagauggccuuugaagag

SEQ ID NO: 1970967 - RNA, 19 nt, Homo sapiens
  misc_RNA (1)...(19): siRNA sense strand
cagcugaaaugaacuucuu

SEQ ID NO: 1970968 - RNA, 19 nt, Homo sapiens
  misc_RNA (1)...(19): siRNA sense strand
gacacaagaugaagucucu

SEQ ID NO: 1970969 - RNA, 19 nt, Homo sapiens
  misc_RNA (1)...(19): siRNA sense strand
cuacauguguccugucugu

SEQ ID NO: 1970970 - RNA, 19 nt, Homo sapiens
  misc_RNA (1)...(19): siRNA sense strand
gcaagauggccuuugaaga

SEQ ID NO: 1970971 - RNA, 19 nt, Homo sapiens
  misc_RNA (1)...(19): siRNA sense strand
gaaacagacaaauccaaau

SEQ ID NO: 1970972 - RNA, 19 nt, Homo sapiens
  misc_RNA (1)...(19): siRNA sense strand
agaaugagccuuuggaagu

SEQ ID NO: 1970973 - RNA, 19 nt, Homo sapiens
  misc_RNA (1)...(19): siRNA sense strand
ggagacgacacaagaugaa

SEQ ID NO: 1970974 - RNA, 19 nt, Homo sapiens
  misc_RNA (1)...(19): siRNA sense strand
ggagaaagaguuagaaaau

SEQ ID NO: 1970975 - RNA, 19 nt, Homo sapiens
  misc_RNA (1)...(19): siRNA sense strand
gaggagacgacacaagaug

SEQ ID NO: 1970976 - RNA, 19 nt, Homo sapiens
  misc_RNA (1)...(19): siRNA sense strand
guugauugcucacguguac

SEQ ID NO: 1970977 - RNA, 19 nt, Homo sapiens
  misc_RNA (1)...(19): siRNA sense strand
gaagaggagacgacacaag

SEQ ID NO: 1970978 - RNA, 19 nt, Homo sapiens
  misc_RNA (1)...(19): siRNA sense strand
gauguugcgagcucaguuu

SEQ ID NO: 1970979 - RNA, 19 nt, Homo sapiens
  misc_RNA (1)...(19): siRNA sense strand
aagaggagacgacacaaga

SEQ ID NO: 1970980 - RNA, 19 nt, Homo sapiens
  misc_RNA (1)...(19): siRNA sense strand
aguguacccugcuggaauu

SEQ ID NO: 1970981 - RNA, 19 nt, Homo sapiens
  misc_RNA (1)...(19): siRNA sense strand
gaggucacagggaauuuga

SEQ ID NO: 1970982 - RNA, 19 nt, Homo sapiens
  misc_RNA (1)...(19): siRNA sense strand
cuuagcagcugaaaugaac

SEQ ID NO: 1970983 - RNA, 19 nt, Homo sapiens
  misc_RNA (1)...(19): siRNA sense strand
uacccacaguccacaauga

SEQ ID NO: 1970984 - RNA, 19 nt, Homo sapiens
  misc_RNA (1)...(19): siRNA sense strand
ucaaaguggagaaagaguu

SEQ ID NO: 1970985 - RNA, 19 nt, Homo sapiens
  misc_RNA (1)...(19): siRNA sense strand
ucaccagccaugccacuuu

SEQ ID NO: 1970986 - RNA, 19 nt, Homo sapiens
  misc_RNA (1)...(19): siRNA sense strand
cgaucuaacugugcugugu

SEQ ID NO: 1970987 - RNA, 19 nt, Homo sapiens
  misc_RNA (1)...(19): siRNA sense strand
ggucacagggaauuugaau

SEQ ID NO: 1970988 - RNA, 19 nt, Homo sapiens
  misc_RNA (1)...(19): siRNA sense strand
guacccugcuggaauucug

SEQ ID NO: 1970989 - RNA, 19 nt, Homo sapiens
  misc_RNA (1)...(19): siRNA sense strand
gcucuacgucgacagaaug

SEQ ID NO: 1970990 - RNA, 19 nt, Homo sapiens
  misc_RNA (1)...(19): siRNA sense strand
guacgcaagugggcucuac

SEQ ID NO: 1970991 - RNA, 19 nt, Homo sapiens
  misc_RNA (1)...(19): siRNA sense strand
ggaguuggacagccagcuu

SEQ ID NO: 1970992 - RNA, 19 nt, Homo sapiens
  misc_RNA (1)...(19): siRNA sense strand
gagagcgcacggccaagaa

SEQ ID NO: 1970993 - RNA, 19 nt, Homo sapiens
  misc_RNA (1)...(19): siRNA sense strand
ccacacaucagaggaagau

SEQ ID NO: 1970994 - RNA, 19 nt, Homo sapiens
  misc_RNA (1)...(19): siRNA sense strand
ucaagaggaggcuggagaa

SEQ ID NO: 1970995 - RNA, 19 nt, Homo sapiens
  misc_RNA (1)...(19): siRNA sense strand
guggagaaagaguuagaaa

SEQ ID NO: 1970996 - RNA, 19 nt, Homo sapiens
  misc_RNA (1)...(19): siRNA sense strand
uuggcaagauggccuuuga

SEQ ID NO: 1970997 - RNA, 19 nt, Homo sapiens
  misc_RNA (1)...(19): siRNA sense strand
acagugagggugaugaaga

SEQ ID NO: 1970998 - RNA, 19 nt, Homo sapiens
  misc_RNA (1)...(19): siRNA sense strand
ggaccagcgaucuaacugu

SEQ ID NO: 1970999 - RNA, 19 nt, Homo sapiens
  misc_RNA (1)...(19): siRNA sense strand
agaggaggcuggagaaaau

SEQ ID NO: 1971000 - RNA, 19 nt, Homo sapiens
  misc_RNA (1)...(19): siRNA sense strand
caagaggaggcuggagaaa

SEQ ID NO: 1971001 - RNA, 19 nt, Homo sapiens
  misc_RNA (1)...(19): siRNA sense strand
gacagaaugagccuuugga

SEQ ID NO: 1971002 - RNA, 19 nt, Homo sapiens
  misc_RNA (1)...(19): siRNA sense strand
uggaaucccuacccacagu

SEQ ID NO: 1971003 - RNA, 19 nt, Homo sapiens
  misc_RNA (1)...(19): siRNA sense strand
cugaaguacuaaauaugga

SEQ ID NO: 1971004 - RNA, 19 nt, Homo sapiens
  misc_RNA (1)...(19): siRNA sense strand
ugacagugagggugaugaa

SEQ ID NO: 1971005 - RNA, 19 nt, Homo sapiens
  misc_RNA (1)...(19): siRNA sense strand
gcacgaggucacagggaau

SEQ ID NO: 1971006 - RNA, 19 nt, Homo sapiens
  misc_RNA (1)...(19): siRNA sense strand
gagcgcacggccaagaaga

SEQ ID NO: 1971007 - RNA, 19 nt, Homo sapiens
  misc_RNA (1)...(19): siRNA sense strand
cggaggaccagcgaucuaa

SEQ ID NO: 1971008 - RNA, 19 nt, Homo sapiens
  misc_RNA (1)...(19): siRNA sense strand
cagugagggugaugaagag

SEQ ID NO: 1971009 - RNA, 19 nt, Homo sapiens
  misc_RNA (1)...(19): siRNA sense strand
ccaaugaaaccccggaaaa

SEQ ID NO: 1971010 - RNA, 19 nt, Homo sapiens
  misc_RNA (1)...(19): siRNA sense strand
gggaggccaugaggcugaa

SEQ ID NO: 1971011 - RNA, 19 nt, Homo sapiens
  misc_RNA (1)...(19): siRNA sense strand
gcuggaauucugcuugugu

SEQ ID NO: 1971012 - RNA, 19 nt, Homo sapiens
  misc_RNA (1)...(19): siRNA sense strand
uggucaaaguggagaaaga

SEQ ID NO: 1971013 - RNA, 19 nt, Homo sapiens
  misc_RNA (1)...(19): siRNA sense strand
agccuuagcagcugaaaug

SEQ ID NO: 1971014 - RNA, 19 nt, Homo sapiens
  misc_RNA (1)...(19): siRNA sense strand
cagacaaauccaaauaaag

SEQ ID NO: 1971015 - RNA, 19 nt, Homo sapiens
  misc_RNA (1)...(19): siRNA sense strand
gcgccaagagcuacaugug

SEQ ID NO: 1971016 - RNA, 19 nt, Homo sapiens
  misc_RNA (1)...(19): siRNA sense strand
ccugaaguacuaaauaugg

SEQ ID NO: 1971017 - RNA, 19 nt, Homo sapiens
  misc_RNA (1)...(19): siRNA sense strand
ggcaagauggccuuugaag

SEQ ID NO: 1971018 - RNA, 19 nt, Homo sapiens
  misc_RNA (1)...(19): siRNA sense strand
cgaggucacagggaauuug

SEQ ID NO: 1971019 - RNA, 19 nt, Homo sapiens
  misc_RNA (1)...(19): siRNA sense strand
ggucaaaguggagaaagag

SEQ ID NO: 1971020 - RNA, 19 nt, Homo sapiens
  misc_RNA (1)...(19): siRNA sense strand
gucgacagaaugagccuuu

SEQ ID NO: 1971021 - RNA, 19 nt, Homo sapiens
  misc_RNA (1)...(19): siRNA sense strand
gggaggagcugcaacuaua

SEQ ID NO: 1971022 - RNA, 19 nt, Homo sapiens
  misc_RNA (1)...(19): siRNA sense strand
caagacagguuguagauug

SEQ ID NO: 1971023 - RNA, 19 nt, Homo sapiens
  misc_RNA (1)...(19): siRNA sense strand
gagagagacuuugaacaua

SEQ ID NO: 1971024 - RNA, 19 nt, Homo sapiens
  misc_RNA (1)...(19): siRNA sense strand
caucaaggcuucugcaaau

SEQ ID NO: 1971025 - RNA, 19 nt, Homo sapiens
  misc_RNA (1)...(19): siRNA sense strand
ggaagaccauccagguuga

SEQ ID NO: 1971026 - RNA, 19 nt, Homo sapiens
  misc_RNA (1)...(19): siRNA sense strand
ggauguagcuuugggauca

SEQ ID NO: 1971027 - RNA, 19 nt, Homo sapiens
  misc_RNA (1)...(19): siRNA sense strand
caucagagcugcuguugca

SEQ ID NO: 1971028 - RNA, 19 nt, Homo sapiens
  misc_RNA (1)...(19): siRNA sense strand
ugaaagaauucguaacuca

SEQ ID NO: 1971029 - RNA, 19 nt, Homo sapiens
  misc_RNA (1)...(19): siRNA sense strand
gcaaagcucuauggaagug

SEQ ID NO: 1971030 - RNA, 19 nt, Homo sapiens
  misc_RNA (1)...(19): siRNA sense strand
gcaaauauggaccucauga

SEQ ID NO: 1971031 - RNA, 19 nt, Homo sapiens
  misc_RNA (1)...(19): siRNA sense strand
ccacaaggacucucauuga

SEQ ID NO: 1971032 - RNA, 19 nt, Homo sapiens
  misc_RNA (1)...(19): siRNA sense strand
ugaauacgaugaccuaaag

SEQ ID NO: 1971033 - RNA, 19 nt, Homo sapiens
  misc_RNA (1)...(19): siRNA sense strand
agagagacuuugaacauau

SEQ ID NO: 1971034 - RNA, 19 nt, Homo sapiens
  misc_RNA (1)...(19): siRNA sense strand
aaacuggcaugaaggcaaa

SEQ ID NO: 1971035 - RNA, 19 nt, Homo sapiens
  misc_RNA (1)...(19): siRNA sense strand
gugggcacauuuagacaua

SEQ ID NO: 1971036 - RNA, 19 nt, Homo sapiens
  misc_RNA (1)...(19): siRNA sense strand
gauaaauuguuagcuggaa

SEQ ID NO: 1971037 - RNA, 19 nt, Homo sapiens
  misc_RNA (1)...(19): siRNA sense strand
cgugucugcugcaaaguua

SEQ ID NO: 1971038 - RNA, 19 nt, Homo sapiens
  misc_RNA (1)...(19): siRNA sense strand
gagagacuuugaacauauc

SEQ ID NO: 1971039 - RNA, 19 nt, Homo sapiens
  misc_RNA (1)...(19): siRNA sense strand
agacauagcaggcgugaug

SEQ ID NO: 1971040 - RNA, 19 nt, Homo sapiens
  misc_RNA (1)...(19): siRNA sense strand
ccgaaauuauugagaagaa

SEQ ID NO: 1971041 - RNA, 19 nt, Homo sapiens
  misc_RNA (1)...(19): siRNA sense strand
caaaagugcuaguaguaaa

SEQ ID NO: 1971042 - RNA, 19 nt, Homo sapiens
  misc_RNA (1)...(19): siRNA sense strand
caaggcuucugcaaauaug

SEQ ID NO: 1971043 - RNA, 19 nt, Homo sapiens
  misc_RNA (1)...(19): siRNA sense strand
gguuguagauugccagcuu

SEQ ID NO: 1971044 - RNA, 19 nt, Homo sapiens
  misc_RNA (1)...(19): siRNA sense strand
ccucaaugccgccaccuua

SEQ ID NO: 1971045 - RNA, 19 nt, Homo sapiens
  misc_RNA (1)...(19): siRNA sense strand
gagcggugcuuggucucua

SEQ ID NO: 1971046 - RNA, 19 nt, Homo sapiens
  misc_RNA (1)...(19): siRNA sense strand
gaaagaauucguaacucau

SEQ ID NO: 1971047 - RNA, 19 nt, Homo sapiens
  misc_RNA (1)...(19): siRNA sense strand
ugagagagacuuugaacau

SEQ ID NO: 1971048 - RNA, 19 nt, Homo sapiens
  misc_RNA (1)...(19): siRNA sense strand
caucgugucugcugcaaag

SEQ ID NO: 1971049 - RNA, 19 nt, Homo sapiens
  misc_RNA (1)...(19): siRNA sense strand
agggaagacucgaaccuuu

SEQ ID NO: 1971050 - RNA, 19 nt, Homo sapiens
  misc_RNA (1)...(19): siRNA sense strand
gaccaacaaagaugaaguu

SEQ ID NO: 1971051 - RNA, 19 nt, Homo sapiens
  misc_RNA (1)...(19): siRNA sense strand
ggaugccucucuucgaaca

SEQ ID NO: 1971052 - RNA, 19 nt, Homo sapiens
  misc_RNA (1)...(19): siRNA sense strand
uaacaggugccauggaugu

SEQ ID NO: 1971053 - RNA, 19 nt, Homo sapiens
  misc_RNA (1)...(19): siRNA sense strand
uggcugaugcgcucuguua

SEQ ID NO: 1971054 - RNA, 19 nt, Homo sapiens
  misc_RNA (1)...(19): siRNA sense strand
ccaaccagauuugccgaaa

SEQ ID NO: 1971055 - RNA, 19 nt, Homo sapiens
  misc_RNA (1)...(19): siRNA sense strand
caagugcaggagagaauuu

SEQ ID NO: 1971056 - RNA, 19 nt, Homo sapiens
  misc_RNA (1)...(19): siRNA sense strand
ggaagacucgaaccuuuua

SEQ ID NO: 1971057 - RNA, 19 nt, Homo sapiens
  misc_RNA (1)...(19): siRNA sense strand
gagaugacgccaaccagau

SEQ ID NO: 1971058 - RNA, 19 nt, Homo sapiens
  misc_RNA (1)...(19): siRNA sense strand
guucuuacuucguuucagu

SEQ ID NO: 1971059 - RNA, 19 nt, Homo sapiens
  misc_RNA (1)...(19): siRNA sense strand
cauccuggcucuggaacaa

SEQ ID NO: 1971060 - RNA, 19 nt, Homo sapiens
  misc_RNA (1)...(19): siRNA sense strand
ugccauggauguagcuuug

SEQ ID NO: 1971061 - RNA, 19 nt, Homo sapiens
  misc_RNA (1)...(19): siRNA sense strand
uagcaggcgugaugaccaa

SEQ ID NO: 1971062 - RNA, 19 nt, Homo sapiens
  misc_RNA (1)...(19): siRNA sense strand
cauccuaagugggcacauu

SEQ ID NO: 1971063 - RNA, 19 nt, Homo sapiens
  misc_RNA (1)...(19): siRNA sense strand
ugcuuggucucuaugaaua

SEQ ID NO: 1971064 - RNA, 19 nt, Homo sapiens
  misc_RNA (1)...(19): siRNA sense strand
ucagucaagacaaugcuua

SEQ ID NO: 1971065 - RNA, 19 nt, Homo sapiens
  misc_RNA (1)...(19): siRNA sense strand
gaugacgccaaccagauuu

SEQ ID NO: 1971066 - RNA, 19 nt, Homo sapiens
  misc_RNA (1)...(19): siRNA sense strand
ggaaucgacgaacaggaaa

SEQ ID NO: 1971067 - RNA, 19 nt, Homo sapiens
  misc_RNA (1)...(19): siRNA sense strand
caaagaugaaguucccuau

SEQ ID NO: 1971068 - RNA, 19 nt, Homo sapiens
  misc_RNA (1)...(19): siRNA sense strand
ggaggagcugcaacuauau

SEQ ID NO: 1971069 - RNA, 19 nt, Homo sapiens
  misc_RNA (1)...(19): siRNA sense strand
ucaaggcuucugcaaauau

SEQ ID NO: 1971070 - RNA, 19 nt, Homo sapiens
  misc_RNA (1)...(19): siRNA sense strand
cuuggaaauucacuacaaa

SEQ ID NO: 1971071 - RNA, 19 nt, Homo sapiens
  misc_RNA (1)...(19): siRNA sense strand
aaaccgagguccauaucag

SEQ ID NO: 1971072 - RNA, 19 nt, Homo sapiens
  misc_RNA (1)...(19): siRNA sense strand
cagcuggaaucgacgaaca

SEQ ID NO: 1971073 - RNA, 19 nt, Homo sapiens
  misc_RNA (1)...(19): siRNA sense strand
ggauguuguuagagccaaa

SEQ ID NO: 1971074 - RNA, 19 nt, Homo sapiens
  misc_RNA (1)...(19): siRNA sense strand
cuuaacaggugccauggau

SEQ ID NO: 1971075 - RNA, 19 nt, Homo sapiens
  misc_RNA (1)...(19): siRNA sense strand
uuacuucguuucagucaag

SEQ ID NO: 1971076 - RNA, 19 nt, Homo sapiens
  misc_RNA (1)...(19): siRNA sense strand
gcuggaaagcugagagaga

SEQ ID NO: 1971077 - RNA, 19 nt, Homo sapiens
  misc_RNA (1)...(19): siRNA sense strand
cugcagcauuccugaaaga

SEQ ID NO: 1971078 - RNA, 19 nt, Homo sapiens
  misc_RNA (1)...(19): siRNA sense strand
gaauucguaacucauccua

SEQ ID NO: 1971079 - RNA, 19 nt, Homo sapiens
  misc_RNA (1)...(19): siRNA sense strand
ggugcuuggucucuaugaa

SEQ ID NO: 1971080 - RNA, 19 nt, Homo sapiens
  misc_RNA (1)...(19): siRNA sense strand
ucuuggaaauucacuacaa

SEQ ID NO: 1971081 - RNA, 19 nt, Homo sapiens
  misc_RNA (1)...(19): siRNA sense strand
ccagucuucuuggaaauuc

SEQ ID NO: 1971082 - RNA, 19 nt, Homo sapiens
  misc_RNA (1)...(19): siRNA sense strand
gaggagcugcaacuauaug

SEQ ID NO: 1971083 - RNA, 19 nt, Homo sapiens
  misc_RNA (1)...(19): siRNA sense strand
cgaaggucauccucaaugc

SEQ ID NO: 1971084 - RNA, 19 nt, Homo sapiens
  misc_RNA (1)...(19): siRNA sense strand
guuacgcacacacguuuaa

SEQ ID NO: 1971085 - RNA, 19 nt, Homo sapiens
  misc_RNA (1)...(19): siRNA sense strand
uggaaucgacgaacaggaa

SEQ ID NO: 1971086 - RNA, 19 nt, Homo sapiens
  misc_RNA (1)...(19): siRNA sense strand
ggaaagcugagagagacuu

SEQ ID NO: 1971087 - RNA, 19 nt, Homo sapiens
  misc_RNA (1)...(19): siRNA sense strand
uugccgaaauuauugagaa

SEQ ID NO: 1971088 - RNA, 19 nt, Homo sapiens
  misc_RNA (1)...(19): siRNA sense strand
uggagacgccagccaauga

SEQ ID NO: 1971089 - RNA, 19 nt, Homo sapiens
  misc_RNA (1)...(19): siRNA sense strand
caggagagaauuuugauaa

SEQ ID NO: 1971090 - RNA, 19 nt, Homo sapiens
  misc_RNA (1)...(19): siRNA sense strand
agucuuggauugaggaaca

SEQ ID NO: 1971091 - RNA, 19 nt, Homo sapiens
  misc_RNA (1)...(19): siRNA sense strand
gugccacaguucacaagug

SEQ ID NO: 1971092 - RNA, 19 nt, Homo sapiens
  misc_RNA (1)...(19): siRNA sense strand
ccaucaaggcuucugcaaa

SEQ ID NO: 1971093 - RNA, 19 nt, Homo sapiens
  misc_RNA (1)...(19): siRNA sense strand
cuaugaauacgaugaccua

SEQ ID NO: 1971094 - RNA, 19 nt, Homo sapiens
  misc_RNA (1)...(19): siRNA sense strand
gaugaccaacaaagaugaa

SEQ ID NO: 1971095 - RNA, 19 nt, Homo sapiens
  misc_RNA (1)...(19): siRNA sense strand
gugaugaccaacaaagaug

SEQ ID NO: 1971096 - RNA, 19 nt, Homo sapiens
  misc_RNA (1)...(19): siRNA sense strand
gcccauuaauauuauaggu

SEQ ID NO: 1971097 - RNA, 19 nt, Homo sapiens
  misc_RNA (1)...(19): siRNA sense strand
uacgaugaccuaaagcaaa

SEQ ID NO: 1971098 - RNA, 19 nt, Homo sapiens
  misc_RNA (1)...(19): siRNA sense strand
caggaaaacuggcaugaag

SEQ ID NO: 1971099 - RNA, 19 nt, Homo sapiens
  misc_RNA (1)...(19): siRNA sense strand
uaagugggcacauuuagac

SEQ ID NO: 1971100 - RNA, 19 nt, Homo sapiens
  misc_RNA (1)...(19): siRNA sense strand
cugcugcaaaguuaaauuu

SEQ ID NO: 1971101 - RNA, 19 nt, Homo sapiens
  misc_RNA (1)...(19): siRNA sense strand
guggugguaucuccaucaa

SEQ ID NO: 1971102 - RNA, 19 nt, Homo sapiens
  misc_RNA (1)...(19): siRNA sense strand
gaacaggcaaugggaucau

SEQ ID NO: 1971103 - RNA, 19 nt, Homo sapiens
  misc_RNA (1)...(19): siRNA sense strand
gcuaguuggccucggcaaa

SEQ ID NO: 1971104 - RNA, 19 nt, Homo sapiens
  misc_RNA (1)...(19): siRNA sense strand
gaugaaguucccuaucuac

SEQ ID NO: 1971105 - RNA, 19 nt, Homo sapiens
  misc_RNA (1)...(19): siRNA sense strand
ccacuggggucuuuaccaa

SEQ ID NO: 1971106 - RNA, 19 nt, Homo sapiens
  misc_RNA (1)...(19): siRNA sense strand
ccgaaggucauccucaaug

SEQ ID NO: 1971107 - RNA, 19 nt, Homo sapiens
  misc_RNA (1)...(19): siRNA sense strand
ggugcaggcagauucaaga

SEQ ID NO: 1971108 - RNA, 19 nt, Homo sapiens
  misc_RNA (1)...(19): siRNA sense strand
aaagaauucguaacucauc

SEQ ID NO: 1971109 - RNA, 19 nt, Homo sapiens
  misc_RNA (1)...(19): siRNA sense strand
aagcugagagagacuuuga

SEQ ID NO: 1971110 - RNA, 19 nt, Homo sapiens
  misc_RNA (1)...(19): siRNA sense strand
ggaacaggcaaugggauca

SEQ ID NO: 1971111 - RNA, 19 nt, Homo sapiens
  misc_RNA (1)...(19): siRNA sense strand
cugcaaauauggaccucau

SEQ ID NO: 1971112 - RNA, 19 nt, Homo sapiens
  misc_RNA (1)...(19): siRNA sense strand
auucguaacucauccuaag

SEQ ID NO: 1971113 - RNA, 19 nt, Homo sapiens
  misc_RNA (1)...(19): siRNA sense strand
auguacagcugcagcauuc

SEQ ID NO: 1971114 - RNA, 19 nt, Homo sapiens
  misc_RNA (1)...(19): siRNA sense strand
gcucuggaacaaacucuuc

SEQ ID NO: 1971115 - RNA, 19 nt, Homo sapiens
  misc_RNA (1)...(19): siRNA sense strand
agauggcugugucggcaaa

SEQ ID NO: 1971116 - RNA, 19 nt, Homo sapiens
  misc_RNA (1)...(19): siRNA sense strand
guccauaucagacccaagu

SEQ ID NO: 1971117 - RNA, 19 nt, Homo sapiens
  misc_RNA (1)...(19): siRNA sense strand
ccugaaagaauucguaacu

SEQ ID NO: 1971118 - RNA, 19 nt, Homo sapiens
  misc_RNA (1)...(19): siRNA sense strand
auugaguucuuacuucguu

SEQ ID NO: 1971119 - RNA, 19 nt, Homo sapiens
  misc_RNA (1)...(19): siRNA sense strand
caggcgugaugaccaacaa

SEQ ID NO: 1971120 - RNA, 19 nt, Homo sapiens
  misc_RNA (1)...(19): siRNA sense strand
uggcaugaaggcaaagaaa

SEQ ID NO: 1971121 - RNA, 19 nt, Homo sapiens
  misc_RNA (1)...(19): siRNA sense strand
guaaagggauugucuaauu

SEQ ID NO: 1971122 - RNA, 19 nt, Homo sapiens
  misc_RNA (1)...(19): siRNA sense strand
ccacacaggugaauaauuu

SEQ ID NO: 1971123 - RNA, 19 nt, Homo sapiens
  misc_RNA (1)...(19): siRNA sense strand
ggacgugacugaccauuau

SEQ ID NO: 1971124 - RNA, 19 nt, Homo sapiens
  misc_RNA (1)...(19): siRNA sense strand
ggaaacagguggauuugga

SEQ ID NO: 1971125 - RNA, 19 nt, Homo sapiens
  misc_RNA (1)...(19): siRNA sense strand
cauggaacgucuauucuua

SEQ ID NO: 1971126 - RNA, 19 nt, Homo sapiens
  misc_RNA (1)...(19): siRNA sense strand
caacaucaccaacaaguaa

SEQ ID NO: 1971127 - RNA, 19 nt, Homo sapiens
  misc_RNA (1)...(19): siRNA sense strand
ggacacauguaaagggauu

SEQ ID NO: 1971128 - RNA, 19 nt, Homo sapiens
  misc_RNA (1)...(19): siRNA sense strand
ggaaguugcucaggauuug

SEQ ID NO: 1971129 - RNA, 19 nt, Homo sapiens
  misc_RNA (1)...(19): siRNA sense strand
ccaauuugcuuguacuuau

SEQ ID NO: 1971130 - RNA, 19 nt, Homo sapiens
  misc_RNA (1)...(19): siRNA sense strand
gcaaggauaauuggaauaa

SEQ ID NO: 1971131 - RNA, 19 nt, Homo sapiens
  misc_RNA (1)...(19): siRNA sense strand
gauuuggauuugaggauua

SEQ ID NO: 1971132 - RNA, 19 nt, Homo sapiens
  misc_RNA (1)...(19): siRNA sense strand
gugaaagccuuauuaguuc

SEQ ID NO: 1971133 - RNA, 19 nt, Homo sapiens
  misc_RNA (1)...(19): siRNA sense strand
gaacgucuauucuuacacu

SEQ ID NO: 1971134 - RNA, 19 nt, Homo sapiens
  misc_RNA (1)...(19): siRNA sense strand
gaaaugaaccaccucaaca

SEQ ID NO: 1971135 - RNA, 19 nt, Homo sapiens
  misc_RNA (1)...(19): siRNA sense strand
gaacgcaucugugugucaa

SEQ ID NO: 1971136 - RNA, 19 nt, Homo sapiens
  misc_RNA (1)...(19): siRNA sense strand
gcaaagcaauagaggaagu

SEQ ID NO: 1971137 - RNA, 19 nt, Homo sapiens
  misc_RNA (1)...(19): siRNA sense strand
ugaaccaccucaacauaaa

SEQ ID NO: 1971138 - RNA, 19 nt, Homo sapiens
  misc_RNA (1)...(19): siRNA sense strand
guagggcuuugacuucuaa

SEQ ID NO: 1971139 - RNA, 19 nt, Homo sapiens
  misc_RNA (1)...(19): siRNA sense strand
uaaaucugcuagugaauuc

SEQ ID NO: 1971140 - RNA, 19 nt, Homo sapiens
  misc_RNA (1)...(19): siRNA sense strand
guaaauacaaccgugauaa

SEQ ID NO: 1971141 - RNA, 19 nt, Homo sapiens
  misc_RNA (1)...(19): siRNA sense strand
uggcagagauacugugaaa

SEQ ID NO: 1971142 - RNA, 19 nt, Homo sapiens
  misc_RNA (1)...(19): siRNA sense strand
ugugaaagccuuauuaguu

SEQ ID NO: 1971143 - RNA, 19 nt, Homo sapiens
  misc_RNA (1)...(19): siRNA sense strand
gagagaaacaaaugucuau

SEQ ID NO: 1971144 - RNA, 19 nt, Homo sapiens
  misc_RNA (1)...(19): siRNA sense strand
gccaaaaucucaugccaua

SEQ ID NO: 1971145 - RNA, 19 nt, Homo sapiens
  misc_RNA (1)...(19): siRNA sense strand
aaaggaaacagguggauuu

SEQ ID NO: 1971146 - RNA, 19 nt, Homo sapiens
  misc_RNA (1)...(19): siRNA sense strand
ggauuuggauuugaggauu

SEQ ID NO: 1971147 - RNA, 19 nt, Homo sapiens
  misc_RNA (1)...(19): siRNA sense strand
ucaagaagguguuguagcu

SEQ ID NO: 1971148 - RNA, 19 nt, Homo sapiens
  misc_RNA (1)...(19): siRNA sense strand
ggacgaagaagcagcuaau

SEQ ID NO: 1971149 - RNA, 19 nt, Homo sapiens
  misc_RNA (1)...(19): siRNA sense strand
uaagagaacgcaucugugu

SEQ ID NO: 1971150 - RNA, 19 nt, Homo sapiens
  misc_RNA (1)...(19): siRNA sense strand
ugauaaagaugcaacugau

SEQ ID NO: 1971151 - RNA, 19 nt, Homo sapiens
  misc_RNA (1)...(19): siRNA sense strand
gaauagauuguacggcaaa

SEQ ID NO: 1971152 - RNA, 19 nt, Homo sapiens
  misc_RNA (1)...(19): siRNA sense strand
auacaaccgugauaaugaa

SEQ ID NO: 1971153 - RNA, 19 nt, Homo sapiens
  misc_RNA (1)...(19): siRNA sense strand
aaacugaucuuucuauacc

SEQ ID NO: 1971154 - RNA, 19 nt, Homo sapiens
  misc_RNA (1)...(19): siRNA sense strand
gauaaaaccccuaagagaa

SEQ ID NO: 1971155 - RNA, 19 nt, Homo sapiens
  misc_RNA (1)...(19): siRNA sense strand
gaagguguuguagcucuua

SEQ ID NO: 1971156 - RNA, 19 nt, Homo sapiens
  misc_RNA (1)...(19): siRNA sense strand
gcucaggauuuggauuuga

SEQ ID NO: 1971157 - RNA, 19 nt, Homo sapiens
  misc_RNA (1)...(19): siRNA sense strand
gauaaagaugcaacugauu

SEQ ID NO: 1971158 - RNA, 19 nt, Homo sapiens
  misc_RNA (1)...(19): siRNA sense strand
uguuagaucugauugaugu

SEQ ID NO: 1971159 - RNA, 19 nt, Homo sapiens
  misc_RNA (1)...(19): siRNA sense strand
cacaguaucuccuagucaa

SEQ ID NO: 1971160 - RNA, 19 nt, Homo sapiens
  misc_RNA (1)...(19): siRNA sense strand
gugaaaauauucucuguga

SEQ ID NO: 1971161 - RNA, 19 nt, Homo sapiens
  misc_RNA (1)...(19): siRNA sense strand
gaagacacaauccaucauc

SEQ ID NO: 1971162 - RNA, 19 nt, Homo sapiens
  misc_RNA (1)...(19): siRNA sense strand
gggcuuugacuucuaauug

SEQ ID NO: 1971163 - RNA, 19 nt, Homo sapiens
  misc_RNA (1)...(19): siRNA sense strand
caaacaguaugcaguaggu

SEQ ID NO: 1971164 - RNA, 19 nt, Homo sapiens
  misc_RNA (1)...(19): siRNA sense strand
gcagagauacugugaaagc

SEQ ID NO: 1971165 - RNA, 19 nt, Homo sapiens
  misc_RNA (1)...(19): siRNA sense strand
gagaaacaaaugucuaucu

SEQ ID NO: 1971166 - RNA, 19 nt, Homo sapiens
  misc_RNA (1)...(19): siRNA sense strand
caucauggaacgucuauuc

SEQ ID NO: 1971167 - RNA, 19 nt, Homo sapiens
  misc_RNA (1)...(19): siRNA sense strand
gcucuuagcaccacugaca

SEQ ID NO: 1971168 - RNA, 19 nt, Homo sapiens
  misc_RNA (1)...(19): siRNA sense strand
caacaauuggaacgaguuu

SEQ ID NO: 1971169 - RNA, 19 nt, Homo sapiens
  misc_RNA (1)...(19): siRNA sense strand
ggguguaaauccaucuguu

SEQ ID NO: 1971170 - RNA, 19 nt, Homo sapiens
  misc_RNA (1)...(19): siRNA sense strand
aauacaaccgugauaauga

SEQ ID NO: 1971171 - RNA, 19 nt, Homo sapiens
  misc_RNA (1)...(19): siRNA sense strand
ccaaggacaaguugauuuc

SEQ ID NO: 1971172 - RNA, 19 nt, Homo sapiens
  misc_RNA (1)...(19): siRNA sense strand
gccaaggacaaguugauuu

SEQ ID NO: 1971173 - RNA, 19 nt, Homo sapiens
  misc_RNA (1)...(19): siRNA sense strand
uaagcaaggauaauuggaa

SEQ ID NO: 1971174 - RNA, 19 nt, Homo sapiens
  misc_RNA (1)...(19): siRNA sense strand
caaaaucucaugccauaaa

SEQ ID NO: 1971175 - RNA, 19 nt, Homo sapiens
  misc_RNA (1)...(19): siRNA sense strand
cgagagaaacaaaugucua

SEQ ID NO: 1971176 - RNA, 19 nt, Homo sapiens
  misc_RNA (1)...(19): siRNA sense strand
aagcaaggauaauuggaau

SEQ ID NO: 1971177 - RNA, 19 nt, Homo sapiens
  misc_RNA (1)...(19): siRNA sense strand
cggcaaacuagcuaaagua

SEQ ID NO: 1971178 - RNA, 19 nt, Homo sapiens
  misc_RNA (1)...(19): siRNA sense strand
auaccaacaucaccaacaa

SEQ ID NO: 1971179 - RNA, 19 nt, Homo sapiens
  misc_RNA (1)...(19): siRNA sense strand
guacugccaaggacaaguu

SEQ ID NO: 1971180 - RNA, 19 nt, Homo sapiens
  misc_RNA (1)...(19): siRNA sense strand
caaccagucagacaggaaa

SEQ ID NO: 1971181 - RNA, 19 nt, Homo sapiens
  misc_RNA (1)...(19): siRNA sense strand
ggaagaucaacaauuggaa

SEQ ID NO: 1971182 - RNA, 19 nt, Homo sapiens
  misc_RNA (1)...(19): siRNA sense strand
gauaagcaaggauaauugg

SEQ ID NO: 1971183 - RNA, 19 nt, Homo sapiens
  misc_RNA (1)...(19): siRNA sense strand
gcagagcuuuuauaugaug

SEQ ID NO: 1971184 - RNA, 19 nt, Homo sapiens
  misc_RNA (1)...(19): siRNA sense strand
ggcuuugacuucuaauugu

SEQ ID NO: 1971185 - RNA, 19 nt, Homo sapiens
  misc_RNA (1)...(19): siRNA sense strand
gugauaaagaugcaacuga

SEQ ID NO: 1971186 - RNA, 19 nt, Homo sapiens
  misc_RNA (1)...(19): siRNA sense strand
ugaccuggcuguggcuuau

SEQ ID NO: 1971187 - RNA, 19 nt, Homo sapiens
  misc_RNA (1)...(19): siRNA sense strand
uaaaccaugguacugcaua

SEQ ID NO: 1971188 - RNA, 19 nt, Homo sapiens
  misc_RNA (1)...(19): siRNA sense strand
aaugaaccaccucaacaua

SEQ ID NO: 1971189 - RNA, 19 nt, Homo sapiens
  misc_RNA (1)...(19): siRNA sense strand
ccagucagacaggaaauaa

SEQ ID NO: 1971190 - RNA, 19 nt, Homo sapiens
  misc_RNA (1)...(19): siRNA sense strand
gguguaaauccaucuguug

SEQ ID NO: 1971191 - RNA, 19 nt, Homo sapiens
  misc_RNA (1)...(19): siRNA sense strand
gaaauaccaaacccaagca

SEQ ID NO: 1971192 - RNA, 19 nt, Homo sapiens
  misc_RNA (1)...(19): siRNA sense strand
uggcaaacaguaugcagua

SEQ ID NO: 1971193 - RNA, 19 nt, Homo sapiens
  misc_RNA (1)...(19): siRNA sense strand
uagauuguacggcaaacua

SEQ ID NO: 1971194 - RNA, 19 nt, Homo sapiens
  misc_RNA (1)...(19): siRNA sense strand
ggaacgaguuuuggaaaug

SEQ ID NO: 1971195 - RNA, 19 nt, Homo sapiens
  misc_RNA (1)...(19): siRNA sense strand
gacacaauccaucaucaug

SEQ ID NO: 1971196 - RNA, 19 nt, Homo sapiens
  misc_RNA (1)...(19): siRNA sense strand
ccaacaucaccaacaagua

SEQ ID NO: 1971197 - RNA, 19 nt, Homo sapiens
  misc_RNA (1)...(19): siRNA sense strand
guacggcaaacuagcuaaa

SEQ ID NO: 1971198 - RNA, 19 nt, Homo sapiens
  misc_RNA (1)...(19): siRNA sense strand
gaaacagguggauuuggau

SEQ ID NO: 1971199 - RNA, 19 nt, Homo sapiens
  misc_RNA (1)...(19): siRNA sense strand
gaacgaguuuuggaaaugu

SEQ ID NO: 1971200 - RNA, 19 nt, Homo sapiens
  misc_RNA (1)...(19): siRNA sense strand
gcuuguacuuauaaagaug

SEQ ID NO: 1971201 - RNA, 19 nt, Homo sapiens
  misc_RNA (1)...(19): siRNA sense strand
gaucccaauuugcuuguac

SEQ ID NO: 1971202 - RNA, 19 nt, Homo sapiens
  misc_RNA (1)...(19): siRNA sense strand
agaggaaguugcucaggau

SEQ ID NO: 1971203 - RNA, 19 nt, Homo sapiens
  misc_RNA (1)...(19): siRNA sense strand
gcuuugacuucuaauugug

SEQ ID NO: 1971204 - RNA, 19 nt, Homo sapiens
  misc_RNA (1)...(19): siRNA sense strand
aaauacaaccgugauaaug

SEQ ID NO: 1971205 - RNA, 19 nt, Homo sapiens
  misc_RNA (1)...(19): siRNA sense strand
ccuaagagaacgcaucugu

SEQ ID NO: 1971206 - RNA, 19 nt, Homo sapiens
  misc_RNA (1)...(19): siRNA sense strand
ccaugguacugcauacugu

SEQ ID NO: 1971207 - RNA, 19 nt, Homo sapiens
  misc_RNA (1)...(19): siRNA sense strand
auaccaaacccaagcauug

SEQ ID NO: 1971208 - RNA, 19 nt, Homo sapiens
  misc_RNA (1)...(19): siRNA sense strand
ugauagaggacuaggaaga

SEQ ID NO: 1971209 - RNA, 19 nt, Homo sapiens
  misc_RNA (1)...(19): siRNA sense strand
guuaggaagauuuaugaug

SEQ ID NO: 1971210 - RNA, 19 nt, Homo sapiens
  misc_RNA (1)...(19): siRNA sense strand
uauaacacaguaucuccua

SEQ ID NO: 1971211 - RNA, 19 nt, Homo sapiens
  misc_RNA (1)...(19): siRNA sense strand
ugauaagcaaggauaauug

SEQ ID NO: 1971212 - RNA, 19 nt, Homo sapiens
  misc_RNA (1)...(19): siRNA sense strand
gaaagccuuauuaguucuu

SEQ ID NO: 1971213 - RNA, 19 nt, Homo sapiens
  misc_RNA (1)...(19): siRNA sense strand
caucaccaacaaguaaaua

SEQ ID NO: 1971214 - RNA, 19 nt, Homo sapiens
  misc_RNA (1)...(19): siRNA sense strand
agaugcaacugauuaaagg

SEQ ID NO: 1971215 - RNA, 19 nt, Homo sapiens
  misc_RNA (1)...(19): siRNA sense strand
agagaacgcaucugugugu

SEQ ID NO: 1971216 - RNA, 19 nt, Homo sapiens
  misc_RNA (1)...(19): siRNA sense strand
ccugauagaggacuaggaa

SEQ ID NO: 1971217 - RNA, 19 nt, Homo sapiens
  misc_RNA (1)...(19): siRNA sense strand
caggcaaaguuaacucagu

SEQ ID NO: 1971218 - RNA, 19 nt, Homo sapiens
  misc_RNA (1)...(19): siRNA sense strand
uacaugauaagcaaggaua

SEQ ID NO: 1971219 - RNA, 19 nt, Homo sapiens
  misc_RNA (1)...(19): siRNA sense strand
cagcuaaugcuccuaccaa

SEQ ID NO: 1971220 - RNA, 19 nt, Homo sapiens
  misc_RNA (1)...(19): siRNA sense strand
gaggacguuaggaagauuu

SEQ ID NO: 1971221 - RNA, 19 nt, Homo sapiens
  misc_RNA (1)...(19): siRNA sense strand
ggauggaaaugacuacaua

SEQ ID NO: 1971222 - RNA, 19 nt, Homo sapiens
  misc_RNA (1)...(19): siRNA sense strand
gaacauaccagauugaagu

SEQ ID NO: 1971223 - RNA, 19 nt, Homo sapiens
  misc_RNA (1)...(19): siRNA sense strand
ccaaggaggugauagcauu

SEQ ID NO: 1971224 - RNA, 19 nt, Homo sapiens
  misc_RNA (1)...(19): siRNA sense strand
ggacuuggcauauaauuau

SEQ ID NO: 1971225 - RNA, 19 nt, Homo sapiens
  misc_RNA (1)...(19): siRNA sense strand
gaagacaugguccaguuua

SEQ ID NO: 1971226 - RNA, 19 nt, Homo sapiens
  misc_RNA (1)...(19): siRNA sense strand
ggaaugaaguuggucuuga

SEQ ID NO: 1971227 - RNA, 19 nt, Homo sapiens
  misc_RNA (1)...(19): siRNA sense strand
gcccaaggauguauuagaa

SEQ ID NO: 1971228 - RNA, 19 nt, Homo sapiens
  misc_RNA (1)...(19): siRNA sense strand
guaaaggauuuguagaaga

SEQ ID NO: 1971229 - RNA, 19 nt, Homo sapiens
  misc_RNA (1)...(19): siRNA sense strand
cgacacagauggagguuau

SEQ ID NO: 1971230 - RNA, 19 nt, Homo sapiens
  misc_RNA (1)...(19): siRNA sense strand
gacaugguccaguuuauua

SEQ ID NO: 1971231 - RNA, 19 nt, Homo sapiens
  misc_RNA (1)...(19): siRNA sense strand
acauuuggcuuguagauuu

SEQ ID NO: 1971232 - RNA, 19 nt, Homo sapiens
  misc_RNA (1)...(19): siRNA sense strand
gaagaacgauaugaagugu

SEQ ID NO: 1971233 - RNA, 19 nt, Homo sapiens
  misc_RNA (1)...(19): siRNA sense strand
gagguuauccaacaauuaa

SEQ ID NO: 1971234 - RNA, 19 nt, Homo sapiens
  misc_RNA (1)...(19): siRNA sense strand
agaauuaccuugcuaugga

SEQ ID NO: 1971235 - RNA, 19 nt, Homo sapiens
  misc_RNA (1)...(19): siRNA sense strand
gaagucaauuauucaggaa

SEQ ID NO: 1971236 - RNA, 19 nt, Homo sapiens
  misc_RNA (1)...(19): siRNA sense strand
gaugccaaaucuacuauug

SEQ ID NO: 1971237 - RNA, 19 nt, Homo sapiens
  misc_RNA (1)...(19): siRNA sense strand
agauggagguuauauagaa

SEQ ID NO: 1971238 - RNA, 19 nt, Homo sapiens
  misc_RNA (1)...(19): siRNA sense strand
ggucgucuguaaaggauuu

SEQ ID NO: 1971239 - RNA, 19 nt, Homo sapiens
  misc_RNA (1)...(19): siRNA sense strand
cauagaugcugcuucagaa

SEQ ID NO: 1971240 - RNA, 19 nt, Homo sapiens
  misc_RNA (1)...(19): siRNA sense strand
gaaugaaguuggucuugag

SEQ ID NO: 1971241 - RNA, 19 nt, Homo sapiens
  misc_RNA (1)...(19): siRNA sense strand
gcugauggaugaauugaca

SEQ ID NO: 1971242 - RNA, 19 nt, Homo sapiens
  misc_RNA (1)...(19): siRNA sense strand
auacauagaugcugcuuca

SEQ ID NO: 1971243 - RNA, 19 nt, Homo sapiens
  misc_RNA (1)...(19): siRNA sense strand
cuucaaaccagcaauauuu

SEQ ID NO: 1971244 - RNA, 19 nt, Homo sapiens
  misc_RNA (1)...(19): siRNA sense strand
gauagaagagagcaaagaa

SEQ ID NO: 1971245 - RNA, 19 nt, Homo sapiens
  misc_RNA (1)...(19): siRNA sense strand
ccacaguuguuguacuuga

SEQ ID NO: 1971246 - RNA, 19 nt, Homo sapiens
  misc_RNA (1)...(19): siRNA sense strand
uucaagagcucaccacuga

SEQ ID NO: 1971247 - RNA, 19 nt, Homo sapiens
  misc_RNA (1)...(19): siRNA sense strand
gaugcuacuuccuauucua

SEQ ID NO: 1971248 - RNA, 19 nt, Homo sapiens
  misc_RNA (1)...(19): siRNA sense strand
gaugacauuuggcuuguag

SEQ ID NO: 1971249 - RNA, 19 nt, Homo sapiens
  misc_RNA (1)...(19): siRNA sense strand
gcuuguggcucuugcaguu

SEQ ID NO: 1971250 - RNA, 19 nt, Homo sapiens
  misc_RNA (1)...(19): siRNA sense strand
gaacuuggagacacaggaa

SEQ ID NO: 1971251 - RNA, 19 nt, Homo sapiens
  misc_RNA (1)...(19): siRNA sense strand
gaucaacagggaaagguuu

SEQ ID NO: 1971252 - RNA, 19 nt, Homo sapiens
  misc_RNA (1)...(19): siRNA sense strand
aagaagugguuccugagua

SEQ ID NO: 1971253 - RNA, 19 nt, Homo sapiens
  misc_RNA (1)...(19): siRNA sense strand
gaaagauggaugcuacuuc

SEQ ID NO: 1971254 - RNA, 19 nt, Homo sapiens
  misc_RNA (1)...(19): siRNA sense strand
cuagauagacagauuaaga

SEQ ID NO: 1971255 - RNA, 19 nt, Homo sapiens
  misc_RNA (1)...(19): siRNA sense strand
gauggaugcuacuuccuau

SEQ ID NO: 1971256 - RNA, 19 nt, Homo sapiens
  misc_RNA (1)...(19): siRNA sense strand
uuauguagguggagaauca

SEQ ID NO: 1971257 - RNA, 19 nt, Homo sapiens
  misc_RNA (1)...(19): siRNA sense strand
ugaaguuggucuugagaug

SEQ ID NO: 1971258 - RNA, 19 nt, Homo sapiens
  misc_RNA (1)...(19): siRNA sense strand
ccacauggauggaaaugac

SEQ ID NO: 1971259 - RNA, 19 nt, Homo sapiens
  misc_RNA (1)...(19): siRNA sense strand
agaagugguuccugaguau

SEQ ID NO: 1971260 - RNA, 19 nt, Homo sapiens
  misc_RNA (1)...(19): siRNA sense strand
gaaguuggucuugagauga

SEQ ID NO: 1971261 - RNA, 19 nt, Homo sapiens
  misc_RNA (1)...(19): siRNA sense strand
gaauuaccuugcuauggau

SEQ ID NO: 1971262 - RNA, 19 nt, Homo sapiens
  misc_RNA (1)...(19): siRNA sense strand
uaaauaccuugcugaugga

SEQ ID NO: 1971263 - RNA, 19 nt, Homo sapiens
  misc_RNA (1)...(19): siRNA sense strand
gggacuuggcauauaauua

SEQ ID NO: 1971264 - RNA, 19 nt, Homo sapiens
  misc_RNA (1)...(19): siRNA sense strand
gaugggcugcuuucucuuu

SEQ ID NO: 1971265 - RNA, 19 nt, Homo sapiens
  misc_RNA (1)...(19): siRNA sense strand
gauaugaagugucuaaaag

SEQ ID NO: 1971266 - RNA, 19 nt, Homo sapiens
  misc_RNA (1)...(19): siRNA sense strand
ggagcccaaggauguauua

SEQ ID NO: 1971267 - RNA, 19 nt, Homo sapiens
  misc_RNA (1)...(19): siRNA sense strand
gaugccagcugugcuuguu

SEQ ID NO: 1971268 - RNA, 19 nt, Homo sapiens
  misc_RNA (1)...(19): siRNA sense strand
gauauggucgucuguaaag

SEQ ID NO: 1971269 - RNA, 19 nt, Homo sapiens
  misc_RNA (1)...(19): siRNA sense strand
caagagcucaccacugaug

SEQ ID NO: 1971270 - RNA, 19 nt, Homo sapiens
  misc_RNA (1)...(19): siRNA sense strand
ccauagggauuuucaguuu

SEQ ID NO: 1971271 - RNA, 19 nt, Homo sapiens
  misc_RNA (1)...(19): siRNA sense strand
ucaggaaguugcaagagau

SEQ ID NO: 1971272 - RNA, 19 nt, Homo sapiens
  misc_RNA (1)...(19): siRNA sense strand
cgagguuauccaacaauua

SEQ ID NO: 1971273 - RNA, 19 nt, Homo sapiens
  misc_RNA (1)...(19): siRNA sense strand
cugaguaugugacacuaaa

SEQ ID NO: 1971274 - RNA, 19 nt, Homo sapiens
  misc_RNA (1)...(19): siRNA sense strand
gauuaagaauguugaagac

SEQ ID NO: 1971275 - RNA, 19 nt, Homo sapiens
  misc_RNA (1)...(19): siRNA sense strand
agcauugguucuccaguua

SEQ ID NO: 1971276 - RNA, 19 nt, Homo sapiens
  misc_RNA (1)...(19): siRNA sense strand
ccaaggauguauuagaaaa

SEQ ID NO: 1971277 - RNA, 19 nt, Homo sapiens
  misc_RNA (1)...(19): siRNA sense strand
gauagacagauuaagaaug

SEQ ID NO: 1971278 - RNA, 19 nt, Homo sapiens
  misc_RNA (1)...(19): siRNA sense strand
gaagaagugguuccugagu

SEQ ID NO: 1971279 - RNA, 19 nt, Homo sapiens
  misc_RNA (1)...(19): siRNA sense strand
aagcauugguucuccaguu

SEQ ID NO: 1971280 - RNA, 19 nt, Homo sapiens
  misc_RNA (1)...(19): siRNA sense strand
cuacacagccgacacagau

SEQ ID NO: 1971281 - RNA, 19 nt, Homo sapiens
  misc_RNA (1)...(19): siRNA sense strand
uugaagacaugguccaguu

SEQ ID NO: 1971282 - RNA, 19 nt, Homo sapiens
  misc_RNA (1)...(19): siRNA sense strand
guaguuguacugaauacuu

SEQ ID NO: 1971283 - RNA, 19 nt, Homo sapiens
  misc_RNA (1)...(19): siRNA sense strand
auaccuugcugauggauga

SEQ ID NO: 1971284 - RNA, 19 nt, Homo sapiens
  misc_RNA (1)...(19): siRNA sense strand
ggaaagauggaugcuacuu

SEQ ID NO: 1971285 - RNA, 19 nt, Homo sapiens
  misc_RNA (1)...(19): siRNA sense strand
caaaucuacuauugugucu

SEQ ID NO: 1971286 - RNA, 19 nt, Homo sapiens
  misc_RNA (1)...(19): siRNA sense strand
gauggaaaugacuacauaa

SEQ ID NO: 1971287 - RNA, 19 nt, Homo sapiens
  misc_RNA (1)...(19): siRNA sense strand
ggaguucgagguuauccaa

SEQ ID NO: 1971288 - RNA, 19 nt, Homo sapiens
  misc_RNA (1)...(19): siRNA sense strand
gauggagguuauauagaag

SEQ ID NO: 1971289 - RNA, 19 nt, Homo sapiens
  misc_RNA (1)...(19): siRNA sense strand
ugccaaaucuacuauugug

SEQ ID NO: 1971290 - RNA, 19 nt, Homo sapiens
  misc_RNA (1)...(19): siRNA sense strand
auacaucaguugaacauac

SEQ ID NO: 1971291 - RNA, 19 nt, Homo sapiens
  misc_RNA (1)...(19): siRNA sense strand
agaugcugcuucagaauug

SEQ ID NO: 1971292 - RNA, 19 nt, Homo sapiens
  misc_RNA (1)...(19): siRNA sense strand
guaugaacuuggagacaca

SEQ ID NO: 1971293 - RNA, 19 nt, Homo sapiens
  misc_RNA (1)...(19): siRNA sense strand
uggagaaucaccuuugaaa

SEQ ID NO: 1971294 - RNA, 19 nt, Homo sapiens
  misc_RNA (1)...(19): siRNA sense strand
uagaagagagcaaagaaca

SEQ ID NO: 1971295 - RNA, 19 nt, Homo sapiens
  misc_RNA (1)...(19): siRNA sense strand
agaacgauaugaagugucu

SEQ ID NO: 1971296 - RNA, 19 nt, Homo sapiens
  misc_RNA (1)...(19): siRNA sense strand
gcucugcgccacaguuguu

SEQ ID NO: 1971297 - RNA, 19 nt, Homo sapiens
  misc_RNA (1)...(19): siRNA sense strand
caaaccagcaauauuucuu

SEQ ID NO: 1971298 - RNA, 19 nt, Homo sapiens
  misc_RNA (1)...(19): siRNA sense strand
uugauauggucgucuguaa

SEQ ID NO: 1971299 - RNA, 19 nt, Homo sapiens
  misc_RNA (1)...(19): siRNA sense strand
gcuucagaauugauuguau

SEQ ID NO: 1971300 - RNA, 19 nt, Homo sapiens
  misc_RNA (1)...(19): siRNA sense strand
guucgagguuauccaacaa

SEQ ID NO: 1971301 - RNA, 19 nt, Homo sapiens
  misc_RNA (1)...(19): siRNA sense strand
gcaggagcccaaggaugua

SEQ ID NO: 1971302 - RNA, 19 nt, Homo sapiens
  misc_RNA (1)...(19): siRNA sense strand
caguuaagguuggaaagau

SEQ ID NO: 1971303 - RNA, 19 nt, Homo sapiens
  misc_RNA (1)...(19): siRNA sense strand
gcauugguucuccaguuaa

SEQ ID NO: 1971304 - RNA, 19 nt, Homo sapiens
  misc_RNA (1)...(19): siRNA sense strand
caaggaggugauagcauuu

SEQ ID NO: 1971305 - RNA, 19 nt, Homo sapiens
  misc_RNA (1)...(19): siRNA sense strand
cgccacaguuguuguacuu

SEQ ID NO: 1971306 - RNA, 19 nt, Homo sapiens
  misc_RNA (1)...(19): siRNA sense strand
ccucuuguaugaacuugga

SEQ ID NO: 1971307 - RNA, 19 nt, Homo sapiens
  misc_RNA (1)...(19): siRNA sense strand
acagauggagguuauauag

SEQ ID NO: 1971308 - RNA, 19 nt, Homo sapiens
  misc_RNA (1)...(19): siRNA sense strand
aaaccaagaacagauagaa

SEQ ID NO: 1971309 - RNA, 19 nt, Homo sapiens
  misc_RNA (1)...(19): siRNA sense strand
guuuggaguucgagguuau

SEQ ID NO: 1971310 - RNA, 19 nt, Homo sapiens
  misc_RNA (1)...(19): siRNA sense strand
uugcagagauugaaaagaa

SEQ ID NO: 1971311 - RNA, 19 nt, Homo sapiens
  misc_RNA (1)...(19): siRNA sense strand
ggaaguugcaagagauuac

SEQ ID NO: 1971312 - RNA, 19 nt, Homo sapiens
  misc_RNA (1)...(19): siRNA sense strand
caguugaacauaccagauu

SEQ ID NO: 1971313 - RNA, 19 nt, Homo sapiens
  misc_RNA (1)...(19): siRNA sense strand
uguaaaggauuuguagaag

SEQ ID NO: 1971314 - RNA, 19 nt, Homo sapiens
  misc_RNA (1)...(19): siRNA sense strand
ggaaagcuuguggcucuug

SEQ ID NO: 1971315 - RNA, 19 nt, Homo sapiens
  misc_RNA (1)...(19): siRNA sense strand
uagaugcugcuucagaauu

SEQ ID NO: 1971316 - RNA, 19 nt, Homo sapiens
  misc_RNA (1)...(19): siRNA sense strand
aaguuggucuugagaugaa

SEQ ID NO: 1971317 - RNA, 19 nt, Homo sapiens
  misc_RNA (1)...(19): siRNA sense strand
aguaucaugugcuauggaa

SEQ ID NO: 1971318 - RNA, 19 nt, Homo sapiens
  misc_RNA (1)...(19): siRNA sense strand
cugaugggcugcuuucucu

SEQ ID NO: 1971319 - RNA, 19 nt, Homo sapiens
  misc_RNA (1)...(19): siRNA sense strand
uggauggcuuccucuugua

SEQ ID NO: 1971320 - RNA, 19 nt, Homo sapiens
  misc_RNA (1)...(19): siRNA sense strand
uuucagaauuaccuugcua

SEQ ID NO: 1971321 - RNA, 19 nt, Homo sapiens
  misc_RNA (1)...(19): siRNA sense strand
cagacuaucuucaacauuu

SEQ ID NO: 1971322 - RNA, 19 nt, Homo sapiens
  misc_RNA (1)...(19): siRNA sense strand
ucacagagcuggaccacau

SEQ ID NO: 1971323 - RNA, 19 nt, Homo sapiens
  misc_RNA (1)...(19): siRNA sense strand
gcagaugacucaaaacuga

SEQ ID NO: 1971324 - RNA, 19 nt, Homo sapiens
  misc_RNA (1)...(19): siRNA sense strand
gaaguuugaugagcaugaa

SEQ ID NO: 1971325 - RNA, 19 nt, Homo sapiens
  misc_RNA (1)...(19): siRNA sense strand
ucaaaacucuggcuccuua

SEQ ID NO: 1971326 - RNA, 19 nt, Homo sapiens
  misc_RNA (1)...(19): siRNA sense strand
gcaugaagaugggcuggaa

SEQ ID NO: 1971327 - RNA, 19 nt, Homo sapiens
  misc_RNA (1)...(19): siRNA sense strand
gaggagcucugucccacau

SEQ ID NO: 1971328 - RNA, 19 nt, Homo sapiens
  misc_RNA (1)...(19): siRNA sense strand
gagcccagcuugcaaaaga

SEQ ID NO: 1971329 - RNA, 19 nt, Homo sapiens
  misc_RNA (1)...(19): siRNA sense strand
ccacaucuaccuccacaga

SEQ ID NO: 1971330 - RNA, 19 nt, Homo sapiens
  misc_RNA (1)...(19): siRNA sense strand
gaaacucgacgguccucaa

SEQ ID NO: 1971331 - RNA, 19 nt, Homo sapiens
  misc_RNA (1)...(19): siRNA sense strand
ggaaguuugaugagcauga

SEQ ID NO: 1971332 - RNA, 19 nt, Homo sapiens
  misc_RNA (1)...(19): siRNA sense strand
ccacggguuuccugacaga

SEQ ID NO: 1971333 - RNA, 19 nt, Homo sapiens
  misc_RNA (1)...(19): siRNA sense strand
uaacgacguccacggguuu

SEQ ID NO: 1971334 - RNA, 19 nt, Homo sapiens
  misc_RNA (1)...(19): siRNA sense strand
gauccaggaggaacucaaa

SEQ ID NO: 1971335 - RNA, 19 nt, Homo sapiens
  misc_RNA (1)...(19): siRNA sense strand
ccagcccucuugccagaaa

SEQ ID NO: 1971336 - RNA, 19 nt, Homo sapiens
  misc_RNA (1)...(19): siRNA sense strand
caucagggacagccucaaa

SEQ ID NO: 1971337 - RNA, 19 nt, Homo sapiens
  misc_RNA (1)...(19): siRNA sense strand
guccauccaaggugucuua

SEQ ID NO: 1971338 - RNA, 19 nt, Homo sapiens
  misc_RNA (1)...(19): siRNA sense strand
cauccuguuugcugacauu

SEQ ID NO: 1971339 - RNA, 19 nt, Homo sapiens
  misc_RNA (1)...(19): siRNA sense strand
ggaggaacucaaacaggaa

SEQ ID NO: 1971340 - RNA, 19 nt, Homo sapiens
  misc_RNA (1)...(19): siRNA sense strand
gccagacuaucuucaacau

SEQ ID NO: 1971341 - RNA, 19 nt, Homo sapiens
  misc_RNA (1)...(19): siRNA sense strand
caagucagccuuucaaaau

SEQ ID NO: 1971342 - RNA, 19 nt, Homo sapiens
  misc_RNA (1)...(19): siRNA sense strand
ggagcucugucccacaucu

SEQ ID NO: 1971343 - RNA, 19 nt, Homo sapiens
  misc_RNA (1)...(19): siRNA sense strand
ugacagagcccagcuugca

SEQ ID NO: 1971344 - RNA, 19 nt, Homo sapiens
  misc_RNA (1)...(19): siRNA sense strand
uucaacauuucccuuauga

SEQ ID NO: 1971345 - RNA, 19 nt, Homo sapiens
  misc_RNA (1)...(19): siRNA sense strand
uuacagcgccagacuaucu

SEQ ID NO: 1971346 - RNA, 19 nt, Homo sapiens
  misc_RNA (1)...(19): siRNA sense strand
cuucaacauuucccuuaug

SEQ ID NO: 1971347 - RNA, 19 nt, Homo sapiens
  misc_RNA (1)...(19): siRNA sense strand
agacuaucuucaacauuuc

SEQ ID NO: 1971348 - RNA, 19 nt, Homo sapiens
  misc_RNA (1)...(19): siRNA sense strand
ccuguuugcugacauugau

SEQ ID NO: 1971349 - RNA, 19 nt, Homo sapiens
  misc_RNA (1)...(19): siRNA sense strand
ccacggcucccaccaaacu

SEQ ID NO: 1971350 - RNA, 19 nt, Homo sapiens
  misc_RNA (1)...(19): siRNA sense strand
guccacggguuuccugaca

SEQ ID NO: 1971351 - RNA, 19 nt, Homo sapiens
  misc_RNA (1)...(19): siRNA sense strand
gcgccagacuaucuucaac

SEQ ID NO: 1971352 - RNA, 19 nt, Homo sapiens
  misc_RNA (1)...(19): siRNA sense strand
acagagcccagcuugcaaa

SEQ ID NO: 1971353 - RNA, 19 nt, Homo sapiens
  misc_RNA (1)...(19): siRNA sense strand
gacagagcccagcuugcaa

SEQ ID NO: 1971354 - RNA, 19 nt, Homo sapiens
  misc_RNA (1)...(19): siRNA sense strand
caucauggaggugcuuguu

SEQ ID NO: 1971355 - RNA, 19 nt, Homo sapiens
  misc_RNA (1)...(19): siRNA sense strand
ccuuacagcgccagacuau

SEQ ID NO: 1971356 - RNA, 19 nt, Homo sapiens
  misc_RNA (1)...(19): siRNA sense strand
ccgcgcagaugacucaaaa

SEQ ID NO: 1971357 - RNA, 19 nt, Homo sapiens
  misc_RNA (1)...(19): siRNA sense strand
gagcucugucccacaucua

SEQ ID NO: 1971358 - RNA, 19 nt, Homo sapiens
  misc_RNA (1)...(19): siRNA sense strand
caaaacugauggacucucu

SEQ ID NO: 1971359 - RNA, 19 nt, Homo sapiens
  misc_RNA (1)...(19): siRNA sense strand
gcagaacucuuggaaauua

SEQ ID NO: 1971360 - RNA, 19 nt, Homo sapiens
  misc_RNA (1)...(19): siRNA sense strand
ccacccagcuucaccauua

SEQ ID NO: 1971361 - RNA, 19 nt, Homo sapiens
  misc_RNA (1)...(19): siRNA sense strand
gaaauauucucccaggaaa

SEQ ID NO: 1971362 - RNA, 19 nt, Homo sapiens
  misc_RNA (1)...(19): siRNA sense strand
gaaacaacguggagguaga

SEQ ID NO: 1971363 - RNA, 19 nt, Homo sapiens
  misc_RNA (1)...(19): siRNA sense strand
ggaaacaacuauuugaaac

SEQ ID NO: 1971364 - RNA, 19 nt, Homo sapiens
  misc_RNA (1)...(19): siRNA sense strand
gaagagagaagaaagaaca

SEQ ID NO: 1971365 - RNA, 19 nt, Homo sapiens
  misc_RNA (1)...(19): siRNA sense strand
ggagguagaugagucuuug

SEQ ID NO: 1971366 - RNA, 19 nt, Homo sapiens
  misc_RNA (1)...(19): siRNA sense strand
gaaagaagaagaacaagca

SEQ ID NO: 1971367 - RNA, 19 nt, Homo sapiens
  misc_RNA (1)...(19): siRNA sense strand
guacuccaguuacaauuga

SEQ ID NO: 1971368 - RNA, 19 nt, Homo sapiens
  misc_RNA (1)...(19): siRNA sense strand
gaugaaagaagaagaacaa

SEQ ID NO: 1971369 - RNA, 19 nt, Homo sapiens
  misc_RNA (1)...(19): siRNA sense strand
cagacuacccucaaguuua

SEQ ID NO: 1971370 - RNA, 19 nt, Homo sapiens
  misc_RNA (1)...(19): siRNA sense strand
gggaaacaacuauuugaaa

SEQ ID NO: 1971371 - RNA, 19 nt, Homo sapiens
  misc_RNA (1)...(19): siRNA sense strand
ugaagaugauccagacuau

SEQ ID NO: 1971372 - RNA, 19 nt, Homo sapiens
  misc_RNA (1)...(19): siRNA sense strand
caucugauauccaguucuu

SEQ ID NO: 1971373 - RNA, 19 nt, Homo sapiens
  misc_RNA (1)...(19): siRNA sense strand
aagaugauccagacuauaa

SEQ ID NO: 1971374 - RNA, 19 nt, Homo sapiens
  misc_RNA (1)...(19): siRNA sense strand
gaagaugauccagacuaua

SEQ ID NO: 1971375 - RNA, 19 nt, Homo sapiens
  misc_RNA (1)...(19): siRNA sense strand
ggaggaugaugaagaugau

SEQ ID NO: 1971376 - RNA, 19 nt, Homo sapiens
  misc_RNA (1)...(19): siRNA sense strand
ggaggaugcuggaaacaac

SEQ ID NO: 1971377 - RNA, 19 nt, Homo sapiens
  misc_RNA (1)...(19): siRNA sense strand
gcuggaggaugaugaagau

SEQ ID NO: 1971378 - RNA, 19 nt, Homo sapiens
  misc_RNA (1)...(19): siRNA sense strand
aagcaauuauuccauggua

SEQ ID NO: 1971379 - RNA, 19 nt, Homo sapiens
  misc_RNA (1)...(19): siRNA sense strand
ccauuacugugacgucuga

SEQ ID NO: 1971380 - RNA, 19 nt, Homo sapiens
  misc_RNA (1)...(19): siRNA sense strand
ugaaauauucucccaggaa

SEQ ID NO: 1971381 - RNA, 19 nt, Homo sapiens
  misc_RNA (1)...(19): siRNA sense strand
agacuacccucaaguuuac

SEQ ID NO: 1971382 - RNA, 19 nt, Homo sapiens
  misc_RNA (1)...(19): siRNA sense strand
augcagaacucuuggaaau

SEQ ID NO: 1971383 - RNA, 19 nt, Homo sapiens
  misc_RNA (1)...(19): siRNA sense strand
cagaacucuuggaaauuaa

SEQ ID NO: 1971384 - RNA, 19 nt, Homo sapiens
  misc_RNA (1)...(19): siRNA sense strand
agaagaagcugaaaagcaa

SEQ ID NO: 1971385 - RNA, 19 nt, Homo sapiens
  misc_RNA (1)...(19): siRNA sense strand
gaugaaacuguccagacua

SEQ ID NO: 1971386 - RNA, 19 nt, Homo sapiens
  misc_RNA (1)...(19): siRNA sense strand
acuuggagcuggaggauga

SEQ ID NO: 1971387 - RNA, 19 nt, Homo sapiens
  misc_RNA (1)...(19): siRNA sense strand
aaucuugacacaucugaua

SEQ ID NO: 1971388 - RNA, 19 nt, Homo sapiens
  misc_RNA (1)...(19): siRNA sense strand
agaaaaggaugaaagaaga

SEQ ID NO: 1971389 - RNA, 19 nt, Homo sapiens
  misc_RNA (1)...(19): siRNA sense strand
gaagaagaacaagcaggaa

SEQ ID NO: 1971390 - RNA, 19 nt, Homo sapiens
  misc_RNA (1)...(19): siRNA sense strand
ccagacuacccucaaguuu

SEQ ID NO: 1971391 - RNA, 19 nt, Homo sapiens
  misc_RNA (1)...(19): siRNA sense strand
agaagauaaugaugucuca

SEQ ID NO: 1971392 - RNA, 19 nt, Homo sapiens
  misc_RNA (1)...(19): siRNA sense strand
agugacagcugugcaagaa

SEQ ID NO: 1971393 - RNA, 19 nt, Homo sapiens
  misc_RNA (1)...(19): siRNA sense strand
ugacagcugugcaagaaaa

SEQ ID NO: 1971394 - RNA, 19 nt, Homo sapiens
  misc_RNA (1)...(19): siRNA sense strand
ugacuccuucacaguauua

SEQ ID NO: 1971395 - RNA, 19 nt, Homo sapiens
  misc_RNA (1)...(19): siRNA sense strand
ugaugaaacuguccagacu

SEQ ID NO: 1971396 - RNA, 19 nt, Homo sapiens
  misc_RNA (1)...(19): siRNA sense strand
ucuagaagauaaugauguc

SEQ ID NO: 1971397 - RNA, 19 nt, Homo sapiens
  misc_RNA (1)...(19): siRNA sense strand
caaaagaaaagaagcagaa

SEQ ID NO: 1971398 - RNA, 19 nt, Homo sapiens
  misc_RNA (1)...(19): siRNA sense strand
gaagcuccccuuuaugaaa

SEQ ID NO: 1971399 - RNA, 19 nt, Homo sapiens
  misc_RNA (1)...(19): siRNA sense strand
gcaauuauuccaugguacu

SEQ ID NO: 1971400 - RNA, 19 nt, Homo sapiens
  misc_RNA (1)...(19): siRNA sense strand
gguacuccaguuacaauug

SEQ ID NO: 1971401 - RNA, 19 nt, Homo sapiens
  misc_RNA (1)...(19): siRNA sense strand
ggagcuggaggaugaugaa

SEQ ID NO: 1971402 - RNA, 19 nt, Homo sapiens
  misc_RNA (1)...(19): siRNA sense strand
uagaagagagaagaaagaa

SEQ ID NO: 1971403 - RNA, 19 nt, Homo sapiens
  misc_RNA (1)...(19): siRNA sense strand
aagaagaacaagcaggaaa

SEQ ID NO: 1971404 - RNA, 19 nt, Homo sapiens
  misc_RNA (1)...(19): siRNA sense strand
caaguuuacauacagugaa

SEQ ID NO: 1971405 - RNA, 19 nt, Homo sapiens
  misc_RNA (1)...(19): siRNA sense strand
gaaaauccacccagcuuca

SEQ ID NO: 1971406 - RNA, 19 nt, Homo sapiens
  misc_RNA (1)...(19): siRNA sense strand
gugggaaacaacuauuuga

SEQ ID NO: 1971407 - RNA, 19 nt, Homo sapiens
  misc_RNA (1)...(19): siRNA sense strand
ccugacuccuucacaguau

SEQ ID NO: 1971408 - RNA, 19 nt, Homo sapiens
  misc_RNA (1)...(19): siRNA sense strand
gaaagccaaguuugaugca

SEQ ID NO: 1971409 - RNA, 19 nt, Homo sapiens
  misc_RNA (1)...(19): siRNA sense strand
gaacaaaagaaaagaagca

SEQ ID NO: 1971410 - RNA, 19 nt, Homo sapiens
  misc_RNA (1)...(19): siRNA sense strand
cuagaagagagaagaaaga

SEQ ID NO: 1971411 - RNA, 19 nt, Homo sapiens
  misc_RNA (1)...(19): siRNA sense strand
aaacuagaagagagaagaa

SEQ ID NO: 1971412 - RNA, 19 nt, Homo sapiens
  misc_RNA (1)...(19): siRNA sense strand
agaugaagcuccccuuuau

SEQ ID NO: 1971413 - RNA, 19 nt, Homo sapiens
  misc_RNA (1)...(19): siRNA sense strand
gaucauaaucuugacacau

SEQ ID NO: 1971414 - RNA, 19 nt, Homo sapiens
  misc_RNA (1)...(19): siRNA sense strand
gaugauccagacuauaauc

SEQ ID NO: 1971415 - RNA, 19 nt, Homo sapiens
  misc_RNA (1)...(19): siRNA sense strand
acacaucugauauccaguu

SEQ ID NO: 1971416 - RNA, 19 nt, Homo sapiens
  misc_RNA (1)...(19): siRNA sense strand
gagagaagaaagaacaaaa

SEQ ID NO: 1971417 - RNA, 19 nt, Homo sapiens
  misc_RNA (1)...(19): siRNA sense strand
uaagugggaaacaacuauu

SEQ ID NO: 1971418 - RNA, 19 nt, Homo sapiens
  misc_RNA (1)...(19): siRNA sense strand
gaugcagaacucuuggaaa

SEQ ID NO: 1971419 - RNA, 19 nt, Homo sapiens
  misc_RNA (1)...(19): siRNA sense strand
ccaugguacuccaguuaca

SEQ ID NO: 1971420 - RNA, 19 nt, Homo sapiens
  misc_RNA (1)...(19): siRNA sense strand
gagaagaaagaacaaaaga

SEQ ID NO: 1971421 - RNA, 19 nt, Homo sapiens
  misc_RNA (1)...(19): siRNA sense strand
gaaaaggaugaaagaagaa

SEQ ID NO: 1971422 - RNA, 19 nt, Homo sapiens
  misc_RNA (1)...(19): siRNA sense strand
gagaaaaugaugaaacugu

SEQ ID NO: 1971423 - RNA, 19 nt, Homo sapiens
  misc_RNA (1)...(19): siRNA sense strand
aucauaaucuugacacauc

SEQ ID NO: 1971424 - RNA, 19 nt, Homo sapiens
  misc_RNA (1)...(19): siRNA sense strand
caacguggagguagaugag

SEQ ID NO: 1971425 - RNA, 19 nt, Homo sapiens
  misc_RNA (1)...(19): siRNA sense strand
gguagaugagucuuuguuc

SEQ ID NO: 1971426 - RNA, 19 nt, Homo sapiens
  misc_RNA (1)...(19): siRNA sense strand
aagauaaugaugucucaga

SEQ ID NO: 1971427 - RNA, 19 nt, Homo sapiens
  misc_RNA (1)...(19): siRNA sense strand
ucaaguuuacauacaguga

SEQ ID NO: 1971428 - RNA, 19 nt, Homo sapiens
  misc_RNA (1)...(19): siRNA sense strand
cagaugaagcuccccuuua

SEQ ID NO: 1971429 - RNA, 19 nt, Homo sapiens
  misc_RNA (1)...(19): siRNA sense strand
uggaggaugaugaagauga

SEQ ID NO: 1971430 - RNA, 19 nt, Homo sapiens
  misc_RNA (1)...(19): siRNA sense strand
ccucaaguuuacauacagu

SEQ ID NO: 1971431 - RNA, 19 nt, Homo sapiens
  misc_RNA (1)...(19): siRNA sense strand
ggaugaaagaagaagaaca

SEQ ID NO: 1971432 - RNA, 19 nt, Homo sapiens
  misc_RNA (1)...(19): siRNA sense strand
uagcauuacaggcugaaga

SEQ ID NO: 1971433 - RNA, 19 nt, Homo sapiens
  misc_RNA (1)...(19): siRNA sense strand
agaugagucuuuguuccaa

SEQ ID NO: 1971434 - RNA, 19 nt, Homo sapiens
  misc_RNA (1)...(19): siRNA sense strand
ugggaaacaacuauuugaa

SEQ ID NO: 1971435 - RNA, 19 nt, Homo sapiens
  misc_RNA (1)...(19): siRNA sense strand
gauaaaacuagaagagaga

SEQ ID NO: 1971436 - RNA, 19 nt, Homo sapiens
  misc_RNA (1)...(19): siRNA sense strand
gcauuacaggcugaagaaa

SEQ ID NO: 1971437 - RNA, 19 nt, Homo sapiens
  misc_RNA (1)...(19): siRNA sense strand
cuugguauggugaugauuu

SEQ ID NO: 1971438 - RNA, 19 nt, Homo sapiens
  misc_RNA (1)...(19): siRNA sense strand
cugcugacccagagaguga

SEQ ID NO: 1971439 - RNA, 19 nt, Homo sapiens
  misc_RNA (1)...(19): siRNA sense strand
uuaagugggaaacaacuau

SEQ ID NO: 1971440 - RNA, 19 nt, Homo sapiens
  misc_RNA (1)...(19): siRNA sense strand
aaggaugaaagaagaagaa

SEQ ID NO: 1971441 - RNA, 19 nt, Homo sapiens
  misc_RNA (1)...(19): siRNA sense strand
agaagcagaagaagcugaa

SEQ ID NO: 1971442 - RNA, 19 nt, Homo sapiens
  misc_RNA (1)...(19): siRNA sense strand
gaagcagaagaagcugaaa

SEQ ID NO: 1971443 - RNA, 19 nt, Homo sapiens
  misc_RNA (1)...(19): siRNA sense strand
ccaucuacccugacuccuu

SEQ ID NO: 1971444 - RNA, 19 nt, Homo sapiens
  misc_RNA (1)...(19): siRNA sense strand
gcaucaaccuccgcuucaa

SEQ ID NO: 1971445 - RNA, 19 nt, Homo sapiens
  misc_RNA (1)...(19): siRNA sense strand
uagcaaggaaggucaacga

SEQ ID NO: 1971446 - RNA, 19 nt, Homo sapiens
  misc_RNA (1)...(19): siRNA sense strand
gcaucaaccuccgcuucaa

SEQ ID NO: 1971447 - RNA, 19 nt, Homo sapiens
  misc_RNA (1)...(19): siRNA sense strand
gggugcagcuggucuggau

SEQ ID NO: 1971448 - RNA, 19 nt, Homo sapiens
  misc_RNA (1)...(19): siRNA sense strand
uagcaaggaaggucaacga

SEQ ID NO: 1971449 - RNA, 19 nt, Homo sapiens
  misc_RNA (1)...(19): siRNA sense strand
gaagacucauuuccagaua

SEQ ID NO: 1971450 - RNA, 19 nt, Homo sapiens
  misc_RNA (1)...(19): siRNA sense strand
gagaucaaaucagcaaaua

SEQ ID NO: 1971451 - RNA, 19 nt, Homo sapiens
  misc_RNA (1)...(19): siRNA sense strand
gauggagucuucugaugua

SEQ ID NO: 1971452 - RNA, 19 nt, Homo sapiens
  misc_RNA (1)...(19): siRNA sense strand
gcaggaauguuacugaaga

SEQ ID NO: 1971453 - RNA, 19 nt, Homo sapiens
  misc_RNA (1)...(19): siRNA sense strand
gaauaccacuaaagucaaa

SEQ ID NO: 1971454 - RNA, 19 nt, Homo sapiens
  misc_RNA (1)...(19): siRNA sense strand
gaauggcucuucuaacaga

SEQ ID NO: 1971455 - RNA, 19 nt, Homo sapiens
  misc_RNA (1)...(19): siRNA sense strand
gaauguuacugaagacaaa

SEQ ID NO: 1971456 - RNA, 19 nt, Homo sapiens
  misc_RNA (1)...(19): siRNA sense strand
caacaaagaauacugaaug

SEQ ID NO: 1971457 - RNA, 19 nt, Homo sapiens
  misc_RNA (1)...(19): siRNA sense strand
gaagcucacuccagagaga

SEQ ID NO: 1971458 - RNA, 19 nt, Homo sapiens
  misc_RNA (1)...(19): siRNA sense strand
agacaucuguucuggauuu

SEQ ID NO: 1971459 - RNA, 19 nt, Homo sapiens
  misc_RNA (1)...(19): siRNA sense strand
gaucaaaucagcaaauaug

SEQ ID NO: 1971460 - RNA, 19 nt, Homo sapiens
  misc_RNA (1)...(19): siRNA sense strand
caagaccacuucuggauuc

SEQ ID NO: 1971461 - RNA, 19 nt, Homo sapiens
  misc_RNA (1)...(19): siRNA sense strand
ggacagagccaaucuacuc

SEQ ID NO: 1971462 - RNA, 19 nt, Homo sapiens
  misc_RNA (1)...(19): siRNA sense strand
gaacaggaaaucagagaug

SEQ ID NO: 1971463 - RNA, 19 nt, Homo sapiens
  misc_RNA (1)...(19): siRNA sense strand
gacuagagguucugaguuc

SEQ ID NO: 1971464 - RNA, 19 nt, Homo sapiens
  misc_RNA (1)...(19): siRNA sense strand
cagaaggaaugaacuugaa

SEQ ID NO: 1971465 - RNA, 19 nt, Homo sapiens
  misc_RNA (1)...(19): siRNA sense strand
gcaccaaacagccuuauca

SEQ ID NO: 1971466 - RNA, 19 nt, Homo sapiens
  misc_RNA (1)...(19): siRNA sense strand
gagagaagacggcagagaa

SEQ ID NO: 1971467 - RNA, 19 nt, Homo sapiens
  misc_RNA (1)...(19): siRNA sense strand
ucaaggagaagacucauuu

SEQ ID NO: 1971468 - RNA, 19 nt, Homo sapiens
  misc_RNA (1)...(19): siRNA sense strand
uagcugaaguggcaagaaa

SEQ ID NO: 1971469 - RNA, 19 nt, Homo sapiens
  misc_RNA (1)...(19): siRNA sense strand
uaaaccaucuucuuagaca

SEQ ID NO: 1971470 - RNA, 19 nt, Homo sapiens
  misc_RNA (1)...(19): siRNA sense strand
guagugauaucuaugaucu

SEQ ID NO: 1971471 - RNA, 19 nt, Homo sapiens
  misc_RNA (1)...(19): siRNA sense strand
caacuguguucaugauaga

SEQ ID NO: 1971472 - RNA, 19 nt, Homo sapiens
  misc_RNA (1)...(19): siRNA sense strand
aaagacaucuguucuggau

SEQ ID NO: 1971473 - RNA, 19 nt, Homo sapiens
  misc_RNA (1)...(19): siRNA sense strand
gcaaauaugcaaggagauu

SEQ ID NO: 1971474 - RNA, 19 nt, Homo sapiens
  misc_RNA (1)...(19): siRNA sense strand
ugagaucuaugaggcaaua

SEQ ID NO: 1971475 - RNA, 19 nt, Homo sapiens
  misc_RNA (1)...(19): siRNA sense strand
ucucagccuuggauuauaa

SEQ ID NO: 1971476 - RNA, 19 nt, Homo sapiens
  misc_RNA (1)...(19): siRNA sense strand
cugaauggcucuucuaaca

SEQ ID NO: 1971477 - RNA, 19 nt, Homo sapiens
  misc_RNA (1)...(19): siRNA sense strand
ggaauaaaauccagugugu

SEQ ID NO: 1971478 - RNA, 19 nt, Homo sapiens
  misc_RNA (1)...(19): siRNA sense strand
gcuaucaacuguguucaug

SEQ ID NO: 1971479 - RNA, 19 nt, Homo sapiens
  misc_RNA (1)...(19): siRNA sense strand
cgugaccucuuuauggaua

SEQ ID NO: 1971480 - RNA, 19 nt, Homo sapiens
  misc_RNA (1)...(19): siRNA sense strand
cagaauaccacuaaaguca

SEQ ID NO: 1971481 - RNA, 19 nt, Homo sapiens
  misc_RNA (1)...(19): siRNA sense strand
ccagggagacucugcaauu

SEQ ID NO: 1971482 - RNA, 19 nt, Homo sapiens
  misc_RNA (1)...(19): siRNA sense strand
ucuccuagcuguugacguu

SEQ ID NO: 1971483 - RNA, 19 nt, Homo sapiens
  misc_RNA (1)...(19): siRNA sense strand
gacaucaucuuccaguaca

SEQ ID NO: 1971484 - RNA, 19 nt, Homo sapiens
  misc_RNA (1)...(19): siRNA sense strand
gaggggauaugcuaaauga

SEQ ID NO: 1971485 - RNA, 19 nt, Homo sapiens
  misc_RNA (1)...(19): siRNA sense strand
ugaagguagugauaucuau

SEQ ID NO: 1971486 - RNA, 19 nt, Homo sapiens
  misc_RNA (1)...(19): siRNA sense strand
ucacuuuggucugguguaa

SEQ ID NO: 1971487 - RNA, 19 nt, Homo sapiens
  misc_RNA (1)...(19): siRNA sense strand
caaggagauucuuccauca

SEQ ID NO: 1971488 - RNA, 19 nt, Homo sapiens
  misc_RNA (1)...(19): siRNA sense strand
caaaucagcaaauaugcaa

SEQ ID NO: 1971489 - RNA, 19 nt, Homo sapiens
  misc_RNA (1)...(19): siRNA sense strand
caaggggaguugcaaauuu

SEQ ID NO: 1971490 - RNA, 19 nt, Homo sapiens
  misc_RNA (1)...(19): siRNA sense strand
uguaaaccaucuucuuaga

SEQ ID NO: 1971491 - RNA, 19 nt, Homo sapiens
  misc_RNA (1)...(19): siRNA sense strand
ccagcagucuuguucaaau

SEQ ID NO: 1971492 - RNA, 19 nt, Homo sapiens
  misc_RNA (1)...(19): siRNA sense strand
ugggugugcuguuguuuaa

SEQ ID NO: 1971493 - RNA, 19 nt, Homo sapiens
  misc_RNA (1)...(19): siRNA sense strand
caauaaacaagacaacaga

SEQ ID NO: 1971494 - RNA, 19 nt, Homo sapiens
  misc_RNA (1)...(19): siRNA sense strand
gcagaagacggagaacuga

SEQ ID NO: 1971495 - RNA, 19 nt, Homo sapiens
  misc_RNA (1)...(19): siRNA sense strand
gacaaauaauugacagaag

SEQ ID NO: 1971496 - RNA, 19 nt, Homo sapiens
  misc_RNA (1)...(19): siRNA sense strand
ggagauucuuccaucacuu

SEQ ID NO: 1971497 - RNA, 19 nt, Homo sapiens
  misc_RNA (1)...(19): siRNA sense strand
gaaggacagagccaaucua

SEQ ID NO: 1971498 - RNA, 19 nt, Homo sapiens
  misc_RNA (1)...(19): siRNA sense strand
gacaacagagcgacaucua

SEQ ID NO: 1971499 - RNA, 19 nt, Homo sapiens
  misc_RNA (1)...(19): siRNA sense strand
aaucagagauggugguucu

SEQ ID NO: 1971500 - RNA, 19 nt, Homo sapiens
  misc_RNA (1)...(19): siRNA sense strand
gagaacaggaaaucagaga

SEQ ID NO: 1971501 - RNA, 19 nt, Homo sapiens
  misc_RNA (1)...(19): siRNA sense strand
ggagucuucugauguaaac

SEQ ID NO: 1971502 - RNA, 19 nt, Homo sapiens
  misc_RNA (1)...(19): siRNA sense strand
auggauagcuccucagguu

SEQ ID NO: 1971503 - RNA, 19 nt, Homo sapiens
  misc_RNA (1)...(19): siRNA sense strand
ggguuaugcucaaggaaga

SEQ ID NO: 1971504 - RNA, 19 nt, Homo sapiens
  misc_RNA (1)...(19): siRNA sense strand
gaagguagugauaucuaug

SEQ ID NO: 1971505 - RNA, 19 nt, Homo sapiens
  misc_RNA (1)...(19): siRNA sense strand
ccacagacauauuuuacaa

SEQ ID NO: 1971506 - RNA, 19 nt, Homo sapiens
  misc_RNA (1)...(19): siRNA sense strand
gagauucuuccaucacuug

SEQ ID NO: 1971507 - RNA, 19 nt, Homo sapiens
  misc_RNA (1)...(19): siRNA sense strand
ggccaccagugcuuuauca

SEQ ID NO: 1971508 - RNA, 19 nt, Homo sapiens
  misc_RNA (1)...(19): siRNA sense strand
ucaacuguguucaugauag

SEQ ID NO: 1971509 - RNA, 19 nt, Homo sapiens
  misc_RNA (1)...(19): siRNA sense strand
ggacagaggggauaugcua

SEQ ID NO: 1971510 - RNA, 19 nt, Homo sapiens
  misc_RNA (1)...(19): siRNA sense strand
cagcaugagcgccauugua

SEQ ID NO: 1971511 - RNA, 19 nt, Homo sapiens
  misc_RNA (1)...(19): siRNA sense strand
uaucuaugaucuccucuuc

SEQ ID NO: 1971512 - RNA, 19 nt, Homo sapiens
  misc_RNA (1)...(19): siRNA sense strand
cagcagucuuguucaaaug

SEQ ID NO: 1971513 - RNA, 19 nt, Homo sapiens
  misc_RNA (1)...(19): siRNA sense strand
uuaugaaacucaccguaga

SEQ ID NO: 1971514 - RNA, 19 nt, Homo sapiens
  misc_RNA (1)...(19): siRNA sense strand
ccaacccacagacauauuu

SEQ ID NO: 1971515 - RNA, 19 nt, Homo sapiens
  misc_RNA (1)...(19): siRNA sense strand
gaggacagcugggccugau

SEQ ID NO: 1971516 - RNA, 19 nt, Homo sapiens
  misc_RNA (1)...(19): siRNA sense strand
ucagaagggugaagguagu

SEQ ID NO: 1971517 - RNA, 19 nt, Homo sapiens
  misc_RNA (1)...(19): siRNA sense strand
ggccacuggucaacgauga

SEQ ID NO: 1971518 - RNA, 19 nt, Homo sapiens
  misc_RNA (1)...(19): siRNA sense strand
gaaaucagagauggugguu

SEQ ID NO: 1971519 - RNA, 19 nt, Homo sapiens
  misc_RNA (1)...(19): siRNA sense strand
gcagagaacaggaaaucag

SEQ ID NO: 1971520 - RNA, 19 nt, Homo sapiens
  misc_RNA (1)...(19): siRNA sense strand
acauucagcucuucucaca

SEQ ID NO: 1971521 - RNA, 19 nt, Homo sapiens
  misc_RNA (1)...(19): siRNA sense strand
ggauauucauuaccuugca

SEQ ID NO: 1971522 - RNA, 19 nt, Homo sapiens
  misc_RNA (1)...(19): siRNA sense strand
ggacagcugggccugauag

SEQ ID NO: 1971523 - RNA, 19 nt, Homo sapiens
  misc_RNA (1)...(19): siRNA sense strand
ggauagcuccucagguugu

SEQ ID NO: 1971524 - RNA, 19 nt, Homo sapiens
  misc_RNA (1)...(19): siRNA sense strand
gaacuuuugccuucauuaa

SEQ ID NO: 1971525 - RNA, 19 nt, Homo sapiens
  misc_RNA (1)...(19): siRNA sense strand
ggaauguuacugaagacaa

SEQ ID NO: 1971526 - RNA, 19 nt, Homo sapiens
  misc_RNA (1)...(19): siRNA sense strand
agccuuggauuauaagauu

SEQ ID NO: 1971527 - RNA, 19 nt, Homo sapiens
  misc_RNA (1)...(19): siRNA sense strand
gcucgugaccucuuuaugg

SEQ ID NO: 1971528 - RNA, 19 nt, Homo sapiens
  misc_RNA (1)...(19): siRNA sense strand
ggaauauagagaucaaauc

SEQ ID NO: 1971529 - RNA, 19 nt, Homo sapiens
  misc_RNA (1)...(19): siRNA sense strand
cuucuaugcuccaacaaga

SEQ ID NO: 1971530 - RNA, 19 nt, Homo sapiens
  misc_RNA (1)...(19): siRNA sense strand
acaucuagcuaucaacugu

SEQ ID NO: 1971531 - RNA, 19 nt, Homo sapiens
  misc_RNA (1)...(19): siRNA sense strand
caaauaauugacagaagga

SEQ ID NO: 1971532 - RNA, 19 nt, Homo sapiens
  misc_RNA (1)...(19): siRNA sense strand
ugaauuggcacuagcugaa

SEQ ID NO: 1971533 - RNA, 19 nt, Homo sapiens
  misc_RNA (1)...(19): siRNA sense strand
gcauuucuccuagcuguug

SEQ ID NO: 1971534 - RNA, 19 nt, Homo sapiens
  misc_RNA (1)...(19): siRNA sense strand
cagggagacucugcaauuc

SEQ ID NO: 1971535 - RNA, 19 nt, Homo sapiens
  misc_RNA (1)...(19): siRNA sense strand
cuccguaaguguagacaaa

SEQ ID NO: 1971536 - RNA, 19 nt, Homo sapiens
  misc_RNA (1)...(19): siRNA sense strand
uaauaccuguaaugcagaa

SEQ ID NO: 1971537 - RNA, 19 nt, Homo sapiens
  misc_RNA (1)...(19): siRNA sense strand
auucagcucuucucacaga

SEQ ID NO: 1971538 - RNA, 19 nt, Homo sapiens
  misc_RNA (1)...(19): siRNA sense strand
aagacucauuuccagauaa

SEQ ID NO: 1971539 - RNA, 19 nt, Homo sapiens
  misc_RNA (1)...(19): siRNA sense strand
aaagagcuagugacauuga

SEQ ID NO: 1971540 - RNA, 19 nt, Homo sapiens
  misc_RNA (1)...(19): siRNA sense strand
ggugugcuguuguuuaaac

SEQ ID NO: 1971541 - RNA, 19 nt, Homo sapiens
  misc_RNA (1)...(19): siRNA sense strand
gggagacucugcaauucag

SEQ ID NO: 1971542 - RNA, 19 nt, Homo sapiens
  misc_RNA (1)...(19): siRNA sense strand
gagacucugcaauucagua

SEQ ID NO: 1971543 - RNA, 19 nt, Homo sapiens
  misc_RNA (1)...(19): siRNA sense strand
gggugaagguagugauauc

SEQ ID NO: 1971544 - RNA, 19 nt, Homo sapiens
  misc_RNA (1)...(19): siRNA sense strand
acucugcaauucaguaaau

SEQ ID NO: 1971545 - RNA, 19 nt, Homo sapiens
  misc_RNA (1)...(19): siRNA sense strand
gauagcuccucagguuguu

SEQ ID NO: 1971546 - RNA, 19 nt, Homo sapiens
  misc_RNA (1)...(19): siRNA sense strand
ugacagaaggaaugaacuu

SEQ ID NO: 1971547 - RNA, 19 nt, Homo sapiens
  misc_RNA (1)...(19): siRNA sense strand
uuuagcaccucaaggagaa

SEQ ID NO: 1971548 - RNA, 19 nt, Homo sapiens
  misc_RNA (1)...(19): siRNA sense strand
cagaagcucacuccagaga

SEQ ID NO: 1971549 - RNA, 19 nt, Homo sapiens
  misc_RNA (1)...(19): siRNA sense strand
gcaaccagcuguggaaaua

SEQ ID NO: 1971550 - RNA, 19 nt, Homo sapiens
  misc_RNA (1)...(19): siRNA sense strand
ggaaguaugugcccuacaa

SEQ ID NO: 1971551 - RNA, 19 nt, Homo sapiens
  misc_RNA (1)...(19): siRNA sense strand
ggaacaacaugcagguauu

SEQ ID NO: 1971552 - RNA, 19 nt, Homo sapiens
  misc_RNA (1)...(19): siRNA sense strand
ggaaauaccgcaaagacaa

SEQ ID NO: 1971553 - RNA, 19 nt, Homo sapiens
  misc_RNA (1)...(19): siRNA sense strand
gcaagaguuucaagugguu

SEQ ID NO: 1971554 - RNA, 19 nt, Homo sapiens
  misc_RNA (1)...(19): siRNA sense strand
cauaggaucuucaugaaca

SEQ ID NO: 1971555 - RNA, 19 nt, Homo sapiens
  misc_RNA (1)...(19): siRNA sense strand
gcaaagacaagacccugua

SEQ ID NO: 1971556 - RNA, 19 nt, Homo sapiens
  misc_RNA (1)...(19): siRNA sense strand
gaccauaggaucuucauga

SEQ ID NO: 1971557 - RNA, 19 nt, Homo sapiens
  misc_RNA (1)...(19): siRNA sense strand
ucaagugguuuaugacgaa

SEQ ID NO: 1971558 - RNA, 19 nt, Homo sapiens
  misc_RNA (1)...(19): siRNA sense strand
ggccauaucuacaggaagu

SEQ ID NO: 1971559 - RNA, 19 nt, Homo sapiens
  misc_RNA (1)...(19): siRNA sense strand
gaaagugaccauaggaucu

SEQ ID NO: 1971560 - RNA, 19 nt, Homo sapiens
  misc_RNA (1)...(19): siRNA sense strand
caacucaacagucuuggaa

SEQ ID NO: 1971561 - RNA, 19 nt, Homo sapiens
  misc_RNA (1)...(19): siRNA sense strand
ggaugucgcaguccagaaa

SEQ ID NO: 1971562 - RNA, 19 nt, Homo sapiens
  misc_RNA (1)...(19): siRNA sense strand
gaacaacaugcagguauuc

SEQ ID NO: 1971563 - RNA, 19 nt, Homo sapiens
  misc_RNA (1)...(19): siRNA sense strand
gaaauaccgcaaagacaag

SEQ ID NO: 1971564 - RNA, 19 nt, Homo sapiens
  misc_RNA (1)...(19): siRNA sense strand
gaacacaccaacucaacag

SEQ ID NO: 1971565 - RNA, 19 nt, Homo sapiens
  misc_RNA (1)...(19): siRNA sense strand
gcagugaaagugaccauag

SEQ ID NO: 1971566 - RNA, 19 nt, Homo sapiens
  misc_RNA (1)...(19): siRNA sense strand
aaguguggauggaugagua

SEQ ID NO: 1971567 - RNA, 19 nt, Homo sapiens
  misc_RNA (1)...(19): siRNA sense strand
guucugcuuugaugccauu

SEQ ID NO: 1971568 - RNA, 19 nt, Homo sapiens
  misc_RNA (1)...(19): siRNA sense strand
gcuccagggugggccauau

SEQ ID NO: 1971569 - RNA, 19 nt, Homo sapiens
  misc_RNA (1)...(19): siRNA sense strand
aguuucaagugguuuauga

SEQ ID NO: 1971570 - RNA, 19 nt, Homo sapiens
  misc_RNA (1)...(19): siRNA sense strand
accauaggaucuucaugaa

SEQ ID NO: 1971571 - RNA, 19 nt, Homo sapiens
  misc_RNA (1)...(19): siRNA sense strand
ggaccugcccaaauucuac

SEQ ID NO: 1971572 - RNA, 19 nt, Homo sapiens
  misc_RNA (1)...(19): siRNA sense strand
cacaccaacucaacagucu

SEQ ID NO: 1971573 - RNA, 19 nt, Homo sapiens
  misc_RNA (1)...(19): siRNA sense strand
uggaugaguacgcagagua

SEQ ID NO: 1971574 - RNA, 19 nt, Homo sapiens
  misc_RNA (1)...(19): siRNA sense strand
caccaacucaacagucuug

SEQ ID NO: 1971575 - RNA, 19 nt, Homo sapiens
  misc_RNA (1)...(19): siRNA sense strand
gggaccugcccaaauucua

SEQ ID NO: 1971576 - RNA, 19 nt, Homo sapiens
  misc_RNA (1)...(19): siRNA sense strand
gaaguaugugcccuacaag

SEQ ID NO: 1971577 - RNA, 19 nt, Homo sapiens
  misc_RNA (1)...(19): siRNA sense strand
uggaacaacaugcagguau

SEQ ID NO: 1971578 - RNA, 19 nt, Homo sapiens
  misc_RNA (1)...(19): siRNA sense strand
uuaagcggguggccgaagu

SEQ ID NO: 1971579 - RNA, 19 nt, Homo sapiens
  misc_RNA (1)...(19): siRNA sense strand
cagugaaagugaccauagg

SEQ ID NO: 1971580 - RNA, 19 nt, Homo sapiens
  misc_RNA (1)...(19): siRNA sense strand
aagaguuucaagugguuua

SEQ ID NO: 1971581 - RNA, 19 nt, Homo sapiens
  misc_RNA (1)...(19): siRNA sense strand
aaagugaccauaggaucuu

SEQ ID NO: 1971582 - RNA, 19 nt, Homo sapiens
  misc_RNA (1)...(19): siRNA sense strand
gcaaccagcuguggaaaua

SEQ ID NO: 1971583 - RNA, 19 nt, Homo sapiens
  misc_RNA (1)...(19): siRNA sense strand
ggaaguaugugcccuacaa

SEQ ID NO: 1971584 - RNA, 19 nt, Homo sapiens
  misc_RNA (1)...(19): siRNA sense strand
ggaacaacaugcagguauu

SEQ ID NO: 1971585 - RNA, 19 nt, Homo sapiens
  misc_RNA (1)...(19): siRNA sense strand
ggaaauaccgcaaagacaa

SEQ ID NO: 1971586 - RNA, 19 nt, Homo sapiens
  misc_RNA (1)...(19): siRNA sense strand
gcaagaguuucaagugguu

SEQ ID NO: 1971587 - RNA, 19 nt, Homo sapiens
  misc_RNA (1)...(19): siRNA sense strand
cauaggaucuucaugaaca

SEQ ID NO: 1971588 - RNA, 19 nt, Homo sapiens
  misc_RNA (1)...(19): siRNA sense strand
gcaaagacaagacccugua

SEQ ID NO: 1971589 - RNA, 19 nt, Homo sapiens
  misc_RNA (1)...(19): siRNA sense strand
gaccauaggaucuucauga

SEQ ID NO: 1971590 - RNA, 19 nt, Homo sapiens
  misc_RNA (1)...(19): siRNA sense strand
ucaagugguuuaugacgaa

SEQ ID NO: 1971591 - RNA, 19 nt, Homo sapiens
  misc_RNA (1)...(19): siRNA sense strand
ggccauaucuacaggaagu

SEQ ID NO: 1971592 - RNA, 19 nt, Homo sapiens
  misc_RNA (1)...(19): siRNA sense strand
gaaagugaccauaggaucu

SEQ ID NO: 1971593 - RNA, 19 nt, Homo sapiens
  misc_RNA (1)...(19): siRNA sense strand
caacucaacagucuuggaa

SEQ ID NO: 1971594 - RNA, 19 nt, Homo sapiens
  misc_RNA (1)...(19): siRNA sense strand
ggaugucgcaguccagaaa

SEQ ID NO: 1971595 - RNA, 19 nt, Homo sapiens
  misc_RNA (1)...(19): siRNA sense strand
gaacaacaugcagguauuc

SEQ ID NO: 1971596 - RNA, 19 nt, Homo sapiens
  misc_RNA (1)...(19): siRNA sense strand
gaaauaccgcaaagacaag

SEQ ID NO: 1971597 - RNA, 19 nt, Homo sapiens
  misc_RNA (1)...(19): siRNA sense strand
gaacacaccaacucaacag

SEQ ID NO: 1971598 - RNA, 19 nt, Homo sapiens
  misc_RNA (1)...(19): siRNA sense strand
gcagugaaagugaccauag

SEQ ID NO: 1971599 - RNA, 19 nt, Homo sapiens
  misc_RNA (1)...(19): siRNA sense strand
aaguguggauggaugagua

SEQ ID NO: 1971600 - RNA, 19 nt, Homo sapiens
  misc_RNA (1)...(19): siRNA sense strand
guucugcuuugaugccauu

SEQ ID NO: 1971601 - RNA, 19 nt, Homo sapiens
  misc_RNA (1)...(19): siRNA sense strand
gcuccagggugggccauau

SEQ ID NO: 1971602 - RNA, 19 nt, Homo sapiens
  misc_RNA (1)...(19): siRNA sense strand
aguuucaagugguuuauga

SEQ ID NO: 1971603 - RNA, 19 nt, Homo sapiens
  misc_RNA (1)...(19): siRNA sense strand
accauaggaucuucaugaa

SEQ ID NO: 1971604 - RNA, 19 nt, Homo sapiens
  misc_RNA (1)...(19): siRNA sense strand
ggaccugcccaaauucuac

SEQ ID NO: 1971605 - RNA, 19 nt, Homo sapiens
  misc_RNA (1)...(19): siRNA sense strand
cacaccaacucaacagucu

SEQ ID NO: 1971606 - RNA, 19 nt, Homo sapiens
  misc_RNA (1)...(19): siRNA sense strand
uggaugaguacgcagagua

SEQ ID NO: 1971607 - RNA, 19 nt, Homo sapiens
  misc_RNA (1)...(19): siRNA sense strand
caccaacucaacagucuug

SEQ ID NO: 1971608 - RNA, 19 nt, Homo sapiens
  misc_RNA (1)...(19): siRNA sense strand
gggaccugcccaaauucua

SEQ ID NO: 1971609 - RNA, 19 nt, Homo sapiens
  misc_RNA (1)...(19): siRNA sense strand
gaaguaugugcccuacaag

SEQ ID NO: 1971610 - RNA, 19 nt, Homo sapiens
  misc_RNA (1)...(19): siRNA sense strand
uggaacaacaugcagguau

SEQ ID NO: 1971611 - RNA, 19 nt, Homo sapiens
  misc_RNA (1)...(19): siRNA sense strand
uuaagcggguggccgaagu

SEQ ID NO: 1971612 - RNA, 19 nt, Homo sapiens
  misc_RNA (1)...(19): siRNA sense strand
cagugaaagugaccauagg

SEQ ID NO: 1971613 - RNA, 19 nt, Homo sapiens
  misc_RNA (1)...(19): siRNA sense strand
aagaguuucaagugguuua

SEQ ID NO: 1971614 - RNA, 19 nt, Homo sapiens
  misc_RNA (1)...(19): siRNA sense strand
aaagugaccauaggaucuu

SEQ ID NO: 1971615 - RNA, 19 nt, Homo sapiens
  misc_RNA (1)...(19): siRNA sense strand
ggaaacaacucaucucauu

SEQ ID NO: 1971616 - RNA, 19 nt, Homo sapiens
  misc_RNA (1)...(19): siRNA sense strand
gaacacagaugcucguauu

SEQ ID NO: 1971617 - RNA, 19 nt, Homo sapiens
  misc_RNA (1)...(19): siRNA sense strand
gaaacuggcugcugagaaa

SEQ ID NO: 1971618 - RNA, 19 nt, Homo sapiens
  misc_RNA (1)...(19): siRNA sense strand
gcagguagcuaauuuaaca

SEQ ID NO: 1971619 - RNA, 19 nt, Homo sapiens
  misc_RNA (1)...(19): siRNA sense strand
caacucaucucauuuccua

SEQ ID NO: 1971620 - RNA, 19 nt, Homo sapiens
  misc_RNA (1)...(19): siRNA sense strand
agaaggaucucaccaauga

SEQ ID NO: 1971621 - RNA, 19 nt, Homo sapiens
  misc_RNA (1)...(19): siRNA sense strand
gcccagagauccauauuga

SEQ ID NO: 1971622 - RNA, 19 nt, Homo sapiens
  misc_RNA (1)...(19): siRNA sense strand
ggaugggugucuccucuua

SEQ ID NO: 1971623 - RNA, 19 nt, Homo sapiens
  misc_RNA (1)...(19): siRNA sense strand
gaugugagcucccuugauc

SEQ ID NO: 1971624 - RNA, 19 nt, Homo sapiens
  misc_RNA (1)...(19): siRNA sense strand
gauguuaccgccucuguua

SEQ ID NO: 1971625 - RNA, 19 nt, Homo sapiens
  misc_RNA (1)...(19): siRNA sense strand
gaaaccagaucuacgaaag

SEQ ID NO: 1971626 - RNA, 19 nt, Homo sapiens
  misc_RNA (1)...(19): siRNA sense strand
caacagcgauccaggaaca

SEQ ID NO: 1971627 - RNA, 19 nt, Homo sapiens
  misc_RNA (1)...(19): siRNA sense strand
gaacucaucacaugcaaug

SEQ ID NO: 1971628 - RNA, 19 nt, Homo sapiens
  misc_RNA (1)...(19): siRNA sense strand
guaagagccuccuagaauc

SEQ ID NO: 1971629 - RNA, 19 nt, Homo sapiens
  misc_RNA (1)...(19): siRNA sense strand
gaaacaacucaucucauuu

SEQ ID NO: 1971630 - RNA, 19 nt, Homo sapiens
  misc_RNA (1)...(19): siRNA sense strand
ugaacaaccucccaaagga

SEQ ID NO: 1971631 - RNA, 19 nt, Homo sapiens
  misc_RNA (1)...(19): siRNA sense strand
gaagaaugguccaguugag

SEQ ID NO: 1971632 - RNA, 19 nt, Homo sapiens
  misc_RNA (1)...(19): siRNA sense strand
ggagaaaccagaucuacga

SEQ ID NO: 1971633 - RNA, 19 nt, Homo sapiens
  misc_RNA (1)...(19): siRNA sense strand
ccacagaggagcugaguga

SEQ ID NO: 1971634 - RNA, 19 nt, Homo sapiens
  misc_RNA (1)...(19): siRNA sense strand
ugucugcgauggaaucuuu

SEQ ID NO: 1971635 - RNA, 19 nt, Homo sapiens
  misc_RNA (1)...(19): siRNA sense strand
uaacagaacaguggaaaug

SEQ ID NO: 1971636 - RNA, 19 nt, Homo sapiens
  misc_RNA (1)...(19): siRNA sense strand
agacaaaguuacuggaaau

SEQ ID NO: 1971637 - RNA, 19 nt, Homo sapiens
  misc_RNA (1)...(19): siRNA sense strand
ggaagaaugguccaguuga

SEQ ID NO: 1971638 - RNA, 19 nt, Homo sapiens
  misc_RNA (1)...(19): siRNA sense strand
gugaggaggugcaggaguu

SEQ ID NO: 1971639 - RNA, 19 nt, Homo sapiens
  misc_RNA (1)...(19): siRNA sense strand
ggagauagaacaaggagau

SEQ ID NO: 1971640 - RNA, 19 nt, Homo sapiens
  misc_RNA (1)...(19): siRNA sense strand
ggacagugacagaguagaa

SEQ ID NO: 1971641 - RNA, 19 nt, Homo sapiens
  misc_RNA (1)...(19): siRNA sense strand
caaaguuacuggaaaugca

SEQ ID NO: 1971642 - RNA, 19 nt, Homo sapiens
  misc_RNA (1)...(19): siRNA sense strand
cguaagagccuccuagaau

SEQ ID NO: 1971643 - RNA, 19 nt, Homo sapiens
  misc_RNA (1)...(19): siRNA sense strand
caacaggcauuugauuuac

SEQ ID NO: 1971644 - RNA, 19 nt, Homo sapiens
  misc_RNA (1)...(19): siRNA sense strand
gaacagagacagaguuagc

SEQ ID NO: 1971645 - RNA, 19 nt, Homo sapiens
  misc_RNA (1)...(19): siRNA sense strand
cagacaaaguuacuggaaa

SEQ ID NO: 1971646 - RNA, 19 nt, Homo sapiens
  misc_RNA (1)...(19): siRNA sense strand
caguggaaauggcuaugua

SEQ ID NO: 1971647 - RNA, 19 nt, Homo sapiens
  misc_RNA (1)...(19): siRNA sense strand
ccucccagaucucguagua

SEQ ID NO: 1971648 - RNA, 19 nt, Homo sapiens
  misc_RNA (1)...(19): siRNA sense strand
caucuggccugguggaguu

SEQ ID NO: 1971649 - RNA, 19 nt, Homo sapiens
  misc_RNA (1)...(19): siRNA sense strand
aaacaacucaucucauuuc

SEQ ID NO: 1971650 - RNA, 19 nt, Homo sapiens
  misc_RNA (1)...(19): siRNA sense strand
cauacacacucuauacugu

SEQ ID NO: 1971651 - RNA, 19 nt, Homo sapiens
  misc_RNA (1)...(19): siRNA sense strand
ggagccagccuuugaggaa

SEQ ID NO: 1971652 - RNA, 19 nt, Homo sapiens
  misc_RNA (1)...(19): siRNA sense strand
cauggacagugacagagua

SEQ ID NO: 1971653 - RNA, 19 nt, Homo sapiens
  misc_RNA (1)...(19): siRNA sense strand
ggugggaugugugaagaaa

SEQ ID NO: 1971654 - RNA, 19 nt, Homo sapiens
  misc_RNA (1)...(19): siRNA sense strand
gcaaagaaaccaucaugcu

SEQ ID NO: 1971655 - RNA, 19 nt, Homo sapiens
  misc_RNA (1)...(19): siRNA sense strand
caaaggacguguggacagu

SEQ ID NO: 1971656 - RNA, 19 nt, Homo sapiens
  misc_RNA (1)...(19): siRNA sense strand
uaaaauuucuccagcacua

SEQ ID NO: 1971657 - RNA, 19 nt, Homo sapiens
  misc_RNA (1)...(19): siRNA sense strand
gcaagaaggcuagcaaguc

SEQ ID NO: 1971658 - RNA, 19 nt, Homo sapiens
  misc_RNA (1)...(19): siRNA sense strand
ggagaaggaugagcgugau

SEQ ID NO: 1971659 - RNA, 19 nt, Homo sapiens
  misc_RNA (1)...(19): siRNA sense strand
gaacaguggaaauggcuau

SEQ ID NO: 1971660 - RNA, 19 nt, Homo sapiens
  misc_RNA (1)...(19): siRNA sense strand
guauugccuuugucaagaa

SEQ ID NO: 1971661 - RNA, 19 nt, Homo sapiens
  misc_RNA (1)...(19): siRNA sense strand
guugucaccugcagagcua

SEQ ID NO: 1971662 - RNA, 19 nt, Homo sapiens
  misc_RNA (1)...(19): siRNA sense strand
ugucugaacugggcaaaga

SEQ ID NO: 1971663 - RNA, 19 nt, Homo sapiens
  misc_RNA (1)...(19): siRNA sense strand
guagcuaauuuaacaaguc

SEQ ID NO: 1971664 - RNA, 19 nt, Homo sapiens
  misc_RNA (1)...(19): siRNA sense strand
ucccagaucucguaguaga

SEQ ID NO: 1971665 - RNA, 19 nt, Homo sapiens
  misc_RNA (1)...(19): siRNA sense strand
ccagagauccauauugaca

SEQ ID NO: 1971666 - RNA, 19 nt, Homo sapiens
  misc_RNA (1)...(19): siRNA sense strand
ggacaucauccuggaauuc

SEQ ID NO: 1971667 - RNA, 19 nt, Homo sapiens
  misc_RNA (1)...(19): siRNA sense strand
caacaaaagccccagaaaa

SEQ ID NO: 1971668 - RNA, 19 nt, Homo sapiens
  misc_RNA (1)...(19): siRNA sense strand
uuuauggucucuagaauag

SEQ ID NO: 1971669 - RNA, 19 nt, Homo sapiens
  misc_RNA (1)...(19): siRNA sense strand
aaacauggacagugacaga

SEQ ID NO: 1971670 - RNA, 19 nt, Homo sapiens
  misc_RNA (1)...(19): siRNA sense strand
gccaggagccagccuuuga

SEQ ID NO: 1971671 - RNA, 19 nt, Homo sapiens
  misc_RNA (1)...(19): siRNA sense strand
gugcagguagcuaauuuaa

SEQ ID NO: 1971672 - RNA, 19 nt, Homo sapiens
  misc_RNA (1)...(19): siRNA sense strand
cugcuccucuugcuacuaa

SEQ ID NO: 1971673 - RNA, 19 nt, Homo sapiens
  misc_RNA (1)...(19): siRNA sense strand
gcgauggaaucuuuuauug

SEQ ID NO: 1971674 - RNA, 19 nt, Homo sapiens
  misc_RNA (1)...(19): siRNA sense strand
gggcaaagaaaccaucaug

SEQ ID NO: 1971675 - RNA, 19 nt, Homo sapiens
  misc_RNA (1)...(19): siRNA sense strand
ugggaugugugaagaaaga

SEQ ID NO: 1971676 - RNA, 19 nt, Homo sapiens
  misc_RNA (1)...(19): siRNA sense strand
uuggaaacauggacaguga

SEQ ID NO: 1971677 - RNA, 19 nt, Homo sapiens
  misc_RNA (1)...(19): siRNA sense strand
cuacgaaaguucaucaaaa

SEQ ID NO: 1971678 - RNA, 19 nt, Homo sapiens
  misc_RNA (1)...(19): siRNA sense strand
cgagcugucaccucaauaa

SEQ ID NO: 1971679 - RNA, 19 nt, Homo sapiens
  misc_RNA (1)...(19): siRNA sense strand
aaccagaucuacgaaaguu

SEQ ID NO: 1971680 - RNA, 19 nt, Homo sapiens
  misc_RNA (1)...(19): siRNA sense strand
aaauggcuauguaccgaaa

SEQ ID NO: 1971681 - RNA, 19 nt, Homo sapiens
  misc_RNA (1)...(19): siRNA sense strand
ucauacaccuucuggucaa

SEQ ID NO: 1971682 - RNA, 19 nt, Homo sapiens
  misc_RNA (1)...(19): siRNA sense strand
agagcuacauucaggcaaa

SEQ ID NO: 1971683 - RNA, 19 nt, Homo sapiens
  misc_RNA (1)...(19): siRNA sense strand
ggaaggcaguguggagucu

SEQ ID NO: 1971684 - RNA, 19 nt, Homo sapiens
  misc_RNA (1)...(19): siRNA sense strand
gagguucucauccaguaaa

SEQ ID NO: 1971685 - RNA, 19 nt, Homo sapiens
  misc_RNA (1)...(19): siRNA sense strand
cguauugccuuugucaaga

SEQ ID NO: 1971686 - RNA, 19 nt, Homo sapiens
  misc_RNA (1)...(19): siRNA sense strand
ucaccucaauaaccuguug

SEQ ID NO: 1971687 - RNA, 19 nt, Homo sapiens
  misc_RNA (1)...(19): siRNA sense strand
ucagccaccuucagcuuug

SEQ ID NO: 1971688 - RNA, 19 nt, Homo sapiens
  misc_RNA (1)...(19): siRNA sense strand
gggaagaaugguccaguug

SEQ ID NO: 1971689 - RNA, 19 nt, Homo sapiens
  misc_RNA (1)...(19): siRNA sense strand
ggaggagaaaccagaucua

SEQ ID NO: 1971690 - RNA, 19 nt, Homo sapiens
  misc_RNA (1)...(19): siRNA sense strand
gaucucagugccucuguug

SEQ ID NO: 1971691 - RNA, 19 nt, Homo sapiens
  misc_RNA (1)...(19): siRNA sense strand
ccgaaaacaugcaaaaguu

SEQ ID NO: 1971692 - RNA, 19 nt, Homo sapiens
  misc_RNA (1)...(19): siRNA sense strand
gcaaguccaggcugagguu

SEQ ID NO: 1971693 - RNA, 19 nt, Homo sapiens
  misc_RNA (1)...(19): siRNA sense strand
aagcaacucugugccauuc

SEQ ID NO: 1971694 - RNA, 19 nt, Homo sapiens
  misc_RNA (1)...(19): siRNA sense strand
gaucuacgaaaguucauca

SEQ ID NO: 1971695 - RNA, 19 nt, Homo sapiens
  misc_RNA (1)...(19): siRNA sense strand
gggacaucauccuggaauu

SEQ ID NO: 1971696 - RNA, 19 nt, Homo sapiens
  misc_RNA (1)...(19): siRNA sense strand
uaagagccuccuagaauca

SEQ ID NO: 1971697 - RNA, 19 nt, Homo sapiens
  misc_RNA (1)...(19): siRNA sense strand
cgcguggcguugugaauuu

SEQ ID NO: 1971698 - RNA, 19 nt, Homo sapiens
  misc_RNA (1)...(19): siRNA sense strand
ccagaucucguaguagaaa

SEQ ID NO: 1971699 - RNA, 19 nt, Homo sapiens
  misc_RNA (1)...(19): siRNA sense strand
gcaacucugugccauucca

SEQ ID NO: 1971700 - RNA, 19 nt, Homo sapiens
  misc_RNA (1)...(19): siRNA sense strand
gagaaaccagaucuacgaa

SEQ ID NO: 1971701 - RNA, 19 nt, Homo sapiens
  misc_RNA (1)...(19): siRNA sense strand
cagcagacaaggagauaga

SEQ ID NO: 1971702 - RNA, 19 nt, Homo sapiens
  misc_RNA (1)...(19): siRNA sense strand
uaucgggaguucuugaauc

SEQ ID NO: 1971703 - RNA, 19 nt, Homo sapiens
  misc_RNA (1)...(19): siRNA sense strand
caaaaguuucuucgucuua

SEQ ID NO: 1971704 - RNA, 19 nt, Homo sapiens
  misc_RNA (1)...(19): siRNA sense strand
ggaaacauggacagugaca

SEQ ID NO: 1971705 - RNA, 19 nt, Homo sapiens
  misc_RNA (1)...(19): siRNA sense strand
cagaugauuauucgagauu

SEQ ID NO: 1971706 - RNA, 19 nt, Homo sapiens
  misc_RNA (1)...(19): siRNA sense strand
ucacggccgucaugcuuag

SEQ ID NO: 1971707 - RNA, 19 nt, Homo sapiens
  misc_RNA (1)...(19): siRNA sense strand
ggaucucagugccucuguu

SEQ ID NO: 1971708 - RNA, 19 nt, Homo sapiens
  misc_RNA (1)...(19): siRNA sense strand
ggugcagguagcuaauuua

SEQ ID NO: 1971709 - RNA, 19 nt, Homo sapiens
  misc_RNA (1)...(19): siRNA sense strand
ccagaugauuauucgagau

SEQ ID NO: 1971710 - RNA, 19 nt, Homo sapiens
  misc_RNA (1)...(19): siRNA sense strand
ugaagcacaagacaagauu

SEQ ID NO: 1971711 - RNA, 19 nt, Homo sapiens
  misc_RNA (1)...(19): siRNA sense strand
ggaaaugcagccaacaaaa

SEQ ID NO: 1971712 - RNA, 19 nt, Homo sapiens
  misc_RNA (1)...(19): siRNA sense strand
gaaggaugagcgugaugga

SEQ ID NO: 1971713 - RNA, 19 nt, Homo sapiens
  misc_RNA (1)...(19): siRNA sense strand
gcaaaaguuucuucgucuu

SEQ ID NO: 1971714 - RNA, 19 nt, Homo sapiens
  misc_RNA (1)...(19): siRNA sense strand
aggaacagagacagaguua

SEQ ID NO: 1971715 - RNA, 19 nt, Homo sapiens
  misc_RNA (1)...(19): siRNA sense strand
gcacauauaugccaaaguc

SEQ ID NO: 1971716 - RNA, 19 nt, Homo sapiens
  misc_RNA (1)...(19): siRNA sense strand
gcagaaaggugacccacaa

SEQ ID NO: 1971717 - RNA, 19 nt, Homo sapiens
  misc_RNA (1)...(19): siRNA sense strand
gaacugaacaagaagagua

SEQ ID NO: 1971718 - RNA, 19 nt, Homo sapiens
  misc_RNA (1)...(19): siRNA sense strand
ggaccaagcugacugaaag

SEQ ID NO: 1971719 - RNA, 19 nt, Homo sapiens
  misc_RNA (1)...(19): siRNA sense strand
gagauugacuuucuucguu

SEQ ID NO: 1971720 - RNA, 19 nt, Homo sapiens
  misc_RNA (1)...(19): siRNA sense strand
gagguugacuucuacauug

SEQ ID NO: 1971721 - RNA, 19 nt, Homo sapiens
  misc_RNA (1)...(19): siRNA sense strand
gaugcugucuuccugauuu

SEQ ID NO: 1971722 - RNA, 19 nt, Homo sapiens
  misc_RNA (1)...(19): siRNA sense strand
guacaaguaugagaugauu

SEQ ID NO: 1971723 - RNA, 19 nt, Homo sapiens
  misc_RNA (1)...(19): siRNA sense strand
guagacaaauccaacauca

SEQ ID NO: 1971724 - RNA, 19 nt, Homo sapiens
  misc_RNA (1)...(19): siRNA sense strand
gcagagguuugaauccuau

SEQ ID NO: 1971725 - RNA, 19 nt, Homo sapiens
  misc_RNA (1)...(19): siRNA sense strand
gaacaagaagaguauguau

SEQ ID NO: 1971726 - RNA, 19 nt, Homo sapiens
  misc_RNA (1)...(19): siRNA sense strand
caagcugacugaaagauuc

SEQ ID NO: 1971727 - RNA, 19 nt, Homo sapiens
  misc_RNA (1)...(19): siRNA sense strand
ccauugcccucacgaugua

SEQ ID NO: 1971728 - RNA, 19 nt, Homo sapiens
  misc_RNA (1)...(19): siRNA sense strand
caguggcucugggauauua

SEQ ID NO: 1971729 - RNA, 19 nt, Homo sapiens
  misc_RNA (1)...(19): siRNA sense strand
gcaggaccuugcuuaugaa

SEQ ID NO: 1971730 - RNA, 19 nt, Homo sapiens
  misc_RNA (1)...(19): siRNA sense strand
ggaccuugcuuaugaacgu

SEQ ID NO: 1971731 - RNA, 19 nt, Homo sapiens
  misc_RNA (1)...(19): siRNA sense strand
gcuguaagacugccaagaa

SEQ ID NO: 1971732 - RNA, 19 nt, Homo sapiens
  misc_RNA (1)...(19): siRNA sense strand
cagauuugauugaccagaa

SEQ ID NO: 1971733 - RNA, 19 nt, Homo sapiens
  misc_RNA (1)...(19): siRNA sense strand
acaagaagaguauguauuc

SEQ ID NO: 1971734 - RNA, 19 nt, Homo sapiens
  misc_RNA (1)...(19): siRNA sense strand
cauccaguauuuccacaaa

SEQ ID NO: 1971735 - RNA, 19 nt, Homo sapiens
  misc_RNA (1)...(19): siRNA sense strand
ggauccagcuucuugucuu

SEQ ID NO: 1971736 - RNA, 19 nt, Homo sapiens
  misc_RNA (1)...(19): siRNA sense strand
acaucgaacugaacaagaa

SEQ ID NO: 1971737 - RNA, 19 nt, Homo sapiens
  misc_RNA (1)...(19): siRNA sense strand
ggaggagauugacuuucuu

SEQ ID NO: 1971738 - RNA, 19 nt, Homo sapiens
  misc_RNA (1)...(19): siRNA sense strand
ccacaaaacugucucagau

SEQ ID NO: 1971739 - RNA, 19 nt, Homo sapiens
  misc_RNA (1)...(19): siRNA sense strand
gcacacaggagauccaaag

SEQ ID NO: 1971740 - RNA, 19 nt, Homo sapiens
  misc_RNA (1)...(19): siRNA sense strand
guugacuucuacauugaua

SEQ ID NO: 1971741 - RNA, 19 nt, Homo sapiens
  misc_RNA (1)...(19): siRNA sense strand
gcccaacuaugauaaugug

SEQ ID NO: 1971742 - RNA, 19 nt, Homo sapiens
  misc_RNA (1)...(19): siRNA sense strand
gaaaggugacccacaaguc

SEQ ID NO: 1971743 - RNA, 19 nt, Homo sapiens
  misc_RNA (1)...(19): siRNA sense strand
ggaccacguacaaguauga

SEQ ID NO: 1971744 - RNA, 19 nt, Homo sapiens
  misc_RNA (1)...(19): siRNA sense strand
gaacaucgaacugaacaag

SEQ ID NO: 1971745 - RNA, 19 nt, Homo sapiens
  misc_RNA (1)...(19): siRNA sense strand
ccagaaaguguaugagcua

SEQ ID NO: 1971746 - RNA, 19 nt, Homo sapiens
  misc_RNA (1)...(19): siRNA sense strand
ucaaggugcuggagaacau

SEQ ID NO: 1971747 - RNA, 19 nt, Homo sapiens
  misc_RNA (1)...(19): siRNA sense strand
gaggugacccugagagugu

SEQ ID NO: 1971748 - RNA, 19 nt, Homo sapiens
  misc_RNA (1)...(19): siRNA sense strand
gaagucagaggaggagauu

SEQ ID NO: 1971749 - RNA, 19 nt, Homo sapiens
  misc_RNA (1)...(19): siRNA sense strand
ucaaacacaagaugaagaa

SEQ ID NO: 1971750 - RNA, 19 nt, Homo sapiens
  misc_RNA (1)...(19): siRNA sense strand
ccaucaaggugcuggagaa

SEQ ID NO: 1971751 - RNA, 19 nt, Homo sapiens
  misc_RNA (1)...(19): siRNA sense strand
acugcaaucucuucaacua

SEQ ID NO: 1971752 - RNA, 19 nt, Homo sapiens
  misc_RNA (1)...(19): siRNA sense strand
gaagaagaugggacagaga

SEQ ID NO: 1971753 - RNA, 19 nt, Homo sapiens
  misc_RNA (1)...(19): siRNA sense strand
acaaaacugucucagauuu

SEQ ID NO: 1971754 - RNA, 19 nt, Homo sapiens
  misc_RNA (1)...(19): siRNA sense strand
gaccagaagguguaugaga

SEQ ID NO: 1971755 - RNA, 19 nt, Homo sapiens
  misc_RNA (1)...(19): siRNA sense strand
ggucaccacauacuauuau

SEQ ID NO: 1971756 - RNA, 19 nt, Homo sapiens
  misc_RNA (1)...(19): siRNA sense strand
gauccagcuucuugucuuc

SEQ ID NO: 1971757 - RNA, 19 nt, Homo sapiens
  misc_RNA (1)...(19): siRNA sense strand
cuuaugaacgucaguauga

SEQ ID NO: 1971758 - RNA, 19 nt, Homo sapiens
  misc_RNA (1)...(19): siRNA sense strand
gagcagagguuugaauccu

SEQ ID NO: 1971759 - RNA, 19 nt, Homo sapiens
  misc_RNA (1)...(19): siRNA sense strand
ccagucgugucuccaguga

SEQ ID NO: 1971760 - RNA, 19 nt, Homo sapiens
  misc_RNA (1)...(19): siRNA sense strand
gaguucaucuaccaguuuc

SEQ ID NO: 1971761 - RNA, 19 nt, Homo sapiens
  misc_RNA (1)...(19): siRNA sense strand
caaaaugcuugguuacuuc

SEQ ID NO: 1971762 - RNA, 19 nt, Homo sapiens
  misc_RNA (1)...(19): siRNA sense strand
aaucgaacccugaagaaga

SEQ ID NO: 1971763 - RNA, 19 nt, Homo sapiens
  misc_RNA (1)...(19): siRNA sense strand
ggguuugcauauuugauga

SEQ ID NO: 1971764 - RNA, 19 nt, Homo sapiens
  misc_RNA (1)...(19): siRNA sense strand
ugaauccuauuacaacuac

SEQ ID NO: 1971765 - RNA, 19 nt, Homo sapiens
  misc_RNA (1)...(19): siRNA sense strand
gaagguguuuucugaugaa

SEQ ID NO: 1971766 - RNA, 19 nt, Homo sapiens
  misc_RNA (1)...(19): siRNA sense strand
gaggaccacguacaaguau

SEQ ID NO: 1971767 - RNA, 19 nt, Homo sapiens
  misc_RNA (1)...(19): siRNA sense strand
gagaacaucgaacugaaca

SEQ ID NO: 1971768 - RNA, 19 nt, Homo sapiens
  misc_RNA (1)...(19): siRNA sense strand
uggagaacaucgaacugaa

SEQ ID NO: 1971769 - RNA, 19 nt, Homo sapiens
  misc_RNA (1)...(19): siRNA sense strand
caacuacugcaaucucuuc

SEQ ID NO: 1971770 - RNA, 19 nt, Homo sapiens
  misc_RNA (1)...(19): siRNA sense strand
caacauccuccucuacauc

SEQ ID NO: 1971771 - RNA, 19 nt, Homo sapiens
  misc_RNA (1)...(19): siRNA sense strand
gguguuuucugaugaagua

SEQ ID NO: 1971772 - RNA, 19 nt, Homo sapiens
  misc_RNA (1)...(19): siRNA sense strand
ccacaagucuaugaagaac

SEQ ID NO: 1971773 - RNA, 19 nt, Homo sapiens
  misc_RNA (1)...(19): siRNA sense strand
uguaugagauccaggacau

SEQ ID NO: 1971774 - RNA, 19 nt, Homo sapiens
  misc_RNA (1)...(19): siRNA sense strand
cuucuugucuucaaacaca

SEQ ID NO: 1971775 - RNA, 19 nt, Homo sapiens
  misc_RNA (1)...(19): siRNA sense strand
ugauuaacaagcagaauga

SEQ ID NO: 1971776 - RNA, 19 nt, Homo sapiens
  misc_RNA (1)...(19): siRNA sense strand
guucauaguguccucaaug

SEQ ID NO: 1971777 - RNA, 19 nt, Homo sapiens
  misc_RNA (1)...(19): siRNA sense strand
ucuggaauguucauagugu

SEQ ID NO: 1971778 - RNA, 19 nt, Homo sapiens
  misc_RNA (1)...(19): siRNA sense strand
agucugaggcggcuuauga

SEQ ID NO: 1971779 - RNA, 19 nt, Homo sapiens
  misc_RNA (1)...(19): siRNA sense strand
uggcaaugaugcugucuuc

SEQ ID NO: 1971780 - RNA, 19 nt, Homo sapiens
  misc_RNA (1)...(19): siRNA sense strand
uccaggacaucuaugagaa

SEQ ID NO: 1971781 - RNA, 19 nt, Homo sapiens
  misc_RNA (1)...(19): siRNA sense strand
ugaacaagaagaguaugua

SEQ ID NO: 1971782 - RNA, 19 nt, Homo sapiens
  misc_RNA (1)...(19): siRNA sense strand
gcaaucucuucaacuacau

SEQ ID NO: 1971783 - RNA, 19 nt, Homo sapiens
  misc_RNA (1)...(19): siRNA sense strand
ugauugaccagaaagugua

SEQ ID NO: 1971784 - RNA, 19 nt, Homo sapiens
  misc_RNA (1)...(19): siRNA sense strand
ccaacauccuccucuacau

SEQ ID NO: 1971785 - RNA, 19 nt, Homo sapiens
  misc_RNA (1)...(19): siRNA sense strand
aggaggagauugacuuucu

SEQ ID NO: 1971786 - RNA, 19 nt, Homo sapiens
  misc_RNA (1)...(19): siRNA sense strand
agucgugucuccagugaug

SEQ ID NO: 1971787 - RNA, 19 nt, Homo sapiens
  misc_RNA (1)...(19): siRNA sense strand
agcccuggauggugaauuu

SEQ ID NO: 1971788 - RNA, 19 nt, Homo sapiens
  misc_RNA (1)...(19): siRNA sense strand
agaggaccacguacaagua

SEQ ID NO: 1971789 - RNA, 19 nt, Homo sapiens
  misc_RNA (1)...(19): siRNA sense strand
ccaggucaccacauacuau

SEQ ID NO: 1971790 - RNA, 19 nt, Homo sapiens
  misc_RNA (1)...(19): siRNA sense strand
ucuaccaguuucagucauu

SEQ ID NO: 1971791 - RNA, 19 nt, Homo sapiens
  misc_RNA (1)...(19): siRNA sense strand
cucuucaacuacauucuua

SEQ ID NO: 1971792 - RNA, 19 nt, Homo sapiens
  misc_RNA (1)...(19): siRNA sense strand
ccaagcugacugaaagauu

SEQ ID NO: 1971793 - RNA, 19 nt, Homo sapiens
  misc_RNA (1)...(19): siRNA sense strand
agauuugauugaccagaaa

SEQ ID NO: 1971794 - RNA, 19 nt, Homo sapiens
  misc_RNA (1)...(19): siRNA sense strand
cuacauugauaaggacaug

SEQ ID NO: 1971795 - RNA, 19 nt, Homo sapiens
  misc_RNA (1)...(19): siRNA sense strand
caagcagaaugagcagaug

SEQ ID NO: 1971796 - RNA, 19 nt, Homo sapiens
  misc_RNA (1)...(19): siRNA sense strand
agacaaauccaacaucaac

SEQ ID NO: 1971797 - RNA, 19 nt, Homo sapiens
  misc_RNA (1)...(19): siRNA sense strand
ugaguucaucuaccaguuu

SEQ ID NO: 1971798 - RNA, 19 nt, Homo sapiens
  misc_RNA (1)...(19): siRNA sense strand
uauuacaacuacugcaauc

SEQ ID NO: 1971799 - RNA, 19 nt, Homo sapiens
  misc_RNA (1)...(19): siRNA sense strand
ucauugaccagaaggugua

SEQ ID NO: 1971800 - RNA, 19 nt, Homo sapiens
  misc_RNA (1)...(19): siRNA sense strand
auaaggacaugauccacau

SEQ ID NO: 1971801 - RNA, 19 nt, Homo sapiens
  misc_RNA (1)...(19): siRNA sense strand
ccacguacaaguaugagau

SEQ ID NO: 1971802 - RNA, 19 nt, Homo sapiens
  misc_RNA (1)...(19): siRNA sense strand
aaucuggaauguucauagu

SEQ ID NO: 1971803 - RNA, 19 nt, Homo sapiens
  misc_RNA (1)...(19): siRNA sense strand
agucagaggaggagauuga

SEQ ID NO: 1971804 - RNA, 19 nt, Homo sapiens
  misc_RNA (1)...(19): siRNA sense strand
ugcaaucucuucaacuaca

SEQ ID NO: 1971805 - RNA, 19 nt, Homo sapiens
  misc_RNA (1)...(19): siRNA sense strand
cuacugcaaucucuucaac

SEQ ID NO: 1971806 - RNA, 19 nt, Homo sapiens
  misc_RNA (1)...(19): siRNA sense strand
cuccacagguuggcaauga

SEQ ID NO: 1971807 - RNA, 19 nt, Homo sapiens
  misc_RNA (1)...(19): siRNA sense strand
ugucuccagugaugucauu

SEQ ID NO: 1971808 - RNA, 19 nt, Homo sapiens
  misc_RNA (1)...(19): siRNA sense strand
agugccaggucaccacaua

SEQ ID NO: 1971809 - RNA, 19 nt, Homo sapiens
  misc_RNA (1)...(19): siRNA sense strand
cccaaaaucuggaauguuc

SEQ ID NO: 1971810 - RNA, 19 nt, Homo sapiens
  misc_RNA (1)...(19): siRNA sense strand
cagaggaggagauugacuu

SEQ ID NO: 1971811 - RNA, 19 nt, Homo sapiens
  misc_RNA (1)...(19): siRNA sense strand
gcaaugaugcugucuuccu

SEQ ID NO: 1971812 - RNA, 19 nt, Homo sapiens
  misc_RNA (1)...(19): siRNA sense strand
gcagcaggcccagcuuuca

SEQ ID NO: 1971813 - RNA, 19 nt, Homo sapiens
  misc_RNA (1)...(19): siRNA sense strand
ggaccaagagcauguucca

SEQ ID NO: 1971814 - RNA, 19 nt, Homo sapiens
  misc_RNA (1)...(19): siRNA sense strand
gugcccaacuaugauaaug

SEQ ID NO: 1971815 - RNA, 19 nt, Homo sapiens
  misc_RNA (1)...(19): siRNA sense strand
gagaagcccuuuauaugug

SEQ ID NO: 1971816 - RNA, 19 nt, Homo sapiens
  misc_RNA (1)...(19): siRNA sense strand
gggcggaccuucagcgaua

SEQ ID NO: 1971817 - RNA, 19 nt, Homo sapiens
  misc_RNA (1)...(19): siRNA sense strand
gcaagaaacucauccaaaa

SEQ ID NO: 1971818 - RNA, 19 nt, Homo sapiens
  misc_RNA (1)...(19): siRNA sense strand
ggcaaaaccuucaauaaua

SEQ ID NO: 1971819 - RNA, 19 nt, Homo sapiens
  misc_RNA (1)...(19): siRNA sense strand
gaugagaagcccuuuauau

SEQ ID NO: 1971820 - RNA, 19 nt, Homo sapiens
  misc_RNA (1)...(19): siRNA sense strand
gaagagaaacacuacaaau

SEQ ID NO: 1971821 - RNA, 19 nt, Homo sapiens
  misc_RNA (1)...(19): siRNA sense strand
ugagaagccuuacaagugu

SEQ ID NO: 1971822 - RNA, 19 nt, Homo sapiens
  misc_RNA (1)...(19): siRNA sense strand
uuacaaguguucugaaugu

SEQ ID NO: 1971823 - RNA, 19 nt, Homo sapiens
  misc_RNA (1)...(19): siRNA sense strand
gaacaggcugggaaagauu

SEQ ID NO: 1971824 - RNA, 19 nt, Homo sapiens
  misc_RNA (1)...(19): siRNA sense strand
ggaagagaaacacuacaaa

SEQ ID NO: 1971825 - RNA, 19 nt, Homo sapiens
  misc_RNA (1)...(19): siRNA sense strand
gugagaagccuuacaagug

SEQ ID NO: 1971826 - RNA, 19 nt, Homo sapiens
  misc_RNA (1)...(19): siRNA sense strand
gcagaugagaagcccuuua

SEQ ID NO: 1971827 - RNA, 19 nt, Homo sapiens
  misc_RNA (1)...(19): siRNA sense strand
ugagaagcccuuuauaugu

SEQ ID NO: 1971828 - RNA, 19 nt, Homo sapiens
  misc_RNA (1)...(19): siRNA sense strand
aagagagccugucggauga

SEQ ID NO: 1971829 - RNA, 19 nt, Homo sapiens
  misc_RNA (1)...(19): siRNA sense strand
gauccacacuggugagaag

SEQ ID NO: 1971830 - RNA, 19 nt, Homo sapiens
  misc_RNA (1)...(19): siRNA sense strand
gagaagccuuacaaguguu

SEQ ID NO: 1971831 - RNA, 19 nt, Homo sapiens
  misc_RNA (1)...(19): siRNA sense strand
gcaaaaccuucaauaauac

SEQ ID NO: 1971832 - RNA, 19 nt, Homo sapiens
  misc_RNA (1)...(19): siRNA sense strand
cgaacaggcugggaaagau

SEQ ID NO: 1971833 - RNA, 19 nt, Homo sapiens
  misc_RNA (1)...(19): siRNA sense strand
ucccggagcucgaaucuca

SEQ ID NO: 1971834 - RNA, 19 nt, Homo sapiens
  misc_RNA (1)...(19): siRNA sense strand
ggugagagaccuuaugagu

SEQ ID NO: 1971835 - RNA, 19 nt, Homo sapiens
  misc_RNA (1)...(19): siRNA sense strand
ucagcgauaucuccaacuu

SEQ ID NO: 1971836 - RNA, 19 nt, Homo sapiens
  misc_RNA (1)...(19): siRNA sense strand
cggaugaacugcaagaaac

SEQ ID NO: 1971837 - RNA, 19 nt, Homo sapiens
  misc_RNA (1)...(19): siRNA sense strand
cagaugagaagcccuuuau

SEQ ID NO: 1971838 - RNA, 19 nt, Homo sapiens
  misc_RNA (1)...(19): siRNA sense strand
gaaggagcaugggcaagag

SEQ ID NO: 1971839 - RNA, 19 nt, Homo sapiens
  misc_RNA (1)...(19): siRNA sense strand
aagagaaacacuacaaaug

SEQ ID NO: 1971840 - RNA, 19 nt, Homo sapiens
  misc_RNA (1)...(19): siRNA sense strand
agcgauaucuccaacuuug

SEQ ID NO: 1971841 - RNA, 19 nt, Homo sapiens
  misc_RNA (1)...(19): siRNA sense strand
gaacugcaagaaacucauc

SEQ ID NO: 1971842 - RNA, 19 nt, Homo sapiens
  misc_RNA (1)...(19): siRNA sense strand
gcgaacaggcugggaaaga

SEQ ID NO: 1971843 - RNA, 19 nt, Homo sapiens
  misc_RNA (1)...(19): siRNA sense strand
ggugagaagccuuacaagu

SEQ ID NO: 1971844 - RNA, 19 nt, Homo sapiens
  misc_RNA (1)...(19): siRNA sense strand
gcaccagcaagaucaccua

SEQ ID NO: 1971845 - RNA, 19 nt, Homo sapiens
  misc_RNA (1)...(19): siRNA sense strand
caaggcaugaggcagauga

SEQ ID NO: 1971846 - RNA, 19 nt, Homo sapiens
  misc_RNA (1)...(19): siRNA sense strand
acacuggugagaagccuua

SEQ ID NO: 1971847 - RNA, 19 nt, Homo sapiens
  misc_RNA (1)...(19): siRNA sense strand
gcaugaggcagaugagaag

SEQ ID NO: 1971848 - RNA, 19 nt, Homo sapiens
  misc_RNA (1)...(19): siRNA sense strand
ccacgcaccagcaagauca

SEQ ID NO: 1971849 - RNA, 19 nt, Homo sapiens
  misc_RNA (1)...(19): siRNA sense strand
ggagcagaguccagaacca

SEQ ID NO: 1971850 - RNA, 19 nt, Homo sapiens
  misc_RNA (1)...(19): siRNA sense strand
gaaggagcagaguccagaa

SEQ ID NO: 1971851 - RNA, 19 nt, Homo sapiens
  misc_RNA (1)...(19): siRNA sense strand
ggcaugaggcagaugagaa

SEQ ID NO: 1971852 - RNA, 19 nt, Homo sapiens
  misc_RNA (1)...(19): siRNA sense strand
cuacaucugcugugagugu

SEQ ID NO: 1971853 - RNA, 19 nt, Homo sapiens
  misc_RNA (1)...(19): siRNA sense strand
augagaagcccuuuauaug

SEQ ID NO: 1971854 - RNA, 19 nt, Homo sapiens
  misc_RNA (1)...(19): siRNA sense strand
agagaaacacuacaaaugc

SEQ ID NO: 1971855 - RNA, 19 nt, Homo sapiens
  misc_RNA (1)...(19): siRNA sense strand
ccuuacaaguguucugaau

SEQ ID NO: 1971856 - RNA, 19 nt, Homo sapiens
  misc_RNA (1)...(19): siRNA sense strand
ugugacaucuguggcaaga

SEQ ID NO: 1971857 - RNA, 19 nt, Homo sapiens
  misc_RNA (1)...(19): siRNA sense strand
agaaggagcaugggcaaga

SEQ ID NO: 1971858 - RNA, 19 nt, Homo sapiens
  misc_RNA (1)...(19): siRNA sense strand
ggagccagcacccuacauc

SEQ ID NO: 1971859 - RNA, 19 nt, Homo sapiens
  misc_RNA (1)...(19): siRNA sense strand
gaacacaccagcggaucca

SEQ ID NO: 1971860 - RNA, 19 nt, Homo sapiens
  misc_RNA (1)...(19): siRNA sense strand
gggcgaacaggcugggaaa

SEQ ID NO: 1971861 - RNA, 19 nt, Homo sapiens
  misc_RNA (1)...(19): siRNA sense strand
cuuuauaugugcccagugu

SEQ ID NO: 1971862 - RNA, 19 nt, Homo sapiens
  misc_RNA (1)...(19): siRNA sense strand
gaccuuaugagugcacuga

SEQ ID NO: 1971863 - RNA, 19 nt, Homo sapiens
  misc_RNA (1)...(19): siRNA sense strand
ugcaagaaacucauccaaa

SEQ ID NO: 1971864 - RNA, 19 nt, Homo sapiens
  misc_RNA (1)...(19): siRNA sense strand
cacccuacaucugcuguga

SEQ ID NO: 1971865 - RNA, 19 nt, Homo sapiens
  misc_RNA (1)...(19): siRNA sense strand
ccauaccgcugugacaucu

SEQ ID NO: 1971866 - RNA, 19 nt, Homo sapiens
  misc_RNA (1)...(19): siRNA sense strand
uggaagagaaacacuacaa

SEQ ID NO: 1971867 - RNA, 19 nt, Homo sapiens
  misc_RNA (1)...(19): siRNA sense strand
ucaccacgcaccagcaaga

SEQ ID NO: 1971868 - RNA, 19 nt, Homo sapiens
  misc_RNA (1)...(19): siRNA sense strand
ccaagugccaggagagcuu

SEQ ID NO: 1971869 - RNA, 19 nt, Homo sapiens
  misc_RNA (1)...(19): siRNA sense strand
ccuccaaccugagaacaca

SEQ ID NO: 1971870 - RNA, 19 nt, Homo sapiens
  misc_RNA (1)...(19): siRNA sense strand
ucucauccgccaccagaaa

SEQ ID NO: 1971871 - RNA, 19 nt, Homo sapiens
  misc_RNA (1)...(19): siRNA sense strand
gaauguggcaagagcuucu

SEQ ID NO: 1971872 - RNA, 19 nt, Homo sapiens
  misc_RNA (1)...(19): siRNA sense strand
uaauaccuccaaccugaga

SEQ ID NO: 1971873 - RNA, 19 nt, Homo sapiens
  misc_RNA (1)...(19): siRNA sense strand
ucggaugaacugcaagaaa

SEQ ID NO: 1971874 - RNA, 19 nt, Homo sapiens
  misc_RNA (1)...(19): siRNA sense strand
cagcgauaucuccaacuuu

SEQ ID NO: 1971875 - RNA, 19 nt, Homo sapiens
  misc_RNA (1)...(19): siRNA sense strand
gagccugucggaugaacug

SEQ ID NO: 1971876 - RNA, 19 nt, Homo sapiens
  misc_RNA (1)...(19): siRNA sense strand
ccugucggaugaacugcaa

SEQ ID NO: 1971877 - RNA, 19 nt, Homo sapiens
  misc_RNA (1)...(19): siRNA sense strand
aaacucacuugggcgaaca

SEQ ID NO: 1971878 - RNA, 19 nt, Homo sapiens
  misc_RNA (1)...(19): siRNA sense strand
agaugagaagcccuuuaua

SEQ ID NO: 1971879 - RNA, 19 nt, Homo sapiens
  misc_RNA (1)...(19): siRNA sense strand
ucaauaauaccuccaaccu

SEQ ID NO: 1971880 - RNA, 19 nt, Homo sapiens
  misc_RNA (1)...(19): siRNA sense strand
gugaacagauuaaggauaa

SEQ ID NO: 1971881 - RNA, 19 nt, Homo sapiens
  misc_RNA (1)...(19): siRNA sense strand
caaauugcaucucuacuug

SEQ ID NO: 1971882 - RNA, 19 nt, Homo sapiens
  misc_RNA (1)...(19): siRNA sense strand
aaacuugucuaccauauug

SEQ ID NO: 1971883 - RNA, 19 nt, Homo sapiens
  misc_RNA (1)...(19): siRNA sense strand
guacaggauuuguuuauag

SEQ ID NO: 1971884 - RNA, 19 nt, Homo sapiens
  misc_RNA (1)...(19): siRNA sense strand
gaccaaagccaccuauuga

SEQ ID NO: 1971885 - RNA, 19 nt, Homo sapiens
  misc_RNA (1)...(19): siRNA sense strand
ugaucuaccuccugaauuu

SEQ ID NO: 1971886 - RNA, 19 nt, Homo sapiens
  misc_RNA (1)...(19): siRNA sense strand
caagccagaucacugagua

SEQ ID NO: 1971887 - RNA, 19 nt, Homo sapiens
  misc_RNA (1)...(19): siRNA sense strand
caacaaacacagcuacuug

SEQ ID NO: 1971888 - RNA, 19 nt, Homo sapiens
  misc_RNA (1)...(19): siRNA sense strand
gugcaggcauucuguauug

SEQ ID NO: 1971889 - RNA, 19 nt, Homo sapiens
  misc_RNA (1)...(19): siRNA sense strand
ggaccaaagccaccuauug

SEQ ID NO: 1971890 - RNA, 19 nt, Homo sapiens
  misc_RNA (1)...(19): siRNA sense strand
gauaaaucgauguguguua

SEQ ID NO: 1971891 - RNA, 19 nt, Homo sapiens
  misc_RNA (1)...(19): siRNA sense strand
gcacugguguggagaucaa

SEQ ID NO: 1971892 - RNA, 19 nt, Homo sapiens
  misc_RNA (1)...(19): siRNA sense strand
gaaguuguaaaucgacuaa

SEQ ID NO: 1971893 - RNA, 19 nt, Homo sapiens
  misc_RNA (1)...(19): siRNA sense strand
aaagacgccucgccagauu

SEQ ID NO: 1971894 - RNA, 19 nt, Homo sapiens
  misc_RNA (1)...(19): siRNA sense strand
ccagaucacugaguauuuc

SEQ ID NO: 1971895 - RNA, 19 nt, Homo sapiens
  misc_RNA (1)...(19): siRNA sense strand
ggagaucaaacgaauaaug

SEQ ID NO: 1971896 - RNA, 19 nt, Homo sapiens
  misc_RNA (1)...(19): siRNA sense strand
ccaaagccaccuauugaaa

SEQ ID NO: 1971897 - RNA, 19 nt, Homo sapiens
  misc_RNA (1)...(19): siRNA sense strand
ucagaucacagaagcuuua

SEQ ID NO: 1971898 - RNA, 19 nt, Homo sapiens
  misc_RNA (1)...(19): siRNA sense strand
gauggacguuggaaacaug

SEQ ID NO: 1971899 - RNA, 19 nt, Homo sapiens
  misc_RNA (1)...(19): siRNA sense strand
ucaguugccucucagauca

SEQ ID NO: 1971900 - RNA, 19 nt, Homo sapiens
  misc_RNA (1)...(19): siRNA sense strand
ccaaacuugucuaccauau

SEQ ID NO: 1971901 - RNA, 19 nt, Homo sapiens
  misc_RNA (1)...(19): siRNA sense strand
guggagaucaaacgaauaa

SEQ ID NO: 1971902 - RNA, 19 nt, Homo sapiens
  misc_RNA (1)...(19): siRNA sense strand
caauggaaguuguaaaucg

SEQ ID NO: 1971903 - RNA, 19 nt, Homo sapiens
  misc_RNA (1)...(19): siRNA sense strand
cuauagaaauguugcugaa

SEQ ID NO: 1971904 - RNA, 19 nt, Homo sapiens
  misc_RNA (1)...(19): siRNA sense strand
gaagugcaggcauucugua

SEQ ID NO: 1971905 - RNA, 19 nt, Homo sapiens
  misc_RNA (1)...(19): siRNA sense strand
gaucuaccuccugaauuua

SEQ ID NO: 1971906 - RNA, 19 nt, Homo sapiens
  misc_RNA (1)...(19): siRNA sense strand
gacccggauucuucuaauu

SEQ ID NO: 1971907 - RNA, 19 nt, Homo sapiens
  misc_RNA (1)...(19): siRNA sense strand
guaaaucgacuaacuacag

SEQ ID NO: 1971908 - RNA, 19 nt, Homo sapiens
  misc_RNA (1)...(19): siRNA sense strand
cgauguguguuaagaauag

SEQ ID NO: 1971909 - RNA, 19 nt, Homo sapiens
  misc_RNA (1)...(19): siRNA sense strand
gaucacagaagcuuuaguc

SEQ ID NO: 1971910 - RNA, 19 nt, Homo sapiens
  misc_RNA (1)...(19): siRNA sense strand
cagcaaggccgaccacuuc

SEQ ID NO: 1971911 - RNA, 19 nt, Homo sapiens
  misc_RNA (1)...(19): siRNA sense strand
caauauggacaugucuuua

SEQ ID NO: 1971912 - RNA, 19 nt, Homo sapiens
  misc_RNA (1)...(19): siRNA sense strand
caaacuuccugaccuugug

SEQ ID NO: 1971913 - RNA, 19 nt, Homo sapiens
  misc_RNA (1)...(19): siRNA sense strand
gagaucaaacgaauaaugg

SEQ ID NO: 1971914 - RNA, 19 nt, Homo sapiens
  misc_RNA (1)...(19): siRNA sense strand
agaccgaaaugucaaaaua

SEQ ID NO: 1971915 - RNA, 19 nt, Homo sapiens
  misc_RNA (1)...(19): siRNA sense strand
ucaaauugcaucucuacuu

SEQ ID NO: 1971916 - RNA, 19 nt, Homo sapiens
  misc_RNA (1)...(19): siRNA sense strand
uuuagucgcuauagaaaug

SEQ ID NO: 1971917 - RNA, 19 nt, Homo sapiens
  misc_RNA (1)...(19): siRNA sense strand
gaacuugcuuggcuaaacc

SEQ ID NO: 1971918 - RNA, 19 nt, Homo sapiens
  misc_RNA (1)...(19): siRNA sense strand
uuauagaagugcaggcauu

SEQ ID NO: 1971919 - RNA, 19 nt, Homo sapiens
  misc_RNA (1)...(19): siRNA sense strand
gcccuccgcucucaggauu

SEQ ID NO: 1971920 - RNA, 19 nt, Homo sapiens
  misc_RNA (1)...(19): siRNA sense strand
ugaaauuaaugcagucaag

SEQ ID NO: 1971921 - RNA, 19 nt, Homo sapiens
  misc_RNA (1)...(19): siRNA sense strand
ggauuugacagcucaguug

SEQ ID NO: 1971922 - RNA, 19 nt, Homo sapiens
  misc_RNA (1)...(19): siRNA sense strand
ggauuuguuuauagaagug

SEQ ID NO: 1971923 - RNA, 19 nt, Homo sapiens
  misc_RNA (1)...(19): siRNA sense strand
ucucuguccuggucaauau

SEQ ID NO: 1971924 - RNA, 19 nt, Homo sapiens
  misc_RNA (1)...(19): siRNA sense strand
aacuacagcuguugaucua

SEQ ID NO: 1971925 - RNA, 19 nt, Homo sapiens
  misc_RNA (1)...(19): siRNA sense strand
uguauugaauucaguagga

SEQ ID NO: 1971926 - RNA, 19 nt, Homo sapiens
  misc_RNA (1)...(19): siRNA sense strand
gggccagucuguggacauu

SEQ ID NO: 1971927 - RNA, 19 nt, Homo sapiens
  misc_RNA (1)...(19): siRNA sense strand
ucaauauggacaugucuuu

SEQ ID NO: 1971928 - RNA, 19 nt, Homo sapiens
  misc_RNA (1)...(19): siRNA sense strand
caaagccaccuauugaaag

SEQ ID NO: 1971929 - RNA, 19 nt, Homo sapiens
  misc_RNA (1)...(19): siRNA sense strand
gcaggcauucuguauugaa

SEQ ID NO: 1971930 - RNA, 19 nt, Homo sapiens
  misc_RNA (1)...(19): siRNA sense strand
acgagaagcugcuggucuu

SEQ ID NO: 1971931 - RNA, 19 nt, Homo sapiens
  misc_RNA (1)...(19): siRNA sense strand
caaacuugucuaccauauu

SEQ ID NO: 1971932 - RNA, 19 nt, Homo sapiens
  misc_RNA (1)...(19): siRNA sense strand
gccagucuguggacauuag

SEQ ID NO: 1971933 - RNA, 19 nt, Homo sapiens
  misc_RNA (1)...(19): siRNA sense strand
uccuauaacuccaccagaa

SEQ ID NO: 1971934 - RNA, 19 nt, Homo sapiens
  misc_RNA (1)...(19): siRNA sense strand
guguggagaucaaacgaau

SEQ ID NO: 1971935 - RNA, 19 nt, Homo sapiens
  misc_RNA (1)...(19): siRNA sense strand
gaugaacuugcuuggcuaa

SEQ ID NO: 1971936 - RNA, 19 nt, Homo sapiens
  misc_RNA (1)...(19): siRNA sense strand
gggauaaaucgaugugugu

SEQ ID NO: 1971937 - RNA, 19 nt, Homo sapiens
  misc_RNA (1)...(19): siRNA sense strand
guuguaaaucgacuaacua

SEQ ID NO: 1971938 - RNA, 19 nt, Homo sapiens
  misc_RNA (1)...(19): siRNA sense strand
aaaucgauguguguuaaga

SEQ ID NO: 1971939 - RNA, 19 nt, Homo sapiens
  misc_RNA (1)...(19): siRNA sense strand
gccagaucacugaguauuu

SEQ ID NO: 1971940 - RNA, 19 nt, Homo sapiens
  misc_RNA (1)...(19): siRNA sense strand
ucacugaguauuucucugu

SEQ ID NO: 1971941 - RNA, 19 nt, Homo sapiens
  misc_RNA (1)...(19): siRNA sense strand
cauuagugggcuucaguua

SEQ ID NO: 1971942 - RNA, 19 nt, Homo sapiens
  misc_RNA (1)...(19): siRNA sense strand
caggauuuguuuauagaag

SEQ ID NO: 1971943 - RNA, 19 nt, Homo sapiens
  misc_RNA (1)...(19): siRNA sense strand
acagcuacuuggugaguug

SEQ ID NO: 1971944 - RNA, 19 nt, Homo sapiens
  misc_RNA (1)...(19): siRNA sense strand
gaaacaugggccagucugu

SEQ ID NO: 1971945 - RNA, 19 nt, Homo sapiens
  misc_RNA (1)...(19): siRNA sense strand
uaacuacagcuguugaucu

SEQ ID NO: 1971946 - RNA, 19 nt, Homo sapiens
  misc_RNA (1)...(19): siRNA sense strand
ccaccgccuuccaccacua

SEQ ID NO: 1971947 - RNA, 19 nt, Homo sapiens
  misc_RNA (1)...(19): siRNA sense strand
aauggaaguuguaaaucga

SEQ ID NO: 1971948 - RNA, 19 nt, Homo sapiens
  misc_RNA (1)...(19): siRNA sense strand
uccaauccuugauccguaa

SEQ ID NO: 1971949 - RNA, 19 nt, Homo sapiens
  misc_RNA (1)...(19): siRNA sense strand
ggaaguuguaaaucgacua

SEQ ID NO: 1971950 - RNA, 19 nt, Homo sapiens
  misc_RNA (1)...(19): siRNA sense strand
ggauaaaucgauguguguu

SEQ ID NO: 1971951 - RNA, 19 nt, Homo sapiens
  misc_RNA (1)...(19): siRNA sense strand
ccuauaacuccaccagaaa

SEQ ID NO: 1971952 - RNA, 19 nt, Homo sapiens
  misc_RNA (1)...(19): siRNA sense strand
cgccuccacuccacauuug

SEQ ID NO: 1971953 - RNA, 19 nt, Homo sapiens
  misc_RNA (1)...(19): siRNA sense strand
cuacuugugaacagauuaa

SEQ ID NO: 1971954 - RNA, 19 nt, Homo sapiens
  misc_RNA (1)...(19): siRNA sense strand
uugcaucucuacuugugaa

SEQ ID NO: 1971955 - RNA, 19 nt, Homo sapiens
  misc_RNA (1)...(19): siRNA sense strand
gcacugauggacguuggaa

SEQ ID NO: 1971956 - RNA, 19 nt, Homo sapiens
  misc_RNA (1)...(19): siRNA sense strand
guauugaauucaguaggau

SEQ ID NO: 1971957 - RNA, 19 nt, Homo sapiens
  misc_RNA (1)...(19): siRNA sense strand
guuggugcgucuugugugu

SEQ ID NO: 1971958 - RNA, 19 nt, Homo sapiens
  misc_RNA (1)...(19): siRNA sense strand
ucgacuaacuacagcuguu

SEQ ID NO: 1971959 - RNA, 19 nt, Homo sapiens
  misc_RNA (1)...(19): siRNA sense strand
ccaacaaacacagcuacuu

SEQ ID NO: 1971960 - RNA, 19 nt, Homo sapiens
  misc_RNA (1)...(19): siRNA sense strand
gccgaacgccaaucugaau

SEQ ID NO: 1971961 - RNA, 19 nt, Homo sapiens
  misc_RNA (1)...(19): siRNA sense strand
gcuacuuggugaguuggaa

SEQ ID NO: 1971962 - RNA, 19 nt, Homo sapiens
  misc_RNA (1)...(19): siRNA sense strand
gcucggugcucgucaugcu

SEQ ID NO: 1971963 - RNA, 19 nt, Homo sapiens
  misc_RNA (1)...(19): siRNA sense strand
ggacauuagugggcuucag

SEQ ID NO: 1971964 - RNA, 19 nt, Homo sapiens
  misc_RNA (1)...(19): siRNA sense strand
uuagugggcuucaguuagc

SEQ ID NO: 1971965 - RNA, 19 nt, Homo sapiens
  misc_RNA (1)...(19): siRNA sense strand
ggaaaacaacccuuuaguc

SEQ ID NO: 1971966 - RNA, 19 nt, Homo sapiens
  misc_RNA (1)...(19): siRNA sense strand
ugaacuugcuuggcuaaac

SEQ ID NO: 1971967 - RNA, 19 nt, Homo sapiens
  misc_RNA (1)...(19): siRNA sense strand
ugaauucaguaggauacga

SEQ ID NO: 1971968 - RNA, 19 nt, Homo sapiens
  misc_RNA (1)...(19): siRNA sense strand
aauugcaucucuacuugug

SEQ ID NO: 1971969 - RNA, 19 nt, Homo sapiens
  misc_RNA (1)...(19): siRNA sense strand
gacauuagugggcuucagu

SEQ ID NO: 1971970 - RNA, 19 nt, Homo sapiens
  misc_RNA (1)...(19): siRNA sense strand
gaccgaaaugucaaaauaa

SEQ ID NO: 1971971 - RNA, 19 nt, Homo sapiens
  misc_RNA (1)...(19): siRNA sense strand
agacccggauucuucuaau

SEQ ID NO: 1971972 - RNA, 19 nt, Homo sapiens
  misc_RNA (1)...(19): siRNA sense strand
ucuaccuccugaauuuauu

SEQ ID NO: 1971973 - RNA, 19 nt, Homo sapiens
  misc_RNA (1)...(19): siRNA sense strand
auauggacaugucuuuaca

SEQ ID NO: 1971974 - RNA, 19 nt, Homo sapiens
  misc_RNA (1)...(19): siRNA sense strand
agucaagccagaucacuga

SEQ ID NO: 1971975 - RNA, 19 nt, Homo sapiens
  misc_RNA (1)...(19): siRNA sense strand
ccaaacuuccugaccuugu

SEQ ID NO: 1971976 - RNA, 19 nt, Homo sapiens
  misc_RNA (1)...(19): siRNA sense strand
gaucacugaguauuucucu

SEQ ID NO: 1971977 - RNA, 19 nt, Homo sapiens
  misc_RNA (1)...(19): siRNA sense strand
uugaagacauuggauacug

SEQ ID NO: 1971978 - RNA, 19 nt, Homo sapiens
  misc_RNA (1)...(19): siRNA sense strand
ugugaacagauuaaggaua

SEQ ID NO: 1971979 - RNA, 19 nt, Homo sapiens
  misc_RNA (1)...(19): siRNA sense strand
ggccgaacgccaaucugaa

SEQ ID NO: 1971980 - RNA, 19 nt, Homo sapiens
  misc_RNA (1)...(19): siRNA sense strand
gcaaggcgguguacuacgu

SEQ ID NO: 1971981 - RNA, 19 nt, Homo sapiens
  misc_RNA (1)...(19): siRNA sense strand
cugcugagcuggaagacuu

SEQ ID NO: 1971982 - RNA, 19 nt, Homo sapiens
  misc_RNA (1)...(19): siRNA sense strand
uggagacucugaccgcuuu

SEQ ID NO: 1971983 - RNA, 19 nt, Homo sapiens
  misc_RNA (1)...(19): siRNA sense strand
gaaggaugucggucugcua

SEQ ID NO: 1971984 - RNA, 19 nt, Homo sapiens
  misc_RNA (1)...(19): siRNA sense strand
gcugcaaggcgguguacua

SEQ ID NO: 1971985 - RNA, 19 nt, Homo sapiens
  misc_RNA (1)...(19): siRNA sense strand
ccauggagcuccgaacuac

SEQ ID NO: 1971986 - RNA, 19 nt, Homo sapiens
  misc_RNA (1)...(19): siRNA sense strand
agacacugcugagcuggaa

SEQ ID NO: 1971987 - RNA, 19 nt, Homo sapiens
  misc_RNA (1)...(19): siRNA sense strand
gccuuggccuucuucaguu

SEQ ID NO: 1971988 - RNA, 19 nt, Homo sapiens
  misc_RNA (1)...(19): siRNA sense strand
gaacuaccccucagcugaa

SEQ ID NO: 1971989 - RNA, 19 nt, Homo sapiens
  misc_RNA (1)...(19): siRNA sense strand
ucugaccgcuuucgugcuu

SEQ ID NO: 1971990 - RNA, 19 nt, Homo sapiens
  misc_RNA (1)...(19): siRNA sense strand
ccgcuuucgugcuuccuuu

SEQ ID NO: 1971991 - RNA, 19 nt, Homo sapiens
  misc_RNA (1)...(19): siRNA sense strand
ggugagcgccaucgugcuu

SEQ ID NO: 1971992 - RNA, 19 nt, Homo sapiens
  misc_RNA (1)...(19): siRNA sense strand
cuucaccgcuggagaucug

SEQ ID NO: 1971993 - RNA, 19 nt, Homo sapiens
  misc_RNA (1)...(19): siRNA sense strand
ugugcgcgcucagcaugua

SEQ ID NO: 1971994 - RNA, 19 nt, Homo sapiens
  misc_RNA (1)...(19): siRNA sense strand
caucacaggugggguuuug

SEQ ID NO: 1971995 - RNA, 19 nt, Homo sapiens
  misc_RNA (1)...(19): siRNA sense strand
ggaacaugcugcagccuua

SEQ ID NO: 1971996 - RNA, 19 nt, Homo sapiens
  misc_RNA (1)...(19): siRNA sense strand
ggagaaagcugagcagauc

SEQ ID NO: 1971997 - RNA, 19 nt, Homo sapiens
  misc_RNA (1)...(19): siRNA sense strand
ucauugaccuuaacaagaa

SEQ ID NO: 1971998 - RNA, 19 nt, Homo sapiens
  misc_RNA (1)...(19): siRNA sense strand
gcaccaaccucuacuuugc

SEQ ID NO: 1971999 - RNA, 19 nt, Homo sapiens
  misc_RNA (1)...(19): siRNA sense strand
ggucacccauuacuucauu

SEQ ID NO: 1972000 - RNA, 19 nt, Homo sapiens
  misc_RNA (1)...(19): siRNA sense strand
gcaaccaucacaaggagua

SEQ ID NO: 1972001 - RNA, 19 nt, Homo sapiens
  misc_RNA (1)...(19): siRNA sense strand
acaagaaggagaauaagaa

SEQ ID NO: 1972002 - RNA, 19 nt, Homo sapiens
  misc_RNA (1)...(19): siRNA sense strand
uggcucagcuucaggagaa

SEQ ID NO: 1972003 - RNA, 19 nt, Homo sapiens
  misc_RNA (1)...(19): siRNA sense strand
gcucagcgccucuucaauc

SEQ ID NO: 1972004 - RNA, 19 nt, Homo sapiens
  misc_RNA (1)...(19): siRNA sense strand
ggagcgagacgguggaguu

SEQ ID NO: 1972005 - RNA, 19 nt, Homo sapiens
  misc_RNA (1)...(19): siRNA sense strand
guacacggccuaccacuac

SEQ ID NO: 1972006 - RNA, 19 nt, Homo sapiens
  misc_RNA (1)...(19): siRNA sense strand
ggacuucuacugcauguac

SEQ ID NO: 1972007 - RNA, 19 nt, Homo sapiens
  misc_RNA (1)...(19): siRNA sense strand
caagaaggagaauaagaau

SEQ ID NO: 1972008 - RNA, 19 nt, Homo sapiens
  misc_RNA (1)...(19): siRNA sense strand
gcgagacgguggaguucug

SEQ ID NO: 1972009 - RNA, 19 nt, Homo sapiens
  misc_RNA (1)...(19): siRNA sense strand
cagcaccaaccucuacuuu

SEQ ID NO: 1972010 - RNA, 19 nt, Homo sapiens
  misc_RNA (1)...(19): siRNA sense strand
uaagaauuccaacaaguuc

SEQ ID NO: 1972011 - RNA, 19 nt, Homo sapiens
  misc_RNA (1)...(19): siRNA sense strand
ggcaccagcucaugagucu

SEQ ID NO: 1972012 - RNA, 19 nt, Homo sapiens
  misc_RNA (1)...(19): siRNA sense strand
gcaccuggcucagcuucag

SEQ ID NO: 1972013 - RNA, 19 nt, Homo sapiens
  misc_RNA (1)...(19): siRNA sense strand
gcugcagccuuaccugaag

SEQ ID NO: 1972014 - RNA, 19 nt, Homo sapiens
  misc_RNA (1)...(19): siRNA sense strand
cagcucagcgccucuucaa

SEQ ID NO: 1972015 - RNA, 19 nt, Homo sapiens
  misc_RNA (1)...(19): siRNA sense strand
gcggacuucuacugcaugu

SEQ ID NO: 1972016 - RNA, 19 nt, Homo sapiens
  misc_RNA (1)...(19): siRNA sense strand
gaccucauccuggagauca

SEQ ID NO: 1972017 - RNA, 19 nt, Homo sapiens
  misc_RNA (1)...(19): siRNA sense strand
gcauguacacggccuacca

SEQ ID NO: 1972018 - RNA, 19 nt, Homo sapiens
  misc_RNA (1)...(19): siRNA sense strand
uaacaagaaggagaauaag

SEQ ID NO: 1972019 - RNA, 19 nt, Homo sapiens
  misc_RNA (1)...(19): siRNA sense strand
gagcgagacgguggaguuc

SEQ ID NO: 1972020 - RNA, 19 nt, Homo sapiens
  misc_RNA (1)...(19): siRNA sense strand
caccagcucaugagucugu

SEQ ID NO: 1972021 - RNA, 19 nt, Homo sapiens
  misc_RNA (1)...(19): siRNA sense strand
cuacugccgaugccaagaa

SEQ ID NO: 1972022 - RNA, 19 nt, Homo sapiens
  misc_RNA (1)...(19): siRNA sense strand
gcucaugagucugucuacu

SEQ ID NO: 1972023 - RNA, 19 nt, Homo sapiens
  misc_RNA (1)...(19): siRNA sense strand
aacaagaaggagaauaaga

SEQ ID NO: 1972024 - RNA, 19 nt, Homo sapiens
  misc_RNA (1)...(19): siRNA sense strand
uuacuucauugaccuuaac

SEQ ID NO: 1972025 - RNA, 19 nt, Homo sapiens
  misc_RNA (1)...(19): siRNA sense strand
caaggaguacuuccagcau

SEQ ID NO: 1972026 - RNA, 19 nt, Homo sapiens
  misc_RNA (1)...(19): siRNA sense strand
caacuguguucuuccauua

SEQ ID NO: 1972027 - RNA, 19 nt, Homo sapiens
  misc_RNA (1)...(19): siRNA sense strand
gggcgaggcuuuauaguug

SEQ ID NO: 1972028 - RNA, 19 nt, Homo sapiens
  misc_RNA (1)...(19): siRNA sense strand
ucaggaaucuggucucauu

SEQ ID NO: 1972029 - RNA, 19 nt, Homo sapiens
  misc_RNA (1)...(19): siRNA sense strand
ggaagagacugagccuuga

SEQ ID NO: 1972030 - RNA, 19 nt, Homo sapiens
  misc_RNA (1)...(19): siRNA sense strand
aagaugagcuacacaauca

SEQ ID NO: 1972031 - RNA, 19 nt, Homo sapiens
  misc_RNA (1)...(19): siRNA sense strand
gcaacuguguucuuccauu

SEQ ID NO: 1972032 - RNA, 19 nt, Homo sapiens
  misc_RNA (1)...(19): siRNA sense strand
gaagucacagcucaucaua

SEQ ID NO: 1972033 - RNA, 19 nt, Homo sapiens
  misc_RNA (1)...(19): siRNA sense strand
gaucaaauaggaccaguga

SEQ ID NO: 1972034 - RNA, 19 nt, Homo sapiens
  misc_RNA (1)...(19): siRNA sense strand
gcagaggaaccuauacaaa

SEQ ID NO: 1972035 - RNA, 19 nt, Homo sapiens
  misc_RNA (1)...(19): siRNA sense strand
agaggaaccuauacaaaga

SEQ ID NO: 1972036 - RNA, 19 nt, Homo sapiens
  misc_RNA (1)...(19): siRNA sense strand
agucagagcucauuaagca

SEQ ID NO: 1972037 - RNA, 19 nt, Homo sapiens
  misc_RNA (1)...(19): siRNA sense strand
gggaggcaacagaauauua

SEQ ID NO: 1972038 - RNA, 19 nt, Homo sapiens
  misc_RNA (1)...(19): siRNA sense strand
acacucuccugcuuuauuu

SEQ ID NO: 1972039 - RNA, 19 nt, Homo sapiens
  misc_RNA (1)...(19): siRNA sense strand
gaaccuauacaaagaagug

SEQ ID NO: 1972040 - RNA, 19 nt, Homo sapiens
  misc_RNA (1)...(19): siRNA sense strand
cacaacauccuucugauaa

SEQ ID NO: 1972041 - RNA, 19 nt, Homo sapiens
  misc_RNA (1)...(19): siRNA sense strand
ggaauggucuuugcaucug

SEQ ID NO: 1972042 - RNA, 19 nt, Homo sapiens
  misc_RNA (1)...(19): siRNA sense strand
ggaaucuggucucauugga

SEQ ID NO: 1972043 - RNA, 19 nt, Homo sapiens
  misc_RNA (1)...(19): siRNA sense strand
cagcuuugcagaacuauaa

SEQ ID NO: 1972044 - RNA, 19 nt, Homo sapiens
  misc_RNA (1)...(19): siRNA sense strand
ucacaacauccuucugaua

SEQ ID NO: 1972045 - RNA, 19 nt, Homo sapiens
  misc_RNA (1)...(19): siRNA sense strand
auaauaaacccaaguguga

SEQ ID NO: 1972046 - RNA, 19 nt, Homo sapiens
  misc_RNA (1)...(19): siRNA sense strand
gaauggucuuugcaucuga

SEQ ID NO: 1972047 - RNA, 19 nt, Homo sapiens
  misc_RNA (1)...(19): siRNA sense strand
guccauaccugcccuucuu

SEQ ID NO: 1972048 - RNA, 19 nt, Homo sapiens
  misc_RNA (1)...(19): siRNA sense strand
gcaacagaauauuagagau

SEQ ID NO: 1972049 - RNA, 19 nt, Homo sapiens
  misc_RNA (1)...(19): siRNA sense strand
gaggaaguagacagaauuu

SEQ ID NO: 1972050 - RNA, 19 nt, Homo sapiens
  misc_RNA (1)...(19): siRNA sense strand
agucaaaccuguucagaca

SEQ ID NO: 1972051 - RNA, 19 nt, Homo sapiens
  misc_RNA (1)...(19): siRNA sense strand
gcuacacaaucauccuauu

SEQ ID NO: 1972052 - RNA, 19 nt, Homo sapiens
  misc_RNA (1)...(19): siRNA sense strand
guagacagaauuuccaaga

SEQ ID NO: 1972053 - RNA, 19 nt, Homo sapiens
  misc_RNA (1)...(19): siRNA sense strand
acaacauccuucugauaaa

SEQ ID NO: 1972054 - RNA, 19 nt, Homo sapiens
  misc_RNA (1)...(19): siRNA sense strand
gcaaccaccugaguacaca

SEQ ID NO: 1972055 - RNA, 19 nt, Homo sapiens
  misc_RNA (1)...(19): siRNA sense strand
agucacagcucaucauaca

SEQ ID NO: 1972056 - RNA, 19 nt, Homo sapiens
  misc_RNA (1)...(19): siRNA sense strand
uacccugucucaaguauug

SEQ ID NO: 1972057 - RNA, 19 nt, Homo sapiens
  misc_RNA (1)...(19): siRNA sense strand
uccauuagcuuccaugaca

SEQ ID NO: 1972058 - RNA, 19 nt, Homo sapiens
  misc_RNA (1)...(19): siRNA sense strand
ggaggcaacagaauauuag

SEQ ID NO: 1972059 - RNA, 19 nt, Homo sapiens
  misc_RNA (1)...(19): siRNA sense strand
caagggagaaaucguuuau

SEQ ID NO: 1972060 - RNA, 19 nt, Homo sapiens
  misc_RNA (1)...(19): siRNA sense strand
agggagaaaucguuuaugu

SEQ ID NO: 1972061 - RNA, 19 nt, Homo sapiens
  misc_RNA (1)...(19): siRNA sense strand
ucucuagccuuugcuguuu

SEQ ID NO: 1972062 - RNA, 19 nt, Homo sapiens
  misc_RNA (1)...(19): siRNA sense strand
gaaugcaagcucugaggaa

SEQ ID NO: 1972063 - RNA, 19 nt, Homo sapiens
  misc_RNA (1)...(19): siRNA sense strand
gugauacccugucucaagu

SEQ ID NO: 1972064 - RNA, 19 nt, Homo sapiens
  misc_RNA (1)...(19): siRNA sense strand
ugcaagcucugaggaagua

SEQ ID NO: 1972065 - RNA, 19 nt, Homo sapiens
  misc_RNA (1)...(19): siRNA sense strand
aaauaggaccagugacuuu

SEQ ID NO: 1972066 - RNA, 19 nt, Homo sapiens
  misc_RNA (1)...(19): siRNA sense strand
gaagucaaaccuguucaga

SEQ ID NO: 1972067 - RNA, 19 nt, Homo sapiens
  misc_RNA (1)...(19): siRNA sense strand
gagcagaggaaccuauaca

SEQ ID NO: 1972068 - RNA, 19 nt, Homo sapiens
  misc_RNA (1)...(19): siRNA sense strand
gacacucuccugcuuuauu

SEQ ID NO: 1972069 - RNA, 19 nt, Homo sapiens
  misc_RNA (1)...(19): siRNA sense strand
uuccagagaccaccaauaa

SEQ ID NO: 1972070 - RNA, 19 nt, Homo sapiens
  misc_RNA (1)...(19): siRNA sense strand
caacauccuucugauaaaa

SEQ ID NO: 1972071 - RNA, 19 nt, Homo sapiens
  misc_RNA (1)...(19): siRNA sense strand
gagcuacacaaucauccua

SEQ ID NO: 1972072 - RNA, 19 nt, Homo sapiens
  misc_RNA (1)...(19): siRNA sense strand
gaaccagcuuugcagaacu

SEQ ID NO: 1972073 - RNA, 19 nt, Homo sapiens
  misc_RNA (1)...(19): siRNA sense strand
caagaugagcuacacaauc

SEQ ID NO: 1972074 - RNA, 19 nt, Homo sapiens
  misc_RNA (1)...(19): siRNA sense strand
cagaggaaccuauacaaag

SEQ ID NO: 1972075 - RNA, 19 nt, Homo sapiens
  misc_RNA (1)...(19): siRNA sense strand
aauaaacccaagugugaua

SEQ ID NO: 1972076 - RNA, 19 nt, Homo sapiens
  misc_RNA (1)...(19): siRNA sense strand
gaaggcagucacagcagaa

SEQ ID NO: 1972077 - RNA, 19 nt, Homo sapiens
  misc_RNA (1)...(19): siRNA sense strand
aaucuggucucauuggaau

SEQ ID NO: 1972078 - RNA, 19 nt, Homo sapiens
  misc_RNA (1)...(19): siRNA sense strand
ggcaacagaauauuagaga

SEQ ID NO: 1972079 - RNA, 19 nt, Homo sapiens
  misc_RNA (1)...(19): siRNA sense strand
ccaugacacucuccugcuu

SEQ ID NO: 1972080 - RNA, 19 nt, Homo sapiens
  misc_RNA (1)...(19): siRNA sense strand
caucagaggacacacacaa

SEQ ID NO: 1972081 - RNA, 19 nt, Homo sapiens
  misc_RNA (1)...(19): siRNA sense strand
gaaguagacagaauuucca

SEQ ID NO: 1972082 - RNA, 19 nt, Homo sapiens
  misc_RNA (1)...(19): siRNA sense strand
gaaaagucagagcucauua

SEQ ID NO: 1972083 - RNA, 19 nt, Homo sapiens
  misc_RNA (1)...(19): siRNA sense strand
gaggaaccuauacaaagaa

SEQ ID NO: 1972084 - RNA, 19 nt, Homo sapiens
  misc_RNA (1)...(19): siRNA sense strand
cuacaucucuagccuuugc

SEQ ID NO: 1972085 - RNA, 19 nt, Homo sapiens
  misc_RNA (1)...(19): siRNA sense strand
ggaaucaaagccagaaguc

SEQ ID NO: 1972086 - RNA, 19 nt, Homo sapiens
  misc_RNA (1)...(19): siRNA sense strand
gaaucuggucucauuggaa

SEQ ID NO: 1972087 - RNA, 19 nt, Homo sapiens
  misc_RNA (1)...(19): siRNA sense strand
agccauaccucaucagaca

SEQ ID NO: 1972088 - RNA, 19 nt, Homo sapiens
  misc_RNA (1)...(19): siRNA sense strand
ggaagucacagcucaucau

SEQ ID NO: 1972089 - RNA, 19 nt, Homo sapiens
  misc_RNA (1)...(19): siRNA sense strand
caaauaggaccagugacuu

SEQ ID NO: 1972090 - RNA, 19 nt, Homo sapiens
  misc_RNA (1)...(19): siRNA sense strand
aaccagcuuugcagaacua

SEQ ID NO: 1972091 - RNA, 19 nt, Homo sapiens
  misc_RNA (1)...(19): siRNA sense strand
aaucugagggacaccuuua

SEQ ID NO: 1972092 - RNA, 19 nt, Homo sapiens
  misc_RNA (1)...(19): siRNA sense strand
augacacucuccugcuuua

SEQ ID NO: 1972093 - RNA, 19 nt, Homo sapiens
  misc_RNA (1)...(19): siRNA sense strand
acacaagggagaaaucguu

SEQ ID NO: 1972094 - RNA, 19 nt, Homo sapiens
  misc_RNA (1)...(19): siRNA sense strand
gcagaguggaagagacuga

SEQ ID NO: 1972095 - RNA, 19 nt, Homo sapiens
  misc_RNA (1)...(19): siRNA sense strand
ggcgaggcuuuauaguuga

SEQ ID NO: 1972096 - RNA, 19 nt, Homo sapiens
  misc_RNA (1)...(19): siRNA sense strand
ugaggaaguagacagaauu

SEQ ID NO: 1972097 - RNA, 19 nt, Homo sapiens
  misc_RNA (1)...(19): siRNA sense strand
ggacacacacaagggagaa

SEQ ID NO: 1972098 - RNA, 19 nt, Homo sapiens
  misc_RNA (1)...(19): siRNA sense strand
ggguuucucuagccuguuc

SEQ ID NO: 1972099 - RNA, 19 nt, Homo sapiens
  misc_RNA (1)...(19): siRNA sense strand
guuuggagcagucagguuu

SEQ ID NO: 1972100 - RNA, 19 nt, Homo sapiens
  misc_RNA (1)...(19): siRNA sense strand
gaccaccaauaagcucuug

SEQ ID NO: 1972101 - RNA, 19 nt, Homo sapiens
  misc_RNA (1)...(19): siRNA sense strand
ucaaauaggaccagugacu

SEQ ID NO: 1972102 - RNA, 19 nt, Homo sapiens
  misc_RNA (1)...(19): siRNA sense strand
caagugugauacccugucu

SEQ ID NO: 1972103 - RNA, 19 nt, Homo sapiens
  misc_RNA (1)...(19): siRNA sense strand
cuccagcccuacaaucuga

SEQ ID NO: 1972104 - RNA, 19 nt, Homo sapiens
  misc_RNA (1)...(19): siRNA sense strand
gggagaaaucguuuaugug

SEQ ID NO: 1972105 - RNA, 19 nt, Homo sapiens
  misc_RNA (1)...(19): siRNA sense strand
ggagugugggcgaggcuuu

SEQ ID NO: 1972106 - RNA, 19 nt, Homo sapiens
  misc_RNA (1)...(19): siRNA sense strand
aaagaagugaugcuggaaa

SEQ ID NO: 1972107 - RNA, 19 nt, Homo sapiens
  misc_RNA (1)...(19): siRNA sense strand
gagugugggcgaggcuuua

SEQ ID NO: 1972108 - RNA, 19 nt, Homo sapiens
  misc_RNA (1)...(19): siRNA sense strand
gaggacacacacaggagaa

SEQ ID NO: 1972109 - RNA, 19 nt, Homo sapiens
  misc_RNA (1)...(19): siRNA sense strand
gagugugggcgaggcuuua

SEQ ID NO: 1972110 - RNA, 19 nt, Homo sapiens
  misc_RNA (1)...(19): siRNA sense strand
gggcugaagcagaagauca

SEQ ID NO: 1972111 - RNA, 19 nt, Homo sapiens
  misc_RNA (1)...(19): siRNA sense strand
ccagagaccaccaauaagc

SEQ ID NO: 1972112 - RNA, 19 nt, Homo sapiens
  misc_RNA (1)...(19): siRNA sense strand
ggaggaauggucuuugcau

SEQ ID NO: 1972113 - RNA, 19 nt, Homo sapiens
  misc_RNA (1)...(19): siRNA sense strand
ccagaagucaaaccuguuc

SEQ ID NO: 1972114 - RNA, 19 nt, Homo sapiens
  misc_RNA (1)...(19): siRNA sense strand
gcuuugcagaacuauaaua

SEQ ID NO: 1972115 - RNA, 19 nt, Homo sapiens
  misc_RNA (1)...(19): siRNA sense strand
caacuccacccaggaaauc

SEQ ID NO: 1972116 - RNA, 19 nt, Homo sapiens
  misc_RNA (1)...(19): siRNA sense strand
acaagggagaaaucguuua

SEQ ID NO: 1972117 - RNA, 19 nt, Homo sapiens
  misc_RNA (1)...(19): siRNA sense strand
caagccauaccucaucaga

SEQ ID NO: 1972118 - RNA, 19 nt, Homo sapiens
  misc_RNA (1)...(19): siRNA sense strand
ccuuaugugugcagccauu

SEQ ID NO: 1972119 - RNA, 19 nt, Homo sapiens
  misc_RNA (1)...(19): siRNA sense strand
ugaaccagcuuugcagaac

SEQ ID NO: 1972120 - RNA, 19 nt, Homo sapiens
  misc_RNA (1)...(19): siRNA sense strand
gccaagaugagcuacacaa

SEQ ID NO: 1972121 - RNA, 19 nt, Homo sapiens
  misc_RNA (1)...(19): siRNA sense strand
caaauguugaaccagcuuu

SEQ ID NO: 1972122 - RNA, 19 nt, Homo sapiens
  misc_RNA (1)...(19): siRNA sense strand
caaagaagugaugcuggaa

SEQ ID NO: 1972123 - RNA, 19 nt, Homo sapiens
  misc_RNA (1)...(19): siRNA sense strand
ugaagcagaagaucaacga

SEQ ID NO: 1972124 - RNA, 19 nt, Homo sapiens
  misc_RNA (1)...(19): siRNA sense strand
agucacaacauccuucuga

SEQ ID NO: 1972125 - RNA, 19 nt, Homo sapiens
  misc_RNA (1)...(19): siRNA sense strand
cuacacaaucauccuauuc

SEQ ID NO: 1972126 - RNA, 19 nt, Homo sapiens
  misc_RNA (1)...(19): siRNA sense strand
ggacagcugcaauugguua

SEQ ID NO: 1972127 - RNA, 19 nt, Homo sapiens
  misc_RNA (1)...(19): siRNA sense strand
gaauggaucgcagcaguua

SEQ ID NO: 1972128 - RNA, 19 nt, Homo sapiens
  misc_RNA (1)...(19): siRNA sense strand
cgaagagacuggagacaau

SEQ ID NO: 1972129 - RNA, 19 nt, Homo sapiens
  misc_RNA (1)...(19): siRNA sense strand
gcaauugguuaucuagcuu

SEQ ID NO: 1972130 - RNA, 19 nt, Homo sapiens
  misc_RNA (1)...(19): siRNA sense strand
gaucgcagcaguuaccauu

SEQ ID NO: 1972131 - RNA, 19 nt, Homo sapiens
  misc_RNA (1)...(19): siRNA sense strand
gaucaucgaaauaaagcua

SEQ ID NO: 1972132 - RNA, 19 nt, Homo sapiens
  misc_RNA (1)...(19): siRNA sense strand
gaaagacaaccccaagaua

SEQ ID NO: 1972133 - RNA, 19 nt, Homo sapiens
  misc_RNA (1)...(19): siRNA sense strand
gagauaaagcuguguacug

SEQ ID NO: 1972134 - RNA, 19 nt, Homo sapiens
  misc_RNA (1)...(19): siRNA sense strand
ccaagauaguacaugcuuu

SEQ ID NO: 1972135 - RNA, 19 nt, Homo sapiens
  misc_RNA (1)...(19): siRNA sense strand
ugauaaaccuucacaucca

SEQ ID NO: 1972136 - RNA, 19 nt, Homo sapiens
  misc_RNA (1)...(19): siRNA sense strand
gcuguguacugccguuguu

SEQ ID NO: 1972137 - RNA, 19 nt, Homo sapiens
  misc_RNA (1)...(19): siRNA sense strand
gaagagacuggagacaaug

SEQ ID NO: 1972138 - RNA, 19 nt, Homo sapiens
  misc_RNA (1)...(19): siRNA sense strand
caauugguuaucuagcuua

SEQ ID NO: 1972139 - RNA, 19 nt, Homo sapiens
  misc_RNA (1)...(19): siRNA sense strand
uggaggauuugggagauaa

SEQ ID NO: 1972140 - RNA, 19 nt, Homo sapiens
  misc_RNA (1)...(19): siRNA sense strand
gacaaugugggcccucuga

SEQ ID NO: 1972141 - RNA, 19 nt, Homo sapiens
  misc_RNA (1)...(19): siRNA sense strand
uugguuaucuagcuuacaa

SEQ ID NO: 1972142 - RNA, 19 nt, Homo sapiens
  misc_RNA (1)...(19): siRNA sense strand
uaugauaaaccuucacauc

SEQ ID NO: 1972143 - RNA, 19 nt, Homo sapiens
  misc_RNA (1)...(19): siRNA sense strand
ugggacagcugcaauuggu

SEQ ID NO: 1972144 - RNA, 19 nt, Homo sapiens
  misc_RNA (1)...(19): siRNA sense strand
caagauaguacaugcuuuu

SEQ ID NO: 1972145 - RNA, 19 nt, Homo sapiens
  misc_RNA (1)...(19): siRNA sense strand
cagcugcaauugguuaucu

SEQ ID NO: 1972146 - RNA, 19 nt, Homo sapiens
  misc_RNA (1)...(19): siRNA sense strand
ugauggggcucacacaaaa

SEQ ID NO: 1972147 - RNA, 19 nt, Homo sapiens
  misc_RNA (1)...(19): siRNA sense strand
ggaggauuugggagauaaa

SEQ ID NO: 1972148 - RNA, 19 nt, Homo sapiens
  misc_RNA (1)...(19): siRNA sense strand
acacaaaacauaacgaaga

SEQ ID NO: 1972149 - RNA, 19 nt, Homo sapiens
  misc_RNA (1)...(19): siRNA sense strand
ucaucgaaauaaagcuaug

SEQ ID NO: 1972150 - RNA, 19 nt, Homo sapiens
  misc_RNA (1)...(19): siRNA sense strand
caaugugggcccucugauc

SEQ ID NO: 1972151 - RNA, 19 nt, Homo sapiens
  misc_RNA (1)...(19): siRNA sense strand
cauggaggauuugggagau

SEQ ID NO: 1972152 - RNA, 19 nt, Homo sapiens
  misc_RNA (1)...(19): siRNA sense strand
gauaguacaugcuuuugac

SEQ ID NO: 1972153 - RNA, 19 nt, Homo sapiens
  misc_RNA (1)...(19): siRNA sense strand
gcguacgaguugaauggau

SEQ ID NO: 1972154 - RNA, 19 nt, Homo sapiens
  misc_RNA (1)...(19): siRNA sense strand
gcuaugauaaaccuucaca

SEQ ID NO: 1972155 - RNA, 19 nt, Homo sapiens
  misc_RNA (1)...(19): siRNA sense strand
cagcguacgaguugaaugg

SEQ ID NO: 1972156 - RNA, 19 nt, Homo sapiens
  misc_RNA (1)...(19): siRNA sense strand
aaugugggcccucugauca

SEQ ID NO: 1972157 - RNA, 19 nt, Homo sapiens
  misc_RNA (1)...(19): siRNA sense strand
aagcuaugauaaaccuuca

SEQ ID NO: 1972158 - RNA, 19 nt, Homo sapiens
  misc_RNA (1)...(19): siRNA sense strand
ugaauggaucgcagcaguu

SEQ ID NO: 1972159 - RNA, 19 nt, Homo sapiens
  misc_RNA (1)...(19): siRNA sense strand
gaccagaucucuucauaga

SEQ ID NO: 1972160 - RNA, 19 nt, Homo sapiens
  misc_RNA (1)...(19): siRNA sense strand
gagaggauguuuagaggaa

SEQ ID NO: 1972161 - RNA, 19 nt, Homo sapiens
  misc_RNA (1)...(19): siRNA sense strand
caaagggcaugccuaaaga

SEQ ID NO: 1972162 - RNA, 19 nt, Homo sapiens
  misc_RNA (1)...(19): siRNA sense strand
aaacuggacuuccuaaugu

SEQ ID NO: 1972163 - RNA, 19 nt, Homo sapiens
  misc_RNA (1)...(19): siRNA sense strand
ggaucuugcucucaacuuu

SEQ ID NO: 1972164 - RNA, 19 nt, Homo sapiens
  misc_RNA (1)...(19): siRNA sense strand
ggaaagggaagcaguuuga

SEQ ID NO: 1972165 - RNA, 19 nt, Homo sapiens
  misc_RNA (1)...(19): siRNA sense strand
gggcaugccuaaagacuug

SEQ ID NO: 1972166 - RNA, 19 nt, Homo sapiens
  misc_RNA (1)...(19): siRNA sense strand
gaugacacagcauuuaaua

SEQ ID NO: 1972167 - RNA, 19 nt, Homo sapiens
  misc_RNA (1)...(19): siRNA sense strand
gaaaccaaaggucuuaauu

SEQ ID NO: 1972168 - RNA, 19 nt, Homo sapiens
  misc_RNA (1)...(19): siRNA sense strand
ugacacagcauuuaauaga

SEQ ID NO: 1972169 - RNA, 19 nt, Homo sapiens
  misc_RNA (1)...(19): siRNA sense strand
guugugaacuuaucugugu

SEQ ID NO: 1972170 - RNA, 19 nt, Homo sapiens
  misc_RNA (1)...(19): siRNA sense strand
ggaguuguuucuacccauu

SEQ ID NO: 1972171 - RNA, 19 nt, Homo sapiens
  misc_RNA (1)...(19): siRNA sense strand
gagggucucucucaacauc

SEQ ID NO: 1972172 - RNA, 19 nt, Homo sapiens
  misc_RNA (1)...(19): siRNA sense strand
gaacucaacaggccagcaa

SEQ ID NO: 1972173 - RNA, 19 nt, Homo sapiens
  misc_RNA (1)...(19): siRNA sense strand
gcagaccuccggcugguaa

SEQ ID NO: 1972174 - RNA, 19 nt, Homo sapiens
  misc_RNA (1)...(19): siRNA sense strand
ccaaagggcaugccuaaag

SEQ ID NO: 1972175 - RNA, 19 nt, Homo sapiens
  misc_RNA (1)...(19): siRNA sense strand
ggcaggcacuuccaucaug

SEQ ID NO: 1972176 - RNA, 19 nt, Homo sapiens
  misc_RNA (1)...(19): siRNA sense strand
caccuugcauuauggauga

SEQ ID NO: 1972177 - RNA, 19 nt, Homo sapiens
  misc_RNA (1)...(19): siRNA sense strand
gaggauguuuagaggaaga

SEQ ID NO: 1972178 - RNA, 19 nt, Homo sapiens
  misc_RNA (1)...(19): siRNA sense strand
ucauagagcacuugaggaa

SEQ ID NO: 1972179 - RNA, 19 nt, Homo sapiens
  misc_RNA (1)...(19): siRNA sense strand
gaagaaaauuuggaagaug

SEQ ID NO: 1972180 - RNA, 19 nt, Homo sapiens
  misc_RNA (1)...(19): siRNA sense strand
aggaccagaucucuucaua

SEQ ID NO: 1972181 - RNA, 19 nt, Homo sapiens
  misc_RNA (1)...(19): siRNA sense strand
ggaagaaaauuuggaagau

SEQ ID NO: 1972182 - RNA, 19 nt, Homo sapiens
  misc_RNA (1)...(19): siRNA sense strand
guugaaaccaaaggucuua

SEQ ID NO: 1972183 - RNA, 19 nt, Homo sapiens
  misc_RNA (1)...(19): siRNA sense strand
ccugaaggcuguggagguu

SEQ ID NO: 1972184 - RNA, 19 nt, Homo sapiens
  misc_RNA (1)...(19): siRNA sense strand
ggaugacacagcauuuaau

SEQ ID NO: 1972185 - RNA, 19 nt, Homo sapiens
  misc_RNA (1)...(19): siRNA sense strand
ggaauucaccugguugucu

SEQ ID NO: 1972186 - RNA, 19 nt, Homo sapiens
  misc_RNA (1)...(19): siRNA sense strand
ucucaucugugcccaagga

SEQ ID NO: 1972187 - RNA, 19 nt, Homo sapiens
  misc_RNA (1)...(19): siRNA sense strand
gacacagcauuuaauagag

SEQ ID NO: 1972188 - RNA, 19 nt, Homo sapiens
  misc_RNA (1)...(19): siRNA sense strand
gugccugaauugagcugua

SEQ ID NO: 1972189 - RNA, 19 nt, Homo sapiens
  misc_RNA (1)...(19): siRNA sense strand
uguggagguugugaacuua

SEQ ID NO: 1972190 - RNA, 19 nt, Homo sapiens
  misc_RNA (1)...(19): siRNA sense strand
ugaaggcuguggagguugu

SEQ ID NO: 1972191 - RNA, 19 nt, Homo sapiens
  misc_RNA (1)...(19): siRNA sense strand
cccggaggcuaaacauaaa

SEQ ID NO: 1972192 - RNA, 19 nt, Homo sapiens
  misc_RNA (1)...(19): siRNA sense strand
caaagcgguucaccuugca

SEQ ID NO: 1972193 - RNA, 19 nt, Homo sapiens
  misc_RNA (1)...(19): siRNA sense strand
gaucuugcucucaacuuug

SEQ ID NO: 1972194 - RNA, 19 nt, Homo sapiens
  misc_RNA (1)...(19): siRNA sense strand
ucccggaggcuaaacauaa

SEQ ID NO: 1972195 - RNA, 19 nt, Homo sapiens
  misc_RNA (1)...(19): siRNA sense strand
gaugaggaagucagugaga

SEQ ID NO: 1972196 - RNA, 19 nt, Homo sapiens
  misc_RNA (1)...(19): siRNA sense strand
gaaugugggucagcaagcu

SEQ ID NO: 1972197 - RNA, 19 nt, Homo sapiens
  misc_RNA (1)...(19): siRNA sense strand
ggaagaggaagaaaauuug

SEQ ID NO: 1972198 - RNA, 19 nt, Homo sapiens
  misc_RNA (1)...(19): siRNA sense strand
cccaggaucuugcucucaa

SEQ ID NO: 1972199 - RNA, 19 nt, Homo sapiens
  misc_RNA (1)...(19): siRNA sense strand
gggauccuuuggaguuguu

SEQ ID NO: 1972200 - RNA, 19 nt, Homo sapiens
  misc_RNA (1)...(19): siRNA sense strand
ucagugagaggauguuuag

SEQ ID NO: 1972201 - RNA, 19 nt, Homo sapiens
  misc_RNA (1)...(19): siRNA sense strand
ggagauaguuuuagaugcu

SEQ ID NO: 1972202 - RNA, 19 nt, Homo sapiens
  misc_RNA (1)...(19): siRNA sense strand
gaagucagugagaggaugu

SEQ ID NO: 1972203 - RNA, 19 nt, Homo sapiens
  misc_RNA (1)...(19): siRNA sense strand
uggaugacacagcauuuaa

SEQ ID NO: 1972204 - RNA, 19 nt, Homo sapiens
  misc_RNA (1)...(19): siRNA sense strand
gaaagggaagcaguuugau

SEQ ID NO: 1972205 - RNA, 19 nt, Homo sapiens
  misc_RNA (1)...(19): siRNA sense strand
ccaccugucucccuuucuc

SEQ ID NO: 1972206 - RNA, 19 nt, Homo sapiens
  misc_RNA (1)...(19): siRNA sense strand
cgguucaccuugcauuaug

SEQ ID NO: 1972207 - RNA, 19 nt, Homo sapiens
  misc_RNA (1)...(19): siRNA sense strand
gcaaagccaaagcgguuca

SEQ ID NO: 1972208 - RNA, 19 nt, Homo sapiens
  misc_RNA (1)...(19): siRNA sense strand
gcaagcucuuuccaacagu

SEQ ID NO: 1972209 - RNA, 19 nt, Homo sapiens
  misc_RNA (1)...(19): siRNA sense strand
ggaccagaucucuucauag

SEQ ID NO: 1972210 - RNA, 19 nt, Homo sapiens
  misc_RNA (1)...(19): siRNA sense strand
auagagcacuugaggaaac

SEQ ID NO: 1972211 - RNA, 19 nt, Homo sapiens
  misc_RNA (1)...(19): siRNA sense strand
agauggaauucaccugguu

SEQ ID NO: 1972212 - RNA, 19 nt, Homo sapiens
  misc_RNA (1)...(19): siRNA sense strand
gggaaagggaagcaguuug

SEQ ID NO: 1972213 - RNA, 19 nt, Homo sapiens
  misc_RNA (1)...(19): siRNA sense strand
cuguggagguugugaacuu

SEQ ID NO: 1972214 - RNA, 19 nt, Homo sapiens
  misc_RNA (1)...(19): siRNA sense strand
aaagggaagcaguuugaug

SEQ ID NO: 1972215 - RNA, 19 nt, Homo sapiens
  misc_RNA (1)...(19): siRNA sense strand
gcacguuggaugaggaagu

SEQ ID NO: 1972216 - RNA, 19 nt, Homo sapiens
  misc_RNA (1)...(19): siRNA sense strand
caucacccaucagccuuug

SEQ ID NO: 1972217 - RNA, 19 nt, Homo sapiens
  misc_RNA (1)...(19): siRNA sense strand
gcacagcaagagccaaggu

SEQ ID NO: 1972218 - RNA, 19 nt, Homo sapiens
  misc_RNA (1)...(19): siRNA sense strand
ggauucucuuccaaacaga

SEQ ID NO: 1972219 - RNA, 19 nt, Homo sapiens
  misc_RNA (1)...(19): siRNA sense strand
gcauuuaauagaggaguga

SEQ ID NO: 1972220 - RNA, 19 nt, Homo sapiens
  misc_RNA (1)...(19): siRNA sense strand
gcgguucaccuugcauuau

SEQ ID NO: 1972221 - RNA, 19 nt, Homo sapiens
  misc_RNA (1)...(19): siRNA sense strand
cauaaagcaggcacugugu

SEQ ID NO: 1972222 - RNA, 19 nt, Homo sapiens
  misc_RNA (1)...(19): siRNA sense strand
gucagugagaggauguuua

SEQ ID NO: 1972223 - RNA, 19 nt, Homo sapiens
  misc_RNA (1)...(19): siRNA sense strand
ugaaaccaaaggucuuaau

SEQ ID NO: 1972224 - RNA, 19 nt, Homo sapiens
  misc_RNA (1)...(19): siRNA sense strand
cagacccuguuucccauca

SEQ ID NO: 1972225 - RNA, 19 nt, Homo sapiens
  misc_RNA (1)...(19): siRNA sense strand
ggcccuggauacauagaca

SEQ ID NO: 1972226 - RNA, 19 nt, Homo sapiens
  misc_RNA (1)...(19): siRNA sense strand
uggacuuccuaaugucuga

SEQ ID NO: 1972227 - RNA, 19 nt, Homo sapiens
  misc_RNA (1)...(19): siRNA sense strand
uggaugaggaagucaguga

SEQ ID NO: 1972228 - RNA, 19 nt, Homo sapiens
  misc_RNA (1)...(19): siRNA sense strand
ggacgaagaugaauggaaa

SEQ ID NO: 1972229 - RNA, 19 nt, Homo sapiens
  misc_RNA (1)...(19): siRNA sense strand
gaagagcuuugaaguagua

SEQ ID NO: 1972230 - RNA, 19 nt, Homo sapiens
  misc_RNA (1)...(19): siRNA sense strand
ccagaaaucuacagugaua

SEQ ID NO: 1972231 - RNA, 19 nt, Homo sapiens
  misc_RNA (1)...(19): siRNA sense strand
gagaagagcuuugaaguag

SEQ ID NO: 1972232 - RNA, 19 nt, Homo sapiens
  misc_RNA (1)...(19): siRNA sense strand
gaagaugaauggaaagaau

SEQ ID NO: 1972233 - RNA, 19 nt, Homo sapiens
  misc_RNA (1)...(19): siRNA sense strand
guagaaagccggaaggaua

SEQ ID NO: 1972234 - RNA, 19 nt, Homo sapiens
  misc_RNA (1)...(19): siRNA sense strand
ggaagaagacgauaaugaa

SEQ ID NO: 1972235 - RNA, 19 nt, Homo sapiens
  misc_RNA (1)...(19): siRNA sense strand
ggagaagagcuuugaagua

SEQ ID NO: 1972236 - RNA, 19 nt, Homo sapiens
  misc_RNA (1)...(19): siRNA sense strand
gaagaagacgauaaugaaa

SEQ ID NO: 1972237 - RNA, 19 nt, Homo sapiens
  misc_RNA (1)...(19): siRNA sense strand
caccagaaaucuacaguga

SEQ ID NO: 1972238 - RNA, 19 nt, Homo sapiens
  misc_RNA (1)...(19): siRNA sense strand
ggaaagaauuggagcaaaa

SEQ ID NO: 1972239 - RNA, 19 nt, Homo sapiens
  misc_RNA (1)...(19): siRNA sense strand
uaaaacagcuccaguacaa

SEQ ID NO: 1972240 - RNA, 19 nt, Homo sapiens
  misc_RNA (1)...(19): siRNA sense strand
caaccaauaugcugugcuu

SEQ ID NO: 1972241 - RNA, 19 nt, Homo sapiens
  misc_RNA (1)...(19): siRNA sense strand
ccacaaggaccaccagaaa

SEQ ID NO: 1972242 - RNA, 19 nt, Homo sapiens
  misc_RNA (1)...(19): siRNA sense strand
gacaagauccaggugauaa

SEQ ID NO: 1972243 - RNA, 19 nt, Homo sapiens
  misc_RNA (1)...(19): siRNA sense strand
gagacaagauccaggugau

SEQ ID NO: 1972244 - RNA, 19 nt, Homo sapiens
  misc_RNA (1)...(19): siRNA sense strand
ccaauaugcugugcuugaa

SEQ ID NO: 1972245 - RNA, 19 nt, Homo sapiens
  misc_RNA (1)...(19): siRNA sense strand
ccaaggcugugacgaagga

SEQ ID NO: 1972246 - RNA, 19 nt, Homo sapiens
  misc_RNA (1)...(19): siRNA sense strand
ggugauaacugggaagaag

SEQ ID NO: 1972247 - RNA, 19 nt, Homo sapiens
  misc_RNA (1)...(19): siRNA sense strand
ccacucacaauacaauuaa

SEQ ID NO: 1972248 - RNA, 19 nt, Homo sapiens
  misc_RNA (1)...(19): siRNA sense strand
gaaggacgaagaugaaugg

SEQ ID NO: 1972249 - RNA, 19 nt, Homo sapiens
  misc_RNA (1)...(19): siRNA sense strand
auaaagaaauggagaagag

SEQ ID NO: 1972250 - RNA, 19 nt, Homo sapiens
  misc_RNA (1)...(19): siRNA sense strand
gaauaaaacagcuccagua

SEQ ID NO: 1972251 - RNA, 19 nt, Homo sapiens
  misc_RNA (1)...(19): siRNA sense strand
ugacgaaggacgaagauga

SEQ ID NO: 1972252 - RNA, 19 nt, Homo sapiens
  misc_RNA (1)...(19): siRNA sense strand
uagaaagccggaaggauaa

SEQ ID NO: 1972253 - RNA, 19 nt, Homo sapiens
  misc_RNA (1)...(19): siRNA sense strand
guucaggcaaugcaaauaa

SEQ ID NO: 1972254 - RNA, 19 nt, Homo sapiens
  misc_RNA (1)...(19): siRNA sense strand
ccggaaggauaaagaaaug

SEQ ID NO: 1972255 - RNA, 19 nt, Homo sapiens
  misc_RNA (1)...(19): siRNA sense strand
gaugacuagugguguguau

SEQ ID NO: 1972256 - RNA, 19 nt, Homo sapiens
  misc_RNA (1)...(19): siRNA sense strand
gagccuggacaacuucuuu

SEQ ID NO: 1972257 - RNA, 19 nt, Homo sapiens
  misc_RNA (1)...(19): siRNA sense strand
aaaccaggcccuuaaacuu

SEQ ID NO: 1972258 - RNA, 19 nt, Homo sapiens
  misc_RNA (1)...(19): siRNA sense strand
guagggaugagguuucaaa

SEQ ID NO: 1972259 - RNA, 19 nt, Homo sapiens
  misc_RNA (1)...(19): siRNA sense strand
gaaauggagaagagcuuug

SEQ ID NO: 1972260 - RNA, 19 nt, Homo sapiens
  misc_RNA (1)...(19): siRNA sense strand
gggacaagaagaagaagaa

SEQ ID NO: 1972261 - RNA, 19 nt, Homo sapiens
  misc_RNA (1)...(19): siRNA sense strand
ccaagagggacaagaagaa

SEQ ID NO: 1972262 - RNA, 19 nt, Homo sapiens
  misc_RNA (1)...(19): siRNA sense strand
cuacagugauacacaguuc

SEQ ID NO: 1972263 - RNA, 19 nt, Homo sapiens
  misc_RNA (1)...(19): siRNA sense strand
gagcuuugaaguaguaaga

SEQ ID NO: 1972264 - RNA, 19 nt, Homo sapiens
  misc_RNA (1)...(19): siRNA sense strand
ggaaggauaaagaaaugga

SEQ ID NO: 1972265 - RNA, 19 nt, Homo sapiens
  misc_RNA (1)...(19): siRNA sense strand
gccacucacaauacaauua

SEQ ID NO: 1972266 - RNA, 19 nt, Homo sapiens
  misc_RNA (1)...(19): siRNA sense strand
ccaccaaggcugugacgaa

SEQ ID NO: 1972267 - RNA, 19 nt, Homo sapiens
  misc_RNA (1)...(19): siRNA sense strand
acaagaagaagaagaagga

SEQ ID NO: 1972268 - RNA, 19 nt, Homo sapiens
  misc_RNA (1)...(19): siRNA sense strand
gacgaaggacgaagaugaa

SEQ ID NO: 1972269 - RNA, 19 nt, Homo sapiens
  misc_RNA (1)...(19): siRNA sense strand
aaaggaagaagacgauaau

SEQ ID NO: 1972270 - RNA, 19 nt, Homo sapiens
  misc_RNA (1)...(19): siRNA sense strand
gaaccagcgaugacuagug

SEQ ID NO: 1972271 - RNA, 19 nt, Homo sapiens
  misc_RNA (1)...(19): siRNA sense strand
gauaaagaaauggagaaga

SEQ ID NO: 1972272 - RNA, 19 nt, Homo sapiens
  misc_RNA (1)...(19): siRNA sense strand
ugaaguaguaagacacaaa

SEQ ID NO: 1972273 - RNA, 19 nt, Homo sapiens
  misc_RNA (1)...(19): siRNA sense strand
caaugcaaauaagcaguga

SEQ ID NO: 1972274 - RNA, 19 nt, Homo sapiens
  misc_RNA (1)...(19): siRNA sense strand
aaagcagccacucacaaua

SEQ ID NO: 1972275 - RNA, 19 nt, Homo sapiens
  misc_RNA (1)...(19): siRNA sense strand
ucagcuagacaaccaauau

SEQ ID NO: 1972276 - RNA, 19 nt, Homo sapiens
  misc_RNA (1)...(19): siRNA sense strand
aggaagaagacgauaauga

SEQ ID NO: 1972277 - RNA, 19 nt, Homo sapiens
  misc_RNA (1)...(19): siRNA sense strand
acaaggaccaccagaaauc

SEQ ID NO: 1972278 - RNA, 19 nt, Homo sapiens
  misc_RNA (1)...(19): siRNA sense strand
gcaccuccugcuccaguaa

SEQ ID NO: 1972279 - RNA, 19 nt, Homo sapiens
  misc_RNA (1)...(19): siRNA sense strand
gcuuugaaguaguaagaca

SEQ ID NO: 1972280 - RNA, 19 nt, Homo sapiens
  misc_RNA (1)...(19): siRNA sense strand
gcaaauaagcagugaaaag

SEQ ID NO: 1972281 - RNA, 19 nt, Homo sapiens
  misc_RNA (1)...(19): siRNA sense strand
gaaaagcagccacucacaa

SEQ ID NO: 1972282 - RNA, 19 nt, Homo sapiens
  misc_RNA (1)...(19): siRNA sense strand
uggaaagaauuggagcaaa

SEQ ID NO: 1972283 - RNA, 19 nt, Homo sapiens
  misc_RNA (1)...(19): siRNA sense strand
gccaagagggacaagaaga

SEQ ID NO: 1972284 - RNA, 19 nt, Homo sapiens
  misc_RNA (1)...(19): siRNA sense strand
caauaugcugugcuugaaa

SEQ ID NO: 1972285 - RNA, 19 nt, Homo sapiens
  misc_RNA (1)...(19): siRNA sense strand
ccagaaccagcgaugacua

SEQ ID NO: 1972286 - RNA, 19 nt, Homo sapiens
  misc_RNA (1)...(19): siRNA sense strand
gagcggagccuggacaacu

SEQ ID NO: 1972287 - RNA, 19 nt, Homo sapiens
  misc_RNA (1)...(19): siRNA sense strand
caacugccaagcauguaga

SEQ ID NO: 1972288 - RNA, 19 nt, Homo sapiens
  misc_RNA (1)...(19): siRNA sense strand
agacaagauccaggugaua

SEQ ID NO: 1972289 - RNA, 19 nt, Homo sapiens
  misc_RNA (1)...(19): siRNA sense strand
gaaguaguaagacacaaaa

SEQ ID NO: 1972290 - RNA, 19 nt, Homo sapiens
  misc_RNA (1)...(19): siRNA sense strand
cgaaggacgaagaugaaug

SEQ ID NO: 1972291 - RNA, 19 nt, Homo sapiens
  misc_RNA (1)...(19): siRNA sense strand
cccuuaaacuucagcuaga

SEQ ID NO: 1972292 - RNA, 19 nt, Homo sapiens
  misc_RNA (1)...(19): siRNA sense strand
ugacuagugguguguauag

SEQ ID NO: 1972293 - RNA, 19 nt, Homo sapiens
  misc_RNA (1)...(19): siRNA sense strand
agagggacaagaagaagaa

SEQ ID NO: 1972294 - RNA, 19 nt, Homo sapiens
  misc_RNA (1)...(19): siRNA sense strand
ccucaggguucaggcaaug

SEQ ID NO: 1972295 - RNA, 19 nt, Homo sapiens
  misc_RNA (1)...(19): siRNA sense strand
ggugguggagguauggaaa

SEQ ID NO: 1972296 - RNA, 19 nt, Homo sapiens
  misc_RNA (1)...(19): siRNA sense strand
gccggaaggauaaagaaau

SEQ ID NO: 1972297 - RNA, 19 nt, Homo sapiens
  misc_RNA (1)...(19): siRNA sense strand
ggagguggugguggaggua

SEQ ID NO: 1972298 - RNA, 19 nt, Homo sapiens
  misc_RNA (1)...(19): siRNA sense strand
gagguagggaugagguuuc

SEQ ID NO: 1972299 - RNA, 19 nt, Homo sapiens
  misc_RNA (1)...(19): siRNA sense strand
ggauaaagaaauggagaag

SEQ ID NO: 1972300 - RNA, 19 nt, Homo sapiens
  misc_RNA (1)...(19): siRNA sense strand
cgaagaugaauggaaagaa

SEQ ID NO: 1972301 - RNA, 19 nt, Homo sapiens
  misc_RNA (1)...(19): siRNA sense strand
aaauggagaagagcuuuga

SEQ ID NO: 1972302 - RNA, 19 nt, Homo sapiens
  misc_RNA (1)...(19): siRNA sense strand
aaccaggcccuuaaacuuc

SEQ ID NO: 1972303 - RNA, 19 nt, Homo sapiens
  misc_RNA (1)...(19): siRNA sense strand
agaagagcuuugaaguagu

SEQ ID NO: 1972304 - RNA, 19 nt, Homo sapiens
  misc_RNA (1)...(19): siRNA sense strand
gaaaaggaagaagacgaua

SEQ ID NO: 1972305 - RNA, 19 nt, Homo sapiens
  misc_RNA (1)...(19): siRNA sense strand
cacaaggaccaccagaaau

SEQ ID NO: 1972306 - RNA, 19 nt, Homo sapiens
  misc_RNA (1)...(19): siRNA sense strand
aaauagagguagggaugag

SEQ ID NO: 1972307 - RNA, 19 nt, Homo sapiens
  misc_RNA (1)...(19): siRNA sense strand
agaaauggagaagagcuuu

SEQ ID NO: 1972308 - RNA, 19 nt, Homo sapiens
  misc_RNA (1)...(19): siRNA sense strand
gaaagccggaaggauaaag

SEQ ID NO: 1972309 - RNA, 19 nt, Homo sapiens
  misc_RNA (1)...(19): siRNA sense strand
agaaaucuacagugauaca

SEQ ID NO: 1972310 - RNA, 19 nt, Homo sapiens
  misc_RNA (1)...(19): siRNA sense strand
ggacaagaagaagaagaag

SEQ ID NO: 1972311 - RNA, 19 nt, Homo sapiens
  misc_RNA (1)...(19): siRNA sense strand
cagcuagacaaccaauaug

SEQ ID NO: 1972312 - RNA, 19 nt, Homo sapiens
  misc_RNA (1)...(19): siRNA sense strand
aauaagcagugaaaaggaa

SEQ ID NO: 1972313 - RNA, 19 nt, Homo sapiens
  misc_RNA (1)...(19): siRNA sense strand
ccugcuccaguaauuguua

SEQ ID NO: 1972314 - RNA, 19 nt, Homo sapiens
  misc_RNA (1)...(19): siRNA sense strand
caagagggacaagaagaag

SEQ ID NO: 1972315 - RNA, 19 nt, Homo sapiens
  misc_RNA (1)...(19): siRNA sense strand
augcaaauaagcagugaaa

SEQ ID NO: 1972316 - RNA, 19 nt, Homo sapiens
  misc_RNA (1)...(19): siRNA sense strand
agaugaauggaaagaauug

SEQ ID NO: 1972317 - RNA, 19 nt, Homo sapiens
  misc_RNA (1)...(19): siRNA sense strand
guuaaccacaacaaggaaa

SEQ ID NO: 1972318 - RNA, 19 nt, Homo sapiens
  misc_RNA (1)...(19): siRNA sense strand
gaagaaacaugcuaaauag

SEQ ID NO: 1972319 - RNA, 19 nt, Homo sapiens
  misc_RNA (1)...(19): siRNA sense strand
gaaccaccauguuuaguaa

SEQ ID NO: 1972320 - RNA, 19 nt, Homo sapiens
  misc_RNA (1)...(19): siRNA sense strand
ggaauuauguuacgaaggu

SEQ ID NO: 1972321 - RNA, 19 nt, Homo sapiens
  misc_RNA (1)...(19): siRNA sense strand
gaaagaagaaacaugcuaa

SEQ ID NO: 1972322 - RNA, 19 nt, Homo sapiens
  misc_RNA (1)...(19): siRNA sense strand
ucagcaagguguggaauua

SEQ ID NO: 1972323 - RNA, 19 nt, Homo sapiens
  misc_RNA (1)...(19): siRNA sense strand
auacgaagcugaucuugaa

SEQ ID NO: 1972324 - RNA, 19 nt, Homo sapiens
  misc_RNA (1)...(19): siRNA sense strand
ugagggauauucguuauaa

SEQ ID NO: 1972325 - RNA, 19 nt, Homo sapiens
  misc_RNA (1)...(19): siRNA sense strand
gaaaggggcugaugugaau

SEQ ID NO: 1972326 - RNA, 19 nt, Homo sapiens
  misc_RNA (1)...(19): siRNA sense strand
ucaaagaacagcccuuauu

SEQ ID NO: 1972327 - RNA, 19 nt, Homo sapiens
  misc_RNA (1)...(19): siRNA sense strand
ggaaagaagaaacaugcua

SEQ ID NO: 1972328 - RNA, 19 nt, Homo sapiens
  misc_RNA (1)...(19): siRNA sense strand
gcauagauacccacaauuc

SEQ ID NO: 1972329 - RNA, 19 nt, Homo sapiens
  misc_RNA (1)...(19): siRNA sense strand
uaguaaagcuucuucuuca

SEQ ID NO: 1972330 - RNA, 19 nt, Homo sapiens
  misc_RNA (1)...(19): siRNA sense strand
uggguauacuccacuauua

SEQ ID NO: 1972331 - RNA, 19 nt, Homo sapiens
  misc_RNA (1)...(19): siRNA sense strand
caaagaacagcccuuauuc

SEQ ID NO: 1972332 - RNA, 19 nt, Homo sapiens
  misc_RNA (1)...(19): siRNA sense strand
cagcugaggaauauguuua

SEQ ID NO: 1972333 - RNA, 19 nt, Homo sapiens
  misc_RNA (1)...(19): siRNA sense strand
guucuucacuaugcuguuu

SEQ ID NO: 1972334 - RNA, 19 nt, Homo sapiens
  misc_RNA (1)...(19): siRNA sense strand
uaucaaagaacagcccuua

SEQ ID NO: 1972335 - RNA, 19 nt, Homo sapiens
  misc_RNA (1)...(19): siRNA sense strand
ggauggguauacuccacua

SEQ ID NO: 1972336 - RNA, 19 nt, Homo sapiens
  misc_RNA (1)...(19): siRNA sense strand
gaucugagggauauucguu

SEQ ID NO: 1972337 - RNA, 19 nt, Homo sapiens
  misc_RNA (1)...(19): siRNA sense strand
ugaaccaccauguuuagua

SEQ ID NO: 1972338 - RNA, 19 nt, Homo sapiens
  misc_RNA (1)...(19): siRNA sense strand
gaauuauguuacgaaggua

SEQ ID NO: 1972339 - RNA, 19 nt, Homo sapiens
  misc_RNA (1)...(19): siRNA sense strand
uuacgaagguauuguggau

SEQ ID NO: 1972340 - RNA, 19 nt, Homo sapiens
  misc_RNA (1)...(19): siRNA sense strand
cugcauagauacccacaau

SEQ ID NO: 1972341 - RNA, 19 nt, Homo sapiens
  misc_RNA (1)...(19): siRNA sense strand
gauugugccuacuauucuu

SEQ ID NO: 1972342 - RNA, 19 nt, Homo sapiens
  misc_RNA (1)...(19): siRNA sense strand
gcaagguguggaauuaugu

SEQ ID NO: 1972343 - RNA, 19 nt, Homo sapiens
  misc_RNA (1)...(19): siRNA sense strand
gagggauauucguuauaau

SEQ ID NO: 1972344 - RNA, 19 nt, Homo sapiens
  misc_RNA (1)...(19): siRNA sense strand
acgaagguauuguggauuc

SEQ ID NO: 1972345 - RNA, 19 nt, Homo sapiens
  misc_RNA (1)...(19): siRNA sense strand
ucacagcugaggaauaugu

SEQ ID NO: 1972346 - RNA, 19 nt, Homo sapiens
  misc_RNA (1)...(19): siRNA sense strand
acccagaucugagggauau

SEQ ID NO: 1972347 - RNA, 19 nt, Homo sapiens
  misc_RNA (1)...(19): siRNA sense strand
ucugagggauauucguuau

SEQ ID NO: 1972348 - RNA, 19 nt, Homo sapiens
  misc_RNA (1)...(19): siRNA sense strand
ggauugugccuacuauucu

SEQ ID NO: 1972349 - RNA, 19 nt, Homo sapiens
  misc_RNA (1)...(19): siRNA sense strand
uuaguaaagcuucuucuuc

SEQ ID NO: 1972350 - RNA, 19 nt, Homo sapiens
  misc_RNA (1)...(19): siRNA sense strand
ugccuacuauucuucuaaa

SEQ ID NO: 1972351 - RNA, 19 nt, Homo sapiens
  misc_RNA (1)...(19): siRNA sense strand
cauagauacccacaauuca

SEQ ID NO: 1972352 - RNA, 19 nt, Homo sapiens
  misc_RNA (1)...(19): siRNA sense strand
ucacugcgagccauggaaa

SEQ ID NO: 1972353 - RNA, 19 nt, Homo sapiens
  misc_RNA (1)...(19): siRNA sense strand
ugaauacgaagcugaucuu

SEQ ID NO: 1972354 - RNA, 19 nt, Homo sapiens
  misc_RNA (1)...(19): siRNA sense strand
gaauacgaagcugaucuug

SEQ ID NO: 1972355 - RNA, 19 nt, Homo sapiens
  misc_RNA (1)...(19): siRNA sense strand
auacuguucuucacuaugc

SEQ ID NO: 1972356 - RNA, 19 nt, Homo sapiens
  misc_RNA (1)...(19): siRNA sense strand
aaauaaggauggguauacu

SEQ ID NO: 1972357 - RNA, 19 nt, Homo sapiens
  misc_RNA (1)...(19): siRNA sense strand
agcaagguguggaauuaug

SEQ ID NO: 1972358 - RNA, 19 nt, Homo sapiens
  misc_RNA (1)...(19): siRNA sense strand
gugccuacuauucuucuaa

SEQ ID NO: 1972359 - RNA, 19 nt, Homo sapiens
  misc_RNA (1)...(19): siRNA sense strand
ggguauacuccacuauuag

SEQ ID NO: 1972360 - RNA, 19 nt, Homo sapiens
  misc_RNA (1)...(19): siRNA sense strand
gaggauugugccuacuauu

SEQ ID NO: 1972361 - RNA, 19 nt, Homo sapiens
  misc_RNA (1)...(19): siRNA sense strand
caagguguggaauuauguu

SEQ ID NO: 1972362 - RNA, 19 nt, Homo sapiens
  misc_RNA (1)...(19): siRNA sense strand
gguguggaauuauguuacg

SEQ ID NO: 1972363 - RNA, 19 nt, Homo sapiens
  misc_RNA (1)...(19): siRNA sense strand
cgaagguauuguggauuca

SEQ ID NO: 1972364 - RNA, 19 nt, Homo sapiens
  misc_RNA (1)...(19): siRNA sense strand
gacccagaucugagggaua

SEQ ID NO: 1972365 - RNA, 19 nt, Homo sapiens
  misc_RNA (1)...(19): siRNA sense strand
aauacgaagcugaucuuga

SEQ ID NO: 1972366 - RNA, 19 nt, Homo sapiens
  misc_RNA (1)...(19): siRNA sense strand
ggagaaaggggcugaugug

SEQ ID NO: 1972367 - RNA, 19 nt, Homo sapiens
  misc_RNA (1)...(19): siRNA sense strand
ccagaucugagggauauuc

SEQ ID NO: 1972368 - RNA, 19 nt, Homo sapiens
  misc_RNA (1)...(19): siRNA sense strand
uaacagggaucaugaaaga

SEQ ID NO: 1972369 - RNA, 19 nt, Homo sapiens
  misc_RNA (1)...(19): siRNA sense strand
gaaagacaguggaaacaag

SEQ ID NO: 1972370 - RNA, 19 nt, Homo sapiens
  misc_RNA (1)...(19): siRNA sense strand
gacuauacauggcaaauga

SEQ ID NO: 1972371 - RNA, 19 nt, Homo sapiens
  misc_RNA (1)...(19): siRNA sense strand
ccguggagcucuucuauga

SEQ ID NO: 1972372 - RNA, 19 nt, Homo sapiens
  misc_RNA (1)...(19): siRNA sense strand
auacauggcaaaugacuua

SEQ ID NO: 1972373 - RNA, 19 nt, Homo sapiens
  misc_RNA (1)...(19): siRNA sense strand
agagaaggcugguaugucu

SEQ ID NO: 1972374 - RNA, 19 nt, Homo sapiens
  misc_RNA (1)...(19): siRNA sense strand
gaacaagcccagggacuuc

SEQ ID NO: 1972375 - RNA, 19 nt, Homo sapiens
  misc_RNA (1)...(19): siRNA sense strand
uggccaaacccacauguua

SEQ ID NO: 1972376 - RNA, 19 nt, Homo sapiens
  misc_RNA (1)...(19): siRNA sense strand
aaggauuucuugucuguga

SEQ ID NO: 1972377 - RNA, 19 nt, Homo sapiens
  misc_RNA (1)...(19): siRNA sense strand
ugaagaaccagcucaagga

SEQ ID NO: 1972378 - RNA, 19 nt, Homo sapiens
  misc_RNA (1)...(19): siRNA sense strand
gccaaacccacauguuauu

SEQ ID NO: 1972379 - RNA, 19 nt, Homo sapiens
  misc_RNA (1)...(19): siRNA sense strand
gaaguggaugggcccuaua

SEQ ID NO: 1972380 - RNA, 19 nt, Homo sapiens
  misc_RNA (1)...(19): siRNA sense strand
cauggcaaaugacuuaaag

SEQ ID NO: 1972381 - RNA, 19 nt, Homo sapiens
  misc_RNA (1)...(19): siRNA sense strand
gcagagaaggcugguaugu

SEQ ID NO: 1972382 - RNA, 19 nt, Homo sapiens
  misc_RNA (1)...(19): siRNA sense strand
acuuaaagcuccugagaca

SEQ ID NO: 1972383 - RNA, 19 nt, Homo sapiens
  misc_RNA (1)...(19): siRNA sense strand
cauaacagggaucaugaaa

SEQ ID NO: 1972384 - RNA, 19 nt, Homo sapiens
  misc_RNA (1)...(19): siRNA sense strand
ggccaaacccacauguuau

SEQ ID NO: 1972385 - RNA, 19 nt, Homo sapiens
  misc_RNA (1)...(19): siRNA sense strand
ccgcaaaggacuauacaug

SEQ ID NO: 1972386 - RNA, 19 nt, Homo sapiens
  misc_RNA (1)...(19): siRNA sense strand
aaacccacauguuauuugg

SEQ ID NO: 1972387 - RNA, 19 nt, Homo sapiens
  misc_RNA (1)...(19): siRNA sense strand
cgccaaaggugaagaacca

SEQ ID NO: 1972388 - RNA, 19 nt, Homo sapiens
  misc_RNA (1)...(19): siRNA sense strand
ggacuauacauggcaaaug

SEQ ID NO: 1972389 - RNA, 19 nt, Homo sapiens
  misc_RNA (1)...(19): siRNA sense strand
ugacuuaaagcuccugaga

SEQ ID NO: 1972390 - RNA, 19 nt, Homo sapiens
  misc_RNA (1)...(19): siRNA sense strand
ccaaacccacauguuauuu

SEQ ID NO: 1972391 - RNA, 19 nt, Homo sapiens
  misc_RNA (1)...(19): siRNA sense strand
gucaaggaaugaagacauc

SEQ ID NO: 1972392 - RNA, 19 nt, Homo sapiens
  misc_RNA (1)...(19): siRNA sense strand
ugguaugucugcagaacaa

SEQ ID NO: 1972393 - RNA, 19 nt, Homo sapiens
  misc_RNA (1)...(19): siRNA sense strand
cagagaugcuggagaaagc

SEQ ID NO: 1972394 - RNA, 19 nt, Homo sapiens
  misc_RNA (1)...(19): siRNA sense strand
caacgccaaaggugaagaa

SEQ ID NO: 1972395 - RNA, 19 nt, Homo sapiens
  misc_RNA (1)...(19): siRNA sense strand
cgugaaugccagacuuuaa

SEQ ID NO: 1972396 - RNA, 19 nt, Homo sapiens
  misc_RNA (1)...(19): siRNA sense strand
ugaaagacaguggaaacaa

SEQ ID NO: 1972397 - RNA, 19 nt, Homo sapiens
  misc_RNA (1)...(19): siRNA sense strand
agaaguggaugggcccuau

SEQ ID NO: 1972398 - RNA, 19 nt, Homo sapiens
  misc_RNA (1)...(19): siRNA sense strand
gagauccugugccgguauc

SEQ ID NO: 1972399 - RNA, 19 nt, Homo sapiens
  misc_RNA (1)...(19): siRNA sense strand
cugcagauacggagccuuu

SEQ ID NO: 1972400 - RNA, 19 nt, Homo sapiens
  misc_RNA (1)...(19): siRNA sense strand
ggucaaggaaugaagacau

SEQ ID NO: 1972401 - RNA, 19 nt, Homo sapiens
  misc_RNA (1)...(19): siRNA sense strand
gcagauacggagccuuugg

SEQ ID NO: 1972402 - RNA, 19 nt, Homo sapiens
  misc_RNA (1)...(19): siRNA sense strand
gcaccguggagcucuucua

SEQ ID NO: 1972403 - RNA, 19 nt, Homo sapiens
  misc_RNA (1)...(19): siRNA sense strand
ccucauaacagggaucaug

SEQ ID NO: 1972404 - RNA, 19 nt, Homo sapiens
  misc_RNA (1)...(19): siRNA sense strand
ucaccgagccgcagagcau

SEQ ID NO: 1972405 - RNA, 19 nt, Homo sapiens
  misc_RNA (1)...(19): siRNA sense strand
ccagauucccauccacuuc

SEQ ID NO: 1972406 - RNA, 19 nt, Homo sapiens
  misc_RNA (1)...(19): siRNA sense strand
acagggaucaugaaagaca

SEQ ID NO: 1972407 - RNA, 19 nt, Homo sapiens
  misc_RNA (1)...(19): siRNA sense strand
caugaaagacaguggaaac

SEQ ID NO: 1972408 - RNA, 19 nt, Homo sapiens
  misc_RNA (1)...(19): siRNA sense strand
gaauaucuggaacaucaac

SEQ ID NO: 1972409 - RNA, 19 nt, Homo sapiens
  misc_RNA (1)...(19): siRNA sense strand
ucgcaacgccaaaggugaa

SEQ ID NO: 1972410 - RNA, 19 nt, Homo sapiens
  misc_RNA (1)...(19): siRNA sense strand
ggaacaucaaccugcaguu

SEQ ID NO: 1972411 - RNA, 19 nt, Homo sapiens
  misc_RNA (1)...(19): siRNA sense strand
gcugguaugucugcagaac

SEQ ID NO: 1972412 - RNA, 19 nt, Homo sapiens
  misc_RNA (1)...(19): siRNA sense strand
ggauuucuugucugugaug

SEQ ID NO: 1972413 - RNA, 19 nt, Homo sapiens
  misc_RNA (1)...(19): siRNA sense strand
agaacaagcccagggacuu

SEQ ID NO: 1972414 - RNA, 19 nt, Homo sapiens
  misc_RNA (1)...(19): siRNA sense strand
cugcagagaaggcugguau

SEQ ID NO: 1972415 - RNA, 19 nt, Homo sapiens
  misc_RNA (1)...(19): siRNA sense strand
gaacagggccaaacggaaa

SEQ ID NO: 1972416 - RNA, 19 nt, Homo sapiens
  misc_RNA (1)...(19): siRNA sense strand
gaaggaagguuuucuuuug

SEQ ID NO: 1972417 - RNA, 19 nt, Homo sapiens
  misc_RNA (1)...(19): siRNA sense strand
gcugggagcugcugaagga

SEQ ID NO: 1972418 - RNA, 19 nt, Homo sapiens
  misc_RNA (1)...(19): siRNA sense strand
agugaaagcuacuuaauca

SEQ ID NO: 1972419 - RNA, 19 nt, Homo sapiens
  misc_RNA (1)...(19): siRNA sense strand
guauagggacuuugauaaa

SEQ ID NO: 1972420 - RNA, 19 nt, Homo sapiens
  misc_RNA (1)...(19): siRNA sense strand
ucaaugagauggugaacag

SEQ ID NO: 1972421 - RNA, 19 nt, Homo sapiens
  misc_RNA (1)...(19): siRNA sense strand
gauccaggcucagaacuuc

SEQ ID NO: 1972422 - RNA, 19 nt, Homo sapiens
  misc_RNA (1)...(19): siRNA sense strand
gcagauggacugagcacaa

SEQ ID NO: 1972423 - RNA, 19 nt, Homo sapiens
  misc_RNA (1)...(19): siRNA sense strand
cagauggacugagcacaaa

SEQ ID NO: 1972424 - RNA, 19 nt, Homo sapiens
  misc_RNA (1)...(19): siRNA sense strand
auagggacuuugauaaaug

SEQ ID NO: 1972425 - RNA, 19 nt, Homo sapiens
  misc_RNA (1)...(19): siRNA sense strand
gagugaaagcuacuuaauc

SEQ ID NO: 1972426 - RNA, 19 nt, Homo sapiens
  misc_RNA (1)...(19): siRNA sense strand
uuugauaaaugcagguuug

SEQ ID NO: 1972427 - RNA, 19 nt, Homo sapiens
  misc_RNA (1)...(19): siRNA sense strand
ugauaucggcuacgucaaa

SEQ ID NO: 1972428 - RNA, 19 nt, Homo sapiens
  misc_RNA (1)...(19): siRNA sense strand
gcacaaaccacuggcugau

SEQ ID NO: 1972429 - RNA, 19 nt, Homo sapiens
  misc_RNA (1)...(19): siRNA sense strand
gaucgggacagacaagugu

SEQ ID NO: 1972430 - RNA, 19 nt, Homo sapiens
  misc_RNA (1)...(19): siRNA sense strand
ugacuccauugacaaccua

SEQ ID NO: 1972431 - RNA, 19 nt, Homo sapiens
  misc_RNA (1)...(19): siRNA sense strand
gagcugagggaccgauuuc

SEQ ID NO: 1972432 - RNA, 19 nt, Homo sapiens
  misc_RNA (1)...(19): siRNA sense strand
ccauugccuucuauuccua

SEQ ID NO: 1972433 - RNA, 19 nt, Homo sapiens
  misc_RNA (1)...(19): siRNA sense strand
uguauagggacuuugauaa

SEQ ID NO: 1972434 - RNA, 19 nt, Homo sapiens
  misc_RNA (1)...(19): siRNA sense strand
guggagaggaucaaugaga

SEQ ID NO: 1972435 - RNA, 19 nt, Homo sapiens
  misc_RNA (1)...(19): siRNA sense strand
acaaguguguggagaggau

SEQ ID NO: 1972436 - RNA, 19 nt, Homo sapiens
  misc_RNA (1)...(19): siRNA sense strand
gggaagauccuggcagaag

SEQ ID NO: 1972437 - RNA, 19 nt, Homo sapiens
  misc_RNA (1)...(19): siRNA sense strand
aauaguguuugacuccauu

SEQ ID NO: 1972438 - RNA, 19 nt, Homo sapiens
  misc_RNA (1)...(19): siRNA sense strand
ggagcugagggaccgauuu

SEQ ID NO: 1972439 - RNA, 19 nt, Homo sapiens
  misc_RNA (1)...(19): siRNA sense strand
ggagaggaucaaugagaug

SEQ ID NO: 1972440 - RNA, 19 nt, Homo sapiens
  misc_RNA (1)...(19): siRNA sense strand
uggagaggaucaaugagau

SEQ ID NO: 1972441 - RNA, 19 nt, Homo sapiens
  misc_RNA (1)...(19): siRNA sense strand
gaagauccuggcagaagca

SEQ ID NO: 1972442 - RNA, 19 nt, Homo sapiens
  misc_RNA (1)...(19): siRNA sense strand
ucaccuguauagggacuuu

SEQ ID NO: 1972443 - RNA, 19 nt, Homo sapiens
  misc_RNA (1)...(19): siRNA sense strand
guguggagaggaucaauga

SEQ ID NO: 1972444 - RNA, 19 nt, Homo sapiens
  misc_RNA (1)...(19): siRNA sense strand
gagagauccaggcucagaa

SEQ ID NO: 1972445 - RNA, 19 nt, Homo sapiens
  misc_RNA (1)...(19): siRNA sense strand
gggagaugcugggcagaca

SEQ ID NO: 1972446 - RNA, 19 nt, Homo sapiens
  misc_RNA (1)...(19): siRNA sense strand
gaucggcuagggauacuca

SEQ ID NO: 1972447 - RNA, 19 nt, Homo sapiens
  misc_RNA (1)...(19): siRNA sense strand
gauaucggcuacgucaaac

SEQ ID NO: 1972448 - RNA, 19 nt, Homo sapiens
  misc_RNA (1)...(19): siRNA sense strand
guguuugacuccauugaca

SEQ ID NO: 1972449 - RNA, 19 nt, Homo sapiens
  misc_RNA (1)...(19): siRNA sense strand
gauccuggcagaagcagau

SEQ ID NO: 1972450 - RNA, 19 nt, Homo sapiens
  misc_RNA (1)...(19): siRNA sense strand
gauccgagguccuuuuagu

SEQ ID NO: 1972451 - RNA, 19 nt, Homo sapiens
  misc_RNA (1)...(19): siRNA sense strand
ugagugaaagcuacuuaau

SEQ ID NO: 1972452 - RNA, 19 nt, Homo sapiens
  misc_RNA (1)...(19): siRNA sense strand
gggcagacacaucguagca

SEQ ID NO: 1972453 - RNA, 19 nt, Homo sapiens
  misc_RNA (1)...(19): siRNA sense strand
ggcuagggauacucacuca

SEQ ID NO: 1972454 - RNA, 19 nt, Homo sapiens
  misc_RNA (1)...(19): siRNA sense strand
caggccauguuccacuauu

SEQ ID NO: 1972455 - RNA, 19 nt, Homo sapiens
  misc_RNA (1)...(19): siRNA sense strand
gaugggugaugaggguuca

SEQ ID NO: 1972456 - RNA, 19 nt, Homo sapiens
  misc_RNA (1)...(19): siRNA sense strand
aggccauguuccacuauuu

SEQ ID NO: 1972457 - RNA, 19 nt, Homo sapiens
  misc_RNA (1)...(19): siRNA sense strand
gcagaagcagauggacuga

SEQ ID NO: 1972458 - RNA, 19 nt, Homo sapiens
  misc_RNA (1)...(19): siRNA sense strand
ccugagugaaagcuacuua

SEQ ID NO: 1972459 - RNA, 19 nt, Homo sapiens
  misc_RNA (1)...(19): siRNA sense strand
ggauacucacucaccugua

SEQ ID NO: 1972460 - RNA, 19 nt, Homo sapiens
  misc_RNA (1)...(19): siRNA sense strand
ggugggauugugcucauau

SEQ ID NO: 1972461 - RNA, 19 nt, Homo sapiens
  misc_RNA (1)...(19): siRNA sense strand
uagcaguguugcccgagau

SEQ ID NO: 1972462 - RNA, 19 nt, Homo sapiens
  misc_RNA (1)...(19): siRNA sense strand
gcugggcagacacaucgua

SEQ ID NO: 1972463 - RNA, 19 nt, Homo sapiens
  misc_RNA (1)...(19): siRNA sense strand
cuguauagggacuuugaua

SEQ ID NO: 1972464 - RNA, 19 nt, Homo sapiens
  misc_RNA (1)...(19): siRNA sense strand
ggaucaaugagauggugaa

SEQ ID NO: 1972465 - RNA, 19 nt, Homo sapiens
  misc_RNA (1)...(19): siRNA sense strand
ggccauguuccacuauuuc

SEQ ID NO: 1972466 - RNA, 19 nt, Homo sapiens
  misc_RNA (1)...(19): siRNA sense strand
aaauaguguuugacuccau

SEQ ID NO: 1972467 - RNA, 19 nt, Homo sapiens
  misc_RNA (1)...(19): siRNA sense strand
gccauugccuucuauuccu

SEQ ID NO: 1972468 - RNA, 19 nt, Homo sapiens
  misc_RNA (1)...(19): siRNA sense strand
caguguugcccgagauuga

SEQ ID NO: 1972469 - RNA, 19 nt, Homo sapiens
  misc_RNA (1)...(19): siRNA sense strand
cccgcuauaucuucaggaa

SEQ ID NO: 1972470 - RNA, 19 nt, Homo sapiens
  misc_RNA (1)...(19): siRNA sense strand
gggauugugcucauaucug

SEQ ID NO: 1972471 - RNA, 19 nt, Homo sapiens
  misc_RNA (1)...(19): siRNA sense strand
cuucuauuccuacaccuuu

SEQ ID NO: 1972472 - RNA, 19 nt, Homo sapiens
  misc_RNA (1)...(19): siRNA sense strand
gagaugcugggcagacaca

SEQ ID NO: 1972473 - RNA, 19 nt, Homo sapiens
  misc_RNA (1)...(19): siRNA sense strand
augcagguuugcuggguuu

SEQ ID NO: 1972474 - RNA, 19 nt, Homo sapiens
  misc_RNA (1)...(19): siRNA sense strand
acaccaagcagugaaaaua

SEQ ID NO: 1972475 - RNA, 19 nt, Homo sapiens
  misc_RNA (1)...(19): siRNA sense strand
ggagaaaucuuuacauugu

SEQ ID NO: 1972476 - RNA, 19 nt, Homo sapiens
  misc_RNA (1)...(19): siRNA sense strand
gaggauagauuuauacuug

SEQ ID NO: 1972477 - RNA, 19 nt, Homo sapiens
  misc_RNA (1)...(19): siRNA sense strand
uaucagaggugccuucuua

SEQ ID NO: 1972478 - RNA, 19 nt, Homo sapiens
  misc_RNA (1)...(19): siRNA sense strand
gcacaacauugcaagauaa

SEQ ID NO: 1972479 - RNA, 19 nt, Homo sapiens
  misc_RNA (1)...(19): siRNA sense strand
gaaacucucugcacaaaga

SEQ ID NO: 1972480 - RNA, 19 nt, Homo sapiens
  misc_RNA (1)...(19): siRNA sense strand
gccaagacauugcuauuua

SEQ ID NO: 1972481 - RNA, 19 nt, Homo sapiens
  misc_RNA (1)...(19): siRNA sense strand
ggaaauggcuuuagcuauc

SEQ ID NO: 1972482 - RNA, 19 nt, Homo sapiens
  misc_RNA (1)...(19): siRNA sense strand
gaugagagcugcagagaug

SEQ ID NO: 1972483 - RNA, 19 nt, Homo sapiens
  misc_RNA (1)...(19): siRNA sense strand
aaacagagcucguggaugu

SEQ ID NO: 1972484 - RNA, 19 nt, Homo sapiens
  misc_RNA (1)...(19): siRNA sense strand
gagagagccuugucuauug

SEQ ID NO: 1972485 - RNA, 19 nt, Homo sapiens
  misc_RNA (1)...(19): siRNA sense strand
gcagagauguguuacagaa

SEQ ID NO: 1972486 - RNA, 19 nt, Homo sapiens
  misc_RNA (1)...(19): siRNA sense strand
gcaguauuguuguagauua

SEQ ID NO: 1972487 - RNA, 19 nt, Homo sapiens
  misc_RNA (1)...(19): siRNA sense strand
guacagaggaccagaauaa

SEQ ID NO: 1972488 - RNA, 19 nt, Homo sapiens
  misc_RNA (1)...(19): siRNA sense strand
caggaaaucuuacugauga

SEQ ID NO: 1972489 - RNA, 19 nt, Homo sapiens
  misc_RNA (1)...(19): siRNA sense strand
ccaaaggacuucaauuguu

SEQ ID NO: 1972490 - RNA, 19 nt, Homo sapiens
  misc_RNA (1)...(19): siRNA sense strand
cagauaagauuccuaguga

SEQ ID NO: 1972491 - RNA, 19 nt, Homo sapiens
  misc_RNA (1)...(19): siRNA sense strand
gaaagaaggcauuacugua

SEQ ID NO: 1972492 - RNA, 19 nt, Homo sapiens
  misc_RNA (1)...(19): siRNA sense strand
ugaaugaucuuaaggaguu

SEQ ID NO: 1972493 - RNA, 19 nt, Homo sapiens
  misc_RNA (1)...(19): siRNA sense strand
gaagaaggccugugaagga

SEQ ID NO: 1972494 - RNA, 19 nt, Homo sapiens
  misc_RNA (1)...(19): siRNA sense strand
caaaggacuucaauuguug

SEQ ID NO: 1972495 - RNA, 19 nt, Homo sapiens
  misc_RNA (1)...(19): siRNA sense strand
cgacaguaauaaucacuua

SEQ ID NO: 1972496 - RNA, 19 nt, Homo sapiens
  misc_RNA (1)...(19): siRNA sense strand
gaacaacacucagccaaag

SEQ ID NO: 1972497 - RNA, 19 nt, Homo sapiens
  misc_RNA (1)...(19): siRNA sense strand
ugaugaagcugcaaagauu

SEQ ID NO: 1972498 - RNA, 19 nt, Homo sapiens
  misc_RNA (1)...(19): siRNA sense strand
cagaaagagucuacaauug

SEQ ID NO: 1972499 - RNA, 19 nt, Homo sapiens
  misc_RNA (1)...(19): siRNA sense strand
uagaagacaucauagguuu

SEQ ID NO: 1972500 - RNA, 19 nt, Homo sapiens
  misc_RNA (1)...(19): siRNA sense strand
aaacaucuauccuacugua

SEQ ID NO: 1972501 - RNA, 19 nt, Homo sapiens
  misc_RNA (1)...(19): siRNA sense strand
agacaaagcccauaucuug

SEQ ID NO: 1972502 - RNA, 19 nt, Homo sapiens
  misc_RNA (1)...(19): siRNA sense strand
aagcagcucuaguugauua

SEQ ID NO: 1972503 - RNA, 19 nt, Homo sapiens
  misc_RNA (1)...(19): siRNA sense strand
gaacauggcacaaguugau

SEQ ID NO: 1972504 - RNA, 19 nt, Homo sapiens
  misc_RNA (1)...(19): siRNA sense strand
caagauacuuacaauguug

SEQ ID NO: 1972505 - RNA, 19 nt, Homo sapiens
  misc_RNA (1)...(19): siRNA sense strand
gcucagcacuguuucauca

SEQ ID NO: 1972506 - RNA, 19 nt, Homo sapiens
  misc_RNA (1)...(19): siRNA sense strand
ugagaaagauaccgaaguu

SEQ ID NO: 1972507 - RNA, 19 nt, Homo sapiens
  misc_RNA (1)...(19): siRNA sense strand
caacaugaaugaucuuaag

SEQ ID NO: 1972508 - RNA, 19 nt, Homo sapiens
  misc_RNA (1)...(19): siRNA sense strand
ggaucuauauuaccaagaa

SEQ ID NO: 1972509 - RNA, 19 nt, Homo sapiens
  misc_RNA (1)...(19): siRNA sense strand
ugagacaaguucaguguaa

SEQ ID NO: 1972510 - RNA, 19 nt, Homo sapiens
  misc_RNA (1)...(19): siRNA sense strand
ccaagacauugcuauuuaa

SEQ ID NO: 1972511 - RNA, 19 nt, Homo sapiens
  misc_RNA (1)...(19): siRNA sense strand
gaaacaggcagcaacauga

SEQ ID NO: 1972512 - RNA, 19 nt, Homo sapiens
  misc_RNA (1)...(19): siRNA sense strand
uaaugaaacucagcaauug

SEQ ID NO: 1972513 - RNA, 19 nt, Homo sapiens
  misc_RNA (1)...(19): siRNA sense strand
ggugugaccuuggaauuaa

SEQ ID NO: 1972514 - RNA, 19 nt, Homo sapiens
  misc_RNA (1)...(19): siRNA sense strand
caaaggcucuuacccacuu

SEQ ID NO: 1972515 - RNA, 19 nt, Homo sapiens
  misc_RNA (1)...(19): siRNA sense strand
gaagugcuuuguuugcauu

SEQ ID NO: 1972516 - RNA, 19 nt, Homo sapiens
  misc_RNA (1)...(19): siRNA sense strand
cauuagaagugcuuuguuu

SEQ ID NO: 1972517 - RNA, 19 nt, Homo sapiens
  misc_RNA (1)...(19): siRNA sense strand
cagaagaccaagauacuua

SEQ ID NO: 1972518 - RNA, 19 nt, Homo sapiens
  misc_RNA (1)...(19): siRNA sense strand
ucacauaaaugcuaaggau

SEQ ID NO: 1972519 - RNA, 19 nt, Homo sapiens
  misc_RNA (1)...(19): siRNA sense strand
gggaagcucucaagucugu

SEQ ID NO: 1972520 - RNA, 19 nt, Homo sapiens
  misc_RNA (1)...(19): siRNA sense strand
cagcaaagccuaugagaga

SEQ ID NO: 1972521 - RNA, 19 nt, Homo sapiens
  misc_RNA (1)...(19): siRNA sense strand
ggcgaggacuauacuauuu

SEQ ID NO: 1972522 - RNA, 19 nt, Homo sapiens
  misc_RNA (1)...(19): siRNA sense strand
cugcaagacuggauacaua

SEQ ID NO: 1972523 - RNA, 19 nt, Homo sapiens
  misc_RNA (1)...(19): siRNA sense strand
gaauaucauuaccaacuug

SEQ ID NO: 1972524 - RNA, 19 nt, Homo sapiens
  misc_RNA (1)...(19): siRNA sense strand
gaagaucaccaaguacuuu

SEQ ID NO: 1972525 - RNA, 19 nt, Homo sapiens
  misc_RNA (1)...(19): siRNA sense strand
uguuauaccucacaaauga

SEQ ID NO: 1972526 - RNA, 19 nt, Homo sapiens
  misc_RNA (1)...(19): siRNA sense strand
aaagaugacuaugagcuua

SEQ ID NO: 1972527 - RNA, 19 nt, Homo sapiens
  misc_RNA (1)...(19): siRNA sense strand
aagaauaucugaagcugaa

SEQ ID NO: 1972528 - RNA, 19 nt, Homo sapiens
  misc_RNA (1)...(19): siRNA sense strand
ucaaaucaauccagucaga

SEQ ID NO: 1972529 - RNA, 19 nt, Homo sapiens
  misc_RNA (1)...(19): siRNA sense strand
ggacucaaaucauggaaag

SEQ ID NO: 1972530 - RNA, 19 nt, Homo sapiens
  misc_RNA (1)...(19): siRNA sense strand
gcucguggauguuauagga

SEQ ID NO: 1972531 - RNA, 19 nt, Homo sapiens
  misc_RNA (1)...(19): siRNA sense strand
gcacguugguaccuacuga

SEQ ID NO: 1972532 - RNA, 19 nt, Homo sapiens
  misc_RNA (1)...(19): siRNA sense strand
ccaagauacuuacaauguu

SEQ ID NO: 1972533 - RNA, 19 nt, Homo sapiens
  misc_RNA (1)...(19): siRNA sense strand
guuaggagaagcauacuua

SEQ ID NO: 1972534 - RNA, 19 nt, Homo sapiens
  misc_RNA (1)...(19): siRNA sense strand
caacuuggauuaacauacu

SEQ ID NO: 1972535 - RNA, 19 nt, Homo sapiens
  misc_RNA (1)...(19): siRNA sense strand
ggaaagaaggcauuacugu

SEQ ID NO: 1972536 - RNA, 19 nt, Homo sapiens
  misc_RNA (1)...(19): siRNA sense strand
caggaaauguggcucauau

SEQ ID NO: 1972537 - RNA, 19 nt, Homo sapiens
  misc_RNA (1)...(19): siRNA sense strand
gggcagcaguauuguugua

SEQ ID NO: 1972538 - RNA, 19 nt, Homo sapiens
  misc_RNA (1)...(19): siRNA sense strand
gcacuguuaucugcuguuu

SEQ ID NO: 1972539 - RNA, 19 nt, Homo sapiens
  misc_RNA (1)...(19): siRNA sense strand
ggaaauguggcucauauuc

SEQ ID NO: 1972540 - RNA, 19 nt, Homo sapiens
  misc_RNA (1)...(19): siRNA sense strand
cugcaaagauuauggaaga

SEQ ID NO: 1972541 - RNA, 19 nt, Homo sapiens
  misc_RNA (1)...(19): siRNA sense strand
ugaauuagaugacacugau

SEQ ID NO: 1972542 - RNA, 19 nt, Homo sapiens
  misc_RNA (1)...(19): siRNA sense strand
aaacgaacaucuacaacug

SEQ ID NO: 1972543 - RNA, 19 nt, Homo sapiens
  misc_RNA (1)...(19): siRNA sense strand
acagugguauuggaaauua

SEQ ID NO: 1972544 - RNA, 19 nt, Homo sapiens
  misc_RNA (1)...(19): siRNA sense strand
guguggagcuugaagauau

SEQ ID NO: 1972545 - RNA, 19 nt, Homo sapiens
  misc_RNA (1)...(19): siRNA sense strand
acagaaggguuaaaggaaa

SEQ ID NO: 1972546 - RNA, 19 nt, Homo sapiens
  misc_RNA (1)...(19): siRNA sense strand
gggaagcaguucagcagaa

SEQ ID NO: 1972547 - RNA, 19 nt, Homo sapiens
  misc_RNA (1)...(19): siRNA sense strand
gaaggagcauuagguuaug

SEQ ID NO: 1972548 - RNA, 19 nt, Homo sapiens
  misc_RNA (1)...(19): siRNA sense strand
ggacuauacuauuugaaag

SEQ ID NO: 1972549 - RNA, 19 nt, Homo sapiens
  misc_RNA (1)...(19): siRNA sense strand
uagcaaacuuguaugagaa

SEQ ID NO: 1972550 - RNA, 19 nt, Homo sapiens
  misc_RNA (1)...(19): siRNA sense strand
acacuuauaugccaaagau

SEQ ID NO: 1972551 - RNA, 19 nt, Homo sapiens
  misc_RNA (1)...(19): siRNA sense strand
guaagacaguguuaaagca

SEQ ID NO: 1972552 - RNA, 19 nt, Homo sapiens
  misc_RNA (1)...(19): siRNA sense strand
aagcagcacuuaaugaguu

SEQ ID NO: 1972553 - RNA, 19 nt, Homo sapiens
  misc_RNA (1)...(19): siRNA sense strand
gcauuggcuuuauucauga

SEQ ID NO: 1972554 - RNA, 19 nt, Homo sapiens
  misc_RNA (1)...(19): siRNA sense strand
cuacagaacuaaauaugca

SEQ ID NO: 1972555 - RNA, 19 nt, Homo sapiens
  misc_RNA (1)...(19): siRNA sense strand
ggcagaagcccaagucaaa

SEQ ID NO: 1972556 - RNA, 19 nt, Homo sapiens
  misc_RNA (1)...(19): siRNA sense strand
gaaggccugugaaggaaug

SEQ ID NO: 1972557 - RNA, 19 nt, Homo sapiens
  misc_RNA (1)...(19): siRNA sense strand
gaucaccaaguacuuuaua

SEQ ID NO: 1972558 - RNA, 19 nt, Homo sapiens
  misc_RNA (1)...(19): siRNA sense strand
gagcugcagagauguguua

SEQ ID NO: 1972559 - RNA, 19 nt, Homo sapiens
  misc_RNA (1)...(19): siRNA sense strand
gcacuaaagaccauucaga

SEQ ID NO: 1972560 - RNA, 19 nt, Homo sapiens
  misc_RNA (1)...(19): siRNA sense strand
gcaggaugcuacacuguca

SEQ ID NO: 1972561 - RNA, 19 nt, Homo sapiens
  misc_RNA (1)...(19): siRNA sense strand
gcagugagacucgacagua

SEQ ID NO: 1972562 - RNA, 19 nt, Homo sapiens
  misc_RNA (1)...(19): siRNA sense strand
gcaaauccuaggcaaauau

SEQ ID NO: 1972563 - RNA, 19 nt, Homo sapiens
  misc_RNA (1)...(19): siRNA sense strand
gaagagacaagaaaagaua

SEQ ID NO: 1972564 - RNA, 19 nt, Homo sapiens
  misc_RNA (1)...(19): siRNA sense strand
caaauuuccucaugagucu

SEQ ID NO: 1972565 - RNA, 19 nt, Homo sapiens
  misc_RNA (1)...(19): siRNA sense strand
gcauagaccuaaagaagcu

SEQ ID NO: 1972566 - RNA, 19 nt, Homo sapiens
  misc_RNA (1)...(19): siRNA sense strand
ucagccagccguuaucuua

SEQ ID NO: 1972567 - RNA, 19 nt, Homo sapiens
  misc_RNA (1)...(19): siRNA sense strand
caucauagguuuugcauug

SEQ ID NO: 1972568 - RNA, 19 nt, Homo sapiens
  misc_RNA (1)...(19): siRNA sense strand
gaagugaagacugcucuaa

SEQ ID NO: 1972569 - RNA, 19 nt, Homo sapiens
  misc_RNA (1)...(19): siRNA sense strand
gaaagaaggaaaacaagua

SEQ ID NO: 1972570 - RNA, 19 nt, Homo sapiens
  misc_RNA (1)...(19): siRNA sense strand
aagauuaugugccugcuuu

SEQ ID NO: 1972571 - RNA, 19 nt, Homo sapiens
  misc_RNA (1)...(19): siRNA sense strand
uaaggaggcuguagcucaa

SEQ ID NO: 1972572 - RNA, 19 nt, Homo sapiens
  misc_RNA (1)...(19): siRNA sense strand
caacagccuugaaguccuu

SEQ ID NO: 1972573 - RNA, 19 nt, Homo sapiens
  misc_RNA (1)...(19): siRNA sense strand
ggagaagcauacuuaagca

SEQ ID NO: 1972574 - RNA, 19 nt, Homo sapiens
  misc_RNA (1)...(19): siRNA sense strand
gcaagacuggauacauaua

SEQ ID NO: 1972575 - RNA, 19 nt, Homo sapiens
  misc_RNA (1)...(19): siRNA sense strand
gagcagagcaagaugaaua

SEQ ID NO: 1972576 - RNA, 19 nt, Homo sapiens
  misc_RNA (1)...(19): siRNA sense strand
gaaggacuauccaagcauu

SEQ ID NO: 1972577 - RNA, 19 nt, Homo sapiens
  misc_RNA (1)...(19): siRNA sense strand
gcacaaggucuuccaguuu

SEQ ID NO: 1972578 - RNA, 19 nt, Homo sapiens
  misc_RNA (1)...(19): siRNA sense strand
gcuaucccguggaagauua

SEQ ID NO: 1972579 - RNA, 19 nt, Homo sapiens
  misc_RNA (1)...(19): siRNA sense strand
uagaagaccuuaagaagca

SEQ ID NO: 1972580 - RNA, 19 nt, Homo sapiens
  misc_RNA (1)...(19): siRNA sense strand
ccagacagcucccagacuu

SEQ ID NO: 1972581 - RNA, 19 nt, Homo sapiens
  misc_RNA (1)...(19): siRNA sense strand
ucucaucaccuuuccauua

SEQ ID NO: 1972582 - RNA, 19 nt, Homo sapiens
  misc_RNA (1)...(19): siRNA sense strand
ccaauccucuguaaauaau

SEQ ID NO: 1972583 - RNA, 19 nt, Homo sapiens
  misc_RNA (1)...(19): siRNA sense strand
gcacugcagcuguuugaaa

SEQ ID NO: 1972584 - RNA, 19 nt, Homo sapiens
  misc_RNA (1)...(19): siRNA sense strand
gaagcgauguagccucguu

SEQ ID NO: 1972585 - RNA, 19 nt, Homo sapiens
  misc_RNA (1)...(19): siRNA sense strand
caccaauccucuguaaaua

SEQ ID NO: 1972586 - RNA, 19 nt, Homo sapiens
  misc_RNA (1)...(19): siRNA sense strand
cagaagcacugcagcuguu

SEQ ID NO: 1972587 - RNA, 19 nt, Homo sapiens
  misc_RNA (1)...(19): siRNA sense strand
ccaacaaauuccuuccaaa

SEQ ID NO: 1972588 - RNA, 19 nt, Homo sapiens
  misc_RNA (1)...(19): siRNA sense strand
gaaccuagggcccuuaagu

SEQ ID NO: 1972589 - RNA, 19 nt, Homo sapiens
  misc_RNA (1)...(19): siRNA sense strand
ccaaaugccagacugauug

SEQ ID NO: 1972590 - RNA, 19 nt, Homo sapiens
  misc_RNA (1)...(19): siRNA sense strand
gauaauaaugaccuuggua

SEQ ID NO: 1972591 - RNA, 19 nt, Homo sapiens
  misc_RNA (1)...(19): siRNA sense strand
ccaccaauccucuguaaau

SEQ ID NO: 1972592 - RNA, 19 nt, Homo sapiens
  misc_RNA (1)...(19): siRNA sense strand
gaaaauugcaugcuugauu

SEQ ID NO: 1972593 - RNA, 19 nt, Homo sapiens
  misc_RNA (1)...(19): siRNA sense strand
caaauuccuuccaaacagu

SEQ ID NO: 1972594 - RNA, 19 nt, Homo sapiens
  misc_RNA (1)...(19): siRNA sense strand
ggacgacuuccaugagaaa

SEQ ID NO: 1972595 - RNA, 19 nt, Homo sapiens
  misc_RNA (1)...(19): siRNA sense strand
gcaacaguuucucauucuu

SEQ ID NO: 1972596 - RNA, 19 nt, Homo sapiens
  misc_RNA (1)...(19): siRNA sense strand
agagcaagaugaauacaau

SEQ ID NO: 1972597 - RNA, 19 nt, Homo sapiens
  misc_RNA (1)...(19): siRNA sense strand
gcggacgacuuccaugaga

SEQ ID NO: 1972598 - RNA, 19 nt, Homo sapiens
  misc_RNA (1)...(19): siRNA sense strand
caccaccaauccucuguaa

SEQ ID NO: 1972599 - RNA, 19 nt, Homo sapiens
  misc_RNA (1)...(19): siRNA sense strand
cacaaggucuuccaguuuc

SEQ ID NO: 1972600 - RNA, 19 nt, Homo sapiens
  misc_RNA (1)...(19): siRNA sense strand
caaaggagcagagcaagau

SEQ ID NO: 1972601 - RNA, 19 nt, Homo sapiens
  misc_RNA (1)...(19): siRNA sense strand
gcaaaggagcagagcaaga

SEQ ID NO: 1972602 - RNA, 19 nt, Homo sapiens
  misc_RNA (1)...(19): siRNA sense strand
ggacuucauccacgccuuu

SEQ ID NO: 1972603 - RNA, 19 nt, Homo sapiens
  misc_RNA (1)...(19): siRNA sense strand
aagcaacaguuucucauuc

SEQ ID NO: 1972604 - RNA, 19 nt, Homo sapiens
  misc_RNA (1)...(19): siRNA sense strand
caacaacacccucaacaac

SEQ ID NO: 1972605 - RNA, 19 nt, Homo sapiens
  misc_RNA (1)...(19): siRNA sense strand
cuagggcccuuaagugaga

SEQ ID NO: 1972606 - RNA, 19 nt, Homo sapiens
  misc_RNA (1)...(19): siRNA sense strand
ggacuauccaagcauuaaa

SEQ ID NO: 1972607 - RNA, 19 nt, Homo sapiens
  misc_RNA (1)...(19): siRNA sense strand
ggacguucuucuacgacaa

SEQ ID NO: 1972608 - RNA, 19 nt, Homo sapiens
  misc_RNA (1)...(19): siRNA sense strand
ggaccacagaccucuauga

SEQ ID NO: 1972609 - RNA, 19 nt, Homo sapiens
  misc_RNA (1)...(19): siRNA sense strand
caacaaauuccuuccaaac

SEQ ID NO: 1972610 - RNA, 19 nt, Homo sapiens
  misc_RNA (1)...(19): siRNA sense strand
cagacuaucucuacuuugc

SEQ ID NO: 1972611 - RNA, 19 nt, Homo sapiens
  misc_RNA (1)...(19): siRNA sense strand
guacucagacuaucucuac

SEQ ID NO: 1972612 - RNA, 19 nt, Homo sapiens
  misc_RNA (1)...(19): siRNA sense strand
auaaugaccuugguaaugg

SEQ ID NO: 1972613 - RNA, 19 nt, Homo sapiens
  misc_RNA (1)...(19): siRNA sense strand
acaguaagcagaugaacuu

SEQ ID NO: 1972614 - RNA, 19 nt, Homo sapiens
  misc_RNA (1)...(19): siRNA sense strand
gacuaucucuacuuugcaa

SEQ ID NO: 1972615 - RNA, 19 nt, Homo sapiens
  misc_RNA (1)...(19): siRNA sense strand
gccagugccuccacgaugu

SEQ ID NO: 1972616 - RNA, 19 nt, Homo sapiens
  misc_RNA (1)...(19): siRNA sense strand
caagcaacaguuucucauu

SEQ ID NO: 1972617 - RNA, 19 nt, Homo sapiens
  misc_RNA (1)...(19): siRNA sense strand
gagguuguacucagacuau

SEQ ID NO: 1972618 - RNA, 19 nt, Homo sapiens
  misc_RNA (1)...(19): siRNA sense strand
gcucuaugcuguguaccuu

SEQ ID NO: 1972619 - RNA, 19 nt, Homo sapiens
  misc_RNA (1)...(19): siRNA sense strand
ucaacagcaucacaacuag

SEQ ID NO: 1972620 - RNA, 19 nt, Homo sapiens
  misc_RNA (1)...(19): siRNA sense strand
acaaauuccuuccaaacag

SEQ ID NO: 1972621 - RNA, 19 nt, Homo sapiens
  misc_RNA (1)...(19): siRNA sense strand
caacaguuucucauucuuc

SEQ ID NO: 1972622 - RNA, 19 nt, Homo sapiens
  misc_RNA (1)...(19): siRNA sense strand
aaaggagcaucaccaccaa

SEQ ID NO: 1972623 - RNA, 19 nt, Homo sapiens
  misc_RNA (1)...(19): siRNA sense strand
gcgccugcgucuacaacaa

SEQ ID NO: 1972624 - RNA, 19 nt, Homo sapiens
  misc_RNA (1)...(19): siRNA sense strand
uaaauccgcggacgacuuc

SEQ ID NO: 1972625 - RNA, 19 nt, Homo sapiens
  misc_RNA (1)...(19): siRNA sense strand
ggaaucguccgccuaagag

SEQ ID NO: 1972626 - RNA, 19 nt, Homo sapiens
  misc_RNA (1)...(19): siRNA sense strand
aauaaugccuggacguucu

SEQ ID NO: 1972627 - RNA, 19 nt, Homo sapiens
  misc_RNA (1)...(19): siRNA sense strand
cucagacuaucucuacuuu

SEQ ID NO: 1972628 - RNA, 19 nt, Homo sapiens
  misc_RNA (1)...(19): siRNA sense strand
gccaaaugccagacugauu

SEQ ID NO: 1972629 - RNA, 19 nt, Homo sapiens
  misc_RNA (1)...(19): siRNA sense strand
ccuugguaauggcuucuua

SEQ ID NO: 1972630 - RNA, 19 nt, Homo sapiens
  misc_RNA (1)...(19): siRNA sense strand
caaguucuccgccaucaag

SEQ ID NO: 1972631 - RNA, 19 nt, Homo sapiens
  misc_RNA (1)...(19): siRNA sense strand
aaacccaagugacacaaag

SEQ ID NO: 1972632 - RNA, 19 nt, Homo sapiens
  misc_RNA (1)...(19): siRNA sense strand
cggaagcgcuuuggaaucg

SEQ ID NO: 1972633 - RNA, 19 nt, Homo sapiens
  misc_RNA (1)...(19): siRNA sense strand
aauaaugaccuugguaaug

SEQ ID NO: 1972634 - RNA, 19 nt, Homo sapiens
  misc_RNA (1)...(19): siRNA sense strand
cccaacaaauuccuuccaa

SEQ ID NO: 1972635 - RNA, 19 nt, Homo sapiens
  misc_RNA (1)...(19): siRNA sense strand
accaagagcuucugaucuc

SEQ ID NO: 1972636 - RNA, 19 nt, Homo sapiens
  misc_RNA (1)...(19): siRNA sense strand
gacaagcaacaguuucuca

SEQ ID NO: 1972637 - RNA, 19 nt, Homo sapiens
  misc_RNA (1)...(19): siRNA sense strand
uggagagguuguacucaga

SEQ ID NO: 1972638 - RNA, 19 nt, Homo sapiens
  misc_RNA (1)...(19): siRNA sense strand
ccaagagcuucugaucuca

SEQ ID NO: 1972639 - RNA, 19 nt, Homo sapiens
  misc_RNA (1)...(19): siRNA sense strand
ggacugaagggaacgaaaa

SEQ ID NO: 1972640 - RNA, 19 nt, Homo sapiens
  misc_RNA (1)...(19): siRNA sense strand
gaucucaucaccuuuccau

SEQ ID NO: 1972641 - RNA, 19 nt, Homo sapiens
  misc_RNA (1)...(19): siRNA sense strand
ugcacaaggucuuccaguu

SEQ ID NO: 1972642 - RNA, 19 nt, Homo sapiens
  misc_RNA (1)...(19): siRNA sense strand
cagcaucacaacuaggauu

SEQ ID NO: 1972643 - RNA, 19 nt, Homo sapiens
  misc_RNA (1)...(19): siRNA sense strand
cagacagcucccagacuua

SEQ ID NO: 1972644 - RNA, 19 nt, Homo sapiens
  misc_RNA (1)...(19): siRNA sense strand
gaagcacugcagcuguuug

SEQ ID NO: 1972645 - RNA, 19 nt, Homo sapiens
  misc_RNA (1)...(19): siRNA sense strand
ccaccaagagcuucugauc

SEQ ID NO: 1972646 - RNA, 19 nt, Homo sapiens
  misc_RNA (1)...(19): siRNA sense strand
gcacaccagauccaucaag

SEQ ID NO: 1972647 - RNA, 19 nt, Homo sapiens
  misc_RNA (1)...(19): siRNA sense strand
agaccgcuaucccguggaa

SEQ ID NO: 1972648 - RNA, 19 nt, Homo sapiens
  misc_RNA (1)...(19): siRNA sense strand
caucacaacuaggauugag

SEQ ID NO: 1972649 - RNA, 19 nt, Homo sapiens
  misc_RNA (1)...(19): siRNA sense strand
acaacaacacccucaacaa

SEQ ID NO: 1972650 - RNA, 19 nt, Homo sapiens
  misc_RNA (1)...(19): siRNA sense strand
cggacgacuuccaugagaa

SEQ ID NO: 1972651 - RNA, 19 nt, Homo sapiens
  misc_RNA (1)...(19): siRNA sense strand
ccuacgugcucuacuccaa

SEQ ID NO: 1972652 - RNA, 19 nt, Homo sapiens
  misc_RNA (1)...(19): siRNA sense strand
caaaugccagacugauugu

SEQ ID NO: 1972653 - RNA, 19 nt, Homo sapiens
  misc_RNA (1)...(19): siRNA sense strand
gcccaucacacagaagauu

SEQ ID NO: 1972654 - RNA, 19 nt, Homo sapiens
  misc_RNA (1)...(19): siRNA sense strand
gcuccagguugggcucuau

SEQ ID NO: 1972655 - RNA, 19 nt, Homo sapiens
  misc_RNA (1)...(19): siRNA sense strand
uugcaugcuugauuauuca

SEQ ID NO: 1972656 - RNA, 19 nt, Homo sapiens
  misc_RNA (1)...(19): siRNA sense strand
acaagcagcaggucaacug

SEQ ID NO: 1972657 - RNA, 19 nt, Homo sapiens
  misc_RNA (1)...(19): siRNA sense strand
accaauccucuguaaauaa

SEQ ID NO: 1972658 - RNA, 19 nt, Homo sapiens
  misc_RNA (1)...(19): siRNA sense strand
gugcaaaggagaaaacaaa

SEQ ID NO: 1972659 - RNA, 19 nt, Homo sapiens
  misc_RNA (1)...(19): siRNA sense strand
gggacccuguggagagguu

SEQ ID NO: 1972660 - RNA, 19 nt, Homo sapiens
  misc_RNA (1)...(19): siRNA sense strand
cagagcaagaugaauacaa

SEQ ID NO: 1972661 - RNA, 19 nt, Homo sapiens
  misc_RNA (1)...(19): siRNA sense strand
uggaaucguccgccuaaga

SEQ ID NO: 1972662 - RNA, 19 nt, Homo sapiens
  misc_RNA (1)...(19): siRNA sense strand
cugccgcacuucuacauca

SEQ ID NO: 1972663 - RNA, 19 nt, Homo sapiens
  misc_RNA (1)...(19): siRNA sense strand
gacuauccaagcauuaaau

SEQ ID NO: 1972664 - RNA, 19 nt, Homo sapiens
  misc_RNA (1)...(19): siRNA sense strand
ggcgagccaccguuucuga

SEQ ID NO: 1972665 - RNA, 19 nt, Homo sapiens
  misc_RNA (1)...(19): siRNA sense strand
ccgcacuucuacaucauag

SEQ ID NO: 1972666 - RNA, 19 nt, Homo sapiens
  misc_RNA (1)...(19): siRNA sense strand
cauccaacgucaaguacac

SEQ ID NO: 1972667 - RNA, 19 nt, Homo sapiens
  misc_RNA (1)...(19): siRNA sense strand
gcaaaggagaaaacaaaau

SEQ ID NO: 1972668 - RNA, 19 nt, Homo sapiens
  misc_RNA (1)...(19): siRNA sense strand
caugagaaagugacagaag

SEQ ID NO: 1972669 - RNA, 19 nt, Homo sapiens
  misc_RNA (1)...(19): siRNA sense strand
gagcaagaugaauacaauc

SEQ ID NO: 1972670 - RNA, 19 nt, Homo sapiens
  misc_RNA (1)...(19): siRNA sense strand
ccgcacaccagauccauca

SEQ ID NO: 1972671 - RNA, 19 nt, Homo sapiens
  misc_RNA (1)...(19): siRNA sense strand
gaccacagaccucuaugac

SEQ ID NO: 1972672 - RNA, 19 nt, Homo sapiens
  misc_RNA (1)...(19): siRNA sense strand
gucaaguucuccgccauca

SEQ ID NO: 1972673 - RNA, 19 nt, Homo sapiens
  misc_RNA (1)...(19): siRNA sense strand
ccuggacguucuucuacga

SEQ ID NO: 1972674 - RNA, 19 nt, Homo sapiens
  misc_RNA (1)...(19): siRNA sense strand
gaaucguccgccuaagaga

SEQ ID NO: 1972675 - RNA, 19 nt, Homo sapiens
  misc_RNA (1)...(19): siRNA sense strand
gagcagagcaagaugaaua

SEQ ID NO: 1972676 - RNA, 19 nt, Homo sapiens
  misc_RNA (1)...(19): siRNA sense strand
gaaggacuauccaagcauu

SEQ ID NO: 1972677 - RNA, 19 nt, Homo sapiens
  misc_RNA (1)...(19): siRNA sense strand
gcacaaggucuuccaguuu

SEQ ID NO: 1972678 - RNA, 19 nt, Homo sapiens
  misc_RNA (1)...(19): siRNA sense strand
gcuaucccguggaagauua

SEQ ID NO: 1972679 - RNA, 19 nt, Homo sapiens
  misc_RNA (1)...(19): siRNA sense strand
uagaagaccuuaagaagca

SEQ ID NO: 1972680 - RNA, 19 nt, Homo sapiens
  misc_RNA (1)...(19): siRNA sense strand
ccagacagcucccagacuu

SEQ ID NO: 1972681 - RNA, 19 nt, Homo sapiens
  misc_RNA (1)...(19): siRNA sense strand
ucucaucaccuuuccauua

SEQ ID NO: 1972682 - RNA, 19 nt, Homo sapiens
  misc_RNA (1)...(19): siRNA sense strand
ccaauccucuguaaauaau

SEQ ID NO: 1972683 - RNA, 19 nt, Homo sapiens
  misc_RNA (1)...(19): siRNA sense strand
gcacugcagcuguuugaaa

SEQ ID NO: 1972684 - RNA, 19 nt, Homo sapiens
  misc_RNA (1)...(19): siRNA sense strand
gaagcgauguagccucguu

SEQ ID NO: 1972685 - RNA, 19 nt, Homo sapiens
  misc_RNA (1)...(19): siRNA sense strand
caccaauccucuguaaaua

SEQ ID NO: 1972686 - RNA, 19 nt, Homo sapiens
  misc_RNA (1)...(19): siRNA sense strand
cagaagcacugcagcuguu

SEQ ID NO: 1972687 - RNA, 19 nt, Homo sapiens
  misc_RNA (1)...(19): siRNA sense strand
ccaacaaauuccuuccaaa

SEQ ID NO: 1972688 - RNA, 19 nt, Homo sapiens
  misc_RNA (1)...(19): siRNA sense strand
gaaccuagggcccuuaagu

SEQ ID NO: 1972689 - RNA, 19 nt, Homo sapiens
  misc_RNA (1)...(19): siRNA sense strand
ccaaaugccagacugauug

SEQ ID NO: 1972690 - RNA, 19 nt, Homo sapiens
  misc_RNA (1)...(19): siRNA sense strand
gauaauaaugaccuuggua

SEQ ID NO: 1972691 - RNA, 19 nt, Homo sapiens
  misc_RNA (1)...(19): siRNA sense strand
ccaccaauccucuguaaau

SEQ ID NO: 1972692 - RNA, 19 nt, Homo sapiens
  misc_RNA (1)...(19): siRNA sense strand
gaaaauugcaugcuugauu

SEQ ID NO: 1972693 - RNA, 19 nt, Homo sapiens
  misc_RNA (1)...(19): siRNA sense strand
caaauuccuuccaaacagu

SEQ ID NO: 1972694 - RNA, 19 nt, Homo sapiens
  misc_RNA (1)...(19): siRNA sense strand
ggacgacuuccaugagaaa

SEQ ID NO: 1972695 - RNA, 19 nt, Homo sapiens
  misc_RNA (1)...(19): siRNA sense strand
gcaacaguuucucauucuu

SEQ ID NO: 1972696 - RNA, 19 nt, Homo sapiens
  misc_RNA (1)...(19): siRNA sense strand
agagcaagaugaauacaau

SEQ ID NO: 1972697 - RNA, 19 nt, Homo sapiens
  misc_RNA (1)...(19): siRNA sense strand
gcggacgacuuccaugaga

SEQ ID NO: 1972698 - RNA, 19 nt, Homo sapiens
  misc_RNA (1)...(19): siRNA sense strand
caccaccaauccucuguaa

SEQ ID NO: 1972699 - RNA, 19 nt, Homo sapiens
  misc_RNA (1)...(19): siRNA sense strand
cacaaggucuuccaguuuc

SEQ ID NO: 1972700 - RNA, 19 nt, Homo sapiens
  misc_RNA (1)...(19): siRNA sense strand
caaaggagcagagcaagau

SEQ ID NO: 1972701 - RNA, 19 nt, Homo sapiens
  misc_RNA (1)...(19): siRNA sense strand
gcaaaggagcagagcaaga

SEQ ID NO: 1972702 - RNA, 19 nt, Homo sapiens
  misc_RNA (1)...(19): siRNA sense strand
ggacuucauccacgccuuu

SEQ ID NO: 1972703 - RNA, 19 nt, Homo sapiens
  misc_RNA (1)...(19): siRNA sense strand
aagcaacaguuucucauuc

SEQ ID NO: 1972704 - RNA, 19 nt, Homo sapiens
  misc_RNA (1)...(19): siRNA sense strand
caacaacacccucaacaac

SEQ ID NO: 1972705 - RNA, 19 nt, Homo sapiens
  misc_RNA (1)...(19): siRNA sense strand
ggacuauccaagcauuaaa

SEQ ID NO: 1972706 - RNA, 19 nt, Homo sapiens
  misc_RNA (1)...(19): siRNA sense strand
ggacguucuucuacgacaa

SEQ ID NO: 1972707 - RNA, 19 nt, Homo sapiens
  misc_RNA (1)...(19): siRNA sense strand
ggaccacagaccucuauga

SEQ ID NO: 1972708 - RNA, 19 nt, Homo sapiens
  misc_RNA (1)...(19): siRNA sense strand
caacaaauuccuuccaaac

SEQ ID NO: 1972709 - RNA, 19 nt, Homo sapiens
  misc_RNA (1)...(19): siRNA sense strand
cagacuaucucuacuuugc

SEQ ID NO: 1972710 - RNA, 19 nt, Homo sapiens
  misc_RNA (1)...(19): siRNA sense strand
guacucagacuaucucuac

SEQ ID NO: 1972711 - RNA, 19 nt, Homo sapiens
  misc_RNA (1)...(19): siRNA sense strand
auaaugaccuugguaaugg

SEQ ID NO: 1972712 - RNA, 19 nt, Homo sapiens
  misc_RNA (1)...(19): siRNA sense strand
gacuaucucuacuuugcaa

SEQ ID NO: 1972713 - RNA, 19 nt, Homo sapiens
  misc_RNA (1)...(19): siRNA sense strand
acaguaagcagaugaacuu

SEQ ID NO: 1972714 - RNA, 19 nt, Homo sapiens
  misc_RNA (1)...(19): siRNA sense strand
gccagugccuccacgaugu

SEQ ID NO: 1972715 - RNA, 19 nt, Homo sapiens
  misc_RNA (1)...(19): siRNA sense strand
caagcaacaguuucucauu

SEQ ID NO: 1972716 - RNA, 19 nt, Homo sapiens
  misc_RNA (1)...(19): siRNA sense strand
gagguuguacucagacuau

SEQ ID NO: 1972717 - RNA, 19 nt, Homo sapiens
  misc_RNA (1)...(19): siRNA sense strand
gcucuaugcuguguaccuu

SEQ ID NO: 1972718 - RNA, 19 nt, Homo sapiens
  misc_RNA (1)...(19): siRNA sense strand
ucaacagcaucacaacuag

SEQ ID NO: 1972719 - RNA, 19 nt, Homo sapiens
  misc_RNA (1)...(19): siRNA sense strand
acaaauuccuuccaaacag

SEQ ID NO: 1972720 - RNA, 19 nt, Homo sapiens
  misc_RNA (1)...(19): siRNA sense strand
caacaguuucucauucuuc

SEQ ID NO: 1972721 - RNA, 19 nt, Homo sapiens
  misc_RNA (1)...(19): siRNA sense strand
aaaggagcaucaccaccaa

SEQ ID NO: 1972722 - RNA, 19 nt, Homo sapiens
  misc_RNA (1)...(19): siRNA sense strand
gcgccugcgucuacaacaa

SEQ ID NO: 1972723 - RNA, 19 nt, Homo sapiens
  misc_RNA (1)...(19): siRNA sense strand
uaaauccgcggacgacuuc

SEQ ID NO: 1972724 - RNA, 19 nt, Homo sapiens
  misc_RNA (1)...(19): siRNA sense strand
ggaaucguccgccuaagag

SEQ ID NO: 1972725 - RNA, 19 nt, Homo sapiens
  misc_RNA (1)...(19): siRNA sense strand
aauaaugccuggacguucu

SEQ ID NO: 1972726 - RNA, 19 nt, Homo sapiens
  misc_RNA (1)...(19): siRNA sense strand
cucagacuaucucuacuuu

SEQ ID NO: 1972727 - RNA, 19 nt, Homo sapiens
  misc_RNA (1)...(19): siRNA sense strand
gccaaaugccagacugauu

SEQ ID NO: 1972728 - RNA, 19 nt, Homo sapiens
  misc_RNA (1)...(19): siRNA sense strand
ccuugguaauggcuucuua

SEQ ID NO: 1972729 - RNA, 19 nt, Homo sapiens
  misc_RNA (1)...(19): siRNA sense strand
caaguucuccgccaucaag

SEQ ID NO: 1972730 - RNA, 19 nt, Homo sapiens
  misc_RNA (1)...(19): siRNA sense strand
aauaaugaccuugguaaug

SEQ ID NO: 1972731 - RNA, 19 nt, Homo sapiens
  misc_RNA (1)...(19): siRNA sense strand
cggaagcgcuuuggaaucg

SEQ ID NO: 1972732 - RNA, 19 nt, Homo sapiens
  misc_RNA (1)...(19): siRNA sense strand
aaacccaagugacacaaag

SEQ ID NO: 1972733 - RNA, 19 nt, Homo sapiens
  misc_RNA (1)...(19): siRNA sense strand
cccaacaaauuccuuccaa

SEQ ID NO: 1972734 - RNA, 19 nt, Homo sapiens
  misc_RNA (1)...(19): siRNA sense strand
accaagagcuucugaucuc

SEQ ID NO: 1972735 - RNA, 19 nt, Homo sapiens
  misc_RNA (1)...(19): siRNA sense strand
gacaagcaacaguuucuca

SEQ ID NO: 1972736 - RNA, 19 nt, Homo sapiens
  misc_RNA (1)...(19): siRNA sense strand
uggagagguuguacucaga

SEQ ID NO: 1972737 - RNA, 19 nt, Homo sapiens
  misc_RNA (1)...(19): siRNA sense strand
ccaagagcuucugaucuca

SEQ ID NO: 1972738 - RNA, 19 nt, Homo sapiens
  misc_RNA (1)...(19): siRNA sense strand
ggacugaagggaacgaaaa

SEQ ID NO: 1972739 - RNA, 19 nt, Homo sapiens
  misc_RNA (1)...(19): siRNA sense strand
gaucucaucaccuuuccau

SEQ ID NO: 1972740 - RNA, 19 nt, Homo sapiens
  misc_RNA (1)...(19): siRNA sense strand
ugcacaaggucuuccaguu

SEQ ID NO: 1972741 - RNA, 19 nt, Homo sapiens
  misc_RNA (1)...(19): siRNA sense strand
cagcaucacaacuaggauu

SEQ ID NO: 1972742 - RNA, 19 nt, Homo sapiens
  misc_RNA (1)...(19): siRNA sense strand
cagacagcucccagacuua

SEQ ID NO: 1972743 - RNA, 19 nt, Homo sapiens
  misc_RNA (1)...(19): siRNA sense strand
gaagcacugcagcuguuug

SEQ ID NO: 1972744 - RNA, 19 nt, Homo sapiens
  misc_RNA (1)...(19): siRNA sense strand
ccaccaagagcuucugauc

SEQ ID NO: 1972745 - RNA, 19 nt, Homo sapiens
  misc_RNA (1)...(19): siRNA sense strand
gcacaccagauccaucaag

SEQ ID NO: 1972746 - RNA, 19 nt, Homo sapiens
  misc_RNA (1)...(19): siRNA sense strand
agaccgcuaucccguggaa

SEQ ID NO: 1972747 - RNA, 19 nt, Homo sapiens
  misc_RNA (1)...(19): siRNA sense strand
caucacaacuaggauugag

SEQ ID NO: 1972748 - RNA, 19 nt, Homo sapiens
  misc_RNA (1)...(19): siRNA sense strand
acaacaacacccucaacaa

SEQ ID NO: 1972749 - RNA, 19 nt, Homo sapiens
  misc_RNA (1)...(19): siRNA sense strand
cggacgacuuccaugagaa

SEQ ID NO: 1972750 - RNA, 19 nt, Homo sapiens
  misc_RNA (1)...(19): siRNA sense strand
ccuacgugcucuacuccaa

SEQ ID NO: 1972751 - RNA, 19 nt, Homo sapiens
  misc_RNA (1)...(19): siRNA sense strand
caaaugccagacugauugu

SEQ ID NO: 1972752 - RNA, 19 nt, Homo sapiens
  misc_RNA (1)...(19): siRNA sense strand
gcuccagguugggcucuau

SEQ ID NO: 1972753 - RNA, 19 nt, Homo sapiens
  misc_RNA (1)...(19): siRNA sense strand
uugcaugcuugauuauuca

SEQ ID NO: 1972754 - RNA, 19 nt, Homo sapiens
  misc_RNA (1)...(19): siRNA sense strand
acaagcagcaggucaacug

SEQ ID NO: 1972755 - RNA, 19 nt, Homo sapiens
  misc_RNA (1)...(19): siRNA sense strand
accaauccucuguaaauaa

SEQ ID NO: 1972756 - RNA, 19 nt, Homo sapiens
  misc_RNA (1)...(19): siRNA sense strand
gugcaaaggagaaaacaaa

SEQ ID NO: 1972757 - RNA, 19 nt, Homo sapiens
  misc_RNA (1)...(19): siRNA sense strand
gggacccuguggagagguu

SEQ ID NO: 1972758 - RNA, 19 nt, Homo sapiens
  misc_RNA (1)...(19): siRNA sense strand
cagagcaagaugaauacaa

SEQ ID NO: 1972759 - RNA, 19 nt, Homo sapiens
  misc_RNA (1)...(19): siRNA sense strand
uggaaucguccgccuaaga

SEQ ID NO: 1972760 - RNA, 19 nt, Homo sapiens
  misc_RNA (1)...(19): siRNA sense strand
cugccgcacuucuacauca

SEQ ID NO: 1972761 - RNA, 19 nt, Homo sapiens
  misc_RNA (1)...(19): siRNA sense strand
gacuauccaagcauuaaau

SEQ ID NO: 1972762 - RNA, 19 nt, Homo sapiens
  misc_RNA (1)...(19): siRNA sense strand
ggcgagccaccguuucuga

SEQ ID NO: 1972763 - RNA, 19 nt, Homo sapiens
  misc_RNA (1)...(19): siRNA sense strand
ccgcacuucuacaucauag

SEQ ID NO: 1972764 - RNA, 19 nt, Homo sapiens
  misc_RNA (1)...(19): siRNA sense strand
cauccaacgucaaguacac

SEQ ID NO: 1972765 - RNA, 19 nt, Homo sapiens
  misc_RNA (1)...(19): siRNA sense strand
gcaaaggagaaaacaaaau

SEQ ID NO: 1972766 - RNA, 19 nt, Homo sapiens
  misc_RNA (1)...(19): siRNA sense strand
caugagaaagugacagaag

SEQ ID NO: 1972767 - RNA, 19 nt, Homo sapiens
  misc_RNA (1)...(19): siRNA sense strand
gagcaagaugaauacaauc

SEQ ID NO: 1972768 - RNA, 19 nt, Homo sapiens
  misc_RNA (1)...(19): siRNA sense strand
ccgcacaccagauccauca

SEQ ID NO: 1972769 - RNA, 19 nt, Homo sapiens
  misc_RNA (1)...(19): siRNA sense strand
gaccacagaccucuaugac

SEQ ID NO: 1972770 - RNA, 19 nt, Homo sapiens
  misc_RNA (1)...(19): siRNA sense strand
ccaagugcgggaccacaga

SEQ ID NO: 1972771 - RNA, 19 nt, Homo sapiens
  misc_RNA (1)...(19): siRNA sense strand
gaugaacuugcuugcuguu

SEQ ID NO: 1972772 - RNA, 19 nt, Homo sapiens
  misc_RNA (1)...(19): siRNA sense strand
ccuggacguucuucuacga

SEQ ID NO: 1972773 - RNA, 19 nt, Homo sapiens
  misc_RNA (1)...(19): siRNA sense strand
gaaucguccgccuaagaga

SEQ ID NO: 1972774 - RNA, 19 nt, Homo sapiens
  misc_RNA (1)...(19): siRNA sense strand
gucaaguucuccgccauca

SEQ ID NO: 1972775 - RNA, 19 nt, Homo sapiens
  misc_RNA (1)...(19): siRNA sense strand
ucacagaaguucacuauug

SEQ ID NO: 1972776 - RNA, 19 nt, Homo sapiens
  misc_RNA (1)...(19): siRNA sense strand
ccagggagcuccuugcuaa

SEQ ID NO: 1972777 - RNA, 19 nt, Homo sapiens
  misc_RNA (1)...(19): siRNA sense strand
gcugagggcuuuaccacua

SEQ ID NO: 1972778 - RNA, 19 nt, Homo sapiens
  misc_RNA (1)...(19): siRNA sense strand
agaagaagcuguugcacuu

SEQ ID NO: 1972779 - RNA, 19 nt, Homo sapiens
  misc_RNA (1)...(19): siRNA sense strand
gagaaaaccucuuuaagga

SEQ ID NO: 1972780 - RNA, 19 nt, Homo sapiens
  misc_RNA (1)...(19): siRNA sense strand
gauaagcgaguggacauuu

SEQ ID NO: 1972781 - RNA, 19 nt, Homo sapiens
  misc_RNA (1)...(19): siRNA sense strand
ggacuauccugagcgguau

SEQ ID NO: 1972782 - RNA, 19 nt, Homo sapiens
  misc_RNA (1)...(19): siRNA sense strand
ggucaaggaaugccacaaa

SEQ ID NO: 1972783 - RNA, 19 nt, Homo sapiens
  misc_RNA (1)...(19): siRNA sense strand
ccacaggcccuucccagaa

SEQ ID NO: 1972784 - RNA, 19 nt, Homo sapiens
  misc_RNA (1)...(19): siRNA sense strand
cuggagaccuuuagugaau

SEQ ID NO: 1972785 - RNA, 19 nt, Homo sapiens
  misc_RNA (1)...(19): siRNA sense strand
ucaagguccuccgauguuu

SEQ ID NO: 1972786 - RNA, 19 nt, Homo sapiens
  misc_RNA (1)...(19): siRNA sense strand
guggacauuucaacccuuu

SEQ ID NO: 1972787 - RNA, 19 nt, Homo sapiens
  misc_RNA (1)...(19): siRNA sense strand
cagcagcgccagaccauug

SEQ ID NO: 1972788 - RNA, 19 nt, Homo sapiens
  misc_RNA (1)...(19): siRNA sense strand
cauuucaacccuuuacuaa

SEQ ID NO: 1972789 - RNA, 19 nt, Homo sapiens
  misc_RNA (1)...(19): siRNA sense strand
ggacaucaagguucaaggu

SEQ ID NO: 1972790 - RNA, 19 nt, Homo sapiens
  misc_RNA (1)...(19): siRNA sense strand
cagaaguucacuauuggua

SEQ ID NO: 1972791 - RNA, 19 nt, Homo sapiens
  misc_RNA (1)...(19): siRNA sense strand
gcuccuugcuaaagccaaa

SEQ ID NO: 1972792 - RNA, 19 nt, Homo sapiens
  misc_RNA (1)...(19): siRNA sense strand
gucaaggaaugccacaaau

SEQ ID NO: 1972793 - RNA, 19 nt, Homo sapiens
  misc_RNA (1)...(19): siRNA sense strand
cacagaaguucacuauugg

SEQ ID NO: 1972794 - RNA, 19 nt, Homo sapiens
  misc_RNA (1)...(19): siRNA sense strand
caaggaaugccacaaaugc

SEQ ID NO: 1972795 - RNA, 19 nt, Homo sapiens
  misc_RNA (1)...(19): siRNA sense strand
uguuugaguuugugucuga

SEQ ID NO: 1972796 - RNA, 19 nt, Homo sapiens
  misc_RNA (1)...(19): siRNA sense strand
ggaagacaccaggaaguuc

SEQ ID NO: 1972797 - RNA, 19 nt, Homo sapiens
  misc_RNA (1)...(19): siRNA sense strand
ggagaaaaccucuuuaagg

SEQ ID NO: 1972798 - RNA, 19 nt, Homo sapiens
  misc_RNA (1)...(19): siRNA sense strand
ucagcuuuguggacucuaa

SEQ ID NO: 1972799 - RNA, 19 nt, Homo sapiens
  misc_RNA (1)...(19): siRNA sense strand
acucgucacuggucaagga

SEQ ID NO: 1972800 - RNA, 19 nt, Homo sapiens
  misc_RNA (1)...(19): siRNA sense strand
aggcgaagaugcagcacuu

SEQ ID NO: 1972801 - RNA, 19 nt, Homo sapiens
  misc_RNA (1)...(19): siRNA sense strand
ccucacagaaguucacuau

SEQ ID NO: 1972802 - RNA, 19 nt, Homo sapiens
  misc_RNA (1)...(19): siRNA sense strand
gguaccaaggaaagacuua

SEQ ID NO: 1972803 - RNA, 19 nt, Homo sapiens
  misc_RNA (1)...(19): siRNA sense strand
ggacauuucaacccuuuac

SEQ ID NO: 1972804 - RNA, 19 nt, Homo sapiens
  misc_RNA (1)...(19): siRNA sense strand
gccaagcagucccggagau

SEQ ID NO: 1972805 - RNA, 19 nt, Homo sapiens
  misc_RNA (1)...(19): siRNA sense strand
ucaaggaaugccacaaaug

SEQ ID NO: 1972806 - RNA, 19 nt, Homo sapiens
  misc_RNA (1)...(19): siRNA sense strand
ucagggagagggaacaaga

SEQ ID NO: 1972807 - RNA, 19 nt, Homo sapiens
  misc_RNA (1)...(19): siRNA sense strand
gcucugggacaucaagguu

SEQ ID NO: 1972808 - RNA, 19 nt, Homo sapiens
  misc_RNA (1)...(19): siRNA sense strand
gcuaaagccaaaggagaaa

SEQ ID NO: 1972809 - RNA, 19 nt, Homo sapiens
  misc_RNA (1)...(19): siRNA sense strand
cgucacuggucaaggaaug

SEQ ID NO: 1972810 - RNA, 19 nt, Homo sapiens
  misc_RNA (1)...(19): siRNA sense strand
cauccagcuugucaucaug

SEQ ID NO: 1972811 - RNA, 19 nt, Homo sapiens
  misc_RNA (1)...(19): siRNA sense strand
gucaucauguggaagaaca

SEQ ID NO: 1972812 - RNA, 19 nt, Homo sapiens
  misc_RNA (1)...(19): siRNA sense strand
gggagaagaagcuguugca

SEQ ID NO: 1972813 - RNA, 19 nt, Homo sapiens
  misc_RNA (1)...(19): siRNA sense strand
ucauccagcuugucaucau

SEQ ID NO: 1972814 - RNA, 19 nt, Homo sapiens
  misc_RNA (1)...(19): siRNA sense strand
acauuucaacccuuuacua

SEQ ID NO: 1972815 - RNA, 19 nt, Homo sapiens
  misc_RNA (1)...(19): siRNA sense strand
ggauaagcgaguggacauu

SEQ ID NO: 1972816 - RNA, 19 nt, Homo sapiens
  misc_RNA (1)...(19): siRNA sense strand
guucaagguccuccgaugu

SEQ ID NO: 1972817 - RNA, 19 nt, Homo sapiens
  misc_RNA (1)...(19): siRNA sense strand
ucugggacaucaagguuca

SEQ ID NO: 1972818 - RNA, 19 nt, Homo sapiens
  misc_RNA (1)...(19): siRNA sense strand
auaagcgaguggacauuuc

SEQ ID NO: 1972819 - RNA, 19 nt, Homo sapiens
  misc_RNA (1)...(19): siRNA sense strand
ggagaccuuuagugaaucc

SEQ ID NO: 1972820 - RNA, 19 nt, Homo sapiens
  misc_RNA (1)...(19): siRNA sense strand
cgguauugcuguggcugua

SEQ ID NO: 1972821 - RNA, 19 nt, Homo sapiens
  misc_RNA (1)...(19): siRNA sense strand
gccagaccauugagcugau

SEQ ID NO: 1972822 - RNA, 19 nt, Homo sapiens
  misc_RNA (1)...(19): siRNA sense strand
uaagcgaguggacauuuca

SEQ ID NO: 1972823 - RNA, 19 nt, Homo sapiens
  misc_RNA (1)...(19): siRNA sense strand
gaacagauauccagaacua

SEQ ID NO: 1972824 - RNA, 19 nt, Homo sapiens
  misc_RNA (1)...(19): siRNA sense strand
gaaggaauguagaaucuuu

SEQ ID NO: 1972825 - RNA, 19 nt, Homo sapiens
  misc_RNA (1)...(19): siRNA sense strand
aaagagaacuuacaacuga

SEQ ID NO: 1972826 - RNA, 19 nt, Homo sapiens
  misc_RNA (1)...(19): siRNA sense strand
gcaaggaucuaaugaagga

SEQ ID NO: 1972827 - RNA, 19 nt, Homo sapiens
  misc_RNA (1)...(19): siRNA sense strand
acaaagaacuggaaaguga

SEQ ID NO: 1972828 - RNA, 19 nt, Homo sapiens
  misc_RNA (1)...(19): siRNA sense strand
ggcaagaguugaggaauua

SEQ ID NO: 1972829 - RNA, 19 nt, Homo sapiens
  misc_RNA (1)...(19): siRNA sense strand
acagaacgcuuagaaguua

SEQ ID NO: 1972830 - RNA, 19 nt, Homo sapiens
  misc_RNA (1)...(19): siRNA sense strand
ggacauagaaccacucuug

SEQ ID NO: 1972831 - RNA, 19 nt, Homo sapiens
  misc_RNA (1)...(19): siRNA sense strand
aaagagagacuacaugaua

SEQ ID NO: 1972832 - RNA, 19 nt, Homo sapiens
  misc_RNA (1)...(19): siRNA sense strand
ucgauaagcuugaaaguga

SEQ ID NO: 1972833 - RNA, 19 nt, Homo sapiens
  misc_RNA (1)...(19): siRNA sense strand
guaccgagaugaauuagau

SEQ ID NO: 1972834 - RNA, 19 nt, Homo sapiens
  misc_RNA (1)...(19): siRNA sense strand
gagacuacaugauauugaa

SEQ ID NO: 1972835 - RNA, 19 nt, Homo sapiens
  misc_RNA (1)...(19): siRNA sense strand
ggauggaagugacugauau

SEQ ID NO: 1972836 - RNA, 19 nt, Homo sapiens
  misc_RNA (1)...(19): siRNA sense strand
gcaauuagagagugaacua

SEQ ID NO: 1972837 - RNA, 19 nt, Homo sapiens
  misc_RNA (1)...(19): siRNA sense strand
ggacuacuguggauucugu

SEQ ID NO: 1972838 - RNA, 19 nt, Homo sapiens
  misc_RNA (1)...(19): siRNA sense strand
ucauagaacucucugaaga

SEQ ID NO: 1972839 - RNA, 19 nt, Homo sapiens
  misc_RNA (1)...(19): siRNA sense strand
caaacagugucuuccuuaa

SEQ ID NO: 1972840 - RNA, 19 nt, Homo sapiens
  misc_RNA (1)...(19): siRNA sense strand
cuaccaggguuuagauaua

SEQ ID NO: 1972841 - RNA, 19 nt, Homo sapiens
  misc_RNA (1)...(19): siRNA sense strand
gaagucagcagauauaaag

SEQ ID NO: 1972842 - RNA, 19 nt, Homo sapiens
  misc_RNA (1)...(19): siRNA sense strand
aaagagaauucccaacuug

SEQ ID NO: 1972843 - RNA, 19 nt, Homo sapiens
  misc_RNA (1)...(19): siRNA sense strand
agaacgagcugaagaacuu

SEQ ID NO: 1972844 - RNA, 19 nt, Homo sapiens
  misc_RNA (1)...(19): siRNA sense strand
gaaacaaaguauggaugaa

SEQ ID NO: 1972845 - RNA, 19 nt, Homo sapiens
  misc_RNA (1)...(19): siRNA sense strand
gaaauggcacagaaacaaa

SEQ ID NO: 1972846 - RNA, 19 nt, Homo sapiens
  misc_RNA (1)...(19): siRNA sense strand
gacaucaaguagauuauug

SEQ ID NO: 1972847 - RNA, 19 nt, Homo sapiens
  misc_RNA (1)...(19): siRNA sense strand
aaagugaagucagcagaua

SEQ ID NO: 1972848 - RNA, 19 nt, Homo sapiens
  misc_RNA (1)...(19): siRNA sense strand
gccaugaggugaaugaguu

SEQ ID NO: 1972849 - RNA, 19 nt, Homo sapiens
  misc_RNA (1)...(19): siRNA sense strand
ggaaauggaacgagauaug

SEQ ID NO: 1972850 - RNA, 19 nt, Homo sapiens
  misc_RNA (1)...(19): siRNA sense strand
ugaauuagaugcacuucga

SEQ ID NO: 1972851 - RNA, 19 nt, Homo sapiens
  misc_RNA (1)...(19): siRNA sense strand
cagcagauauaaagagaga

SEQ ID NO: 1972852 - RNA, 19 nt, Homo sapiens
  misc_RNA (1)...(19): siRNA sense strand
gaacaugaauuugcuuucg

SEQ ID NO: 1972853 - RNA, 19 nt, Homo sapiens
  misc_RNA (1)...(19): siRNA sense strand
gcacagaaacaaaguaugg

SEQ ID NO: 1972854 - RNA, 19 nt, Homo sapiens
  misc_RNA (1)...(19): siRNA sense strand
ggaaauggcacagaaacaa

SEQ ID NO: 1972855 - RNA, 19 nt, Homo sapiens
  misc_RNA (1)...(19): siRNA sense strand
gaaagucgacaacaucugu

SEQ ID NO: 1972856 - RNA, 19 nt, Homo sapiens
  misc_RNA (1)...(19): siRNA sense strand
ggaacgagauauggauaga

SEQ ID NO: 1972857 - RNA, 19 nt, Homo sapiens
  misc_RNA (1)...(19): siRNA sense strand
ccagauaagugcagaagca

SEQ ID NO: 1972858 - RNA, 19 nt, Homo sapiens
  misc_RNA (1)...(19): siRNA sense strand
gcgaaggaauguagaaucu

SEQ ID NO: 1972859 - RNA, 19 nt, Homo sapiens
  misc_RNA (1)...(19): siRNA sense strand
ugaauugcaucaucuugaa

SEQ ID NO: 1972860 - RNA, 19 nt, Homo sapiens
  misc_RNA (1)...(19): siRNA sense strand
gaacuugagcaaauggaaa

SEQ ID NO: 1972861 - RNA, 19 nt, Homo sapiens
  misc_RNA (1)...(19): siRNA sense strand
gaacugcgaaggaauguag

SEQ ID NO: 1972862 - RNA, 19 nt, Homo sapiens
  misc_RNA (1)...(19): siRNA sense strand
gaauguaccgagaugaauu

SEQ ID NO: 1972863 - RNA, 19 nt, Homo sapiens
  misc_RNA (1)...(19): siRNA sense strand
aauauggcauugcaucuaa

SEQ ID NO: 1972864 - RNA, 19 nt, Homo sapiens
  misc_RNA (1)...(19): siRNA sense strand
gagcaguuguuggauugua

SEQ ID NO: 1972865 - RNA, 19 nt, Homo sapiens
  misc_RNA (1)...(19): siRNA sense strand
gaacaaggcacagaagaag

SEQ ID NO: 1972866 - RNA, 19 nt, Homo sapiens
  misc_RNA (1)...(19): siRNA sense strand
ucaaacagugucuuccuua

SEQ ID NO: 1972867 - RNA, 19 nt, Homo sapiens
  misc_RNA (1)...(19): siRNA sense strand
ggaacuggcagaugcuaaa

SEQ ID NO: 1972868 - RNA, 19 nt, Homo sapiens
  misc_RNA (1)...(19): siRNA sense strand
gauaagugcagaagcaaga

SEQ ID NO: 1972869 - RNA, 19 nt, Homo sapiens
  misc_RNA (1)...(19): siRNA sense strand
agcaaagucuucagaauug

SEQ ID NO: 1972870 - RNA, 19 nt, Homo sapiens
  misc_RNA (1)...(19): siRNA sense strand
agaaaucccugggccauga

SEQ ID NO: 1972871 - RNA, 19 nt, Homo sapiens
  misc_RNA (1)...(19): siRNA sense strand
gcugggaacuggaacagau

SEQ ID NO: 1972872 - RNA, 19 nt, Homo sapiens
  misc_RNA (1)...(19): siRNA sense strand
caacugaaagcuaaacuuc

SEQ ID NO: 1972873 - RNA, 19 nt, Homo sapiens
  misc_RNA (1)...(19): siRNA sense strand
cauagaaccacucuugaaa

SEQ ID NO: 1972874 - RNA, 19 nt, Homo sapiens
  misc_RNA (1)...(19): siRNA sense strand
gcuaagcaagauugaauuu

SEQ ID NO: 1972875 - RNA, 19 nt, Homo sapiens
  misc_RNA (1)...(19): siRNA sense strand
ucagagagacagauuaaga

SEQ ID NO: 1972876 - RNA, 19 nt, Homo sapiens
  misc_RNA (1)...(19): siRNA sense strand
gcacauauucaagagguaa

SEQ ID NO: 1972877 - RNA, 19 nt, Homo sapiens
  misc_RNA (1)...(19): siRNA sense strand
gaaaacagaacgcuuagaa

SEQ ID NO: 1972878 - RNA, 19 nt, Homo sapiens
  misc_RNA (1)...(19): siRNA sense strand
caagaaaacagaacgcuua

SEQ ID NO: 1972879 - RNA, 19 nt, Homo sapiens
  misc_RNA (1)...(19): siRNA sense strand
gaagugugcaagcaugaaa

SEQ ID NO: 1972880 - RNA, 19 nt, Homo sapiens
  misc_RNA (1)...(19): siRNA sense strand
gaauguagaaucuuugaag

SEQ ID NO: 1972881 - RNA, 19 nt, Homo sapiens
  misc_RNA (1)...(19): siRNA sense strand
ucaaaaggcugcaacaaga

SEQ ID NO: 1972882 - RNA, 19 nt, Homo sapiens
  misc_RNA (1)...(19): siRNA sense strand
gaacagaaagucgacaaca

SEQ ID NO: 1972883 - RNA, 19 nt, Homo sapiens
  misc_RNA (1)...(19): siRNA sense strand
uucaagagguaacucauaa

SEQ ID NO: 1972884 - RNA, 19 nt, Homo sapiens
  misc_RNA (1)...(19): siRNA sense strand
aggcagcggucccagauaa

SEQ ID NO: 1972885 - RNA, 19 nt, Homo sapiens
  misc_RNA (1)...(19): siRNA sense strand
gaacauucagagacuauca

SEQ ID NO: 1972886 - RNA, 19 nt, Homo sapiens
  misc_RNA (1)...(19): siRNA sense strand
gauggaaaaucaaacauug

SEQ ID NO: 1972887 - RNA, 19 nt, Homo sapiens
  misc_RNA (1)...(19): siRNA sense strand
gaacuacaagacuuagaga

SEQ ID NO: 1972888 - RNA, 19 nt, Homo sapiens
  misc_RNA (1)...(19): siRNA sense strand
aaacagaacgcuuagaagu

SEQ ID NO: 1972889 - RNA, 19 nt, Homo sapiens
  misc_RNA (1)...(19): siRNA sense strand
auucagagcuagaaagaga

SEQ ID NO: 1972890 - RNA, 19 nt, Homo sapiens
  misc_RNA (1)...(19): siRNA sense strand
cugaagaacuugaaaauga

SEQ ID NO: 1972891 - RNA, 19 nt, Homo sapiens
  misc_RNA (1)...(19): siRNA sense strand
aacgagauauggauagaaa

SEQ ID NO: 1972892 - RNA, 19 nt, Homo sapiens
  misc_RNA (1)...(19): siRNA sense strand
caacaagagaacaugaauu

SEQ ID NO: 1972893 - RNA, 19 nt, Homo sapiens
  misc_RNA (1)...(19): siRNA sense strand
aaagcaaagucuucagaau

SEQ ID NO: 1972894 - RNA, 19 nt, Homo sapiens
  misc_RNA (1)...(19): siRNA sense strand
gaagcaagagugaaagaca

SEQ ID NO: 1972895 - RNA, 19 nt, Homo sapiens
  misc_RNA (1)...(19): siRNA sense strand
gagagaaaauucagagaga

SEQ ID NO: 1972896 - RNA, 19 nt, Homo sapiens
  misc_RNA (1)...(19): siRNA sense strand
gcuaaagccaagauaagaa

SEQ ID NO: 1972897 - RNA, 19 nt, Homo sapiens
  misc_RNA (1)...(19): siRNA sense strand
aagcaaagucuucagaauu

SEQ ID NO: 1972898 - RNA, 19 nt, Homo sapiens
  misc_RNA (1)...(19): siRNA sense strand
gagaacaugaauuugcuuu

SEQ ID NO: 1972899 - RNA, 19 nt, Homo sapiens
  misc_RNA (1)...(19): siRNA sense strand
gaugcuaaagccaagauaa

SEQ ID NO: 1972900 - RNA, 19 nt, Homo sapiens
  misc_RNA (1)...(19): siRNA sense strand
gagugaacuacaagacuua

SEQ ID NO: 1972901 - RNA, 19 nt, Homo sapiens
  misc_RNA (1)...(19): siRNA sense strand
gaaaauggcucagcuacag

SEQ ID NO: 1972902 - RNA, 19 nt, Homo sapiens
  misc_RNA (1)...(19): siRNA sense strand
aagcaaggaucuaaugaag

SEQ ID NO: 1972903 - RNA, 19 nt, Homo sapiens
  misc_RNA (1)...(19): siRNA sense strand
gcaaagucuucagaauugu

SEQ ID NO: 1972904 - RNA, 19 nt, Homo sapiens
  misc_RNA (1)...(19): siRNA sense strand
gaaaaucaaaggcucagua

SEQ ID NO: 1972905 - RNA, 19 nt, Homo sapiens
  misc_RNA (1)...(19): siRNA sense strand
gaaauggaacgagauaugg

SEQ ID NO: 1972906 - RNA, 19 nt, Homo sapiens
  misc_RNA (1)...(19): siRNA sense strand
aagagagacuacaugauau

SEQ ID NO: 1972907 - RNA, 19 nt, Homo sapiens
  misc_RNA (1)...(19): siRNA sense strand
caagagaacaugaauuugc

SEQ ID NO: 1972908 - RNA, 19 nt, Homo sapiens
  misc_RNA (1)...(19): siRNA sense strand
gcaacaagagaacaugaau

SEQ ID NO: 1972909 - RNA, 19 nt, Homo sapiens
  misc_RNA (1)...(19): siRNA sense strand
agagugaacuacaagacuu

SEQ ID NO: 1972910 - RNA, 19 nt, Homo sapiens
  misc_RNA (1)...(19): siRNA sense strand
ucaguuagaaucccuagaa

SEQ ID NO: 1972911 - RNA, 19 nt, Homo sapiens
  misc_RNA (1)...(19): siRNA sense strand
gaaagugaagucagcagau

SEQ ID NO: 1972912 - RNA, 19 nt, Homo sapiens
  misc_RNA (1)...(19): siRNA sense strand
uguagaaucuuugaagugu

SEQ ID NO: 1972913 - RNA, 19 nt, Homo sapiens
  misc_RNA (1)...(19): siRNA sense strand
acuuacaacugaaagcuaa

SEQ ID NO: 1972914 - RNA, 19 nt, Homo sapiens
  misc_RNA (1)...(19): siRNA sense strand
gcaguucagugucagaaaa

SEQ ID NO: 1972915 - RNA, 19 nt, Homo sapiens
  misc_RNA (1)...(19): siRNA sense strand
gcaaauggaaauagaacuc

SEQ ID NO: 1972916 - RNA, 19 nt, Homo sapiens
  misc_RNA (1)...(19): siRNA sense strand
gaaagaauucaagguuuag

SEQ ID NO: 1972917 - RNA, 19 nt, Homo sapiens
  misc_RNA (1)...(19): siRNA sense strand
gagaauucccaacuugaug

SEQ ID NO: 1972918 - RNA, 19 nt, Homo sapiens
  misc_RNA (1)...(19): siRNA sense strand
agagagacagauuaagaua

SEQ ID NO: 1972919 - RNA, 19 nt, Homo sapiens
  misc_RNA (1)...(19): siRNA sense strand
caauagaaacacugagaga

SEQ ID NO: 1972920 - RNA, 19 nt, Homo sapiens
  misc_RNA (1)...(19): siRNA sense strand
guagauuauugaagcuaga

SEQ ID NO: 1972921 - RNA, 19 nt, Homo sapiens
  misc_RNA (1)...(19): siRNA sense strand
aggcaagaguugaggaauu

SEQ ID NO: 1972922 - RNA, 19 nt, Homo sapiens
  misc_RNA (1)...(19): siRNA sense strand
aaacaaagaacuggaaagu

SEQ ID NO: 1972923 - RNA, 19 nt, Homo sapiens
  misc_RNA (1)...(19): siRNA sense strand
gauaagacaucuccauuug

SEQ ID NO: 1972924 - RNA, 19 nt, Homo sapiens
  misc_RNA (1)...(19): siRNA sense strand
gaacaaguguccuagauac

SEQ ID NO: 1972925 - RNA, 19 nt, Homo sapiens
  misc_RNA (1)...(19): siRNA sense strand
gaagauguauuuggaauca

SEQ ID NO: 1972926 - RNA, 19 nt, Homo sapiens
  misc_RNA (1)...(19): siRNA sense strand
uaagacaucuccauuugaa

SEQ ID NO: 1972927 - RNA, 19 nt, Homo sapiens
  misc_RNA (1)...(19): siRNA sense strand
gagcaaagcugggaaaguc

SEQ ID NO: 1972928 - RNA, 19 nt, Homo sapiens
  misc_RNA (1)...(19): siRNA sense strand
ggaaucaccguuacucuaa

SEQ ID NO: 1972929 - RNA, 19 nt, Homo sapiens
  misc_RNA (1)...(19): siRNA sense strand
cagcauaaaucaccaacaa

SEQ ID NO: 1972930 - RNA, 19 nt, Homo sapiens
  misc_RNA (1)...(19): siRNA sense strand
uaacaaauccugagagugu

SEQ ID NO: 1972931 - RNA, 19 nt, Homo sapiens
  misc_RNA (1)...(19): siRNA sense strand
gagaagauguauuuggaau

SEQ ID NO: 1972932 - RNA, 19 nt, Homo sapiens
  misc_RNA (1)...(19): siRNA sense strand
gaauggacuuuccuuacuu

SEQ ID NO: 1972933 - RNA, 19 nt, Homo sapiens
  misc_RNA (1)...(19): siRNA sense strand
caaguugacuggagaagau

SEQ ID NO: 1972934 - RNA, 19 nt, Homo sapiens
  misc_RNA (1)...(19): siRNA sense strand
ggaacaaguguccuagaua

SEQ ID NO: 1972935 - RNA, 19 nt, Homo sapiens
  misc_RNA (1)...(19): siRNA sense strand
ggacuuuccuuacuuaaaa

SEQ ID NO: 1972936 - RNA, 19 nt, Homo sapiens
  misc_RNA (1)...(19): siRNA sense strand
aaagguaccugaagcuguu

SEQ ID NO: 1972937 - RNA, 19 nt, Homo sapiens
  misc_RNA (1)...(19): siRNA sense strand
gagcuuggccgaguucuuu

SEQ ID NO: 1972938 - RNA, 19 nt, Homo sapiens
  misc_RNA (1)...(19): siRNA sense strand
ucccagagauugaucauau

SEQ ID NO: 1972939 - RNA, 19 nt, Homo sapiens
  misc_RNA (1)...(19): siRNA sense strand
caagaauggacuuuccuua

SEQ ID NO: 1972940 - RNA, 19 nt, Homo sapiens
  misc_RNA (1)...(19): siRNA sense strand
guacacaagcccuuuauca

SEQ ID NO: 1972941 - RNA, 19 nt, Homo sapiens
  misc_RNA (1)...(19): siRNA sense strand
cuaaaucucucaguauugu

SEQ ID NO: 1972942 - RNA, 19 nt, Homo sapiens
  misc_RNA (1)...(19): siRNA sense strand
ugacuucuauuaccucuuc

SEQ ID NO: 1972943 - RNA, 19 nt, Homo sapiens
  misc_RNA (1)...(19): siRNA sense strand
gaaggcggagucagcauaa

SEQ ID NO: 1972944 - RNA, 19 nt, Homo sapiens
  misc_RNA (1)...(19): siRNA sense strand
uaaaauggcuucaguugug

SEQ ID NO: 1972945 - RNA, 19 nt, Homo sapiens
  misc_RNA (1)...(19): siRNA sense strand
gcuaaucaccagcagcuuu

SEQ ID NO: 1972946 - RNA, 19 nt, Homo sapiens
  misc_RNA (1)...(19): siRNA sense strand
gcauaaaucaccaacaagu

SEQ ID NO: 1972947 - RNA, 19 nt, Homo sapiens
  misc_RNA (1)...(19): siRNA sense strand
uggagaagauguauuugga

SEQ ID NO: 1972948 - RNA, 19 nt, Homo sapiens
  misc_RNA (1)...(19): siRNA sense strand
gacuggagaagauguauuu

SEQ ID NO: 1972949 - RNA, 19 nt, Homo sapiens
  misc_RNA (1)...(19): siRNA sense strand
aauggacuuuccuuacuua

SEQ ID NO: 1972950 - RNA, 19 nt, Homo sapiens
  misc_RNA (1)...(19): siRNA sense strand
ggacaacauauucucaaga

SEQ ID NO: 1972951 - RNA, 19 nt, Homo sapiens
  misc_RNA (1)...(19): siRNA sense strand
cauaaaucaccaacaagua

SEQ ID NO: 1972952 - RNA, 19 nt, Homo sapiens
  misc_RNA (1)...(19): siRNA sense strand
agacaucuccauuugaauu

SEQ ID NO: 1972953 - RNA, 19 nt, Homo sapiens
  misc_RNA (1)...(19): siRNA sense strand
guauuuggaaucaccguua

SEQ ID NO: 1972954 - RNA, 19 nt, Homo sapiens
  misc_RNA (1)...(19): siRNA sense strand
gcaacgcuguuuggcuaaa

SEQ ID NO: 1972955 - RNA, 19 nt, Homo sapiens
  misc_RNA (1)...(19): siRNA sense strand
gaaucaccguuacucuaau

SEQ ID NO: 1972956 - RNA, 19 nt, Homo sapiens
  misc_RNA (1)...(19): siRNA sense strand
uacccuaaaucucucagua

SEQ ID NO: 1972957 - RNA, 19 nt, Homo sapiens
  misc_RNA (1)...(19): siRNA sense strand
caucuccauuugaauugua

SEQ ID NO: 1972958 - RNA, 19 nt, Homo sapiens
  misc_RNA (1)...(19): siRNA sense strand
guuuaaagaagcuccauuu

SEQ ID NO: 1972959 - RNA, 19 nt, Homo sapiens
  misc_RNA (1)...(19): siRNA sense strand
gaucaacuaggcaacauca

SEQ ID NO: 1972960 - RNA, 19 nt, Homo sapiens
  misc_RNA (1)...(19): siRNA sense strand
ggacgagaaggauuggauu

SEQ ID NO: 1972961 - RNA, 19 nt, Homo sapiens
  misc_RNA (1)...(19): siRNA sense strand
cccuaaaucucucaguauu

SEQ ID NO: 1972962 - RNA, 19 nt, Homo sapiens
  misc_RNA (1)...(19): siRNA sense strand
gcuaaaagguguacacaag

SEQ ID NO: 1972963 - RNA, 19 nt, Homo sapiens
  misc_RNA (1)...(19): siRNA sense strand
ucaugugggucaucuacuu

SEQ ID NO: 1972964 - RNA, 19 nt, Homo sapiens
  misc_RNA (1)...(19): siRNA sense strand
cacuggaggucaugucuga

SEQ ID NO: 1972965 - RNA, 19 nt, Homo sapiens
  misc_RNA (1)...(19): siRNA sense strand
aaucaccguuacucuaauu

SEQ ID NO: 1972966 - RNA, 19 nt, Homo sapiens
  misc_RNA (1)...(19): siRNA sense strand
ggagaagauguauuuggaa

SEQ ID NO: 1972967 - RNA, 19 nt, Homo sapiens
  misc_RNA (1)...(19): siRNA sense strand
ccaggccuaugacuucuau

SEQ ID NO: 1972968 - RNA, 19 nt, Homo sapiens
  misc_RNA (1)...(19): siRNA sense strand
gaaacgacuggcagcagaa

SEQ ID NO: 1972969 - RNA, 19 nt, Homo sapiens
  misc_RNA (1)...(19): siRNA sense strand
ucacugugcuggacaacuc

SEQ ID NO: 1972970 - RNA, 19 nt, Homo sapiens
  misc_RNA (1)...(19): siRNA sense strand
agaauggacuuuccuuacu

SEQ ID NO: 1972971 - RNA, 19 nt, Homo sapiens
  misc_RNA (1)...(19): siRNA sense strand
aggauuggauucugcuaaa

SEQ ID NO: 1972972 - RNA, 19 nt, Homo sapiens
  misc_RNA (1)...(19): siRNA sense strand
gcagcugcaugucaaagag

SEQ ID NO: 1972973 - RNA, 19 nt, Homo sapiens
  misc_RNA (1)...(19): siRNA sense strand
aggauucaguggaaaggua

SEQ ID NO: 1972974 - RNA, 19 nt, Homo sapiens
  misc_RNA (1)...(19): siRNA sense strand
gcaugagcuuggccgaguu

SEQ ID NO: 1972975 - RNA, 19 nt, Homo sapiens
  misc_RNA (1)...(19): siRNA sense strand
gagaguguuuuaauuguug

SEQ ID NO: 1972976 - RNA, 19 nt, Homo sapiens
  misc_RNA (1)...(19): siRNA sense strand
uggaacaaguguccuagau

SEQ ID NO: 1972977 - RNA, 19 nt, Homo sapiens
  misc_RNA (1)...(19): siRNA sense strand
caugucugaucaggaguua

SEQ ID NO: 1972978 - RNA, 19 nt, Homo sapiens
  misc_RNA (1)...(19): siRNA sense strand
acacaagcccuuuaucaca

SEQ ID NO: 1972979 - RNA, 19 nt, Homo sapiens
  misc_RNA (1)...(19): siRNA sense strand
cagcagaaguaacaaagcu

SEQ ID NO: 1972980 - RNA, 19 nt, Homo sapiens
  misc_RNA (1)...(19): siRNA sense strand
ucagacaacccgaggauuc

SEQ ID NO: 1972981 - RNA, 19 nt, Homo sapiens
  misc_RNA (1)...(19): siRNA sense strand
gcuccaggccuaugacuuc

SEQ ID NO: 1972982 - RNA, 19 nt, Homo sapiens
  misc_RNA (1)...(19): siRNA sense strand
ugucugaucaggaguuaaa

SEQ ID NO: 1972983 - RNA, 19 nt, Homo sapiens
  misc_RNA (1)...(19): siRNA sense strand
gguguacacaagcccuuua

SEQ ID NO: 1972984 - RNA, 19 nt, Homo sapiens
  misc_RNA (1)...(19): siRNA sense strand
caaguaacaaauccugaga

SEQ ID NO: 1972985 - RNA, 19 nt, Homo sapiens
  misc_RNA (1)...(19): siRNA sense strand
gaucaggaguuaaaagagu

SEQ ID NO: 1972986 - RNA, 19 nt, Homo sapiens
  misc_RNA (1)...(19): siRNA sense strand
aggccuaugacuucuauua

SEQ ID NO: 1972987 - RNA, 19 nt, Homo sapiens
  misc_RNA (1)...(19): siRNA sense strand
gaagcuccauuuucugaau

SEQ ID NO: 1972988 - RNA, 19 nt, Homo sapiens
  misc_RNA (1)...(19): siRNA sense strand
ucaacuaggcaacaucaug

SEQ ID NO: 1972989 - RNA, 19 nt, Homo sapiens
  misc_RNA (1)...(19): siRNA sense strand
agaaggcggagucagcaua

SEQ ID NO: 1972990 - RNA, 19 nt, Homo sapiens
  misc_RNA (1)...(19): siRNA sense strand
caccguuacucuaauuaca

SEQ ID NO: 1972991 - RNA, 19 nt, Homo sapiens
  misc_RNA (1)...(19): siRNA sense strand
uggaaucaccguuacucua

SEQ ID NO: 1972992 - RNA, 19 nt, Homo sapiens
  misc_RNA (1)...(19): siRNA sense strand
caagcccuuuaucacagua

SEQ ID NO: 1972993 - RNA, 19 nt, Homo sapiens
  misc_RNA (1)...(19): siRNA sense strand
gacaucuccauuugaauug

SEQ ID NO: 1972994 - RNA, 19 nt, Homo sapiens
  misc_RNA (1)...(19): siRNA sense strand
gcuaaacagagauaagaca

SEQ ID NO: 1972995 - RNA, 19 nt, Homo sapiens
  misc_RNA (1)...(19): siRNA sense strand
uugaggcccuggcggcuaa

SEQ ID NO: 1972996 - RNA, 19 nt, Homo sapiens
  misc_RNA (1)...(19): siRNA sense strand
ugcugggucuguuucauuu

SEQ ID NO: 1972997 - RNA, 19 nt, Homo sapiens
  misc_RNA (1)...(19): siRNA sense strand
cuaauuacaaguacaacug

SEQ ID NO: 1972998 - RNA, 19 nt, Homo sapiens
  misc_RNA (1)...(19): siRNA sense strand
aguaacaaauccugagagu

SEQ ID NO: 1972999 - RNA, 19 nt, Homo sapiens
  misc_RNA (1)...(19): siRNA sense strand
gaaggauuggauucugcua

SEQ ID NO: 1973000 - RNA, 19 nt, Homo sapiens
  misc_RNA (1)...(19): siRNA sense strand
ggucugguacccuaaaucu

SEQ ID NO: 1973001 - RNA, 19 nt, Homo sapiens
  misc_RNA (1)...(19): siRNA sense strand
caaguacaacuggagcaaa

SEQ ID NO: 1973002 - RNA, 19 nt, Homo sapiens
  misc_RNA (1)...(19): siRNA sense strand
aaguacaacuggagcaaag

SEQ ID NO: 1973003 - RNA, 19 nt, Homo sapiens
  misc_RNA (1)...(19): siRNA sense strand
cucgaggucuguucaagga

SEQ ID NO: 1973004 - RNA, 19 nt, Homo sapiens
  misc_RNA (1)...(19): siRNA sense strand
ucaccaacaaguaacaaau

SEQ ID NO: 1973005 - RNA, 19 nt, Homo sapiens
  misc_RNA (1)...(19): siRNA sense strand
uagaugcacuggaggucau

SEQ ID NO: 1973006 - RNA, 19 nt, Homo sapiens
  misc_RNA (1)...(19): siRNA sense strand
cgacuggcagcagaaguaa

SEQ ID NO: 1973007 - RNA, 19 nt, Homo sapiens
  misc_RNA (1)...(19): siRNA sense strand
ccuaaaucucucaguauug

SEQ ID NO: 1973008 - RNA, 19 nt, Homo sapiens
  misc_RNA (1)...(19): siRNA sense strand
uaucacaguagcauagaug

SEQ ID NO: 1973009 - RNA, 19 nt, Homo sapiens
  misc_RNA (1)...(19): siRNA sense strand
gaggucuguucaaggacuu

SEQ ID NO: 1973010 - RNA, 19 nt, Homo sapiens
  misc_RNA (1)...(19): siRNA sense strand
acaaauccugagaguguuu

SEQ ID NO: 1973011 - RNA, 19 nt, Homo sapiens
  misc_RNA (1)...(19): siRNA sense strand
gacgagaaggauuggauuc

SEQ ID NO: 1973012 - RNA, 19 nt, Homo sapiens
  misc_RNA (1)...(19): siRNA sense strand
gcuuguucauggacgagaa

SEQ ID NO: 1973013 - RNA, 19 nt, Homo sapiens
  misc_RNA (1)...(19): siRNA sense strand
guaucaauucuuugucaga

SEQ ID NO: 1973014 - RNA, 19 nt, Homo sapiens
  misc_RNA (1)...(19): siRNA sense strand
gugcagcugcggcucaaga

SEQ ID NO: 1973015 - RNA, 19 nt, Homo sapiens
  misc_RNA (1)...(19): siRNA sense strand
ggaguuaaaagaguuguuu

SEQ ID NO: 1973016 - RNA, 19 nt, Homo sapiens
  misc_RNA (1)...(19): siRNA sense strand
uggcuaaacagagauaaga

SEQ ID NO: 1973017 - RNA, 19 nt, Homo sapiens
  misc_RNA (1)...(19): siRNA sense strand
ggagcaaagcugggaaagu

SEQ ID NO: 1973018 - RNA, 19 nt, Homo sapiens
  misc_RNA (1)...(19): siRNA sense strand
acccgaggauucaguggaa

SEQ ID NO: 1973019 - RNA, 19 nt, Homo sapiens
  misc_RNA (1)...(19): siRNA sense strand
aaaucucucaguauuguug

SEQ ID NO: 1973020 - RNA, 19 nt, Homo sapiens
  misc_RNA (1)...(19): siRNA sense strand
caccaacaaguaacaaauc

SEQ ID NO: 1973021 - RNA, 19 nt, Homo sapiens
  misc_RNA (1)...(19): siRNA sense strand
acgacuggcagcagaagua

SEQ ID NO: 1973022 - RNA, 19 nt, Homo sapiens
  misc_RNA (1)...(19): siRNA sense strand
ucaagaauggacuuuccuu

SEQ ID NO: 1973023 - RNA, 19 nt, Homo sapiens
  misc_RNA (1)...(19): siRNA sense strand
gaagagaaagcaauuaaug

SEQ ID NO: 1973024 - RNA, 19 nt, Homo sapiens
  misc_RNA (1)...(19): siRNA sense strand
gggagagccucaugcagaa

SEQ ID NO: 1973025 - RNA, 19 nt, Homo sapiens
  misc_RNA (1)...(19): siRNA sense strand
uguaucaucuagacgcuua

SEQ ID NO: 1973026 - RNA, 19 nt, Homo sapiens
  misc_RNA (1)...(19): siRNA sense strand
gaauggcgcaugaugaaga

SEQ ID NO: 1973027 - RNA, 19 nt, Homo sapiens
  misc_RNA (1)...(19): siRNA sense strand
cagccugguuucugcauaa

SEQ ID NO: 1973028 - RNA, 19 nt, Homo sapiens
  misc_RNA (1)...(19): siRNA sense strand
gggagggccuugaggacaa

SEQ ID NO: 1973029 - RNA, 19 nt, Homo sapiens
  misc_RNA (1)...(19): siRNA sense strand
gaagaaccggccauucaug

SEQ ID NO: 1973030 - RNA, 19 nt, Homo sapiens
  misc_RNA (1)...(19): siRNA sense strand
ggaagagaaagcaauuaau

SEQ ID NO: 1973031 - RNA, 19 nt, Homo sapiens
  misc_RNA (1)...(19): siRNA sense strand
cggaagagaaagcaauuaa

SEQ ID NO: 1973032 - RNA, 19 nt, Homo sapiens
  misc_RNA (1)...(19): siRNA sense strand
agaccagaaucgacacaaa

SEQ ID NO: 1973033 - RNA, 19 nt, Homo sapiens
  misc_RNA (1)...(19): siRNA sense strand
aggaggagcugcuucagau

SEQ ID NO: 1973034 - RNA, 19 nt, Homo sapiens
  misc_RNA (1)...(19): siRNA sense strand
ggagggccuugaggacaaa

SEQ ID NO: 1973035 - RNA, 19 nt, Homo sapiens
  misc_RNA (1)...(19): siRNA sense strand
gaccagaaucgacacaaau

SEQ ID NO: 1973036 - RNA, 19 nt, Homo sapiens
  misc_RNA (1)...(19): siRNA sense strand
ccugguuucugcauaaaga

SEQ ID NO: 1973037 - RNA, 19 nt, Homo sapiens
  misc_RNA (1)...(19): siRNA sense strand
gaggaggagcugcuucaga

SEQ ID NO: 1973038 - RNA, 19 nt, Homo sapiens
  misc_RNA (1)...(19): siRNA sense strand
ggaggaccaagcuggguuu

SEQ ID NO: 1973039 - RNA, 19 nt, Homo sapiens
  misc_RNA (1)...(19): siRNA sense strand
gcagcuguaucaucuagac

SEQ ID NO: 1973040 - RNA, 19 nt, Homo sapiens
  misc_RNA (1)...(19): siRNA sense strand
cggaauggcgcaugaugaa

SEQ ID NO: 1973041 - RNA, 19 nt, Homo sapiens
  misc_RNA (1)...(19): siRNA sense strand
ccagacaaccagaccagaa

SEQ ID NO: 1973042 - RNA, 19 nt, Homo sapiens
  misc_RNA (1)...(19): siRNA sense strand
gcagaucaacucucaugag

SEQ ID NO: 1973043 - RNA, 19 nt, Homo sapiens
  misc_RNA (1)...(19): siRNA sense strand
gcaaaaggccagggaugua

SEQ ID NO: 1973044 - RNA, 19 nt, Homo sapiens
  misc_RNA (1)...(19): siRNA sense strand
ggaugcagaacagcgauuu

SEQ ID NO: 1973045 - RNA, 19 nt, Homo sapiens
  misc_RNA (1)...(19): siRNA sense strand
ggagcugcuucagaugcua

SEQ ID NO: 1973046 - RNA, 19 nt, Homo sapiens
  misc_RNA (1)...(19): siRNA sense strand
gcagcugaauccggaaugg

SEQ ID NO: 1973047 - RNA, 19 nt, Homo sapiens
  misc_RNA (1)...(19): siRNA sense strand
ucagccugguuucugcaua

SEQ ID NO: 1973048 - RNA, 19 nt, Homo sapiens
  misc_RNA (1)...(19): siRNA sense strand
acccgaagcugcugggaau

SEQ ID NO: 1973049 - RNA, 19 nt, Homo sapiens
  misc_RNA (1)...(19): siRNA sense strand
ggagaaccgccuggugaug

SEQ ID NO: 1973050 - RNA, 19 nt, Homo sapiens
  misc_RNA (1)...(19): siRNA sense strand
aauccggaauggcgcauga

SEQ ID NO: 1973051 - RNA, 19 nt, Homo sapiens
  misc_RNA (1)...(19): siRNA sense strand
agagaaagcaauuaauggu

SEQ ID NO: 1973052 - RNA, 19 nt, Homo sapiens
  misc_RNA (1)...(19): siRNA sense strand
gaagggaagguuuucauca

SEQ ID NO: 1973053 - RNA, 19 nt, Homo sapiens
  misc_RNA (1)...(19): siRNA sense strand
ugaggacaaauacaacuug

SEQ ID NO: 1973054 - RNA, 19 nt, Homo sapiens
  misc_RNA (1)...(19): siRNA sense strand
cagacaaccagaccagaau

SEQ ID NO: 1973055 - RNA, 19 nt, Homo sapiens
  misc_RNA (1)...(19): siRNA sense strand
gaugaagaaccggccauuc

SEQ ID NO: 1973056 - RNA, 19 nt, Homo sapiens
  misc_RNA (1)...(19): siRNA sense strand
aauggcgcaugaugaagaa

SEQ ID NO: 1973057 - RNA, 19 nt, Homo sapiens
  misc_RNA (1)...(19): siRNA sense strand
aauacaacuugcagcugaa

SEQ ID NO: 1973058 - RNA, 19 nt, Homo sapiens
  misc_RNA (1)...(19): siRNA sense strand
ggcgaucggugcugauucg

SEQ ID NO: 1973059 - RNA, 19 nt, Homo sapiens
  misc_RNA (1)...(19): siRNA sense strand
gaggcgaucggugcugauu

SEQ ID NO: 1973060 - RNA, 19 nt, Homo sapiens
  misc_RNA (1)...(19): siRNA sense strand
ggaggagcugcuucagaug

SEQ ID NO: 1973061 - RNA, 19 nt, Homo sapiens
  misc_RNA (1)...(19): siRNA sense strand
uaucaucuagacgcuuaua

SEQ ID NO: 1973062 - RNA, 19 nt, Homo sapiens
  misc_RNA (1)...(19): siRNA sense strand
gggagaaccgccuggugau

SEQ ID NO: 1973063 - RNA, 19 nt, Homo sapiens
  misc_RNA (1)...(19): siRNA sense strand
ugaaaagccucaccugaac

SEQ ID NO: 1973064 - RNA, 19 nt, Homo sapiens
  misc_RNA (1)...(19): siRNA sense strand
aagagaaagcaauuaaugg

SEQ ID NO: 1973065 - RNA, 19 nt, Homo sapiens
  misc_RNA (1)...(19): siRNA sense strand
caaaggcucuguuauaaag

SEQ ID NO: 1973066 - RNA, 19 nt, Homo sapiens
  misc_RNA (1)...(19): siRNA sense strand
gggaagcccuguaugauga

SEQ ID NO: 1973067 - RNA, 19 nt, Homo sapiens
  misc_RNA (1)...(19): siRNA sense strand
gaacuuggaacucuuacua

SEQ ID NO: 1973068 - RNA, 19 nt, Homo sapiens
  misc_RNA (1)...(19): siRNA sense strand
gaaaucgacgugguaauua

SEQ ID NO: 1973069 - RNA, 19 nt, Homo sapiens
  misc_RNA (1)...(19): siRNA sense strand
ccagaacucuuucgaauag

SEQ ID NO: 1973070 - RNA, 19 nt, Homo sapiens
  misc_RNA (1)...(19): siRNA sense strand
gcaccgagcucgaccuuag

SEQ ID NO: 1973071 - RNA, 19 nt, Homo sapiens
  misc_RNA (1)...(19): siRNA sense strand
gaagauggagcuacagaaa

SEQ ID NO: 1973072 - RNA, 19 nt, Homo sapiens
  misc_RNA (1)...(19): siRNA sense strand
gcuguuaccuuuauagauc

SEQ ID NO: 1973073 - RNA, 19 nt, Homo sapiens
  misc_RNA (1)...(19): siRNA sense strand
ugauacaucuuccaacauu

SEQ ID NO: 1973074 - RNA, 19 nt, Homo sapiens
  misc_RNA (1)...(19): siRNA sense strand
ggagaacuuggaacucuua

SEQ ID NO: 1973075 - RNA, 19 nt, Homo sapiens
  misc_RNA (1)...(19): siRNA sense strand
cuauaaagccaguaugaua

SEQ ID NO: 1973076 - RNA, 19 nt, Homo sapiens
  misc_RNA (1)...(19): siRNA sense strand
gcuuggcucucucuuguaa

SEQ ID NO: 1973077 - RNA, 19 nt, Homo sapiens
  misc_RNA (1)...(19): siRNA sense strand
ggacagacucauuugaaga

SEQ ID NO: 1973078 - RNA, 19 nt, Homo sapiens
  misc_RNA (1)...(19): siRNA sense strand
aaaucgacgugguaauuaa

SEQ ID NO: 1973079 - RNA, 19 nt, Homo sapiens
  misc_RNA (1)...(19): siRNA sense strand
uucaaaggcucuguuauaa

SEQ ID NO: 1973080 - RNA, 19 nt, Homo sapiens
  misc_RNA (1)...(19): siRNA sense strand
ucaugugacuggaagauau

SEQ ID NO: 1973081 - RNA, 19 nt, Homo sapiens
  misc_RNA (1)...(19): siRNA sense strand
uggaagauaugcagcuuau

SEQ ID NO: 1973082 - RNA, 19 nt, Homo sapiens
  misc_RNA (1)...(19): siRNA sense strand
gauaaaggcauuacuacag

SEQ ID NO: 1973083 - RNA, 19 nt, Homo sapiens
  misc_RNA (1)...(19): siRNA sense strand
auuaagaccucuacuggaa

SEQ ID NO: 1973084 - RNA, 19 nt, Homo sapiens
  misc_RNA (1)...(19): siRNA sense strand
uuagagauuucuucuggaa

SEQ ID NO: 1973085 - RNA, 19 nt, Homo sapiens
  misc_RNA (1)...(19): siRNA sense strand
gcugaagccagaacucuuu

SEQ ID NO: 1973086 - RNA, 19 nt, Homo sapiens
  misc_RNA (1)...(19): siRNA sense strand
caugauaaaggcauuacua

SEQ ID NO: 1973087 - RNA, 19 nt, Homo sapiens
  misc_RNA (1)...(19): siRNA sense strand
cagauuggcuguggaagau

SEQ ID NO: 1973088 - RNA, 19 nt, Homo sapiens
  misc_RNA (1)...(19): siRNA sense strand
gauuagaagagaucagauu

SEQ ID NO: 1973089 - RNA, 19 nt, Homo sapiens
  misc_RNA (1)...(19): siRNA sense strand
auucaaaggcucuguuaua

SEQ ID NO: 1973090 - RNA, 19 nt, Homo sapiens
  misc_RNA (1)...(19): siRNA sense strand
agauggagcuacagaaauc

SEQ ID NO: 1973091 - RNA, 19 nt, Homo sapiens
  misc_RNA (1)...(19): siRNA sense strand
uaauaucccuguggcauca

SEQ ID NO: 1973092 - RNA, 19 nt, Homo sapiens
  misc_RNA (1)...(19): siRNA sense strand
agaggcagauuuaccauca

SEQ ID NO: 1973093 - RNA, 19 nt, Homo sapiens
  misc_RNA (1)...(19): siRNA sense strand
acauugagaggcagauuua

SEQ ID NO: 1973094 - RNA, 19 nt, Homo sapiens
  misc_RNA (1)...(19): siRNA sense strand
aggaggagcuuggagauga

SEQ ID NO: 1973095 - RNA, 19 nt, Homo sapiens
  misc_RNA (1)...(19): siRNA sense strand
cccgguagcuauaguaaug

SEQ ID NO: 1973096 - RNA, 19 nt, Homo sapiens
  misc_RNA (1)...(19): siRNA sense strand
agaaaucgacgugguaauu

SEQ ID NO: 1973097 - RNA, 19 nt, Homo sapiens
  misc_RNA (1)...(19): siRNA sense strand
gccagaacucuuucgaaua

SEQ ID NO: 1973098 - RNA, 19 nt, Homo sapiens
  misc_RNA (1)...(19): siRNA sense strand
ucaaaggcucuguuauaaa

SEQ ID NO: 1973099 - RNA, 19 nt, Homo sapiens
  misc_RNA (1)...(19): siRNA sense strand
gaacucuuacuaaugucua

SEQ ID NO: 1973100 - RNA, 19 nt, Homo sapiens
  misc_RNA (1)...(19): siRNA sense strand
gaucagauuggcuguggaa

SEQ ID NO: 1973101 - RNA, 19 nt, Homo sapiens
  misc_RNA (1)...(19): siRNA sense strand
gaagacacgauuagaagag

SEQ ID NO: 1973102 - RNA, 19 nt, Homo sapiens
  misc_RNA (1)...(19): siRNA sense strand
uuggaacucuuacuaaugu

SEQ ID NO: 1973103 - RNA, 19 nt, Homo sapiens
  misc_RNA (1)...(19): siRNA sense strand
cagcuggacagacucauuu

SEQ ID NO: 1973104 - RNA, 19 nt, Homo sapiens
  misc_RNA (1)...(19): siRNA sense strand
ggaagauggagcuacagaa

SEQ ID NO: 1973105 - RNA, 19 nt, Homo sapiens
  misc_RNA (1)...(19): siRNA sense strand
caggagaacuuggaacucu

SEQ ID NO: 1973106 - RNA, 19 nt, Homo sapiens
  misc_RNA (1)...(19): siRNA sense strand
ugaugagauucgucaguuu

SEQ ID NO: 1973107 - RNA, 19 nt, Homo sapiens
  misc_RNA (1)...(19): siRNA sense strand
ggaggcauccgcagugcaa

SEQ ID NO: 1973108 - RNA, 19 nt, Homo sapiens
  misc_RNA (1)...(19): siRNA sense strand
gaugagauucgucaguuuc

SEQ ID NO: 1973109 - RNA, 19 nt, Homo sapiens
  misc_RNA (1)...(19): siRNA sense strand
gacauugagaggcagauuu

SEQ ID NO: 1973110 - RNA, 19 nt, Homo sapiens
  misc_RNA (1)...(19): siRNA sense strand
uauauuagcgacaggagaa

SEQ ID NO: 1973111 - RNA, 19 nt, Homo sapiens
  misc_RNA (1)...(19): siRNA sense strand
gcucuguuauaaagccaaa

SEQ ID NO: 1973112 - RNA, 19 nt, Homo sapiens
  misc_RNA (1)...(19): siRNA sense strand
guacucugcucucggacau

SEQ ID NO: 1973113 - RNA, 19 nt, Homo sapiens
  misc_RNA (1)...(19): siRNA sense strand
gaaaagaaacaguaaaugc

SEQ ID NO: 1973114 - RNA, 19 nt, Homo sapiens
  misc_RNA (1)...(19): siRNA sense strand
agccagaacucuuucgaau

SEQ ID NO: 1973115 - RNA, 19 nt, Homo sapiens
  misc_RNA (1)...(19): siRNA sense strand
gauacaucuuccaacauuc

SEQ ID NO: 1973116 - RNA, 19 nt, Homo sapiens
  misc_RNA (1)...(19): siRNA sense strand
gcagauuuaccaucaugug

SEQ ID NO: 1973117 - RNA, 19 nt, Homo sapiens
  misc_RNA (1)...(19): siRNA sense strand
uauaaagccaguaugauag

SEQ ID NO: 1973118 - RNA, 19 nt, Homo sapiens
  misc_RNA (1)...(19): siRNA sense strand
gcugcaggcuguaauaucc

SEQ ID NO: 1973119 - RNA, 19 nt, Homo sapiens
  misc_RNA (1)...(19): siRNA sense strand
gaaaacuggaaacaagaua

SEQ ID NO: 1973120 - RNA, 19 nt, Homo sapiens
  misc_RNA (1)...(19): siRNA sense strand
auaugcagcuuaucaugau

SEQ ID NO: 1973121 - RNA, 19 nt, Homo sapiens
  misc_RNA (1)...(19): siRNA sense strand
ucgaauaggugccaguacu

SEQ ID NO: 1973122 - RNA, 19 nt, Homo sapiens
  misc_RNA (1)...(19): siRNA sense strand
uaagaccucuacuggaaaa

SEQ ID NO: 1973123 - RNA, 19 nt, Homo sapiens
  misc_RNA (1)...(19): siRNA sense strand
uaucaugaucuuccaaugu

SEQ ID NO: 1973124 - RNA, 19 nt, Homo sapiens
  misc_RNA (1)...(19): siRNA sense strand
ggacauugagaggcagauu

SEQ ID NO: 1973125 - RNA, 19 nt, Homo sapiens
  misc_RNA (1)...(19): siRNA sense strand
ggaggagcuuggagaugag

SEQ ID NO: 1973126 - RNA, 19 nt, Homo sapiens
  misc_RNA (1)...(19): siRNA sense strand
ugaagacacgauuagaaga

SEQ ID NO: 1973127 - RNA, 19 nt, Homo sapiens
  misc_RNA (1)...(19): siRNA sense strand
gauuuaccaucaugugacu

SEQ ID NO: 1973128 - RNA, 19 nt, Homo sapiens
  misc_RNA (1)...(19): siRNA sense strand
cagauuuaccaucauguga

SEQ ID NO: 1973129 - RNA, 19 nt, Homo sapiens
  misc_RNA (1)...(19): siRNA sense strand
uugcuuggcucucucuugu

SEQ ID NO: 1973130 - RNA, 19 nt, Homo sapiens
  misc_RNA (1)...(19): siRNA sense strand
ccaguaugauagcaaugau

SEQ ID NO: 1973131 - RNA, 19 nt, Homo sapiens
  misc_RNA (1)...(19): siRNA sense strand
gaagccagaacucuuucga

SEQ ID NO: 1973132 - RNA, 19 nt, Homo sapiens
  misc_RNA (1)...(19): siRNA sense strand
ccgggugugugaugcugua

SEQ ID NO: 1973133 - RNA, 19 nt, Homo sapiens
  misc_RNA (1)...(19): siRNA sense strand
acauucaaaggcucuguua

SEQ ID NO: 1973134 - RNA, 19 nt, Homo sapiens
  misc_RNA (1)...(19): siRNA sense strand
gccaguaugauagcaauga

SEQ ID NO: 1973135 - RNA, 19 nt, Homo sapiens
  misc_RNA (1)...(19): siRNA sense strand
gaagcccuguaugaugaga

SEQ ID NO: 1973136 - RNA, 19 nt, Homo sapiens
  misc_RNA (1)...(19): siRNA sense strand
ucagauuggcuguggaaga

SEQ ID NO: 1973137 - RNA, 19 nt, Homo sapiens
  misc_RNA (1)...(19): siRNA sense strand
ggugugugaugcuguaaaa

SEQ ID NO: 1973138 - RNA, 19 nt, Homo sapiens
  misc_RNA (1)...(19): siRNA sense strand
ucauuugaagacacgauua

SEQ ID NO: 1973139 - RNA, 19 nt, Homo sapiens
  misc_RNA (1)...(19): siRNA sense strand
aggcagauuuaccaucaug

SEQ ID NO: 1973140 - RNA, 19 nt, Homo sapiens
  misc_RNA (1)...(19): siRNA sense strand
ggcucucucuuguaaagga

SEQ ID NO: 1973141 - RNA, 19 nt, Homo sapiens
  misc_RNA (1)...(19): siRNA sense strand
caccuucccgguagcuaua

SEQ ID NO: 1973142 - RNA, 19 nt, Homo sapiens
  misc_RNA (1)...(19): siRNA sense strand
uguggaagauggagcuaca

SEQ ID NO: 1973143 - RNA, 19 nt, Homo sapiens
  misc_RNA (1)...(19): siRNA sense strand
caucaguggccgcuggauu

SEQ ID NO: 1973144 - RNA, 19 nt, Homo sapiens
  misc_RNA (1)...(19): siRNA sense strand
acucugcucucggacauug

SEQ ID NO: 1973145 - RNA, 19 nt, Homo sapiens
  misc_RNA (1)...(19): siRNA sense strand
acuuggaacucuuacuaau

SEQ ID NO: 1973146 - RNA, 19 nt, Homo sapiens
  misc_RNA (1)...(19): siRNA sense strand
ccagugggaagcccuguau

SEQ ID NO: 1973147 - RNA, 19 nt, Homo sapiens
  misc_RNA (1)...(19): siRNA sense strand
uggacagacucauuugaag

SEQ ID NO: 1973148 - RNA, 19 nt, Homo sapiens
  misc_RNA (1)...(19): siRNA sense strand
caaauccaggcucgcagaa

SEQ ID NO: 1973149 - RNA, 19 nt, Homo sapiens
  misc_RNA (1)...(19): siRNA sense strand
gucuauaaagccaguauga

SEQ ID NO: 1973150 - RNA, 19 nt, Homo sapiens
  misc_RNA (1)...(19): siRNA sense strand
augaugagauucgucaguu

SEQ ID NO: 1973151 - RNA, 19 nt, Homo sapiens
  misc_RNA (1)...(19): siRNA sense strand
uacagaaaucgacguggua

SEQ ID NO: 1973152 - RNA, 19 nt, Homo sapiens
  misc_RNA (1)...(19): siRNA sense strand
aagacacgauuagaagaga

SEQ ID NO: 1973153 - RNA, 19 nt, Homo sapiens
  misc_RNA (1)...(19): siRNA sense strand
gcuggacagacucauuuga

SEQ ID NO: 1973154 - RNA, 19 nt, Homo sapiens
  misc_RNA (1)...(19): siRNA sense strand
gaauaggugccaguacucu

SEQ ID NO: 1973155 - RNA, 19 nt, Homo sapiens
  misc_RNA (1)...(19): siRNA sense strand
acagaaaucgacgugguaa

SEQ ID NO: 1973156 - RNA, 19 nt, Homo sapiens
  misc_RNA (1)...(19): siRNA sense strand
ugauaaaggcauuacuaca

SEQ ID NO: 1973157 - RNA, 19 nt, Homo sapiens
  misc_RNA (1)...(19): siRNA sense strand
gcaggaucagauuuuauua

SEQ ID NO: 1973158 - RNA, 19 nt, Homo sapiens
  misc_RNA (1)...(19): siRNA sense strand
gacaggagaacuuggaacu

SEQ ID NO: 1973159 - RNA, 19 nt, Homo sapiens
  misc_RNA (1)...(19): siRNA sense strand
cgacgugguaauuaacaga

SEQ ID NO: 1973160 - RNA, 19 nt, Homo sapiens
  misc_RNA (1)...(19): siRNA sense strand
ggaaaagaaacaguaaaug

SEQ ID NO: 1973161 - RNA, 19 nt, Homo sapiens
  misc_RNA (1)...(19): siRNA sense strand
gacgugguaauuaacagaa

SEQ ID NO: 1973162 - RNA, 19 nt, Homo sapiens
  misc_RNA (1)...(19): siRNA sense strand
ccagcuggacagacucauu

SEQ ID NO: 1973163 - RNA, 19 nt, Homo sapiens
  misc_RNA (1)...(19): siRNA sense strand
uaaagccaguaugauagca

SEQ ID NO: 1973164 - RNA, 19 nt, Homo sapiens
  misc_RNA (1)...(19): siRNA sense strand
agaacucuuucgaauaggu

SEQ ID NO: 1973165 - RNA, 19 nt, Homo sapiens
  misc_RNA (1)...(19): siRNA sense strand
gaaagcaccagauaaauau

SEQ ID NO: 1973166 - RNA, 19 nt, Homo sapiens
  misc_RNA (1)...(19): siRNA sense strand
gauagauccuguuaaagaa

SEQ ID NO: 1973167 - RNA, 19 nt, Homo sapiens
  misc_RNA (1)...(19): siRNA sense strand
uaagaaagcaccagauaaa

SEQ ID NO: 1973168 - RNA, 19 nt, Homo sapiens
  misc_RNA (1)...(19): siRNA sense strand
gaagcuaguucucagaguu

SEQ ID NO: 1973169 - RNA, 19 nt, Homo sapiens
  misc_RNA (1)...(19): siRNA sense strand
gaaauuacgccgucuugaa

SEQ ID NO: 1973170 - RNA, 19 nt, Homo sapiens
  misc_RNA (1)...(19): siRNA sense strand
ccgaaaggaugaccuagua

SEQ ID NO: 1973171 - RNA, 19 nt, Homo sapiens
  misc_RNA (1)...(19): siRNA sense strand
uagaagaacuuaagaagca

SEQ ID NO: 1973172 - RNA, 19 nt, Homo sapiens
  misc_RNA (1)...(19): siRNA sense strand
cagccaaacugacaagaaa

SEQ ID NO: 1973173 - RNA, 19 nt, Homo sapiens
  misc_RNA (1)...(19): siRNA sense strand
uaucaaaggugcagaaucu

SEQ ID NO: 1973174 - RNA, 19 nt, Homo sapiens
  misc_RNA (1)...(19): siRNA sense strand
agaaagcaccagauaaaua

SEQ ID NO: 1973175 - RNA, 19 nt, Homo sapiens
  misc_RNA (1)...(19): siRNA sense strand
ggagaagauugacagcauu

SEQ ID NO: 1973176 - RNA, 19 nt, Homo sapiens
  misc_RNA (1)...(19): siRNA sense strand
cagcaacuccgauccaaua

SEQ ID NO: 1973177 - RNA, 19 nt, Homo sapiens
  misc_RNA (1)...(19): siRNA sense strand
ugacuucucucuccuagug

SEQ ID NO: 1973178 - RNA, 19 nt, Homo sapiens
  misc_RNA (1)...(19): siRNA sense strand
gaagaagcaucagcagcaa

SEQ ID NO: 1973179 - RNA, 19 nt, Homo sapiens
  misc_RNA (1)...(19): siRNA sense strand
ugaaccagcuauccagaaa

SEQ ID NO: 1973180 - RNA, 19 nt, Homo sapiens
  misc_RNA (1)...(19): siRNA sense strand
gguggagcauuucauacua

SEQ ID NO: 1973181 - RNA, 19 nt, Homo sapiens
  misc_RNA (1)...(19): siRNA sense strand
gaagcggacuuaauugaac

SEQ ID NO: 1973182 - RNA, 19 nt, Homo sapiens
  misc_RNA (1)...(19): siRNA sense strand
ugaaauuccucaagaucaa

SEQ ID NO: 1973183 - RNA, 19 nt, Homo sapiens
  misc_RNA (1)...(19): siRNA sense strand
ugauagauccuguuaaaga

SEQ ID NO: 1973184 - RNA, 19 nt, Homo sapiens
  misc_RNA (1)...(19): siRNA sense strand
guuaagaaagcaccagaua

SEQ ID NO: 1973185 - RNA, 19 nt, Homo sapiens
  misc_RNA (1)...(19): siRNA sense strand
ccagauaaauauugagaag

SEQ ID NO: 1973186 - RNA, 19 nt, Homo sapiens
  misc_RNA (1)...(19): siRNA sense strand
gggacaaguugcaugaaga

SEQ ID NO: 1973187 - RNA, 19 nt, Homo sapiens
  misc_RNA (1)...(19): siRNA sense strand
ggacuuaauugaacuuagc

SEQ ID NO: 1973188 - RNA, 19 nt, Homo sapiens
  misc_RNA (1)...(19): siRNA sense strand
gagcauuucauacuacuga

SEQ ID NO: 1973189 - RNA, 19 nt, Homo sapiens
  misc_RNA (1)...(19): siRNA sense strand
gauauaugccuuaccugaa

SEQ ID NO: 1973190 - RNA, 19 nt, Homo sapiens
  misc_RNA (1)...(19): siRNA sense strand
gauccaauauccgagaaau

SEQ ID NO: 1973191 - RNA, 19 nt, Homo sapiens
  misc_RNA (1)...(19): siRNA sense strand
auauaugccuuaccugaaa

SEQ ID NO: 1973192 - RNA, 19 nt, Homo sapiens
  misc_RNA (1)...(19): siRNA sense strand
uuuggaaucuguagaagaa

SEQ ID NO: 1973193 - RNA, 19 nt, Homo sapiens
  misc_RNA (1)...(19): siRNA sense strand
gaauuucuccaacuccauu

SEQ ID NO: 1973194 - RNA, 19 nt, Homo sapiens
  misc_RNA (1)...(19): siRNA sense strand
aaccagcuauccagaaauu

SEQ ID NO: 1973195 - RNA, 19 nt, Homo sapiens
  misc_RNA (1)...(19): siRNA sense strand
agaaugauagauccuguua

SEQ ID NO: 1973196 - RNA, 19 nt, Homo sapiens
  misc_RNA (1)...(19): siRNA sense strand
cuuagaagcggacuuaauu

SEQ ID NO: 1973197 - RNA, 19 nt, Homo sapiens
  misc_RNA (1)...(19): siRNA sense strand
gcaugaagagcauaucaau

SEQ ID NO: 1973198 - RNA, 19 nt, Homo sapiens
  misc_RNA (1)...(19): siRNA sense strand
uaccugaaauuccucaaga

SEQ ID NO: 1973199 - RNA, 19 nt, Homo sapiens
  misc_RNA (1)...(19): siRNA sense strand
ugaagaaacuuugcuacag

SEQ ID NO: 1973200 - RNA, 19 nt, Homo sapiens
  misc_RNA (1)...(19): siRNA sense strand
ugacaagaaaugcaguuaa

SEQ ID NO: 1973201 - RNA, 19 nt, Homo sapiens
  misc_RNA (1)...(19): siRNA sense strand
caacuccgauccaauaucc

SEQ ID NO: 1973202 - RNA, 19 nt, Homo sapiens
  misc_RNA (1)...(19): siRNA sense strand
gacuguugguggagcauuu

SEQ ID NO: 1973203 - RNA, 19 nt, Homo sapiens
  misc_RNA (1)...(19): siRNA sense strand
gugcugcugugaauguuga

SEQ ID NO: 1973204 - RNA, 19 nt, Homo sapiens
  misc_RNA (1)...(19): siRNA sense strand
gagaagauugacagcauug

SEQ ID NO: 1973205 - RNA, 19 nt, Homo sapiens
  misc_RNA (1)...(19): siRNA sense strand
gaaauuccucaagaucaaa

SEQ ID NO: 1973206 - RNA, 19 nt, Homo sapiens
  misc_RNA (1)...(19): siRNA sense strand
caaguugcaugaagagcau

SEQ ID NO: 1973207 - RNA, 19 nt, Homo sapiens
  misc_RNA (1)...(19): siRNA sense strand
uuaagaaagcaccagauaa

SEQ ID NO: 1973208 - RNA, 19 nt, Homo sapiens
  misc_RNA (1)...(19): siRNA sense strand
cgagaaauugagaaacuuu

SEQ ID NO: 1973209 - RNA, 19 nt, Homo sapiens
  misc_RNA (1)...(19): siRNA sense strand
uagaagcggacuuaauuga

SEQ ID NO: 1973210 - RNA, 19 nt, Homo sapiens
  misc_RNA (1)...(19): siRNA sense strand
gguggaaaauugauacaaa

SEQ ID NO: 1973211 - RNA, 19 nt, Homo sapiens
  misc_RNA (1)...(19): siRNA sense strand
caaaguggcaggaauugca

SEQ ID NO: 1973212 - RNA, 19 nt, Homo sapiens
  misc_RNA (1)...(19): siRNA sense strand
uagauccuguuaaagaaga

SEQ ID NO: 1973213 - RNA, 19 nt, Homo sapiens
  misc_RNA (1)...(19): siRNA sense strand
uuagccaacuggucacuga

SEQ ID NO: 1973214 - RNA, 19 nt, Homo sapiens
  misc_RNA (1)...(19): siRNA sense strand
ucagauauaugccuuaccu

SEQ ID NO: 1973215 - RNA, 19 nt, Homo sapiens
  misc_RNA (1)...(19): siRNA sense strand
gagaaauugagaaacuuug

SEQ ID NO: 1973216 - RNA, 19 nt, Homo sapiens
  misc_RNA (1)...(19): siRNA sense strand
gcuauccagaaauucauua

SEQ ID NO: 1973217 - RNA, 19 nt, Homo sapiens
  misc_RNA (1)...(19): siRNA sense strand
gaaaggaugaccuaguacu

SEQ ID NO: 1973218 - RNA, 19 nt, Homo sapiens
  misc_RNA (1)...(19): siRNA sense strand
gaaugauagauccuguuaa

SEQ ID NO: 1973219 - RNA, 19 nt, Homo sapiens
  misc_RNA (1)...(19): siRNA sense strand
cagaaucgcgggaaaccuu

SEQ ID NO: 1973220 - RNA, 19 nt, Homo sapiens
  misc_RNA (1)...(19): siRNA sense strand
agauaguaaucccaacaaa

SEQ ID NO: 1973221 - RNA, 19 nt, Homo sapiens
  misc_RNA (1)...(19): siRNA sense strand
guugguggagcauuucaua

SEQ ID NO: 1973222 - RNA, 19 nt, Homo sapiens
  misc_RNA (1)...(19): siRNA sense strand
uaauugaacuuagccaacu

SEQ ID NO: 1973223 - RNA, 19 nt, Homo sapiens
  misc_RNA (1)...(19): siRNA sense strand
gaugaccuaguacuucuga

SEQ ID NO: 1973224 - RNA, 19 nt, Homo sapiens
  misc_RNA (1)...(19): siRNA sense strand
gaagauugacagcauugca

SEQ ID NO: 1973225 - RNA, 19 nt, Homo sapiens
  misc_RNA (1)...(19): siRNA sense strand
gaucuucccagccaaacug

SEQ ID NO: 1973226 - RNA, 19 nt, Homo sapiens
  misc_RNA (1)...(19): siRNA sense strand
ggacaaguugcaugaagag

SEQ ID NO: 1973227 - RNA, 19 nt, Homo sapiens
  misc_RNA (1)...(19): siRNA sense strand
gaaucuguagaagaacuua

SEQ ID NO: 1973228 - RNA, 19 nt, Homo sapiens
  misc_RNA (1)...(19): siRNA sense strand
ccauuuggaaucuguagaa

SEQ ID NO: 1973229 - RNA, 19 nt, Homo sapiens
  misc_RNA (1)...(19): siRNA sense strand
gccaaacugacaagaaaug

SEQ ID NO: 1973230 - RNA, 19 nt, Homo sapiens
  misc_RNA (1)...(19): siRNA sense strand
cuggaaagguuaagaaagc

SEQ ID NO: 1973231 - RNA, 19 nt, Homo sapiens
  misc_RNA (1)...(19): siRNA sense strand
gauaguaaucccaacaaac

SEQ ID NO: 1973232 - RNA, 19 nt, Homo sapiens
  misc_RNA (1)...(19): siRNA sense strand
gagaaugauagauccuguu

SEQ ID NO: 1973233 - RNA, 19 nt, Homo sapiens
  misc_RNA (1)...(19): siRNA sense strand
ugacagcauugcagaccau

SEQ ID NO: 1973234 - RNA, 19 nt, Homo sapiens
  misc_RNA (1)...(19): siRNA sense strand
gaaccagcuauccagaaau

SEQ ID NO: 1973235 - RNA, 19 nt, Homo sapiens
  misc_RNA (1)...(19): siRNA sense strand
ccagcuauccagaaauuca

SEQ ID NO: 1973236 - RNA, 19 nt, Homo sapiens
  misc_RNA (1)...(19): siRNA sense strand
gaagaacuuaagaagcaau

SEQ ID NO: 1973237 - RNA, 19 nt, Homo sapiens
  misc_RNA (1)...(19): siRNA sense strand
cagcagcaacagcagaauu

SEQ ID NO: 1973238 - RNA, 19 nt, Homo sapiens
  misc_RNA (1)...(19): siRNA sense strand
ccgagaaauugagaaacuu

SEQ ID NO: 1973239 - RNA, 19 nt, Homo sapiens
  misc_RNA (1)...(19): siRNA sense strand
uaagauaguaaucccaaca

SEQ ID NO: 1973240 - RNA, 19 nt, Homo sapiens
  misc_RNA (1)...(19): siRNA sense strand
cuucacagguggaaaauug

SEQ ID NO: 1973241 - RNA, 19 nt, Homo sapiens
  misc_RNA (1)...(19): siRNA sense strand
aggagaagauugacagcau

SEQ ID NO: 1973242 - RNA, 19 nt, Homo sapiens
  misc_RNA (1)...(19): siRNA sense strand
gcugcagaaucgcgggaaa

SEQ ID NO: 1973243 - RNA, 19 nt, Homo sapiens
  misc_RNA (1)...(19): siRNA sense strand
gaccagauccaugacuguu

SEQ ID NO: 1973244 - RNA, 19 nt, Homo sapiens
  misc_RNA (1)...(19): siRNA sense strand
ugaaaguccgaaaggauga

SEQ ID NO: 1973245 - RNA, 19 nt, Homo sapiens
  misc_RNA (1)...(19): siRNA sense strand
agaagcggacuuaauugaa

SEQ ID NO: 1973246 - RNA, 19 nt, Homo sapiens
  misc_RNA (1)...(19): siRNA sense strand
ucauacuacugaagcugaa

SEQ ID NO: 1973247 - RNA, 19 nt, Homo sapiens
  misc_RNA (1)...(19): siRNA sense strand
aaccuuagaagcggacuua

SEQ ID NO: 1973248 - RNA, 19 nt, Homo sapiens
  misc_RNA (1)...(19): siRNA sense strand
cuucaaaguggcaggaauu

SEQ ID NO: 1973249 - RNA, 19 nt, Homo sapiens
  misc_RNA (1)...(19): siRNA sense strand
uagggaaggcugcaaaaua

SEQ ID NO: 1973250 - RNA, 19 nt, Homo sapiens
  misc_RNA (1)...(19): siRNA sense strand
caaugcaggacguacaguu

SEQ ID NO: 1973251 - RNA, 19 nt, Homo sapiens
  misc_RNA (1)...(19): siRNA sense strand
aaaggaugaccuaguacuu

SEQ ID NO: 1973252 - RNA, 19 nt, Homo sapiens
  misc_RNA (1)...(19): siRNA sense strand
ccagccaaacugacaagaa

SEQ ID NO: 1973253 - RNA, 19 nt, Homo sapiens
  misc_RNA (1)...(19): siRNA sense strand
uauccgagaaauugagaaa

SEQ ID NO: 1973254 - RNA, 19 nt, Homo sapiens
  misc_RNA (1)...(19): siRNA sense strand
ccagaucuucccagccaaa

SEQ ID NO: 1973255 - RNA, 19 nt, Homo sapiens
  misc_RNA (1)...(19): siRNA sense strand
caccagauaaauauugaga

SEQ ID NO: 1973256 - RNA, 19 nt, Homo sapiens
  misc_RNA (1)...(19): siRNA sense strand
ucaaaaugcugcagaaucg

SEQ ID NO: 1973257 - RNA, 19 nt, Homo sapiens
  misc_RNA (1)...(19): siRNA sense strand
guggagcauuucauacuac

SEQ ID NO: 1973258 - RNA, 19 nt, Homo sapiens
  misc_RNA (1)...(19): siRNA sense strand
ggaaucuguagaagaacuu

SEQ ID NO: 1973259 - RNA, 19 nt, Homo sapiens
  misc_RNA (1)...(19): siRNA sense strand
gugaaauuacgccgucuug

SEQ ID NO: 1973260 - RNA, 19 nt, Homo sapiens
  misc_RNA (1)...(19): siRNA sense strand
ugaugaagaaacuuugcua

SEQ ID NO: 1973261 - RNA, 19 nt, Homo sapiens
  misc_RNA (1)...(19): siRNA sense strand
gcuucaaaguggcaggaau

SEQ ID NO: 1973262 - RNA, 19 nt, Homo sapiens
  misc_RNA (1)...(19): siRNA sense strand
uauaugccuuaccugaaau

SEQ ID NO: 1973263 - RNA, 19 nt, Homo sapiens
  misc_RNA (1)...(19): siRNA sense strand
aagcaccagauaaauauug

SEQ ID NO: 1973264 - RNA, 19 nt, Homo sapiens
  misc_RNA (1)...(19): siRNA sense strand
gcaacuccgauccaauauc

SEQ ID NO: 1973265 - RNA, 19 nt, Homo sapiens
  misc_RNA (1)...(19): siRNA sense strand
gaagaaagauucaguaacu

SEQ ID NO: 1973266 - RNA, 19 nt, Homo sapiens
  misc_RNA (1)...(19): siRNA sense strand
gcauaccgcuacuauauug

SEQ ID NO: 1973267 - RNA, 19 nt, Homo sapiens
  misc_RNA (1)...(19): siRNA sense strand
ggagaaggguuuaucaucu

SEQ ID NO: 1973268 - RNA, 19 nt, Homo sapiens
  misc_RNA (1)...(19): siRNA sense strand
gaagaagaaagauucagua

SEQ ID NO: 1973269 - RNA, 19 nt, Homo sapiens
  misc_RNA (1)...(19): siRNA sense strand
gaagaugcuuauaagauca

SEQ ID NO: 1973270 - RNA, 19 nt, Homo sapiens
  misc_RNA (1)...(19): siRNA sense strand
uaagacaggucaccaagga

SEQ ID NO: 1973271 - RNA, 19 nt, Homo sapiens
  misc_RNA (1)...(19): siRNA sense strand
ggagauacguaggaaagaa

SEQ ID NO: 1973272 - RNA, 19 nt, Homo sapiens
  misc_RNA (1)...(19): siRNA sense strand
gaauucagcugucccuuuu

SEQ ID NO: 1973273 - RNA, 19 nt, Homo sapiens
  misc_RNA (1)...(19): siRNA sense strand
gaaagauucaguaacuuga

SEQ ID NO: 1973274 - RNA, 19 nt, Homo sapiens
  misc_RNA (1)...(19): siRNA sense strand
ugaagaugcuuauaagauc

SEQ ID NO: 1973275 - RNA, 19 nt, Homo sapiens
  misc_RNA (1)...(19): siRNA sense strand
gcuacuauauugaugaugu

SEQ ID NO: 1973276 - RNA, 19 nt, Homo sapiens
  misc_RNA (1)...(19): siRNA sense strand
gagaaggguuuaucaucug

SEQ ID NO: 1973277 - RNA, 19 nt, Homo sapiens
  misc_RNA (1)...(19): siRNA sense strand
aaacaagucagaccucaaa

SEQ ID NO: 1973278 - RNA, 19 nt, Homo sapiens
  misc_RNA (1)...(19): siRNA sense strand
ugagacaucugcugcauac

SEQ ID NO: 1973279 - RNA, 19 nt, Homo sapiens
  misc_RNA (1)...(19): siRNA sense strand
ccauugaagaugcuuauaa

SEQ ID NO: 1973280 - RNA, 19 nt, Homo sapiens
  misc_RNA (1)...(19): siRNA sense strand
gcugggugcugguggugua

SEQ ID NO: 1973281 - RNA, 19 nt, Homo sapiens
  misc_RNA (1)...(19): siRNA sense strand
ggaagaagaaagauucagu

SEQ ID NO: 1973282 - RNA, 19 nt, Homo sapiens
  misc_RNA (1)...(19): siRNA sense strand
aaggguuuaucaucuguua

SEQ ID NO: 1973283 - RNA, 19 nt, Homo sapiens
  misc_RNA (1)...(19): siRNA sense strand
gagauacguaggaaagaaa

SEQ ID NO: 1973284 - RNA, 19 nt, Homo sapiens
  misc_RNA (1)...(19): siRNA sense strand
cauugaagaugcuuauaag

SEQ ID NO: 1973285 - RNA, 19 nt, Homo sapiens
  misc_RNA (1)...(19): siRNA sense strand
ggauccguauugaugauga

SEQ ID NO: 1973286 - RNA, 19 nt, Homo sapiens
  misc_RNA (1)...(19): siRNA sense strand
uaucaucuguuacucuauc

SEQ ID NO: 1973287 - RNA, 19 nt, Homo sapiens
  misc_RNA (1)...(19): siRNA sense strand
ucacggaucgucgaaguuu

SEQ ID NO: 1973288 - RNA, 19 nt, Homo sapiens
  misc_RNA (1)...(19): siRNA sense strand
gcaggagaaggguuuauca

SEQ ID NO: 1973289 - RNA, 19 nt, Homo sapiens
  misc_RNA (1)...(19): siRNA sense strand
cugcauaccgcuacuauau

SEQ ID NO: 1973290 - RNA, 19 nt, Homo sapiens
  misc_RNA (1)...(19): siRNA sense strand
gaaacaagucagaccucaa

SEQ ID NO: 1973291 - RNA, 19 nt, Homo sapiens
  misc_RNA (1)...(19): siRNA sense strand
agaaagauucaguaacuug

SEQ ID NO: 1973292 - RNA, 19 nt, Homo sapiens
  misc_RNA (1)...(19): siRNA sense strand
ggaguacaaacuagugaug

SEQ ID NO: 1973293 - RNA, 19 nt, Homo sapiens
  misc_RNA (1)...(19): siRNA sense strand
cgucgaaguuuccaugaag

SEQ ID NO: 1973294 - RNA, 19 nt, Homo sapiens
  misc_RNA (1)...(19): siRNA sense strand
ucacgggaguacaaacuag

SEQ ID NO: 1973295 - RNA, 19 nt, Homo sapiens
  misc_RNA (1)...(19): siRNA sense strand
uaucacggaucgucgaagu

SEQ ID NO: 1973296 - RNA, 19 nt, Homo sapiens
  misc_RNA (1)...(19): siRNA sense strand
gagggcaggagaaggguuu

SEQ ID NO: 1973297 - RNA, 19 nt, Homo sapiens
  misc_RNA (1)...(19): siRNA sense strand
cgauacaccugugguucuu

SEQ ID NO: 1973298 - RNA, 19 nt, Homo sapiens
  misc_RNA (1)...(19): siRNA sense strand
agaauucagcugucccuuu

SEQ ID NO: 1973299 - RNA, 19 nt, Homo sapiens
  misc_RNA (1)...(19): siRNA sense strand
ggaagagugccaugaccau

SEQ ID NO: 1973300 - RNA, 19 nt, Homo sapiens
  misc_RNA (1)...(19): siRNA sense strand
gaaagaaaaggaggcagua

SEQ ID NO: 1973301 - RNA, 19 nt, Homo sapiens
  misc_RNA (1)...(19): siRNA sense strand
caccaaggaagaaggauug

SEQ ID NO: 1973302 - RNA, 19 nt, Homo sapiens
  misc_RNA (1)...(19): siRNA sense strand
caagucagaccucaaacag

SEQ ID NO: 1973303 - RNA, 19 nt, Homo sapiens
  misc_RNA (1)...(19): siRNA sense strand
caggauccguauugaugau

SEQ ID NO: 1973304 - RNA, 19 nt, Homo sapiens
  misc_RNA (1)...(19): siRNA sense strand
guucaucagccaccgauuc

SEQ ID NO: 1973305 - RNA, 19 nt, Homo sapiens
  misc_RNA (1)...(19): siRNA sense strand
agaaggguuuaucaucugu

SEQ ID NO: 1973306 - RNA, 19 nt, Homo sapiens
  misc_RNA (1)...(19): siRNA sense strand
aaaucaccauuccggaaga

SEQ ID NO: 1973307 - RNA, 19 nt, Homo sapiens
  misc_RNA (1)...(19): siRNA sense strand
ugaugagccugccaaucug

SEQ ID NO: 1973308 - RNA, 19 nt, Homo sapiens
  misc_RNA (1)...(19): siRNA sense strand
guagggaagagugccauga

SEQ ID NO: 1973309 - RNA, 19 nt, Homo sapiens
  misc_RNA (1)...(19): siRNA sense strand
gcugcauaccgcuacuaua

SEQ ID NO: 1973310 - RNA, 19 nt, Homo sapiens
  misc_RNA (1)...(19): siRNA sense strand
ucaggauccguauugauga

SEQ ID NO: 1973311 - RNA, 19 nt, Homo sapiens
  misc_RNA (1)...(19): siRNA sense strand
guauaugagggcaggagaa

SEQ ID NO: 1973312 - RNA, 19 nt, Homo sapiens
  misc_RNA (1)...(19): siRNA sense strand
cugccaaucuggacauuuu

SEQ ID NO: 1973313 - RNA, 19 nt, Homo sapiens
  misc_RNA (1)...(19): siRNA sense strand
caccauuccggaagaagaa

SEQ ID NO: 1973314 - RNA, 19 nt, Homo sapiens
  misc_RNA (1)...(19): siRNA sense strand
ccgcuacuauauugaugau

SEQ ID NO: 1973315 - RNA, 19 nt, Homo sapiens
  misc_RNA (1)...(19): siRNA sense strand
ucaccaaggaagaaggauu

SEQ ID NO: 1973316 - RNA, 19 nt, Homo sapiens
  misc_RNA (1)...(19): siRNA sense strand
ucagaccucaaacagcuaa

SEQ ID NO: 1973317 - RNA, 19 nt, Homo sapiens
  misc_RNA (1)...(19): siRNA sense strand
auacaccugugguucuugu

SEQ ID NO: 1973318 - RNA, 19 nt, Homo sapiens
  misc_RNA (1)...(19): siRNA sense strand
cagcuggacaggcagaguu

SEQ ID NO: 1973319 - RNA, 19 nt, Homo sapiens
  misc_RNA (1)...(19): siRNA sense strand
ggacaggcagaguuuacag

SEQ ID NO: 1973320 - RNA, 19 nt, Homo sapiens
  misc_RNA (1)...(19): siRNA sense strand
ggucaccaaggaagaagga

SEQ ID NO: 1973321 - RNA, 19 nt, Homo sapiens
  misc_RNA (1)...(19): siRNA sense strand
gaaggguuuaucaucuguu

SEQ ID NO: 1973322 - RNA, 19 nt, Homo sapiens
  misc_RNA (1)...(19): siRNA sense strand
ccaguugguagcugcugua

SEQ ID NO: 1973323 - RNA, 19 nt, Homo sapiens
  misc_RNA (1)...(19): siRNA sense strand
ccaccgauucccagaagau

SEQ ID NO: 1973324 - RNA, 19 nt, Homo sapiens
  misc_RNA (1)...(19): siRNA sense strand
uaucgaguccgacguacug

SEQ ID NO: 1973325 - RNA, 19 nt, Homo sapiens
  misc_RNA (1)...(19): siRNA sense strand
gaucccaccauugaagaug

SEQ ID NO: 1973326 - RNA, 19 nt, Homo sapiens
  misc_RNA (1)...(19): siRNA sense strand
ucaccauuccggaagaaga

SEQ ID NO: 1973327 - RNA, 19 nt, Homo sapiens
  misc_RNA (1)...(19): siRNA sense strand
aggcaguacuggccaugga

SEQ ID NO: 1973328 - RNA, 19 nt, Homo sapiens
  misc_RNA (1)...(19): siRNA sense strand
ugacgauacaccugugguu

SEQ ID NO: 1973329 - RNA, 19 nt, Homo sapiens
  misc_RNA (1)...(19): siRNA sense strand
gaccagggcuccacaauga

SEQ ID NO: 1973330 - RNA, 19 nt, Homo sapiens
  misc_RNA (1)...(19): siRNA sense strand
gggaggagcuguugaaaga

SEQ ID NO: 1973331 - RNA, 19 nt, Homo sapiens
  misc_RNA (1)...(19): siRNA sense strand
gaggaagccugcagccuua

SEQ ID NO: 1973332 - RNA, 19 nt, Homo sapiens
  misc_RNA (1)...(19): siRNA sense strand
ggaagugacuggucugaug

SEQ ID NO: 1973333 - RNA, 19 nt, Homo sapiens
  misc_RNA (1)...(19): siRNA sense strand
ccagaauucucguucauuu

SEQ ID NO: 1973334 - RNA, 19 nt, Homo sapiens
  misc_RNA (1)...(19): siRNA sense strand
aaagagaggugaaggagaa

SEQ ID NO: 1973335 - RNA, 19 nt, Homo sapiens
  misc_RNA (1)...(19): siRNA sense strand
ggaaacggaugcucccuau

SEQ ID NO: 1973336 - RNA, 19 nt, Homo sapiens
  misc_RNA (1)...(19): siRNA sense strand
ccaaagauaguucucauaa

SEQ ID NO: 1973337 - RNA, 19 nt, Homo sapiens
  misc_RNA (1)...(19): siRNA sense strand
gaggagggcuucauugaca

SEQ ID NO: 1973338 - RNA, 19 nt, Homo sapiens
  misc_RNA (1)...(19): siRNA sense strand
gaaaugggcuuggauuacu

SEQ ID NO: 1973339 - RNA, 19 nt, Homo sapiens
  misc_RNA (1)...(19): siRNA sense strand
gagaaaugggcuuggauua

SEQ ID NO: 1973340 - RNA, 19 nt, Homo sapiens
  misc_RNA (1)...(19): siRNA sense strand
gaaguacuuucccaacaug

SEQ ID NO: 1973341 - RNA, 19 nt, Homo sapiens
  misc_RNA (1)...(19): siRNA sense strand
ccgagaagcugaugaagau

SEQ ID NO: 1973342 - RNA, 19 nt, Homo sapiens
  misc_RNA (1)...(19): siRNA sense strand
aaacggaugcucccuauuu

SEQ ID NO: 1973343 - RNA, 19 nt, Homo sapiens
  misc_RNA (1)...(19): siRNA sense strand
uauagacccucaagagaaa

SEQ ID NO: 1973344 - RNA, 19 nt, Homo sapiens
  misc_RNA (1)...(19): siRNA sense strand
ucacggcagugcugacaua

SEQ ID NO: 1973345 - RNA, 19 nt, Homo sapiens
  misc_RNA (1)...(19): siRNA sense strand
gcacguuacuacagugaga

SEQ ID NO: 1973346 - RNA, 19 nt, Homo sapiens
  misc_RNA (1)...(19): siRNA sense strand
gaacaccagucgccucuac

SEQ ID NO: 1973347 - RNA, 19 nt, Homo sapiens
  misc_RNA (1)...(19): siRNA sense strand
gaaccugucucccugaaac

SEQ ID NO: 1973348 - RNA, 19 nt, Homo sapiens
  misc_RNA (1)...(19): siRNA sense strand
ccacaaugaucuaccugaa

SEQ ID NO: 1973349 - RNA, 19 nt, Homo sapiens
  misc_RNA (1)...(19): siRNA sense strand
gaagaucugcuagaaauca

SEQ ID NO: 1973350 - RNA, 19 nt, Homo sapiens
  misc_RNA (1)...(19): siRNA sense strand
gcagcuacccggucauuga

SEQ ID NO: 1973351 - RNA, 19 nt, Homo sapiens
  misc_RNA (1)...(19): siRNA sense strand
cauguacccuccucauuug

SEQ ID NO: 1973352 - RNA, 19 nt, Homo sapiens
  misc_RNA (1)...(19): siRNA sense strand
gcacaagguauuugagaga

SEQ ID NO: 1973353 - RNA, 19 nt, Homo sapiens
  misc_RNA (1)...(19): siRNA sense strand
gaacagcacaagguauuug

SEQ ID NO: 1973354 - RNA, 19 nt, Homo sapiens
  misc_RNA (1)...(19): siRNA sense strand
ggagaaaugggcuuggauu

SEQ ID NO: 1973355 - RNA, 19 nt, Homo sapiens
  misc_RNA (1)...(19): siRNA sense strand
uaaagaagcccuuggugau

SEQ ID NO: 1973356 - RNA, 19 nt, Homo sapiens
  misc_RNA (1)...(19): siRNA sense strand
ucucauaacuccacaaacu

SEQ ID NO: 1973357 - RNA, 19 nt, Homo sapiens
  misc_RNA (1)...(19): siRNA sense strand
ggucugauguugaggagau

SEQ ID NO: 1973358 - RNA, 19 nt, Homo sapiens
  misc_RNA (1)...(19): siRNA sense strand
gagaggagcagcuucuaug

SEQ ID NO: 1973359 - RNA, 19 nt, Homo sapiens
  misc_RNA (1)...(19): siRNA sense strand
gauaagacagugccagaga

SEQ ID NO: 1973360 - RNA, 19 nt, Homo sapiens
  misc_RNA (1)...(19): siRNA sense strand
uaagguugauuccaaagau

SEQ ID NO: 1973361 - RNA, 19 nt, Homo sapiens
  misc_RNA (1)...(19): siRNA sense strand
ugacaggagaguaguuaua

SEQ ID NO: 1973362 - RNA, 19 nt, Homo sapiens
  misc_RNA (1)...(19): siRNA sense strand
ggagccgcaugagugauua

SEQ ID NO: 1973363 - RNA, 19 nt, Homo sapiens
  misc_RNA (1)...(19): siRNA sense strand
ucauguacccuccucauuu

SEQ ID NO: 1973364 - RNA, 19 nt, Homo sapiens
  misc_RNA (1)...(19): siRNA sense strand
ugaugaagaucugcuagaa

SEQ ID NO: 1973365 - RNA, 19 nt, Homo sapiens
  misc_RNA (1)...(19): siRNA sense strand
cagaacagcacaagguauu

SEQ ID NO: 1973366 - RNA, 19 nt, Homo sapiens
  misc_RNA (1)...(19): siRNA sense strand
augaagaucugcuagaaau

SEQ ID NO: 1973367 - RNA, 19 nt, Homo sapiens
  misc_RNA (1)...(19): siRNA sense strand
uccagaagcucagaagaaa

SEQ ID NO: 1973368 - RNA, 19 nt, Homo sapiens
  misc_RNA (1)...(19): siRNA sense strand
cagaagcucagaagaaaga

SEQ ID NO: 1973369 - RNA, 19 nt, Homo sapiens
  misc_RNA (1)...(19): siRNA sense strand
ugacucugacucucauuua

SEQ ID NO: 1973370 - RNA, 19 nt, Homo sapiens
  misc_RNA (1)...(19): siRNA sense strand
gaugaagaucugcuagaaa

SEQ ID NO: 1973371 - RNA, 19 nt, Homo sapiens
  misc_RNA (1)...(19): siRNA sense strand
gaaaagaacauuccaagag

SEQ ID NO: 1973372 - RNA, 19 nt, Homo sapiens
  misc_RNA (1)...(19): siRNA sense strand
caaaacaccuccagagaca

SEQ ID NO: 1973373 - RNA, 19 nt, Homo sapiens
  misc_RNA (1)...(19): siRNA sense strand
ugaaguacuuucccaacau

SEQ ID NO: 1973374 - RNA, 19 nt, Homo sapiens
  misc_RNA (1)...(19): siRNA sense strand
gggcuuggauuacucuuac

SEQ ID NO: 1973375 - RNA, 19 nt, Homo sapiens
  misc_RNA (1)...(19): siRNA sense strand
ggucagaaugauacaauug

SEQ ID NO: 1973376 - RNA, 19 nt, Homo sapiens
  misc_RNA (1)...(19): siRNA sense strand
gagagaaucaucguggaaa

SEQ ID NO: 1973377 - RNA, 19 nt, Homo sapiens
  misc_RNA (1)...(19): siRNA sense strand
ggagagaaucaucguggaa

SEQ ID NO: 1973378 - RNA, 19 nt, Homo sapiens
  misc_RNA (1)...(19): siRNA sense strand
cagauucucucaggaggaa

SEQ ID NO: 1973379 - RNA, 19 nt, Homo sapiens
  misc_RNA (1)...(19): siRNA sense strand
caaagauaguucucauaac

SEQ ID NO: 1973380 - RNA, 19 nt, Homo sapiens
  misc_RNA (1)...(19): siRNA sense strand
cugcaucucugacuucugu

SEQ ID NO: 1973381 - RNA, 19 nt, Homo sapiens
  misc_RNA (1)...(19): siRNA sense strand
ugacuggucugauguugag

SEQ ID NO: 1973382 - RNA, 19 nt, Homo sapiens
  misc_RNA (1)...(19): siRNA sense strand
aagguugauuccaaagaua

SEQ ID NO: 1973383 - RNA, 19 nt, Homo sapiens
  misc_RNA (1)...(19): siRNA sense strand
gaagugacuggucugaugu

SEQ ID NO: 1973384 - RNA, 19 nt, Homo sapiens
  misc_RNA (1)...(19): siRNA sense strand
ugaucuaccugaaggcuau

SEQ ID NO: 1973385 - RNA, 19 nt, Homo sapiens
  misc_RNA (1)...(19): siRNA sense strand
gccuuaagguugauuccaa

SEQ ID NO: 1973386 - RNA, 19 nt, Homo sapiens
  misc_RNA (1)...(19): siRNA sense strand
gaacauuccaagaggagau

SEQ ID NO: 1973387 - RNA, 19 nt, Homo sapiens
  misc_RNA (1)...(19): siRNA sense strand
guuauagacccucaagaga

SEQ ID NO: 1973388 - RNA, 19 nt, Homo sapiens
  misc_RNA (1)...(19): siRNA sense strand
gaucugcuagaaaucauga

SEQ ID NO: 1973389 - RNA, 19 nt, Homo sapiens
  misc_RNA (1)...(19): siRNA sense strand
gcuguggcauuuggagaaa

SEQ ID NO: 1973390 - RNA, 19 nt, Homo sapiens
  misc_RNA (1)...(19): siRNA sense strand
cagugagagucaagaaaga

SEQ ID NO: 1973391 - RNA, 19 nt, Homo sapiens
  misc_RNA (1)...(19): siRNA sense strand
uagaggagggcuucauuga

SEQ ID NO: 1973392 - RNA, 19 nt, Homo sapiens
  misc_RNA (1)...(19): siRNA sense strand
caacgaugcagcccagguu

SEQ ID NO: 1973393 - RNA, 19 nt, Homo sapiens
  misc_RNA (1)...(19): siRNA sense strand
gggucagaaugauacaauu

SEQ ID NO: 1973394 - RNA, 19 nt, Homo sapiens
  misc_RNA (1)...(19): siRNA sense strand
caccacgccugucccagaa

SEQ ID NO: 1973395 - RNA, 19 nt, Homo sapiens
  misc_RNA (1)...(19): siRNA sense strand
ggaccgaaggacugucauu

SEQ ID NO: 1973396 - RNA, 19 nt, Homo sapiens
  misc_RNA (1)...(19): siRNA sense strand
uuauagacccucaagagaa

SEQ ID NO: 1973397 - RNA, 19 nt, Homo sapiens
  misc_RNA (1)...(19): siRNA sense strand
aggagcagcuucuaugaca

SEQ ID NO: 1973398 - RNA, 19 nt, Homo sapiens
  misc_RNA (1)...(19): siRNA sense strand
uaugacaggagaguaguua

SEQ ID NO: 1973399 - RNA, 19 nt, Homo sapiens
  misc_RNA (1)...(19): siRNA sense strand
cccuagaguucuuggauga

SEQ ID NO: 1973400 - RNA, 19 nt, Homo sapiens
  misc_RNA (1)...(19): siRNA sense strand
ccuuaagguugauuccaaa

SEQ ID NO: 1973401 - RNA, 19 nt, Homo sapiens
  misc_RNA (1)...(19): siRNA sense strand
gcauacgguccgagagauu

SEQ ID NO: 1973402 - RNA, 19 nt, Homo sapiens
  misc_RNA (1)...(19): siRNA sense strand
gcagaucccacuggagaga

SEQ ID NO: 1973403 - RNA, 19 nt, Homo sapiens
  misc_RNA (1)...(19): siRNA sense strand
uacaagauccauaggcauu

SEQ ID NO: 1973404 - RNA, 19 nt, Homo sapiens
  misc_RNA (1)...(19): siRNA sense strand
caugcucuauuccaagcua

SEQ ID NO: 1973405 - RNA, 19 nt, Homo sapiens
  misc_RNA (1)...(19): siRNA sense strand
gagcaccccucuucuggaa

SEQ ID NO: 1973406 - RNA, 19 nt, Homo sapiens
  misc_RNA (1)...(19): siRNA sense strand
gacaggagaguaguuauag

SEQ ID NO: 1973407 - RNA, 19 nt, Homo sapiens
  misc_RNA (1)...(19): siRNA sense strand
auagggagguggugaugga

SEQ ID NO: 1973408 - RNA, 19 nt, Homo sapiens
  misc_RNA (1)...(19): siRNA sense strand
cggcagugcugacauacuc

SEQ ID NO: 1973409 - RNA, 19 nt, Homo sapiens
  misc_RNA (1)...(19): siRNA sense strand
cccuaaggcuguggcauuu

SEQ ID NO: 1973410 - RNA, 19 nt, Homo sapiens
  misc_RNA (1)...(19): siRNA sense strand
gacucugacucucauuuag

SEQ ID NO: 1973411 - RNA, 19 nt, Homo sapiens
  misc_RNA (1)...(19): siRNA sense strand
ccuccucauuuguacagua

SEQ ID NO: 1973412 - RNA, 19 nt, Homo sapiens
  misc_RNA (1)...(19): siRNA sense strand
gaaugauacaauugaggaa

SEQ ID NO: 1973413 - RNA, 19 nt, Homo sapiens
  misc_RNA (1)...(19): siRNA sense strand
agagauugccagagucaaa

SEQ ID NO: 1973414 - RNA, 19 nt, Homo sapiens
  misc_RNA (1)...(19): siRNA sense strand
gaaacggaugcucccuauu

SEQ ID NO: 1973415 - RNA, 19 nt, Homo sapiens
  misc_RNA (1)...(19): siRNA sense strand
gagaagcugaugaagaucu

SEQ ID NO: 1973416 - RNA, 19 nt, Homo sapiens
  misc_RNA (1)...(19): siRNA sense strand
gccgagaagcugaugaaga

SEQ ID NO: 1973417 - RNA, 19 nt, Homo sapiens
  misc_RNA (1)...(19): siRNA sense strand
cuaaggcuguggcauuugg

SEQ ID NO: 1973418 - RNA, 19 nt, Homo sapiens
  misc_RNA (1)...(19): siRNA sense strand
gaccgaaggacugucauug

SEQ ID NO: 1973419 - RNA, 19 nt, Homo sapiens
  misc_RNA (1)...(19): siRNA sense strand
agccaagacugcagaagga

SEQ ID NO: 1973420 - RNA, 19 nt, Homo sapiens
  misc_RNA (1)...(19): siRNA sense strand
ccaacaagguccagaaaag

SEQ ID NO: 1973421 - RNA, 19 nt, Homo sapiens
  misc_RNA (1)...(19): siRNA sense strand
ccagucgccucuacagucu

SEQ ID NO: 1973422 - RNA, 19 nt, Homo sapiens
  misc_RNA (1)...(19): siRNA sense strand
cagcacaagguauuugaga

SEQ ID NO: 1973423 - RNA, 19 nt, Homo sapiens
  misc_RNA (1)...(19): siRNA sense strand
cuccacaaacucugaauuu

SEQ ID NO: 1973424 - RNA, 19 nt, Homo sapiens
  misc_RNA (1)...(19): siRNA sense strand
aaacaccuccagagacaug

SEQ ID NO: 1973425 - RNA, 19 nt, Homo sapiens
  misc_RNA (1)...(19): siRNA sense strand
acaggagaguaguuauaga

SEQ ID NO: 1973426 - RNA, 19 nt, Homo sapiens
  misc_RNA (1)...(19): siRNA sense strand
ccagcucccugccaaagag

SEQ ID NO: 1973427 - RNA, 19 nt, Homo sapiens
  misc_RNA (1)...(19): siRNA sense strand
caauugaggaacccaacaa

SEQ ID NO: 1973428 - RNA, 19 nt, Homo sapiens
  misc_RNA (1)...(19): siRNA sense strand
gucagaaugauacaauuga

SEQ ID NO: 1973429 - RNA, 19 nt, Homo sapiens
  misc_RNA (1)...(19): siRNA sense strand
gcagcgagguggacauguu

SEQ ID NO: 1973430 - RNA, 19 nt, Homo sapiens
  misc_RNA (1)...(19): siRNA sense strand
ccaacaugcugguggagua

SEQ ID NO: 1973431 - RNA, 19 nt, Homo sapiens
  misc_RNA (1)...(19): siRNA sense strand
ggaaagaacaaaacuauug

SEQ ID NO: 1973432 - RNA, 19 nt, Homo sapiens
  misc_RNA (1)...(19): siRNA sense strand
ggagggcugugccaacaug

SEQ ID NO: 1973433 - RNA, 19 nt, Homo sapiens
  misc_RNA (1)...(19): siRNA sense strand
gugggaagcugacgguguu

SEQ ID NO: 1973434 - RNA, 19 nt, Homo sapiens
  misc_RNA (1)...(19): siRNA sense strand
ccaagcagacgucuuccua

SEQ ID NO: 1973435 - RNA, 19 nt, Homo sapiens
  misc_RNA (1)...(19): siRNA sense strand
aaacagugcagcagacuug

SEQ ID NO: 1973436 - RNA, 19 nt, Homo sapiens
  misc_RNA (1)...(19): siRNA sense strand
gugagucgagguaucauuu

SEQ ID NO: 1973437 - RNA, 19 nt, Homo sapiens
  misc_RNA (1)...(19): siRNA sense strand
aaaucuggcuaaaguguuc

SEQ ID NO: 1973438 - RNA, 19 nt, Homo sapiens
  misc_RNA (1)...(19): siRNA sense strand
uggagccgcugcuuaacuu

SEQ ID NO: 1973439 - RNA, 19 nt, Homo sapiens
  misc_RNA (1)...(19): siRNA sense strand
gguguucacugugcugugu

SEQ ID NO: 1973440 - RNA, 19 nt, Homo sapiens
  misc_RNA (1)...(19): siRNA sense strand
gcauaggacagcuguucuu

SEQ ID NO: 1973441 - RNA, 19 nt, Homo sapiens
  misc_RNA (1)...(19): siRNA sense strand
guaccucgaccgcauagga

SEQ ID NO: 1973442 - RNA, 19 nt, Homo sapiens
  misc_RNA (1)...(19): siRNA sense strand
gaaaaucuggcuaaagugu

SEQ ID NO: 1973443 - RNA, 19 nt, Homo sapiens
  misc_RNA (1)...(19): siRNA sense strand
cgacguacacccagaagca

SEQ ID NO: 1973444 - RNA, 19 nt, Homo sapiens
  misc_RNA (1)...(19): siRNA sense strand
uggaaaaucuggcuaaagu

SEQ ID NO: 1973445 - RNA, 19 nt, Homo sapiens
  misc_RNA (1)...(19): siRNA sense strand
cgagaagggcgacuacuac

SEQ ID NO: 1973446 - RNA, 19 nt, Homo sapiens
  misc_RNA (1)...(19): siRNA sense strand
gcgcaucgguggucuucac

SEQ ID NO: 1973447 - RNA, 19 nt, Homo sapiens
  misc_RNA (1)...(19): siRNA sense strand
ucgagaagggcgacuacua

SEQ ID NO: 1973448 - RNA, 19 nt, Homo sapiens
  misc_RNA (1)...(19): siRNA sense strand
cuacgaggcgcaccagaug

SEQ ID NO: 1973449 - RNA, 19 nt, Homo sapiens
  misc_RNA (1)...(19): siRNA sense strand
cccgggagcucauguacuc

SEQ ID NO: 1973450 - RNA, 19 nt, Homo sapiens
  misc_RNA (1)...(19): siRNA sense strand
caacaugcugguggaguau

SEQ ID NO: 1973451 - RNA, 19 nt, Homo sapiens
  misc_RNA (1)...(19): siRNA sense strand
cuucagccauggccagcaa

SEQ ID NO: 1973452 - RNA, 19 nt, Homo sapiens
  misc_RNA (1)...(19): siRNA sense strand
ccugagcgcgugaccuuug

SEQ ID NO: 1973453 - RNA, 19 nt, Homo sapiens
  misc_RNA (1)...(19): siRNA sense strand
guaccggacccuguucuuc

SEQ ID NO: 1973454 - RNA, 19 nt, Homo sapiens
  misc_RNA (1)...(19): siRNA sense strand
cugacgagcugcuggaaaa

SEQ ID NO: 1973455 - RNA, 19 nt, Homo sapiens
  misc_RNA (1)...(19): siRNA sense strand
gagccgcugcuuaacuuca

SEQ ID NO: 1973456 - RNA, 19 nt, Homo sapiens
  misc_RNA (1)...(19): siRNA sense strand
acgaggcgcaccagaugua

SEQ ID NO: 1973457 - RNA, 19 nt, Homo sapiens
  misc_RNA (1)...(19): siRNA sense strand
uaccggacccuguucuuca

SEQ ID NO: 1973458 - RNA, 19 nt, Homo sapiens
  misc_RNA (1)...(19): siRNA sense strand
agaccaaccucacauauga

SEQ ID NO: 1973459 - RNA, 19 nt, Homo sapiens
  misc_RNA (1)...(19): siRNA sense strand
cuacaaugcugaugacaug

SEQ ID NO: 1973460 - RNA, 19 nt, Homo sapiens
  misc_RNA (1)...(19): siRNA sense strand
gaucaacaccguccucauc

SEQ ID NO: 1973461 - RNA, 19 nt, Homo sapiens
  misc_RNA (1)...(19): siRNA sense strand
ugaccgacaucgagcagaa

SEQ ID NO: 1973462 - RNA, 19 nt, Homo sapiens
  misc_RNA (1)...(19): siRNA sense strand
cuggcaagcucugcucuua

SEQ ID NO: 1973463 - RNA, 19 nt, Homo sapiens
  misc_RNA (1)...(19): siRNA sense strand
gcgcuucucugcuucuucu

SEQ ID NO: 1973464 - RNA, 19 nt, Homo sapiens
  misc_RNA (1)...(19): siRNA sense strand
ucaacaccguccucaucua

SEQ ID NO: 1973465 - RNA, 19 nt, Homo sapiens
  misc_RNA (1)...(19): siRNA sense strand
gagaccaaccucacauaug

SEQ ID NO: 1973466 - RNA, 19 nt, Homo sapiens
  misc_RNA (1)...(19): siRNA sense strand
ggcaagcucugcucuuacu

SEQ ID NO: 1973467 - RNA, 19 nt, Homo sapiens
  misc_RNA (1)...(19): siRNA sense strand
uugcucaucuucuacaaug

SEQ ID NO: 1973468 - RNA, 19 nt, Homo sapiens
  misc_RNA (1)...(19): siRNA sense strand
caacaccguccucaucuag

SEQ ID NO: 1973469 - RNA, 19 nt, Homo sapiens
  misc_RNA (1)...(19): siRNA sense strand
ucggacgacugcaccauug

SEQ ID NO: 1973470 - RNA, 19 nt, Homo sapiens
  misc_RNA (1)...(19): siRNA sense strand
gacauguccuggcucuaca

SEQ ID NO: 1973471 - RNA, 19 nt, Homo sapiens
  misc_RNA (1)...(19): siRNA sense strand
gccagaaggccaugcuaga

SEQ ID NO: 1973472 - RNA, 19 nt, Homo sapiens
  misc_RNA (1)...(19): siRNA sense strand
uguccuggcucuacaccuu

SEQ ID NO: 1973473 - RNA, 19 nt, Homo sapiens
  misc_RNA (1)...(19): siRNA sense strand
cgccaaagcgcuucgaugu

SEQ ID NO: 1973474 - RNA, 19 nt, Homo sapiens
  misc_RNA (1)...(19): siRNA sense strand
ggacgacugcaccauugug

SEQ ID NO: 1973475 - RNA, 19 nt, Homo sapiens
  misc_RNA (1)...(19): siRNA sense strand
aaggcuugcucaucuucua

SEQ ID NO: 1973476 - RNA, 19 nt, Homo sapiens
  misc_RNA (1)...(19): siRNA sense strand
gccucaagcuggccaacau

SEQ ID NO: 1973477 - RNA, 19 nt, Homo sapiens
  misc_RNA (1)...(19): siRNA sense strand
gcaagggcagcauccagau

SEQ ID NO: 1973478 - RNA, 19 nt, Homo sapiens
  misc_RNA (1)...(19): siRNA sense strand
ugucggugcuggguucuga

SEQ ID NO: 1973479 - RNA, 19 nt, Homo sapiens
  misc_RNA (1)...(19): siRNA sense strand
caagcucugcucuuacuuc

SEQ ID NO: 1973480 - RNA, 19 nt, Homo sapiens
  misc_RNA (1)...(19): siRNA sense strand
gugucuuccuggacuauga

SEQ ID NO: 1973481 - RNA, 19 nt, Homo sapiens
  misc_RNA (1)...(19): siRNA sense strand
gggcugcgagcacuacuuc

SEQ ID NO: 1973482 - RNA, 19 nt, Homo sapiens
  misc_RNA (1)...(19): siRNA sense strand
aagcucugcucuuacuuca

SEQ ID NO: 1973483 - RNA, 19 nt, Homo sapiens
  misc_RNA (1)...(19): siRNA sense strand
acugcaccauuguggcuua

SEQ ID NO: 1973484 - RNA, 19 nt, Homo sapiens
  misc_RNA (1)...(19): siRNA sense strand
ccaucugccugagcaucua

SEQ ID NO: 1973485 - RNA, 19 nt, Homo sapiens
  misc_RNA (1)...(19): siRNA sense strand
caacuucaggcccuucaag

SEQ ID NO: 1973486 - RNA, 19 nt, Homo sapiens
  misc_RNA (1)...(19): siRNA sense strand
gaccaaccucacauaugaa

SEQ ID NO: 1973487 - RNA, 19 nt, Homo sapiens
  misc_RNA (1)...(19): siRNA sense strand
caaccucacauaugaagac

SEQ ID NO: 1973488 - RNA, 19 nt, Homo sapiens
  misc_RNA (1)...(19): siRNA sense strand
gcacgauggcaaccaguac

SEQ ID NO: 1973489 - RNA, 19 nt, Homo sapiens
  misc_RNA (1)...(19): siRNA sense strand
cgacaucgagcagaaaguc

SEQ ID NO: 1973490 - RNA, 19 nt, Homo sapiens
  misc_RNA (1)...(19): siRNA sense strand
ugacauguccuggcucuac

SEQ ID NO: 1973491 - RNA, 19 nt, Homo sapiens
  misc_RNA (1)...(19): siRNA sense strand
ggagcugaaggaccaacuu

SEQ ID NO: 1973492 - RNA, 19 nt, Homo sapiens
  misc_RNA (1)...(19): siRNA sense strand
aaaccgaccggcacaccuu

SEQ ID NO: 1973493 - RNA, 19 nt, Homo sapiens
  misc_RNA (1)...(19): siRNA sense strand
caggagcggcuggcugaaa

SEQ ID NO: 1973494 - RNA, 19 nt, Homo sapiens
  misc_RNA (1)...(19): siRNA sense strand
ccaauggcaagaacguuca

SEQ ID NO: 1973495 - RNA, 19 nt, Homo sapiens
  misc_RNA (1)...(19): siRNA sense strand
cugcaggacucgccaaagc

SEQ ID NO: 1973496 - RNA, 19 nt, Homo sapiens
  misc_RNA (1)...(19): siRNA sense strand
gagaagacccucaaagaua

SEQ ID NO: 1973497 - RNA, 19 nt, Homo sapiens
  misc_RNA (1)...(19): siRNA sense strand
ggucagacgucauggagua

SEQ ID NO: 1973498 - RNA, 19 nt, Homo sapiens
  misc_RNA (1)...(19): siRNA sense strand
ggacgggaguuuaaaauua

SEQ ID NO: 1973499 - RNA, 19 nt, Homo sapiens
  misc_RNA (1)...(19): siRNA sense strand
uagaauggcucaugcaaug

SEQ ID NO: 1973500 - RNA, 19 nt, Homo sapiens
  misc_RNA (1)...(19): siRNA sense strand
acaaggagcauccaagaua

SEQ ID NO: 1973501 - RNA, 19 nt, Homo sapiens
  misc_RNA (1)...(19): siRNA sense strand
gaagacauguuuguuugug

SEQ ID NO: 1973502 - RNA, 19 nt, Homo sapiens
  misc_RNA (1)...(19): siRNA sense strand
caugaaugcuuacacaaug

SEQ ID NO: 1973503 - RNA, 19 nt, Homo sapiens
  misc_RNA (1)...(19): siRNA sense strand
ggagaagacccucaaagau

SEQ ID NO: 1973504 - RNA, 19 nt, Homo sapiens
  misc_RNA (1)...(19): siRNA sense strand
gaauacaccugaggagaag

SEQ ID NO: 1973505 - RNA, 19 nt, Homo sapiens
  misc_RNA (1)...(19): siRNA sense strand
agaagacccucaaagauag

SEQ ID NO: 1973506 - RNA, 19 nt, Homo sapiens
  misc_RNA (1)...(19): siRNA sense strand
gcaggugcagugauucaua

SEQ ID NO: 1973507 - RNA, 19 nt, Homo sapiens
  misc_RNA (1)...(19): siRNA sense strand
gcauggcgaugaaaucuac

SEQ ID NO: 1973508 - RNA, 19 nt, Homo sapiens
  misc_RNA (1)...(19): siRNA sense strand
cugaagacauguuuguuug

SEQ ID NO: 1973509 - RNA, 19 nt, Homo sapiens
  misc_RNA (1)...(19): siRNA sense strand
gaggaggaauuagcuugaa

SEQ ID NO: 1973510 - RNA, 19 nt, Homo sapiens
  misc_RNA (1)...(19): siRNA sense strand
gcgaugaaaucuacauugc

SEQ ID NO: 1973511 - RNA, 19 nt, Homo sapiens
  misc_RNA (1)...(19): siRNA sense strand
cggaggguauuauagauau

SEQ ID NO: 1973512 - RNA, 19 nt, Homo sapiens
  misc_RNA (1)...(19): siRNA sense strand
caaggagcauccaagauac

SEQ ID NO: 1973513 - RNA, 19 nt, Homo sapiens
  misc_RNA (1)...(19): siRNA sense strand
ggaggaggaauuagcuuga

SEQ ID NO: 1973514 - RNA, 19 nt, Homo sapiens
  misc_RNA (1)...(19): siRNA sense strand
gauagaauggcucaugcaa

SEQ ID NO: 1973515 - RNA, 19 nt, Homo sapiens
  misc_RNA (1)...(19): siRNA sense strand
ccagaacuuugcaaacagu

SEQ ID NO: 1973516 - RNA, 19 nt, Homo sapiens
  misc_RNA (1)...(19): siRNA sense strand
guacuggucagacgucaug

SEQ ID NO: 1973517 - RNA, 19 nt, Homo sapiens
  misc_RNA (1)...(19): siRNA sense strand
ccugaagacauguuuguuu

SEQ ID NO: 1973518 - RNA, 19 nt, Homo sapiens
  misc_RNA (1)...(19): siRNA sense strand
gauggccacacuucucuuu

SEQ ID NO: 1973519 - RNA, 19 nt, Homo sapiens
  misc_RNA (1)...(19): siRNA sense strand
agaauacaccugaggagaa

SEQ ID NO: 1973520 - RNA, 19 nt, Homo sapiens
  misc_RNA (1)...(19): siRNA sense strand
guacuuccggaggguauua

SEQ ID NO: 1973521 - RNA, 19 nt, Homo sapiens
  misc_RNA (1)...(19): siRNA sense strand
gggacuggaggaggaauua

SEQ ID NO: 1973522 - RNA, 19 nt, Homo sapiens
  misc_RNA (1)...(19): siRNA sense strand
gaagcauggcgaugaaauc

SEQ ID NO: 1973523 - RNA, 19 nt, Homo sapiens
  misc_RNA (1)...(19): siRNA sense strand
ucccagaacuuugcaaaca

SEQ ID NO: 1973524 - RNA, 19 nt, Homo sapiens
  misc_RNA (1)...(19): siRNA sense strand
ggaggguauuauagauaug

SEQ ID NO: 1973525 - RNA, 19 nt, Homo sapiens
  misc_RNA (1)...(19): siRNA sense strand
cucuaaagcugcugugaug

SEQ ID NO: 1973526 - RNA, 19 nt, Homo sapiens
  misc_RNA (1)...(19): siRNA sense strand
aggagcaggugcagugauu

SEQ ID NO: 1973527 - RNA, 19 nt, Homo sapiens
  misc_RNA (1)...(19): siRNA sense strand
guacuccucuuuucaugaa

SEQ ID NO: 1973528 - RNA, 19 nt, Homo sapiens
  misc_RNA (1)...(19): siRNA sense strand
gaucccagaacuuugcaaa

SEQ ID NO: 1973529 - RNA, 19 nt, Homo sapiens
  misc_RNA (1)...(19): siRNA sense strand
cagacgucauggaguauau

SEQ ID NO: 1973530 - RNA, 19 nt, Homo sapiens
  misc_RNA (1)...(19): siRNA sense strand
gagcaggugcagugauuca

SEQ ID NO: 1973531 - RNA, 19 nt, Homo sapiens
  misc_RNA (1)...(19): siRNA sense strand
gaggguauuauagauauga

SEQ ID NO: 1973532 - RNA, 19 nt, Homo sapiens
  misc_RNA (1)...(19): siRNA sense strand
agacauguuuguuugugau

SEQ ID NO: 1973533 - RNA, 19 nt, Homo sapiens
  misc_RNA (1)...(19): siRNA sense strand
aaagauagaauggcucaug

SEQ ID NO: 1973534 - RNA, 19 nt, Homo sapiens
  misc_RNA (1)...(19): siRNA sense strand
gaagacccucaaagauaga

SEQ ID NO: 1973535 - RNA, 19 nt, Homo sapiens
  misc_RNA (1)...(19): siRNA sense strand
uaccugaucccagaacuuu

SEQ ID NO: 1973536 - RNA, 19 nt, Homo sapiens
  misc_RNA (1)...(19): siRNA sense strand
gugaguguuaugacuauuu

SEQ ID NO: 1973537 - RNA, 19 nt, Homo sapiens
  misc_RNA (1)...(19): siRNA sense strand
gugugaguguuaugacuau

SEQ ID NO: 1973538 - RNA, 19 nt, Homo sapiens
  misc_RNA (1)...(19): siRNA sense strand
ugauucauacccacucuaa

SEQ ID NO: 1973539 - RNA, 19 nt, Homo sapiens
  misc_RNA (1)...(19): siRNA sense strand
aaaccaugugugaguguua

SEQ ID NO: 1973540 - RNA, 19 nt, Homo sapiens
  misc_RNA (1)...(19): siRNA sense strand
aggagaagacccucaaaga

SEQ ID NO: 1973541 - RNA, 19 nt, Homo sapiens
  misc_RNA (1)...(19): siRNA sense strand
ccggaggguauuauagaua

SEQ ID NO: 1973542 - RNA, 19 nt, Homo sapiens
  misc_RNA (1)...(19): siRNA sense strand
ccguaucaaugaagaaagu

SEQ ID NO: 1973543 - RNA, 19 nt, Homo sapiens
  misc_RNA (1)...(19): siRNA sense strand
uuagugguacccauuauug

SEQ ID NO: 1973544 - RNA, 19 nt, Homo sapiens
  misc_RNA (1)...(19): siRNA sense strand
gacauguuuguuugugaua

SEQ ID NO: 1973545 - RNA, 19 nt, Homo sapiens
  misc_RNA (1)...(19): siRNA sense strand
uuucaugaaugcuuacaca

SEQ ID NO: 1973546 - RNA, 19 nt, Homo sapiens
  misc_RNA (1)...(19): siRNA sense strand
aagacauguuuguuuguga

SEQ ID NO: 1973547 - RNA, 19 nt, Homo sapiens
  misc_RNA (1)...(19): siRNA sense strand
cgucauggaguauaugugu

SEQ ID NO: 1973548 - RNA, 19 nt, Homo sapiens
  misc_RNA (1)...(19): siRNA sense strand
caggugcagugauucauac

SEQ ID NO: 1973549 - RNA, 19 nt, Homo sapiens
  misc_RNA (1)...(19): siRNA sense strand
ucaugaaugcuuacacaau

SEQ ID NO: 1973550 - RNA, 19 nt, Homo sapiens
  misc_RNA (1)...(19): siRNA sense strand
cuugaagcauggcgaugaa

SEQ ID NO: 1973551 - RNA, 19 nt, Homo sapiens
  misc_RNA (1)...(19): siRNA sense strand
augaaugcuuacacaauga

SEQ ID NO: 1973552 - RNA, 19 nt, Homo sapiens
  misc_RNA (1)...(19): siRNA sense strand
caagagaugauaaaaggaa

SEQ ID NO: 1973553 - RNA, 19 nt, Homo sapiens
  misc_RNA (1)...(19): siRNA sense strand
ggcgaugaaaucuacauug

SEQ ID NO: 1973554 - RNA, 19 nt, Homo sapiens
  misc_RNA (1)...(19): siRNA sense strand
cccagacuccugugcagua

SEQ ID NO: 1973555 - RNA, 19 nt, Homo sapiens
  misc_RNA (1)...(19): siRNA sense strand
guuagugguacccauuauu

SEQ ID NO: 1973556 - RNA, 19 nt, Homo sapiens
  misc_RNA (1)...(19): siRNA sense strand
gaaaucuacauugcuccuu

SEQ ID NO: 1973557 - RNA, 19 nt, Homo sapiens
  misc_RNA (1)...(19): siRNA sense strand
agacuccugugcaguacug

SEQ ID NO: 1973558 - RNA, 19 nt, Homo sapiens
  misc_RNA (1)...(19): siRNA sense strand
aaucuacauugcuccuuca

SEQ ID NO: 1973559 - RNA, 19 nt, Homo sapiens
  misc_RNA (1)...(19): siRNA sense strand
ugaagcauggcgaugaaau

SEQ ID NO: 1973560 - RNA, 19 nt, Homo sapiens
  misc_RNA (1)...(19): siRNA sense strand
ucagacgucauggaguaua

SEQ ID NO: 1973561 - RNA, 19 nt, Homo sapiens
  misc_RNA (1)...(19): siRNA sense strand
gugguacccauuauugaga

SEQ ID NO: 1973562 - RNA, 19 nt, Homo sapiens
  misc_RNA (1)...(19): siRNA sense strand
uauguuagugguacccauu

SEQ ID NO: 1973563 - RNA, 19 nt, Homo sapiens
  misc_RNA (1)...(19): siRNA sense strand
uaaccaagaugccaaauua

SEQ ID NO: 1973564 - RNA, 19 nt, Homo sapiens
  misc_RNA (1)...(19): siRNA sense strand
gaacuucucauguaaugua

SEQ ID NO: 1973565 - RNA, 19 nt, Homo sapiens
  misc_RNA (1)...(19): siRNA sense strand
gcugugagcucugcaagua

SEQ ID NO: 1973566 - RNA, 19 nt, Homo sapiens
  misc_RNA (1)...(19): siRNA sense strand
gcaaucaccugugugguuu

SEQ ID NO: 1973567 - RNA, 19 nt, Homo sapiens
  misc_RNA (1)...(19): siRNA sense strand
uaaagucuauguucaguug

SEQ ID NO: 1973568 - RNA, 19 nt, Homo sapiens
  misc_RNA (1)...(19): siRNA sense strand
acaaacaggugcaaauuca

SEQ ID NO: 1973569 - RNA, 19 nt, Homo sapiens
  misc_RNA (1)...(19): siRNA sense strand
uguauuaccuuaaccaaga

SEQ ID NO: 1973570 - RNA, 19 nt, Homo sapiens
  misc_RNA (1)...(19): siRNA sense strand
caagauaucaaccauguau

SEQ ID NO: 1973571 - RNA, 19 nt, Homo sapiens
  misc_RNA (1)...(19): siRNA sense strand
caaagaugcugugguagug

SEQ ID NO: 1973572 - RNA, 19 nt, Homo sapiens
  misc_RNA (1)...(19): siRNA sense strand
ucaaccauguauuaccuua

SEQ ID NO: 1973573 - RNA, 19 nt, Homo sapiens
  misc_RNA (1)...(19): siRNA sense strand
cuacaaccgugugaucuuu

SEQ ID NO: 1973574 - RNA, 19 nt, Homo sapiens
  misc_RNA (1)...(19): siRNA sense strand
gcaaggcaaugacaauggu

SEQ ID NO: 1973575 - RNA, 19 nt, Homo sapiens
  misc_RNA (1)...(19): siRNA sense strand
gcagccacguuuguuguaa

SEQ ID NO: 1973576 - RNA, 19 nt, Homo sapiens
  misc_RNA (1)...(19): siRNA sense strand
cacaggaggucuugucuuc

SEQ ID NO: 1973577 - RNA, 19 nt, Homo sapiens
  misc_RNA (1)...(19): siRNA sense strand
caggacaucugcagaaucu

SEQ ID NO: 1973578 - RNA, 19 nt, Homo sapiens
  misc_RNA (1)...(19): siRNA sense strand
ggacagcggaggaaaucaa

SEQ ID NO: 1973579 - RNA, 19 nt, Homo sapiens
  misc_RNA (1)...(19): siRNA sense strand
gcaagcagcccaacaacag

SEQ ID NO: 1973580 - RNA, 19 nt, Homo sapiens
  misc_RNA (1)...(19): siRNA sense strand
cagaugaccacaagugaaa

SEQ ID NO: 1973581 - RNA, 19 nt, Homo sapiens
  misc_RNA (1)...(19): siRNA sense strand
gguuuggucuuuguaugua

SEQ ID NO: 1973582 - RNA, 19 nt, Homo sapiens
  misc_RNA (1)...(19): siRNA sense strand
ccacaaacaggugcaaauu

SEQ ID NO: 1973583 - RNA, 19 nt, Homo sapiens
  misc_RNA (1)...(19): siRNA sense strand
cauguaauguaaacacaga

SEQ ID NO: 1973584 - RNA, 19 nt, Homo sapiens
  misc_RNA (1)...(19): siRNA sense strand
gauaaagagcucagauaca

SEQ ID NO: 1973585 - RNA, 19 nt, Homo sapiens
  misc_RNA (1)...(19): siRNA sense strand
ggauaaagagcucagauac

SEQ ID NO: 1973586 - RNA, 19 nt, Homo sapiens
  misc_RNA (1)...(19): siRNA sense strand
acaaugguguccuugaaug

SEQ ID NO: 1973587 - RNA, 19 nt, Homo sapiens
  misc_RNA (1)...(19): siRNA sense strand
ggaaaucaagcaaggcaau

SEQ ID NO: 1973588 - RNA, 19 nt, Homo sapiens
  misc_RNA (1)...(19): siRNA sense strand
gaggucuugucuucaugua

SEQ ID NO: 1973589 - RNA, 19 nt, Homo sapiens
  misc_RNA (1)...(19): siRNA sense strand
aaacacagacaucaaagau

SEQ ID NO: 1973590 - RNA, 19 nt, Homo sapiens
  misc_RNA (1)...(19): siRNA sense strand
gggagaaacuacagaugac

SEQ ID NO: 1973591 - RNA, 19 nt, Homo sapiens
  misc_RNA (1)...(19): siRNA sense strand
gaugccaaauuaucuaacu

SEQ ID NO: 1973592 - RNA, 19 nt, Homo sapiens
  misc_RNA (1)...(19): siRNA sense strand
caggaggucuugucuucau

SEQ ID NO: 1973593 - RNA, 19 nt, Homo sapiens
  misc_RNA (1)...(19): siRNA sense strand
gaaaucaagcaaggcaaug

SEQ ID NO: 1973594 - RNA, 19 nt, Homo sapiens
  misc_RNA (1)...(19): siRNA sense strand
gccaaauuaucuaacuugu

SEQ ID NO: 1973595 - RNA, 19 nt, Homo sapiens
  misc_RNA (1)...(19): siRNA sense strand
uguaaacacagacaucaaa

SEQ ID NO: 1973596 - RNA, 19 nt, Homo sapiens
  misc_RNA (1)...(19): siRNA sense strand
auaaagagcucagauacac

SEQ ID NO: 1973597 - RNA, 19 nt, Homo sapiens
  misc_RNA (1)...(19): siRNA sense strand
ggaagugggagaaacuaca

SEQ ID NO: 1973598 - RNA, 19 nt, Homo sapiens
  misc_RNA (1)...(19): siRNA sense strand
gcaagauaucaaccaugua

SEQ ID NO: 1973599 - RNA, 19 nt, Homo sapiens
  misc_RNA (1)...(19): siRNA sense strand
uggauaaagagcucagaua

SEQ ID NO: 1973600 - RNA, 19 nt, Homo sapiens
  misc_RNA (1)...(19): siRNA sense strand
agcaagauaucaaccaugu

SEQ ID NO: 1973601 - RNA, 19 nt, Homo sapiens
  misc_RNA (1)...(19): siRNA sense strand
ugugagcucugcaaguaug

SEQ ID NO: 1973602 - RNA, 19 nt, Homo sapiens
  misc_RNA (1)...(19): siRNA sense strand
uaaacacagacaucaaaga

SEQ ID NO: 1973603 - RNA, 19 nt, Homo sapiens
  misc_RNA (1)...(19): siRNA sense strand
ccacguuuguuguaauuuu

SEQ ID NO: 1973604 - RNA, 19 nt, Homo sapiens
  misc_RNA (1)...(19): siRNA sense strand
caagcaaggcaaugacaau

SEQ ID NO: 1973605 - RNA, 19 nt, Homo sapiens
  misc_RNA (1)...(19): siRNA sense strand
cuacagaugaccacaagug

SEQ ID NO: 1973606 - RNA, 19 nt, Homo sapiens
  misc_RNA (1)...(19): siRNA sense strand
ucugucacauuccacguaa

SEQ ID NO: 1973607 - RNA, 19 nt, Homo sapiens
  misc_RNA (1)...(19): siRNA sense strand
gcaaauucacugccaucug

SEQ ID NO: 1973608 - RNA, 19 nt, Homo sapiens
  misc_RNA (1)...(19): siRNA sense strand
ucaaagaugcugugguagu

SEQ ID NO: 1973609 - RNA, 19 nt, Homo sapiens
  misc_RNA (1)...(19): siRNA sense strand
guacaaaauugcccagaca

SEQ ID NO: 1973610 - RNA, 19 nt, Homo sapiens
  misc_RNA (1)...(19): siRNA sense strand
aaagcaagauaucaaccau

SEQ ID NO: 1973611 - RNA, 19 nt, Homo sapiens
  misc_RNA (1)...(19): siRNA sense strand
ugggagaaacuacagauga

SEQ ID NO: 1973612 - RNA, 19 nt, Homo sapiens
  misc_RNA (1)...(19): siRNA sense strand
uaucaaccauguauuaccu

SEQ ID NO: 1973613 - RNA, 19 nt, Homo sapiens
  misc_RNA (1)...(19): siRNA sense strand
gaccagcagccacguuugu

SEQ ID NO: 1973614 - RNA, 19 nt, Homo sapiens
  misc_RNA (1)...(19): siRNA sense strand
caaccauguauuaccuuaa

SEQ ID NO: 1973615 - RNA, 19 nt, Homo sapiens
  misc_RNA (1)...(19): siRNA sense strand
uaauggagaccaagcucaa

SEQ ID NO: 1973616 - RNA, 19 nt, Homo sapiens
  misc_RNA (1)...(19): siRNA sense strand
uaaucgcaaucaccugugu

SEQ ID NO: 1973617 - RNA, 19 nt, Homo sapiens
  misc_RNA (1)...(19): siRNA sense strand
aaaauauucugcucuguca

SEQ ID NO: 1973618 - RNA, 19 nt, Homo sapiens
  misc_RNA (1)...(19): siRNA sense strand
cagccacguuuguuguaau

SEQ ID NO: 1973619 - RNA, 19 nt, Homo sapiens
  misc_RNA (1)...(19): siRNA sense strand
guaaagucuauguucaguu

SEQ ID NO: 1973620 - RNA, 19 nt, Homo sapiens
  misc_RNA (1)...(19): siRNA sense strand
aguguaaagucuauguuca

SEQ ID NO: 1973621 - RNA, 19 nt, Homo sapiens
  misc_RNA (1)...(19): siRNA sense strand
guauuaccuuaaccaagau

SEQ ID NO: 1973622 - RNA, 19 nt, Homo sapiens
  misc_RNA (1)...(19): siRNA sense strand
auucugcucugucacauuc

SEQ ID NO: 1973623 - RNA, 19 nt, Homo sapiens
  misc_RNA (1)...(19): siRNA sense strand
gugguuuggucuuuguaug

SEQ ID NO: 1973624 - RNA, 19 nt, Homo sapiens
  misc_RNA (1)...(19): siRNA sense strand
guaaacacagacaucaaag

SEQ ID NO: 1973625 - RNA, 19 nt, Homo sapiens
  misc_RNA (1)...(19): siRNA sense strand
gauaucaaccauguauuac

SEQ ID NO: 1973626 - RNA, 19 nt, Homo sapiens
  misc_RNA (1)...(19): siRNA sense strand
gaagugggagaaacuacag

SEQ ID NO: 1973627 - RNA, 19 nt, Homo sapiens
  misc_RNA (1)...(19): siRNA sense strand
cacaaacaggugcaaauuc

SEQ ID NO: 1973628 - RNA, 19 nt, Homo sapiens
  misc_RNA (1)...(19): siRNA sense strand
ccugugugguuuggucuuu

SEQ ID NO: 1973629 - RNA, 19 nt, Homo sapiens
  misc_RNA (1)...(19): siRNA sense strand
gaaaggaggaaaauauucu

SEQ ID NO: 1973630 - RNA, 19 nt, Homo sapiens
  misc_RNA (1)...(19): siRNA sense strand
cgcaaucaccugugugguu

SEQ ID NO: 1973631 - RNA, 19 nt, Homo sapiens
  misc_RNA (1)...(19): siRNA sense strand
ccaggagccagucaagguu

SEQ ID NO: 1973632 - RNA, 19 nt, Homo sapiens
  misc_RNA (1)...(19): siRNA sense strand
cagucaagguugucugucu

SEQ ID NO: 1973633 - RNA, 19 nt, Homo sapiens
  misc_RNA (1)...(19): siRNA sense strand
uguaaagucuauguucagu

SEQ ID NO: 1973634 - RNA, 19 nt, Homo sapiens
  misc_RNA (1)...(19): siRNA sense strand
ggaggucuugucuucaugu

SEQ ID NO: 1973635 - RNA, 19 nt, Homo sapiens
  misc_RNA (1)...(19): siRNA sense strand
caggcaagcagcccaacaa

SEQ ID NO: 1973636 - RNA, 19 nt, Homo sapiens
  misc_RNA (1)...(19): siRNA sense strand
aaacuacagaugaccacaa

SEQ ID NO: 1973637 - RNA, 19 nt, Homo sapiens
  misc_RNA (1)...(19): siRNA sense strand
guagugccuguaccacaaa

SEQ ID NO: 1973638 - RNA, 19 nt, Homo sapiens
  misc_RNA (1)...(19): siRNA sense strand
cagcagccacguuuguugu

SEQ ID NO: 1973639 - RNA, 19 nt, Homo sapiens
  misc_RNA (1)...(19): siRNA sense strand
agccacguuuguuguaauu

SEQ ID NO: 1973640 - RNA, 19 nt, Homo sapiens
  misc_RNA (1)...(19): siRNA sense strand
aaccauguauuaccuuaac

SEQ ID NO: 1973641 - RNA, 19 nt, Homo sapiens
  misc_RNA (1)...(19): siRNA sense strand
ccagcagccacguuuguug

SEQ ID NO: 1973642 - RNA, 19 nt, Homo sapiens
  misc_RNA (1)...(19): siRNA sense strand
acagaugaccacaagugaa

SEQ ID NO: 1973643 - RNA, 19 nt, Homo sapiens
  misc_RNA (1)...(19): siRNA sense strand
cagauacacgcugcuguga

SEQ ID NO: 1973644 - RNA, 19 nt, Homo sapiens
  misc_RNA (1)...(19): siRNA sense strand
uuaaccaagaugccaaauu

SEQ ID NO: 1973645 - RNA, 19 nt, Homo sapiens
  misc_RNA (1)...(19): siRNA sense strand
aaaucaagcaaggcaauga

SEQ ID NO: 1973646 - RNA, 19 nt, Homo sapiens
  misc_RNA (1)...(19): siRNA sense strand
ggagauacuugaagaauuu

SEQ ID NO: 1973647 - RNA, 19 nt, Homo sapiens
  misc_RNA (1)...(19): siRNA sense strand
gaagagauuuaucagcuua

SEQ ID NO: 1973648 - RNA, 19 nt, Homo sapiens
  misc_RNA (1)...(19): siRNA sense strand
ggaaggaacagcauauuua

SEQ ID NO: 1973649 - RNA, 19 nt, Homo sapiens
  misc_RNA (1)...(19): siRNA sense strand
gaagaaguuugcagaugua

SEQ ID NO: 1973650 - RNA, 19 nt, Homo sapiens
  misc_RNA (1)...(19): siRNA sense strand
gaaguuugcagauguauuu

SEQ ID NO: 1973651 - RNA, 19 nt, Homo sapiens
  misc_RNA (1)...(19): siRNA sense strand
gaaggaacagcauauuuaa

SEQ ID NO: 1973652 - RNA, 19 nt, Homo sapiens
  misc_RNA (1)...(19): siRNA sense strand
ggccagaaaugaagaagaa

SEQ ID NO: 1973653 - RNA, 19 nt, Homo sapiens
  misc_RNA (1)...(19): siRNA sense strand
gguaaaagcuagucucuaa

SEQ ID NO: 1973654 - RNA, 19 nt, Homo sapiens
  misc_RNA (1)...(19): siRNA sense strand
gcagauguauuugcaaaga

SEQ ID NO: 1973655 - RNA, 19 nt, Homo sapiens
  misc_RNA (1)...(19): siRNA sense strand
gccacgauaucaacuauuu

SEQ ID NO: 1973656 - RNA, 19 nt, Homo sapiens
  misc_RNA (1)...(19): siRNA sense strand
gaucaaaggacuuggacua

SEQ ID NO: 1973657 - RNA, 19 nt, Homo sapiens
  misc_RNA (1)...(19): siRNA sense strand
ggaaagcuucugccgguua

SEQ ID NO: 1973658 - RNA, 19 nt, Homo sapiens
  misc_RNA (1)...(19): siRNA sense strand
ggaacagcauauuuaaguu

SEQ ID NO: 1973659 - RNA, 19 nt, Homo sapiens
  misc_RNA (1)...(19): siRNA sense strand
caaaggacuuggacuaaag

SEQ ID NO: 1973660 - RNA, 19 nt, Homo sapiens
  misc_RNA (1)...(19): siRNA sense strand
ggucauugaugcaaauaug

SEQ ID NO: 1973661 - RNA, 19 nt, Homo sapiens
  misc_RNA (1)...(19): siRNA sense strand
gaacuucccaaucagauga

SEQ ID NO: 1973662 - RNA, 19 nt, Homo sapiens
  misc_RNA (1)...(19): siRNA sense strand
gcagaguggugucaaaucu

SEQ ID NO: 1973663 - RNA, 19 nt, Homo sapiens
  misc_RNA (1)...(19): siRNA sense strand
ugacuccgguucugacuuu

SEQ ID NO: 1973664 - RNA, 19 nt, Homo sapiens
  misc_RNA (1)...(19): siRNA sense strand
ucaaaggacuuggacuaaa

SEQ ID NO: 1973665 - RNA, 19 nt, Homo sapiens
  misc_RNA (1)...(19): siRNA sense strand
gaaaugaagaagaaguuug

SEQ ID NO: 1973666 - RNA, 19 nt, Homo sapiens
  misc_RNA (1)...(19): siRNA sense strand
agaagaaguuugcagaugu

SEQ ID NO: 1973667 - RNA, 19 nt, Homo sapiens
  misc_RNA (1)...(19): siRNA sense strand
gaaagcuucugccgguuag

SEQ ID NO: 1973668 - RNA, 19 nt, Homo sapiens
  misc_RNA (1)...(19): siRNA sense strand
agaguggugucaaaucuuu

SEQ ID NO: 1973669 - RNA, 19 nt, Homo sapiens
  misc_RNA (1)...(19): siRNA sense strand
gcaaauaugguggaaggaa

SEQ ID NO: 1973670 - RNA, 19 nt, Homo sapiens
  misc_RNA (1)...(19): siRNA sense strand
agaacacacugaggagaua

SEQ ID NO: 1973671 - RNA, 19 nt, Homo sapiens
  misc_RNA (1)...(19): siRNA sense strand
uuuaucagcuuaacucaga

SEQ ID NO: 1973672 - RNA, 19 nt, Homo sapiens
  misc_RNA (1)...(19): siRNA sense strand
ugucagguguucucucaaa

SEQ ID NO: 1973673 - RNA, 19 nt, Homo sapiens
  misc_RNA (1)...(19): siRNA sense strand
gaagaagaaguuugcagau

SEQ ID NO: 1973674 - RNA, 19 nt, Homo sapiens
  misc_RNA (1)...(19): siRNA sense strand
gcaccuuucuauacgacuu

SEQ ID NO: 1973675 - RNA, 19 nt, Homo sapiens
  misc_RNA (1)...(19): siRNA sense strand
uggcagaaguggugagaau

SEQ ID NO: 1973676 - RNA, 19 nt, Homo sapiens
  misc_RNA (1)...(19): siRNA sense strand
cagcuuaacucagauaaaa

SEQ ID NO: 1973677 - RNA, 19 nt, Homo sapiens
  misc_RNA (1)...(19): siRNA sense strand
ucuacgagcugcugaucaa

SEQ ID NO: 1973678 - RNA, 19 nt, Homo sapiens
  misc_RNA (1)...(19): siRNA sense strand
aagaagaaguuugcagaug

SEQ ID NO: 1973679 - RNA, 19 nt, Homo sapiens
  misc_RNA (1)...(19): siRNA sense strand
uaucaacuauuuggcuuug

SEQ ID NO: 1973680 - RNA, 19 nt, Homo sapiens
  misc_RNA (1)...(19): siRNA sense strand
gaugauuggccagaaauga

SEQ ID NO: 1973681 - RNA, 19 nt, Homo sapiens
  misc_RNA (1)...(19): siRNA sense strand
ccgguuagcuggccacgau

SEQ ID NO: 1973682 - RNA, 19 nt, Homo sapiens
  misc_RNA (1)...(19): siRNA sense strand
uugaggagguuguucauca

SEQ ID NO: 1973683 - RNA, 19 nt, Homo sapiens
  misc_RNA (1)...(19): siRNA sense strand
cagauguauuugcaaagaa

SEQ ID NO: 1973684 - RNA, 19 nt, Homo sapiens
  misc_RNA (1)...(19): siRNA sense strand
gaguggauuuggccaguuc

SEQ ID NO: 1973685 - RNA, 19 nt, Homo sapiens
  misc_RNA (1)...(19): siRNA sense strand
gagaacacacugaggagau

SEQ ID NO: 1973686 - RNA, 19 nt, Homo sapiens
  misc_RNA (1)...(19): siRNA sense strand
gaggagauacuugaagaau

SEQ ID NO: 1973687 - RNA, 19 nt, Homo sapiens
  misc_RNA (1)...(19): siRNA sense strand
cugaggagauacuugaaga

SEQ ID NO: 1973688 - RNA, 19 nt, Homo sapiens
  misc_RNA (1)...(19): siRNA sense strand
aggagauacuugaagaauu

SEQ ID NO: 1973689 - RNA, 19 nt, Homo sapiens
  misc_RNA (1)...(19): siRNA sense strand
ggagcaccuuucuauacga

SEQ ID NO: 1973690 - RNA, 19 nt, Homo sapiens
  misc_RNA (1)...(19): siRNA sense strand
ggauucagccgagaagaga

SEQ ID NO: 1973691 - RNA, 19 nt, Homo sapiens
  misc_RNA (1)...(19): siRNA sense strand
acacugaggagauacuuga

SEQ ID NO: 1973692 - RNA, 19 nt, Homo sapiens
  misc_RNA (1)...(19): siRNA sense strand
cagaaaugaagaagaaguu

SEQ ID NO: 1973693 - RNA, 19 nt, Homo sapiens
  misc_RNA (1)...(19): siRNA sense strand
gaaucucguggcugacuuu

SEQ ID NO: 1973694 - RNA, 19 nt, Homo sapiens
  misc_RNA (1)...(19): siRNA sense strand
gaugaacuucccaaucaga

SEQ ID NO: 1973695 - RNA, 19 nt, Homo sapiens
  misc_RNA (1)...(19): siRNA sense strand
gaggacagaacauguugga

SEQ ID NO: 1973696 - RNA, 19 nt, Homo sapiens
  misc_RNA (1)...(19): siRNA sense strand
agaagagauuuaucagcuu

SEQ ID NO: 1973697 - RNA, 19 nt, Homo sapiens
  misc_RNA (1)...(19): siRNA sense strand
uggaaggaacagcauauuu

SEQ ID NO: 1973698 - RNA, 19 nt, Homo sapiens
  misc_RNA (1)...(19): siRNA sense strand
agccaucccuucuuccaaa

SEQ ID NO: 1973699 - RNA, 19 nt, Homo sapiens
  misc_RNA (1)...(19): siRNA sense strand
ucaggucauugaugcaaau

SEQ ID NO: 1973700 - RNA, 19 nt, Homo sapiens
  misc_RNA (1)...(19): siRNA sense strand
acaagggucaggucauuga

SEQ ID NO: 1973701 - RNA, 19 nt, Homo sapiens
  misc_RNA (1)...(19): siRNA sense strand
gccgagaagagauuuauca

SEQ ID NO: 1973702 - RNA, 19 nt, Homo sapiens
  misc_RNA (1)...(19): siRNA sense strand
cauggcuguuggagcaaua

SEQ ID NO: 1973703 - RNA, 19 nt, Homo sapiens
  misc_RNA (1)...(19): siRNA sense strand
ucaacuauuuggcuuuguc

SEQ ID NO: 1973704 - RNA, 19 nt, Homo sapiens
  misc_RNA (1)...(19): siRNA sense strand
aauccaaggcuuauuuaug

SEQ ID NO: 1973705 - RNA, 19 nt, Homo sapiens
  misc_RNA (1)...(19): siRNA sense strand
aggaacagcauauuuaagu

SEQ ID NO: 1973706 - RNA, 19 nt, Homo sapiens
  misc_RNA (1)...(19): siRNA sense strand
gagauucugcagcgggaaa

SEQ ID NO: 1973707 - RNA, 19 nt, Homo sapiens
  misc_RNA (1)...(19): siRNA sense strand
guggagcaccuuucuauac

SEQ ID NO: 1973708 - RNA, 19 nt, Homo sapiens
  misc_RNA (1)...(19): siRNA sense strand
gguggaaggaacagcauau

SEQ ID NO: 1973709 - RNA, 19 nt, Homo sapiens
  misc_RNA (1)...(19): siRNA sense strand
ggaauucauggcuguugga

SEQ ID NO: 1973710 - RNA, 19 nt, Homo sapiens
  misc_RNA (1)...(19): siRNA sense strand
gcaccucgaggacagaaca

SEQ ID NO: 1973711 - RNA, 19 nt, Homo sapiens
  misc_RNA (1)...(19): siRNA sense strand
auccaaggcuuauuuaugc

SEQ ID NO: 1973712 - RNA, 19 nt, Homo sapiens
  misc_RNA (1)...(19): siRNA sense strand
gauuuggccaguucaggaa

SEQ ID NO: 1973713 - RNA, 19 nt, Homo sapiens
  misc_RNA (1)...(19): siRNA sense strand
ugaggagguuguucaucau

SEQ ID NO: 1973714 - RNA, 19 nt, Homo sapiens
  misc_RNA (1)...(19): siRNA sense strand
uggccacgauaucaacuau

SEQ ID NO: 1973715 - RNA, 19 nt, Homo sapiens
  misc_RNA (1)...(19): siRNA sense strand
agauguauuugcaaagaag

SEQ ID NO: 1973716 - RNA, 19 nt, Homo sapiens
  misc_RNA (1)...(19): siRNA sense strand
gaggagguuguucaucaug

SEQ ID NO: 1973717 - RNA, 19 nt, Homo sapiens
  misc_RNA (1)...(19): siRNA sense strand
ggucaggucauugaugcaa

SEQ ID NO: 1973718 - RNA, 19 nt, Homo sapiens
  misc_RNA (1)...(19): siRNA sense strand
ccagaaaugaagaagaagu

SEQ ID NO: 1973719 - RNA, 19 nt, Homo sapiens
  misc_RNA (1)...(19): siRNA sense strand
gucaggucauugaugcaaa

SEQ ID NO: 1973720 - RNA, 19 nt, Homo sapiens
  misc_RNA (1)...(19): siRNA sense strand
gaaggcagaguggugucaa

SEQ ID NO: 1973721 - RNA, 19 nt, Homo sapiens
  misc_RNA (1)...(19): siRNA sense strand
gauacuugaagaauuugga

SEQ ID NO: 1973722 - RNA, 19 nt, Homo sapiens
  misc_RNA (1)...(19): siRNA sense strand
uuugucagguguucucuca

SEQ ID NO: 1973723 - RNA, 19 nt, Homo sapiens
  misc_RNA (1)...(19): siRNA sense strand
ucucguggcugacuuugcu

SEQ ID NO: 1973724 - RNA, 19 nt, Homo sapiens
  misc_RNA (1)...(19): siRNA sense strand
aaggcagaguggugucaaa

SEQ ID NO: 1973725 - RNA, 19 nt, Homo sapiens
  misc_RNA (1)...(19): siRNA sense strand
gcagaaguggugagaaucc

SEQ ID NO: 1973726 - RNA, 19 nt, Homo sapiens
  misc_RNA (1)...(19): siRNA sense strand
ugugugcacugggcauuau

SEQ ID NO: 1973727 - RNA, 19 nt, Homo sapiens
  misc_RNA (1)...(19): siRNA sense strand
caacuauuuggcuuuguca

SEQ ID NO: 1973728 - RNA, 19 nt, Homo sapiens
  misc_RNA (1)...(19): siRNA sense strand
gacaagggucaggucauug

SEQ ID NO: 1973729 - RNA, 19 nt, Homo sapiens
  misc_RNA (1)...(19): siRNA sense strand
ggaugauuggccagaaaug

SEQ ID NO: 1973730 - RNA, 19 nt, Homo sapiens
  misc_RNA (1)...(19): siRNA sense strand
ugaaucucguggcugacuu

SEQ ID NO: 1973731 - RNA, 19 nt, Homo sapiens
  misc_RNA (1)...(19): siRNA sense strand
uaaguucuuuucuguggaa

SEQ ID NO: 1973732 - RNA, 19 nt, Homo sapiens
  misc_RNA (1)...(19): siRNA sense strand
caacauauaggcaacauuu

SEQ ID NO: 1973733 - RNA, 19 nt, Homo sapiens
  misc_RNA (1)...(19): siRNA sense strand
gauccgagaauuuaacuua

SEQ ID NO: 1973734 - RNA, 19 nt, Homo sapiens
  misc_RNA (1)...(19): siRNA sense strand
ggccacagauugacaagaa

SEQ ID NO: 1973735 - RNA, 19 nt, Homo sapiens
  misc_RNA (1)...(19): siRNA sense strand
uaauugcucucguguauuc

SEQ ID NO: 1973736 - RNA, 19 nt, Homo sapiens
  misc_RNA (1)...(19): siRNA sense strand
ucacuuggauuguggaguu

SEQ ID NO: 1973737 - RNA, 19 nt, Homo sapiens
  misc_RNA (1)...(19): siRNA sense strand
uaaaguggccaacacaauu

SEQ ID NO: 1973738 - RNA, 19 nt, Homo sapiens
  misc_RNA (1)...(19): siRNA sense strand
gaaugugauccgagaauuu

SEQ ID NO: 1973739 - RNA, 19 nt, Homo sapiens
  misc_RNA (1)...(19): siRNA sense strand
ggucuuggcaccucuaauu

SEQ ID NO: 1973740 - RNA, 19 nt, Homo sapiens
  misc_RNA (1)...(19): siRNA sense strand
ucuaauugcucucguguau

SEQ ID NO: 1973741 - RNA, 19 nt, Homo sapiens
  misc_RNA (1)...(19): siRNA sense strand
gcugaccucucccuuaaau

SEQ ID NO: 1973742 - RNA, 19 nt, Homo sapiens
  misc_RNA (1)...(19): siRNA sense strand
gaaaggacgggcugucuca

SEQ ID NO: 1973743 - RNA, 19 nt, Homo sapiens
  misc_RNA (1)...(19): siRNA sense strand
gcucucugcugccuuccua

SEQ ID NO: 1973744 - RNA, 19 nt, Homo sapiens
  misc_RNA (1)...(19): siRNA sense strand
gcaacucccuacccugauc

SEQ ID NO: 1973745 - RNA, 19 nt, Homo sapiens
  misc_RNA (1)...(19): siRNA sense strand
ccauugugaugaugaagaa

SEQ ID NO: 1973746 - RNA, 19 nt, Homo sapiens
  misc_RNA (1)...(19): siRNA sense strand
gaacuagaacgggacaaga

SEQ ID NO: 1973747 - RNA, 19 nt, Homo sapiens
  misc_RNA (1)...(19): siRNA sense strand
uuacaucacacucugcaua

SEQ ID NO: 1973748 - RNA, 19 nt, Homo sapiens
  misc_RNA (1)...(19): siRNA sense strand
ggagagaaguggagauccu

SEQ ID NO: 1973749 - RNA, 19 nt, Homo sapiens
  misc_RNA (1)...(19): siRNA sense strand
aaugugauccgagaauuua

SEQ ID NO: 1973750 - RNA, 19 nt, Homo sapiens
  misc_RNA (1)...(19): siRNA sense strand
gcccugaguauaucaagua

SEQ ID NO: 1973751 - RNA, 19 nt, Homo sapiens
  misc_RNA (1)...(19): siRNA sense strand
guaaaguggccaacacaau

SEQ ID NO: 1973752 - RNA, 19 nt, Homo sapiens
  misc_RNA (1)...(19): siRNA sense strand
ggaguucuuugccaauugg

SEQ ID NO: 1973753 - RNA, 19 nt, Homo sapiens
  misc_RNA (1)...(19): siRNA sense strand
guuggacgcuauacugaug

SEQ ID NO: 1973754 - RNA, 19 nt, Homo sapiens
  misc_RNA (1)...(19): siRNA sense strand
caaccuuacuaccuucugu

SEQ ID NO: 1973755 - RNA, 19 nt, Homo sapiens
  misc_RNA (1)...(19): siRNA sense strand
guacaaagugagcacauca

SEQ ID NO: 1973756 - RNA, 19 nt, Homo sapiens
  misc_RNA (1)...(19): siRNA sense strand
gcaugggccuacuuuacau

SEQ ID NO: 1973757 - RNA, 19 nt, Homo sapiens
  misc_RNA (1)...(19): siRNA sense strand
augcugaccucucccuuaa

SEQ ID NO: 1973758 - RNA, 19 nt, Homo sapiens
  misc_RNA (1)...(19): siRNA sense strand
guacagggcuaaauuuugg

SEQ ID NO: 1973759 - RNA, 19 nt, Homo sapiens
  misc_RNA (1)...(19): siRNA sense strand
gaaguggagauccugaugu

SEQ ID NO: 1973760 - RNA, 19 nt, Homo sapiens
  misc_RNA (1)...(19): siRNA sense strand
gagaaugugauccgagaau

SEQ ID NO: 1973761 - RNA, 19 nt, Homo sapiens
  misc_RNA (1)...(19): siRNA sense strand
gagggucacuuggauugug

SEQ ID NO: 1973762 - RNA, 19 nt, Homo sapiens
  misc_RNA (1)...(19): siRNA sense strand
caaaggcuggagacaauau

SEQ ID NO: 1973763 - RNA, 19 nt, Homo sapiens
  misc_RNA (1)...(19): siRNA sense strand
agaaugugauccgagaauu

SEQ ID NO: 1973764 - RNA, 19 nt, Homo sapiens
  misc_RNA (1)...(19): siRNA sense strand
guggagauccugauguuuc

SEQ ID NO: 1973765 - RNA, 19 nt, Homo sapiens
  misc_RNA (1)...(19): siRNA sense strand
ucucauggaccuucucuga

SEQ ID NO: 1973766 - RNA, 19 nt, Homo sapiens
  misc_RNA (1)...(19): siRNA sense strand
aaguggagauccugauguu

SEQ ID NO: 1973767 - RNA, 19 nt, Homo sapiens
  misc_RNA (1)...(19): siRNA sense strand
gauguuggacgcuauacug

SEQ ID NO: 1973768 - RNA, 19 nt, Homo sapiens
  misc_RNA (1)...(19): siRNA sense strand
guggaguucuuugccaauu

SEQ ID NO: 1973769 - RNA, 19 nt, Homo sapiens
  misc_RNA (1)...(19): siRNA sense strand
gggccuacuuuacaucaca

SEQ ID NO: 1973770 - RNA, 19 nt, Homo sapiens
  misc_RNA (1)...(19): siRNA sense strand
gccaagaaacuaucaaagg

SEQ ID NO: 1973771 - RNA, 19 nt, Homo sapiens
  misc_RNA (1)...(19): siRNA sense strand
gguaacccgugugacuuug

SEQ ID NO: 1973772 - RNA, 19 nt, Homo sapiens
  misc_RNA (1)...(19): siRNA sense strand
gggccaagaaacuaucaaa

SEQ ID NO: 1973773 - RNA, 19 nt, Homo sapiens
  misc_RNA (1)...(19): siRNA sense strand
gccacagauugacaagaaa

SEQ ID NO: 1973774 - RNA, 19 nt, Homo sapiens
  misc_RNA (1)...(19): siRNA sense strand
gacuuugacuggagagaag

SEQ ID NO: 1973775 - RNA, 19 nt, Homo sapiens
  misc_RNA (1)...(19): siRNA sense strand
ucagugccauugugaugau

SEQ ID NO: 1973776 - RNA, 19 nt, Homo sapiens
  misc_RNA (1)...(19): siRNA sense strand
gggaaaacaagaaggauaa

SEQ ID NO: 1973777 - RNA, 19 nt, Homo sapiens
  misc_RNA (1)...(19): siRNA sense strand
ugcauaguguuccugauga

SEQ ID NO: 1973778 - RNA, 19 nt, Homo sapiens
  misc_RNA (1)...(19): siRNA sense strand
gguacaaagugagcacauc

SEQ ID NO: 1973779 - RNA, 19 nt, Homo sapiens
  misc_RNA (1)...(19): siRNA sense strand
gccaauuggucuaaugacu

SEQ ID NO: 1973780 - RNA, 19 nt, Homo sapiens
  misc_RNA (1)...(19): siRNA sense strand
uaugcugaccucucccuua

SEQ ID NO: 1973781 - RNA, 19 nt, Homo sapiens
  misc_RNA (1)...(19): siRNA sense strand
aucaaaggcuggagacaau

SEQ ID NO: 1973782 - RNA, 19 nt, Homo sapiens
  misc_RNA (1)...(19): siRNA sense strand
aaccauugaugaggaacua

SEQ ID NO: 1973783 - RNA, 19 nt, Homo sapiens
  misc_RNA (1)...(19): siRNA sense strand
uaucaaaggcuggagacaa

SEQ ID NO: 1973784 - RNA, 19 nt, Homo sapiens
  misc_RNA (1)...(19): siRNA sense strand
ugaccucucccuuaaauac

SEQ ID NO: 1973785 - RNA, 19 nt, Homo sapiens
  misc_RNA (1)...(19): siRNA sense strand
cgcccaaccuuacuaccuu

SEQ ID NO: 1973786 - RNA, 19 nt, Homo sapiens
  misc_RNA (1)...(19): siRNA sense strand
gcacaucaccccucaccaa

SEQ ID NO: 1973787 - RNA, 19 nt, Homo sapiens
  misc_RNA (1)...(19): siRNA sense strand
gguggauguuggacgcuau

SEQ ID NO: 1973788 - RNA, 19 nt, Homo sapiens
  misc_RNA (1)...(19): siRNA sense strand
ucaaaggcuggagacaaua

SEQ ID NO: 1973789 - RNA, 19 nt, Homo sapiens
  misc_RNA (1)...(19): siRNA sense strand
uaaaaccauugaugaggaa

SEQ ID NO: 1973790 - RNA, 19 nt, Homo sapiens
  misc_RNA (1)...(19): siRNA sense strand
caacuguacagggcuaaau

SEQ ID NO: 1973791 - RNA, 19 nt, Homo sapiens
  misc_RNA (1)...(19): siRNA sense strand
uggaguucuuugccaauug

SEQ ID NO: 1973792 - RNA, 19 nt, Homo sapiens
  misc_RNA (1)...(19): siRNA sense strand
aaaguggccaacacaauuc

SEQ ID NO: 1973793 - RNA, 19 nt, Homo sapiens
  misc_RNA (1)...(19): siRNA sense strand
ggacgcuauacugauguua

SEQ ID NO: 1973794 - RNA, 19 nt, Homo sapiens
  misc_RNA (1)...(19): siRNA sense strand
ggaacuagaacgggacaag

SEQ ID NO: 1973795 - RNA, 19 nt, Homo sapiens
  misc_RNA (1)...(19): siRNA sense strand
gcauaguguuccugaugac

SEQ ID NO: 1973796 - RNA, 19 nt, Homo sapiens
  misc_RNA (1)...(19): siRNA sense strand
ucacuguggagcaacauau

SEQ ID NO: 1973797 - RNA, 19 nt, Homo sapiens
  misc_RNA (1)...(19): siRNA sense strand
gauggcucgcccaaccuua

SEQ ID NO: 1973798 - RNA, 19 nt, Homo sapiens
  misc_RNA (1)...(19): siRNA sense strand
gcaacauauaggcaacauu

SEQ ID NO: 1973799 - RNA, 19 nt, Homo sapiens
  misc_RNA (1)...(19): siRNA sense strand
gugccauugugaugaugaa

SEQ ID NO: 1973800 - RNA, 19 nt, Homo sapiens
  misc_RNA (1)...(19): siRNA sense strand
ggagaaugugauccgagaa

SEQ ID NO: 1973801 - RNA, 19 nt, Homo sapiens
  misc_RNA (1)...(19): siRNA sense strand
aagagggucacuuggauug

SEQ ID NO: 1973802 - RNA, 19 nt, Homo sapiens
  misc_RNA (1)...(19): siRNA sense strand
uauauaugggcccugagua

SEQ ID NO: 1973803 - RNA, 19 nt, Homo sapiens
  misc_RNA (1)...(19): siRNA sense strand
guggccaacacaauucuuu

SEQ ID NO: 1973804 - RNA, 19 nt, Homo sapiens
  misc_RNA (1)...(19): siRNA sense strand
aagaaccgcagauccauca

SEQ ID NO: 1973805 - RNA, 19 nt, Homo sapiens
  misc_RNA (1)...(19): siRNA sense strand
cgguaacccgugugacuuu

SEQ ID NO: 1973806 - RNA, 19 nt, Homo sapiens
  misc_RNA (1)...(19): siRNA sense strand
ucccuacccugauccuguu

SEQ ID NO: 1973807 - RNA, 19 nt, Homo sapiens
  misc_RNA (1)...(19): siRNA sense strand
gagaaguggagauccugau

SEQ ID NO: 1973808 - RNA, 19 nt, Homo sapiens
  misc_RNA (1)...(19): siRNA sense strand
ccacagauugacaagaaag

SEQ ID NO: 1973809 - RNA, 19 nt, Homo sapiens
  misc_RNA (1)...(19): siRNA sense strand
guaacccgugugacuuuga

SEQ ID NO: 1973810 - RNA, 19 nt, Homo sapiens
  misc_RNA (1)...(19): siRNA sense strand
ggggaaaacaagaaggaua

SEQ ID NO: 1973811 - RNA, 19 nt, Homo sapiens
  misc_RNA (1)...(19): siRNA sense strand
ggacgggcugucucaugga

SEQ ID NO: 1973812 - RNA, 19 nt, Homo sapiens
  misc_RNA (1)...(19): siRNA sense strand
uggagauccugauguuucu

SEQ ID NO: 1973813 - RNA, 19 nt, Homo sapiens
  misc_RNA (1)...(19): siRNA sense strand
uaugggcccugaguauauc

SEQ ID NO: 1973814 - RNA, 19 nt, Homo sapiens
  misc_RNA (1)...(19): siRNA sense strand
guugggagcuugugcauaa

SEQ ID NO: 1973815 - RNA, 19 nt, Homo sapiens
  misc_RNA (1)...(19): siRNA sense strand
gaggaggaguccauucaaa

SEQ ID NO: 1973816 - RNA, 19 nt, Homo sapiens
  misc_RNA (1)...(19): siRNA sense strand
cugcacaucugacggacua

SEQ ID NO: 1973817 - RNA, 19 nt, Homo sapiens
  misc_RNA (1)...(19): siRNA sense strand
ucacugggcuggcaagaac

SEQ ID NO: 1973818 - RNA, 19 nt, Homo sapiens
  misc_RNA (1)...(19): siRNA sense strand
aaaugacccugcucuaucu

SEQ ID NO: 1973819 - RNA, 19 nt, Homo sapiens
  misc_RNA (1)...(19): siRNA sense strand
cagaugugcugaggcugua

SEQ ID NO: 1973820 - RNA, 19 nt, Homo sapiens
  misc_RNA (1)...(19): siRNA sense strand
gggagcuugugcauaaaug

SEQ ID NO: 1973821 - RNA, 19 nt, Homo sapiens
  misc_RNA (1)...(19): siRNA sense strand
gggaggaggaguccauuca

SEQ ID NO: 1973822 - RNA, 19 nt, Homo sapiens
  misc_RNA (1)...(19): siRNA sense strand
gggacagccugagaagaga

SEQ ID NO: 1973823 - RNA, 19 nt, Homo sapiens
  misc_RNA (1)...(19): siRNA sense strand
ggaggaggaguccauucaa

SEQ ID NO: 1973824 - RNA, 19 nt, Homo sapiens
  misc_RNA (1)...(19): siRNA sense strand
cuaccaaccuuuuccaaga

SEQ ID NO: 1973825 - RNA, 19 nt, Homo sapiens
  misc_RNA (1)...(19): siRNA sense strand
gugcugaggcuguagaaag

SEQ ID NO: 1973826 - RNA, 19 nt, Homo sapiens
  misc_RNA (1)...(19): siRNA sense strand
gagaggggcugcacaucug

SEQ ID NO: 1973827 - RNA, 19 nt, Homo sapiens
  misc_RNA (1)...(19): siRNA sense strand
aaaccgagaaacaaagugu

SEQ ID NO: 1973828 - RNA, 19 nt, Homo sapiens
  misc_RNA (1)...(19): siRNA sense strand
ggccucacccugugcaaau

SEQ ID NO: 1973829 - RNA, 19 nt, Homo sapiens
  misc_RNA (1)...(19): siRNA sense strand
auucaaaccgagaaacaaa

SEQ ID NO: 1973830 - RNA, 19 nt, Homo sapiens
  misc_RNA (1)...(19): siRNA sense strand
ucaaaccgagaaacaaagu

SEQ ID NO: 1973831 - RNA, 19 nt, Homo sapiens
  misc_RNA (1)...(19): siRNA sense strand
ccauucaaaccgagaaaca

SEQ ID NO: 1973832 - RNA, 19 nt, Homo sapiens
  misc_RNA (1)...(19): siRNA sense strand
ggaaagacaccucgaggaa

SEQ ID NO: 1973833 - RNA, 19 nt, Homo sapiens
  misc_RNA (1)...(19): siRNA sense strand
ggaggaagaagaagaagaa

SEQ ID NO: 1973834 - RNA, 19 nt, Homo sapiens
  misc_RNA (1)...(19): siRNA sense strand
gaaagaagaagagcaggaa

SEQ ID NO: 1973835 - RNA, 19 nt, Homo sapiens
  misc_RNA (1)...(19): siRNA sense strand
gggcgcaccaggcuuauua

SEQ ID NO: 1973836 - RNA, 19 nt, Homo sapiens
  misc_RNA (1)...(19): siRNA sense strand
ggaagaagaagaagaagag

SEQ ID NO: 1973837 - RNA, 19 nt, Homo sapiens
  misc_RNA (1)...(19): siRNA sense strand
ggaaaucguaaccaaagaa

SEQ ID NO: 1973838 - RNA, 19 nt, Homo sapiens
  misc_RNA (1)...(19): siRNA sense strand
gacaagaggaggaagaaga

SEQ ID NO: 1973839 - RNA, 19 nt, Homo sapiens
  misc_RNA (1)...(19): siRNA sense strand
uagaggaaaucguaaccaa

SEQ ID NO: 1973840 - RNA, 19 nt, Homo sapiens
  misc_RNA (1)...(19): siRNA sense strand
gaaaagagaaagaagaaga

SEQ ID NO: 1973841 - RNA, 19 nt, Homo sapiens
  misc_RNA (1)...(19): siRNA sense strand
gaggaaaucguaaccaaag

SEQ ID NO: 1973842 - RNA, 19 nt, Homo sapiens
  misc_RNA (1)...(19): siRNA sense strand
aaagacaccucgaggaacu

SEQ ID NO: 1973843 - RNA, 19 nt, Homo sapiens
  misc_RNA (1)...(19): siRNA sense strand
ggaaguacaaggacaagag

SEQ ID NO: 1973844 - RNA, 19 nt, Homo sapiens
  misc_RNA (1)...(19): siRNA sense strand
agaagaagaagaagaggaa

SEQ ID NO: 1973845 - RNA, 19 nt, Homo sapiens
  misc_RNA (1)...(19): siRNA sense strand
aagaagagcaggaaagaca

SEQ ID NO: 1973846 - RNA, 19 nt, Homo sapiens
  misc_RNA (1)...(19): siRNA sense strand
agaagaagggcaaggagaa

SEQ ID NO: 1973847 - RNA, 19 nt, Homo sapiens
  misc_RNA (1)...(19): siRNA sense strand
acaagaggaggaagaagaa

SEQ ID NO: 1973848 - RNA, 19 nt, Homo sapiens
  misc_RNA (1)...(19): siRNA sense strand
agaagaagaagaggaagaa

SEQ ID NO: 1973849 - RNA, 19 nt, Homo sapiens
  misc_RNA (1)...(19): siRNA sense strand
gaagaagggcaaggagaag

SEQ ID NO: 1973850 - RNA, 19 nt, Homo sapiens
  misc_RNA (1)...(19): siRNA sense strand
agaagaagagcaggaaaga

SEQ ID NO: 1973851 - RNA, 19 nt, Homo sapiens
  misc_RNA (1)...(19): siRNA sense strand
gaaaucguaaccaaagaac

SEQ ID NO: 1973852 - RNA, 19 nt, Homo sapiens
  misc_RNA (1)...(19): siRNA sense strand
ucuucuagcuccucuucuu

SEQ ID NO: 1973853 - RNA, 19 nt, Homo sapiens
  misc_RNA (1)...(19): siRNA sense strand
ugaagaagaagggcaagga

SEQ ID NO: 1973854 - RNA, 19 nt, Homo sapiens
  misc_RNA (1)...(19): siRNA sense strand
agaggaggaagaagaagaa

SEQ ID NO: 1973855 - RNA, 19 nt, Homo sapiens
  misc_RNA (1)...(19): siRNA sense strand
agaggaaaucguaaccaaa

SEQ ID NO: 1973856 - RNA, 19 nt, Homo sapiens
  misc_RNA (1)...(19): siRNA sense strand
aggaaaucguaaccaaaga

SEQ ID NO: 1973857 - RNA, 19 nt, Homo sapiens
  misc_RNA (1)...(19): siRNA sense strand
aaagaagaagagcaggaaa

SEQ ID NO: 1973858 - RNA, 19 nt, Homo sapiens
  misc_RNA (1)...(19): siRNA sense strand
gagauggcgagguccuaga

SEQ ID NO: 1973859 - RNA, 19 nt, Homo sapiens
  misc_RNA (1)...(19): siRNA sense strand
aagaagaagaagaggaaga

SEQ ID NO: 1973860 - RNA, 19 nt, Homo sapiens
  misc_RNA (1)...(19): siRNA sense strand
ggaaagacaccucgaggaa

SEQ ID NO: 1973861 - RNA, 19 nt, Homo sapiens
  misc_RNA (1)...(19): siRNA sense strand
ggaggaagaagaagaagaa

SEQ ID NO: 1973862 - RNA, 19 nt, Homo sapiens
  misc_RNA (1)...(19): siRNA sense strand
gaaagaagaagagcaggaa

SEQ ID NO: 1973863 - RNA, 19 nt, Homo sapiens
  misc_RNA (1)...(19): siRNA sense strand
gggcgcaccaggcuuauua

SEQ ID NO: 1973864 - RNA, 19 nt, Homo sapiens
  misc_RNA (1)...(19): siRNA sense strand
ggaagaagaagaagaagag

SEQ ID NO: 1973865 - RNA, 19 nt, Homo sapiens
  misc_RNA (1)...(19): siRNA sense strand
gacaagaggaggaagaaga

SEQ ID NO: 1973866 - RNA, 19 nt, Homo sapiens
  misc_RNA (1)...(19): siRNA sense strand
gaaaagagaaagaagaaga

SEQ ID NO: 1973867 - RNA, 19 nt, Homo sapiens
  misc_RNA (1)...(19): siRNA sense strand
aaagacaccucgaggaacu

SEQ ID NO: 1973868 - RNA, 19 nt, Homo sapiens
  misc_RNA (1)...(19): siRNA sense strand
ggaaguacaaggacaagag

SEQ ID NO: 1973869 - RNA, 19 nt, Homo sapiens
  misc_RNA (1)...(19): siRNA sense strand
agaagaagaagaagaggaa

SEQ ID NO: 1973870 - RNA, 19 nt, Homo sapiens
  misc_RNA (1)...(19): siRNA sense strand
aagaagagcaggaaagaca

SEQ ID NO: 1973871 - RNA, 19 nt, Homo sapiens
  misc_RNA (1)...(19): siRNA sense strand
agaagaagggcaaggagaa

SEQ ID NO: 1973872 - RNA, 19 nt, Homo sapiens
  misc_RNA (1)...(19): siRNA sense strand
acaagaggaggaagaagaa

SEQ ID NO: 1973873 - RNA, 19 nt, Homo sapiens
  misc_RNA (1)...(19): siRNA sense strand
agaagaagaagaggaagaa

SEQ ID NO: 1973874 - RNA, 19 nt, Homo sapiens
  misc_RNA (1)...(19): siRNA sense strand
gaagaagggcaaggagaag

SEQ ID NO: 1973875 - RNA, 19 nt, Homo sapiens
  misc_RNA (1)...(19): siRNA sense strand
agaagaagagcaggaaaga

SEQ ID NO: 1973876 - RNA, 19 nt, Homo sapiens
  misc_RNA (1)...(19): siRNA sense strand
ucuucuagcuccucuucuu

SEQ ID NO: 1973877 - RNA, 19 nt, Homo sapiens
  misc_RNA (1)...(19): siRNA sense strand
ugaagaagaagggcaagga

SEQ ID NO: 1973878 - RNA, 19 nt, Homo sapiens
  misc_RNA (1)...(19): siRNA sense strand
agaggaggaagaagaagaa

SEQ ID NO: 1973879 - RNA, 19 nt, Homo sapiens
  misc_RNA (1)...(19): siRNA sense strand
aaagaagaagagcaggaaa

SEQ ID NO: 1973880 - RNA, 19 nt, Homo sapiens
  misc_RNA (1)...(19): siRNA sense strand
aagaagaagaagaggaaga

SEQ ID NO: 1973881 - RNA, 19 nt, Homo sapiens
  misc_RNA (1)...(19): siRNA sense strand
ugacagagguuaaggauga

SEQ ID NO: 1973882 - RNA, 19 nt, Homo sapiens
  misc_RNA (1)...(19): siRNA sense strand
gcuauuaccuaucaaauug

SEQ ID NO: 1973883 - RNA, 19 nt, Homo sapiens
  misc_RNA (1)...(19): siRNA sense strand
agaaagaacugauuccaaa

SEQ ID NO: 1973884 - RNA, 19 nt, Homo sapiens
  misc_RNA (1)...(19): siRNA sense strand
uagaaaggcuuguuaccua

SEQ ID NO: 1973885 - RNA, 19 nt, Homo sapiens
  misc_RNA (1)...(19): siRNA sense strand
aaagagagcuauuaccuau

SEQ ID NO: 1973886 - RNA, 19 nt, Homo sapiens
  misc_RNA (1)...(19): siRNA sense strand
ggaugaugcuguaaagaaa

SEQ ID NO: 1973887 - RNA, 19 nt, Homo sapiens
  misc_RNA (1)...(19): siRNA sense strand
guaaagaagagcaacguua

SEQ ID NO: 1973888 - RNA, 19 nt, Homo sapiens
  misc_RNA (1)...(19): siRNA sense strand
gcuaagggcuggaaugaag

SEQ ID NO: 1973889 - RNA, 19 nt, Homo sapiens
  misc_RNA (1)...(19): siRNA sense strand
gaagcuguccucagaaauu

SEQ ID NO: 1973890 - RNA, 19 nt, Homo sapiens
  misc_RNA (1)...(19): siRNA sense strand
ggauuuggcuaaaguuuca

SEQ ID NO: 1973891 - RNA, 19 nt, Homo sapiens
  misc_RNA (1)...(19): siRNA sense strand
gaaauuugaucaacaagcu

SEQ ID NO: 1973892 - RNA, 19 nt, Homo sapiens
  misc_RNA (1)...(19): siRNA sense strand
gaagagcaacguuauagug

SEQ ID NO: 1973893 - RNA, 19 nt, Homo sapiens
  misc_RNA (1)...(19): siRNA sense strand
cgacgaagauggagggaau

SEQ ID NO: 1973894 - RNA, 19 nt, Homo sapiens
  misc_RNA (1)...(19): siRNA sense strand
ggaaucaccagaacucuug

SEQ ID NO: 1973895 - RNA, 19 nt, Homo sapiens
  misc_RNA (1)...(19): siRNA sense strand
cagaagcuguccucagaaa

SEQ ID NO: 1973896 - RNA, 19 nt, Homo sapiens
  misc_RNA (1)...(19): siRNA sense strand
uagaagaccugaaagucaa

SEQ ID NO: 1973897 - RNA, 19 nt, Homo sapiens
  misc_RNA (1)...(19): siRNA sense strand
gaaauucgucaucuguuga

SEQ ID NO: 1973898 - RNA, 19 nt, Homo sapiens
  misc_RNA (1)...(19): siRNA sense strand
ggagcuccgugcaaaguga

SEQ ID NO: 1973899 - RNA, 19 nt, Homo sapiens
  misc_RNA (1)...(19): siRNA sense strand
caaagagagcuauuaccua

SEQ ID NO: 1973900 - RNA, 19 nt, Homo sapiens
  misc_RNA (1)...(19): siRNA sense strand
ccaccaagcccaaaccaaa

SEQ ID NO: 1973901 - RNA, 19 nt, Homo sapiens
  misc_RNA (1)...(19): siRNA sense strand
gcugauagaagaccugaaa

SEQ ID NO: 1973902 - RNA, 19 nt, Homo sapiens
  misc_RNA (1)...(19): siRNA sense strand
uaaagaagagcaacguuau

SEQ ID NO: 1973903 - RNA, 19 nt, Homo sapiens
  misc_RNA (1)...(19): siRNA sense strand
agagagcuauuaccuauca

SEQ ID NO: 1973904 - RNA, 19 nt, Homo sapiens
  misc_RNA (1)...(19): siRNA sense strand
ggcaaaagcuaaagagaaa

SEQ ID NO: 1973905 - RNA, 19 nt, Homo sapiens
  misc_RNA (1)...(19): siRNA sense strand
ggugggagcuccgugcaaa

SEQ ID NO: 1973906 - RNA, 19 nt, Homo sapiens
  misc_RNA (1)...(19): siRNA sense strand
ugaaggauuuggcuaaagu

SEQ ID NO: 1973907 - RNA, 19 nt, Homo sapiens
  misc_RNA (1)...(19): siRNA sense strand
agaaauucgucaucuguug

SEQ ID NO: 1973908 - RNA, 19 nt, Homo sapiens
  misc_RNA (1)...(19): siRNA sense strand
aggaugagcuggagccauu

SEQ ID NO: 1973909 - RNA, 19 nt, Homo sapiens
  misc_RNA (1)...(19): siRNA sense strand
aaaggaagccaauacuuga

SEQ ID NO: 1973910 - RNA, 19 nt, Homo sapiens
  misc_RNA (1)...(19): siRNA sense strand
aagcaaaacugaaguacua

SEQ ID NO: 1973911 - RNA, 19 nt, Homo sapiens
  misc_RNA (1)...(19): siRNA sense strand
guaaagaaagaacugauuc

SEQ ID NO: 1973912 - RNA, 19 nt, Homo sapiens
  misc_RNA (1)...(19): siRNA sense strand
gcugcugccugugcuguua

SEQ ID NO: 1973913 - RNA, 19 nt, Homo sapiens
  misc_RNA (1)...(19): siRNA sense strand
ggaggagaaugccgaugau

SEQ ID NO: 1973914 - RNA, 19 nt, Homo sapiens
  misc_RNA (1)...(19): siRNA sense strand
gaaauagaagacaggcaaa

SEQ ID NO: 1973915 - RNA, 19 nt, Homo sapiens
  misc_RNA (1)...(19): siRNA sense strand
ggagaaugccgaugaugau

SEQ ID NO: 1973916 - RNA, 19 nt, Homo sapiens
  misc_RNA (1)...(19): siRNA sense strand
cuuguuaccuaccgaaauu

SEQ ID NO: 1973917 - RNA, 19 nt, Homo sapiens
  misc_RNA (1)...(19): siRNA sense strand
gcaaagagagcuauuaccu

SEQ ID NO: 1973918 - RNA, 19 nt, Homo sapiens
  misc_RNA (1)...(19): siRNA sense strand
uaaggaugaugcuguaaag

SEQ ID NO: 1973919 - RNA, 19 nt, Homo sapiens
  misc_RNA (1)...(19): siRNA sense strand
cgaaaggaaucaccagaac

SEQ ID NO: 1973920 - RNA, 19 nt, Homo sapiens
  misc_RNA (1)...(19): siRNA sense strand
aaagaagagcaacguuaua

SEQ ID NO: 1973921 - RNA, 19 nt, Homo sapiens
  misc_RNA (1)...(19): siRNA sense strand
agagagaaguucagaagag

SEQ ID NO: 1973922 - RNA, 19 nt, Homo sapiens
  misc_RNA (1)...(19): siRNA sense strand
ggaggaggcacagaucauu

SEQ ID NO: 1973923 - RNA, 19 nt, Homo sapiens
  misc_RNA (1)...(19): siRNA sense strand
gaaugccgaugaugauggu

SEQ ID NO: 1973924 - RNA, 19 nt, Homo sapiens
  misc_RNA (1)...(19): siRNA sense strand
uacaaccucuacuugaauu

SEQ ID NO: 1973925 - RNA, 19 nt, Homo sapiens
  misc_RNA (1)...(19): siRNA sense strand
gauagaagaccugaaaguc

SEQ ID NO: 1973926 - RNA, 19 nt, Homo sapiens
  misc_RNA (1)...(19): siRNA sense strand
gcgaaaggaaucaccagaa

SEQ ID NO: 1973927 - RNA, 19 nt, Homo sapiens
  misc_RNA (1)...(19): siRNA sense strand
guacaaccucuacuugaau

SEQ ID NO: 1973928 - RNA, 19 nt, Homo sapiens
  misc_RNA (1)...(19): siRNA sense strand
aagagaagcugaaaauguu

SEQ ID NO: 1973929 - RNA, 19 nt, Homo sapiens
  misc_RNA (1)...(19): siRNA sense strand
ggacaccagcuacuaccaa

SEQ ID NO: 1973930 - RNA, 19 nt, Homo sapiens
  misc_RNA (1)...(19): siRNA sense strand
aaauagcacugaagaacag

SEQ ID NO: 1973931 - RNA, 19 nt, Homo sapiens
  misc_RNA (1)...(19): siRNA sense strand
uggagaugauuuaggauug

SEQ ID NO: 1973932 - RNA, 19 nt, Homo sapiens
  misc_RNA (1)...(19): siRNA sense strand
ggaccaaguacaaccucua

SEQ ID NO: 1973933 - RNA, 19 nt, Homo sapiens
  misc_RNA (1)...(19): siRNA sense strand
gaagacaggcaaaagcuaa

SEQ ID NO: 1973934 - RNA, 19 nt, Homo sapiens
  misc_RNA (1)...(19): siRNA sense strand
aauuauugcucgaacauca

SEQ ID NO: 1973935 - RNA, 19 nt, Homo sapiens
  misc_RNA (1)...(19): siRNA sense strand
uguugacacuuaaggauga

SEQ ID NO: 1973936 - RNA, 19 nt, Homo sapiens
  misc_RNA (1)...(19): siRNA sense strand
gaucgcaaucccagaguga

SEQ ID NO: 1973937 - RNA, 19 nt, Homo sapiens
  misc_RNA (1)...(19): siRNA sense strand
aaccaaagucuguuucaaa

SEQ ID NO: 1973938 - RNA, 19 nt, Homo sapiens
  misc_RNA (1)...(19): siRNA sense strand
ugagcuggagccauuguua

SEQ ID NO: 1973939 - RNA, 19 nt, Homo sapiens
  misc_RNA (1)...(19): siRNA sense strand
gaaguucagaagagccaaa

SEQ ID NO: 1973940 - RNA, 19 nt, Homo sapiens
  misc_RNA (1)...(19): siRNA sense strand
gcaagaggaugauuuuggu

SEQ ID NO: 1973941 - RNA, 19 nt, Homo sapiens
  misc_RNA (1)...(19): siRNA sense strand
gcaacguuauaguggugaa

SEQ ID NO: 1973942 - RNA, 19 nt, Homo sapiens
  misc_RNA (1)...(19): siRNA sense strand
ucgugaaguucguaaagaa

SEQ ID NO: 1973943 - RNA, 19 nt, Homo sapiens
  misc_RNA (1)...(19): siRNA sense strand
ggacgaugaggacgacgaa

SEQ ID NO: 1973944 - RNA, 19 nt, Homo sapiens
  misc_RNA (1)...(19): siRNA sense strand
uauuugauccugaaagcua

SEQ ID NO: 1973945 - RNA, 19 nt, Homo sapiens
  misc_RNA (1)...(19): siRNA sense strand
cccuagauauggacgauga

SEQ ID NO: 1973946 - RNA, 19 nt, Homo sapiens
  misc_RNA (1)...(19): siRNA sense strand
cgugaaggauuuggcuaaa

SEQ ID NO: 1973947 - RNA, 19 nt, Homo sapiens
  misc_RNA (1)...(19): siRNA sense strand
cagaggaggaggaaagaga

SEQ ID NO: 1973948 - RNA, 19 nt, Homo sapiens
  misc_RNA (1)...(19): siRNA sense strand
gagcuauuaccuaucaaau

SEQ ID NO: 1973949 - RNA, 19 nt, Homo sapiens
  misc_RNA (1)...(19): siRNA sense strand
aucagaagcuguccucaga

SEQ ID NO: 1973950 - RNA, 19 nt, Homo sapiens
  misc_RNA (1)...(19): siRNA sense strand
gaaaaggaagccaauacuu

SEQ ID NO: 1973951 - RNA, 19 nt, Homo sapiens
  misc_RNA (1)...(19): siRNA sense strand
gaaaggaaucaccagaacu

SEQ ID NO: 1973952 - RNA, 19 nt, Homo sapiens
  misc_RNA (1)...(19): siRNA sense strand
gaaggauuuggcuaaaguu

SEQ ID NO: 1973953 - RNA, 19 nt, Homo sapiens
  misc_RNA (1)...(19): siRNA sense strand
ggagaugauuuaggauugc

SEQ ID NO: 1973954 - RNA, 19 nt, Homo sapiens
  misc_RNA (1)...(19): siRNA sense strand
acguuauaguggugaauua

SEQ ID NO: 1973955 - RNA, 19 nt, Homo sapiens
  misc_RNA (1)...(19): siRNA sense strand
gaaaauagcacugaagaac

SEQ ID NO: 1973956 - RNA, 19 nt, Homo sapiens
  misc_RNA (1)...(19): siRNA sense strand
acuuaaggaugaugcugua

SEQ ID NO: 1973957 - RNA, 19 nt, Homo sapiens
  misc_RNA (1)...(19): siRNA sense strand
gucauagaaaggcuuguua

SEQ ID NO: 1973958 - RNA, 19 nt, Homo sapiens
  misc_RNA (1)...(19): siRNA sense strand
ggguugaggccuuugcaaa

SEQ ID NO: 1973959 - RNA, 19 nt, Homo sapiens
  misc_RNA (1)...(19): siRNA sense strand
cuaaagagaaagaaagaag

SEQ ID NO: 1973960 - RNA, 19 nt, Homo sapiens
  misc_RNA (1)...(19): siRNA sense strand
ccucagaaauucgucaucu

SEQ ID NO: 1973961 - RNA, 19 nt, Homo sapiens
  misc_RNA (1)...(19): siRNA sense strand
gggcuggaaugaaguacag

SEQ ID NO: 1973962 - RNA, 19 nt, Homo sapiens
  misc_RNA (1)...(19): siRNA sense strand
gccaauacuugaggaccaa

SEQ ID NO: 1973963 - RNA, 19 nt, Homo sapiens
  misc_RNA (1)...(19): siRNA sense strand
uaagggcuggaaugaagua

SEQ ID NO: 1973964 - RNA, 19 nt, Homo sapiens
  misc_RNA (1)...(19): siRNA sense strand
ugaaacacagagagaaguu

SEQ ID NO: 1973965 - RNA, 19 nt, Homo sapiens
  misc_RNA (1)...(19): siRNA sense strand
gagagucccagcacaugga

SEQ ID NO: 1973966 - RNA, 19 nt, Homo sapiens
  misc_RNA (1)...(19): siRNA sense strand
caaccucuacuugaauuau

SEQ ID NO: 1973967 - RNA, 19 nt, Homo sapiens
  misc_RNA (1)...(19): siRNA sense strand
uaccgaaauuugaucaaca

SEQ ID NO: 1973968 - RNA, 19 nt, Homo sapiens
  misc_RNA (1)...(19): siRNA sense strand
cagaagagccaaaauuaga

SEQ ID NO: 1973969 - RNA, 19 nt, Homo sapiens
  misc_RNA (1)...(19): siRNA sense strand
aagaucagguagaugacuu

SEQ ID NO: 1973970 - RNA, 19 nt, Homo sapiens
  misc_RNA (1)...(19): siRNA sense strand
gaacugauuccaaaagcaa

SEQ ID NO: 1973971 - RNA, 19 nt, Homo sapiens
  misc_RNA (1)...(19): siRNA sense strand
uagcuaagggcuggaauga

SEQ ID NO: 1973972 - RNA, 19 nt, Homo sapiens
  misc_RNA (1)...(19): siRNA sense strand
accaaagucuguuucaaag

SEQ ID NO: 1973973 - RNA, 19 nt, Homo sapiens
  misc_RNA (1)...(19): siRNA sense strand
gaaacacagagagaaguuc

SEQ ID NO: 1973974 - RNA, 19 nt, Homo sapiens
  misc_RNA (1)...(19): siRNA sense strand
gcaaaacugaaguacuaua

SEQ ID NO: 1973975 - RNA, 19 nt, Homo sapiens
  misc_RNA (1)...(19): siRNA sense strand
gaaagaacugauuccaaaa

SEQ ID NO: 1973976 - RNA, 19 nt, Homo sapiens
  misc_RNA (1)...(19): siRNA sense strand
gugaaguucguaaagaaga

SEQ ID NO: 1973977 - RNA, 19 nt, Homo sapiens
  misc_RNA (1)...(19): siRNA sense strand
uagaagaagaggccagguu

SEQ ID NO: 1973978 - RNA, 19 nt, Homo sapiens
  misc_RNA (1)...(19): siRNA sense strand
aaacacagagagaaguuca

SEQ ID NO: 1973979 - RNA, 19 nt, Homo sapiens
  misc_RNA (1)...(19): siRNA sense strand
ccuaggagaaagaagauug

SEQ ID NO: 1973980 - RNA, 19 nt, Homo sapiens
  misc_RNA (1)...(19): siRNA sense strand
ccaaagucuguuucaaaga

SEQ ID NO: 1973981 - RNA, 19 nt, Homo sapiens
  misc_RNA (1)...(19): siRNA sense strand
ccaaagagcuggaugaugu

SEQ ID NO: 1973982 - RNA, 19 nt, Homo sapiens
  misc_RNA (1)...(19): siRNA sense strand
gagaagaucuaccacaaga

SEQ ID NO: 1973983 - RNA, 19 nt, Homo sapiens
  misc_RNA (1)...(19): siRNA sense strand
caagcauccugaacaauua

SEQ ID NO: 1973984 - RNA, 19 nt, Homo sapiens
  misc_RNA (1)...(19): siRNA sense strand
caacuucucugccaagguu

SEQ ID NO: 1973985 - RNA, 19 nt, Homo sapiens
  misc_RNA (1)...(19): siRNA sense strand
acaauuaccugaucuggaa

SEQ ID NO: 1973986 - RNA, 19 nt, Homo sapiens
  misc_RNA (1)...(19): siRNA sense strand
gcagcaacaugguggagua

SEQ ID NO: 1973987 - RNA, 19 nt, Homo sapiens
  misc_RNA (1)...(19): siRNA sense strand
acacagcgcuucuaccuau

SEQ ID NO: 1973988 - RNA, 19 nt, Homo sapiens
  misc_RNA (1)...(19): siRNA sense strand
uguaugggauggauuauuu

SEQ ID NO: 1973989 - RNA, 19 nt, Homo sapiens
  misc_RNA (1)...(19): siRNA sense strand
aaacagaacugccaaugag

SEQ ID NO: 1973990 - RNA, 19 nt, Homo sapiens
  misc_RNA (1)...(19): siRNA sense strand
ccuacuaccuuccaacuaa

SEQ ID NO: 1973991 - RNA, 19 nt, Homo sapiens
  misc_RNA (1)...(19): siRNA sense strand
guacgaaauuucugaagau

SEQ ID NO: 1973992 - RNA, 19 nt, Homo sapiens
  misc_RNA (1)...(19): siRNA sense strand
gaaccaagcauccugaaca

SEQ ID NO: 1973993 - RNA, 19 nt, Homo sapiens
  misc_RNA (1)...(19): siRNA sense strand
gguacgaaauuucugaaga

SEQ ID NO: 1973994 - RNA, 19 nt, Homo sapiens
  misc_RNA (1)...(19): siRNA sense strand
gcgcgaguaugacaaagaa

SEQ ID NO: 1973995 - RNA, 19 nt, Homo sapiens
  misc_RNA (1)...(19): siRNA sense strand
gcacuaagaaguccugugu

SEQ ID NO: 1973996 - RNA, 19 nt, Homo sapiens
  misc_RNA (1)...(19): siRNA sense strand
cgaaauuucugaagauucu

SEQ ID NO: 1973997 - RNA, 19 nt, Homo sapiens
  misc_RNA (1)...(19): siRNA sense strand
gcaacaugguggaguacaa

SEQ ID NO: 1973998 - RNA, 19 nt, Homo sapiens
  misc_RNA (1)...(19): siRNA sense strand
ccaagcauccugaacaauu

SEQ ID NO: 1973999 - RNA, 19 nt, Homo sapiens
  misc_RNA (1)...(19): siRNA sense strand
gggagaacauugcugacaa

SEQ ID NO: 1974000 - RNA, 19 nt, Homo sapiens
  misc_RNA (1)...(19): siRNA sense strand
ggaugacgcccuuggcuuu

SEQ ID NO: 1974001 - RNA, 19 nt, Homo sapiens
  misc_RNA (1)...(19): siRNA sense strand
gaggaacaguacaaucaau

SEQ ID NO: 1974002 - RNA, 19 nt, Homo sapiens
  misc_RNA (1)...(19): siRNA sense strand
gcagugaagcugagcagaa

SEQ ID NO: 1974003 - RNA, 19 nt, Homo sapiens
  misc_RNA (1)...(19): siRNA sense strand
gaacugccaaugagaaagu

SEQ ID NO: 1974004 - RNA, 19 nt, Homo sapiens
  misc_RNA (1)...(19): siRNA sense strand
uaaacagaacugccaauga

SEQ ID NO: 1974005 - RNA, 19 nt, Homo sapiens
  misc_RNA (1)...(19): siRNA sense strand
cgagaccaguggagcauga

SEQ ID NO: 1974006 - RNA, 19 nt, Homo sapiens
  misc_RNA (1)...(19): siRNA sense strand
ggcuugaguuccugucuuu

SEQ ID NO: 1974007 - RNA, 19 nt, Homo sapiens
  misc_RNA (1)...(19): siRNA sense strand
ggagaacauugcugacaac

SEQ ID NO: 1974008 - RNA, 19 nt, Homo sapiens
  misc_RNA (1)...(19): siRNA sense strand
ggauuacuacuuaaacaga

SEQ ID NO: 1974009 - RNA, 19 nt, Homo sapiens
  misc_RNA (1)...(19): siRNA sense strand
ugccaucuaugauaugauu

SEQ ID NO: 1974010 - RNA, 19 nt, Homo sapiens
  misc_RNA (1)...(19): siRNA sense strand
agauacagcuggccaacau

SEQ ID NO: 1974011 - RNA, 19 nt, Homo sapiens
  misc_RNA (1)...(19): siRNA sense strand
ggacaagacagcuguuagg

SEQ ID NO: 1974012 - RNA, 19 nt, Homo sapiens
  misc_RNA (1)...(19): siRNA sense strand
ggaggaacaguacaaucaa

SEQ ID NO: 1974013 - RNA, 19 nt, Homo sapiens
  misc_RNA (1)...(19): siRNA sense strand
agagcuggaugauguuuau

SEQ ID NO: 1974014 - RNA, 19 nt, Homo sapiens
  misc_RNA (1)...(19): siRNA sense strand
ccacagcaccugccuuaca

SEQ ID NO: 1974015 - RNA, 19 nt, Homo sapiens
  misc_RNA (1)...(19): siRNA sense strand
uacaaagcauggcugagaa

SEQ ID NO: 1974016 - RNA, 19 nt, Homo sapiens
  misc_RNA (1)...(19): siRNA sense strand
gacagugaaugccuacuac

SEQ ID NO: 1974017 - RNA, 19 nt, Homo sapiens
  misc_RNA (1)...(19): siRNA sense strand
caacaugguggaguacaaa

SEQ ID NO: 1974018 - RNA, 19 nt, Homo sapiens
  misc_RNA (1)...(19): siRNA sense strand
aggagaagaucuaccacaa

SEQ ID NO: 1974019 - RNA, 19 nt, Homo sapiens
  misc_RNA (1)...(19): siRNA sense strand
gcauucgaguggcuggaaa

SEQ ID NO: 1974020 - RNA, 19 nt, Homo sapiens
  misc_RNA (1)...(19): siRNA sense strand
ggaccaggacaacuuuaug

SEQ ID NO: 1974021 - RNA, 19 nt, Homo sapiens
  misc_RNA (1)...(19): siRNA sense strand
cggcaaagcaaagaaauug

SEQ ID NO: 1974022 - RNA, 19 nt, Homo sapiens
  misc_RNA (1)...(19): siRNA sense strand
cuaccuaucuugccuacag

SEQ ID NO: 1974023 - RNA, 19 nt, Homo sapiens
  misc_RNA (1)...(19): siRNA sense strand
aagcauggcugagaaagca

SEQ ID NO: 1974024 - RNA, 19 nt, Homo sapiens
  misc_RNA (1)...(19): siRNA sense strand
uaugacggguacgaaauuu

SEQ ID NO: 1974025 - RNA, 19 nt, Homo sapiens
  misc_RNA (1)...(19): siRNA sense strand
ucacugccuaucuggauua

SEQ ID NO: 1974026 - RNA, 19 nt, Homo sapiens
  misc_RNA (1)...(19): siRNA sense strand
ugggacagcugguuuggau

SEQ ID NO: 1974027 - RNA, 19 nt, Homo sapiens
  misc_RNA (1)...(19): siRNA sense strand
uuacaaagcauggcugaga

SEQ ID NO: 1974028 - RNA, 19 nt, Homo sapiens
  misc_RNA (1)...(19): siRNA sense strand
ugacgcaugccuuugauga

SEQ ID NO: 1974029 - RNA, 19 nt, Homo sapiens
  misc_RNA (1)...(19): siRNA sense strand
caacuaagaaugagaucgu

SEQ ID NO: 1974030 - RNA, 19 nt, Homo sapiens
  misc_RNA (1)...(19): siRNA sense strand
auuggugguuggaacauua

SEQ ID NO: 1974031 - RNA, 19 nt, Homo sapiens
  misc_RNA (1)...(19): siRNA sense strand
gauuggugguuggaacauu

SEQ ID NO: 1974032 - RNA, 19 nt, Homo sapiens
  misc_RNA (1)...(19): siRNA sense strand
gagcccagccacugagaga

SEQ ID NO: 1974033 - RNA, 19 nt, Homo sapiens
  misc_RNA (1)...(19): siRNA sense strand
ugccuacaaugcuuacaaa

SEQ ID NO: 1974034 - RNA, 19 nt, Homo sapiens
  misc_RNA (1)...(19): siRNA sense strand
ggaacaguacaaucaauac

SEQ ID NO: 1974035 - RNA, 19 nt, Homo sapiens
  misc_RNA (1)...(19): siRNA sense strand
gcauggaggaacaguacaa

SEQ ID NO: 1974036 - RNA, 19 nt, Homo sapiens
  misc_RNA (1)...(19): siRNA sense strand
ggaccgacgcuuugagucu

SEQ ID NO: 1974037 - RNA, 19 nt, Homo sapiens
  misc_RNA (1)...(19): siRNA sense strand
ccugaacaauuaccugauc

SEQ ID NO: 1974038 - RNA, 19 nt, Homo sapiens
  misc_RNA (1)...(19): siRNA sense strand
aaccaagcauccugaacaa

SEQ ID NO: 1974039 - RNA, 19 nt, Homo sapiens
  misc_RNA (1)...(19): siRNA sense strand
gcgacgaggagaagaucua

SEQ ID NO: 1974040 - RNA, 19 nt, Homo sapiens
  misc_RNA (1)...(19): siRNA sense strand
cagaacugccaaugagaaa

SEQ ID NO: 1974041 - RNA, 19 nt, Homo sapiens
  misc_RNA (1)...(19): siRNA sense strand
agacagugaaugccuacua

SEQ ID NO: 1974042 - RNA, 19 nt, Homo sapiens
  misc_RNA (1)...(19): siRNA sense strand
gcccuuggcuuugcuuugg

SEQ ID NO: 1974043 - RNA, 19 nt, Homo sapiens
  misc_RNA (1)...(19): siRNA sense strand
ggagaagaucuaccacaag

SEQ ID NO: 1974044 - RNA, 19 nt, Homo sapiens
  misc_RNA (1)...(19): siRNA sense strand
ucccacagcaccugccuua

SEQ ID NO: 1974045 - RNA, 19 nt, Homo sapiens
  misc_RNA (1)...(19): siRNA sense strand
ugaguugacgcaugccuuu

SEQ ID NO: 1974046 - RNA, 19 nt, Homo sapiens
  misc_RNA (1)...(19): siRNA sense strand
uggaggaacaguacaauca

SEQ ID NO: 1974047 - RNA, 19 nt, Homo sapiens
  misc_RNA (1)...(19): siRNA sense strand
cagugaagcugagcagaag

SEQ ID NO: 1974048 - RNA, 19 nt, Homo sapiens
  misc_RNA (1)...(19): siRNA sense strand
aggaacaguacaaucaaua

SEQ ID NO: 1974049 - RNA, 19 nt, Homo sapiens
  misc_RNA (1)...(19): siRNA sense strand
cgggauuacuacuuaaaca

SEQ ID NO: 1974050 - RNA, 19 nt, Homo sapiens
  misc_RNA (1)...(19): siRNA sense strand
cugccuaucuggauuacau

SEQ ID NO: 1974051 - RNA, 19 nt, Homo sapiens
  misc_RNA (1)...(19): siRNA sense strand
cuuagcaggugccucucua

SEQ ID NO: 1974052 - RNA, 19 nt, Homo sapiens
  misc_RNA (1)...(19): siRNA sense strand
caaagagcuggaugauguu

SEQ ID NO: 1974053 - RNA, 19 nt, Homo sapiens
  misc_RNA (1)...(19): siRNA sense strand
gaccggcaaagcaaagaaa

SEQ ID NO: 1974054 - RNA, 19 nt, Homo sapiens
  misc_RNA (1)...(19): siRNA sense strand
gaccaggacaacuuuaugg

SEQ ID NO: 1974055 - RNA, 19 nt, Homo sapiens
  misc_RNA (1)...(19): siRNA sense strand
gaauuuguacaacuucucu

SEQ ID NO: 1974056 - RNA, 19 nt, Homo sapiens
  misc_RNA (1)...(19): siRNA sense strand
gagacccucuauggcacua

SEQ ID NO: 1974057 - RNA, 19 nt, Homo sapiens
  misc_RNA (1)...(19): siRNA sense strand
uuucugcccucucgggauu

SEQ ID NO: 1974058 - RNA, 19 nt, Homo sapiens
  misc_RNA (1)...(19): siRNA sense strand
gcaugccuuugaugaccaa

SEQ ID NO: 1974059 - RNA, 19 nt, Homo sapiens
  misc_RNA (1)...(19): siRNA sense strand
uggcaucgguguggucaug

SEQ ID NO: 1974060 - RNA, 19 nt, Homo sapiens
  misc_RNA (1)...(19): siRNA sense strand
ggaggugggauuccagaag

SEQ ID NO: 1974061 - RNA, 19 nt, Homo sapiens
  misc_RNA (1)...(19): siRNA sense strand
uaccacaagaugagcauuu

SEQ ID NO: 1974062 - RNA, 19 nt, Homo sapiens
  misc_RNA (1)...(19): siRNA sense strand
acagaacugccaaugagaa

SEQ ID NO: 1974063 - RNA, 19 nt, Homo sapiens
  misc_RNA (1)...(19): siRNA sense strand
aagcugagcagaagacaca

SEQ ID NO: 1974064 - RNA, 19 nt, Homo sapiens
  misc_RNA (1)...(19): siRNA sense strand
gcgaaauccggaccgcauu

SEQ ID NO: 1974065 - RNA, 19 nt, Homo sapiens
  misc_RNA (1)...(19): siRNA sense strand
gcuuugagucugcacaaga

SEQ ID NO: 1974066 - RNA, 19 nt, Homo sapiens
  misc_RNA (1)...(19): siRNA sense strand
gcucacugccuaucuggau

SEQ ID NO: 1974067 - RNA, 19 nt, Homo sapiens
  misc_RNA (1)...(19): siRNA sense strand
gggaccaggacaacuuuau

SEQ ID NO: 1974068 - RNA, 19 nt, Homo sapiens
  misc_RNA (1)...(19): siRNA sense strand
ccaggcagccaaggagaaa

SEQ ID NO: 1974069 - RNA, 19 nt, Homo sapiens
  misc_RNA (1)...(19): siRNA sense strand
ugguuuggauggaugagaa

SEQ ID NO: 1974070 - RNA, 19 nt, Homo sapiens
  misc_RNA (1)...(19): siRNA sense strand
cucucgggauuacuacuua

SEQ ID NO: 1974071 - RNA, 19 nt, Homo sapiens
  misc_RNA (1)...(19): siRNA sense strand
gaacccagggcagcugugu

SEQ ID NO: 1974072 - RNA, 19 nt, Homo sapiens
  misc_RNA (1)...(19): siRNA sense strand
acaaagcauggcugagaaa

SEQ ID NO: 1974073 - RNA, 19 nt, Homo sapiens
  misc_RNA (1)...(19): siRNA sense strand
uggauuacauggaggaacu

SEQ ID NO: 1974074 - RNA, 19 nt, Homo sapiens
  misc_RNA (1)...(19): siRNA sense strand
ucucgggauuacuacuuaa

SEQ ID NO: 1974075 - RNA, 19 nt, Homo sapiens
  misc_RNA (1)...(19): siRNA sense strand
gaaaacaccaccuucaacu

SEQ ID NO: 1974076 - RNA, 19 nt, Homo sapiens
  misc_RNA (1)...(19): siRNA sense strand
gcucuucuucgugggauuu

SEQ ID NO: 1974077 - RNA, 19 nt, Homo sapiens
  misc_RNA (1)...(19): siRNA sense strand
caaccaccagcucuucuuc

SEQ ID NO: 1974078 - RNA, 19 nt, Homo sapiens
  misc_RNA (1)...(19): siRNA sense strand
cacagcaccugccuuacag

SEQ ID NO: 1974079 - RNA, 19 nt, Homo sapiens
  misc_RNA (1)...(19): siRNA sense strand
ugguguaugggauggauua

SEQ ID NO: 1974080 - RNA, 19 nt, Homo sapiens
  misc_RNA (1)...(19): siRNA sense strand
gaugacgcccuuggcuuug

SEQ ID NO: 1974081 - RNA, 19 nt, Homo sapiens
  misc_RNA (1)...(19): siRNA sense strand
ggcaagaccuacaccaaga

SEQ ID NO: 1974082 - RNA, 19 nt, Homo sapiens
  misc_RNA (1)...(19): siRNA sense strand
accaagaguucgcaucuga

SEQ ID NO: 1974083 - RNA, 19 nt, Homo sapiens
  misc_RNA (1)...(19): siRNA sense strand
gcaaacgcaccgccacuca

SEQ ID NO: 1974084 - RNA, 19 nt, Homo sapiens
  misc_RNA (1)...(19): siRNA sense strand
ucugugcgaucgugccuuu

SEQ ID NO: 1974085 - RNA, 19 nt, Homo sapiens
  misc_RNA (1)...(19): siRNA sense strand
caagaguucgcaucugaag

SEQ ID NO: 1974086 - RNA, 19 nt, Homo sapiens
  misc_RNA (1)...(19): siRNA sense strand
ggcugcggcuggaaguuug

SEQ ID NO: 1974087 - RNA, 19 nt, Homo sapiens
  misc_RNA (1)...(19): siRNA sense strand
agaccuacaccaagaguuc

SEQ ID NO: 1974088 - RNA, 19 nt, Homo sapiens
  misc_RNA (1)...(19): siRNA sense strand
gcggcaagaccuacaccaa

SEQ ID NO: 1974089 - RNA, 19 nt, Homo sapiens
  misc_RNA (1)...(19): siRNA sense strand
gcacgcacacaggugagaa

SEQ ID NO: 1974090 - RNA, 19 nt, Homo sapiens
  misc_RNA (1)...(19): siRNA sense strand
ccaagaguucgcaucugaa

SEQ ID NO: 1974091 - RNA, 19 nt, Homo sapiens
  misc_RNA (1)...(19): siRNA sense strand
ccauuccagugccaucugu

SEQ ID NO: 1974092 - RNA, 19 nt, Homo sapiens
  misc_RNA (1)...(19): siRNA sense strand
ugccguccuucuccacuuu

SEQ ID NO: 1974093 - RNA, 19 nt, Homo sapiens
  misc_RNA (1)...(19): siRNA sense strand
aaacgcaccgccacucaca

SEQ ID NO: 1974094 - RNA, 19 nt, Homo sapiens
  misc_RNA (1)...(19): siRNA sense strand
ggaaguuugcgcgcucaga

SEQ ID NO: 1974095 - RNA, 19 nt, Homo sapiens
  misc_RNA (1)...(19): siRNA sense strand
gcaagaccuacaccaagag

SEQ ID NO: 1974096 - RNA, 19 nt, Homo sapiens
  misc_RNA (1)...(19): siRNA sense strand
gcaccgacgacgaccucaa

SEQ ID NO: 1974097 - RNA, 19 nt, Homo sapiens
  misc_RNA (1)...(19): siRNA sense strand
ccacucacaccugcagcua

SEQ ID NO: 1974098 - RNA, 19 nt, Homo sapiens
  misc_RNA (1)...(19): siRNA sense strand
gaaguccgcugacgugcua

SEQ ID NO: 1974099 - RNA, 19 nt, Homo sapiens
  misc_RNA (1)...(19): siRNA sense strand
ggacaaggaugacgaagag

SEQ ID NO: 1974100 - RNA, 19 nt, Homo sapiens
  misc_RNA (1)...(19): siRNA sense strand
ggaaugcccaccuugguua

SEQ ID NO: 1974101 - RNA, 19 nt, Homo sapiens
  misc_RNA (1)...(19): siRNA sense strand
gauggcagauggcaauguu

SEQ ID NO: 1974102 - RNA, 19 nt, Homo sapiens
  misc_RNA (1)...(19): siRNA sense strand
gagaggcccugcuucaagu

SEQ ID NO: 1974103 - RNA, 19 nt, Homo sapiens
  misc_RNA (1)...(19): siRNA sense strand
gcacaacggcucccucuac

SEQ ID NO: 1974104 - RNA, 19 nt, Homo sapiens
  misc_RNA (1)...(19): siRNA sense strand
gcucugacuugaaggacuu

SEQ ID NO: 1974105 - RNA, 19 nt, Homo sapiens
  misc_RNA (1)...(19): siRNA sense strand
agaugaagcuggcuacuac

SEQ ID NO: 1974106 - RNA, 19 nt, Homo sapiens
  misc_RNA (1)...(19): siRNA sense strand
ugaaugucaugguguggaa

SEQ ID NO: 1974107 - RNA, 19 nt, Homo sapiens
  misc_RNA (1)...(19): siRNA sense strand
gcccauggaugucuaugag

SEQ ID NO: 1974108 - RNA, 19 nt, Homo sapiens
  misc_RNA (1)...(19): siRNA sense strand
gaggagagcacguguuucg

SEQ ID NO: 1974109 - RNA, 19 nt, Homo sapiens
  misc_RNA (1)...(19): siRNA sense strand
ccacgugacgggcaacuau

SEQ ID NO: 1974110 - RNA, 19 nt, Homo sapiens
  misc_RNA (1)...(19): siRNA sense strand
ccgaggagagcacguguuu

SEQ ID NO: 1974111 - RNA, 19 nt, Homo sapiens
  misc_RNA (1)...(19): siRNA sense strand
cgugcuagcucuugcagau

SEQ ID NO: 1974112 - RNA, 19 nt, Homo sapiens
  misc_RNA (1)...(19): siRNA sense strand
gggaaugcccaccuugguu

SEQ ID NO: 1974113 - RNA, 19 nt, Homo sapiens
  misc_RNA (1)...(19): siRNA sense strand
gagcagugcgucuccuuca

SEQ ID NO: 1974114 - RNA, 19 nt, Homo sapiens
  misc_RNA (1)...(19): siRNA sense strand
gucgugcgcugcuggaaga

SEQ ID NO: 1974115 - RNA, 19 nt, Homo sapiens
  misc_RNA (1)...(19): siRNA sense strand
gcggagagggcuaccaguu

SEQ ID NO: 1974116 - RNA, 19 nt, Homo sapiens
  misc_RNA (1)...(19): siRNA sense strand
gagagcuucuucguggauu

SEQ ID NO: 1974117 - RNA, 19 nt, Homo sapiens
  misc_RNA (1)...(19): siRNA sense strand
cgugugaccugcacuguac

SEQ ID NO: 1974118 - RNA, 19 nt, Homo sapiens
  misc_RNA (1)...(19): siRNA sense strand
ccauguguguccgcuauga

SEQ ID NO: 1974119 - RNA, 19 nt, Homo sapiens
  misc_RNA (1)...(19): siRNA sense strand
caacagcccaacauccaau

SEQ ID NO: 1974120 - RNA, 19 nt, Homo sapiens
  misc_RNA (1)...(19): siRNA sense strand
gacaacagcccaacaucca

SEQ ID NO: 1974121 - RNA, 19 nt, Homo sapiens
  misc_RNA (1)...(19): siRNA sense strand
cgagacauccagauuguag

SEQ ID NO: 1974122 - RNA, 19 nt, Homo sapiens
  misc_RNA (1)...(19): siRNA sense strand
caaggaugacgaagagguu

SEQ ID NO: 1974123 - RNA, 19 nt, Homo sapiens
  misc_RNA (1)...(19): siRNA sense strand
ggguuugcgugucuggaaa

SEQ ID NO: 1974124 - RNA, 19 nt, Homo sapiens
  misc_RNA (1)...(19): siRNA sense strand
cagaugaagcuggcuacua

SEQ ID NO: 1974125 - RNA, 19 nt, Homo sapiens
  misc_RNA (1)...(19): siRNA sense strand
guacccggaugacuauguc

SEQ ID NO: 1974126 - RNA, 19 nt, Homo sapiens
  misc_RNA (1)...(19): siRNA sense strand
ugcgagacgucaagugcua

SEQ ID NO: 1974127 - RNA, 19 nt, Homo sapiens
  misc_RNA (1)...(19): siRNA sense strand
ucaggcacguguacugcaa

SEQ ID NO: 1974128 - RNA, 19 nt, Homo sapiens
  misc_RNA (1)...(19): siRNA sense strand
gggacaaggaugacgaaga

SEQ ID NO: 1974129 - RNA, 19 nt, Homo sapiens
  misc_RNA (1)...(19): siRNA sense strand
guccacaucuccagcaaac

SEQ ID NO: 1974130 - RNA, 19 nt, Homo sapiens
  misc_RNA (1)...(19): siRNA sense strand
agagcuucuucguggauua

SEQ ID NO: 1974131 - RNA, 19 nt, Homo sapiens
  misc_RNA (1)...(19): siRNA sense strand
cggcuaacgccaucucuga

SEQ ID NO: 1974132 - RNA, 19 nt, Homo sapiens
  misc_RNA (1)...(19): siRNA sense strand
cccgagacauccagauugu

SEQ ID NO: 1974133 - RNA, 19 nt, Homo sapiens
  misc_RNA (1)...(19): siRNA sense strand
ugcuagcucuugcagauga

SEQ ID NO: 1974134 - RNA, 19 nt, Homo sapiens
  misc_RNA (1)...(19): siRNA sense strand
gcuucuucguggauuauga

SEQ ID NO: 1974135 - RNA, 19 nt, Homo sapiens
  misc_RNA (1)...(19): siRNA sense strand
cgagaggcccugcuucaag

SEQ ID NO: 1974136 - RNA, 19 nt, Homo sapiens
  misc_RNA (1)...(19): siRNA sense strand
ggcccugcuucaaguggua

SEQ ID NO: 1974137 - RNA, 19 nt, Homo sapiens
  misc_RNA (1)...(19): siRNA sense strand
gcccuggccaucaaaguga

SEQ ID NO: 1974138 - RNA, 19 nt, Homo sapiens
  misc_RNA (1)...(19): siRNA sense strand
gcccgagacauccagauug

SEQ ID NO: 1974139 - RNA, 19 nt, Homo sapiens
  misc_RNA (1)...(19): siRNA sense strand
cgccauguguguccgcuau

SEQ ID NO: 1974140 - RNA, 19 nt, Homo sapiens
  misc_RNA (1)...(19): siRNA sense strand
gcgcaggcucugacuugaa

SEQ ID NO: 1974141 - RNA, 19 nt, Homo sapiens
  misc_RNA (1)...(19): siRNA sense strand
gcagcuggagcgaguguuc

SEQ ID NO: 1974142 - RNA, 19 nt, Homo sapiens
  misc_RNA (1)...(19): siRNA sense strand
ccaagccucuggccaucca

SEQ ID NO: 1974143 - RNA, 19 nt, Homo sapiens
  misc_RNA (1)...(19): siRNA sense strand
ggcaaaagccccuccauca

SEQ ID NO: 1974144 - RNA, 19 nt, Homo sapiens
  misc_RNA (1)...(19): siRNA sense strand
agugcgggcucgccaagaa

SEQ ID NO: 1974145 - RNA, 19 nt, Homo sapiens
  misc_RNA (1)...(19): siRNA sense strand
gagcuucuucguggauuau

SEQ ID NO: 1974146 - RNA, 19 nt, Homo sapiens
  misc_RNA (1)...(19): siRNA sense strand
aggaugagaagcuguguga

SEQ ID NO: 1974147 - RNA, 19 nt, Homo sapiens
  misc_RNA (1)...(19): siRNA sense strand
ggcgcaggcucugacuuga

SEQ ID NO: 1974148 - RNA, 19 nt, Homo sapiens
  misc_RNA (1)...(19): siRNA sense strand
cgcaggcucugacuugaag

SEQ ID NO: 1974149 - RNA, 19 nt, Homo sapiens
  misc_RNA (1)...(19): siRNA sense strand
gcuagcucuugcagaugaa

SEQ ID NO: 1974150 - RNA, 19 nt, Homo sapiens
  misc_RNA (1)...(19): siRNA sense strand
ucaacucccacguguacaa

SEQ ID NO: 1974151 - RNA, 19 nt, Homo sapiens
  misc_RNA (1)...(19): siRNA sense strand
agaccggaaucgaguacau

SEQ ID NO: 1974152 - RNA, 19 nt, Homo sapiens
  misc_RNA (1)...(19): siRNA sense strand
gcagugcgucuccuucaac

SEQ ID NO: 1974153 - RNA, 19 nt, Homo sapiens
  misc_RNA (1)...(19): siRNA sense strand
ggucagagugcaccaagac

SEQ ID NO: 1974154 - RNA, 19 nt, Homo sapiens
  misc_RNA (1)...(19): siRNA sense strand
gagcagcuggagcgagugu

SEQ ID NO: 1974155 - RNA, 19 nt, Homo sapiens
  misc_RNA (1)...(19): siRNA sense strand
gcaccaucaggcacgugua

SEQ ID NO: 1974156 - RNA, 19 nt, Homo sapiens
  misc_RNA (1)...(19): siRNA sense strand
ggaaaucacuccuccauau

SEQ ID NO: 1974157 - RNA, 19 nt, Homo sapiens
  misc_RNA (1)...(19): siRNA sense strand
gcaaacugaugaccuaaua

SEQ ID NO: 1974158 - RNA, 19 nt, Homo sapiens
  misc_RNA (1)...(19): siRNA sense strand
ggagagagaccuuauguuu

SEQ ID NO: 1974159 - RNA, 19 nt, Homo sapiens
  misc_RNA (1)...(19): siRNA sense strand
ggagaaaccuuuugaauau

SEQ ID NO: 1974160 - RNA, 19 nt, Homo sapiens
  misc_RNA (1)...(19): siRNA sense strand
gaagagccauggauaguag

SEQ ID NO: 1974161 - RNA, 19 nt, Homo sapiens
  misc_RNA (1)...(19): siRNA sense strand
aaugaaagcugaugaaugu

SEQ ID NO: 1974162 - RNA, 19 nt, Homo sapiens
  misc_RNA (1)...(19): siRNA sense strand
gaagagagagguaauguuc

SEQ ID NO: 1974163 - RNA, 19 nt, Homo sapiens
  misc_RNA (1)...(19): siRNA sense strand
gagguaauguuccugguaa

SEQ ID NO: 1974164 - RNA, 19 nt, Homo sapiens
  misc_RNA (1)...(19): siRNA sense strand
agagaaaccuuacgaaugu

SEQ ID NO: 1974165 - RNA, 19 nt, Homo sapiens
  misc_RNA (1)...(19): siRNA sense strand
gaaaugaagcccuaugaau

SEQ ID NO: 1974166 - RNA, 19 nt, Homo sapiens
  misc_RNA (1)...(19): siRNA sense strand
gagagaagcccuaugaaug

SEQ ID NO: 1974167 - RNA, 19 nt, Homo sapiens
  misc_RNA (1)...(19): siRNA sense strand
gaauguaguuauuguggaa

SEQ ID NO: 1974168 - RNA, 19 nt, Homo sapiens
  misc_RNA (1)...(19): siRNA sense strand
gauggaagcuaugcaagaa

SEQ ID NO: 1974169 - RNA, 19 nt, Homo sapiens
  misc_RNA (1)...(19): siRNA sense strand
gagaagcccuaugaaugua

SEQ ID NO: 1974170 - RNA, 19 nt, Homo sapiens
  misc_RNA (1)...(19): siRNA sense strand
gagaagcccuaugaaugua

SEQ ID NO: 1974171 - RNA, 19 nt, Homo sapiens
  misc_RNA (1)...(19): siRNA sense strand
ggacguggcuguggacuuc

SEQ ID NO: 1974172 - RNA, 19 nt, Homo sapiens
  misc_RNA (1)...(19): siRNA sense strand
ucagacaucucauauggaa

SEQ ID NO: 1974173 - RNA, 19 nt, Homo sapiens
  misc_RNA (1)...(19): siRNA sense strand
caacagccaucagagaauu

SEQ ID NO: 1974174 - RNA, 19 nt, Homo sapiens
  misc_RNA (1)...(19): siRNA sense strand
gagagaaaccuuacgaaug

SEQ ID NO: 1974175 - RNA, 19 nt, Homo sapiens
  misc_RNA (1)...(19): siRNA sense strand
gagagaaaccguaugaaug

SEQ ID NO: 1974176 - RNA, 19 nt, Homo sapiens
  misc_RNA (1)...(19): siRNA sense strand
agagagaccuuauguuugu

SEQ ID NO: 1974177 - RNA, 19 nt, Homo sapiens
  misc_RNA (1)...(19): siRNA sense strand
ggagaagcccuaugaaugu

SEQ ID NO: 1974178 - RNA, 19 nt, Homo sapiens
  misc_RNA (1)...(19): siRNA sense strand
gaugaagucuggcaaacug

SEQ ID NO: 1974179 - RNA, 19 nt, Homo sapiens
  misc_RNA (1)...(19): siRNA sense strand
gauaguagaaggagaauuc

SEQ ID NO: 1974180 - RNA, 19 nt, Homo sapiens
  misc_RNA (1)...(19): siRNA sense strand
caucagacaucucauaugg

SEQ ID NO: 1974181 - RNA, 19 nt, Homo sapiens
  misc_RNA (1)...(19): siRNA sense strand
guacaucagacaucucaua

SEQ ID NO: 1974182 - RNA, 19 nt, Homo sapiens
  misc_RNA (1)...(19): siRNA sense strand
gagaaacccuaugagugua

SEQ ID NO: 1974183 - RNA, 19 nt, Homo sapiens
  misc_RNA (1)...(19): siRNA sense strand
gaaaucacuccuccauauu

SEQ ID NO: 1974184 - RNA, 19 nt, Homo sapiens
  misc_RNA (1)...(19): siRNA sense strand
ggcaaacuguguucauuga

SEQ ID NO: 1974185 - RNA, 19 nt, Homo sapiens
  misc_RNA (1)...(19): siRNA sense strand
gagaaaccguaugaaugua

SEQ ID NO: 1974186 - RNA, 19 nt, Homo sapiens
  misc_RNA (1)...(19): siRNA sense strand
ggagagaaaccguaugaau

SEQ ID NO: 1974187 - RNA, 19 nt, Homo sapiens
  misc_RNA (1)...(19): siRNA sense strand
gaccuuauguuugucauga

SEQ ID NO: 1974188 - RNA, 19 nt, Homo sapiens
  misc_RNA (1)...(19): siRNA sense strand
gggagaagcccuaugaaug

SEQ ID NO: 1974189 - RNA, 19 nt, Homo sapiens
  misc_RNA (1)...(19): siRNA sense strand
caaacuguguucauugaga

SEQ ID NO: 1974190 - RNA, 19 nt, Homo sapiens
  misc_RNA (1)...(19): siRNA sense strand
gaaugaaagcugaugaaug

SEQ ID NO: 1974191 - RNA, 19 nt, Homo sapiens
  misc_RNA (1)...(19): siRNA sense strand
ggagagaagcccuaugaau

SEQ ID NO: 1974192 - RNA, 19 nt, Homo sapiens
  misc_RNA (1)...(19): siRNA sense strand
gagaucaagcuuaugaauu

SEQ ID NO: 1974193 - RNA, 19 nt, Homo sapiens
  misc_RNA (1)...(19): siRNA sense strand
gaaaccguaugaauguaau

SEQ ID NO: 1974194 - RNA, 19 nt, Homo sapiens
  misc_RNA (1)...(19): siRNA sense strand
caacaucagagaacacauu

SEQ ID NO: 1974195 - RNA, 19 nt, Homo sapiens
  misc_RNA (1)...(19): siRNA sense strand
gagagagaccuuauguuug

SEQ ID NO: 1974196 - RNA, 19 nt, Homo sapiens
  misc_RNA (1)...(19): siRNA sense strand
ggagaauuccuacuucaga

SEQ ID NO: 1974197 - RNA, 19 nt, Homo sapiens
  misc_RNA (1)...(19): siRNA sense strand
ggagagaaaccuuacgaau

SEQ ID NO: 1974198 - RNA, 19 nt, Homo sapiens
  misc_RNA (1)...(19): siRNA sense strand
ggaaaugaagcccuaugaa

SEQ ID NO: 1974199 - RNA, 19 nt, Homo sapiens
  misc_RNA (1)...(19): siRNA sense strand
gaaagcugaugaauguagu

SEQ ID NO: 1974200 - RNA, 19 nt, Homo sapiens
  misc_RNA (1)...(19): siRNA sense strand
cuucagagcuauccagaug

SEQ ID NO: 1974201 - RNA, 19 nt, Homo sapiens
  misc_RNA (1)...(19): siRNA sense strand
aaaucacuccuccauauua

SEQ ID NO: 1974202 - RNA, 19 nt, Homo sapiens
  misc_RNA (1)...(19): siRNA sense strand
agacacaccucacacaaca

SEQ ID NO: 1974203 - RNA, 19 nt, Homo sapiens
  misc_RNA (1)...(19): siRNA sense strand
gaagacacaccucacacaa

SEQ ID NO: 1974204 - RNA, 19 nt, Homo sapiens
  misc_RNA (1)...(19): siRNA sense strand
gagaggcaauaugaaugua

SEQ ID NO: 1974205 - RNA, 19 nt, Homo sapiens
  misc_RNA (1)...(19): siRNA sense strand
ucagagcuauccagaugaa

SEQ ID NO: 1974206 - RNA, 19 nt, Homo sapiens
  misc_RNA (1)...(19): siRNA sense strand
caucagagaauucauagga

SEQ ID NO: 1974207 - RNA, 19 nt, Homo sapiens
  misc_RNA (1)...(19): siRNA sense strand
ggagagaaacccuaugagu

SEQ ID NO: 1974208 - RNA, 19 nt, Homo sapiens
  misc_RNA (1)...(19): siRNA sense strand
gagaaaccuuacgaaugua

SEQ ID NO: 1974209 - RNA, 19 nt, Homo sapiens
  misc_RNA (1)...(19): siRNA sense strand
aaucacuccuccauauuaa

SEQ ID NO: 1974210 - RNA, 19 nt, Homo sapiens
  misc_RNA (1)...(19): siRNA sense strand
ugucauaucucacuguaca

SEQ ID NO: 1974211 - RNA, 19 nt, Homo sapiens
  misc_RNA (1)...(19): siRNA sense strand
gaggcaauaugaauguaau

SEQ ID NO: 1974212 - RNA, 19 nt, Homo sapiens
  misc_RNA (1)...(19): siRNA sense strand
aaaugaagcccuaugaaug

SEQ ID NO: 1974213 - RNA, 19 nt, Homo sapiens
  misc_RNA (1)...(19): siRNA sense strand
uaaguggaauggaucugaa

SEQ ID NO: 1974214 - RNA, 19 nt, Homo sapiens
  misc_RNA (1)...(19): siRNA sense strand
ggagaggcaauaugaaugu

SEQ ID NO: 1974215 - RNA, 19 nt, Homo sapiens
  misc_RNA (1)...(19): siRNA sense strand
ggaagaacuuuuaccagaa

SEQ ID NO: 1974216 - RNA, 19 nt, Homo sapiens
  misc_RNA (1)...(19): siRNA sense strand
gggaaauccuucuguaaaa

SEQ ID NO: 1974217 - RNA, 19 nt, Homo sapiens
  misc_RNA (1)...(19): siRNA sense strand
gagcagaagauaacuuaca

SEQ ID NO: 1974218 - RNA, 19 nt, Homo sapiens
  misc_RNA (1)...(19): siRNA sense strand
guaugaauguaaugagugu

SEQ ID NO: 1974219 - RNA, 19 nt, Homo sapiens
  misc_RNA (1)...(19): siRNA sense strand
gugugaaacucuacaagug

SEQ ID NO: 1974220 - RNA, 19 nt, Homo sapiens
  misc_RNA (1)...(19): siRNA sense strand
gggaugugaugcuggagaa

SEQ ID NO: 1974221 - RNA, 19 nt, Homo sapiens
  misc_RNA (1)...(19): siRNA sense strand
ggagaacuacagcaaucua

SEQ ID NO: 1974222 - RNA, 19 nt, Homo sapiens
  misc_RNA (1)...(19): siRNA sense strand
caggagagaagcccuauga

SEQ ID NO: 1974223 - RNA, 19 nt, Homo sapiens
  misc_RNA (1)...(19): siRNA sense strand
ggagaagagccauggauag

SEQ ID NO: 1974224 - RNA, 19 nt, Homo sapiens
  misc_RNA (1)...(19): siRNA sense strand
agagaaaccguaugaaugu

SEQ ID NO: 1974225 - RNA, 19 nt, Homo sapiens
  misc_RNA (1)...(19): siRNA sense strand
gaagcccuaugaauguaau

SEQ ID NO: 1974226 - RNA, 19 nt, Homo sapiens
  misc_RNA (1)...(19): siRNA sense strand
cuacagcaaucuaguuucu

SEQ ID NO: 1974227 - RNA, 19 nt, Homo sapiens
  misc_RNA (1)...(19): siRNA sense strand
ggagaucaagcuuaugaau

SEQ ID NO: 1974228 - RNA, 19 nt, Homo sapiens
  misc_RNA (1)...(19): siRNA sense strand
caggagaucaagcuuauga

SEQ ID NO: 1974229 - RNA, 19 nt, Homo sapiens
  misc_RNA (1)...(19): siRNA sense strand
gcugaugaauguaguggau

SEQ ID NO: 1974230 - RNA, 19 nt, Homo sapiens
  misc_RNA (1)...(19): siRNA sense strand
gagaagagccauggauagu

SEQ ID NO: 1974231 - RNA, 19 nt, Homo sapiens
  misc_RNA (1)...(19): siRNA sense strand
agagaaacccuaugagugu

SEQ ID NO: 1974232 - RNA, 19 nt, Homo sapiens
  misc_RNA (1)...(19): siRNA sense strand
ggaccucacuguacaucag

SEQ ID NO: 1974233 - RNA, 19 nt, Homo sapiens
  misc_RNA (1)...(19): siRNA sense strand
ggacuucacccaggaggaa

SEQ ID NO: 1974234 - RNA, 19 nt, Homo sapiens
  misc_RNA (1)...(19): siRNA sense strand
guugucauaucucacugua

SEQ ID NO: 1974235 - RNA, 19 nt, Homo sapiens
  misc_RNA (1)...(19): siRNA sense strand
acacaggagagaaaccuua

SEQ ID NO: 1974236 - RNA, 19 nt, Homo sapiens
  misc_RNA (1)...(19): siRNA sense strand
uagagagaauccaggaaga

SEQ ID NO: 1974237 - RNA, 19 nt, Homo sapiens
  misc_RNA (1)...(19): siRNA sense strand
ccacaaaucagcauucaac

SEQ ID NO: 1974238 - RNA, 19 nt, Homo sapiens
  misc_RNA (1)...(19): siRNA sense strand
uggaauggaucugaaauag

SEQ ID NO: 1974239 - RNA, 19 nt, Homo sapiens
  misc_RNA (1)...(19): siRNA sense strand
gagaauccaggaagaggaa

SEQ ID NO: 1974240 - RNA, 19 nt, Homo sapiens
  misc_RNA (1)...(19): siRNA sense strand
aaacugaugaccuaauaga

SEQ ID NO: 1974241 - RNA, 19 nt, Homo sapiens
  misc_RNA (1)...(19): siRNA sense strand
gaagaaaagcccuauaagu

SEQ ID NO: 1974242 - RNA, 19 nt, Homo sapiens
  misc_RNA (1)...(19): siRNA sense strand
uggaagcuaugcaagaaug

SEQ ID NO: 1974243 - RNA, 19 nt, Homo sapiens
  misc_RNA (1)...(19): siRNA sense strand
ucauugagacccugauuga

SEQ ID NO: 1974244 - RNA, 19 nt, Homo sapiens
  misc_RNA (1)...(19): siRNA sense strand
caggagagaaacccuauga

SEQ ID NO: 1974245 - RNA, 19 nt, Homo sapiens
  misc_RNA (1)...(19): siRNA sense strand
caggagagaaaccguauga

SEQ ID NO: 1974246 - RNA, 19 nt, Homo sapiens
  misc_RNA (1)...(19): siRNA sense strand
agagaagcccuaugaaugu

SEQ ID NO: 1974247 - RNA, 19 nt, Homo sapiens
  misc_RNA (1)...(19): siRNA sense strand
gaaguuacaccucauucag

SEQ ID NO: 1974248 - RNA, 19 nt, Homo sapiens
  misc_RNA (1)...(19): siRNA sense strand
gggaaaucacuccuccaua

SEQ ID NO: 1974249 - RNA, 19 nt, Homo sapiens
  misc_RNA (1)...(19): siRNA sense strand
ggaaccuuauacucuaaau

SEQ ID NO: 1974250 - RNA, 19 nt, Homo sapiens
  misc_RNA (1)...(19): siRNA sense strand
ugugggaaauccuucugua

SEQ ID NO: 1974251 - RNA, 19 nt, Homo sapiens
  misc_RNA (1)...(19): siRNA sense strand
guggaauggaucugaaaua

SEQ ID NO: 1974252 - RNA, 19 nt, Homo sapiens
  misc_RNA (1)...(19): siRNA sense strand
caaguuggagcaaggagaa

SEQ ID NO: 1974253 - RNA, 19 nt, Homo sapiens
  misc_RNA (1)...(19): siRNA sense strand
gauccugagcagaagauaa

SEQ ID NO: 1974254 - RNA, 19 nt, Homo sapiens
  misc_RNA (1)...(19): siRNA sense strand
uaucaaaccggauguuauc

SEQ ID NO: 1974255 - RNA, 19 nt, Homo sapiens
  misc_RNA (1)...(19): siRNA sense strand
gcacuuaaugaccaucaga

SEQ ID NO: 1974256 - RNA, 19 nt, Homo sapiens
  misc_RNA (1)...(19): siRNA sense strand
gaagcuagaugguggauga

SEQ ID NO: 1974257 - RNA, 19 nt, Homo sapiens
  misc_RNA (1)...(19): siRNA sense strand
gcaggaaggguauauauuu

SEQ ID NO: 1974258 - RNA, 19 nt, Homo sapiens
  misc_RNA (1)...(19): siRNA sense strand
ccuaaaggcugaagaacua

SEQ ID NO: 1974259 - RNA, 19 nt, Homo sapiens
  misc_RNA (1)...(19): siRNA sense strand
gaagucauaugcccuagau

SEQ ID NO: 1974260 - RNA, 19 nt, Homo sapiens
  misc_RNA (1)...(19): siRNA sense strand
caccugagcuggcuagaaa

SEQ ID NO: 1974261 - RNA, 19 nt, Homo sapiens
  misc_RNA (1)...(19): siRNA sense strand
gcuacagccuugcuugaaa

SEQ ID NO: 1974262 - RNA, 19 nt, Homo sapiens
  misc_RNA (1)...(19): siRNA sense strand
gcgggacucugacaaagaa

SEQ ID NO: 1974263 - RNA, 19 nt, Homo sapiens
  misc_RNA (1)...(19): siRNA sense strand
acaacaagcugguguaugg

SEQ ID NO: 1974264 - RNA, 19 nt, Homo sapiens
  misc_RNA (1)...(19): siRNA sense strand
gaaaggauucucuugacuu

SEQ ID NO: 1974265 - RNA, 19 nt, Homo sapiens
  misc_RNA (1)...(19): siRNA sense strand
ggguauauauuuccaagug

SEQ ID NO: 1974266 - RNA, 19 nt, Homo sapiens
  misc_RNA (1)...(19): siRNA sense strand
cagaguggcuuuagcuuca

SEQ ID NO: 1974267 - RNA, 19 nt, Homo sapiens
  misc_RNA (1)...(19): siRNA sense strand
aaaggauucucuugacuug

SEQ ID NO: 1974268 - RNA, 19 nt, Homo sapiens
  misc_RNA (1)...(19): siRNA sense strand
ggaagaacuggaagucauu

SEQ ID NO: 1974269 - RNA, 19 nt, Homo sapiens
  misc_RNA (1)...(19): siRNA sense strand
gaaggaggauuuggcuauc

SEQ ID NO: 1974270 - RNA, 19 nt, Homo sapiens
  misc_RNA (1)...(19): siRNA sense strand
cggcgaagguuuccguuug

SEQ ID NO: 1974271 - RNA, 19 nt, Homo sapiens
  misc_RNA (1)...(19): siRNA sense strand
cauaugcccuagauggaaa

SEQ ID NO: 1974272 - RNA, 19 nt, Homo sapiens
  misc_RNA (1)...(19): siRNA sense strand
acaaugagcgggacucuga

SEQ ID NO: 1974273 - RNA, 19 nt, Homo sapiens
  misc_RNA (1)...(19): siRNA sense strand
ccaacucccuggacuauac

SEQ ID NO: 1974274 - RNA, 19 nt, Homo sapiens
  misc_RNA (1)...(19): siRNA sense strand
caggaaggguauauauuuc

SEQ ID NO: 1974275 - RNA, 19 nt, Homo sapiens
  misc_RNA (1)...(19): siRNA sense strand
guucacagaugcugagagu

SEQ ID NO: 1974276 - RNA, 19 nt, Homo sapiens
  misc_RNA (1)...(19): siRNA sense strand
caaggagcauguggacaaa

SEQ ID NO: 1974277 - RNA, 19 nt, Homo sapiens
  misc_RNA (1)...(19): siRNA sense strand
cuacagagaacuagggaaa

SEQ ID NO: 1974278 - RNA, 19 nt, Homo sapiens
  misc_RNA (1)...(19): siRNA sense strand
ggagccacguucacagaug

SEQ ID NO: 1974279 - RNA, 19 nt, Homo sapiens
  misc_RNA (1)...(19): siRNA sense strand
gaagaacuggaagucauuu

SEQ ID NO: 1974280 - RNA, 19 nt, Homo sapiens
  misc_RNA (1)...(19): siRNA sense strand
ggauuccugugccuccuuu

SEQ ID NO: 1974281 - RNA, 19 nt, Homo sapiens
  misc_RNA (1)...(19): siRNA sense strand
ggaugagagugcugacugu

SEQ ID NO: 1974282 - RNA, 19 nt, Homo sapiens
  misc_RNA (1)...(19): siRNA sense strand
gcacaggggugaugagcaa

SEQ ID NO: 1974283 - RNA, 19 nt, Homo sapiens
  misc_RNA (1)...(19): siRNA sense strand
ucaaggagcauguggacaa

SEQ ID NO: 1974284 - RNA, 19 nt, Homo sapiens
  misc_RNA (1)...(19): siRNA sense strand
agaaggaccuggaagaacu

SEQ ID NO: 1974285 - RNA, 19 nt, Homo sapiens
  misc_RNA (1)...(19): siRNA sense strand
gaugccacauggaagagaa

SEQ ID NO: 1974286 - RNA, 19 nt, Homo sapiens
  misc_RNA (1)...(19): siRNA sense strand
cgaaggaggauuuggcuau

SEQ ID NO: 1974287 - RNA, 19 nt, Homo sapiens
  misc_RNA (1)...(19): siRNA sense strand
gagcgggacucugacaaag

SEQ ID NO: 1974288 - RNA, 19 nt, Homo sapiens
  misc_RNA (1)...(19): siRNA sense strand
cuccagagcuuccuaaagg

SEQ ID NO: 1974289 - RNA, 19 nt, Homo sapiens
  misc_RNA (1)...(19): siRNA sense strand
ugagcgagaagaagucaua

SEQ ID NO: 1974290 - RNA, 19 nt, Homo sapiens
  misc_RNA (1)...(19): siRNA sense strand
gcugugagacugugaagau

SEQ ID NO: 1974291 - RNA, 19 nt, Homo sapiens
  misc_RNA (1)...(19): siRNA sense strand
aagaugaagugagcuguga

SEQ ID NO: 1974292 - RNA, 19 nt, Homo sapiens
  misc_RNA (1)...(19): siRNA sense strand
ggaccuggaagaacuggaa

SEQ ID NO: 1974293 - RNA, 19 nt, Homo sapiens
  misc_RNA (1)...(19): siRNA sense strand
gcuagaugguggaugaagu

SEQ ID NO: 1974294 - RNA, 19 nt, Homo sapiens
  misc_RNA (1)...(19): siRNA sense strand
caagugcuacagagaacua

SEQ ID NO: 1974295 - RNA, 19 nt, Homo sapiens
  misc_RNA (1)...(19): siRNA sense strand
gaagaacuacagccaggau

SEQ ID NO: 1974296 - RNA, 19 nt, Homo sapiens
  misc_RNA (1)...(19): siRNA sense strand
uggaagaacuggaagucau

SEQ ID NO: 1974297 - RNA, 19 nt, Homo sapiens
  misc_RNA (1)...(19): siRNA sense strand
aaacggacccagcgucaug

SEQ ID NO: 1974298 - RNA, 19 nt, Homo sapiens
  misc_RNA (1)...(19): siRNA sense strand
ugccagaugucacgaagga

SEQ ID NO: 1974299 - RNA, 19 nt, Homo sapiens
  misc_RNA (1)...(19): siRNA sense strand
caacaacaagcugguguau

SEQ ID NO: 1974300 - RNA, 19 nt, Homo sapiens
  misc_RNA (1)...(19): siRNA sense strand
ggcgaagguuuccguuugu

SEQ ID NO: 1974301 - RNA, 19 nt, Homo sapiens
  misc_RNA (1)...(19): siRNA sense strand
gaugaagugagcugugaga

SEQ ID NO: 1974302 - RNA, 19 nt, Homo sapiens
  misc_RNA (1)...(19): siRNA sense strand
aagaugcccuccagagcuu

SEQ ID NO: 1974303 - RNA, 19 nt, Homo sapiens
  misc_RNA (1)...(19): siRNA sense strand
cuacagccuugcuugaaag

SEQ ID NO: 1974304 - RNA, 19 nt, Homo sapiens
  misc_RNA (1)...(19): siRNA sense strand
gcgagaagaagucauaugc

SEQ ID NO: 1974305 - RNA, 19 nt, Homo sapiens
  misc_RNA (1)...(19): siRNA sense strand
cuccagcucugucuacuuc

SEQ ID NO: 1974306 - RNA, 19 nt, Homo sapiens
  misc_RNA (1)...(19): siRNA sense strand
caaagcaggaaggguauau

SEQ ID NO: 1974307 - RNA, 19 nt, Homo sapiens
  misc_RNA (1)...(19): siRNA sense strand
gcauguggacaaagccauu

SEQ ID NO: 1974308 - RNA, 19 nt, Homo sapiens
  misc_RNA (1)...(19): siRNA sense strand
gaggugagcgagaagaagu

SEQ ID NO: 1974309 - RNA, 19 nt, Homo sapiens
  misc_RNA (1)...(19): siRNA sense strand
aggauucucuugacuugga

SEQ ID NO: 1974310 - RNA, 19 nt, Homo sapiens
  misc_RNA (1)...(19): siRNA sense strand
agaacuacagccaggauuu

SEQ ID NO: 1974311 - RNA, 19 nt, Homo sapiens
  misc_RNA (1)...(19): siRNA sense strand
gaacuacagccaggauuuu

SEQ ID NO: 1974312 - RNA, 19 nt, Homo sapiens
  misc_RNA (1)...(19): siRNA sense strand
cagccaaugcggagucuga

SEQ ID NO: 1974313 - RNA, 19 nt, Homo sapiens
  misc_RNA (1)...(19): siRNA sense strand
aagcaggaaggguauauau

SEQ ID NO: 1974314 - RNA, 19 nt, Homo sapiens
  misc_RNA (1)...(19): siRNA sense strand
gguccgaugccacauggaa

SEQ ID NO: 1974315 - RNA, 19 nt, Homo sapiens
  misc_RNA (1)...(19): siRNA sense strand
ccaaugcggagucugacaa

SEQ ID NO: 1974316 - RNA, 19 nt, Homo sapiens
  misc_RNA (1)...(19): siRNA sense strand
gggaaggacaggagaaggu

SEQ ID NO: 1974317 - RNA, 19 nt, Homo sapiens
  misc_RNA (1)...(19): siRNA sense strand
ucaacaacaagcuggugua

SEQ ID NO: 1974318 - RNA, 19 nt, Homo sapiens
  misc_RNA (1)...(19): siRNA sense strand
ggacucugacaaagaaagu

SEQ ID NO: 1974319 - RNA, 19 nt, Homo sapiens
  misc_RNA (1)...(19): siRNA sense strand
gcccgagccuacagugaca

SEQ ID NO: 1974320 - RNA, 19 nt, Homo sapiens
  misc_RNA (1)...(19): siRNA sense strand
cuagaugguggaugaaguu

SEQ ID NO: 1974321 - RNA, 19 nt, Homo sapiens
  misc_RNA (1)...(19): siRNA sense strand
cugaggaggugagcgagaa

SEQ ID NO: 1974322 - RNA, 19 nt, Homo sapiens
  misc_RNA (1)...(19): siRNA sense strand
gcccaacucccuggacuau

SEQ ID NO: 1974323 - RNA, 19 nt, Homo sapiens
  misc_RNA (1)...(19): siRNA sense strand
ggagguccgaugccacaug

SEQ ID NO: 1974324 - RNA, 19 nt, Homo sapiens
  misc_RNA (1)...(19): siRNA sense strand
ugagcgggacucugacaaa

SEQ ID NO: 1974325 - RNA, 19 nt, Homo sapiens
  misc_RNA (1)...(19): siRNA sense strand
gaaggaccuggaagaacug

SEQ ID NO: 1974326 - RNA, 19 nt, Homo sapiens
  misc_RNA (1)...(19): siRNA sense strand
gaaggguauauauuuccaa

SEQ ID NO: 1974327 - RNA, 19 nt, Homo sapiens
  misc_RNA (1)...(19): siRNA sense strand
gcgcauccagaguggcuuu

SEQ ID NO: 1974328 - RNA, 19 nt, Homo sapiens
  misc_RNA (1)...(19): siRNA sense strand
gaagccggcaggacuuucu

SEQ ID NO: 1974329 - RNA, 19 nt, Homo sapiens
  misc_RNA (1)...(19): siRNA sense strand
ggugcuaucaggucucuca

SEQ ID NO: 1974330 - RNA, 19 nt, Homo sapiens
  misc_RNA (1)...(19): siRNA sense strand
cacagaugcugagagugaa

SEQ ID NO: 1974331 - RNA, 19 nt, Homo sapiens
  misc_RNA (1)...(19): siRNA sense strand
gagccuacagugacaugug

SEQ ID NO: 1974332 - RNA, 19 nt, Homo sapiens
  misc_RNA (1)...(19): siRNA sense strand
ccaaagcaggaaggguaua

SEQ ID NO: 1974333 - RNA, 19 nt, Homo sapiens
  misc_RNA (1)...(19): siRNA sense strand
ggagguggaggagcugaga

SEQ ID NO: 1974334 - RNA, 19 nt, Homo sapiens
  misc_RNA (1)...(19): siRNA sense strand
aaagcaggaaggguauaua

SEQ ID NO: 1974335 - RNA, 19 nt, Homo sapiens
  misc_RNA (1)...(19): siRNA sense strand
ucauaugcccuagauggaa

SEQ ID NO: 1974336 - RNA, 19 nt, Homo sapiens
  misc_RNA (1)...(19): siRNA sense strand
ggacuauacgcagacuuca

SEQ ID NO: 1974337 - RNA, 19 nt, Homo sapiens
  misc_RNA (1)...(19): siRNA sense strand
acuauacgcagacuucaga

SEQ ID NO: 1974338 - RNA, 19 nt, Homo sapiens
  misc_RNA (1)...(19): siRNA sense strand
gcgaagguuuccguuuguc

SEQ ID NO: 1974339 - RNA, 19 nt, Homo sapiens
  misc_RNA (1)...(19): siRNA sense strand
cauggaagagaaccagaga

SEQ ID NO: 1974340 - RNA, 19 nt, Homo sapiens
  misc_RNA (1)...(19): siRNA sense strand
uuacagccagcgauggaaa

SEQ ID NO: 1974341 - RNA, 19 nt, Homo sapiens
  misc_RNA (1)...(19): siRNA sense strand
uggaagagaaccagagagu

SEQ ID NO: 1974342 - RNA, 19 nt, Homo sapiens
  misc_RNA (1)...(19): siRNA sense strand
ggaaugaaguuucgaaauu

SEQ ID NO: 1974343 - RNA, 19 nt, Homo sapiens
  misc_RNA (1)...(19): siRNA sense strand
caaagaacauccuggugua

SEQ ID NO: 1974344 - RNA, 19 nt, Homo sapiens
  misc_RNA (1)...(19): siRNA sense strand
uaacagaugugaccaaagu

SEQ ID NO: 1974345 - RNA, 19 nt, Homo sapiens
  misc_RNA (1)...(19): siRNA sense strand
guaaggacuuugaaugcua

SEQ ID NO: 1974346 - RNA, 19 nt, Homo sapiens
  misc_RNA (1)...(19): siRNA sense strand
gaauauucccuaaagguaa

SEQ ID NO: 1974347 - RNA, 19 nt, Homo sapiens
  misc_RNA (1)...(19): siRNA sense strand
ggaaguuuguguugauuca

SEQ ID NO: 1974348 - RNA, 19 nt, Homo sapiens
  misc_RNA (1)...(19): siRNA sense strand
ggaaucagcugugaaugca

SEQ ID NO: 1974349 - RNA, 19 nt, Homo sapiens
  misc_RNA (1)...(19): siRNA sense strand
ugaaugcuaucgcaaagaa

SEQ ID NO: 1974350 - RNA, 19 nt, Homo sapiens
  misc_RNA (1)...(19): siRNA sense strand
gacugaagauggacacauu

SEQ ID NO: 1974351 - RNA, 19 nt, Homo sapiens
  misc_RNA (1)...(19): siRNA sense strand
gguaacagaugugaccaaa

SEQ ID NO: 1974352 - RNA, 19 nt, Homo sapiens
  misc_RNA (1)...(19): siRNA sense strand
gaugaaggcugacauucgu

SEQ ID NO: 1974353 - RNA, 19 nt, Homo sapiens
  misc_RNA (1)...(19): siRNA sense strand
agacagaaaucuacaaagg

SEQ ID NO: 1974354 - RNA, 19 nt, Homo sapiens
  misc_RNA (1)...(19): siRNA sense strand
gccaggaggugguauaaca

SEQ ID NO: 1974355 - RNA, 19 nt, Homo sapiens
  misc_RNA (1)...(19): siRNA sense strand
acaaagagcuguguauguc

SEQ ID NO: 1974356 - RNA, 19 nt, Homo sapiens
  misc_RNA (1)...(19): siRNA sense strand
gaagcagaguguucagauc

SEQ ID NO: 1974357 - RNA, 19 nt, Homo sapiens
  misc_RNA (1)...(19): siRNA sense strand
gaagauggacacauugaca

SEQ ID NO: 1974358 - RNA, 19 nt, Homo sapiens
  misc_RNA (1)...(19): siRNA sense strand
cagcauggguguccuucaa

SEQ ID NO: 1974359 - RNA, 19 nt, Homo sapiens
  misc_RNA (1)...(19): siRNA sense strand
acagaaaucuacaaaggau

SEQ ID NO: 1974360 - RNA, 19 nt, Homo sapiens
  misc_RNA (1)...(19): siRNA sense strand
guaugucccuuauggcuau

SEQ ID NO: 1974361 - RNA, 19 nt, Homo sapiens
  misc_RNA (1)...(19): siRNA sense strand
ccaccgagccuuugacaug

SEQ ID NO: 1974362 - RNA, 19 nt, Homo sapiens
  misc_RNA (1)...(19): siRNA sense strand
ggcauugacugaagaugga

SEQ ID NO: 1974363 - RNA, 19 nt, Homo sapiens
  misc_RNA (1)...(19): siRNA sense strand
gacaaagagcuguguaugu

SEQ ID NO: 1974364 - RNA, 19 nt, Homo sapiens
  misc_RNA (1)...(19): siRNA sense strand
uaaggacuuugaaugcuau

SEQ ID NO: 1974365 - RNA, 19 nt, Homo sapiens
  misc_RNA (1)...(19): siRNA sense strand
gugcugaucggauugaauu

SEQ ID NO: 1974366 - RNA, 19 nt, Homo sapiens
  misc_RNA (1)...(19): siRNA sense strand
cauggaaguuuguguugau

SEQ ID NO: 1974367 - RNA, 19 nt, Homo sapiens
  misc_RNA (1)...(19): siRNA sense strand
agaauauucccuaaaggua

SEQ ID NO: 1974368 - RNA, 19 nt, Homo sapiens
  misc_RNA (1)...(19): siRNA sense strand
ccucuuaaccuugggauuu

SEQ ID NO: 1974369 - RNA, 19 nt, Homo sapiens
  misc_RNA (1)...(19): siRNA sense strand
ggguucaggugcuacagaa

SEQ ID NO: 1974370 - RNA, 19 nt, Homo sapiens
  misc_RNA (1)...(19): siRNA sense strand
ggauuucucauggaaguuu

SEQ ID NO: 1974371 - RNA, 19 nt, Homo sapiens
  misc_RNA (1)...(19): siRNA sense strand
ugacaguucagcauuagaa

SEQ ID NO: 1974372 - RNA, 19 nt, Homo sapiens
  misc_RNA (1)...(19): siRNA sense strand
gcauggguguccuucaagu

SEQ ID NO: 1974373 - RNA, 19 nt, Homo sapiens
  misc_RNA (1)...(19): siRNA sense strand
gcucagaauauucccuaaa

SEQ ID NO: 1974374 - RNA, 19 nt, Homo sapiens
  misc_RNA (1)...(19): siRNA sense strand
guucaggugcuacagaauu

SEQ ID NO: 1974375 - RNA, 19 nt, Homo sapiens
  misc_RNA (1)...(19): siRNA sense strand
gacagaaaucuacaaagga

SEQ ID NO: 1974376 - RNA, 19 nt, Homo sapiens
  misc_RNA (1)...(19): siRNA sense strand
gagcuguguaugucccuua

SEQ ID NO: 1974377 - RNA, 19 nt, Homo sapiens
  misc_RNA (1)...(19): siRNA sense strand
gaugugacaguucagcauu

SEQ ID NO: 1974378 - RNA, 19 nt, Homo sapiens
  misc_RNA (1)...(19): siRNA sense strand
gaaagaggaggugcugauc

SEQ ID NO: 1974379 - RNA, 19 nt, Homo sapiens
  misc_RNA (1)...(19): siRNA sense strand
uuucgaaauucaucuguug

SEQ ID NO: 1974380 - RNA, 19 nt, Homo sapiens
  misc_RNA (1)...(19): siRNA sense strand
acuagagacucgggaauga

SEQ ID NO: 1974381 - RNA, 19 nt, Homo sapiens
  misc_RNA (1)...(19): siRNA sense strand
gggaaugaaguuucgaaau

SEQ ID NO: 1974382 - RNA, 19 nt, Homo sapiens
  misc_RNA (1)...(19): siRNA sense strand
uggagacccucuuaaccuu

SEQ ID NO: 1974383 - RNA, 19 nt, Homo sapiens
  misc_RNA (1)...(19): siRNA sense strand
acagaugugaccaaaguaa

SEQ ID NO: 1974384 - RNA, 19 nt, Homo sapiens
  misc_RNA (1)...(19): siRNA sense strand
ucaguggaaucagcuguga

SEQ ID NO: 1974385 - RNA, 19 nt, Homo sapiens
  misc_RNA (1)...(19): siRNA sense strand
ucauggaaguuuguguuga

SEQ ID NO: 1974386 - RNA, 19 nt, Homo sapiens
  misc_RNA (1)...(19): siRNA sense strand
gaucggauugaauuauguu

SEQ ID NO: 1974387 - RNA, 19 nt, Homo sapiens
  misc_RNA (1)...(19): siRNA sense strand
caugggagccucacuuucu

SEQ ID NO: 1974388 - RNA, 19 nt, Homo sapiens
  misc_RNA (1)...(19): siRNA sense strand
guagugaagcagaguguuc

SEQ ID NO: 1974389 - RNA, 19 nt, Homo sapiens
  misc_RNA (1)...(19): siRNA sense strand
ggugaugaaggcugacauu

SEQ ID NO: 1974390 - RNA, 19 nt, Homo sapiens
  misc_RNA (1)...(19): siRNA sense strand
gaaggccggagcagcaaau

SEQ ID NO: 1974391 - RNA, 19 nt, Homo sapiens
  misc_RNA (1)...(19): siRNA sense strand
cagaauauucccuaaaggu

SEQ ID NO: 1974392 - RNA, 19 nt, Homo sapiens
  misc_RNA (1)...(19): siRNA sense strand
gccaugggagccucacuuu

SEQ ID NO: 1974393 - RNA, 19 nt, Homo sapiens
  misc_RNA (1)...(19): siRNA sense strand
uaacagacagaaaucuaca

SEQ ID NO: 1974394 - RNA, 19 nt, Homo sapiens
  misc_RNA (1)...(19): siRNA sense strand
uuauggugcugaugguuug

SEQ ID NO: 1974395 - RNA, 19 nt, Homo sapiens
  misc_RNA (1)...(19): siRNA sense strand
gguauaacagacagaaauc

SEQ ID NO: 1974396 - RNA, 19 nt, Homo sapiens
  misc_RNA (1)...(19): siRNA sense strand
ugacaaagagcuguguaug

SEQ ID NO: 1974397 - RNA, 19 nt, Homo sapiens
  misc_RNA (1)...(19): siRNA sense strand
cugaucggauugaauuaug

SEQ ID NO: 1974398 - RNA, 19 nt, Homo sapiens
  misc_RNA (1)...(19): siRNA sense strand
aggaggugcugaucggauu

SEQ ID NO: 1974399 - RNA, 19 nt, Homo sapiens
  misc_RNA (1)...(19): siRNA sense strand
acagacagaaaucuacaaa

SEQ ID NO: 1974400 - RNA, 19 nt, Homo sapiens
  misc_RNA (1)...(19): siRNA sense strand
caguggaugugacaguuca

SEQ ID NO: 1974401 - RNA, 19 nt, Homo sapiens
  misc_RNA (1)...(19): siRNA sense strand
ggccggagcagcaaaugga

SEQ ID NO: 1974402 - RNA, 19 nt, Homo sapiens
  misc_RNA (1)...(19): siRNA sense strand
cggauugaauuauguucug

SEQ ID NO: 1974403 - RNA, 19 nt, Homo sapiens
  misc_RNA (1)...(19): siRNA sense strand
gcucuggagacccucuuaa

SEQ ID NO: 1974404 - RNA, 19 nt, Homo sapiens
  misc_RNA (1)...(19): siRNA sense strand
cucagaauauucccuaaag

SEQ ID NO: 1974405 - RNA, 19 nt, Homo sapiens
  misc_RNA (1)...(19): siRNA sense strand
gagacucgggaaugaaguu

SEQ ID NO: 1974406 - RNA, 19 nt, Homo sapiens
  misc_RNA (1)...(19): siRNA sense strand
gcugaucggauugaauuau

SEQ ID NO: 1974407 - RNA, 19 nt, Homo sapiens
  misc_RNA (1)...(19): siRNA sense strand
auggacacauugacaaaga

SEQ ID NO: 1974408 - RNA, 19 nt, Homo sapiens
  misc_RNA (1)...(19): siRNA sense strand
cccuaaagguaacagaugu

SEQ ID NO: 1974409 - RNA, 19 nt, Homo sapiens
  misc_RNA (1)...(19): siRNA sense strand
gauuucucauggaaguuug

SEQ ID NO: 1974410 - RNA, 19 nt, Homo sapiens
  misc_RNA (1)...(19): siRNA sense strand
ggaggugguauaacagaca

SEQ ID NO: 1974411 - RNA, 19 nt, Homo sapiens
  misc_RNA (1)...(19): siRNA sense strand
guaaugccaggagguggua

SEQ ID NO: 1974412 - RNA, 19 nt, Homo sapiens
  misc_RNA (1)...(19): siRNA sense strand
ggaaggccggagcagcaaa

SEQ ID NO: 1974413 - RNA, 19 nt, Homo sapiens
  misc_RNA (1)...(19): siRNA sense strand
gaugugaccaaaguaagga

SEQ ID NO: 1974414 - RNA, 19 nt, Homo sapiens
  misc_RNA (1)...(19): siRNA sense strand
guuucgaaauucaucuguu

SEQ ID NO: 1974415 - RNA, 19 nt, Homo sapiens
  misc_RNA (1)...(19): siRNA sense strand
augugacaguucagcauua

SEQ ID NO: 1974416 - RNA, 19 nt, Homo sapiens
  misc_RNA (1)...(19): siRNA sense strand
gggauuugaacgcguguug

SEQ ID NO: 1974417 - RNA, 19 nt, Homo sapiens
  misc_RNA (1)...(19): siRNA sense strand
agaaagaggaggugcugau

SEQ ID NO: 1974418 - RNA, 19 nt, Homo sapiens
  misc_RNA (1)...(19): siRNA sense strand
cuaaagguaacagauguga

SEQ ID NO: 1974419 - RNA, 19 nt, Homo sapiens
  misc_RNA (1)...(19): siRNA sense strand
ugaucggauugaauuaugu

SEQ ID NO: 1974420 - RNA, 19 nt, Homo sapiens
  misc_RNA (1)...(19): siRNA sense strand
cauggguguccuucaagua

SEQ ID NO: 1974421 - RNA, 19 nt, Homo sapiens
  misc_RNA (1)...(19): siRNA sense strand
ucagaauauucccuaaagg

SEQ ID NO: 1974422 - RNA, 19 nt, Homo sapiens
  misc_RNA (1)...(19): siRNA sense strand
ggguguccuucaaguagug

SEQ ID NO: 1974423 - RNA, 19 nt, Homo sapiens
  misc_RNA (1)...(19): siRNA sense strand
ggauuugaacgcguguuga

SEQ ID NO: 1974424 - RNA, 19 nt, Homo sapiens
  misc_RNA (1)...(19): siRNA sense strand
aaaggcaggauugugguaa

SEQ ID NO: 1974425 - RNA, 19 nt, Homo sapiens
  misc_RNA (1)...(19): siRNA sense strand
caggaggugguauaacaga

SEQ ID NO: 1974426 - RNA, 19 nt, Homo sapiens
  misc_RNA (1)...(19): siRNA sense strand
guucugcucggucuacuag

SEQ ID NO: 1974427 - RNA, 19 nt, Homo sapiens
  misc_RNA (1)...(19): siRNA sense strand
gaaggacucugauauguug

SEQ ID NO: 1974428 - RNA, 19 nt, Homo sapiens
  misc_RNA (1)...(19): siRNA sense strand
gcacugggcuuuauaucug

SEQ ID NO: 1974429 - RNA, 19 nt, Homo sapiens
  misc_RNA (1)...(19): siRNA sense strand
gcacgugucugcaguagag

SEQ ID NO: 1974430 - RNA, 19 nt, Homo sapiens
  misc_RNA (1)...(19): siRNA sense strand
gaaagccugugaacuaugg

SEQ ID NO: 1974431 - RNA, 19 nt, Homo sapiens
  misc_RNA (1)...(19): siRNA sense strand
gaucaaggauggguuggaa

SEQ ID NO: 1974432 - RNA, 19 nt, Homo sapiens
  misc_RNA (1)...(19): siRNA sense strand
gaugagagauucuguugcu

SEQ ID NO: 1974433 - RNA, 19 nt, Homo sapiens
  misc_RNA (1)...(19): siRNA sense strand
ggaaggacucugauauguu

SEQ ID NO: 1974434 - RNA, 19 nt, Homo sapiens
  misc_RNA (1)...(19): siRNA sense strand
ccgugaagcuggacaaaga

SEQ ID NO: 1974435 - RNA, 19 nt, Homo sapiens
  misc_RNA (1)...(19): siRNA sense strand
gcgcugaccaucuacgaua

SEQ ID NO: 1974436 - RNA, 19 nt, Homo sapiens
  misc_RNA (1)...(19): siRNA sense strand
ggaccuggcugugaagaca

SEQ ID NO: 1974437 - RNA, 19 nt, Homo sapiens
  misc_RNA (1)...(19): siRNA sense strand
gcagauccaaccuuuguga

SEQ ID NO: 1974438 - RNA, 19 nt, Homo sapiens
  misc_RNA (1)...(19): siRNA sense strand
agacaaugguggagauuuc

SEQ ID NO: 1974439 - RNA, 19 nt, Homo sapiens
  misc_RNA (1)...(19): siRNA sense strand
cauguuggcccugaaauuu

SEQ ID NO: 1974440 - RNA, 19 nt, Homo sapiens
  misc_RNA (1)...(19): siRNA sense strand
ccgaaagccugugaacuau

SEQ ID NO: 1974441 - RNA, 19 nt, Homo sapiens
  misc_RNA (1)...(19): siRNA sense strand
gaaagcagagaucaaggau

SEQ ID NO: 1974442 - RNA, 19 nt, Homo sapiens
  misc_RNA (1)...(19): siRNA sense strand
cagcagauccaaccuuugu

SEQ ID NO: 1974443 - RNA, 19 nt, Homo sapiens
  misc_RNA (1)...(19): siRNA sense strand
uggaaggacucugauaugu

SEQ ID NO: 1974444 - RNA, 19 nt, Homo sapiens
  misc_RNA (1)...(19): siRNA sense strand
gaugaaagcagagaucaag

SEQ ID NO: 1974445 - RNA, 19 nt, Homo sapiens
  misc_RNA (1)...(19): siRNA sense strand
gaacuaugggaacagauuc

SEQ ID NO: 1974446 - RNA, 19 nt, Homo sapiens
  misc_RNA (1)...(19): siRNA sense strand
uccgaaagccugugaacua

SEQ ID NO: 1974447 - RNA, 19 nt, Homo sapiens
  misc_RNA (1)...(19): siRNA sense strand
ugaagacaaugguggagau

SEQ ID NO: 1974448 - RNA, 19 nt, Homo sapiens
  misc_RNA (1)...(19): siRNA sense strand
ucaaggauggguuggaauu

SEQ ID NO: 1974449 - RNA, 19 nt, Homo sapiens
  misc_RNA (1)...(19): siRNA sense strand
gagaccacauccugcuguu

SEQ ID NO: 1974450 - RNA, 19 nt, Homo sapiens
  misc_RNA (1)...(19): siRNA sense strand
gaccacauccugcuguuca

SEQ ID NO: 1974451 - RNA, 19 nt, Homo sapiens
  misc_RNA (1)...(19): siRNA sense strand
gcucaaagcagcagaucca

SEQ ID NO: 1974452 - RNA, 19 nt, Homo sapiens
  misc_RNA (1)...(19): siRNA sense strand
caucuacgauacccacauc

SEQ ID NO: 1974453 - RNA, 19 nt, Homo sapiens
  misc_RNA (1)...(19): siRNA sense strand
gauggaaaccaacuucuac

SEQ ID NO: 1974454 - RNA, 19 nt, Homo sapiens
  misc_RNA (1)...(19): siRNA sense strand
gaagacaaugguggagauu

SEQ ID NO: 1974455 - RNA, 19 nt, Homo sapiens
  misc_RNA (1)...(19): siRNA sense strand
gagcuggaccuggcuguga

SEQ ID NO: 1974456 - RNA, 19 nt, Homo sapiens
  misc_RNA (1)...(19): siRNA sense strand
ccuaagcagcuaugugaaa

SEQ ID NO: 1974457 - RNA, 19 nt, Homo sapiens
  misc_RNA (1)...(19): siRNA sense strand
gcagauggaaggagugucu

SEQ ID NO: 1974458 - RNA, 19 nt, Homo sapiens
  misc_RNA (1)...(19): siRNA sense strand
cuacuggccuugugcugau

SEQ ID NO: 1974459 - RNA, 19 nt, Homo sapiens
  misc_RNA (1)...(19): siRNA sense strand
gcacagccgagaccacauc

SEQ ID NO: 1974460 - RNA, 19 nt, Homo sapiens
  misc_RNA (1)...(19): siRNA sense strand
ugaacuaugggaacagauu

SEQ ID NO: 1974461 - RNA, 19 nt, Homo sapiens
  misc_RNA (1)...(19): siRNA sense strand
gcacaccgucgcucacauc

SEQ ID NO: 1974462 - RNA, 19 nt, Homo sapiens
  misc_RNA (1)...(19): siRNA sense strand
cuaagcagcuaugugaaag

SEQ ID NO: 1974463 - RNA, 19 nt, Homo sapiens
  misc_RNA (1)...(19): siRNA sense strand
ugaaagcagagaucaagga

SEQ ID NO: 1974464 - RNA, 19 nt, Homo sapiens
  misc_RNA (1)...(19): siRNA sense strand
uggcuugucauaacuauug

SEQ ID NO: 1974465 - RNA, 19 nt, Homo sapiens
  misc_RNA (1)...(19): siRNA sense strand
gcacuggaagcuccgugaa

SEQ ID NO: 1974466 - RNA, 19 nt, Homo sapiens
  misc_RNA (1)...(19): siRNA sense strand
gagaugaaagcagagauca

SEQ ID NO: 1974467 - RNA, 19 nt, Homo sapiens
  misc_RNA (1)...(19): siRNA sense strand
agcagcagauccaaccuuu

SEQ ID NO: 1974468 - RNA, 19 nt, Homo sapiens
  misc_RNA (1)...(19): siRNA sense strand
ugauggaaaccaacuucua

SEQ ID NO: 1974469 - RNA, 19 nt, Homo sapiens
  misc_RNA (1)...(19): siRNA sense strand
gugaaaggcaucuacucuu

SEQ ID NO: 1974470 - RNA, 19 nt, Homo sapiens
  misc_RNA (1)...(19): siRNA sense strand
aggaacagaugagagauuc

SEQ ID NO: 1974471 - RNA, 19 nt, Homo sapiens
  misc_RNA (1)...(19): siRNA sense strand
acgcugacccaguauguaa

SEQ ID NO: 1974472 - RNA, 19 nt, Homo sapiens
  misc_RNA (1)...(19): siRNA sense strand
ggaccaaugacaagagucu

SEQ ID NO: 1974473 - RNA, 19 nt, Homo sapiens
  misc_RNA (1)...(19): siRNA sense strand
acauccugcuguucaauga

SEQ ID NO: 1974474 - RNA, 19 nt, Homo sapiens
  misc_RNA (1)...(19): siRNA sense strand
augccacgcugacccagua

SEQ ID NO: 1974475 - RNA, 19 nt, Homo sapiens
  misc_RNA (1)...(19): siRNA sense strand
uugagaagggcgaauauga

SEQ ID NO: 1974476 - RNA, 19 nt, Homo sapiens
  misc_RNA (1)...(19): siRNA sense strand
aaggauggguuggaauuca

SEQ ID NO: 1974477 - RNA, 19 nt, Homo sapiens
  misc_RNA (1)...(19): siRNA sense strand
uaaaauggaccaaugacaa

SEQ ID NO: 1974478 - RNA, 19 nt, Homo sapiens
  misc_RNA (1)...(19): siRNA sense strand
guucaaugacgcacacuuc

SEQ ID NO: 1974479 - RNA, 19 nt, Homo sapiens
  misc_RNA (1)...(19): siRNA sense strand
gcaggccaacgaugcaaug

SEQ ID NO: 1974480 - RNA, 19 nt, Homo sapiens
  misc_RNA (1)...(19): siRNA sense strand
gauugagaagggcgaauau

SEQ ID NO: 1974481 - RNA, 19 nt, Homo sapiens
  misc_RNA (1)...(19): siRNA sense strand
ugauugagaagggcgaaua

SEQ ID NO: 1974482 - RNA, 19 nt, Homo sapiens
  misc_RNA (1)...(19): siRNA sense strand
caggaacagaugagagauu

SEQ ID NO: 1974483 - RNA, 19 nt, Homo sapiens
  misc_RNA (1)...(19): siRNA sense strand
ggaccacccgacagacaug

SEQ ID NO: 1974484 - RNA, 19 nt, Homo sapiens
  misc_RNA (1)...(19): siRNA sense strand
caucgagggcugccuguca

SEQ ID NO: 1974485 - RNA, 19 nt, Homo sapiens
  misc_RNA (1)...(19): siRNA sense strand
uauuggcacugggcuuuau

SEQ ID NO: 1974486 - RNA, 19 nt, Homo sapiens
  misc_RNA (1)...(19): siRNA sense strand
agacauguuggcccugaaa

SEQ ID NO: 1974487 - RNA, 19 nt, Homo sapiens
  misc_RNA (1)...(19): siRNA sense strand
ugagaagggcgaauaugag

SEQ ID NO: 1974488 - RNA, 19 nt, Homo sapiens
  misc_RNA (1)...(19): siRNA sense strand
gcagcagauccaaccuuug

SEQ ID NO: 1974489 - RNA, 19 nt, Homo sapiens
  misc_RNA (1)...(19): siRNA sense strand
cgaaagccugugaacuaug

SEQ ID NO: 1974490 - RNA, 19 nt, Homo sapiens
  misc_RNA (1)...(19): siRNA sense strand
guuggcuugucauaacuau

SEQ ID NO: 1974491 - RNA, 19 nt, Homo sapiens
  misc_RNA (1)...(19): siRNA sense strand
ccacgcugacccaguaugu

SEQ ID NO: 1974492 - RNA, 19 nt, Homo sapiens
  misc_RNA (1)...(19): siRNA sense strand
cgagaugaaagcagagauc

SEQ ID NO: 1974493 - RNA, 19 nt, Homo sapiens
  misc_RNA (1)...(19): siRNA sense strand
ugugaacuaugggaacaga

SEQ ID NO: 1974494 - RNA, 19 nt, Homo sapiens
  misc_RNA (1)...(19): siRNA sense strand
uauguaaaauggaccaaug

SEQ ID NO: 1974495 - RNA, 19 nt, Homo sapiens
  misc_RNA (1)...(19): siRNA sense strand
cacugggcuuuauaucuga

SEQ ID NO: 1974496 - RNA, 19 nt, Homo sapiens
  misc_RNA (1)...(19): siRNA sense strand
ucuggaaggacucugauau

SEQ ID NO: 1974497 - RNA, 19 nt, Homo sapiens
  misc_RNA (1)...(19): siRNA sense strand
ggaauucaugcagcacuca

SEQ ID NO: 1974498 - RNA, 19 nt, Homo sapiens
  misc_RNA (1)...(19): siRNA sense strand
ccacccgacagacauguug

SEQ ID NO: 1974499 - RNA, 19 nt, Homo sapiens
  misc_RNA (1)...(19): siRNA sense strand
gaucagaggcuuaaagaaa

SEQ ID NO: 1974500 - RNA, 19 nt, Homo sapiens
  misc_RNA (1)...(19): siRNA sense strand
cagcauaaguguuacauug

SEQ ID NO: 1974501 - RNA, 19 nt, Homo sapiens
  misc_RNA (1)...(19): siRNA sense strand
ccaacacccuuccugcuua

SEQ ID NO: 1974502 - RNA, 19 nt, Homo sapiens
  misc_RNA (1)...(19): siRNA sense strand
uccaagauuugaacgauua

SEQ ID NO: 1974503 - RNA, 19 nt, Homo sapiens
  misc_RNA (1)...(19): siRNA sense strand
ggaaguaugcgaccaugaa

SEQ ID NO: 1974504 - RNA, 19 nt, Homo sapiens
  misc_RNA (1)...(19): siRNA sense strand
gaacggaugccagaugauu

SEQ ID NO: 1974505 - RNA, 19 nt, Homo sapiens
  misc_RNA (1)...(19): siRNA sense strand
ccaaguguaucccauguau

SEQ ID NO: 1974506 - RNA, 19 nt, Homo sapiens
  misc_RNA (1)...(19): siRNA sense strand
gaaggaucccagcgcauua

SEQ ID NO: 1974507 - RNA, 19 nt, Homo sapiens
  misc_RNA (1)...(19): siRNA sense strand
uauaaccgauuguguaaug

SEQ ID NO: 1974508 - RNA, 19 nt, Homo sapiens
  misc_RNA (1)...(19): siRNA sense strand
gcauaaguguuacauugug

SEQ ID NO: 1974509 - RNA, 19 nt, Homo sapiens
  misc_RNA (1)...(19): siRNA sense strand
caaaggaaccuaugcagau

SEQ ID NO: 1974510 - RNA, 19 nt, Homo sapiens
  misc_RNA (1)...(19): siRNA sense strand
aaccauagauacaacauug

SEQ ID NO: 1974511 - RNA, 19 nt, Homo sapiens
  misc_RNA (1)...(19): siRNA sense strand
ugccaaggauccaagauuu

SEQ ID NO: 1974512 - RNA, 19 nt, Homo sapiens
  misc_RNA (1)...(19): siRNA sense strand
gagaucagaggcuuaaaga

SEQ ID NO: 1974513 - RNA, 19 nt, Homo sapiens
  misc_RNA (1)...(19): siRNA sense strand
gauccaagauuugaacgau

SEQ ID NO: 1974514 - RNA, 19 nt, Homo sapiens
  misc_RNA (1)...(19): siRNA sense strand
ucgaguggcucuaaggauu

SEQ ID NO: 1974515 - RNA, 19 nt, Homo sapiens
  misc_RNA (1)...(19): siRNA sense strand
caacacccuuccugcuuau

SEQ ID NO: 1974516 - RNA, 19 nt, Homo sapiens
  misc_RNA (1)...(19): siRNA sense strand
gaugccagaugauuaugga

SEQ ID NO: 1974517 - RNA, 19 nt, Homo sapiens
  misc_RNA (1)...(19): siRNA sense strand
gaugacugcuuaguacaga

SEQ ID NO: 1974518 - RNA, 19 nt, Homo sapiens
  misc_RNA (1)...(19): siRNA sense strand
uguaauggcugaaauugag

SEQ ID NO: 1974519 - RNA, 19 nt, Homo sapiens
  misc_RNA (1)...(19): siRNA sense strand
uuugaacgauuaccaugua

SEQ ID NO: 1974520 - RNA, 19 nt, Homo sapiens
  misc_RNA (1)...(19): siRNA sense strand
guuccuaucauguacauuu

SEQ ID NO: 1974521 - RNA, 19 nt, Homo sapiens
  misc_RNA (1)...(19): siRNA sense strand
aaguguaucccauguauaa

SEQ ID NO: 1974522 - RNA, 19 nt, Homo sapiens
  misc_RNA (1)...(19): siRNA sense strand
ccaaggauccaagauuuga

SEQ ID NO: 1974523 - RNA, 19 nt, Homo sapiens
  misc_RNA (1)...(19): siRNA sense strand
aaaggaaccuaugcagaug

SEQ ID NO: 1974524 - RNA, 19 nt, Homo sapiens
  misc_RNA (1)...(19): siRNA sense strand
gcgaaugcuuagucucaga

SEQ ID NO: 1974525 - RNA, 19 nt, Homo sapiens
  misc_RNA (1)...(19): siRNA sense strand
aaagaagaauccguaagau

SEQ ID NO: 1974526 - RNA, 19 nt, Homo sapiens
  misc_RNA (1)...(19): siRNA sense strand
ccuaucauguacauuucua

SEQ ID NO: 1974527 - RNA, 19 nt, Homo sapiens
  misc_RNA (1)...(19): siRNA sense strand
ucagagaucagaggcuuaa

SEQ ID NO: 1974528 - RNA, 19 nt, Homo sapiens
  misc_RNA (1)...(19): siRNA sense strand
uguauaaccgauuguguaa

SEQ ID NO: 1974529 - RNA, 19 nt, Homo sapiens
  misc_RNA (1)...(19): siRNA sense strand
gggcccaccuuaccacauc

SEQ ID NO: 1974530 - RNA, 19 nt, Homo sapiens
  misc_RNA (1)...(19): siRNA sense strand
aagccaaacuggacuuagu

SEQ ID NO: 1974531 - RNA, 19 nt, Homo sapiens
  misc_RNA (1)...(19): siRNA sense strand
ccauagauacaacauugaa

SEQ ID NO: 1974532 - RNA, 19 nt, Homo sapiens
  misc_RNA (1)...(19): siRNA sense strand
uaccacauccucguugaua

SEQ ID NO: 1974533 - RNA, 19 nt, Homo sapiens
  misc_RNA (1)...(19): siRNA sense strand
uugaacggaugccagauga

SEQ ID NO: 1974534 - RNA, 19 nt, Homo sapiens
  misc_RNA (1)...(19): siRNA sense strand
ucauguacauuucuaacca

SEQ ID NO: 1974535 - RNA, 19 nt, Homo sapiens
  misc_RNA (1)...(19): siRNA sense strand
cgauuaccauguacacaca

SEQ ID NO: 1974536 - RNA, 19 nt, Homo sapiens
  misc_RNA (1)...(19): siRNA sense strand
aaugauggacugucuguau

SEQ ID NO: 1974537 - RNA, 19 nt, Homo sapiens
  misc_RNA (1)...(19): siRNA sense strand
gaaguaugcgaccaugaag

SEQ ID NO: 1974538 - RNA, 19 nt, Homo sapiens
  misc_RNA (1)...(19): siRNA sense strand
caaguguaucccauguaua

SEQ ID NO: 1974539 - RNA, 19 nt, Homo sapiens
  misc_RNA (1)...(19): siRNA sense strand
gaucccagcgcauuaaagg

SEQ ID NO: 1974540 - RNA, 19 nt, Homo sapiens
  misc_RNA (1)...(19): siRNA sense strand
ucccauguauaaccgauug

SEQ ID NO: 1974541 - RNA, 19 nt, Homo sapiens
  misc_RNA (1)...(19): siRNA sense strand
gccaaggauccaagauuug

SEQ ID NO: 1974542 - RNA, 19 nt, Homo sapiens
  misc_RNA (1)...(19): siRNA sense strand
agaaggaucccagcgcauu

SEQ ID NO: 1974543 - RNA, 19 nt, Homo sapiens
  misc_RNA (1)...(19): siRNA sense strand
gaguuccuaucauguacau

SEQ ID NO: 1974544 - RNA, 19 nt, Homo sapiens
  misc_RNA (1)...(19): siRNA sense strand
aaaagaagaauccguaaga

SEQ ID NO: 1974545 - RNA, 19 nt, Homo sapiens
  misc_RNA (1)...(19): siRNA sense strand
gaacgauuaccauguacac

SEQ ID NO: 1974546 - RNA, 19 nt, Homo sapiens
  misc_RNA (1)...(19): siRNA sense strand
aaagagaaguuccccaaca

SEQ ID NO: 1974547 - RNA, 19 nt, Homo sapiens
  misc_RNA (1)...(19): siRNA sense strand
uaagauuccuggaguuccu

SEQ ID NO: 1974548 - RNA, 19 nt, Homo sapiens
  misc_RNA (1)...(19): siRNA sense strand
acacccuuccugcuuauuu

SEQ ID NO: 1974549 - RNA, 19 nt, Homo sapiens
  misc_RNA (1)...(19): siRNA sense strand
gcgcauuaaaggaaagaga

SEQ ID NO: 1974550 - RNA, 19 nt, Homo sapiens
  misc_RNA (1)...(19): siRNA sense strand
cgaguggcucuaaggauug

SEQ ID NO: 1974551 - RNA, 19 nt, Homo sapiens
  misc_RNA (1)...(19): siRNA sense strand
caaaagaaaacaaggaagu

SEQ ID NO: 1974552 - RNA, 19 nt, Homo sapiens
  misc_RNA (1)...(19): siRNA sense strand
guacacacaaaggaaccua

SEQ ID NO: 1974553 - RNA, 19 nt, Homo sapiens
  misc_RNA (1)...(19): siRNA sense strand
ccauguacacacaaaggaa

SEQ ID NO: 1974554 - RNA, 19 nt, Homo sapiens
  misc_RNA (1)...(19): siRNA sense strand
caaggauccaagauuugaa

SEQ ID NO: 1974555 - RNA, 19 nt, Homo sapiens
  misc_RNA (1)...(19): siRNA sense strand
ucuaaggauugccaaggau

SEQ ID NO: 1974556 - RNA, 19 nt, Homo sapiens
  misc_RNA (1)...(19): siRNA sense strand
gaaauuggggcagaaguau

SEQ ID NO: 1974557 - RNA, 19 nt, Homo sapiens
  misc_RNA (1)...(19): siRNA sense strand
guguaauggcugaaauuga

SEQ ID NO: 1974558 - RNA, 19 nt, Homo sapiens
  misc_RNA (1)...(19): siRNA sense strand
ucaaugauggacugucugu

SEQ ID NO: 1974559 - RNA, 19 nt, Homo sapiens
  misc_RNA (1)...(19): siRNA sense strand
gcauuaaaggaaagagaag

SEQ ID NO: 1974560 - RNA, 19 nt, Homo sapiens
  misc_RNA (1)...(19): siRNA sense strand
ucccagcgcauuaaaggaa

SEQ ID NO: 1974561 - RNA, 19 nt, Homo sapiens
  misc_RNA (1)...(19): siRNA sense strand
augauggacugucuguaug

SEQ ID NO: 1974562 - RNA, 19 nt, Homo sapiens
  misc_RNA (1)...(19): siRNA sense strand
aacggaugccagaugauua

SEQ ID NO: 1974563 - RNA, 19 nt, Homo sapiens
  misc_RNA (1)...(19): siRNA sense strand
cauguacauuucuaaccau

SEQ ID NO: 1974564 - RNA, 19 nt, Homo sapiens
  misc_RNA (1)...(19): siRNA sense strand
guaauggcugaaauugaga

SEQ ID NO: 1974565 - RNA, 19 nt, Homo sapiens
  misc_RNA (1)...(19): siRNA sense strand
caaggaaguaugcgaccau

SEQ ID NO: 1974566 - RNA, 19 nt, Homo sapiens
  misc_RNA (1)...(19): siRNA sense strand
gccaaguguaucccaugua

SEQ ID NO: 1974567 - RNA, 19 nt, Homo sapiens
  misc_RNA (1)...(19): siRNA sense strand
acacacaaaggaaccuaug

SEQ ID NO: 1974568 - RNA, 19 nt, Homo sapiens
  misc_RNA (1)...(19): siRNA sense strand
cuggaguuccuaucaugua

SEQ ID NO: 1974569 - RNA, 19 nt, Homo sapiens
  misc_RNA (1)...(19): siRNA sense strand
guaacucagcauaaguguu

SEQ ID NO: 1974570 - RNA, 19 nt, Homo sapiens
  misc_RNA (1)...(19): siRNA sense strand
acacaaaggaaccuaugca

SEQ ID NO: 1974571 - RNA, 19 nt, Homo sapiens
  misc_RNA (1)...(19): siRNA sense strand
uaacaaggcugaugaugaa

SEQ ID NO: 1974572 - RNA, 19 nt, Homo sapiens
  misc_RNA (1)...(19): siRNA sense strand
gcaaucagguggacauauu

SEQ ID NO: 1974573 - RNA, 19 nt, Homo sapiens
  misc_RNA (1)...(19): siRNA sense strand
gcucagaaguuguuuaaug

SEQ ID NO: 1974574 - RNA, 19 nt, Homo sapiens
  misc_RNA (1)...(19): siRNA sense strand
ggaagaagguggcgaaagu

SEQ ID NO: 1974575 - RNA, 19 nt, Homo sapiens
  misc_RNA (1)...(19): siRNA sense strand
gaaagaaggacaugaacaa

SEQ ID NO: 1974576 - RNA, 19 nt, Homo sapiens
  misc_RNA (1)...(19): siRNA sense strand
gauaaaguccugaauguga

SEQ ID NO: 1974577 - RNA, 19 nt, Homo sapiens
  misc_RNA (1)...(19): siRNA sense strand
ggacaugaacaaacgcuua

SEQ ID NO: 1974578 - RNA, 19 nt, Homo sapiens
  misc_RNA (1)...(19): siRNA sense strand
gaagguggcgaaagucaua

SEQ ID NO: 1974579 - RNA, 19 nt, Homo sapiens
  misc_RNA (1)...(19): siRNA sense strand
ugaagaaugugaucuccua

SEQ ID NO: 1974580 - RNA, 19 nt, Homo sapiens
  misc_RNA (1)...(19): siRNA sense strand
gaacaaacgcuuaaagaac

SEQ ID NO: 1974581 - RNA, 19 nt, Homo sapiens
  misc_RNA (1)...(19): siRNA sense strand
cagauaaaguccugaaugu

SEQ ID NO: 1974582 - RNA, 19 nt, Homo sapiens
  misc_RNA (1)...(19): siRNA sense strand
gaaaauaugcucagaaguu

SEQ ID NO: 1974583 - RNA, 19 nt, Homo sapiens
  misc_RNA (1)...(19): siRNA sense strand
gaaagcagccaggaacaaa

SEQ ID NO: 1974584 - RNA, 19 nt, Homo sapiens
  misc_RNA (1)...(19): siRNA sense strand
ucacgaaaguuuauagcaa

SEQ ID NO: 1974585 - RNA, 19 nt, Homo sapiens
  misc_RNA (1)...(19): siRNA sense strand
acaaagugcugacgaggaa

SEQ ID NO: 1974586 - RNA, 19 nt, Homo sapiens
  misc_RNA (1)...(19): siRNA sense strand
ggauauggaugaaagaaac

SEQ ID NO: 1974587 - RNA, 19 nt, Homo sapiens
  misc_RNA (1)...(19): siRNA sense strand
gacaucgucuuauauaaca

SEQ ID NO: 1974588 - RNA, 19 nt, Homo sapiens
  misc_RNA (1)...(19): siRNA sense strand
gaugaaagaaaccaaauuc

SEQ ID NO: 1974589 - RNA, 19 nt, Homo sapiens
  misc_RNA (1)...(19): siRNA sense strand
cacgaaaguuuauagcaaa

SEQ ID NO: 1974590 - RNA, 19 nt, Homo sapiens
  misc_RNA (1)...(19): siRNA sense strand
gaaguuguuuaaugaccuu

SEQ ID NO: 1974591 - RNA, 19 nt, Homo sapiens
  misc_RNA (1)...(19): siRNA sense strand
aaugugacccugcagauua

SEQ ID NO: 1974592 - RNA, 19 nt, Homo sapiens
  misc_RNA (1)...(19): siRNA sense strand
ggaccgagaucaguacgau

SEQ ID NO: 1974593 - RNA, 19 nt, Homo sapiens
  misc_RNA (1)...(19): siRNA sense strand
cgaggaauauugaguacau

SEQ ID NO: 1974594 - RNA, 19 nt, Homo sapiens
  misc_RNA (1)...(19): siRNA sense strand
ucucucagauuaaggauau

SEQ ID NO: 1974595 - RNA, 19 nt, Homo sapiens
  misc_RNA (1)...(19): siRNA sense strand
cucagaaguuguuuaauga

SEQ ID NO: 1974596 - RNA, 19 nt, Homo sapiens
  misc_RNA (1)...(19): siRNA sense strand
ccagaaagaaggacaugaa

SEQ ID NO: 1974597 - RNA, 19 nt, Homo sapiens
  misc_RNA (1)...(19): siRNA sense strand
ugaacaaacgcuuaaagaa

SEQ ID NO: 1974598 - RNA, 19 nt, Homo sapiens
  misc_RNA (1)...(19): siRNA sense strand
uuaaggauauggaugaaag

SEQ ID NO: 1974599 - RNA, 19 nt, Homo sapiens
  misc_RNA (1)...(19): siRNA sense strand
ugacgaggaauauugagua

SEQ ID NO: 1974600 - RNA, 19 nt, Homo sapiens
  misc_RNA (1)...(19): siRNA sense strand
gacaugaacaaacgcuuaa

SEQ ID NO: 1974601 - RNA, 19 nt, Homo sapiens
  misc_RNA (1)...(19): siRNA sense strand
ggaugaaagaaaccaaauu

SEQ ID NO: 1974602 - RNA, 19 nt, Homo sapiens
  misc_RNA (1)...(19): siRNA sense strand
ggguggucauccugaaaua

SEQ ID NO: 1974603 - RNA, 19 nt, Homo sapiens
  misc_RNA (1)...(19): siRNA sense strand
ggugaugaauauccacuuc

SEQ ID NO: 1974604 - RNA, 19 nt, Homo sapiens
  misc_RNA (1)...(19): siRNA sense strand
accaaauucugacugcuua

SEQ ID NO: 1974605 - RNA, 19 nt, Homo sapiens
  misc_RNA (1)...(19): siRNA sense strand
gaaugugacccugcagauu

SEQ ID NO: 1974606 - RNA, 19 nt, Homo sapiens
  misc_RNA (1)...(19): siRNA sense strand
gaaagucauagaccgauuc

SEQ ID NO: 1974607 - RNA, 19 nt, Homo sapiens
  misc_RNA (1)...(19): siRNA sense strand
cgaaagucauagaccgauu

SEQ ID NO: 1974608 - RNA, 19 nt, Homo sapiens
  misc_RNA (1)...(19): siRNA sense strand
gaccaccucacgaaaguuu

SEQ ID NO: 1974609 - RNA, 19 nt, Homo sapiens
  misc_RNA (1)...(19): siRNA sense strand
gauuaaggauauggaugaa

SEQ ID NO: 1974610 - RNA, 19 nt, Homo sapiens
  misc_RNA (1)...(19): siRNA sense strand
auuacgcucucucagauua

SEQ ID NO: 1974611 - RNA, 19 nt, Homo sapiens
  misc_RNA (1)...(19): siRNA sense strand
gggaccaccucacgaaagu

SEQ ID NO: 1974612 - RNA, 19 nt, Homo sapiens
  misc_RNA (1)...(19): siRNA sense strand
caugcguccucauaucuuu

SEQ ID NO: 1974613 - RNA, 19 nt, Homo sapiens
  misc_RNA (1)...(19): siRNA sense strand
ccugauagguaaauacuac

SEQ ID NO: 1974614 - RNA, 19 nt, Homo sapiens
  misc_RNA (1)...(19): siRNA sense strand
aguggaagauacagauaaa

SEQ ID NO: 1974615 - RNA, 19 nt, Homo sapiens
  misc_RNA (1)...(19): siRNA sense strand
ggaagauacagauaaaguc

SEQ ID NO: 1974616 - RNA, 19 nt, Homo sapiens
  misc_RNA (1)...(19): siRNA sense strand
caaggcugaugaugaaucu

SEQ ID NO: 1974617 - RNA, 19 nt, Homo sapiens
  misc_RNA (1)...(19): siRNA sense strand
agaaugugaucuccuaugg

SEQ ID NO: 1974618 - RNA, 19 nt, Homo sapiens
  misc_RNA (1)...(19): siRNA sense strand
ggucuuguuugucuaugau

SEQ ID NO: 1974619 - RNA, 19 nt, Homo sapiens
  misc_RNA (1)...(19): siRNA sense strand
cagauuacgcucucucaga

SEQ ID NO: 1974620 - RNA, 19 nt, Homo sapiens
  misc_RNA (1)...(19): siRNA sense strand
ggccaugacuguauuucag

SEQ ID NO: 1974621 - RNA, 19 nt, Homo sapiens
  misc_RNA (1)...(19): siRNA sense strand
agaucucucugacuucauu

SEQ ID NO: 1974622 - RNA, 19 nt, Homo sapiens
  misc_RNA (1)...(19): siRNA sense strand
uauauaacaaggcugauga

SEQ ID NO: 1974623 - RNA, 19 nt, Homo sapiens
  misc_RNA (1)...(19): siRNA sense strand
agauuacgcucucucagau

SEQ ID NO: 1974624 - RNA, 19 nt, Homo sapiens
  misc_RNA (1)...(19): siRNA sense strand
agaaggacaugaacaaacg

SEQ ID NO: 1974625 - RNA, 19 nt, Homo sapiens
  misc_RNA (1)...(19): siRNA sense strand
gugcugacgaggaauauug

SEQ ID NO: 1974626 - RNA, 19 nt, Homo sapiens
  misc_RNA (1)...(19): siRNA sense strand
caaauucugacugcuuauu

SEQ ID NO: 1974627 - RNA, 19 nt, Homo sapiens
  misc_RNA (1)...(19): siRNA sense strand
agucauagaccgauucuuc

SEQ ID NO: 1974628 - RNA, 19 nt, Homo sapiens
  misc_RNA (1)...(19): siRNA sense strand
cccagagucuaaccugaaa

SEQ ID NO: 1974629 - RNA, 19 nt, Homo sapiens
  misc_RNA (1)...(19): siRNA sense strand
gggagugaccauccuguug

SEQ ID NO: 1974630 - RNA, 19 nt, Homo sapiens
  misc_RNA (1)...(19): siRNA sense strand
auaacaaggcugaugauga

SEQ ID NO: 1974631 - RNA, 19 nt, Homo sapiens
  misc_RNA (1)...(19): siRNA sense strand
gaaaaugugccccugauag

SEQ ID NO: 1974632 - RNA, 19 nt, Homo sapiens
  misc_RNA (1)...(19): siRNA sense strand
aaagugcugacgaggaaua

SEQ ID NO: 1974633 - RNA, 19 nt, Homo sapiens
  misc_RNA (1)...(19): siRNA sense strand
cucaggaggccgagaguua

SEQ ID NO: 1974634 - RNA, 19 nt, Homo sapiens
  misc_RNA (1)...(19): siRNA sense strand
gcagagacggcagauggaa

SEQ ID NO: 1974635 - RNA, 19 nt, Homo sapiens
  misc_RNA (1)...(19): siRNA sense strand
ccacugcguugaccaucau

SEQ ID NO: 1974636 - RNA, 19 nt, Homo sapiens
  misc_RNA (1)...(19): siRNA sense strand
gcuccugugugguggaugu

SEQ ID NO: 1974637 - RNA, 19 nt, Homo sapiens
  misc_RNA (1)...(19): siRNA sense strand
auagaccgauucuucaugu

SEQ ID NO: 1974638 - RNA, 19 nt, Homo sapiens
  misc_RNA (1)...(19): siRNA sense strand
gacgaggaauauugaguac

SEQ ID NO: 1974639 - RNA, 19 nt, Homo sapiens
  misc_RNA (1)...(19): siRNA sense strand
gacggcagauggaaaauau

SEQ ID NO: 1974640 - RNA, 19 nt, Homo sapiens
  misc_RNA (1)...(19): siRNA sense strand
ggaccuacaauggcaauca

SEQ ID NO: 1974641 - RNA, 19 nt, Homo sapiens
  misc_RNA (1)...(19): siRNA sense strand
agauuaaggauauggauga

SEQ ID NO: 1974642 - RNA, 19 nt, Homo sapiens
  misc_RNA (1)...(19): siRNA sense strand
aaagaaggacaugaacaaa

SEQ ID NO: 1974643 - RNA, 19 nt, Homo sapiens
  misc_RNA (1)...(19): siRNA sense strand
ugaugaauauccacuucug

SEQ ID NO: 1974644 - RNA, 19 nt, Homo sapiens
  misc_RNA (1)...(19): siRNA sense strand
gcuaaugguggcagaaauc

SEQ ID NO: 1974645 - RNA, 19 nt, Homo sapiens
  misc_RNA (1)...(19): siRNA sense strand
ccagcagccuccggagaaa

SEQ ID NO: 1974646 - RNA, 19 nt, Homo sapiens
  misc_RNA (1)...(19): siRNA sense strand
gaagaaugugaucuccuau

SEQ ID NO: 1974647 - RNA, 19 nt, Homo sapiens
  misc_RNA (1)...(19): siRNA sense strand
gacuguauuucagcuaaug

SEQ ID NO: 1974648 - RNA, 19 nt, Homo sapiens
  misc_RNA (1)...(19): siRNA sense strand
acagauaaaguccugaaug

SEQ ID NO: 1974649 - RNA, 19 nt, Homo sapiens
  misc_RNA (1)...(19): siRNA sense strand
aauucugacugcuuauuug

SEQ ID NO: 1974650 - RNA, 19 nt, Homo sapiens
  misc_RNA (1)...(19): siRNA sense strand
aaaauaugcucagaaguug

SEQ ID NO: 1974651 - RNA, 19 nt, Homo sapiens
  misc_RNA (1)...(19): siRNA sense strand
ccaguggaagauacagaua

SEQ ID NO: 1974652 - RNA, 19 nt, Homo sapiens
  misc_RNA (1)...(19): siRNA sense strand
caucccaugcguccucaua

SEQ ID NO: 1974653 - RNA, 19 nt, Homo sapiens
  misc_RNA (1)...(19): siRNA sense strand
ucaguacgauggccuagac

SEQ ID NO: 1974654 - RNA, 19 nt, Homo sapiens
  misc_RNA (1)...(19): siRNA sense strand
uugaguacaucgccaagug

SEQ ID NO: 1974655 - RNA, 19 nt, Homo sapiens
  misc_RNA (1)...(19): siRNA sense strand
caguggaagauacagauaa

SEQ ID NO: 1974656 - RNA, 19 nt, Homo sapiens
  misc_RNA (1)...(19): siRNA sense strand
gggucuuguuugucuauga

SEQ ID NO: 1974657 - RNA, 19 nt, Homo sapiens
  misc_RNA (1)...(19): siRNA sense strand
ucauagcaagagcggauua

SEQ ID NO: 1974658 - RNA, 19 nt, Homo sapiens
  misc_RNA (1)...(19): siRNA sense strand
gaagaagguggcgaaaguc

SEQ ID NO: 1974659 - RNA, 19 nt, Homo sapiens
  misc_RNA (1)...(19): siRNA sense strand
cagagccugugaacaccaa

SEQ ID NO: 1974660 - RNA, 19 nt, Homo sapiens
  misc_RNA (1)...(19): siRNA sense strand
ggagugaauggaagaaggu

SEQ ID NO: 1974661 - RNA, 19 nt, Homo sapiens
  misc_RNA (1)...(19): siRNA sense strand
gaccuacaauggcaaucag

SEQ ID NO: 1974662 - RNA, 19 nt, Homo sapiens
  misc_RNA (1)...(19): siRNA sense strand
ugacuguauuucagcuaau

SEQ ID NO: 1974663 - RNA, 19 nt, Homo sapiens
  misc_RNA (1)...(19): siRNA sense strand
gaccacaaggccaccaguu

SEQ ID NO: 1974664 - RNA, 19 nt, Homo sapiens
  misc_RNA (1)...(19): siRNA sense strand
uguccagggucuuguuugu

SEQ ID NO: 1974665 - RNA, 19 nt, Homo sapiens
  misc_RNA (1)...(19): siRNA sense strand
gcaugcccgcugugaagaa

SEQ ID NO: 1974666 - RNA, 19 nt, Homo sapiens
  misc_RNA (1)...(19): siRNA sense strand
gaggaauauugaguacauc

SEQ ID NO: 1974667 - RNA, 19 nt, Homo sapiens
  misc_RNA (1)...(19): siRNA sense strand
uggaagauacagauaaagu

SEQ ID NO: 1974668 - RNA, 19 nt, Homo sapiens
  misc_RNA (1)...(19): siRNA sense strand
ccaccucacgaaaguuuau

SEQ ID NO: 1974669 - RNA, 19 nt, Homo sapiens
  misc_RNA (1)...(19): siRNA sense strand
acauucacccuccuucuga

SEQ ID NO: 1974670 - RNA, 19 nt, Homo sapiens
  misc_RNA (1)...(19): siRNA sense strand
guguuugugaugacuauuu

SEQ ID NO: 1974671 - RNA, 19 nt, Homo sapiens
  misc_RNA (1)...(19): siRNA sense strand
ggaaggagauugcugacua

SEQ ID NO: 1974672 - RNA, 19 nt, Homo sapiens
  misc_RNA (1)...(19): siRNA sense strand
caaauacgccuuucucaua

SEQ ID NO: 1974673 - RNA, 19 nt, Homo sapiens
  misc_RNA (1)...(19): siRNA sense strand
gcugagcgcuuaagaguga

SEQ ID NO: 1974674 - RNA, 19 nt, Homo sapiens
  misc_RNA (1)...(19): siRNA sense strand
uaucaggccuuucccaaua

SEQ ID NO: 1974675 - RNA, 19 nt, Homo sapiens
  misc_RNA (1)...(19): siRNA sense strand
agacagaucuuauugaugu

SEQ ID NO: 1974676 - RNA, 19 nt, Homo sapiens
  misc_RNA (1)...(19): siRNA sense strand
gaaaggaggcccuggaaga

SEQ ID NO: 1974677 - RNA, 19 nt, Homo sapiens
  misc_RNA (1)...(19): siRNA sense strand
caaggaauauggcaagcua

SEQ ID NO: 1974678 - RNA, 19 nt, Homo sapiens
  misc_RNA (1)...(19): siRNA sense strand
agagauaccugauugaaau

SEQ ID NO: 1974679 - RNA, 19 nt, Homo sapiens
  misc_RNA (1)...(19): siRNA sense strand
gaaggagauugcugacuau

SEQ ID NO: 1974680 - RNA, 19 nt, Homo sapiens
  misc_RNA (1)...(19): siRNA sense strand
gaauauggcaagcuaugua

SEQ ID NO: 1974681 - RNA, 19 nt, Homo sapiens
  misc_RNA (1)...(19): siRNA sense strand
gauguuggauucacagaug

SEQ ID NO: 1974682 - RNA, 19 nt, Homo sapiens
  misc_RNA (1)...(19): siRNA sense strand
gaaucugugucuacauuga

SEQ ID NO: 1974683 - RNA, 19 nt, Homo sapiens
  misc_RNA (1)...(19): siRNA sense strand
gcugggcucuggauuuaaa

SEQ ID NO: 1974684 - RNA, 19 nt, Homo sapiens
  misc_RNA (1)...(19): siRNA sense strand
caaagggaccaucagauuu

SEQ ID NO: 1974685 - RNA, 19 nt, Homo sapiens
  misc_RNA (1)...(19): siRNA sense strand
ccaaguauagcaaggaaua

SEQ ID NO: 1974686 - RNA, 19 nt, Homo sapiens
  misc_RNA (1)...(19): siRNA sense strand
ccaaagggaccaucagauu

SEQ ID NO: 1974687 - RNA, 19 nt, Homo sapiens
  misc_RNA (1)...(19): siRNA sense strand
agaaguggcugaguugaaa

SEQ ID NO: 1974688 - RNA, 19 nt, Homo sapiens
  misc_RNA (1)...(19): siRNA sense strand
agucauaaaucgccuuaaa

SEQ ID NO: 1974689 - RNA, 19 nt, Homo sapiens
  misc_RNA (1)...(19): siRNA sense strand
cugaagacauugacuuuga

SEQ ID NO: 1974690 - RNA, 19 nt, Homo sapiens
  misc_RNA (1)...(19): siRNA sense strand
guggagagauaccugauug

SEQ ID NO: 1974691 - RNA, 19 nt, Homo sapiens
  misc_RNA (1)...(19): siRNA sense strand
gcagauaacuaugacaacu

SEQ ID NO: 1974692 - RNA, 19 nt, Homo sapiens
  misc_RNA (1)...(19): siRNA sense strand
gagagauaccugauugaaa

SEQ ID NO: 1974693 - RNA, 19 nt, Homo sapiens
  misc_RNA (1)...(19): siRNA sense strand
aaauacgccuuucucauau

SEQ ID NO: 1974694 - RNA, 19 nt, Homo sapiens
  misc_RNA (1)...(19): siRNA sense strand
gaucagcucugugccaagu

SEQ ID NO: 1974695 - RNA, 19 nt, Homo sapiens
  misc_RNA (1)...(19): siRNA sense strand
guagagacagaucuuauug

SEQ ID NO: 1974696 - RNA, 19 nt, Homo sapiens
  misc_RNA (1)...(19): siRNA sense strand
ggagagauaccugauugaa

SEQ ID NO: 1974697 - RNA, 19 nt, Homo sapiens
  misc_RNA (1)...(19): siRNA sense strand
agagacagaucuuauugau

SEQ ID NO: 1974698 - RNA, 19 nt, Homo sapiens
  misc_RNA (1)...(19): siRNA sense strand
ggccuuauccagucuauga

SEQ ID NO: 1974699 - RNA, 19 nt, Homo sapiens
  misc_RNA (1)...(19): siRNA sense strand
gcaaauacgccuuucucau

SEQ ID NO: 1974700 - RNA, 19 nt, Homo sapiens
  misc_RNA (1)...(19): siRNA sense strand
cagaugaugugaagaaagg

SEQ ID NO: 1974701 - RNA, 19 nt, Homo sapiens
  misc_RNA (1)...(19): siRNA sense strand
ugcaaagaauuacaacgua

SEQ ID NO: 1974702 - RNA, 19 nt, Homo sapiens
  misc_RNA (1)...(19): siRNA sense strand
gaaaauaguugcugaucag

SEQ ID NO: 1974703 - RNA, 19 nt, Homo sapiens
  misc_RNA (1)...(19): siRNA sense strand
cugaaucugugucuacauu

SEQ ID NO: 1974704 - RNA, 19 nt, Homo sapiens
  misc_RNA (1)...(19): siRNA sense strand
gacauugacuuugaugauc

SEQ ID NO: 1974705 - RNA, 19 nt, Homo sapiens
  misc_RNA (1)...(19): siRNA sense strand
gguagagacagaucuuauu

SEQ ID NO: 1974706 - RNA, 19 nt, Homo sapiens
  misc_RNA (1)...(19): siRNA sense strand
gaauuacaacguacccuau

SEQ ID NO: 1974707 - RNA, 19 nt, Homo sapiens
  misc_RNA (1)...(19): siRNA sense strand
gccuuaaacuauuggagaa

SEQ ID NO: 1974708 - RNA, 19 nt, Homo sapiens
  misc_RNA (1)...(19): siRNA sense strand
ugacauuaaugcugauaag

SEQ ID NO: 1974709 - RNA, 19 nt, Homo sapiens
  misc_RNA (1)...(19): siRNA sense strand
cauaaaucgccuuaaacua

SEQ ID NO: 1974710 - RNA, 19 nt, Homo sapiens
  misc_RNA (1)...(19): siRNA sense strand
agagugaauuugagauuag

SEQ ID NO: 1974711 - RNA, 19 nt, Homo sapiens
  misc_RNA (1)...(19): siRNA sense strand
caacguacccuaugaaccu

SEQ ID NO: 1974712 - RNA, 19 nt, Homo sapiens
  misc_RNA (1)...(19): siRNA sense strand
gaccugcagauaacuauga

SEQ ID NO: 1974713 - RNA, 19 nt, Homo sapiens
  misc_RNA (1)...(19): siRNA sense strand
gaagacauugacuuugaug

SEQ ID NO: 1974714 - RNA, 19 nt, Homo sapiens
  misc_RNA (1)...(19): siRNA sense strand
uccuggagcuguacuguga

SEQ ID NO: 1974715 - RNA, 19 nt, Homo sapiens
  misc_RNA (1)...(19): siRNA sense strand
gaucuuucccggagguuug

SEQ ID NO: 1974716 - RNA, 19 nt, Homo sapiens
  misc_RNA (1)...(19): siRNA sense strand
ugaagacauugacuuugau

SEQ ID NO: 1974717 - RNA, 19 nt, Homo sapiens
  misc_RNA (1)...(19): siRNA sense strand
aaagggaccaucagauuuc

SEQ ID NO: 1974718 - RNA, 19 nt, Homo sapiens
  misc_RNA (1)...(19): siRNA sense strand
gaaagcaaggaaggagauu

SEQ ID NO: 1974719 - RNA, 19 nt, Homo sapiens
  misc_RNA (1)...(19): siRNA sense strand
cccaugccaucugcaaaua

SEQ ID NO: 1974720 - RNA, 19 nt, Homo sapiens
  misc_RNA (1)...(19): siRNA sense strand
ccuaugaaccugacucugu

SEQ ID NO: 1974721 - RNA, 19 nt, Homo sapiens
  misc_RNA (1)...(19): siRNA sense strand
gagauaccugauugaaauu

SEQ ID NO: 1974722 - RNA, 19 nt, Homo sapiens
  misc_RNA (1)...(19): siRNA sense strand
cuaucuggcugcugggaaa

SEQ ID NO: 1974723 - RNA, 19 nt, Homo sapiens
  misc_RNA (1)...(19): siRNA sense strand
ggacuuaucaggccuuucc

SEQ ID NO: 1974724 - RNA, 19 nt, Homo sapiens
  misc_RNA (1)...(19): siRNA sense strand
ucucauauccacugccaaa

SEQ ID NO: 1974725 - RNA, 19 nt, Homo sapiens
  misc_RNA (1)...(19): siRNA sense strand
ucagcucugugccaaguau

SEQ ID NO: 1974726 - RNA, 19 nt, Homo sapiens
  misc_RNA (1)...(19): siRNA sense strand
gcuuaagagugaauuugag

SEQ ID NO: 1974727 - RNA, 19 nt, Homo sapiens
  misc_RNA (1)...(19): siRNA sense strand
ggguagagacagaucuuau

SEQ ID NO: 1974728 - RNA, 19 nt, Homo sapiens
  misc_RNA (1)...(19): siRNA sense strand
cagaaguggcugaguugaa

SEQ ID NO: 1974729 - RNA, 19 nt, Homo sapiens
  misc_RNA (1)...(19): siRNA sense strand
ggaauauggcaagcuaugu

SEQ ID NO: 1974730 - RNA, 19 nt, Homo sapiens
  misc_RNA (1)...(19): siRNA sense strand
uggagauccuggagcugua

SEQ ID NO: 1974731 - RNA, 19 nt, Homo sapiens
  misc_RNA (1)...(19): siRNA sense strand
gcgcuuaagagugaauuug

SEQ ID NO: 1974732 - RNA, 19 nt, Homo sapiens
  misc_RNA (1)...(19): siRNA sense strand
ucaggccuuucccaauauu

SEQ ID NO: 1974733 - RNA, 19 nt, Homo sapiens
  misc_RNA (1)...(19): siRNA sense strand
aaauccugguggagagaua

SEQ ID NO: 1974734 - RNA, 19 nt, Homo sapiens
  misc_RNA (1)...(19): siRNA sense strand
gauuggaacugugaaugac

SEQ ID NO: 1974735 - RNA, 19 nt, Homo sapiens
  misc_RNA (1)...(19): siRNA sense strand
ucauaaaucgccuuaaacu

SEQ ID NO: 1974736 - RNA, 19 nt, Homo sapiens
  misc_RNA (1)...(19): siRNA sense strand
gagacagaucuuauugaug

SEQ ID NO: 1974737 - RNA, 19 nt, Homo sapiens
  misc_RNA (1)...(19): siRNA sense strand
gagugaauuugagauuagu

SEQ ID NO: 1974738 - RNA, 19 nt, Homo sapiens
  misc_RNA (1)...(19): siRNA sense strand
caucugcaaauacgccuuu

SEQ ID NO: 1974739 - RNA, 19 nt, Homo sapiens
  misc_RNA (1)...(19): siRNA sense strand
gacagaucuuauugauguu

SEQ ID NO: 1974740 - RNA, 19 nt, Homo sapiens
  misc_RNA (1)...(19): siRNA sense strand
gauaccugauugaaauugc

SEQ ID NO: 1974741 - RNA, 19 nt, Homo sapiens
  misc_RNA (1)...(19): siRNA sense strand
agacauugacuuugaugau

SEQ ID NO: 1974742 - RNA, 19 nt, Homo sapiens
  misc_RNA (1)...(19): siRNA sense strand
caucugaagacauugacuu

SEQ ID NO: 1974743 - RNA, 19 nt, Homo sapiens
  misc_RNA (1)...(19): siRNA sense strand
ccagacacacuaccaacug

SEQ ID NO: 1974744 - RNA, 19 nt, Homo sapiens
  misc_RNA (1)...(19): siRNA sense strand
cagauaacuaugacaacuu

SEQ ID NO: 1974745 - RNA, 19 nt, Homo sapiens
  misc_RNA (1)...(19): siRNA sense strand
ccagaccugcagauaacua

SEQ ID NO: 1974746 - RNA, 19 nt, Homo sapiens
  misc_RNA (1)...(19): siRNA sense strand
gacauuaaugcugauaaga

SEQ ID NO: 1974747 - RNA, 19 nt, Homo sapiens
  misc_RNA (1)...(19): siRNA sense strand
gcccaugccaucugcaaau

SEQ ID NO: 1974748 - RNA, 19 nt, Homo sapiens
  misc_RNA (1)...(19): siRNA sense strand
ucuuauugauguuggauuc

SEQ ID NO: 1974749 - RNA, 19 nt, Homo sapiens
  misc_RNA (1)...(19): siRNA sense strand
uagagacagaucuuauuga

SEQ ID NO: 1974750 - RNA, 19 nt, Homo sapiens
  misc_RNA (1)...(19): siRNA sense strand
aaaucgccuuaaacuauug

SEQ ID NO: 1974751 - RNA, 19 nt, Homo sapiens
  misc_RNA (1)...(19): siRNA sense strand
ugacuuugaugaucuuucc

SEQ ID NO: 1974752 - RNA, 19 nt, Homo sapiens
  misc_RNA (1)...(19): siRNA sense strand
cagcaucugaagacauuga

SEQ ID NO: 1974753 - RNA, 19 nt, Homo sapiens
  misc_RNA (1)...(19): siRNA sense strand
gaugacauuaaugcugaua

SEQ ID NO: 1974754 - RNA, 19 nt, Homo sapiens
  misc_RNA (1)...(19): siRNA sense strand
agauuggaacugugaauga

SEQ ID NO: 1974755 - RNA, 19 nt, Homo sapiens
  misc_RNA (1)...(19): siRNA sense strand
gggaccaucagauuucaau

SEQ ID NO: 1974756 - RNA, 19 nt, Homo sapiens
  misc_RNA (1)...(19): siRNA sense strand
cccaucguaugaaucugua

SEQ ID NO: 1974757 - RNA, 19 nt, Homo sapiens
  misc_RNA (1)...(19): siRNA sense strand
auuacaacguacccuauga

SEQ ID NO: 1974758 - RNA, 19 nt, Homo sapiens
  misc_RNA (1)...(19): siRNA sense strand
uuacaacguacccuaugaa

SEQ ID NO: 1974759 - RNA, 19 nt, Homo sapiens
  misc_RNA (1)...(19): siRNA sense strand
ugaaaauaguugcugauca

SEQ ID NO: 1974760 - RNA, 19 nt, Homo sapiens
  misc_RNA (1)...(19): siRNA sense strand
acauugacuuugaugaucu

SEQ ID NO: 1974761 - RNA, 19 nt, Homo sapiens
  misc_RNA (1)...(19): siRNA sense strand
uauccagucuaugaaggaa

SEQ ID NO: 1974762 - RNA, 19 nt, Homo sapiens
  misc_RNA (1)...(19): siRNA sense strand
cuuccagaccugcagauaa

SEQ ID NO: 1974763 - RNA, 19 nt, Homo sapiens
  misc_RNA (1)...(19): siRNA sense strand
gguggagagauaccugauu

SEQ ID NO: 1974764 - RNA, 19 nt, Homo sapiens
  misc_RNA (1)...(19): siRNA sense strand
gugaaugacaggcuaaugc

SEQ ID NO: 1974765 - RNA, 19 nt, Homo sapiens
  misc_RNA (1)...(19): siRNA sense strand
ugccaaguauagcaaggaa

SEQ ID NO: 1974766 - RNA, 19 nt, Homo sapiens
  misc_RNA (1)...(19): siRNA sense strand
uguaggaccaaccagauug

SEQ ID NO: 1974767 - RNA, 19 nt, Homo sapiens
  misc_RNA (1)...(19): siRNA sense strand
uuccagaccugcagauaac

SEQ ID NO: 1974768 - RNA, 19 nt, Homo sapiens
  misc_RNA (1)...(19): siRNA sense strand
aagaaaggaggcccuggaa

SEQ ID NO: 1974769 - RNA, 19 nt, Homo sapiens
  misc_RNA (1)...(19): siRNA sense strand
gauggaacggugccaaugc

SEQ ID NO: 1974770 - RNA, 19 nt, Homo sapiens
  misc_RNA (1)...(19): siRNA sense strand
cauugacuuugaugaucuu

SEQ ID NO: 1974771 - RNA, 19 nt, Homo sapiens
  misc_RNA (1)...(19): siRNA sense strand
gaggugcugaugaugauua

SEQ ID NO: 1974772 - RNA, 19 nt, Homo sapiens
  misc_RNA (1)...(19): siRNA sense strand
cgaaguggccgagguaauu

SEQ ID NO: 1974773 - RNA, 19 nt, Homo sapiens
  misc_RNA (1)...(19): siRNA sense strand
gaagaucgaggaagacagu

SEQ ID NO: 1974774 - RNA, 19 nt, Homo sapiens
  misc_RNA (1)...(19): siRNA sense strand
aagggaagaucgaggaaga

SEQ ID NO: 1974775 - RNA, 19 nt, Homo sapiens
  misc_RNA (1)...(19): siRNA sense strand
gaaagggaagaucgaggaa

SEQ ID NO: 1974776 - RNA, 19 nt, Homo sapiens
  misc_RNA (1)...(19): siRNA sense strand
acagugaggugcugaugau

SEQ ID NO: 1974777 - RNA, 19 nt, Homo sapiens
  misc_RNA (1)...(19): siRNA sense strand
aaccucaucccucagauua

SEQ ID NO: 1974778 - RNA, 19 nt, Homo sapiens
  misc_RNA (1)...(19): siRNA sense strand
gaaguggccgagguaauug

SEQ ID NO: 1974779 - RNA, 19 nt, Homo sapiens
  misc_RNA (1)...(19): siRNA sense strand
acgagaaggucgccaagga

SEQ ID NO: 1974780 - RNA, 19 nt, Homo sapiens
  misc_RNA (1)...(19): siRNA sense strand
gugaggugcugaugaugau

SEQ ID NO: 1974781 - RNA, 19 nt, Homo sapiens
  misc_RNA (1)...(19): siRNA sense strand
ggucccagcuuugacagau

SEQ ID NO: 1974782 - RNA, 19 nt, Homo sapiens
  misc_RNA (1)...(19): siRNA sense strand
ucccagcuuugacagauuu

SEQ ID NO: 1974783 - RNA, 19 nt, Homo sapiens
  misc_RNA (1)...(19): siRNA sense strand
gaaggucgccaaggagauc

SEQ ID NO: 1974784 - RNA, 19 nt, Homo sapiens
  misc_RNA (1)...(19): siRNA sense strand
ccucaucccucagauuaca

SEQ ID NO: 1974785 - RNA, 19 nt, Homo sapiens
  misc_RNA (1)...(19): siRNA sense strand
cugcagccuuuguuacuug

SEQ ID NO: 1974786 - RNA, 19 nt, Homo sapiens
  misc_RNA (1)...(19): siRNA sense strand
guuccuuggucccagcuuu

SEQ ID NO: 1974787 - RNA, 19 nt, Homo sapiens
  misc_RNA (1)...(19): siRNA sense strand
caaccucaucccucagauu

SEQ ID NO: 1974788 - RNA, 19 nt, Homo sapiens
  misc_RNA (1)...(19): siRNA sense strand
uggccgagguaauugcauu

SEQ ID NO: 1974789 - RNA, 19 nt, Homo sapiens
  misc_RNA (1)...(19): siRNA sense strand
gacagugaggugcugauga

SEQ ID NO: 1974790 - RNA, 19 nt, Homo sapiens
  misc_RNA (1)...(19): siRNA sense strand
uuacgaaguggccgaggua

SEQ ID NO: 1974791 - RNA, 19 nt, Homo sapiens
  misc_RNA (1)...(19): siRNA sense strand
gauuacauccaucuaugag

SEQ ID NO: 1974792 - RNA, 19 nt, Homo sapiens
  misc_RNA (1)...(19): siRNA sense strand
uaucacaguccugccauga

SEQ ID NO: 1974793 - RNA, 19 nt, Homo sapiens
  misc_RNA (1)...(19): siRNA sense strand
cucggucucugcagccuuu

SEQ ID NO: 1974794 - RNA, 19 nt, Homo sapiens
  misc_RNA (1)...(19): siRNA sense strand
ugugcacccuuacgaagug

SEQ ID NO: 1974795 - RNA, 19 nt, Homo sapiens
  misc_RNA (1)...(19): siRNA sense strand
gggaagaucgaggaagaca

SEQ ID NO: 1974796 - RNA, 19 nt, Homo sapiens
  misc_RNA (1)...(19): siRNA sense strand
uucguucugugcacccuua

SEQ ID NO: 1974797 - RNA, 19 nt, Homo sapiens
  misc_RNA (1)...(19): siRNA sense strand
ggcacaagaugcacaauua

SEQ ID NO: 1974798 - RNA, 19 nt, Homo sapiens
  misc_RNA (1)...(19): siRNA sense strand
gaccugcucugcaagaaua

SEQ ID NO: 1974799 - RNA, 19 nt, Homo sapiens
  misc_RNA (1)...(19): siRNA sense strand
uggcaaagauucauacuau

SEQ ID NO: 1974800 - RNA, 19 nt, Homo sapiens
  misc_RNA (1)...(19): siRNA sense strand
gaaauggcaaagauucaua

SEQ ID NO: 1974801 - RNA, 19 nt, Homo sapiens
  misc_RNA (1)...(19): siRNA sense strand
ugaaugagguggauuacug

SEQ ID NO: 1974802 - RNA, 19 nt, Homo sapiens
  misc_RNA (1)...(19): siRNA sense strand
agaaugggcugugcuauga

SEQ ID NO: 1974803 - RNA, 19 nt, Homo sapiens
  misc_RNA (1)...(19): siRNA sense strand
guuaaucgccuuagaaaug

SEQ ID NO: 1974804 - RNA, 19 nt, Homo sapiens
  misc_RNA (1)...(19): siRNA sense strand
acaaugaccugcucugcaa

SEQ ID NO: 1974805 - RNA, 19 nt, Homo sapiens
  misc_RNA (1)...(19): siRNA sense strand
agaaugaggucagaaacuu

SEQ ID NO: 1974806 - RNA, 19 nt, Homo sapiens
  misc_RNA (1)...(19): siRNA sense strand
gcacaagaugcacaauuau

SEQ ID NO: 1974807 - RNA, 19 nt, Homo sapiens
  misc_RNA (1)...(19): siRNA sense strand
cuaccaagcuuuugacauu

SEQ ID NO: 1974808 - RNA, 19 nt, Homo sapiens
  misc_RNA (1)...(19): siRNA sense strand
guacuccaccaucgacuuu

SEQ ID NO: 1974809 - RNA, 19 nt, Homo sapiens
  misc_RNA (1)...(19): siRNA sense strand
caagaugcacaauuauuuc

SEQ ID NO: 1974810 - RNA, 19 nt, Homo sapiens
  misc_RNA (1)...(19): siRNA sense strand
ccaggcgucucacuucuuc

SEQ ID NO: 1974811 - RNA, 19 nt, Homo sapiens
  misc_RNA (1)...(19): siRNA sense strand
ugaauaugcuggcuacaac

SEQ ID NO: 1974812 - RNA, 19 nt, Homo sapiens
  misc_RNA (1)...(19): siRNA sense strand
gggagaaugaggucagaaa

SEQ ID NO: 1974813 - RNA, 19 nt, Homo sapiens
  misc_RNA (1)...(19): siRNA sense strand
gguccuagcugugugucuu

SEQ ID NO: 1974814 - RNA, 19 nt, Homo sapiens
  misc_RNA (1)...(19): siRNA sense strand
gcaaaggcucuacgugcaa

SEQ ID NO: 1974815 - RNA, 19 nt, Homo sapiens
  misc_RNA (1)...(19): siRNA sense strand
gcgugaaugagguggauua

SEQ ID NO: 1974816 - RNA, 19 nt, Homo sapiens
  misc_RNA (1)...(19): siRNA sense strand
ccuuagaaauggcaaagau

SEQ ID NO: 1974817 - RNA, 19 nt, Homo sapiens
  misc_RNA (1)...(19): siRNA sense strand
cacaagaugcacaauuauu

SEQ ID NO: 1974818 - RNA, 19 nt, Homo sapiens
  misc_RNA (1)...(19): siRNA sense strand
gcaaagauucauacuaucc

SEQ ID NO: 1974819 - RNA, 19 nt, Homo sapiens
  misc_RNA (1)...(19): siRNA sense strand
cugcaagaauaucaucuau

SEQ ID NO: 1974820 - RNA, 19 nt, Homo sapiens
  misc_RNA (1)...(19): siRNA sense strand
gaaugaggucagaaacuuc

SEQ ID NO: 1974821 - RNA, 19 nt, Homo sapiens
  misc_RNA (1)...(19): siRNA sense strand
cagaaugggcugugcuaug

SEQ ID NO: 1974822 - RNA, 19 nt, Homo sapiens
  misc_RNA (1)...(19): siRNA sense strand
gacauuggcaaccauuuca

SEQ ID NO: 1974823 - RNA, 19 nt, Homo sapiens
  misc_RNA (1)...(19): siRNA sense strand
ggcaaagauucauacuauc

SEQ ID NO: 1974824 - RNA, 19 nt, Homo sapiens
  misc_RNA (1)...(19): siRNA sense strand
cuacugcaccuuccagaau

SEQ ID NO: 1974825 - RNA, 19 nt, Homo sapiens
  misc_RNA (1)...(19): siRNA sense strand
ggucacgugcgguucauug

SEQ ID NO: 1974826 - RNA, 19 nt, Homo sapiens
  misc_RNA (1)...(19): siRNA sense strand
gagaaugaggucagaaacu

SEQ ID NO: 1974827 - RNA, 19 nt, Homo sapiens
  misc_RNA (1)...(19): siRNA sense strand
cugcagaugucccuaaggu

SEQ ID NO: 1974828 - RNA, 19 nt, Homo sapiens
  misc_RNA (1)...(19): siRNA sense strand
ucagguuaaucgccuuaga

SEQ ID NO: 1974829 - RNA, 19 nt, Homo sapiens
  misc_RNA (1)...(19): siRNA sense strand
gcugugcuaugaguacaug

SEQ ID NO: 1974830 - RNA, 19 nt, Homo sapiens
  misc_RNA (1)...(19): siRNA sense strand
uaagguagagguguuggaa

SEQ ID NO: 1974831 - RNA, 19 nt, Homo sapiens
  misc_RNA (1)...(19): siRNA sense strand
cagguuaaucgccuuagaa

SEQ ID NO: 1974832 - RNA, 19 nt, Homo sapiens
  misc_RNA (1)...(19): siRNA sense strand
gcugguggccugcuaugug

SEQ ID NO: 1974833 - RNA, 19 nt, Homo sapiens
  misc_RNA (1)...(19): siRNA sense strand
uuagaaauggcaaagauuc

SEQ ID NO: 1974834 - RNA, 19 nt, Homo sapiens
  misc_RNA (1)...(19): siRNA sense strand
uuaaucgccuuagaaaugg

SEQ ID NO: 1974835 - RNA, 19 nt, Homo sapiens
  misc_RNA (1)...(19): siRNA sense strand
acaagcugguggccugcua

SEQ ID NO: 1974836 - RNA, 19 nt, Homo sapiens
  misc_RNA (1)...(19): siRNA sense strand
gagaucaaccccagccuuu

SEQ ID NO: 1974837 - RNA, 19 nt, Homo sapiens
  misc_RNA (1)...(19): siRNA sense strand
ugacauuggcaaccauuuc

SEQ ID NO: 1974838 - RNA, 19 nt, Homo sapiens
  misc_RNA (1)...(19): siRNA sense strand
ggcuacaacuaccaagcuu

SEQ ID NO: 1974839 - RNA, 19 nt, Homo sapiens
  misc_RNA (1)...(19): siRNA sense strand
caucuaugacagcaucaaa

SEQ ID NO: 1974840 - RNA, 19 nt, Homo sapiens
  misc_RNA (1)...(19): siRNA sense strand
ggaguccccugugguguuu

SEQ ID NO: 1974841 - RNA, 19 nt, Homo sapiens
  misc_RNA (1)...(19): siRNA sense strand
gcuacaacuaccaagcuuu

SEQ ID NO: 1974842 - RNA, 19 nt, Homo sapiens
  misc_RNA (1)...(19): siRNA sense strand
gugcaagucaacaaguuug

SEQ ID NO: 1974843 - RNA, 19 nt, Homo sapiens
  misc_RNA (1)...(19): siRNA sense strand
ggacccggacgacauccuu

SEQ ID NO: 1974844 - RNA, 19 nt, Homo sapiens
  misc_RNA (1)...(19): siRNA sense strand
cccauccucuggcacaaga

SEQ ID NO: 1974845 - RNA, 19 nt, Homo sapiens
  misc_RNA (1)...(19): siRNA sense strand
ggagaaugaggucagaaac

SEQ ID NO: 1974846 - RNA, 19 nt, Homo sapiens
  misc_RNA (1)...(19): siRNA sense strand
ucccuaagguagagguguu

SEQ ID NO: 1974847 - RNA, 19 nt, Homo sapiens
  misc_RNA (1)...(19): siRNA sense strand
uagaaauggcaaagauuca

SEQ ID NO: 1974848 - RNA, 19 nt, Homo sapiens
  misc_RNA (1)...(19): siRNA sense strand
acuccaccaucgacuuuga

SEQ ID NO: 1974849 - RNA, 19 nt, Homo sapiens
  misc_RNA (1)...(19): siRNA sense strand
aauaugcuggcuacaacua

SEQ ID NO: 1974850 - RNA, 19 nt, Homo sapiens
  misc_RNA (1)...(19): siRNA sense strand
uacugcaccuuccagaaug

SEQ ID NO: 1974851 - RNA, 19 nt, Homo sapiens
  misc_RNA (1)...(19): siRNA sense strand
caaagauucauacuaucca

SEQ ID NO: 1974852 - RNA, 19 nt, Homo sapiens
  misc_RNA (1)...(19): siRNA sense strand
aaacaggcauggggagauu

SEQ ID NO: 1974853 - RNA, 19 nt, Homo sapiens
  misc_RNA (1)...(19): siRNA sense strand
uggcacaagaugcacaauu

SEQ ID NO: 1974854 - RNA, 19 nt, Homo sapiens
  misc_RNA (1)...(19): siRNA sense strand
cagaugucccuaagguaga

SEQ ID NO: 1974855 - RNA, 19 nt, Homo sapiens
  misc_RNA (1)...(19): siRNA sense strand
gaagacagcccuggaaaug

SEQ ID NO: 1974856 - RNA, 19 nt, Homo sapiens
  misc_RNA (1)...(19): siRNA sense strand
gaaauucucuacguuacau

SEQ ID NO: 1974857 - RNA, 19 nt, Homo sapiens
  misc_RNA (1)...(19): siRNA sense strand
gaccauacccuaggaaauu

SEQ ID NO: 1974858 - RNA, 19 nt, Homo sapiens
  misc_RNA (1)...(19): siRNA sense strand
gaagaacccggaaguggaa

SEQ ID NO: 1974859 - RNA, 19 nt, Homo sapiens
  misc_RNA (1)...(19): siRNA sense strand
ggaagaccauacccuagga

SEQ ID NO: 1974860 - RNA, 19 nt, Homo sapiens
  misc_RNA (1)...(19): siRNA sense strand
gcauaaaggacuauaagga

SEQ ID NO: 1974861 - RNA, 19 nt, Homo sapiens
  misc_RNA (1)...(19): siRNA sense strand
uaggaaauucucuacguua

SEQ ID NO: 1974862 - RNA, 19 nt, Homo sapiens
  misc_RNA (1)...(19): siRNA sense strand
gaaguggaauuuugugguu

SEQ ID NO: 1974863 - RNA, 19 nt, Homo sapiens
  misc_RNA (1)...(19): siRNA sense strand
ggaagacagcccuggaaau

SEQ ID NO: 1974864 - RNA, 19 nt, Homo sapiens
  misc_RNA (1)...(19): siRNA sense strand
gccaacaugugcuugacaa

SEQ ID NO: 1974865 - RNA, 19 nt, Homo sapiens
  misc_RNA (1)...(19): siRNA sense strand
gaacccggaaguggaauuu

SEQ ID NO: 1974866 - RNA, 19 nt, Homo sapiens
  misc_RNA (1)...(19): siRNA sense strand
cuaggaaauucucuacguu

SEQ ID NO: 1974867 - RNA, 19 nt, Homo sapiens
  misc_RNA (1)...(19): siRNA sense strand
cauaaaggacuauaaggau

SEQ ID NO: 1974868 - RNA, 19 nt, Homo sapiens
  misc_RNA (1)...(19): siRNA sense strand
agacagcccuggaaauggu

SEQ ID NO: 1974869 - RNA, 19 nt, Homo sapiens
  misc_RNA (1)...(19): siRNA sense strand
aucaggagcuggagagaaa

SEQ ID NO: 1974870 - RNA, 19 nt, Homo sapiens
  misc_RNA (1)...(19): siRNA sense strand
aaagcaagcagaaaugaau

SEQ ID NO: 1974871 - RNA, 19 nt, Homo sapiens
  misc_RNA (1)...(19): siRNA sense strand
gaggaagacagcccuggaa

SEQ ID NO: 1974872 - RNA, 19 nt, Homo sapiens
  misc_RNA (1)...(19): siRNA sense strand
uaaaggacuauaaggauca

SEQ ID NO: 1974873 - RNA, 19 nt, Homo sapiens
  misc_RNA (1)...(19): siRNA sense strand
caaguuugaggccagcaua

SEQ ID NO: 1974874 - RNA, 19 nt, Homo sapiens
  misc_RNA (1)...(19): siRNA sense strand
ggaaauucucuacguuaca

SEQ ID NO: 1974875 - RNA, 19 nt, Homo sapiens
  misc_RNA (1)...(19): siRNA sense strand
ccuaggaaauucucuacgu

SEQ ID NO: 1974876 - RNA, 19 nt, Homo sapiens
  misc_RNA (1)...(19): siRNA sense strand
gaucaggagcuggagagaa

SEQ ID NO: 1974877 - RNA, 19 nt, Homo sapiens
  misc_RNA (1)...(19): siRNA sense strand
gaagaccauacccuaggaa

SEQ ID NO: 1974878 - RNA, 19 nt, Homo sapiens
  misc_RNA (1)...(19): siRNA sense strand
cagcauaaaggacuauaag

SEQ ID NO: 1974879 - RNA, 19 nt, Homo sapiens
  misc_RNA (1)...(19): siRNA sense strand
gcugaaggcgagaggaaga

SEQ ID NO: 1974880 - RNA, 19 nt, Homo sapiens
  misc_RNA (1)...(19): siRNA sense strand
gcuguugagccauuucaga

SEQ ID NO: 1974881 - RNA, 19 nt, Homo sapiens
  misc_RNA (1)...(19): siRNA sense strand
ucucuacguuacaugauca

SEQ ID NO: 1974882 - RNA, 19 nt, Homo sapiens
  misc_RNA (1)...(19): siRNA sense strand
cuacgacccauccuucaga

SEQ ID NO: 1974883 - RNA, 19 nt, Homo sapiens
  misc_RNA (1)...(19): siRNA sense strand
ccagcauaaaggacuauaa

SEQ ID NO: 1974884 - RNA, 19 nt, Homo sapiens
  misc_RNA (1)...(19): siRNA sense strand
gaagaccucaauggcugaa

SEQ ID NO: 1974885 - RNA, 19 nt, Homo sapiens
  misc_RNA (1)...(19): siRNA sense strand
ucaugaaugucugccaaca

SEQ ID NO: 1974886 - RNA, 19 nt, Homo sapiens
  misc_RNA (1)...(19): siRNA sense strand
aggaaauucucuacguuac

SEQ ID NO: 1974887 - RNA, 19 nt, Homo sapiens
  misc_RNA (1)...(19): siRNA sense strand
aaaggacuauaaggaucaa

SEQ ID NO: 1974888 - RNA, 19 nt, Homo sapiens
  misc_RNA (1)...(19): siRNA sense strand
caucacaccauauuuauug

SEQ ID NO: 1974889 - RNA, 19 nt, Homo sapiens
  misc_RNA (1)...(19): siRNA sense strand
gcacaguccuugccuucug

SEQ ID NO: 1974890 - RNA, 19 nt, Homo sapiens
  misc_RNA (1)...(19): siRNA sense strand
ggaaggauaggucagaaau

SEQ ID NO: 1974891 - RNA, 19 nt, Homo sapiens
  misc_RNA (1)...(19): siRNA sense strand
ugaaucaucacaccauauu

SEQ ID NO: 1974892 - RNA, 19 nt, Homo sapiens
  misc_RNA (1)...(19): siRNA sense strand
ggacaccuacagcuugcua

SEQ ID NO: 1974893 - RNA, 19 nt, Homo sapiens
  misc_RNA (1)...(19): siRNA sense strand
gagcucaugguccagaauu

SEQ ID NO: 1974894 - RNA, 19 nt, Homo sapiens
  misc_RNA (1)...(19): siRNA sense strand
agguuucccugguuucaua

SEQ ID NO: 1974895 - RNA, 19 nt, Homo sapiens
  misc_RNA (1)...(19): siRNA sense strand
cauauuuauuggacaccua

SEQ ID NO: 1974896 - RNA, 19 nt, Homo sapiens
  misc_RNA (1)...(19): siRNA sense strand
gaaucaucacaccauauuu

SEQ ID NO: 1974897 - RNA, 19 nt, Homo sapiens
  misc_RNA (1)...(19): siRNA sense strand
ggucaaguucucuuugguu

SEQ ID NO: 1974898 - RNA, 19 nt, Homo sapiens
  misc_RNA (1)...(19): siRNA sense strand
gcucaugguccagaauuga

SEQ ID NO: 1974899 - RNA, 19 nt, Homo sapiens
  misc_RNA (1)...(19): siRNA sense strand
gaaggauaggucagaaauc

SEQ ID NO: 1974900 - RNA, 19 nt, Homo sapiens
  misc_RNA (1)...(19): siRNA sense strand
cucauuaccuccuggugaa

SEQ ID NO: 1974901 - RNA, 19 nt, Homo sapiens
  misc_RNA (1)...(19): siRNA sense strand
gacugagguuucccugguu

SEQ ID NO: 1974902 - RNA, 19 nt, Homo sapiens
  misc_RNA (1)...(19): siRNA sense strand
caggucaaguucucuuugg

SEQ ID NO: 1974903 - RNA, 19 nt, Homo sapiens
  misc_RNA (1)...(19): siRNA sense strand
gggagcucaugguccagaa

SEQ ID NO: 1974904 - RNA, 19 nt, Homo sapiens
  misc_RNA (1)...(19): siRNA sense strand
ucuaggagacugagguuuc

SEQ ID NO: 1974905 - RNA, 19 nt, Homo sapiens
  misc_RNA (1)...(19): siRNA sense strand
cugaggguauuuuacuuua

SEQ ID NO: 1974906 - RNA, 19 nt, Homo sapiens
  misc_RNA (1)...(19): siRNA sense strand
acugagguuucccugguuu

SEQ ID NO: 1974907 - RNA, 19 nt, Homo sapiens
  misc_RNA (1)...(19): siRNA sense strand
gguagcuguuucaggagau

SEQ ID NO: 1974908 - RNA, 19 nt, Homo sapiens
  misc_RNA (1)...(19): siRNA sense strand
ccaggucaaguucucuuug

SEQ ID NO: 1974909 - RNA, 19 nt, Homo sapiens
  misc_RNA (1)...(19): siRNA sense strand
guuccguccugagcucauu

SEQ ID NO: 1974910 - RNA, 19 nt, Homo sapiens
  misc_RNA (1)...(19): siRNA sense strand
gcaugaaggucccugauga

SEQ ID NO: 1974911 - RNA, 19 nt, Homo sapiens
  misc_RNA (1)...(19): siRNA sense strand
gcaggcagguucucugaaa

SEQ ID NO: 1974912 - RNA, 19 nt, Homo sapiens
  misc_RNA (1)...(19): siRNA sense strand
gaaaggagaugaaguugcu

SEQ ID NO: 1974913 - RNA, 19 nt, Homo sapiens
  misc_RNA (1)...(19): siRNA sense strand
ucaguuagauuccaucauu

SEQ ID NO: 1974914 - RNA, 19 nt, Homo sapiens
  misc_RNA (1)...(19): siRNA sense strand
gaacugaagaagaagauuu

SEQ ID NO: 1974915 - RNA, 19 nt, Homo sapiens
  misc_RNA (1)...(19): siRNA sense strand
cgagugaucuuaagcaguu

SEQ ID NO: 1974916 - RNA, 19 nt, Homo sapiens
  misc_RNA (1)...(19): siRNA sense strand
gagcagcugucacucauca

SEQ ID NO: 1974917 - RNA, 19 nt, Homo sapiens
  misc_RNA (1)...(19): siRNA sense strand
cagaagaucuagaacugaa

SEQ ID NO: 1974918 - RNA, 19 nt, Homo sapiens
  misc_RNA (1)...(19): siRNA sense strand
cagaagguauguuaagcua

SEQ ID NO: 1974919 - RNA, 19 nt, Homo sapiens
  misc_RNA (1)...(19): siRNA sense strand
gaagguauguuaagcuacu

SEQ ID NO: 1974920 - RNA, 19 nt, Homo sapiens
  misc_RNA (1)...(19): siRNA sense strand
gaaacucuaugacauugag

SEQ ID NO: 1974921 - RNA, 19 nt, Homo sapiens
  misc_RNA (1)...(19): siRNA sense strand
ucucaugccuuccaaguug

SEQ ID NO: 1974922 - RNA, 19 nt, Homo sapiens
  misc_RNA (1)...(19): siRNA sense strand
caaugcagaagguauguua

SEQ ID NO: 1974923 - RNA, 19 nt, Homo sapiens
  misc_RNA (1)...(19): siRNA sense strand
gaagagcagcugucacuca

SEQ ID NO: 1974924 - RNA, 19 nt, Homo sapiens
  misc_RNA (1)...(19): siRNA sense strand
guaccucaguggagucauu

SEQ ID NO: 1974925 - RNA, 19 nt, Homo sapiens
  misc_RNA (1)...(19): siRNA sense strand
ucagaaaggagaugaaguu

SEQ ID NO: 1974926 - RNA, 19 nt, Homo sapiens
  misc_RNA (1)...(19): siRNA sense strand
gaauucgugucuccuagug

SEQ ID NO: 1974927 - RNA, 19 nt, Homo sapiens
  misc_RNA (1)...(19): siRNA sense strand
gugaaacucuaugacauug

SEQ ID NO: 1974928 - RNA, 19 nt, Homo sapiens
  misc_RNA (1)...(19): siRNA sense strand
aaacauguccuacagacuu

SEQ ID NO: 1974929 - RNA, 19 nt, Homo sapiens
  misc_RNA (1)...(19): siRNA sense strand
gaagaucuagaacugaaga

SEQ ID NO: 1974930 - RNA, 19 nt, Homo sapiens
  misc_RNA (1)...(19): siRNA sense strand
gaucuagaacugaagaaga

SEQ ID NO: 1974931 - RNA, 19 nt, Homo sapiens
  misc_RNA (1)...(19): siRNA sense strand
gauaaggaacgcccuggaa

SEQ ID NO: 1974932 - RNA, 19 nt, Homo sapiens
  misc_RNA (1)...(19): siRNA sense strand
ucaugagacucgccaaguu

SEQ ID NO: 1974933 - RNA, 19 nt, Homo sapiens
  misc_RNA (1)...(19): siRNA sense strand
ggugaaacucuaugacauu

SEQ ID NO: 1974934 - RNA, 19 nt, Homo sapiens
  misc_RNA (1)...(19): siRNA sense strand
ggacgagugccucaugaga

SEQ ID NO: 1974935 - RNA, 19 nt, Homo sapiens
  misc_RNA (1)...(19): siRNA sense strand
ugaagaagauugggacagu

SEQ ID NO: 1974936 - RNA, 19 nt, Homo sapiens
  misc_RNA (1)...(19): siRNA sense strand
gagcaggcagguucucuga

SEQ ID NO: 1974937 - RNA, 19 nt, Homo sapiens
  misc_RNA (1)...(19): siRNA sense strand
gaacccacgcccugaugaa

SEQ ID NO: 1974938 - RNA, 19 nt, Homo sapiens
  misc_RNA (1)...(19): siRNA sense strand
caauauccaagaagcagua

SEQ ID NO: 1974939 - RNA, 19 nt, Homo sapiens
  misc_RNA (1)...(19): siRNA sense strand
gaaaccaugcaucucaaug

SEQ ID NO: 1974940 - RNA, 19 nt, Homo sapiens
  misc_RNA (1)...(19): siRNA sense strand
gagcaacagcagauaagga

SEQ ID NO: 1974941 - RNA, 19 nt, Homo sapiens
  misc_RNA (1)...(19): siRNA sense strand
gcuaguggaggaaggaauu

SEQ ID NO: 1974942 - RNA, 19 nt, Homo sapiens
  misc_RNA (1)...(19): siRNA sense strand
caucagugguugucccaau

SEQ ID NO: 1974943 - RNA, 19 nt, Homo sapiens
  misc_RNA (1)...(19): siRNA sense strand
cgacugggccaugcuguuu

SEQ ID NO: 1974944 - RNA, 19 nt, Homo sapiens
  misc_RNA (1)...(19): siRNA sense strand
ucuaugacauugagcaaca

SEQ ID NO: 1974945 - RNA, 19 nt, Homo sapiens
  misc_RNA (1)...(19): siRNA sense strand
cagauacagcgaaggcaua

SEQ ID NO: 1974946 - RNA, 19 nt, Homo sapiens
  misc_RNA (1)...(19): siRNA sense strand
uccagaagaucuagaacug

SEQ ID NO: 1974947 - RNA, 19 nt, Homo sapiens
  misc_RNA (1)...(19): siRNA sense strand
uuaagcaguuccacuucuu

SEQ ID NO: 1974948 - RNA, 19 nt, Homo sapiens
  misc_RNA (1)...(19): siRNA sense strand
gaccugggaccuugucaug

SEQ ID NO: 1974949 - RNA, 19 nt, Homo sapiens
  misc_RNA (1)...(19): siRNA sense strand
ccacugcugagaagguuaa

SEQ ID NO: 1974950 - RNA, 19 nt, Homo sapiens
  misc_RNA (1)...(19): siRNA sense strand
uaagcuacugcgacagaua

SEQ ID NO: 1974951 - RNA, 19 nt, Homo sapiens
  misc_RNA (1)...(19): siRNA sense strand
caguuagauuccaucauug

SEQ ID NO: 1974952 - RNA, 19 nt, Homo sapiens
  misc_RNA (1)...(19): siRNA sense strand
caugagacucgccaaguug

SEQ ID NO: 1974953 - RNA, 19 nt, Homo sapiens
  misc_RNA (1)...(19): siRNA sense strand
guuaagcuacugcgacaga

SEQ ID NO: 1974954 - RNA, 19 nt, Homo sapiens
  misc_RNA (1)...(19): siRNA sense strand
ggaaaccaugcaucucaau

SEQ ID NO: 1974955 - RNA, 19 nt, Homo sapiens
  misc_RNA (1)...(19): siRNA sense strand
gcaguuccacuucuugucu

SEQ ID NO: 1974956 - RNA, 19 nt, Homo sapiens
  misc_RNA (1)...(19): siRNA sense strand
aucuagaacugaagaagaa

SEQ ID NO: 1974957 - RNA, 19 nt, Homo sapiens
  misc_RNA (1)...(19): siRNA sense strand
aacauguccuacagacuuu

SEQ ID NO: 1974958 - RNA, 19 nt, Homo sapiens
  misc_RNA (1)...(19): siRNA sense strand
ccugggaccuugucauguc

SEQ ID NO: 1974959 - RNA, 19 nt, Homo sapiens
  misc_RNA (1)...(19): siRNA sense strand
gcuuccaggugaaacucua

SEQ ID NO: 1974960 - RNA, 19 nt, Homo sapiens
  misc_RNA (1)...(19): siRNA sense strand
cccacgcccugaugaagaa

SEQ ID NO: 1974961 - RNA, 19 nt, Homo sapiens
  misc_RNA (1)...(19): siRNA sense strand
ucgccaaguugaagaguca

SEQ ID NO: 1974962 - RNA, 19 nt, Homo sapiens
  misc_RNA (1)...(19): siRNA sense strand
gaggaaggaauucgugucu

SEQ ID NO: 1974963 - RNA, 19 nt, Homo sapiens
  misc_RNA (1)...(19): siRNA sense strand
aagagcagcugucacucau

SEQ ID NO: 1974964 - RNA, 19 nt, Homo sapiens
  misc_RNA (1)...(19): siRNA sense strand
ggccacugcugagaagguu

SEQ ID NO: 1974965 - RNA, 19 nt, Homo sapiens
  misc_RNA (1)...(19): siRNA sense strand
uggaaaccaugcaucucaa

SEQ ID NO: 1974966 - RNA, 19 nt, Homo sapiens
  misc_RNA (1)...(19): siRNA sense strand
ggaacgcccuggaaaacau

SEQ ID NO: 1974967 - RNA, 19 nt, Homo sapiens
  misc_RNA (1)...(19): siRNA sense strand
ugaaccgccugcaauaugc

SEQ ID NO: 1974968 - RNA, 19 nt, Homo sapiens
  misc_RNA (1)...(19): siRNA sense strand
auaaggaacgcccuggaaa

SEQ ID NO: 1974969 - RNA, 19 nt, Homo sapiens
  misc_RNA (1)...(19): siRNA sense strand
gcagaagguauguuaagcu

SEQ ID NO: 1974970 - RNA, 19 nt, Homo sapiens
  misc_RNA (1)...(19): siRNA sense strand
ggaauucgugucuccuagu

SEQ ID NO: 1974971 - RNA, 19 nt, Homo sapiens
  misc_RNA (1)...(19): siRNA sense strand
gaagguuaaccaggacaug

SEQ ID NO: 1974972 - RNA, 19 nt, Homo sapiens
  misc_RNA (1)...(19): siRNA sense strand
ccagaagaucuagaacuga

SEQ ID NO: 1974973 - RNA, 19 nt, Homo sapiens
  misc_RNA (1)...(19): siRNA sense strand
cuacgacaguggacagaac

SEQ ID NO: 1974974 - RNA, 19 nt, Homo sapiens
  misc_RNA (1)...(19): siRNA sense strand
aucagugguugucccaaua

SEQ ID NO: 1974975 - RNA, 19 nt, Homo sapiens
  misc_RNA (1)...(19): siRNA sense strand
caggugaaacucuaugaca

SEQ ID NO: 1974976 - RNA, 19 nt, Homo sapiens
  misc_RNA (1)...(19): siRNA sense strand
gaccuugucaugucagaag

SEQ ID NO: 1974977 - RNA, 19 nt, Homo sapiens
  misc_RNA (1)...(19): siRNA sense strand
gcagcugucacucaucagu

SEQ ID NO: 1974978 - RNA, 19 nt, Homo sapiens
  misc_RNA (1)...(19): siRNA sense strand
cauaaaacauguccuacag

SEQ ID NO: 1974979 - RNA, 19 nt, Homo sapiens
  misc_RNA (1)...(19): siRNA sense strand
ccaugcgaguccagaagga

SEQ ID NO: 1974980 - RNA, 19 nt, Homo sapiens
  misc_RNA (1)...(19): siRNA sense strand
ugaaaggcucccugagugu

SEQ ID NO: 1974981 - RNA, 19 nt, Homo sapiens
  misc_RNA (1)...(19): siRNA sense strand
ugaauccgccauacuacau

SEQ ID NO: 1974982 - RNA, 19 nt, Homo sapiens
  misc_RNA (1)...(19): siRNA sense strand
ugaugacccggagcacuua

SEQ ID NO: 1974983 - RNA, 19 nt, Homo sapiens
  misc_RNA (1)...(19): siRNA sense strand
cugaaccgccugcaauaug

SEQ ID NO: 1974984 - RNA, 19 nt, Homo sapiens
  misc_RNA (1)...(19): siRNA sense strand
gcccugaugaagaagauug

SEQ ID NO: 1974985 - RNA, 19 nt, Homo sapiens
  misc_RNA (1)...(19): siRNA sense strand
cagaaaggagaugaaguug

SEQ ID NO: 1974986 - RNA, 19 nt, Homo sapiens
  misc_RNA (1)...(19): siRNA sense strand
uaagcaguuccacuucuug

SEQ ID NO: 1974987 - RNA, 19 nt, Homo sapiens
  misc_RNA (1)...(19): siRNA sense strand
ccagggccacugcugagaa

SEQ ID NO: 1974988 - RNA, 19 nt, Homo sapiens
  misc_RNA (1)...(19): siRNA sense strand
gcgaaggcauaaaacaugu

SEQ ID NO: 1974989 - RNA, 19 nt, Homo sapiens
  misc_RNA (1)...(19): siRNA sense strand
cugugaauccgccauacua

SEQ ID NO: 1974990 - RNA, 19 nt, Homo sapiens
  misc_RNA (1)...(19): siRNA sense strand
cagggccacugcugagaag

SEQ ID NO: 1974991 - RNA, 19 nt, Homo sapiens
  misc_RNA (1)...(19): siRNA sense strand
gcaaacagcuccugaaacu

SEQ ID NO: 1974992 - RNA, 19 nt, Homo sapiens
  misc_RNA (1)...(19): siRNA sense strand
gaaagggcaugaacuuagu

SEQ ID NO: 1974993 - RNA, 19 nt, Homo sapiens
  misc_RNA (1)...(19): siRNA sense strand
uagagauggugaagaauaa

SEQ ID NO: 1974994 - RNA, 19 nt, Homo sapiens
  misc_RNA (1)...(19): siRNA sense strand
uuugaaaggugacaugaua

SEQ ID NO: 1974995 - RNA, 19 nt, Homo sapiens
  misc_RNA (1)...(19): siRNA sense strand
ggaaagggcaugaacuuag

SEQ ID NO: 1974996 - RNA, 19 nt, Homo sapiens
  misc_RNA (1)...(19): siRNA sense strand
gugaucaacuggaagauuc

SEQ ID NO: 1974997 - RNA, 19 nt, Homo sapiens
  misc_RNA (1)...(19): siRNA sense strand
aaagacauuucggaaguuu

SEQ ID NO: 1974998 - RNA, 19 nt, Homo sapiens
  misc_RNA (1)...(19): siRNA sense strand
gggcaaacagcuccugaaa

SEQ ID NO: 1974999 - RNA, 19 nt, Homo sapiens
  misc_RNA (1)...(19): siRNA sense strand
auucuaggguccucaauuu

SEQ ID NO: 1975000 - RNA, 19 nt, Homo sapiens
  misc_RNA (1)...(19): siRNA sense strand
agagagugaucaacuggaa

SEQ ID NO: 1975001 - RNA, 19 nt, Homo sapiens
  misc_RNA (1)...(19): siRNA sense strand
gcugugaccugucuuucuc

SEQ ID NO: 1975002 - RNA, 19 nt, Homo sapiens
  misc_RNA (1)...(19): siRNA sense strand
gaaguucuugcuccuguug

SEQ ID NO: 1975003 - RNA, 19 nt, Homo sapiens
  misc_RNA (1)...(19): siRNA sense strand
auagagauggugaagaaua

SEQ ID NO: 1975004 - RNA, 19 nt, Homo sapiens
  misc_RNA (1)...(19): siRNA sense strand
gcacauggagagagugauc

SEQ ID NO: 1975005 - RNA, 19 nt, Homo sapiens
  misc_RNA (1)...(19): siRNA sense strand
gaauaagggagguagugau

SEQ ID NO: 1975006 - RNA, 19 nt, Homo sapiens
  misc_RNA (1)...(19): siRNA sense strand
uaagggagguagugaucgu

SEQ ID NO: 1975007 - RNA, 19 nt, Homo sapiens
  misc_RNA (1)...(19): siRNA sense strand
gauucuaggguccucaauu

SEQ ID NO: 1975008 - RNA, 19 nt, Homo sapiens
  misc_RNA (1)...(19): siRNA sense strand
uggaaugccuggccucucu

SEQ ID NO: 1975009 - RNA, 19 nt, Homo sapiens
  misc_RNA (1)...(19): siRNA sense strand
guguggccacggcaaauua

SEQ ID NO: 1975010 - RNA, 19 nt, Homo sapiens
  misc_RNA (1)...(19): siRNA sense strand
uggaaagggcaugaacuua

SEQ ID NO: 1975011 - RNA, 19 nt, Homo sapiens
  misc_RNA (1)...(19): siRNA sense strand
gacaugauacccuggaaag

SEQ ID NO: 1975012 - RNA, 19 nt, Homo sapiens
  misc_RNA (1)...(19): siRNA sense strand
gaaagaggcuggggcacau

SEQ ID NO: 1975013 - RNA, 19 nt, Homo sapiens
  misc_RNA (1)...(19): siRNA sense strand
gguagggguuccuuccaua

SEQ ID NO: 1975014 - RNA, 19 nt, Homo sapiens
  misc_RNA (1)...(19): siRNA sense strand
ucaguucguccuugccuuu

SEQ ID NO: 1975015 - RNA, 19 nt, Homo sapiens
  misc_RNA (1)...(19): siRNA sense strand
cgaaguucuugcuccuguu

SEQ ID NO: 1975016 - RNA, 19 nt, Homo sapiens
  misc_RNA (1)...(19): siRNA sense strand
agacucaguuucccaugca

SEQ ID NO: 1975017 - RNA, 19 nt, Homo sapiens
  misc_RNA (1)...(19): siRNA sense strand
cauggguggugcagacuca

SEQ ID NO: 1975018 - RNA, 19 nt, Homo sapiens
  misc_RNA (1)...(19): siRNA sense strand
gaucaacuggaagauucua

SEQ ID NO: 1975019 - RNA, 19 nt, Homo sapiens
  misc_RNA (1)...(19): siRNA sense strand
gaagaauaagggagguagu

SEQ ID NO: 1975020 - RNA, 19 nt, Homo sapiens
  misc_RNA (1)...(19): siRNA sense strand
gggcacauggagagaguga

SEQ ID NO: 1975021 - RNA, 19 nt, Homo sapiens
  misc_RNA (1)...(19): siRNA sense strand
uggagagagugaucaacug

SEQ ID NO: 1975022 - RNA, 19 nt, Homo sapiens
  misc_RNA (1)...(19): siRNA sense strand
ugacaugauacccuggaaa

SEQ ID NO: 1975023 - RNA, 19 nt, Homo sapiens
  misc_RNA (1)...(19): siRNA sense strand
agaauaagggagguaguga

SEQ ID NO: 1975024 - RNA, 19 nt, Homo sapiens
  misc_RNA (1)...(19): siRNA sense strand
agagugaucaacuggaaga

SEQ ID NO: 1975025 - RNA, 19 nt, Homo sapiens
  misc_RNA (1)...(19): siRNA sense strand
ggagguagugaucgucucu

SEQ ID NO: 1975026 - RNA, 19 nt, Homo sapiens
  misc_RNA (1)...(19): siRNA sense strand
gugacaugauacccuggaa

SEQ ID NO: 1975027 - RNA, 19 nt, Homo sapiens
  misc_RNA (1)...(19): siRNA sense strand
gaaauuuggugcugaugua

SEQ ID NO: 1975028 - RNA, 19 nt, Homo sapiens
  misc_RNA (1)...(19): siRNA sense strand
gaaauugaguuccaugaga

SEQ ID NO: 1975029 - RNA, 19 nt, Homo sapiens
  misc_RNA (1)...(19): siRNA sense strand
ugacaaauauggcuaugua

SEQ ID NO: 1975030 - RNA, 19 nt, Homo sapiens
  misc_RNA (1)...(19): siRNA sense strand
ccaaagugcuggacaauau

SEQ ID NO: 1975031 - RNA, 19 nt, Homo sapiens
  misc_RNA (1)...(19): siRNA sense strand
aaaggacgaugcagaaaua

SEQ ID NO: 1975032 - RNA, 19 nt, Homo sapiens
  misc_RNA (1)...(19): siRNA sense strand
gagcuaaugucaauauuca

SEQ ID NO: 1975033 - RNA, 19 nt, Homo sapiens
  misc_RNA (1)...(19): siRNA sense strand
gcagaugucuucagcuaug

SEQ ID NO: 1975034 - RNA, 19 nt, Homo sapiens
  misc_RNA (1)...(19): siRNA sense strand
uaauggagcugauaugaau

SEQ ID NO: 1975035 - RNA, 19 nt, Homo sapiens
  misc_RNA (1)...(19): siRNA sense strand
gaauugcccuguaaugaau

SEQ ID NO: 1975036 - RNA, 19 nt, Homo sapiens
  misc_RNA (1)...(19): siRNA sense strand
ggcaagaaaucacauauuc

SEQ ID NO: 1975037 - RNA, 19 nt, Homo sapiens
  misc_RNA (1)...(19): siRNA sense strand
ucacacuccugaagcauua

SEQ ID NO: 1975038 - RNA, 19 nt, Homo sapiens
  misc_RNA (1)...(19): siRNA sense strand
ugacagaacuaaggaauau

SEQ ID NO: 1975039 - RNA, 19 nt, Homo sapiens
  misc_RNA (1)...(19): siRNA sense strand
ucacauauucgaacucuua

SEQ ID NO: 1975040 - RNA, 19 nt, Homo sapiens
  misc_RNA (1)...(19): siRNA sense strand
uacaauagcuggccaccua

SEQ ID NO: 1975041 - RNA, 19 nt, Homo sapiens
  misc_RNA (1)...(19): siRNA sense strand
caagaugaauugcccugua

SEQ ID NO: 1975042 - RNA, 19 nt, Homo sapiens
  misc_RNA (1)...(19): siRNA sense strand
gaagaugaccugcagauca

SEQ ID NO: 1975043 - RNA, 19 nt, Homo sapiens
  misc_RNA (1)...(19): siRNA sense strand
acacacccauugacaaaua

SEQ ID NO: 1975044 - RNA, 19 nt, Homo sapiens
  misc_RNA (1)...(19): siRNA sense strand
ggaauaugcucuaaaugca

SEQ ID NO: 1975045 - RNA, 19 nt, Homo sapiens
  misc_RNA (1)...(19): siRNA sense strand
ccaaggaaaucauccaaau

SEQ ID NO: 1975046 - RNA, 19 nt, Homo sapiens
  misc_RNA (1)...(19): siRNA sense strand
gucagugaaucauauguua

SEQ ID NO: 1975047 - RNA, 19 nt, Homo sapiens
  misc_RNA (1)...(19): siRNA sense strand
ggaaaucauccaaauauca

SEQ ID NO: 1975048 - RNA, 19 nt, Homo sapiens
  misc_RNA (1)...(19): siRNA sense strand
ccaaauaucaggaacagaa

SEQ ID NO: 1975049 - RNA, 19 nt, Homo sapiens
  misc_RNA (1)...(19): siRNA sense strand
gcagauauucuccuccuaa

SEQ ID NO: 1975050 - RNA, 19 nt, Homo sapiens
  misc_RNA (1)...(19): siRNA sense strand
caaggauaaugcagaauug

SEQ ID NO: 1975051 - RNA, 19 nt, Homo sapiens
  misc_RNA (1)...(19): siRNA sense strand
gaauauauuuggcucugau

SEQ ID NO: 1975052 - RNA, 19 nt, Homo sapiens
  misc_RNA (1)...(19): siRNA sense strand
gaaauuccauucgcucauc

SEQ ID NO: 1975053 - RNA, 19 nt, Homo sapiens
  misc_RNA (1)...(19): siRNA sense strand
gagugucucugcaacauug

SEQ ID NO: 1975054 - RNA, 19 nt, Homo sapiens
  misc_RNA (1)...(19): siRNA sense strand
caaggaaaucauccaaaua

SEQ ID NO: 1975055 - RNA, 19 nt, Homo sapiens
  misc_RNA (1)...(19): siRNA sense strand
gaauuggaauaugcucuaa

SEQ ID NO: 1975056 - RNA, 19 nt, Homo sapiens
  misc_RNA (1)...(19): siRNA sense strand
ggagucauguggcagcauu

SEQ ID NO: 1975057 - RNA, 19 nt, Homo sapiens
  misc_RNA (1)...(19): siRNA sense strand
gagcugauaugaaucuagu

SEQ ID NO: 1975058 - RNA, 19 nt, Homo sapiens
  misc_RNA (1)...(19): siRNA sense strand
gaaaucacauauucgaacu

SEQ ID NO: 1975059 - RNA, 19 nt, Homo sapiens
  misc_RNA (1)...(19): siRNA sense strand
aaauguaaguggugaaguu

SEQ ID NO: 1975060 - RNA, 19 nt, Homo sapiens
  misc_RNA (1)...(19): siRNA sense strand
cccaugagcucaaugcauu

SEQ ID NO: 1975061 - RNA, 19 nt, Homo sapiens
  misc_RNA (1)...(19): siRNA sense strand
aagcagaugucuucagcua

SEQ ID NO: 1975062 - RNA, 19 nt, Homo sapiens
  misc_RNA (1)...(19): siRNA sense strand
caucucgacugacaagaaa

SEQ ID NO: 1975063 - RNA, 19 nt, Homo sapiens
  misc_RNA (1)...(19): siRNA sense strand
gauaauggagcugauauga

SEQ ID NO: 1975064 - RNA, 19 nt, Homo sapiens
  misc_RNA (1)...(19): siRNA sense strand
ccauuucuguucucgauuu

SEQ ID NO: 1975065 - RNA, 19 nt, Homo sapiens
  misc_RNA (1)...(19): siRNA sense strand
gaacugacagaacuaagga

SEQ ID NO: 1975066 - RNA, 19 nt, Homo sapiens
  misc_RNA (1)...(19): siRNA sense strand
uaagaagucguuucgaauu

SEQ ID NO: 1975067 - RNA, 19 nt, Homo sapiens
  misc_RNA (1)...(19): siRNA sense strand
uaagagaccacaagaugaa

SEQ ID NO: 1975068 - RNA, 19 nt, Homo sapiens
  misc_RNA (1)...(19): siRNA sense strand
uuacaaggauaaugcagaa

SEQ ID NO: 1975069 - RNA, 19 nt, Homo sapiens
  misc_RNA (1)...(19): siRNA sense strand
uuaaguaucugcugcaaag

SEQ ID NO: 1975070 - RNA, 19 nt, Homo sapiens
  misc_RNA (1)...(19): siRNA sense strand
cagcaaagcagaugugaau

SEQ ID NO: 1975071 - RNA, 19 nt, Homo sapiens
  misc_RNA (1)...(19): siRNA sense strand
gcaagagcauugaccuagu

SEQ ID NO: 1975072 - RNA, 19 nt, Homo sapiens
  misc_RNA (1)...(19): siRNA sense strand
aagaugaauugcccuguaa

SEQ ID NO: 1975073 - RNA, 19 nt, Homo sapiens
  misc_RNA (1)...(19): siRNA sense strand
aagaugagcagacauguuu

SEQ ID NO: 1975074 - RNA, 19 nt, Homo sapiens
  misc_RNA (1)...(19): siRNA sense strand
caagaaaucacauauucga

SEQ ID NO: 1975075 - RNA, 19 nt, Homo sapiens
  misc_RNA (1)...(19): siRNA sense strand
ugaaggaagacccgaauuu

SEQ ID NO: 1975076 - RNA, 19 nt, Homo sapiens
  misc_RNA (1)...(19): siRNA sense strand
caagucagauguggauaug

SEQ ID NO: 1975077 - RNA, 19 nt, Homo sapiens
  misc_RNA (1)...(19): siRNA sense strand
uauaagagaccacaagaug

SEQ ID NO: 1975078 - RNA, 19 nt, Homo sapiens
  misc_RNA (1)...(19): siRNA sense strand
cuagucaaauuucuucuug

SEQ ID NO: 1975079 - RNA, 19 nt, Homo sapiens
  misc_RNA (1)...(19): siRNA sense strand
ggacaccaugauauaguua

SEQ ID NO: 1975080 - RNA, 19 nt, Homo sapiens
  misc_RNA (1)...(19): siRNA sense strand
gaacucuuauguugaaagg

SEQ ID NO: 1975081 - RNA, 19 nt, Homo sapiens
  misc_RNA (1)...(19): siRNA sense strand
gaaauucucacuggcgaaa

SEQ ID NO: 1975082 - RNA, 19 nt, Homo sapiens
  misc_RNA (1)...(19): siRNA sense strand
gcauuuagcaguuuacaag

SEQ ID NO: 1975083 - RNA, 19 nt, Homo sapiens
  misc_RNA (1)...(19): siRNA sense strand
gaaauaguagcagcuuuga

SEQ ID NO: 1975084 - RNA, 19 nt, Homo sapiens
  misc_RNA (1)...(19): siRNA sense strand
ggacaauauuccucucaag

SEQ ID NO: 1975085 - RNA, 19 nt, Homo sapiens
  misc_RNA (1)...(19): siRNA sense strand
gagcugaugucuccugcau

SEQ ID NO: 1975086 - RNA, 19 nt, Homo sapiens
  misc_RNA (1)...(19): siRNA sense strand
cuauggacaugaacaggua

SEQ ID NO: 1975087 - RNA, 19 nt, Homo sapiens
  misc_RNA (1)...(19): siRNA sense strand
ggaagaaggcagcaaagca

SEQ ID NO: 1975088 - RNA, 19 nt, Homo sapiens
  misc_RNA (1)...(19): siRNA sense strand
gaaguugucaugaaguuag

SEQ ID NO: 1975089 - RNA, 19 nt, Homo sapiens
  misc_RNA (1)...(19): siRNA sense strand
aagaugaccugcagaucaa

SEQ ID NO: 1975090 - RNA, 19 nt, Homo sapiens
  misc_RNA (1)...(19): siRNA sense strand
ggaauauauuuggcucuga

SEQ ID NO: 1975091 - RNA, 19 nt, Homo sapiens
  misc_RNA (1)...(19): siRNA sense strand
gaucagaaugucauaaaca

SEQ ID NO: 1975092 - RNA, 19 nt, Homo sapiens
  misc_RNA (1)...(19): siRNA sense strand
gaugugaaugcucaagaua

SEQ ID NO: 1975093 - RNA, 19 nt, Homo sapiens
  misc_RNA (1)...(19): siRNA sense strand
aauuauacaucgugacuug

SEQ ID NO: 1975094 - RNA, 19 nt, Homo sapiens
  misc_RNA (1)...(19): siRNA sense strand
cgaaauaguagcagcuuug

SEQ ID NO: 1975095 - RNA, 19 nt, Homo sapiens
  misc_RNA (1)...(19): siRNA sense strand
gaagucguuucgaauugga

SEQ ID NO: 1975096 - RNA, 19 nt, Homo sapiens
  misc_RNA (1)...(19): siRNA sense strand
uauucgaacucuuauguug

SEQ ID NO: 1975097 - RNA, 19 nt, Homo sapiens
  misc_RNA (1)...(19): siRNA sense strand
aagaagucguuucgaauug

SEQ ID NO: 1975098 - RNA, 19 nt, Homo sapiens
  misc_RNA (1)...(19): siRNA sense strand
agucagauguggauauguu

SEQ ID NO: 1975099 - RNA, 19 nt, Homo sapiens
  misc_RNA (1)...(19): siRNA sense strand
cuucagcucucagaaauug

SEQ ID NO: 1975100 - RNA, 19 nt, Homo sapiens
  misc_RNA (1)...(19): siRNA sense strand
caagagcauugaccuaguc

SEQ ID NO: 1975101 - RNA, 19 nt, Homo sapiens
  misc_RNA (1)...(19): siRNA sense strand
gaccaugucccacuccauu

SEQ ID NO: 1975102 - RNA, 19 nt, Homo sapiens
  misc_RNA (1)...(19): siRNA sense strand
acagguaacucgccuucuu

SEQ ID NO: 1975103 - RNA, 19 nt, Homo sapiens
  misc_RNA (1)...(19): siRNA sense strand
ugaauugcccuguaaugaa

SEQ ID NO: 1975104 - RNA, 19 nt, Homo sapiens
  misc_RNA (1)...(19): siRNA sense strand
caagauuucuacagucucu

SEQ ID NO: 1975105 - RNA, 19 nt, Homo sapiens
  misc_RNA (1)...(19): siRNA sense strand
gaacagucacaauauucuu

SEQ ID NO: 1975106 - RNA, 19 nt, Homo sapiens
  misc_RNA (1)...(19): siRNA sense strand
aaucaucccugcguaauuc

SEQ ID NO: 1975107 - RNA, 19 nt, Homo sapiens
  misc_RNA (1)...(19): siRNA sense strand
gaaaucauccaaauaucag

SEQ ID NO: 1975108 - RNA, 19 nt, Homo sapiens
  misc_RNA (1)...(19): siRNA sense strand
cagcagacauggcuuacca

SEQ ID NO: 1975109 - RNA, 19 nt, Homo sapiens
  misc_RNA (1)...(19): siRNA sense strand
gauauucuccuccuaagag

SEQ ID NO: 1975110 - RNA, 19 nt, Homo sapiens
  misc_RNA (1)...(19): siRNA sense strand
cagcaggucuaguggugaa

SEQ ID NO: 1975111 - RNA, 19 nt, Homo sapiens
  misc_RNA (1)...(19): siRNA sense strand
ggaggcaagaaaucacaua

SEQ ID NO: 1975112 - RNA, 19 nt, Homo sapiens
  misc_RNA (1)...(19): siRNA sense strand
ugacacagccaauuauaca

SEQ ID NO: 1975113 - RNA, 19 nt, Homo sapiens
  misc_RNA (1)...(19): siRNA sense strand
ccugaagcauuauaagaga

SEQ ID NO: 1975114 - RNA, 19 nt, Homo sapiens
  misc_RNA (1)...(19): siRNA sense strand
ggaugggcacacuggauua

SEQ ID NO: 1975115 - RNA, 19 nt, Homo sapiens
  misc_RNA (1)...(19): siRNA sense strand
aaagugauuuggaaguuca

SEQ ID NO: 1975116 - RNA, 19 nt, Homo sapiens
  misc_RNA (1)...(19): siRNA sense strand
ugaaugcucaagauaauga

SEQ ID NO: 1975117 - RNA, 19 nt, Homo sapiens
  misc_RNA (1)...(19): siRNA sense strand
gauggaagaaggcagcaaa

SEQ ID NO: 1975118 - RNA, 19 nt, Homo sapiens
  misc_RNA (1)...(19): siRNA sense strand
ccuagaggcugcugaugug

SEQ ID NO: 1975119 - RNA, 19 nt, Homo sapiens
  misc_RNA (1)...(19): siRNA sense strand
ucacaguggagcugauaua

SEQ ID NO: 1975120 - RNA, 19 nt, Homo sapiens
  misc_RNA (1)...(19): siRNA sense strand
aaacaucaaccaccaagga

SEQ ID NO: 1975121 - RNA, 19 nt, Homo sapiens
  misc_RNA (1)...(19): siRNA sense strand
gaauaugcucuaaaugcaa

SEQ ID NO: 1975122 - RNA, 19 nt, Homo sapiens
  misc_RNA (1)...(19): siRNA sense strand
uacagucucuggaugaaga

SEQ ID NO: 1975123 - RNA, 19 nt, Homo sapiens
  misc_RNA (1)...(19): siRNA sense strand
ugcaguagauguugccaaa

SEQ ID NO: 1975124 - RNA, 19 nt, Homo sapiens
  misc_RNA (1)...(19): siRNA sense strand
gaaugaucccagccaguuu

SEQ ID NO: 1975125 - RNA, 19 nt, Homo sapiens
  misc_RNA (1)...(19): siRNA sense strand
uauaaaggacgaugcagaa

SEQ ID NO: 1975126 - RNA, 19 nt, Homo sapiens
  misc_RNA (1)...(19): siRNA sense strand
uggauugccuucacauuuc

SEQ ID NO: 1975127 - RNA, 19 nt, Homo sapiens
  misc_RNA (1)...(19): siRNA sense strand
gaaagagccucgauucaaa

SEQ ID NO: 1975128 - RNA, 19 nt, Homo sapiens
  misc_RNA (1)...(19): siRNA sense strand
ggaaggaauuucucauaaa

SEQ ID NO: 1975129 - RNA, 19 nt, Homo sapiens
  misc_RNA (1)...(19): siRNA sense strand
caaagaagaugguacacuu

SEQ ID NO: 1975130 - RNA, 19 nt, Homo sapiens
  misc_RNA (1)...(19): siRNA sense strand
gagccucgauucaaauuaa

SEQ ID NO: 1975131 - RNA, 19 nt, Homo sapiens
  misc_RNA (1)...(19): siRNA sense strand
cauggaaucucuucuauug

SEQ ID NO: 1975132 - RNA, 19 nt, Homo sapiens
  misc_RNA (1)...(19): siRNA sense strand
gauugaagaugaugaaaug

SEQ ID NO: 1975133 - RNA, 19 nt, Homo sapiens
  misc_RNA (1)...(19): siRNA sense strand
ggaaaccuuugauuagaaa

SEQ ID NO: 1975134 - RNA, 19 nt, Homo sapiens
  misc_RNA (1)...(19): siRNA sense strand
gaagggagagguaacuaua

SEQ ID NO: 1975135 - RNA, 19 nt, Homo sapiens
  misc_RNA (1)...(19): siRNA sense strand
gaacauagccaaugagacu

SEQ ID NO: 1975136 - RNA, 19 nt, Homo sapiens
  misc_RNA (1)...(19): siRNA sense strand
gagagagacuauagcauug

SEQ ID NO: 1975137 - RNA, 19 nt, Homo sapiens
  misc_RNA (1)...(19): siRNA sense strand
gugaugacauggugacuaa

SEQ ID NO: 1975138 - RNA, 19 nt, Homo sapiens
  misc_RNA (1)...(19): siRNA sense strand
ccaacuaccucaucccaaa

SEQ ID NO: 1975139 - RNA, 19 nt, Homo sapiens
  misc_RNA (1)...(19): siRNA sense strand
gaucuuaucugaaguuuug

SEQ ID NO: 1975140 - RNA, 19 nt, Homo sapiens
  misc_RNA (1)...(19): siRNA sense strand
ggaaauuauugucaacaug

SEQ ID NO: 1975141 - RNA, 19 nt, Homo sapiens
  misc_RNA (1)...(19): siRNA sense strand
gaacugagagagacuauag

SEQ ID NO: 1975142 - RNA, 19 nt, Homo sapiens
  misc_RNA (1)...(19): siRNA sense strand
ggacuggauucaaaugaga

SEQ ID NO: 1975143 - RNA, 19 nt, Homo sapiens
  misc_RNA (1)...(19): siRNA sense strand
uaucugcucugaaagaauu

SEQ ID NO: 1975144 - RNA, 19 nt, Homo sapiens
  misc_RNA (1)...(19): siRNA sense strand
gaagaugguacacuugaaa

SEQ ID NO: 1975145 - RNA, 19 nt, Homo sapiens
  misc_RNA (1)...(19): siRNA sense strand
ugaccuggcuauuucagua

SEQ ID NO: 1975146 - RNA, 19 nt, Homo sapiens
  misc_RNA (1)...(19): siRNA sense strand
gaaagugacgcauuuaugg

SEQ ID NO: 1975147 - RNA, 19 nt, Homo sapiens
  misc_RNA (1)...(19): siRNA sense strand
uggaaggaauuucucauaa

SEQ ID NO: 1975148 - RNA, 19 nt, Homo sapiens
  misc_RNA (1)...(19): siRNA sense strand
gaucagcuguguguucuug

SEQ ID NO: 1975149 - RNA, 19 nt, Homo sapiens
  misc_RNA (1)...(19): siRNA sense strand
agacugcucuggaaauuau

SEQ ID NO: 1975150 - RNA, 19 nt, Homo sapiens
  misc_RNA (1)...(19): siRNA sense strand
gggaauggaugcuggugaa

SEQ ID NO: 1975151 - RNA, 19 nt, Homo sapiens
  misc_RNA (1)...(19): siRNA sense strand
gcaguugaccuauguucua

SEQ ID NO: 1975152 - RNA, 19 nt, Homo sapiens
  misc_RNA (1)...(19): siRNA sense strand
acacggcucucaccaacua

SEQ ID NO: 1975153 - RNA, 19 nt, Homo sapiens
  misc_RNA (1)...(19): siRNA sense strand
gagaauuccuucagugagu

SEQ ID NO: 1975154 - RNA, 19 nt, Homo sapiens
  misc_RNA (1)...(19): siRNA sense strand
gcaaugaagaucccucuga

SEQ ID NO: 1975155 - RNA, 19 nt, Homo sapiens
  misc_RNA (1)...(19): siRNA sense strand
gggaugauuugauugaaga

SEQ ID NO: 1975156 - RNA, 19 nt, Homo sapiens
  misc_RNA (1)...(19): siRNA sense strand
gugcuggacuggauucaaa

SEQ ID NO: 1975157 - RNA, 19 nt, Homo sapiens
  misc_RNA (1)...(19): siRNA sense strand
gaaguuaccaccaaagauc

SEQ ID NO: 1975158 - RNA, 19 nt, Homo sapiens
  misc_RNA (1)...(19): siRNA sense strand
ugaugaaagugacgcauuu

SEQ ID NO: 1975159 - RNA, 19 nt, Homo sapiens
  misc_RNA (1)...(19): siRNA sense strand
uggaaucucuucuauugaa

SEQ ID NO: 1975160 - RNA, 19 nt, Homo sapiens
  misc_RNA (1)...(19): siRNA sense strand
guuuggagauuguguuaaa

SEQ ID NO: 1975161 - RNA, 19 nt, Homo sapiens
  misc_RNA (1)...(19): siRNA sense strand
caaacagcauugcaguuga

SEQ ID NO: 1975162 - RNA, 19 nt, Homo sapiens
  misc_RNA (1)...(19): siRNA sense strand
gaggaaauauuagagaaca

SEQ ID NO: 1975163 - RNA, 19 nt, Homo sapiens
  misc_RNA (1)...(19): siRNA sense strand
gagucaagcagaaaucaua

SEQ ID NO: 1975164 - RNA, 19 nt, Homo sapiens
  misc_RNA (1)...(19): siRNA sense strand
cagagcugcugaagucuuu

SEQ ID NO: 1975165 - RNA, 19 nt, Homo sapiens
  misc_RNA (1)...(19): siRNA sense strand
gcgaagauuuauugcuuau

SEQ ID NO: 1975166 - RNA, 19 nt, Homo sapiens
  misc_RNA (1)...(19): siRNA sense strand
ugaagaugaugaaauggaa

SEQ ID NO: 1975167 - RNA, 19 nt, Homo sapiens
  misc_RNA (1)...(19): siRNA sense strand
caaagauccuucccuugug

SEQ ID NO: 1975168 - RNA, 19 nt, Homo sapiens
  misc_RNA (1)...(19): siRNA sense strand
ccaaagauccuucccuugu

SEQ ID NO: 1975169 - RNA, 19 nt, Homo sapiens
  misc_RNA (1)...(19): siRNA sense strand
caacaugugcugcaaugaa

SEQ ID NO: 1975170 - RNA, 19 nt, Homo sapiens
  misc_RNA (1)...(19): siRNA sense strand
ugagagagacuauagcauu

SEQ ID NO: 1975171 - RNA, 19 nt, Homo sapiens
  misc_RNA (1)...(19): siRNA sense strand
ggcacaauuuggaaucuaa

SEQ ID NO: 1975172 - RNA, 19 nt, Homo sapiens
  misc_RNA (1)...(19): siRNA sense strand
cgaaagagccucgauucaa

SEQ ID NO: 1975173 - RNA, 19 nt, Homo sapiens
  misc_RNA (1)...(19): siRNA sense strand
gcagcguccuugccaaaga

SEQ ID NO: 1975174 - RNA, 19 nt, Homo sapiens
  misc_RNA (1)...(19): siRNA sense strand
gaaggguguuuggagauug

SEQ ID NO: 1975175 - RNA, 19 nt, Homo sapiens
  misc_RNA (1)...(19): siRNA sense strand
caaugaagaucccucugau

SEQ ID NO: 1975176 - RNA, 19 nt, Homo sapiens
  misc_RNA (1)...(19): siRNA sense strand
aagcagaaaucauaaaugc

SEQ ID NO: 1975177 - RNA, 19 nt, Homo sapiens
  misc_RNA (1)...(19): siRNA sense strand
ugcagaggcugaggaaaua

SEQ ID NO: 1975178 - RNA, 19 nt, Homo sapiens
  misc_RNA (1)...(19): siRNA sense strand
gaugaaagugacgcauuua

SEQ ID NO: 1975179 - RNA, 19 nt, Homo sapiens
  misc_RNA (1)...(19): siRNA sense strand
gcaaagcaggcauucauag

SEQ ID NO: 1975180 - RNA, 19 nt, Homo sapiens
  misc_RNA (1)...(19): siRNA sense strand
cuaaacauguugacuuucu

SEQ ID NO: 1975181 - RNA, 19 nt, Homo sapiens
  misc_RNA (1)...(19): siRNA sense strand
ccaaacagcauugcaguug

SEQ ID NO: 1975182 - RNA, 19 nt, Homo sapiens
  misc_RNA (1)...(19): siRNA sense strand
gaacgugcuguggaauaua

SEQ ID NO: 1975183 - RNA, 19 nt, Homo sapiens
  misc_RNA (1)...(19): siRNA sense strand
guaaagaagggagagguaa

SEQ ID NO: 1975184 - RNA, 19 nt, Homo sapiens
  misc_RNA (1)...(19): siRNA sense strand
aaagcaggcauucauagua

SEQ ID NO: 1975185 - RNA, 19 nt, Homo sapiens
  misc_RNA (1)...(19): siRNA sense strand
cauaaaugccuuacuaaag

SEQ ID NO: 1975186 - RNA, 19 nt, Homo sapiens
  misc_RNA (1)...(19): siRNA sense strand
aaacaauggccuccaagaa

SEQ ID NO: 1975187 - RNA, 19 nt, Homo sapiens
  misc_RNA (1)...(19): siRNA sense strand
uaagaacauugggugcuuu

SEQ ID NO: 1975188 - RNA, 19 nt, Homo sapiens
  misc_RNA (1)...(19): siRNA sense strand
gagaacauagccaaugaga

SEQ ID NO: 1975189 - RNA, 19 nt, Homo sapiens
  misc_RNA (1)...(19): siRNA sense strand
gaugcccucuuugauguuu

SEQ ID NO: 1975190 - RNA, 19 nt, Homo sapiens
  misc_RNA (1)...(19): siRNA sense strand
acaauggccuccaagaaca

SEQ ID NO: 1975191 - RNA, 19 nt, Homo sapiens
  misc_RNA (1)...(19): siRNA sense strand
uggaaaccuuugauuagaa

SEQ ID NO: 1975192 - RNA, 19 nt, Homo sapiens
  misc_RNA (1)...(19): siRNA sense strand
gcauugcaguugaccuaug

SEQ ID NO: 1975193 - RNA, 19 nt, Homo sapiens
  misc_RNA (1)...(19): siRNA sense strand
ugaacgugcuguggaauau

SEQ ID NO: 1975194 - RNA, 19 nt, Homo sapiens
  misc_RNA (1)...(19): siRNA sense strand
gcaggcauucauaguagua

SEQ ID NO: 1975195 - RNA, 19 nt, Homo sapiens
  misc_RNA (1)...(19): siRNA sense strand
cauguugacuuucuagaag

SEQ ID NO: 1975196 - RNA, 19 nt, Homo sapiens
  misc_RNA (1)...(19): siRNA sense strand
uggagauuguguuaaagua

SEQ ID NO: 1975197 - RNA, 19 nt, Homo sapiens
  misc_RNA (1)...(19): siRNA sense strand
ggagauuguguuaaaguau

SEQ ID NO: 1975198 - RNA, 19 nt, Homo sapiens
  misc_RNA (1)...(19): siRNA sense strand
aaagaagagucagaaggaa

SEQ ID NO: 1975199 - RNA, 19 nt, Homo sapiens
  misc_RNA (1)...(19): siRNA sense strand
gcugaaacgcaaagguuaa

SEQ ID NO: 1975200 - RNA, 19 nt, Homo sapiens
  misc_RNA (1)...(19): siRNA sense strand
gcaagagucaagcagaaau

SEQ ID NO: 1975201 - RNA, 19 nt, Homo sapiens
  misc_RNA (1)...(19): siRNA sense strand
gaacauugggugcuuucug

SEQ ID NO: 1975202 - RNA, 19 nt, Homo sapiens
  misc_RNA (1)...(19): siRNA sense strand
gcugaugacauuaugcaaa

SEQ ID NO: 1975203 - RNA, 19 nt, Homo sapiens
  misc_RNA (1)...(19): siRNA sense strand
ugaaguuugugaugacaug

SEQ ID NO: 1975204 - RNA, 19 nt, Homo sapiens
  misc_RNA (1)...(19): siRNA sense strand
ugcuaaacauguugacuuu

SEQ ID NO: 1975205 - RNA, 19 nt, Homo sapiens
  misc_RNA (1)...(19): siRNA sense strand
aauggaugcuggugaaaug

SEQ ID NO: 1975206 - RNA, 19 nt, Homo sapiens
  misc_RNA (1)...(19): siRNA sense strand
gacaaggaacugagagaga

SEQ ID NO: 1975207 - RNA, 19 nt, Homo sapiens
  misc_RNA (1)...(19): siRNA sense strand
uugcgaagauuuauugcuu

SEQ ID NO: 1975208 - RNA, 19 nt, Homo sapiens
  misc_RNA (1)...(19): siRNA sense strand
cagcguccuugccaaagaa

SEQ ID NO: 1975209 - RNA, 19 nt, Homo sapiens
  misc_RNA (1)...(19): siRNA sense strand
aagcaggcauucauaguag

SEQ ID NO: 1975210 - RNA, 19 nt, Homo sapiens
  misc_RNA (1)...(19): siRNA sense strand
auaugugaaugcaguagua

SEQ ID NO: 1975211 - RNA, 19 nt, Homo sapiens
  misc_RNA (1)...(19): siRNA sense strand
uugagaacauagccaauga

SEQ ID NO: 1975212 - RNA, 19 nt, Homo sapiens
  misc_RNA (1)...(19): siRNA sense strand
ugaaagugacgcauuuaug

SEQ ID NO: 1975213 - RNA, 19 nt, Homo sapiens
  misc_RNA (1)...(19): siRNA sense strand
gucaacaugugcugcaaug

SEQ ID NO: 1975214 - RNA, 19 nt, Homo sapiens
  misc_RNA (1)...(19): siRNA sense strand
ggaugcuggugaaaugguu

SEQ ID NO: 1975215 - RNA, 19 nt, Homo sapiens
  misc_RNA (1)...(19): siRNA sense strand
gacauuauuccaugcaaga

SEQ ID NO: 1975216 - RNA, 19 nt, Homo sapiens
  misc_RNA (1)...(19): siRNA sense strand
gcacaauuuggaaucuaaa

SEQ ID NO: 1975217 - RNA, 19 nt, Homo sapiens
  misc_RNA (1)...(19): siRNA sense strand
acccagagcugcugaaguc

SEQ ID NO: 1975218 - RNA, 19 nt, Homo sapiens
  misc_RNA (1)...(19): siRNA sense strand
cuauuucaguagcauauug

SEQ ID NO: 1975219 - RNA, 19 nt, Homo sapiens
  misc_RNA (1)...(19): siRNA sense strand
ugcgaagauuuauugcuua

SEQ ID NO: 1975220 - RNA, 19 nt, Homo sapiens
  misc_RNA (1)...(19): siRNA sense strand
uggaugcccucuuugaugu

SEQ ID NO: 1975221 - RNA, 19 nt, Homo sapiens
  misc_RNA (1)...(19): siRNA sense strand
gcuugaaguuaccaccaaa

SEQ ID NO: 1975222 - RNA, 19 nt, Homo sapiens
  misc_RNA (1)...(19): siRNA sense strand
gagugaaugucguuagcau

SEQ ID NO: 1975223 - RNA, 19 nt, Homo sapiens
  misc_RNA (1)...(19): siRNA sense strand
ccaaugagacugugaacgu

SEQ ID NO: 1975224 - RNA, 19 nt, Homo sapiens
  misc_RNA (1)...(19): siRNA sense strand
caaacaauggccuccaaga

SEQ ID NO: 1975225 - RNA, 19 nt, Homo sapiens
  misc_RNA (1)...(19): siRNA sense strand
guaacuauagcacagauca

SEQ ID NO: 1975226 - RNA, 19 nt, Homo sapiens
  misc_RNA (1)...(19): siRNA sense strand
gaaacucuuaagaacauug

SEQ ID NO: 1975227 - RNA, 19 nt, Homo sapiens
  misc_RNA (1)...(19): siRNA sense strand
ggaauuugaugucguggaa

SEQ ID NO: 1975228 - RNA, 19 nt, Homo sapiens
  misc_RNA (1)...(19): siRNA sense strand
gcagaagccacuaauguaa

SEQ ID NO: 1975229 - RNA, 19 nt, Homo sapiens
  misc_RNA (1)...(19): siRNA sense strand
ggaaugacaccaaggaaga

SEQ ID NO: 1975230 - RNA, 19 nt, Homo sapiens
  misc_RNA (1)...(19): siRNA sense strand
gggagacuguggaauuuga

SEQ ID NO: 1975231 - RNA, 19 nt, Homo sapiens
  misc_RNA (1)...(19): siRNA sense strand
gcgcagaagccacuaaugu

SEQ ID NO: 1975232 - RNA, 19 nt, Homo sapiens
  misc_RNA (1)...(19): siRNA sense strand
ggagcgggcugaagacucu

SEQ ID NO: 1975233 - RNA, 19 nt, Homo sapiens
  misc_RNA (1)...(19): siRNA sense strand
ccagacagcuauuaaaaga

SEQ ID NO: 1975234 - RNA, 19 nt, Homo sapiens
  misc_RNA (1)...(19): siRNA sense strand
cgcagaagccacuaaugua

SEQ ID NO: 1975235 - RNA, 19 nt, Homo sapiens
  misc_RNA (1)...(19): siRNA sense strand
gguuacggauucaucaaca

SEQ ID NO: 1975236 - RNA, 19 nt, Homo sapiens
  misc_RNA (1)...(19): siRNA sense strand
gguagaacccaaagagaca

SEQ ID NO: 1975237 - RNA, 19 nt, Homo sapiens
  misc_RNA (1)...(19): siRNA sense strand
ggugguagcggugguggua

SEQ ID NO: 1975238 - RNA, 19 nt, Homo sapiens
  misc_RNA (1)...(19): siRNA sense strand
gccagcagccuaccacaga

SEQ ID NO: 1975239 - RNA, 19 nt, Homo sapiens
  misc_RNA (1)...(19): siRNA sense strand
gugaagggcagccguuaug

SEQ ID NO: 1975240 - RNA, 19 nt, Homo sapiens
  misc_RNA (1)...(19): siRNA sense strand
ucaccagacagcuauuaaa

SEQ ID NO: 1975241 - RNA, 19 nt, Homo sapiens
  misc_RNA (1)...(19): siRNA sense strand
ccagcagccuaccacagaa

SEQ ID NO: 1975242 - RNA, 19 nt, Homo sapiens
  misc_RNA (1)...(19): siRNA sense strand
gaaacaaccccaggaaguu

SEQ ID NO: 1975243 - RNA, 19 nt, Homo sapiens
  misc_RNA (1)...(19): siRNA sense strand
ccugggcacugucaaaugg

SEQ ID NO: 1975244 - RNA, 19 nt, Homo sapiens
  misc_RNA (1)...(19): siRNA sense strand
guucaccagacagcuauua

SEQ ID NO: 1975245 - RNA, 19 nt, Homo sapiens
  misc_RNA (1)...(19): siRNA sense strand
ucaacguccggaaugguua

SEQ ID NO: 1975246 - RNA, 19 nt, Homo sapiens
  misc_RNA (1)...(19): siRNA sense strand
ccaaccagcagcagccuau

SEQ ID NO: 1975247 - RNA, 19 nt, Homo sapiens
  misc_RNA (1)...(19): siRNA sense strand
gaaugacaccaaggaagau

SEQ ID NO: 1975248 - RNA, 19 nt, Homo sapiens
  misc_RNA (1)...(19): siRNA sense strand
agaagccacuaauguaacu

SEQ ID NO: 1975249 - RNA, 19 nt, Homo sapiens
  misc_RNA (1)...(19): siRNA sense strand
acaagccggugcuggcaau

SEQ ID NO: 1975250 - RNA, 19 nt, Homo sapiens
  misc_RNA (1)...(19): siRNA sense strand
gaccaagcccagccaaggu

SEQ ID NO: 1975251 - RNA, 19 nt, Homo sapiens
  misc_RNA (1)...(19): siRNA sense strand
ggagagaagggcgcagaag

SEQ ID NO: 1975252 - RNA, 19 nt, Homo sapiens
  misc_RNA (1)...(19): siRNA sense strand
caaagagacagccccauug

SEQ ID NO: 1975253 - RNA, 19 nt, Homo sapiens
  misc_RNA (1)...(19): siRNA sense strand
ccaaagagacagccccauu

SEQ ID NO: 1975254 - RNA, 19 nt, Homo sapiens
  misc_RNA (1)...(19): siRNA sense strand
caaccagcagcagccuaua

SEQ ID NO: 1975255 - RNA, 19 nt, Homo sapiens
  misc_RNA (1)...(19): siRNA sense strand
caaggucccgcugaugguu

SEQ ID NO: 1975256 - RNA, 19 nt, Homo sapiens
  misc_RNA (1)...(19): siRNA sense strand
ggaaugaccuuaaaugaga

SEQ ID NO: 1975257 - RNA, 19 nt, Homo sapiens
  misc_RNA (1)...(19): siRNA sense strand
gcaauggucauaucuguuu

SEQ ID NO: 1975258 - RNA, 19 nt, Homo sapiens
  misc_RNA (1)...(19): siRNA sense strand
ggucauaucuguuuaucca

SEQ ID NO: 1975259 - RNA, 19 nt, Homo sapiens
  misc_RNA (1)...(19): siRNA sense strand
gcagaaacgacuacagaaa

SEQ ID NO: 1975260 - RNA, 19 nt, Homo sapiens
  misc_RNA (1)...(19): siRNA sense strand
ucagguaccuuauaugaag

SEQ ID NO: 1975261 - RNA, 19 nt, Homo sapiens
  misc_RNA (1)...(19): siRNA sense strand
guaacaagaauccaaagaa

SEQ ID NO: 1975262 - RNA, 19 nt, Homo sapiens
  misc_RNA (1)...(19): siRNA sense strand
gugcgaacauguaacaaga

SEQ ID NO: 1975263 - RNA, 19 nt, Homo sapiens
  misc_RNA (1)...(19): siRNA sense strand
agaaacgacuacagaaaga

SEQ ID NO: 1975264 - RNA, 19 nt, Homo sapiens
  misc_RNA (1)...(19): siRNA sense strand
caucagguaccuuauauga

SEQ ID NO: 1975265 - RNA, 19 nt, Homo sapiens
  misc_RNA (1)...(19): siRNA sense strand
gcgaacauguaacaagaau

SEQ ID NO: 1975266 - RNA, 19 nt, Homo sapiens
  misc_RNA (1)...(19): siRNA sense strand
gaaugaccuuaaaugagaa

SEQ ID NO: 1975267 - RNA, 19 nt, Homo sapiens
  misc_RNA (1)...(19): siRNA sense strand
caauggucauaucuguuua

SEQ ID NO: 1975268 - RNA, 19 nt, Homo sapiens
  misc_RNA (1)...(19): siRNA sense strand
uagcaauggucauaucugu

SEQ ID NO: 1975269 - RNA, 19 nt, Homo sapiens
  misc_RNA (1)...(19): siRNA sense strand
gaccaccggauaauucuuu

SEQ ID NO: 1975270 - RNA, 19 nt, Homo sapiens
  misc_RNA (1)...(19): siRNA sense strand
gaacauguaacaagaaucc

SEQ ID NO: 1975271 - RNA, 19 nt, Homo sapiens
  misc_RNA (1)...(19): siRNA sense strand
gaacuguuggcuuugcaaa

SEQ ID NO: 1975272 - RNA, 19 nt, Homo sapiens
  misc_RNA (1)...(19): siRNA sense strand
gaagaguguucaaaauuca

SEQ ID NO: 1975273 - RNA, 19 nt, Homo sapiens
  misc_RNA (1)...(19): siRNA sense strand
ugacccaccuccuggaaug

SEQ ID NO: 1975274 - RNA, 19 nt, Homo sapiens
  misc_RNA (1)...(19): siRNA sense strand
gaccuuaaaugagaagagu

SEQ ID NO: 1975275 - RNA, 19 nt, Homo sapiens
  misc_RNA (1)...(19): siRNA sense strand
ucaguuugucuuagcauua

SEQ ID NO: 1975276 - RNA, 19 nt, Homo sapiens
  misc_RNA (1)...(19): siRNA sense strand
gagaagaguguucaaaauu

SEQ ID NO: 1975277 - RNA, 19 nt, Homo sapiens
  misc_RNA (1)...(19): siRNA sense strand
gugcaucagguaccuuaua

SEQ ID NO: 1975278 - RNA, 19 nt, Homo sapiens
  misc_RNA (1)...(19): siRNA sense strand
guuuauccauucuaacaga

SEQ ID NO: 1975279 - RNA, 19 nt, Homo sapiens
  misc_RNA (1)...(19): siRNA sense strand
gaaacgacuacagaaagaa

SEQ ID NO: 1975280 - RNA, 19 nt, Homo sapiens
  misc_RNA (1)...(19): siRNA sense strand
ggucauguuuacuggugaa

SEQ ID NO: 1975281 - RNA, 19 nt, Homo sapiens
  misc_RNA (1)...(19): siRNA sense strand
cagaaacgacuacagaaag

SEQ ID NO: 1975282 - RNA, 19 nt, Homo sapiens
  misc_RNA (1)...(19): siRNA sense strand
guuuauagcaauggucaua

SEQ ID NO: 1975283 - RNA, 19 nt, Homo sapiens
  misc_RNA (1)...(19): siRNA sense strand
gacgaccaccggauaauuc

SEQ ID NO: 1975284 - RNA, 19 nt, Homo sapiens
  misc_RNA (1)...(19): siRNA sense strand
caguuugucuuagcauuau

SEQ ID NO: 1975285 - RNA, 19 nt, Homo sapiens
  misc_RNA (1)...(19): siRNA sense strand
uaaaugagaagaguguuca

SEQ ID NO: 1975286 - RNA, 19 nt, Homo sapiens
  misc_RNA (1)...(19): siRNA sense strand
ccaaucaguuugucuuagc

SEQ ID NO: 1975287 - RNA, 19 nt, Homo sapiens
  misc_RNA (1)...(19): siRNA sense strand
ugcaucagguaccuuauau

SEQ ID NO: 1975288 - RNA, 19 nt, Homo sapiens
  misc_RNA (1)...(19): siRNA sense strand
gcucucaguccaaucaguu

SEQ ID NO: 1975289 - RNA, 19 nt, Homo sapiens
  misc_RNA (1)...(19): siRNA sense strand
ugucuuagcauuauuagca

SEQ ID NO: 1975290 - RNA, 19 nt, Homo sapiens
  misc_RNA (1)...(19): siRNA sense strand
ccucauguuuauagcaaug

SEQ ID NO: 1975291 - RNA, 19 nt, Homo sapiens
  misc_RNA (1)...(19): siRNA sense strand
cauaucuguuuauccauuc

SEQ ID NO: 1975292 - RNA, 19 nt, Homo sapiens
  misc_RNA (1)...(19): siRNA sense strand
cacaguggauuguagacau

SEQ ID NO: 1975293 - RNA, 19 nt, Homo sapiens
  misc_RNA (1)...(19): siRNA sense strand
aagagacgaccaccggaua

SEQ ID NO: 1975294 - RNA, 19 nt, Homo sapiens
  misc_RNA (1)...(19): siRNA sense strand
guccaaucaguuugucuua

SEQ ID NO: 1975295 - RNA, 19 nt, Homo sapiens
  misc_RNA (1)...(19): siRNA sense strand
agacauggaaggugcauca

SEQ ID NO: 1975296 - RNA, 19 nt, Homo sapiens
  misc_RNA (1)...(19): siRNA sense strand
ugagaagaguguucaaaau

SEQ ID NO: 1975297 - RNA, 19 nt, Homo sapiens
  misc_RNA (1)...(19): siRNA sense strand
cauguaacaagaauccaaa

SEQ ID NO: 1975298 - RNA, 19 nt, Homo sapiens
  misc_RNA (1)...(19): siRNA sense strand
acaguggauuguagacaug

SEQ ID NO: 1975299 - RNA, 19 nt, Homo sapiens
  misc_RNA (1)...(19): siRNA sense strand
caaaauggugguaucauga

SEQ ID NO: 1975300 - RNA, 19 nt, Homo sapiens
  misc_RNA (1)...(19): siRNA sense strand
uuauagcaauggucauauc

SEQ ID NO: 1975301 - RNA, 19 nt, Homo sapiens
  misc_RNA (1)...(19): siRNA sense strand
agaagaguguucaaaauuc

SEQ ID NO: 1975302 - RNA, 19 nt, Homo sapiens
  misc_RNA (1)...(19): siRNA sense strand
gaaaauauuccuguucauc

SEQ ID NO: 1975303 - RNA, 19 nt, Homo sapiens
  misc_RNA (1)...(19): siRNA sense strand
cuccuggaaugaccuuaaa

SEQ ID NO: 1975304 - RNA, 19 nt, Homo sapiens
  misc_RNA (1)...(19): siRNA sense strand
aaauggugguaucaugaug

SEQ ID NO: 1975305 - RNA, 19 nt, Homo sapiens
  misc_RNA (1)...(19): siRNA sense strand
agagacgaccaccggauaa

SEQ ID NO: 1975306 - RNA, 19 nt, Homo sapiens
  misc_RNA (1)...(19): siRNA sense strand
cuggaaugaccuuaaauga

SEQ ID NO: 1975307 - RNA, 19 nt, Homo sapiens
  misc_RNA (1)...(19): siRNA sense strand
caaucaguuugucuuagca

SEQ ID NO: 1975308 - RNA, 19 nt, Homo sapiens
  misc_RNA (1)...(19): siRNA sense strand
cuguucauccucauguuua

SEQ ID NO: 1975309 - RNA, 19 nt, Homo sapiens
  misc_RNA (1)...(19): siRNA sense strand
acaaaauggugguaucaug

SEQ ID NO: 1975310 - RNA, 19 nt, Homo sapiens
  misc_RNA (1)...(19): siRNA sense strand
guucauccucauguuuaua

SEQ ID NO: 1975311 - RNA, 19 nt, Homo sapiens
  misc_RNA (1)...(19): siRNA sense strand
ccucaggucauguuuacug

SEQ ID NO: 1975312 - RNA, 19 nt, Homo sapiens
  misc_RNA (1)...(19): siRNA sense strand
agacgaccaccggauaauu

SEQ ID NO: 1975313 - RNA, 19 nt, Homo sapiens
  misc_RNA (1)...(19): siRNA sense strand
gagacgaccaccggauaau

SEQ ID NO: 1975314 - RNA, 19 nt, Homo sapiens
  misc_RNA (1)...(19): siRNA sense strand
ccuggaaugaccuuaaaug

SEQ ID NO: 1975315 - RNA, 19 nt, Homo sapiens
  misc_RNA (1)...(19): siRNA sense strand
gaaaacaaaauggugguau

SEQ ID NO: 1975316 - RNA, 19 nt, Homo sapiens
  misc_RNA (1)...(19): siRNA sense strand
uuaguagucgauauccuuu

SEQ ID NO: 1975317 - RNA, 19 nt, Homo sapiens
  misc_RNA (1)...(19): siRNA sense strand
uggaaugaccuuaaaugag

SEQ ID NO: 1975318 - RNA, 19 nt, Homo sapiens
  misc_RNA (1)...(19): siRNA sense strand
gaccagaaguccugcuuua

SEQ ID NO: 1975319 - RNA, 19 nt, Homo sapiens
  misc_RNA (1)...(19): siRNA sense strand
gaaugaagaugcaggaugu

SEQ ID NO: 1975320 - RNA, 19 nt, Homo sapiens
  misc_RNA (1)...(19): siRNA sense strand
cagcuuggcucgaugcuuu

SEQ ID NO: 1975321 - RNA, 19 nt, Homo sapiens
  misc_RNA (1)...(19): siRNA sense strand
caagauguauccaggaaga

SEQ ID NO: 1975322 - RNA, 19 nt, Homo sapiens
  misc_RNA (1)...(19): siRNA sense strand
gaucaaauggcuauaagaa

SEQ ID NO: 1975323 - RNA, 19 nt, Homo sapiens
  misc_RNA (1)...(19): siRNA sense strand
ccaaaggcaaaguauauua

SEQ ID NO: 1975324 - RNA, 19 nt, Homo sapiens
  misc_RNA (1)...(19): siRNA sense strand
ugaaagcaguggaggcuaa

SEQ ID NO: 1975325 - RNA, 19 nt, Homo sapiens
  misc_RNA (1)...(19): siRNA sense strand
gaccaaaggcaaaguauau

SEQ ID NO: 1975326 - RNA, 19 nt, Homo sapiens
  misc_RNA (1)...(19): siRNA sense strand
ccaggaugcuucuucauga

SEQ ID NO: 1975327 - RNA, 19 nt, Homo sapiens
  misc_RNA (1)...(19): siRNA sense strand
aagggugccugauagauua

SEQ ID NO: 1975328 - RNA, 19 nt, Homo sapiens
  misc_RNA (1)...(19): siRNA sense strand
ucagaagccuacaaugaaa

SEQ ID NO: 1975329 - RNA, 19 nt, Homo sapiens
  misc_RNA (1)...(19): siRNA sense strand
gauguggaccuguucauaa

SEQ ID NO: 1975330 - RNA, 19 nt, Homo sapiens
  misc_RNA (1)...(19): siRNA sense strand
uaaagagagugaugacaau

SEQ ID NO: 1975331 - RNA, 19 nt, Homo sapiens
  misc_RNA (1)...(19): siRNA sense strand
cagaaguccugcuuuaaau

SEQ ID NO: 1975332 - RNA, 19 nt, Homo sapiens
  misc_RNA (1)...(19): siRNA sense strand
guaaagagagugaugacaa

SEQ ID NO: 1975333 - RNA, 19 nt, Homo sapiens
  misc_RNA (1)...(19): siRNA sense strand
ggagugcagucuucaaagu

SEQ ID NO: 1975334 - RNA, 19 nt, Homo sapiens
  misc_RNA (1)...(19): siRNA sense strand
gaaagacuguugcauacac

SEQ ID NO: 1975335 - RNA, 19 nt, Homo sapiens
  misc_RNA (1)...(19): siRNA sense strand
cugaagauguggauauuga

SEQ ID NO: 1975336 - RNA, 19 nt, Homo sapiens
  misc_RNA (1)...(19): siRNA sense strand
ccagaaguccugcuuuaaa

SEQ ID NO: 1975337 - RNA, 19 nt, Homo sapiens
  misc_RNA (1)...(19): siRNA sense strand
gacauuccacauauaguua

SEQ ID NO: 1975338 - RNA, 19 nt, Homo sapiens
  misc_RNA (1)...(19): siRNA sense strand
uagaagaacuggcugugau

SEQ ID NO: 1975339 - RNA, 19 nt, Homo sapiens
  misc_RNA (1)...(19): siRNA sense strand
gaagaacuggcugugauuu

SEQ ID NO: 1975340 - RNA, 19 nt, Homo sapiens
  misc_RNA (1)...(19): siRNA sense strand
gaaaucagcaagauguauc

SEQ ID NO: 1975341 - RNA, 19 nt, Homo sapiens
  misc_RNA (1)...(19): siRNA sense strand
gaaguaaagagagugauga

SEQ ID NO: 1975342 - RNA, 19 nt, Homo sapiens
  misc_RNA (1)...(19): siRNA sense strand
gugaguggcuauacuuuca

SEQ ID NO: 1975343 - RNA, 19 nt, Homo sapiens
  misc_RNA (1)...(19): siRNA sense strand
ucacaaucccauaucuuua

SEQ ID NO: 1975344 - RNA, 19 nt, Homo sapiens
  misc_RNA (1)...(19): siRNA sense strand
aaugaaagacuguugcaua

SEQ ID NO: 1975345 - RNA, 19 nt, Homo sapiens
  misc_RNA (1)...(19): siRNA sense strand
gcuauaagaagcuacuaaa

SEQ ID NO: 1975346 - RNA, 19 nt, Homo sapiens
  misc_RNA (1)...(19): siRNA sense strand
cuaacucuguguuucuuaa

SEQ ID NO: 1975347 - RNA, 19 nt, Homo sapiens
  misc_RNA (1)...(19): siRNA sense strand
gauaauguacuucuugaca

SEQ ID NO: 1975348 - RNA, 19 nt, Homo sapiens
  misc_RNA (1)...(19): siRNA sense strand
agagagugaugacaauuau

SEQ ID NO: 1975349 - RNA, 19 nt, Homo sapiens
  misc_RNA (1)...(19): siRNA sense strand
ccaaccaaauaaagaaguu

SEQ ID NO: 1975350 - RNA, 19 nt, Homo sapiens
  misc_RNA (1)...(19): siRNA sense strand
caagggugccugauagauu

SEQ ID NO: 1975351 - RNA, 19 nt, Homo sapiens
  misc_RNA (1)...(19): siRNA sense strand
guagccaacugcuuuguag

SEQ ID NO: 1975352 - RNA, 19 nt, Homo sapiens
  misc_RNA (1)...(19): siRNA sense strand
uccaguagguggugcuaua

SEQ ID NO: 1975353 - RNA, 19 nt, Homo sapiens
  misc_RNA (1)...(19): siRNA sense strand
gcugugauuugugcuaauu

SEQ ID NO: 1975354 - RNA, 19 nt, Homo sapiens
  misc_RNA (1)...(19): siRNA sense strand
gcaacugguaugagucuaa

SEQ ID NO: 1975355 - RNA, 19 nt, Homo sapiens
  misc_RNA (1)...(19): siRNA sense strand
auaaagaaguugucagaag

SEQ ID NO: 1975356 - RNA, 19 nt, Homo sapiens
  misc_RNA (1)...(19): siRNA sense strand
ggacgauccggugauauuu

SEQ ID NO: 1975357 - RNA, 19 nt, Homo sapiens
  misc_RNA (1)...(19): siRNA sense strand
ugucagaagccuacaauga

SEQ ID NO: 1975358 - RNA, 19 nt, Homo sapiens
  misc_RNA (1)...(19): siRNA sense strand
ugacaaaacugaagaugug

SEQ ID NO: 1975359 - RNA, 19 nt, Homo sapiens
  misc_RNA (1)...(19): siRNA sense strand
auaauuacccuugugcuua

SEQ ID NO: 1975360 - RNA, 19 nt, Homo sapiens
  misc_RNA (1)...(19): siRNA sense strand
gcuccaagggugccugaua

SEQ ID NO: 1975361 - RNA, 19 nt, Homo sapiens
  misc_RNA (1)...(19): siRNA sense strand
gaaauggcuuuaaaacuag

SEQ ID NO: 1975362 - RNA, 19 nt, Homo sapiens
  misc_RNA (1)...(19): siRNA sense strand
ggauguggaccuguucaua

SEQ ID NO: 1975363 - RNA, 19 nt, Homo sapiens
  misc_RNA (1)...(19): siRNA sense strand
gucagaagccuacaaugaa

SEQ ID NO: 1975364 - RNA, 19 nt, Homo sapiens
  misc_RNA (1)...(19): siRNA sense strand
guucagagcuuggacaaaa

SEQ ID NO: 1975365 - RNA, 19 nt, Homo sapiens
  misc_RNA (1)...(19): siRNA sense strand
caaaguguaugcaucucau

SEQ ID NO: 1975366 - RNA, 19 nt, Homo sapiens
  misc_RNA (1)...(19): siRNA sense strand
ggaaaucagcaagauguau

SEQ ID NO: 1975367 - RNA, 19 nt, Homo sapiens
  misc_RNA (1)...(19): siRNA sense strand
aaacugaagauguggauau

SEQ ID NO: 1975368 - RNA, 19 nt, Homo sapiens
  misc_RNA (1)...(19): siRNA sense strand
agacuugacagguguuuaa

SEQ ID NO: 1975369 - RNA, 19 nt, Homo sapiens
  misc_RNA (1)...(19): siRNA sense strand
ccucuuggguccaugcaaa

SEQ ID NO: 1975370 - RNA, 19 nt, Homo sapiens
  misc_RNA (1)...(19): siRNA sense strand
aagagagugaugacaauua

SEQ ID NO: 1975371 - RNA, 19 nt, Homo sapiens
  misc_RNA (1)...(19): siRNA sense strand
gugacgagcugcguacaga

SEQ ID NO: 1975372 - RNA, 19 nt, Homo sapiens
  misc_RNA (1)...(19): siRNA sense strand
gaaaagaacgaaguaaaga

SEQ ID NO: 1975373 - RNA, 19 nt, Homo sapiens
  misc_RNA (1)...(19): siRNA sense strand
ugacauuccacauauaguu

SEQ ID NO: 1975374 - RNA, 19 nt, Homo sapiens
  misc_RNA (1)...(19): siRNA sense strand
ggcucgaguugguagaaua

SEQ ID NO: 1975375 - RNA, 19 nt, Homo sapiens
  misc_RNA (1)...(19): siRNA sense strand
aaagaacgaaguaaagaga

SEQ ID NO: 1975376 - RNA, 19 nt, Homo sapiens
  misc_RNA (1)...(19): siRNA sense strand
ucacucagcuuggcucgau

SEQ ID NO: 1975377 - RNA, 19 nt, Homo sapiens
  misc_RNA (1)...(19): siRNA sense strand
guagguggugcuauaauug

SEQ ID NO: 1975378 - RNA, 19 nt, Homo sapiens
  misc_RNA (1)...(19): siRNA sense strand
uaauguacuucuugacaca

SEQ ID NO: 1975379 - RNA, 19 nt, Homo sapiens
  misc_RNA (1)...(19): siRNA sense strand
cagcuucaccuucuuuaga

SEQ ID NO: 1975380 - RNA, 19 nt, Homo sapiens
  misc_RNA (1)...(19): siRNA sense strand
aguagguggugcuauaauu

SEQ ID NO: 1975381 - RNA, 19 nt, Homo sapiens
  misc_RNA (1)...(19): siRNA sense strand
agauguggauauugaagaa

SEQ ID NO: 1975382 - RNA, 19 nt, Homo sapiens
  misc_RNA (1)...(19): siRNA sense strand
agagugaugacaauuauga

SEQ ID NO: 1975383 - RNA, 19 nt, Homo sapiens
  misc_RNA (1)...(19): siRNA sense strand
caucagccaucggaaugaa

SEQ ID NO: 1975384 - RNA, 19 nt, Homo sapiens
  misc_RNA (1)...(19): siRNA sense strand
caggaaaucagcaagaugu

SEQ ID NO: 1975385 - RNA, 19 nt, Homo sapiens
  misc_RNA (1)...(19): siRNA sense strand
uaauuacccuugugcuuac

SEQ ID NO: 1975386 - RNA, 19 nt, Homo sapiens
  misc_RNA (1)...(19): siRNA sense strand
gaaagcaguggaggcuaaa

SEQ ID NO: 1975387 - RNA, 19 nt, Homo sapiens
  misc_RNA (1)...(19): siRNA sense strand
gaagauguggauauugaag

SEQ ID NO: 1975388 - RNA, 19 nt, Homo sapiens
  misc_RNA (1)...(19): siRNA sense strand
guuuaaaggcaguaagaaa

SEQ ID NO: 1975389 - RNA, 19 nt, Homo sapiens
  misc_RNA (1)...(19): siRNA sense strand
ugauauuucugcugugcaa

SEQ ID NO: 1975390 - RNA, 19 nt, Homo sapiens
  misc_RNA (1)...(19): siRNA sense strand
agaacuggcugugauuugu

SEQ ID NO: 1975391 - RNA, 19 nt, Homo sapiens
  misc_RNA (1)...(19): siRNA sense strand
gaacuugggccugauugca

SEQ ID NO: 1975392 - RNA, 19 nt, Homo sapiens
  misc_RNA (1)...(19): siRNA sense strand
gaguggcuauacuuucaga

SEQ ID NO: 1975393 - RNA, 19 nt, Homo sapiens
  misc_RNA (1)...(19): siRNA sense strand
gcucuagccuuuugaacaa

SEQ ID NO: 1975394 - RNA, 19 nt, Homo sapiens
  misc_RNA (1)...(19): siRNA sense strand
caugaucacugcagguuuu

SEQ ID NO: 1975395 - RNA, 19 nt, Homo sapiens
  misc_RNA (1)...(19): siRNA sense strand
aaucccauaucuuuagcua

SEQ ID NO: 1975396 - RNA, 19 nt, Homo sapiens
  misc_RNA (1)...(19): siRNA sense strand
gcuauaauugcuggcuuua

SEQ ID NO: 1975397 - RNA, 19 nt, Homo sapiens
  misc_RNA (1)...(19): siRNA sense strand
gugcagucuucaaagugua

SEQ ID NO: 1975398 - RNA, 19 nt, Homo sapiens
  misc_RNA (1)...(19): siRNA sense strand
gaacuggcugugauuugug

SEQ ID NO: 1975399 - RNA, 19 nt, Homo sapiens
  misc_RNA (1)...(19): siRNA sense strand
aaagaccaaaggcaaagua

SEQ ID NO: 1975400 - RNA, 19 nt, Homo sapiens
  misc_RNA (1)...(19): siRNA sense strand
ugcauucuguguauucauu

SEQ ID NO: 1975401 - RNA, 19 nt, Homo sapiens
  misc_RNA (1)...(19): siRNA sense strand
cugauugcauucuguguau

SEQ ID NO: 1975402 - RNA, 19 nt, Homo sapiens
  misc_RNA (1)...(19): siRNA sense strand
guucauucauggcauugga

SEQ ID NO: 1975403 - RNA, 19 nt, Homo sapiens
  misc_RNA (1)...(19): siRNA sense strand
cuagauaauguacuucuug

SEQ ID NO: 1975404 - RNA, 19 nt, Homo sapiens
  misc_RNA (1)...(19): siRNA sense strand
ucagaggcuuuaugucaca

SEQ ID NO: 1975405 - RNA, 19 nt, Homo sapiens
  misc_RNA (1)...(19): siRNA sense strand
uaauugcuggcuuuaauga

SEQ ID NO: 1975406 - RNA, 19 nt, Homo sapiens
  misc_RNA (1)...(19): siRNA sense strand
uauggcaacugguaugagu

SEQ ID NO: 1975407 - RNA, 19 nt, Homo sapiens
  misc_RNA (1)...(19): siRNA sense strand
uauugucacuuggaucaaa

SEQ ID NO: 1975408 - RNA, 19 nt, Homo sapiens
  misc_RNA (1)...(19): siRNA sense strand
aaagcuggcugguguccau

SEQ ID NO: 1975409 - RNA, 19 nt, Homo sapiens
  misc_RNA (1)...(19): siRNA sense strand
uuucagaggcuuuauguca

SEQ ID NO: 1975410 - RNA, 19 nt, Homo sapiens
  misc_RNA (1)...(19): siRNA sense strand
cuuuagcuaugacacuuaa

SEQ ID NO: 1975411 - RNA, 19 nt, Homo sapiens
  misc_RNA (1)...(19): siRNA sense strand
ccugauagauuagaagaac

SEQ ID NO: 1975412 - RNA, 19 nt, Homo sapiens
  misc_RNA (1)...(19): siRNA sense strand
cgaaguaaagagagugaug

SEQ ID NO: 1975413 - RNA, 19 nt, Homo sapiens
  misc_RNA (1)...(19): siRNA sense strand
agaccaaaggcaaaguaua

SEQ ID NO: 1975414 - RNA, 19 nt, Homo sapiens
  misc_RNA (1)...(19): siRNA sense strand
gagccuguggugauagaaa

SEQ ID NO: 1975415 - RNA, 19 nt, Homo sapiens
  misc_RNA (1)...(19): siRNA sense strand
ccaaauaaagaaguuguca

SEQ ID NO: 1975416 - RNA, 19 nt, Homo sapiens
  misc_RNA (1)...(19): siRNA sense strand
auugcuggcuuuaaugauu

SEQ ID NO: 1975417 - RNA, 19 nt, Homo sapiens
  misc_RNA (1)...(19): siRNA sense strand
gaauagaugcuuuuguuca

SEQ ID NO: 1975418 - RNA, 19 nt, Homo sapiens
  misc_RNA (1)...(19): siRNA sense strand
gaccagaaguccugcuuua

SEQ ID NO: 1975419 - RNA, 19 nt, Homo sapiens
  misc_RNA (1)...(19): siRNA sense strand
gaaugaagaugcaggaugu

SEQ ID NO: 1975420 - RNA, 19 nt, Homo sapiens
  misc_RNA (1)...(19): siRNA sense strand
cagcuuggcucgaugcuuu

SEQ ID NO: 1975421 - RNA, 19 nt, Homo sapiens
  misc_RNA (1)...(19): siRNA sense strand
caagauguauccaggaaga

SEQ ID NO: 1975422 - RNA, 19 nt, Homo sapiens
  misc_RNA (1)...(19): siRNA sense strand
gaucaaauggcuauaagaa

SEQ ID NO: 1975423 - RNA, 19 nt, Homo sapiens
  misc_RNA (1)...(19): siRNA sense strand
ccaaaggcaaaguauauua

SEQ ID NO: 1975424 - RNA, 19 nt, Homo sapiens
  misc_RNA (1)...(19): siRNA sense strand
ugaaagcaguggaggcuaa

SEQ ID NO: 1975425 - RNA, 19 nt, Homo sapiens
  misc_RNA (1)...(19): siRNA sense strand
gaccaaaggcaaaguauau

SEQ ID NO: 1975426 - RNA, 19 nt, Homo sapiens
  misc_RNA (1)...(19): siRNA sense strand
ccaggaugcuucuucauga

SEQ ID NO: 1975427 - RNA, 19 nt, Homo sapiens
  misc_RNA (1)...(19): siRNA sense strand
aagggugccugauagauua

SEQ ID NO: 1975428 - RNA, 19 nt, Homo sapiens
  misc_RNA (1)...(19): siRNA sense strand
ucagaagccuacaaugaaa

SEQ ID NO: 1975429 - RNA, 19 nt, Homo sapiens
  misc_RNA (1)...(19): siRNA sense strand
gauguggaccuguucauaa

SEQ ID NO: 1975430 - RNA, 19 nt, Homo sapiens
  misc_RNA (1)...(19): siRNA sense strand
uaaagagagugaugacaau

SEQ ID NO: 1975431 - RNA, 19 nt, Homo sapiens
  misc_RNA (1)...(19): siRNA sense strand
cagaaguccugcuuuaaau

SEQ ID NO: 1975432 - RNA, 19 nt, Homo sapiens
  misc_RNA (1)...(19): siRNA sense strand
guaaagagagugaugacaa

SEQ ID NO: 1975433 - RNA, 19 nt, Homo sapiens
  misc_RNA (1)...(19): siRNA sense strand
ggagugcagucuucaaagu

SEQ ID NO: 1975434 - RNA, 19 nt, Homo sapiens
  misc_RNA (1)...(19): siRNA sense strand
gaaagacuguugcauacac

SEQ ID NO: 1975435 - RNA, 19 nt, Homo sapiens
  misc_RNA (1)...(19): siRNA sense strand
cugaagauguggauauuga

SEQ ID NO: 1975436 - RNA, 19 nt, Homo sapiens
  misc_RNA (1)...(19): siRNA sense strand
ccagaaguccugcuuuaaa

SEQ ID NO: 1975437 - RNA, 19 nt, Homo sapiens
  misc_RNA (1)...(19): siRNA sense strand
gacauuccacauauaguua

SEQ ID NO: 1975438 - RNA, 19 nt, Homo sapiens
  misc_RNA (1)...(19): siRNA sense strand
uagaagaacuggcugugau

SEQ ID NO: 1975439 - RNA, 19 nt, Homo sapiens
  misc_RNA (1)...(19): siRNA sense strand
gaagaacuggcugugauuu

SEQ ID NO: 1975440 - RNA, 19 nt, Homo sapiens
  misc_RNA (1)...(19): siRNA sense strand
gaaaucagcaagauguauc

SEQ ID NO: 1975441 - RNA, 19 nt, Homo sapiens
  misc_RNA (1)...(19): siRNA sense strand
gaaguaaagagagugauga

SEQ ID NO: 1975442 - RNA, 19 nt, Homo sapiens
  misc_RNA (1)...(19): siRNA sense strand
gugaguggcuauacuuuca

SEQ ID NO: 1975443 - RNA, 19 nt, Homo sapiens
  misc_RNA (1)...(19): siRNA sense strand
ucacaaucccauaucuuua

SEQ ID NO: 1975444 - RNA, 19 nt, Homo sapiens
  misc_RNA (1)...(19): siRNA sense strand
aaugaaagacuguugcaua

SEQ ID NO: 1975445 - RNA, 19 nt, Homo sapiens
  misc_RNA (1)...(19): siRNA sense strand
gcuauaagaagcuacuaaa

SEQ ID NO: 1975446 - RNA, 19 nt, Homo sapiens
  misc_RNA (1)...(19): siRNA sense strand
cuaacucuguguuucuuaa

SEQ ID NO: 1975447 - RNA, 19 nt, Homo sapiens
  misc_RNA (1)...(19): siRNA sense strand
gauaauguacuucuugaca

SEQ ID NO: 1975448 - RNA, 19 nt, Homo sapiens
  misc_RNA (1)...(19): siRNA sense strand
agagagugaugacaauuau

SEQ ID NO: 1975449 - RNA, 19 nt, Homo sapiens
  misc_RNA (1)...(19): siRNA sense strand
ccaaccaaauaaagaaguu

SEQ ID NO: 1975450 - RNA, 19 nt, Homo sapiens
  misc_RNA (1)...(19): siRNA sense strand
caagggugccugauagauu

SEQ ID NO: 1975451 - RNA, 19 nt, Homo sapiens
  misc_RNA (1)...(19): siRNA sense strand
gcaacugguaugagucuaa

SEQ ID NO: 1975452 - RNA, 19 nt, Homo sapiens
  misc_RNA (1)...(19): siRNA sense strand
uccaguagguggugcuaua

SEQ ID NO: 1975453 - RNA, 19 nt, Homo sapiens
  misc_RNA (1)...(19): siRNA sense strand
gcugugauuugugcuaauu

SEQ ID NO: 1975454 - RNA, 19 nt, Homo sapiens
  misc_RNA (1)...(19): siRNA sense strand
guagccaacugcuuuguag

SEQ ID NO: 1975455 - RNA, 19 nt, Homo sapiens
  misc_RNA (1)...(19): siRNA sense strand
auaaagaaguugucagaag

SEQ ID NO: 1975456 - RNA, 19 nt, Homo sapiens
  misc_RNA (1)...(19): siRNA sense strand
ggacgauccggugauauuu

SEQ ID NO: 1975457 - RNA, 19 nt, Homo sapiens
  misc_RNA (1)...(19): siRNA sense strand
ugucagaagccuacaauga

SEQ ID NO: 1975458 - RNA, 19 nt, Homo sapiens
  misc_RNA (1)...(19): siRNA sense strand
ugacaaaacugaagaugug

SEQ ID NO: 1975459 - RNA, 19 nt, Homo sapiens
  misc_RNA (1)...(19): siRNA sense strand
auaauuacccuugugcuua

SEQ ID NO: 1975460 - RNA, 19 nt, Homo sapiens
  misc_RNA (1)...(19): siRNA sense strand
gcuccaagggugccugaua

SEQ ID NO: 1975461 - RNA, 19 nt, Homo sapiens
  misc_RNA (1)...(19): siRNA sense strand
gaaauggcuuuaaaacuag

SEQ ID NO: 1975462 - RNA, 19 nt, Homo sapiens
  misc_RNA (1)...(19): siRNA sense strand
ggauguggaccuguucaua

SEQ ID NO: 1975463 - RNA, 19 nt, Homo sapiens
  misc_RNA (1)...(19): siRNA sense strand
gucagaagccuacaaugaa

SEQ ID NO: 1975464 - RNA, 19 nt, Homo sapiens
  misc_RNA (1)...(19): siRNA sense strand
guucagagcuuggacaaaa

SEQ ID NO: 1975465 - RNA, 19 nt, Homo sapiens
  misc_RNA (1)...(19): siRNA sense strand
caaaguguaugcaucucau

SEQ ID NO: 1975466 - RNA, 19 nt, Homo sapiens
  misc_RNA (1)...(19): siRNA sense strand
ggaaaucagcaagauguau

SEQ ID NO: 1975467 - RNA, 19 nt, Homo sapiens
  misc_RNA (1)...(19): siRNA sense strand
aaacugaagauguggauau

SEQ ID NO: 1975468 - RNA, 19 nt, Homo sapiens
  misc_RNA (1)...(19): siRNA sense strand
agacuugacagguguuuaa

SEQ ID NO: 1975469 - RNA, 19 nt, Homo sapiens
  misc_RNA (1)...(19): siRNA sense strand
ccucuuggguccaugcaaa

SEQ ID NO: 1975470 - RNA, 19 nt, Homo sapiens
  misc_RNA (1)...(19): siRNA sense strand
aagagagugaugacaauua

SEQ ID NO: 1975471 - RNA, 19 nt, Homo sapiens
  misc_RNA (1)...(19): siRNA sense strand
gugacgagcugcguacaga

SEQ ID NO: 1975472 - RNA, 19 nt, Homo sapiens
  misc_RNA (1)...(19): siRNA sense strand
gaaaagaacgaaguaaaga

SEQ ID NO: 1975473 - RNA, 19 nt, Homo sapiens
  misc_RNA (1)...(19): siRNA sense strand
ugacauuccacauauaguu

SEQ ID NO: 1975474 - RNA, 19 nt, Homo sapiens
  misc_RNA (1)...(19): siRNA sense strand
ggcucgaguugguagaaua

SEQ ID NO: 1975475 - RNA, 19 nt, Homo sapiens
  misc_RNA (1)...(19): siRNA sense strand
aaagaacgaaguaaagaga

SEQ ID NO: 1975476 - RNA, 19 nt, Homo sapiens
  misc_RNA (1)...(19): siRNA sense strand
ucacucagcuuggcucgau

SEQ ID NO: 1975477 - RNA, 19 nt, Homo sapiens
  misc_RNA (1)...(19): siRNA sense strand
guagguggugcuauaauug

SEQ ID NO: 1975478 - RNA, 19 nt, Homo sapiens
  misc_RNA (1)...(19): siRNA sense strand
uaauguacuucuugacaca

SEQ ID NO: 1975479 - RNA, 19 nt, Homo sapiens
  misc_RNA (1)...(19): siRNA sense strand
cagcuucaccuucuuuaga

SEQ ID NO: 1975480 - RNA, 19 nt, Homo sapiens
  misc_RNA (1)...(19): siRNA sense strand
aguagguggugcuauaauu

SEQ ID NO: 1975481 - RNA, 19 nt, Homo sapiens
  misc_RNA (1)...(19): siRNA sense strand
agauguggauauugaagaa

SEQ ID NO: 1975482 - RNA, 19 nt, Homo sapiens
  misc_RNA (1)...(19): siRNA sense strand
agagugaugacaauuauga

SEQ ID NO: 1975483 - RNA, 19 nt, Homo sapiens
  misc_RNA (1)...(19): siRNA sense strand
caucagccaucggaaugaa

SEQ ID NO: 1975484 - RNA, 19 nt, Homo sapiens
  misc_RNA (1)...(19): siRNA sense strand
caggaaaucagcaagaugu

SEQ ID NO: 1975485 - RNA, 19 nt, Homo sapiens
  misc_RNA (1)...(19): siRNA sense strand
uaauuacccuugugcuuac

SEQ ID NO: 1975486 - RNA, 19 nt, Homo sapiens
  misc_RNA (1)...(19): siRNA sense strand
gaaagcaguggaggcuaaa

SEQ ID NO: 1975487 - RNA, 19 nt, Homo sapiens
  misc_RNA (1)...(19): siRNA sense strand
gaagauguggauauugaag

SEQ ID NO: 1975488 - RNA, 19 nt, Homo sapiens
  misc_RNA (1)...(19): siRNA sense strand
guuuaaaggcaguaagaaa

SEQ ID NO: 1975489 - RNA, 19 nt, Homo sapiens
  misc_RNA (1)...(19): siRNA sense strand
ugauauuucugcugugcaa

SEQ ID NO: 1975490 - RNA, 19 nt, Homo sapiens
  misc_RNA (1)...(19): siRNA sense strand
agaacuggcugugauuugu

SEQ ID NO: 1975491 - RNA, 19 nt, Homo sapiens
  misc_RNA (1)...(19): siRNA sense strand
gaacuugggccugauugca

SEQ ID NO: 1975492 - RNA, 19 nt, Homo sapiens
  misc_RNA (1)...(19): siRNA sense strand
gcucuagccuuuugaacaa

SEQ ID NO: 1975493 - RNA, 19 nt, Homo sapiens
  misc_RNA (1)...(19): siRNA sense strand
gaguggcuauacuuucaga

SEQ ID NO: 1975494 - RNA, 19 nt, Homo sapiens
  misc_RNA (1)...(19): siRNA sense strand
caugaucacugcagguuuu

SEQ ID NO: 1975495 - RNA, 19 nt, Homo sapiens
  misc_RNA (1)...(19): siRNA sense strand
aaagaccaaaggcaaagua

SEQ ID NO: 1975496 - RNA, 19 nt, Homo sapiens
  misc_RNA (1)...(19): siRNA sense strand
aaucccauaucuuuagcua

SEQ ID NO: 1975497 - RNA, 19 nt, Homo sapiens
  misc_RNA (1)...(19): siRNA sense strand
gcuauaauugcuggcuuua

SEQ ID NO: 1975498 - RNA, 19 nt, Homo sapiens
  misc_RNA (1)...(19): siRNA sense strand
gugcagucuucaaagugua

SEQ ID NO: 1975499 - RNA, 19 nt, Homo sapiens
  misc_RNA (1)...(19): siRNA sense strand
gaacuggcugugauuugug

SEQ ID NO: 1975500 - RNA, 19 nt, Homo sapiens
  misc_RNA (1)...(19): siRNA sense strand
ugcauucuguguauucauu

SEQ ID NO: 1975501 - RNA, 19 nt, Homo sapiens
  misc_RNA (1)...(19): siRNA sense strand
cugauugcauucuguguau

SEQ ID NO: 1975502 - RNA, 19 nt, Homo sapiens
  misc_RNA (1)...(19): siRNA sense strand
uaauugcuggcuuuaauga

SEQ ID NO: 1975503 - RNA, 19 nt, Homo sapiens
  misc_RNA (1)...(19): siRNA sense strand
cuagauaauguacuucuug

SEQ ID NO: 1975504 - RNA, 19 nt, Homo sapiens
  misc_RNA (1)...(19): siRNA sense strand
ucagaggcuuuaugucaca

SEQ ID NO: 1975505 - RNA, 19 nt, Homo sapiens
  misc_RNA (1)...(19): siRNA sense strand
guucauucauggcauugga

SEQ ID NO: 1975506 - RNA, 19 nt, Homo sapiens
  misc_RNA (1)...(19): siRNA sense strand
uauggcaacugguaugagu

SEQ ID NO: 1975507 - RNA, 19 nt, Homo sapiens
  misc_RNA (1)...(19): siRNA sense strand
uauugucacuuggaucaaa

SEQ ID NO: 1975508 - RNA, 19 nt, Homo sapiens
  misc_RNA (1)...(19): siRNA sense strand
aaagcuggcugguguccau

SEQ ID NO: 1975509 - RNA, 19 nt, Homo sapiens
  misc_RNA (1)...(19): siRNA sense strand
uuucagaggcuuuauguca

SEQ ID NO: 1975510 - RNA, 19 nt, Homo sapiens
  misc_RNA (1)...(19): siRNA sense strand
cuuuagcuaugacacuuaa

SEQ ID NO: 1975511 - RNA, 19 nt, Homo sapiens
  misc_RNA (1)...(19): siRNA sense strand
ccugauagauuagaagaac

SEQ ID NO: 1975512 - RNA, 19 nt, Homo sapiens
  misc_RNA (1)...(19): siRNA sense strand
cgaaguaaagagagugaug

SEQ ID NO: 1975513 - RNA, 19 nt, Homo sapiens
  misc_RNA (1)...(19): siRNA sense strand
agaccaaaggcaaaguaua

SEQ ID NO: 1975514 - RNA, 19 nt, Homo sapiens
  misc_RNA (1)...(19): siRNA sense strand
gagccuguggugauagaaa

SEQ ID NO: 1975515 - RNA, 19 nt, Homo sapiens
  misc_RNA (1)...(19): siRNA sense strand
ccaaauaaagaaguuguca

SEQ ID NO: 1975516 - RNA, 19 nt, Homo sapiens
  misc_RNA (1)...(19): siRNA sense strand
auugcuggcuuuaaugauu

SEQ ID NO: 1975517 - RNA, 19 nt, Homo sapiens
  misc_RNA (1)...(19): siRNA sense strand
gaauagaugcuuuuguuca

SEQ ID NO: 1975518 - RNA, 19 nt, Homo sapiens
  misc_RNA (1)...(19): siRNA sense strand
gaucgucacuccuuccuua

SEQ ID NO: 1975519 - RNA, 19 nt, Homo sapiens
  misc_RNA (1)...(19): siRNA sense strand
ccacagagauuugcaaaga

SEQ ID NO: 1975520 - RNA, 19 nt, Homo sapiens
  misc_RNA (1)...(19): siRNA sense strand
ugaacaaccuggaaaguuu

SEQ ID NO: 1975521 - RNA, 19 nt, Homo sapiens
  misc_RNA (1)...(19): siRNA sense strand
guaaacagcugugugaaga

SEQ ID NO: 1975522 - RNA, 19 nt, Homo sapiens
  misc_RNA (1)...(19): siRNA sense strand
ccaagcgacuucucucaua

SEQ ID NO: 1975523 - RNA, 19 nt, Homo sapiens
  misc_RNA (1)...(19): siRNA sense strand
gaauguaugucuaagaaag

SEQ ID NO: 1975524 - RNA, 19 nt, Homo sapiens
  misc_RNA (1)...(19): siRNA sense strand
cgacuucucucauaucaug

SEQ ID NO: 1975525 - RNA, 19 nt, Homo sapiens
  misc_RNA (1)...(19): siRNA sense strand
uaugagaggugaacccuuu

SEQ ID NO: 1975526 - RNA, 19 nt, Homo sapiens
  misc_RNA (1)...(19): siRNA sense strand
ccagagaaaucguuuguca

SEQ ID NO: 1975527 - RNA, 19 nt, Homo sapiens
  misc_RNA (1)...(19): siRNA sense strand
ggaagcagcugggacuaug

SEQ ID NO: 1975528 - RNA, 19 nt, Homo sapiens
  misc_RNA (1)...(19): siRNA sense strand
uggaggagcuggaaacaga

SEQ ID NO: 1975529 - RNA, 19 nt, Homo sapiens
  misc_RNA (1)...(19): siRNA sense strand
aagaugaaauccagagaaa

SEQ ID NO: 1975530 - RNA, 19 nt, Homo sapiens
  misc_RNA (1)...(19): siRNA sense strand
gaagaugaaauccagagaa

SEQ ID NO: 1975531 - RNA, 19 nt, Homo sapiens
  misc_RNA (1)...(19): siRNA sense strand
gaugaaauccagagaaauc

SEQ ID NO: 1975532 - RNA, 19 nt, Homo sapiens
  misc_RNA (1)...(19): siRNA sense strand
ggcaacuccugaagcaaua

SEQ ID NO: 1975533 - RNA, 19 nt, Homo sapiens
  misc_RNA (1)...(19): siRNA sense strand
uuuaucaccuuucccaaua

SEQ ID NO: 1975534 - RNA, 19 nt, Homo sapiens
  misc_RNA (1)...(19): siRNA sense strand
gaaaagaagacaaaacuga

SEQ ID NO: 1975535 - RNA, 19 nt, Homo sapiens
  misc_RNA (1)...(19): siRNA sense strand
ggcgagaaauggaaauaga

SEQ ID NO: 1975536 - RNA, 19 nt, Homo sapiens
  misc_RNA (1)...(19): siRNA sense strand
ggaaccaaacaagguauua

SEQ ID NO: 1975537 - RNA, 19 nt, Homo sapiens
  misc_RNA (1)...(19): siRNA sense strand
caagcgacuucucucauau

SEQ ID NO: 1975538 - RNA, 19 nt, Homo sapiens
  misc_RNA (1)...(19): siRNA sense strand
gagcgucagcgcauucuuu

SEQ ID NO: 1975539 - RNA, 19 nt, Homo sapiens
  misc_RNA (1)...(19): siRNA sense strand
accaagagaugauaaugaa

SEQ ID NO: 1975540 - RNA, 19 nt, Homo sapiens
  misc_RNA (1)...(19): siRNA sense strand
ugauagaguuuggaaagaa

SEQ ID NO: 1975541 - RNA, 19 nt, Homo sapiens
  misc_RNA (1)...(19): siRNA sense strand
gagggcaacuccugaagca

SEQ ID NO: 1975542 - RNA, 19 nt, Homo sapiens
  misc_RNA (1)...(19): siRNA sense strand
caucauuacuccaggacaa

SEQ ID NO: 1975543 - RNA, 19 nt, Homo sapiens
  misc_RNA (1)...(19): siRNA sense strand
gcugagagcccaucauuac

SEQ ID NO: 1975544 - RNA, 19 nt, Homo sapiens
  misc_RNA (1)...(19): siRNA sense strand
aggaauguaugucuaagaa

SEQ ID NO: 1975545 - RNA, 19 nt, Homo sapiens
  misc_RNA (1)...(19): siRNA sense strand
gaaccaaacaagguauuau

SEQ ID NO: 1975546 - RNA, 19 nt, Homo sapiens
  misc_RNA (1)...(19): siRNA sense strand
ugacgcagccaauagaauu

SEQ ID NO: 1975547 - RNA, 19 nt, Homo sapiens
  misc_RNA (1)...(19): siRNA sense strand
cagcugggacuaugacuuu

SEQ ID NO: 1975548 - RNA, 19 nt, Homo sapiens
  misc_RNA (1)...(19): siRNA sense strand
gaagagugaugagcauguc

SEQ ID NO: 1975549 - RNA, 19 nt, Homo sapiens
  misc_RNA (1)...(19): siRNA sense strand
ggagauagcauggcaagca

SEQ ID NO: 1975550 - RNA, 19 nt, Homo sapiens
  misc_RNA (1)...(19): siRNA sense strand
ggacugggccuaagaagcu

SEQ ID NO: 1975551 - RNA, 19 nt, Homo sapiens
  misc_RNA (1)...(19): siRNA sense strand
aaugaugacuggacgaaug

SEQ ID NO: 1975552 - RNA, 19 nt, Homo sapiens
  misc_RNA (1)...(19): siRNA sense strand
gaaauccagagaaaucguu

SEQ ID NO: 1975553 - RNA, 19 nt, Homo sapiens
  misc_RNA (1)...(19): siRNA sense strand
auacuucugucuccauuga

SEQ ID NO: 1975554 - RNA, 19 nt, Homo sapiens
  misc_RNA (1)...(19): siRNA sense strand
gagcugaucgucacuccuu

SEQ ID NO: 1975555 - RNA, 19 nt, Homo sapiens
  misc_RNA (1)...(19): siRNA sense strand
cgagaaauggaaauagaaa

SEQ ID NO: 1975556 - RNA, 19 nt, Homo sapiens
  misc_RNA (1)...(19): siRNA sense strand
caaaggugaucccaugaac

SEQ ID NO: 1975557 - RNA, 19 nt, Homo sapiens
  misc_RNA (1)...(19): siRNA sense strand
gagauagcauggcaagcau

SEQ ID NO: 1975558 - RNA, 19 nt, Homo sapiens
  misc_RNA (1)...(19): siRNA sense strand
gagaucuugugucauuguu

SEQ ID NO: 1975559 - RNA, 19 nt, Homo sapiens
  misc_RNA (1)...(19): siRNA sense strand
agagaaaucguuugucaga

SEQ ID NO: 1975560 - RNA, 19 nt, Homo sapiens
  misc_RNA (1)...(19): siRNA sense strand
aauagaauuugucccagaa

SEQ ID NO: 1975561 - RNA, 19 nt, Homo sapiens
  misc_RNA (1)...(19): siRNA sense strand
ccuuaaggcucuuuauuac

SEQ ID NO: 1975562 - RNA, 19 nt, Homo sapiens
  misc_RNA (1)...(19): siRNA sense strand
uuaaggcucuuuauuacca

SEQ ID NO: 1975563 - RNA, 19 nt, Homo sapiens
  misc_RNA (1)...(19): siRNA sense strand
uccuuaaggcucuuuauua

SEQ ID NO: 1975564 - RNA, 19 nt, Homo sapiens
  misc_RNA (1)...(19): siRNA sense strand
gaauuugucccagaagaug

SEQ ID NO: 1975565 - RNA, 19 nt, Homo sapiens
  misc_RNA (1)...(19): siRNA sense strand
uagaauuugucccagaaga

SEQ ID NO: 1975566 - RNA, 19 nt, Homo sapiens
  misc_RNA (1)...(19): siRNA sense strand
cagcugagagcccaucauu

SEQ ID NO: 1975567 - RNA, 19 nt, Homo sapiens
  misc_RNA (1)...(19): siRNA sense strand
ucucucauaucaugugcua

SEQ ID NO: 1975568 - RNA, 19 nt, Homo sapiens
  misc_RNA (1)...(19): siRNA sense strand
gauagaguuuggaaagaac

SEQ ID NO: 1975569 - RNA, 19 nt, Homo sapiens
  misc_RNA (1)...(19): siRNA sense strand
gugauagaguuuggaaaga

SEQ ID NO: 1975570 - RNA, 19 nt, Homo sapiens
  misc_RNA (1)...(19): siRNA sense strand
gauagcauggcaagcauug

SEQ ID NO: 1975571 - RNA, 19 nt, Homo sapiens
  misc_RNA (1)...(19): siRNA sense strand
aaaaggaccuccaauucaa

SEQ ID NO: 1975572 - RNA, 19 nt, Homo sapiens
  misc_RNA (1)...(19): siRNA sense strand
gggcaacuccugaagcaau

SEQ ID NO: 1975573 - RNA, 19 nt, Homo sapiens
  misc_RNA (1)...(19): siRNA sense strand
gcgagaaauggaaauagaa

SEQ ID NO: 1975574 - RNA, 19 nt, Homo sapiens
  misc_RNA (1)...(19): siRNA sense strand
ggaauguaugucuaagaaa

SEQ ID NO: 1975575 - RNA, 19 nt, Homo sapiens
  misc_RNA (1)...(19): siRNA sense strand
gaaacagaaaucuugaucu

SEQ ID NO: 1975576 - RNA, 19 nt, Homo sapiens
  misc_RNA (1)...(19): siRNA sense strand
ggugauagaguuuggaaag

SEQ ID NO: 1975577 - RNA, 19 nt, Homo sapiens
  misc_RNA (1)...(19): siRNA sense strand
aaacagcugugugaagagu

SEQ ID NO: 1975578 - RNA, 19 nt, Homo sapiens
  misc_RNA (1)...(19): siRNA sense strand
gauaguggcacagcugaga

SEQ ID NO: 1975579 - RNA, 19 nt, Homo sapiens
  misc_RNA (1)...(19): siRNA sense strand
ggaaaauauuggugauaga

SEQ ID NO: 1975580 - RNA, 19 nt, Homo sapiens
  misc_RNA (1)...(19): siRNA sense strand
gaagcagcugggacuauga

SEQ ID NO: 1975581 - RNA, 19 nt, Homo sapiens
  misc_RNA (1)...(19): siRNA sense strand
auacagaaccgucuucaag

SEQ ID NO: 1975582 - RNA, 19 nt, Homo sapiens
  misc_RNA (1)...(19): siRNA sense strand
ucacuggucucagcuacau

SEQ ID NO: 1975583 - RNA, 19 nt, Homo sapiens
  misc_RNA (1)...(19): siRNA sense strand
ugauacuucugucuccauu

SEQ ID NO: 1975584 - RNA, 19 nt, Homo sapiens
  misc_RNA (1)...(19): siRNA sense strand
gaggaauguaugucuaaga

SEQ ID NO: 1975585 - RNA, 19 nt, Homo sapiens
  misc_RNA (1)...(19): siRNA sense strand
uccagacacugcaugagaa

SEQ ID NO: 1975586 - RNA, 19 nt, Homo sapiens
  misc_RNA (1)...(19): siRNA sense strand
uauuauaccugaagaaccu

SEQ ID NO: 1975587 - RNA, 19 nt, Homo sapiens
  misc_RNA (1)...(19): siRNA sense strand
acagcugugugaagaguga

SEQ ID NO: 1975588 - RNA, 19 nt, Homo sapiens
  misc_RNA (1)...(19): siRNA sense strand
gaacaaccuggaaaguuuu

SEQ ID NO: 1975589 - RNA, 19 nt, Homo sapiens
  misc_RNA (1)...(19): siRNA sense strand
gcaauacagaaccgucuuc

SEQ ID NO: 1975590 - RNA, 19 nt, Homo sapiens
  misc_RNA (1)...(19): siRNA sense strand
gagccauguuucuggugaa

SEQ ID NO: 1975591 - RNA, 19 nt, Homo sapiens
  misc_RNA (1)...(19): siRNA sense strand
uaccaagagaugauaauga

SEQ ID NO: 1975592 - RNA, 19 nt, Homo sapiens
  misc_RNA (1)...(19): siRNA sense strand
gguaaacagcugugugaag

SEQ ID NO: 1975593 - RNA, 19 nt, Homo sapiens
  misc_RNA (1)...(19): siRNA sense strand
ccauguggcaaauguuauu

SEQ ID NO: 1975594 - RNA, 19 nt, Homo sapiens
  misc_RNA (1)...(19): siRNA sense strand
cugcuucucucagggaauu

SEQ ID NO: 1975595 - RNA, 19 nt, Homo sapiens
  misc_RNA (1)...(19): siRNA sense strand
gggaaaauauuggugauag

SEQ ID NO: 1975596 - RNA, 19 nt, Homo sapiens
  misc_RNA (1)...(19): siRNA sense strand
aagcauugcaucuaguaaa

SEQ ID NO: 1975597 - RNA, 19 nt, Homo sapiens
  misc_RNA (1)...(19): siRNA sense strand
aaggugaucccaugaacaa

SEQ ID NO: 1975598 - RNA, 19 nt, Homo sapiens
  misc_RNA (1)...(19): siRNA sense strand
cuaugacuuugucccaauu

SEQ ID NO: 1975599 - RNA, 19 nt, Homo sapiens
  misc_RNA (1)...(19): siRNA sense strand
ugaaacagaaaucuugauc

SEQ ID NO: 1975600 - RNA, 19 nt, Homo sapiens
  misc_RNA (1)...(19): siRNA sense strand
gggcuuaaugaaacagaaa

SEQ ID NO: 1975601 - RNA, 19 nt, Homo sapiens
  misc_RNA (1)...(19): siRNA sense strand
cagaggaagagauccgaaa

SEQ ID NO: 1975602 - RNA, 19 nt, Homo sapiens
  misc_RNA (1)...(19): siRNA sense strand
ucagggaauuagggcuuaa

SEQ ID NO: 1975603 - RNA, 19 nt, Homo sapiens
  misc_RNA (1)...(19): siRNA sense strand
gcaacggucaaaucuccaa

SEQ ID NO: 1975604 - RNA, 19 nt, Homo sapiens
  misc_RNA (1)...(19): siRNA sense strand
gacgcagccaauagaauuu

SEQ ID NO: 1975605 - RNA, 19 nt, Homo sapiens
  misc_RNA (1)...(19): siRNA sense strand
gagaaggaccaggaaacug

SEQ ID NO: 1975606 - RNA, 19 nt, Homo sapiens
  misc_RNA (1)...(19): siRNA sense strand
acaaaggugaucccaugaa

SEQ ID NO: 1975607 - RNA, 19 nt, Homo sapiens
  misc_RNA (1)...(19): siRNA sense strand
agcauugcaucuaguaaau

SEQ ID NO: 1975608 - RNA, 19 nt, Homo sapiens
  misc_RNA (1)...(19): siRNA sense strand
ccaggccuuuaucaccuuu

SEQ ID NO: 1975609 - RNA, 19 nt, Homo sapiens
  misc_RNA (1)...(19): siRNA sense strand
ccaagagaugauaaugaaa

SEQ ID NO: 1975610 - RNA, 19 nt, Homo sapiens
  misc_RNA (1)...(19): siRNA sense strand
caagaugaaccccaaaaga

SEQ ID NO: 1975611 - RNA, 19 nt, Homo sapiens
  misc_RNA (1)...(19): siRNA sense strand
caagcauugcaucuaguaa

SEQ ID NO: 1975612 - RNA, 19 nt, Homo sapiens
  misc_RNA (1)...(19): siRNA sense strand
cgaaugaugacuggacgaa

SEQ ID NO: 1975613 - RNA, 19 nt, Homo sapiens
  misc_RNA (1)...(19): siRNA sense strand
ggaggagcuggaaacagaa

SEQ ID NO: 1975614 - RNA, 19 nt, Homo sapiens
  misc_RNA (1)...(19): siRNA sense strand
gggaaccaaacaagguauu

SEQ ID NO: 1975615 - RNA, 19 nt, Homo sapiens
  misc_RNA (1)...(19): siRNA sense strand
cuccauguggcaaauguua

SEQ ID NO: 1975616 - RNA, 19 nt, Homo sapiens
  misc_RNA (1)...(19): siRNA sense strand
gcaugagaaggaccaggaa

SEQ ID NO: 1975617 - RNA, 19 nt, Homo sapiens
  misc_RNA (1)...(19): siRNA sense strand
gccaggccuuuaucaccuu

SEQ ID NO: 1975618 - RNA, 19 nt, Homo sapiens
  misc_RNA (1)...(19): siRNA sense strand
gaacagcaaaggucaauau

SEQ ID NO: 1975619 - RNA, 19 nt, Homo sapiens
  misc_RNA (1)...(19): siRNA sense strand
ccucagaccuugcaucuuc

SEQ ID NO: 1975620 - RNA, 19 nt, Homo sapiens
  misc_RNA (1)...(19): siRNA sense strand
cagcaaaggucaauaucca

SEQ ID NO: 1975621 - RNA, 19 nt, Homo sapiens
  misc_RNA (1)...(19): siRNA sense strand
ugaugcaggugccagauuu

SEQ ID NO: 1975622 - RNA, 19 nt, Homo sapiens
  misc_RNA (1)...(19): siRNA sense strand
ggaaggaggguaugaugca

SEQ ID NO: 1975623 - RNA, 19 nt, Homo sapiens
  misc_RNA (1)...(19): siRNA sense strand
ccaacguccucguaacuca

SEQ ID NO: 1975624 - RNA, 19 nt, Homo sapiens
  misc_RNA (1)...(19): siRNA sense strand
ggagccaacguccucguaa

SEQ ID NO: 1975625 - RNA, 19 nt, Homo sapiens
  misc_RNA (1)...(19): siRNA sense strand
caccaugucagccgcauuu

SEQ ID NO: 1975626 - RNA, 19 nt, Homo sapiens
  misc_RNA (1)...(19): siRNA sense strand
gccuuuagguuccacaauc

SEQ ID NO: 1975627 - RNA, 19 nt, Homo sapiens
  misc_RNA (1)...(19): siRNA sense strand
ggcuacugcuggcaacauu

SEQ ID NO: 1975628 - RNA, 19 nt, Homo sapiens
  misc_RNA (1)...(19): siRNA sense strand
cuucaugggugguucagau

SEQ ID NO: 1975629 - RNA, 19 nt, Homo sapiens
  misc_RNA (1)...(19): siRNA sense strand
gcuguugggccuuuagguu

SEQ ID NO: 1975630 - RNA, 19 nt, Homo sapiens
  misc_RNA (1)...(19): siRNA sense strand
caguauacccucagaccuu

SEQ ID NO: 1975631 - RNA, 19 nt, Homo sapiens
  misc_RNA (1)...(19): siRNA sense strand
gagccaacguccucguaac

SEQ ID NO: 1975632 - RNA, 19 nt, Homo sapiens
  misc_RNA (1)...(19): siRNA sense strand
uccagucggucccaucuau

SEQ ID NO: 1975633 - RNA, 19 nt, Homo sapiens
  misc_RNA (1)...(19): siRNA sense strand
ccacaauccccauggcuua

SEQ ID NO: 1975634 - RNA, 19 nt, Homo sapiens
  misc_RNA (1)...(19): siRNA sense strand
caauccccauggcuuauua

SEQ ID NO: 1975635 - RNA, 19 nt, Homo sapiens
  misc_RNA (1)...(19): siRNA sense strand
gggagccaacguccucgua

SEQ ID NO: 1975636 - RNA, 19 nt, Homo sapiens
  misc_RNA (1)...(19): siRNA sense strand
ccucaggcuccacccuaua

SEQ ID NO: 1975637 - RNA, 19 nt, Homo sapiens
  misc_RNA (1)...(19): siRNA sense strand
caaaggucaauauccaaca

SEQ ID NO: 1975638 - RNA, 19 nt, Homo sapiens
  misc_RNA (1)...(19): siRNA sense strand
ccuggagccucucuguauc

SEQ ID NO: 1975639 - RNA, 19 nt, Homo sapiens
  misc_RNA (1)...(19): siRNA sense strand
guggaaggaggguaugaug

SEQ ID NO: 1975640 - RNA, 19 nt, Homo sapiens
  misc_RNA (1)...(19): siRNA sense strand
guaaagagaugacuagaaa

SEQ ID NO: 1975641 - RNA, 19 nt, Homo sapiens
  misc_RNA (1)...(19): siRNA sense strand
ggaaagcuuugcagaagua

SEQ ID NO: 1975642 - RNA, 19 nt, Homo sapiens
  misc_RNA (1)...(19): siRNA sense strand
acgaaaggcugcaguauua

SEQ ID NO: 1975643 - RNA, 19 nt, Homo sapiens
  misc_RNA (1)...(19): siRNA sense strand
uaucagugcuucaccauua

SEQ ID NO: 1975644 - RNA, 19 nt, Homo sapiens
  misc_RNA (1)...(19): siRNA sense strand
gcuaaggauucuaaaguua

SEQ ID NO: 1975645 - RNA, 19 nt, Homo sapiens
  misc_RNA (1)...(19): siRNA sense strand
caaugaagaucuagagaaa

SEQ ID NO: 1975646 - RNA, 19 nt, Homo sapiens
  misc_RNA (1)...(19): siRNA sense strand
ccaaagaacuaaucaagau

SEQ ID NO: 1975647 - RNA, 19 nt, Homo sapiens
  misc_RNA (1)...(19): siRNA sense strand
gucaagagcucauggcuuu

SEQ ID NO: 1975648 - RNA, 19 nt, Homo sapiens
  misc_RNA (1)...(19): siRNA sense strand
gaaagcgucuacagcauug

SEQ ID NO: 1975649 - RNA, 19 nt, Homo sapiens
  misc_RNA (1)...(19): siRNA sense strand
ggagaaguauuuccaacaa

SEQ ID NO: 1975650 - RNA, 19 nt, Homo sapiens
  misc_RNA (1)...(19): siRNA sense strand
gcagaaguauugcugagaa

SEQ ID NO: 1975651 - RNA, 19 nt, Homo sapiens
  misc_RNA (1)...(19): siRNA sense strand
gaaaggcuauuaagacagu

SEQ ID NO: 1975652 - RNA, 19 nt, Homo sapiens
  misc_RNA (1)...(19): siRNA sense strand
caucaggucuuaauuacaa

SEQ ID NO: 1975653 - RNA, 19 nt, Homo sapiens
  misc_RNA (1)...(19): siRNA sense strand
gcuaugagauauuuacaga

SEQ ID NO: 1975654 - RNA, 19 nt, Homo sapiens
  misc_RNA (1)...(19): siRNA sense strand
gagaaccgcuacugucuau

SEQ ID NO: 1975655 - RNA, 19 nt, Homo sapiens
  misc_RNA (1)...(19): siRNA sense strand
gaacaaauucucagugugu

SEQ ID NO: 1975656 - RNA, 19 nt, Homo sapiens
  misc_RNA (1)...(19): siRNA sense strand
gcagauacuuugaaucauc

SEQ ID NO: 1975657 - RNA, 19 nt, Homo sapiens
  misc_RNA (1)...(19): siRNA sense strand
gcacagcacuggguguuga

SEQ ID NO: 1975658 - RNA, 19 nt, Homo sapiens
  misc_RNA (1)...(19): siRNA sense strand
gagacuagcuacagugaug

SEQ ID NO: 1975659 - RNA, 19 nt, Homo sapiens
  misc_RNA (1)...(19): siRNA sense strand
ggagcuagaucuuauccaa

SEQ ID NO: 1975660 - RNA, 19 nt, Homo sapiens
  misc_RNA (1)...(19): siRNA sense strand
gcacuucgcuuccaugacu

SEQ ID NO: 1975661 - RNA, 19 nt, Homo sapiens
  misc_RNA (1)...(19): siRNA sense strand
gagaguacuucaauucuuc

SEQ ID NO: 1975662 - RNA, 19 nt, Homo sapiens
  misc_RNA (1)...(19): siRNA sense strand
gcacgcaagcugaugguua

SEQ ID NO: 1975663 - RNA, 19 nt, Homo sapiens
  misc_RNA (1)...(19): siRNA sense strand
agacauagcugacauugag

SEQ ID NO: 1975664 - RNA, 19 nt, Homo sapiens
  misc_RNA (1)...(19): siRNA sense strand
uuacagggcugaucccaaa

SEQ ID NO: 1975665 - RNA, 19 nt, Homo sapiens
  misc_RNA (1)...(19): siRNA sense strand
gcuaaccggugcuuugaaa

SEQ ID NO: 1975666 - RNA, 19 nt, Homo sapiens
  misc_RNA (1)...(19): siRNA sense strand
gcaagcugaugguuagauu

SEQ ID NO: 1975667 - RNA, 19 nt, Homo sapiens
  misc_RNA (1)...(19): siRNA sense strand
acacaugucuagauucuga

SEQ ID NO: 1975668 - RNA, 19 nt, Homo sapiens
  misc_RNA (1)...(19): siRNA sense strand
aaaguuaccuaugcagaua

SEQ ID NO: 1975669 - RNA, 19 nt, Homo sapiens
  misc_RNA (1)...(19): siRNA sense strand
ggguagagauccugccuuu

SEQ ID NO: 1975670 - RNA, 19 nt, Homo sapiens
  misc_RNA (1)...(19): siRNA sense strand
guauacacaugucuagauu

SEQ ID NO: 1975671 - RNA, 19 nt, Homo sapiens
  misc_RNA (1)...(19): siRNA sense strand
gauguacgauggagaacaa

SEQ ID NO: 1975672 - RNA, 19 nt, Homo sapiens
  misc_RNA (1)...(19): siRNA sense strand
ugaaucaucuggagaaauc

SEQ ID NO: 1975673 - RNA, 19 nt, Homo sapiens
  misc_RNA (1)...(19): siRNA sense strand
aaacaugaguccucuugaa

SEQ ID NO: 1975674 - RNA, 19 nt, Homo sapiens
  misc_RNA (1)...(19): siRNA sense strand
ggcagaaacucuagaggaa

SEQ ID NO: 1975675 - RNA, 19 nt, Homo sapiens
  misc_RNA (1)...(19): siRNA sense strand
gaacuacagccaaugaaga

SEQ ID NO: 1975676 - RNA, 19 nt, Homo sapiens
  misc_RNA (1)...(19): siRNA sense strand
gcagagaguacuucaauuc

SEQ ID NO: 1975677 - RNA, 19 nt, Homo sapiens
  misc_RNA (1)...(19): siRNA sense strand
gacaugaccuuggcucuug

SEQ ID NO: 1975678 - RNA, 19 nt, Homo sapiens
  misc_RNA (1)...(19): siRNA sense strand
gcuuacaacugauaacaga

SEQ ID NO: 1975679 - RNA, 19 nt, Homo sapiens
  misc_RNA (1)...(19): siRNA sense strand
gaaaggcugcaguauuauu

SEQ ID NO: 1975680 - RNA, 19 nt, Homo sapiens
  misc_RNA (1)...(19): siRNA sense strand
ggacagguucuaauccuuu

SEQ ID NO: 1975681 - RNA, 19 nt, Homo sapiens
  misc_RNA (1)...(19): siRNA sense strand
caagacauguuaacuaugc

SEQ ID NO: 1975682 - RNA, 19 nt, Homo sapiens
  misc_RNA (1)...(19): siRNA sense strand
gaaaaugugucgcucuuug

SEQ ID NO: 1975683 - RNA, 19 nt, Homo sapiens
  misc_RNA (1)...(19): siRNA sense strand
gaacugaagccauucucaa

SEQ ID NO: 1975684 - RNA, 19 nt, Homo sapiens
  misc_RNA (1)...(19): siRNA sense strand
ggaaagcgucuacagcauu

SEQ ID NO: 1975685 - RNA, 19 nt, Homo sapiens
  misc_RNA (1)...(19): siRNA sense strand
gcugagaacuggaaaauug

SEQ ID NO: 1975686 - RNA, 19 nt, Homo sapiens
  misc_RNA (1)...(19): siRNA sense strand
ggccacagguuauccuaaa

SEQ ID NO: 1975687 - RNA, 19 nt, Homo sapiens
  misc_RNA (1)...(19): siRNA sense strand
ggauguuuguagccaguua

SEQ ID NO: 1975688 - RNA, 19 nt, Homo sapiens
  misc_RNA (1)...(19): siRNA sense strand
uagaaaggcuauuaagaca

SEQ ID NO: 1975689 - RNA, 19 nt, Homo sapiens
  misc_RNA (1)...(19): siRNA sense strand
ugaagaaguuuaagguugu

SEQ ID NO: 1975690 - RNA, 19 nt, Homo sapiens
  misc_RNA (1)...(19): siRNA sense strand
ccaccuggcuggacagaug

SEQ ID NO: 1975691 - RNA, 19 nt, Homo sapiens
  misc_RNA (1)...(19): siRNA sense strand
gaagaauagugagcaggaa

SEQ ID NO: 1975692 - RNA, 19 nt, Homo sapiens
  misc_RNA (1)...(19): siRNA sense strand
gcacaacguuacagugucu

SEQ ID NO: 1975693 - RNA, 19 nt, Homo sapiens
  misc_RNA (1)...(19): siRNA sense strand
ccacaaguguuagaugcua

SEQ ID NO: 1975694 - RNA, 19 nt, Homo sapiens
  misc_RNA (1)...(19): siRNA sense strand
ccagauccaucaugaagga

SEQ ID NO: 1975695 - RNA, 19 nt, Homo sapiens
  misc_RNA (1)...(19): siRNA sense strand
gaagcagccuccugucagu

SEQ ID NO: 1975696 - RNA, 19 nt, Homo sapiens
  misc_RNA (1)...(19): siRNA sense strand
gaaccgcuacugucuauuc

SEQ ID NO: 1975697 - RNA, 19 nt, Homo sapiens
  misc_RNA (1)...(19): siRNA sense strand
ccagagacagguagacaua

SEQ ID NO: 1975698 - RNA, 19 nt, Homo sapiens
  misc_RNA (1)...(19): siRNA sense strand
ggaucagucucaucaagga

SEQ ID NO: 1975699 - RNA, 19 nt, Homo sapiens
  misc_RNA (1)...(19): siRNA sense strand
gaacgucuccuggauuuca

SEQ ID NO: 1975700 - RNA, 19 nt, Homo sapiens
  misc_RNA (1)...(19): siRNA sense strand
gugaagccuugccaaauga

SEQ ID NO: 1975701 - RNA, 19 nt, Homo sapiens
  misc_RNA (1)...(19): siRNA sense strand
gaaguagguguuccaggua

SEQ ID NO: 1975702 - RNA, 19 nt, Homo sapiens
  misc_RNA (1)...(19): siRNA sense strand
gcaauucagcugaccuauu

SEQ ID NO: 1975703 - RNA, 19 nt, Homo sapiens
  misc_RNA (1)...(19): siRNA sense strand
gaagaaguuuaagguuguu

SEQ ID NO: 1975704 - RNA, 19 nt, Homo sapiens
  misc_RNA (1)...(19): siRNA sense strand
cuaccaaccucacugauag

SEQ ID NO: 1975705 - RNA, 19 nt, Homo sapiens
  misc_RNA (1)...(19): siRNA sense strand
gcacuugguuuuacuuuug

SEQ ID NO: 1975706 - RNA, 19 nt, Homo sapiens
  misc_RNA (1)...(19): siRNA sense strand
gaacaucucaaccaaggau

SEQ ID NO: 1975707 - RNA, 19 nt, Homo sapiens
  misc_RNA (1)...(19): siRNA sense strand
gcaguuggccuucugaaca

SEQ ID NO: 1975708 - RNA, 19 nt, Homo sapiens
  misc_RNA (1)...(19): siRNA sense strand
gcacgaagccuggccugaa

SEQ ID NO: 1975709 - RNA, 19 nt, Homo sapiens
  misc_RNA (1)...(19): siRNA sense strand
ccaguucuuucaagucaaa

SEQ ID NO: 1975710 - RNA, 19 nt, Homo sapiens
  misc_RNA (1)...(19): siRNA sense strand
gguagaugcaguuacauuu

SEQ ID NO: 1975711 - RNA, 19 nt, Homo sapiens
  misc_RNA (1)...(19): siRNA sense strand
gcucauggcuuuugcuuug

SEQ ID NO: 1975712 - RNA, 19 nt, Homo sapiens
  misc_RNA (1)...(19): siRNA sense strand
ggagaacaaggaaggauug

SEQ ID NO: 1975713 - RNA, 19 nt, Homo sapiens
  misc_RNA (1)...(19): siRNA sense strand
ugcaagacauguuaacuau

SEQ ID NO: 1975714 - RNA, 19 nt, Homo sapiens
  misc_RNA (1)...(19): siRNA sense strand
gcagagugcaaucaugaaa

SEQ ID NO: 1975715 - RNA, 19 nt, Homo sapiens
  misc_RNA (1)...(19): siRNA sense strand
aaagagaaacuucaugaug

SEQ ID NO: 1975716 - RNA, 19 nt, Homo sapiens
  misc_RNA (1)...(19): siRNA sense strand
gacaagugccauccucuuu

SEQ ID NO: 1975717 - RNA, 19 nt, Homo sapiens
  misc_RNA (1)...(19): siRNA sense strand
gaccuuggcucuugcuuac

SEQ ID NO: 1975718 - RNA, 19 nt, Homo sapiens
  misc_RNA (1)...(19): siRNA sense strand
cagcugguauagcccauaa

SEQ ID NO: 1975719 - RNA, 19 nt, Homo sapiens
  misc_RNA (1)...(19): siRNA sense strand
agccacagcuucauccuuu

SEQ ID NO: 1975720 - RNA, 19 nt, Homo sapiens
  misc_RNA (1)...(19): siRNA sense strand
acaaagagaaacuucauga

SEQ ID NO: 1975721 - RNA, 19 nt, Homo sapiens
  misc_RNA (1)...(19): siRNA sense strand
gcaagcuccucguguucuu

SEQ ID NO: 1975722 - RNA, 19 nt, Homo sapiens
  misc_RNA (1)...(19): siRNA sense strand
ugaugaagcuguggcuauu

SEQ ID NO: 1975723 - RNA, 19 nt, Homo sapiens
  misc_RNA (1)...(19): siRNA sense strand
ggugagaacccagaagaaa

SEQ ID NO: 1975724 - RNA, 19 nt, Homo sapiens
  misc_RNA (1)...(19): siRNA sense strand
ccaagcugcuggugaagug

SEQ ID NO: 1975725 - RNA, 19 nt, Homo sapiens
  misc_RNA (1)...(19): siRNA sense strand
ggaagcccguaaagagaug

SEQ ID NO: 1975726 - RNA, 19 nt, Homo sapiens
  misc_RNA (1)...(19): siRNA sense strand
ggaguggcuucaugccuau

SEQ ID NO: 1975727 - RNA, 19 nt, Homo sapiens
  misc_RNA (1)...(19): siRNA sense strand
gcagcagaauguauacaca

SEQ ID NO: 1975728 - RNA, 19 nt, Homo sapiens
  misc_RNA (1)...(19): siRNA sense strand
aaauagagcccaagaccuu

SEQ ID NO: 1975729 - RNA, 19 nt, Homo sapiens
  misc_RNA (1)...(19): siRNA sense strand
cagaaacucuagaggaaag

SEQ ID NO: 1975730 - RNA, 19 nt, Homo sapiens
  misc_RNA (1)...(19): siRNA sense strand
guggaaagcuuugcagaag

SEQ ID NO: 1975731 - RNA, 19 nt, Homo sapiens
  misc_RNA (1)...(19): siRNA sense strand
ggaccuaugacaccuauca

SEQ ID NO: 1975732 - RNA, 19 nt, Homo sapiens
  misc_RNA (1)...(19): siRNA sense strand
gaugggcagugguggaaga

SEQ ID NO: 1975733 - RNA, 19 nt, Homo sapiens
  misc_RNA (1)...(19): siRNA sense strand
gcuucaccauuaacuagua

SEQ ID NO: 1975734 - RNA, 19 nt, Homo sapiens
  misc_RNA (1)...(19): siRNA sense strand
cuacaaagcagccaguaug

SEQ ID NO: 1975735 - RNA, 19 nt, Homo sapiens
  misc_RNA (1)...(19): siRNA sense strand
gcacauggucaaguauauu

SEQ ID NO: 1975736 - RNA, 19 nt, Homo sapiens
  misc_RNA (1)...(19): siRNA sense strand
guuguugcaucaggucuua

SEQ ID NO: 1975737 - RNA, 19 nt, Homo sapiens
  misc_RNA (1)...(19): siRNA sense strand
gaacugugccauuaaacca

SEQ ID NO: 1975738 - RNA, 19 nt, Homo sapiens
  misc_RNA (1)...(19): siRNA sense strand
gcaaucauuucaccugacu

SEQ ID NO: 1975739 - RNA, 19 nt, Homo sapiens
  misc_RNA (1)...(19): siRNA sense strand
uaugaugucugcaugaagu

SEQ ID NO: 1975740 - RNA, 19 nt, Homo sapiens
  misc_RNA (1)...(19): siRNA sense strand
ggaaaggccuucauucaua

SEQ ID NO: 1975741 - RNA, 19 nt, Homo sapiens
  misc_RNA (1)...(19): siRNA sense strand
ggaauucacacaaauauga

SEQ ID NO: 1975742 - RNA, 19 nt, Homo sapiens
  misc_RNA (1)...(19): siRNA sense strand
gagaauaaaugguggaaag

SEQ ID NO: 1975743 - RNA, 19 nt, Homo sapiens
  misc_RNA (1)...(19): siRNA sense strand
gagagaagccuuaugaaug

SEQ ID NO: 1975744 - RNA, 19 nt, Homo sapiens
  misc_RNA (1)...(19): siRNA sense strand
gagagaaaccuuacaaaug

SEQ ID NO: 1975745 - RNA, 19 nt, Homo sapiens
  misc_RNA (1)...(19): siRNA sense strand
gaagggaauucacacaaau

SEQ ID NO: 1975746 - RNA, 19 nt, Homo sapiens
  misc_RNA (1)...(19): siRNA sense strand
gagagaagcccuaugaaug

SEQ ID NO: 1975747 - RNA, 19 nt, Homo sapiens
  misc_RNA (1)...(19): siRNA sense strand
gaaaggccuucauucauag

SEQ ID NO: 1975748 - RNA, 19 nt, Homo sapiens
  misc_RNA (1)...(19): siRNA sense strand
caacaucagaguauucaua

SEQ ID NO: 1975749 - RNA, 19 nt, Homo sapiens
  misc_RNA (1)...(19): siRNA sense strand
gcuauagacuucucucaug

SEQ ID NO: 1975750 - RNA, 19 nt, Homo sapiens
  misc_RNA (1)...(19): siRNA sense strand
gagagaaaccguaugaaug

SEQ ID NO: 1975751 - RNA, 19 nt, Homo sapiens
  misc_RNA (1)...(19): siRNA sense strand
gaagcaccuuucauucaaa

SEQ ID NO: 1975752 - RNA, 19 nt, Homo sapiens
  misc_RNA (1)...(19): siRNA sense strand
caucaaagaauucacagua

SEQ ID NO: 1975753 - RNA, 19 nt, Homo sapiens
  misc_RNA (1)...(19): siRNA sense strand
ggagagaaaccuuacaaau

SEQ ID NO: 1975754 - RNA, 19 nt, Homo sapiens
  misc_RNA (1)...(19): siRNA sense strand
gcucacaccuuacucaaca

SEQ ID NO: 1975755 - RNA, 19 nt, Homo sapiens
  misc_RNA (1)...(19): siRNA sense strand
agagaagccuuaugaaugu

SEQ ID NO: 1975756 - RNA, 19 nt, Homo sapiens
  misc_RNA (1)...(19): siRNA sense strand
ggagagaaaccguaugaau

SEQ ID NO: 1975757 - RNA, 19 nt, Homo sapiens
  misc_RNA (1)...(19): siRNA sense strand
ggagagaagccuuaugaau

SEQ ID NO: 1975758 - RNA, 19 nt, Homo sapiens
  misc_RNA (1)...(19): siRNA sense strand
gagaaaccguaugaaugua

SEQ ID NO: 1975759 - RNA, 19 nt, Homo sapiens
  misc_RNA (1)...(19): siRNA sense strand
agagaaaccuuacaaaugc

SEQ ID NO: 1975760 - RNA, 19 nt, Homo sapiens
  misc_RNA (1)...(19): siRNA sense strand
ucaaagaauucacaguaug

SEQ ID NO: 1975761 - RNA, 19 nt, Homo sapiens
  misc_RNA (1)...(19): siRNA sense strand
gcucaucacuuacuaacca

SEQ ID NO: 1975762 - RNA, 19 nt, Homo sapiens
  misc_RNA (1)...(19): siRNA sense strand
caaagaauucacaguauga

SEQ ID NO: 1975763 - RNA, 19 nt, Homo sapiens
  misc_RNA (1)...(19): siRNA sense strand
ggagagaagcccuaugaau

SEQ ID NO: 1975764 - RNA, 19 nt, Homo sapiens
  misc_RNA (1)...(19): siRNA sense strand
uuuaguagcuucucauuuc

SEQ ID NO: 1975765 - RNA, 19 nt, Homo sapiens
  misc_RNA (1)...(19): siRNA sense strand
gaaaccguaugaauguaug

SEQ ID NO: 1975766 - RNA, 19 nt, Homo sapiens
  misc_RNA (1)...(19): siRNA sense strand
guaacuaagccauauguga

SEQ ID NO: 1975767 - RNA, 19 nt, Homo sapiens
  misc_RNA (1)...(19): siRNA sense strand
gaauaaaugguggaaagaa

SEQ ID NO: 1975768 - RNA, 19 nt, Homo sapiens
  misc_RNA (1)...(19): siRNA sense strand
ggaauuaucaacaaagaag

SEQ ID NO: 1975769 - RNA, 19 nt, Homo sapiens
  misc_RNA (1)...(19): siRNA sense strand
agaagcaccuuucauucaa

SEQ ID NO: 1975770 - RNA, 19 nt, Homo sapiens
  misc_RNA (1)...(19): siRNA sense strand
cagcaucuaagaauucaua

SEQ ID NO: 1975771 - RNA, 19 nt, Homo sapiens
  misc_RNA (1)...(19): siRNA sense strand
gagaaugugggaaagcuuu

SEQ ID NO: 1975772 - RNA, 19 nt, Homo sapiens
  misc_RNA (1)...(19): siRNA sense strand
gagaagccuuaugaaugua

SEQ ID NO: 1975773 - RNA, 19 nt, Homo sapiens
  misc_RNA (1)...(19): siRNA sense strand
caggugacauuuagugaug

SEQ ID NO: 1975774 - RNA, 19 nt, Homo sapiens
  misc_RNA (1)...(19): siRNA sense strand
ugcuguagcucacaccuua

SEQ ID NO: 1975775 - RNA, 19 nt, Homo sapiens
  misc_RNA (1)...(19): siRNA sense strand
uaacuaagccauaugugau

SEQ ID NO: 1975776 - RNA, 19 nt, Homo sapiens
  misc_RNA (1)...(19): siRNA sense strand
cuauagacuucucucauga

SEQ ID NO: 1975777 - RNA, 19 nt, Homo sapiens
  misc_RNA (1)...(19): siRNA sense strand
cgacaucagauaagccaua

SEQ ID NO: 1975778 - RNA, 19 nt, Homo sapiens
  misc_RNA (1)...(19): siRNA sense strand
gagagaaaaucuauacaug

SEQ ID NO: 1975779 - RNA, 19 nt, Homo sapiens
  misc_RNA (1)...(19): siRNA sense strand
caggagagaagcccuauga

SEQ ID NO: 1975780 - RNA, 19 nt, Homo sapiens
  misc_RNA (1)...(19): siRNA sense strand
guuuagaaaugcaggaaau

SEQ ID NO: 1975781 - RNA, 19 nt, Homo sapiens
  misc_RNA (1)...(19): siRNA sense strand
cuaugaaugucgugaaugu

SEQ ID NO: 1975782 - RNA, 19 nt, Homo sapiens
  misc_RNA (1)...(19): siRNA sense strand
gagugggcaugccuagauu

SEQ ID NO: 1975783 - RNA, 19 nt, Homo sapiens
  misc_RNA (1)...(19): siRNA sense strand
uuagugauguggcuauaga

SEQ ID NO: 1975784 - RNA, 19 nt, Homo sapiens
  misc_RNA (1)...(19): siRNA sense strand
agagaaaccguaugaaugu

SEQ ID NO: 1975785 - RNA, 19 nt, Homo sapiens
  misc_RNA (1)...(19): siRNA sense strand
gaugugaugguccagaauu

SEQ ID NO: 1975786 - RNA, 19 nt, Homo sapiens
  misc_RNA (1)...(19): siRNA sense strand
caacaucaaagaauucaca

SEQ ID NO: 1975787 - RNA, 19 nt, Homo sapiens
  misc_RNA (1)...(19): siRNA sense strand
ugauguggcuauagacuuc

SEQ ID NO: 1975788 - RNA, 19 nt, Homo sapiens
  misc_RNA (1)...(19): siRNA sense strand
gagaaaaucuauacaugca

SEQ ID NO: 1975789 - RNA, 19 nt, Homo sapiens
  misc_RNA (1)...(19): siRNA sense strand
gaaaagagcccuggaugau

SEQ ID NO: 1975790 - RNA, 19 nt, Homo sapiens
  misc_RNA (1)...(19): siRNA sense strand
uagaagcaccuuucauuca

SEQ ID NO: 1975791 - RNA, 19 nt, Homo sapiens
  misc_RNA (1)...(19): siRNA sense strand
guaggucuuuccguaacua

SEQ ID NO: 1975792 - RNA, 19 nt, Homo sapiens
  misc_RNA (1)...(19): siRNA sense strand
gagaagcccuaugaauguc

SEQ ID NO: 1975793 - RNA, 19 nt, Homo sapiens
  misc_RNA (1)...(19): siRNA sense strand
agagaagcccuaugaaugu

SEQ ID NO: 1975794 - RNA, 19 nt, Homo sapiens
  misc_RNA (1)...(19): siRNA sense strand
gagaaaccuuacaaaugca

SEQ ID NO: 1975795 - RNA, 19 nt, Homo sapiens
  misc_RNA (1)...(19): siRNA sense strand
agccaugguucaucccuua

SEQ ID NO: 1975796 - RNA, 19 nt, Homo sapiens
  misc_RNA (1)...(19): siRNA sense strand
gaauguaugaacuguggaa

SEQ ID NO: 1975797 - RNA, 19 nt, Homo sapiens
  misc_RNA (1)...(19): siRNA sense strand
guggaaaggccuucauuca

SEQ ID NO: 1975798 - RNA, 19 nt, Homo sapiens
  misc_RNA (1)...(19): siRNA sense strand
uguaugaacuguggaaagu

SEQ ID NO: 1975799 - RNA, 19 nt, Homo sapiens
  misc_RNA (1)...(19): siRNA sense strand
gugaaugugggaagacuuu

SEQ ID NO: 1975800 - RNA, 19 nt, Homo sapiens
  misc_RNA (1)...(19): siRNA sense strand
gaagccuuaugaauguaga

SEQ ID NO: 1975801 - RNA, 19 nt, Homo sapiens
  misc_RNA (1)...(19): siRNA sense strand
caucagauaagccauagug

SEQ ID NO: 1975802 - RNA, 19 nt, Homo sapiens
  misc_RNA (1)...(19): siRNA sense strand
agccauaugugaucauguu

SEQ ID NO: 1975803 - RNA, 19 nt, Homo sapiens
  misc_RNA (1)...(19): siRNA sense strand
uaagaauucauacgcaaga

SEQ ID NO: 1975804 - RNA, 19 nt, Homo sapiens
  misc_RNA (1)...(19): siRNA sense strand
uuuagaagcaccuuucauu

SEQ ID NO: 1975805 - RNA, 19 nt, Homo sapiens
  misc_RNA (1)...(19): siRNA sense strand
cauaguucgucucucauuc

SEQ ID NO: 1975806 - RNA, 19 nt, Homo sapiens
  misc_RNA (1)...(19): siRNA sense strand
auucauaguucgucucuca

SEQ ID NO: 1975807 - RNA, 19 nt, Homo sapiens
  misc_RNA (1)...(19): siRNA sense strand
ggaaaacaaggaauuauca

SEQ ID NO: 1975808 - RNA, 19 nt, Homo sapiens
  misc_RNA (1)...(19): siRNA sense strand
cuaugagugucguauaugu

SEQ ID NO: 1975809 - RNA, 19 nt, Homo sapiens
  misc_RNA (1)...(19): siRNA sense strand
gacaucagauaagccauag

SEQ ID NO: 1975810 - RNA, 19 nt, Homo sapiens
  misc_RNA (1)...(19): siRNA sense strand
ggaaaagagcccuggauga

SEQ ID NO: 1975811 - RNA, 19 nt, Homo sapiens
  misc_RNA (1)...(19): siRNA sense strand
gaaugugggaaggccuuua

SEQ ID NO: 1975812 - RNA, 19 nt, Homo sapiens
  misc_RNA (1)...(19): siRNA sense strand
gcucagagggacuuauaca

SEQ ID NO: 1975813 - RNA, 19 nt, Homo sapiens
  misc_RNA (1)...(19): siRNA sense strand
ggacuuauacaaggaugug

SEQ ID NO: 1975814 - RNA, 19 nt, Homo sapiens
  misc_RNA (1)...(19): siRNA sense strand
guaugaauguaugaacugu

SEQ ID NO: 1975815 - RNA, 19 nt, Homo sapiens
  misc_RNA (1)...(19): siRNA sense strand
ccuuacaaaugcauugaau

SEQ ID NO: 1975816 - RNA, 19 nt, Homo sapiens
  misc_RNA (1)...(19): siRNA sense strand
ccuuaugaauguagagaau

SEQ ID NO: 1975817 - RNA, 19 nt, Homo sapiens
  misc_RNA (1)...(19): siRNA sense strand
gugugucccuucucauuca

SEQ ID NO: 1975818 - RNA, 19 nt, Homo sapiens
  misc_RNA (1)...(19): siRNA sense strand
uaugaacuguggaaagucu

SEQ ID NO: 1975819 - RNA, 19 nt, Homo sapiens
  misc_RNA (1)...(19): siRNA sense strand
gcacucacacgggagagaa

SEQ ID NO: 1975820 - RNA, 19 nt, Homo sapiens
  misc_RNA (1)...(19): siRNA sense strand
cuggagagaagccuuauga

SEQ ID NO: 1975821 - RNA, 19 nt, Homo sapiens
  misc_RNA (1)...(19): siRNA sense strand
ucagagggacuuauacaag

SEQ ID NO: 1975822 - RNA, 19 nt, Homo sapiens
  misc_RNA (1)...(19): siRNA sense strand
aaagugagagaauaaaugg

SEQ ID NO: 1975823 - RNA, 19 nt, Homo sapiens
  misc_RNA (1)...(19): siRNA sense strand
acaccuuacucaacaucaa

SEQ ID NO: 1975824 - RNA, 19 nt, Homo sapiens
  misc_RNA (1)...(19): siRNA sense strand
uaagccauaugugaucaug

SEQ ID NO: 1975825 - RNA, 19 nt, Homo sapiens
  misc_RNA (1)...(19): siRNA sense strand
gaaugugggaagacuuuua

SEQ ID NO: 1975826 - RNA, 19 nt, Homo sapiens
  misc_RNA (1)...(19): siRNA sense strand
gaaucaagaugggaaaaca

SEQ ID NO: 1975827 - RNA, 19 nt, Homo sapiens
  misc_RNA (1)...(19): siRNA sense strand
cgcuaugagugucguauau

SEQ ID NO: 1975828 - RNA, 19 nt, Homo sapiens
  misc_RNA (1)...(19): siRNA sense strand
agagggacuuauacaagga

SEQ ID NO: 1975829 - RNA, 19 nt, Homo sapiens
  misc_RNA (1)...(19): siRNA sense strand
cgggagagaaaccguauga

SEQ ID NO: 1975830 - RNA, 19 nt, Homo sapiens
  misc_RNA (1)...(19): siRNA sense strand
aagggaauucacacaaaua

SEQ ID NO: 1975831 - RNA, 19 nt, Homo sapiens
  misc_RNA (1)...(19): siRNA sense strand
augugaugguccagaauua

SEQ ID NO: 1975832 - RNA, 19 nt, Homo sapiens
  misc_RNA (1)...(19): siRNA sense strand
gguccagaauuaugagaac

SEQ ID NO: 1975833 - RNA, 19 nt, Homo sapiens
  misc_RNA (1)...(19): siRNA sense strand
cauggcucaucacuuacua

SEQ ID NO: 1975834 - RNA, 19 nt, Homo sapiens
  misc_RNA (1)...(19): siRNA sense strand
agucgccacuggagaauuc

SEQ ID NO: 1975835 - RNA, 19 nt, Homo sapiens
  misc_RNA (1)...(19): siRNA sense strand
caaggaauuaucaacaaag

SEQ ID NO: 1975836 - RNA, 19 nt, Homo sapiens
  misc_RNA (1)...(19): siRNA sense strand
gaauucauacgcaagaaaa

SEQ ID NO: 1975837 - RNA, 19 nt, Homo sapiens
  misc_RNA (1)...(19): siRNA sense strand
gaaaccuuacaaaugcauu

SEQ ID NO: 1975838 - RNA, 19 nt, Homo sapiens
  misc_RNA (1)...(19): siRNA sense strand
gaaauccuucaaccagcuu

SEQ ID NO: 1975839 - RNA, 19 nt, Homo sapiens
  misc_RNA (1)...(19): siRNA sense strand
aguagcuucucauuucuug

SEQ ID NO: 1975840 - RNA, 19 nt, Homo sapiens
  misc_RNA (1)...(19): siRNA sense strand
ggaaaggccuucauucaua

SEQ ID NO: 1975841 - RNA, 19 nt, Homo sapiens
  misc_RNA (1)...(19): siRNA sense strand
ggaauucacacaaauauga

SEQ ID NO: 1975842 - RNA, 19 nt, Homo sapiens
  misc_RNA (1)...(19): siRNA sense strand
gagaauaaaugguggaaag

SEQ ID NO: 1975843 - RNA, 19 nt, Homo sapiens
  misc_RNA (1)...(19): siRNA sense strand
gagagaagccuuaugaaug

SEQ ID NO: 1975844 - RNA, 19 nt, Homo sapiens
  misc_RNA (1)...(19): siRNA sense strand
gagagaaaccuuacaaaug

SEQ ID NO: 1975845 - RNA, 19 nt, Homo sapiens
  misc_RNA (1)...(19): siRNA sense strand
gaagggaauucacacaaau

SEQ ID NO: 1975846 - RNA, 19 nt, Homo sapiens
  misc_RNA (1)...(19): siRNA sense strand
gagagaagcccuaugaaug

SEQ ID NO: 1975847 - RNA, 19 nt, Homo sapiens
  misc_RNA (1)...(19): siRNA sense strand
gaaaggccuucauucauag

SEQ ID NO: 1975848 - RNA, 19 nt, Homo sapiens
  misc_RNA (1)...(19): siRNA sense strand
caacaucagaguauucaua

SEQ ID NO: 1975849 - RNA, 19 nt, Homo sapiens
  misc_RNA (1)...(19): siRNA sense strand
gcuauagacuucucucaug

SEQ ID NO: 1975850 - RNA, 19 nt, Homo sapiens
  misc_RNA (1)...(19): siRNA sense strand
gagagaaaccguaugaaug

SEQ ID NO: 1975851 - RNA, 19 nt, Homo sapiens
  misc_RNA (1)...(19): siRNA sense strand
gaagcaccuuucauucaaa

SEQ ID NO: 1975852 - RNA, 19 nt, Homo sapiens
  misc_RNA (1)...(19): siRNA sense strand
caucaaagaauucacagua

SEQ ID NO: 1975853 - RNA, 19 nt, Homo sapiens
  misc_RNA (1)...(19): siRNA sense strand
ggagagaaaccuuacaaau

SEQ ID NO: 1975854 - RNA, 19 nt, Homo sapiens
  misc_RNA (1)...(19): siRNA sense strand
gcucacaccuuacucaaca

SEQ ID NO: 1975855 - RNA, 19 nt, Homo sapiens
  misc_RNA (1)...(19): siRNA sense strand
agagaagccuuaugaaugu

SEQ ID NO: 1975856 - RNA, 19 nt, Homo sapiens
  misc_RNA (1)...(19): siRNA sense strand
ggagagaaaccguaugaau

SEQ ID NO: 1975857 - RNA, 19 nt, Homo sapiens
  misc_RNA (1)...(19): siRNA sense strand
ggagagaagccuuaugaau

SEQ ID NO: 1975858 - RNA, 19 nt, Homo sapiens
  misc_RNA (1)...(19): siRNA sense strand
gagaaaccguaugaaugua

SEQ ID NO: 1975859 - RNA, 19 nt, Homo sapiens
  misc_RNA (1)...(19): siRNA sense strand
agagaaaccuuacaaaugc

SEQ ID NO: 1975860 - RNA, 19 nt, Homo sapiens
  misc_RNA (1)...(19): siRNA sense strand
ucaaagaauucacaguaug

SEQ ID NO: 1975861 - RNA, 19 nt, Homo sapiens
  misc_RNA (1)...(19): siRNA sense strand
gcucaucacuuacuaacca

SEQ ID NO: 1975862 - RNA, 19 nt, Homo sapiens
  misc_RNA (1)...(19): siRNA sense strand
caaagaauucacaguauga

SEQ ID NO: 1975863 - RNA, 19 nt, Homo sapiens
  misc_RNA (1)...(19): siRNA sense strand
ggagagaagcccuaugaau

SEQ ID NO: 1975864 - RNA, 19 nt, Homo sapiens
  misc_RNA (1)...(19): siRNA sense strand
uuuaguagcuucucauuuc

SEQ ID NO: 1975865 - RNA, 19 nt, Homo sapiens
  misc_RNA (1)...(19): siRNA sense strand
gaaaccguaugaauguaug

SEQ ID NO: 1975866 - RNA, 19 nt, Homo sapiens
  misc_RNA (1)...(19): siRNA sense strand
guaacuaagccauauguga

SEQ ID NO: 1975867 - RNA, 19 nt, Homo sapiens
  misc_RNA (1)...(19): siRNA sense strand
gaauaaaugguggaaagaa

SEQ ID NO: 1975868 - RNA, 19 nt, Homo sapiens
  misc_RNA (1)...(19): siRNA sense strand
ggaauuaucaacaaagaag

SEQ ID NO: 1975869 - RNA, 19 nt, Homo sapiens
  misc_RNA (1)...(19): siRNA sense strand
agaagcaccuuucauucaa

SEQ ID NO: 1975870 - RNA, 19 nt, Homo sapiens
  misc_RNA (1)...(19): siRNA sense strand
cagcaucuaagaauucaua

SEQ ID NO: 1975871 - RNA, 19 nt, Homo sapiens
  misc_RNA (1)...(19): siRNA sense strand
gagaaugugggaaagcuuu

SEQ ID NO: 1975872 - RNA, 19 nt, Homo sapiens
  misc_RNA (1)...(19): siRNA sense strand
gagaagccuuaugaaugua

SEQ ID NO: 1975873 - RNA, 19 nt, Homo sapiens
  misc_RNA (1)...(19): siRNA sense strand
caggugacauuuagugaug

SEQ ID NO: 1975874 - RNA, 19 nt, Homo sapiens
  misc_RNA (1)...(19): siRNA sense strand
ugcuguagcucacaccuua

SEQ ID NO: 1975875 - RNA, 19 nt, Homo sapiens
  misc_RNA (1)...(19): siRNA sense strand
uaacuaagccauaugugau

SEQ ID NO: 1975876 - RNA, 19 nt, Homo sapiens
  misc_RNA (1)...(19): siRNA sense strand
cuauagacuucucucauga

SEQ ID NO: 1975877 - RNA, 19 nt, Homo sapiens
  misc_RNA (1)...(19): siRNA sense strand
cgacaucagauaagccaua

SEQ ID NO: 1975878 - RNA, 19 nt, Homo sapiens
  misc_RNA (1)...(19): siRNA sense strand
gagagaaaaucuauacaug

SEQ ID NO: 1975879 - RNA, 19 nt, Homo sapiens
  misc_RNA (1)...(19): siRNA sense strand
caggagagaagcccuauga

SEQ ID NO: 1975880 - RNA, 19 nt, Homo sapiens
  misc_RNA (1)...(19): siRNA sense strand
cuaugaaugucgugaaugu

SEQ ID NO: 1975881 - RNA, 19 nt, Homo sapiens
  misc_RNA (1)...(19): siRNA sense strand
gagugggcaugccuagauu

SEQ ID NO: 1975882 - RNA, 19 nt, Homo sapiens
  misc_RNA (1)...(19): siRNA sense strand
uuagugauguggcuauaga

SEQ ID NO: 1975883 - RNA, 19 nt, Homo sapiens
  misc_RNA (1)...(19): siRNA sense strand
agagaaaccguaugaaugu

SEQ ID NO: 1975884 - RNA, 19 nt, Homo sapiens
  misc_RNA (1)...(19): siRNA sense strand
gaugugaugguccagaauu

SEQ ID NO: 1975885 - RNA, 19 nt, Homo sapiens
  misc_RNA (1)...(19): siRNA sense strand
caacaucaaagaauucaca

SEQ ID NO: 1975886 - RNA, 19 nt, Homo sapiens
  misc_RNA (1)...(19): siRNA sense strand
ugauguggcuauagacuuc

SEQ ID NO: 1975887 - RNA, 19 nt, Homo sapiens
  misc_RNA (1)...(19): siRNA sense strand
gagaaaaucuauacaugca

SEQ ID NO: 1975888 - RNA, 19 nt, Homo sapiens
  misc_RNA (1)...(19): siRNA sense strand
gaaaagagcccuggaugau

SEQ ID NO: 1975889 - RNA, 19 nt, Homo sapiens
  misc_RNA (1)...(19): siRNA sense strand
uagaagcaccuuucauuca

SEQ ID NO: 1975890 - RNA, 19 nt, Homo sapiens
  misc_RNA (1)...(19): siRNA sense strand
guaggucuuuccguaacua

SEQ ID NO: 1975891 - RNA, 19 nt, Homo sapiens
  misc_RNA (1)...(19): siRNA sense strand
gagaagcccuaugaauguc

SEQ ID NO: 1975892 - RNA, 19 nt, Homo sapiens
  misc_RNA (1)...(19): siRNA sense strand
agagaagcccuaugaaugu

SEQ ID NO: 1975893 - RNA, 19 nt, Homo sapiens
  misc_RNA (1)...(19): siRNA sense strand
gagaaaccuuacaaaugca

SEQ ID NO: 1975894 - RNA, 19 nt, Homo sapiens
  misc_RNA (1)...(19): siRNA sense strand
agccaugguucaucccuua

SEQ ID NO: 1975895 - RNA, 19 nt, Homo sapiens
  misc_RNA (1)...(19): siRNA sense strand
gaauguaugaacuguggaa

SEQ ID NO: 1975896 - RNA, 19 nt, Homo sapiens
  misc_RNA (1)...(19): siRNA sense strand
guggaaaggccuucauuca

SEQ ID NO: 1975897 - RNA, 19 nt, Homo sapiens
  misc_RNA (1)...(19): siRNA sense strand
uguaugaacuguggaaagu

SEQ ID NO: 1975898 - RNA, 19 nt, Homo sapiens
  misc_RNA (1)...(19): siRNA sense strand
gugaaugugggaagacuuu

SEQ ID NO: 1975899 - RNA, 19 nt, Homo sapiens
  misc_RNA (1)...(19): siRNA sense strand
gaagccuuaugaauguaga

SEQ ID NO: 1975900 - RNA, 19 nt, Homo sapiens
  misc_RNA (1)...(19): siRNA sense strand
caucagauaagccauagug

SEQ ID NO: 1975901 - RNA, 19 nt, Homo sapiens
  misc_RNA (1)...(19): siRNA sense strand
agccauaugugaucauguu

SEQ ID NO: 1975902 - RNA, 19 nt, Homo sapiens
  misc_RNA (1)...(19): siRNA sense strand
uaagaauucauacgcaaga

SEQ ID NO: 1975903 - RNA, 19 nt, Homo sapiens
  misc_RNA (1)...(19): siRNA sense strand
uuuagaagcaccuuucauu

SEQ ID NO: 1975904 - RNA, 19 nt, Homo sapiens
  misc_RNA (1)...(19): siRNA sense strand
cauaguucgucucucauuc

SEQ ID NO: 1975905 - RNA, 19 nt, Homo sapiens
  misc_RNA (1)...(19): siRNA sense strand
auucauaguucgucucuca

SEQ ID NO: 1975906 - RNA, 19 nt, Homo sapiens
  misc_RNA (1)...(19): siRNA sense strand
ggaaaacaaggaauuauca

SEQ ID NO: 1975907 - RNA, 19 nt, Homo sapiens
  misc_RNA (1)...(19): siRNA sense strand
cuaugagugucguauaugu

SEQ ID NO: 1975908 - RNA, 19 nt, Homo sapiens
  misc_RNA (1)...(19): siRNA sense strand
gacaucagauaagccauag

SEQ ID NO: 1975909 - RNA, 19 nt, Homo sapiens
  misc_RNA (1)...(19): siRNA sense strand
ggaaaagagcccuggauga

SEQ ID NO: 1975910 - RNA, 19 nt, Homo sapiens
  misc_RNA (1)...(19): siRNA sense strand
gaaugugggaaggccuuua

SEQ ID NO: 1975911 - RNA, 19 nt, Homo sapiens
  misc_RNA (1)...(19): siRNA sense strand
gcucagagggacuuauaca

SEQ ID NO: 1975912 - RNA, 19 nt, Homo sapiens
  misc_RNA (1)...(19): siRNA sense strand
ggacuuauacaaggaugug

SEQ ID NO: 1975913 - RNA, 19 nt, Homo sapiens
  misc_RNA (1)...(19): siRNA sense strand
guaugaauguaugaacugu

SEQ ID NO: 1975914 - RNA, 19 nt, Homo sapiens
  misc_RNA (1)...(19): siRNA sense strand
ccuuacaaaugcauugaau

SEQ ID NO: 1975915 - RNA, 19 nt, Homo sapiens
  misc_RNA (1)...(19): siRNA sense strand
ccuuaugaauguagagaau

SEQ ID NO: 1975916 - RNA, 19 nt, Homo sapiens
  misc_RNA (1)...(19): siRNA sense strand
gugugucccuucucauuca

SEQ ID NO: 1975917 - RNA, 19 nt, Homo sapiens
  misc_RNA (1)...(19): siRNA sense strand
uaugaacuguggaaagucu

SEQ ID NO: 1975918 - RNA, 19 nt, Homo sapiens
  misc_RNA (1)...(19): siRNA sense strand
gcacucacacgggagagaa

SEQ ID NO: 1975919 - RNA, 19 nt, Homo sapiens
  misc_RNA (1)...(19): siRNA sense strand
cuggagagaagccuuauga

SEQ ID NO: 1975920 - RNA, 19 nt, Homo sapiens
  misc_RNA (1)...(19): siRNA sense strand
ucagagggacuuauacaag

SEQ ID NO: 1975921 - RNA, 19 nt, Homo sapiens
  misc_RNA (1)...(19): siRNA sense strand
uaagccauaugugaucaug

SEQ ID NO: 1975922 - RNA, 19 nt, Homo sapiens
  misc_RNA (1)...(19): siRNA sense strand
acaccuuacucaacaucaa

SEQ ID NO: 1975923 - RNA, 19 nt, Homo sapiens
  misc_RNA (1)...(19): siRNA sense strand
gaaugugggaagacuuuua

SEQ ID NO: 1975924 - RNA, 19 nt, Homo sapiens
  misc_RNA (1)...(19): siRNA sense strand
aaagugagagaauaaaugg

SEQ ID NO: 1975925 - RNA, 19 nt, Homo sapiens
  misc_RNA (1)...(19): siRNA sense strand
gaaucaagaugggaaaaca

SEQ ID NO: 1975926 - RNA, 19 nt, Homo sapiens
  misc_RNA (1)...(19): siRNA sense strand
cgcuaugagugucguauau

SEQ ID NO: 1975927 - RNA, 19 nt, Homo sapiens
  misc_RNA (1)...(19): siRNA sense strand
agagggacuuauacaagga

SEQ ID NO: 1975928 - RNA, 19 nt, Homo sapiens
  misc_RNA (1)...(19): siRNA sense strand
cgggagagaaaccguauga

SEQ ID NO: 1975929 - RNA, 19 nt, Homo sapiens
  misc_RNA (1)...(19): siRNA sense strand
aagggaauucacacaaaua

SEQ ID NO: 1975930 - RNA, 19 nt, Homo sapiens
  misc_RNA (1)...(19): siRNA sense strand
cauggcucaucacuuacua

SEQ ID NO: 1975931 - RNA, 19 nt, Homo sapiens
  misc_RNA (1)...(19): siRNA sense strand
augugaugguccagaauua

SEQ ID NO: 1975932 - RNA, 19 nt, Homo sapiens
  misc_RNA (1)...(19): siRNA sense strand
gguccagaauuaugagaac

SEQ ID NO: 1975933 - RNA, 19 nt, Homo sapiens
  misc_RNA (1)...(19): siRNA sense strand
agucgccacuggagaauuc

SEQ ID NO: 1975934 - RNA, 19 nt, Homo sapiens
  misc_RNA (1)...(19): siRNA sense strand
caaggaauuaucaacaaag

SEQ ID NO: 1975935 - RNA, 19 nt, Homo sapiens
  misc_RNA (1)...(19): siRNA sense strand
gaauucauacgcaagaaaa

SEQ ID NO: 1975936 - RNA, 19 nt, Homo sapiens
  misc_RNA (1)...(19): siRNA sense strand
gacuuguaauagagagaaa

SEQ ID NO: 1975937 - RNA, 19 nt, Homo sapiens
  misc_RNA (1)...(19): siRNA sense strand
aguagcuucucauuucuug

SEQ ID NO: 1975938 - RNA, 19 nt, Homo sapiens
  misc_RNA (1)...(19): siRNA sense strand
gaaaccuuacaaaugcauu

SEQ ID NO: 1975939 - RNA, 19 nt, Homo sapiens
  misc_RNA (1)...(19): siRNA sense strand
gugaugguccagaauuaug

SEQ ID NO: 1975940 - RNA, 19 nt, Homo sapiens
  misc_RNA (1)...(19): siRNA sense strand
gcagaaagacgccgaguuu

SEQ ID NO: 1975941 - RNA, 19 nt, Homo sapiens
  misc_RNA (1)...(19): siRNA sense strand
gcacgcagcucuauuacau

SEQ ID NO: 1975942 - RNA, 19 nt, Homo sapiens
  misc_RNA (1)...(19): siRNA sense strand
gcacagcccugaugaugga

SEQ ID NO: 1975943 - RNA, 19 nt, Homo sapiens
  misc_RNA (1)...(19): siRNA sense strand
gcaaguaccucuaccaaaa

SEQ ID NO: 1975944 - RNA, 19 nt, Homo sapiens
  misc_RNA (1)...(19): siRNA sense strand
ccaagaacgucucgcagaa

SEQ ID NO: 1975945 - RNA, 19 nt, Homo sapiens
  misc_RNA (1)...(19): siRNA sense strand
ccaaugauuucgcuuccua

SEQ ID NO: 1975946 - RNA, 19 nt, Homo sapiens
  misc_RNA (1)...(19): siRNA sense strand
ugauuucgcuuccuacuug

SEQ ID NO: 1975947 - RNA, 19 nt, Homo sapiens
  misc_RNA (1)...(19): siRNA sense strand
gagcaguucagcuucaaua

SEQ ID NO: 1975948 - RNA, 19 nt, Homo sapiens
  misc_RNA (1)...(19): siRNA sense strand
cgacaucgauuccgacaag

SEQ ID NO: 1975949 - RNA, 19 nt, Homo sapiens
  misc_RNA (1)...(19): siRNA sense strand
gaccgagccugcccagaaa

SEQ ID NO: 1975950 - RNA, 19 nt, Homo sapiens
  misc_RNA (1)...(19): siRNA sense strand
uuacaacuauggcuccuuu

SEQ ID NO: 1975951 - RNA, 19 nt, Homo sapiens
  misc_RNA (1)...(19): siRNA sense strand
caccauugcugucuucuau

SEQ ID NO: 1975952 - RNA, 19 nt, Homo sapiens
  misc_RNA (1)...(19): siRNA sense strand
gcaaccugcuccuuuacuu

SEQ ID NO: 1975953 - RNA, 19 nt, Homo sapiens
  misc_RNA (1)...(19): siRNA sense strand
ggguauauuucucuccuuu

SEQ ID NO: 1975954 - RNA, 19 nt, Homo sapiens
  misc_RNA (1)...(19): siRNA sense strand
ggaaucaggacaucugcua

SEQ ID NO: 1975955 - RNA, 19 nt, Homo sapiens
  misc_RNA (1)...(19): siRNA sense strand
ucuaugaccuggacaacaa

SEQ ID NO: 1975956 - RNA, 19 nt, Homo sapiens
  misc_RNA (1)...(19): siRNA sense strand
ucagcacgcagcucuauua

SEQ ID NO: 1975957 - RNA, 19 nt, Homo sapiens
  misc_RNA (1)...(19): siRNA sense strand
ggaccucucuuacgguuac

SEQ ID NO: 1975958 - RNA, 19 nt, Homo sapiens
  misc_RNA (1)...(19): siRNA sense strand
gcucagugcuugcuaucau

SEQ ID NO: 1975959 - RNA, 19 nt, Homo sapiens
  misc_RNA (1)...(19): siRNA sense strand
ucugcaaccugcuccuuua

SEQ ID NO: 1975960 - RNA, 19 nt, Homo sapiens
  misc_RNA (1)...(19): siRNA sense strand
gcaccaagcaauaccucua

SEQ ID NO: 1975961 - RNA, 19 nt, Homo sapiens
  misc_RNA (1)...(19): siRNA sense strand
agaaagacgccgaguuuga

SEQ ID NO: 1975962 - RNA, 19 nt, Homo sapiens
  misc_RNA (1)...(19): siRNA sense strand
gcucagucaucuccauuca

SEQ ID NO: 1975963 - RNA, 19 nt, Homo sapiens
  misc_RNA (1)...(19): siRNA sense strand
cuauaccaauuuccaguuu

SEQ ID NO: 1975964 - RNA, 19 nt, Homo sapiens
  misc_RNA (1)...(19): siRNA sense strand
ucaacaacauccucagcaa

SEQ ID NO: 1975965 - RNA, 19 nt, Homo sapiens
  misc_RNA (1)...(19): siRNA sense strand
gaaagacgccgaguuugag

SEQ ID NO: 1975966 - RNA, 19 nt, Homo sapiens
  misc_RNA (1)...(19): siRNA sense strand
ugucagugcuggugucuca

SEQ ID NO: 1975967 - RNA, 19 nt, Homo sapiens
  misc_RNA (1)...(19): siRNA sense strand
ggacaucugcuacuacaac

SEQ ID NO: 1975968 - RNA, 19 nt, Homo sapiens
  misc_RNA (1)...(19): siRNA sense strand
ugaccgagccugcccagaa

SEQ ID NO: 1975969 - RNA, 19 nt, Homo sapiens
  misc_RNA (1)...(19): siRNA sense strand
gaucgucuucuccaucauu

SEQ ID NO: 1975970 - RNA, 19 nt, Homo sapiens
  misc_RNA (1)...(19): siRNA sense strand
caggacaucugcuacuaca

SEQ ID NO: 1975971 - RNA, 19 nt, Homo sapiens
  misc_RNA (1)...(19): siRNA sense strand
gcaaagacuuccccagcaa

SEQ ID NO: 1975972 - RNA, 19 nt, Homo sapiens
  misc_RNA (1)...(19): siRNA sense strand
ggaugacuacgacacauug

SEQ ID NO: 1975973 - RNA, 19 nt, Homo sapiens
  misc_RNA (1)...(19): siRNA sense strand
uuaugaggguuacaacuau

SEQ ID NO: 1975974 - RNA, 19 nt, Homo sapiens
  misc_RNA (1)...(19): siRNA sense strand
gcacuggggaccucucuua

SEQ ID NO: 1975975 - RNA, 19 nt, Homo sapiens
  misc_RNA (1)...(19): siRNA sense strand
gcgagcuggucaacaucua

SEQ ID NO: 1975976 - RNA, 19 nt, Homo sapiens
  misc_RNA (1)...(19): siRNA sense strand
gaacauugccaccauugcu

SEQ ID NO: 1975977 - RNA, 19 nt, Homo sapiens
  misc_RNA (1)...(19): siRNA sense strand
agucggagauucaguucuu

SEQ ID NO: 1975978 - RNA, 19 nt, Homo sapiens
  misc_RNA (1)...(19): siRNA sense strand
guucggguccuuccuggua

SEQ ID NO: 1975979 - RNA, 19 nt, Homo sapiens
  misc_RNA (1)...(19): siRNA sense strand
auaccaauuuccaguuuga

SEQ ID NO: 1975980 - RNA, 19 nt, Homo sapiens
  misc_RNA (1)...(19): siRNA sense strand
ggcguggacucgguaauug

SEQ ID NO: 1975981 - RNA, 19 nt, Homo sapiens
  misc_RNA (1)...(19): siRNA sense strand
gaugugcuguguccugucu

SEQ ID NO: 1975982 - RNA, 19 nt, Homo sapiens
  misc_RNA (1)...(19): siRNA sense strand
caagaacgucucgcagaaa

SEQ ID NO: 1975983 - RNA, 19 nt, Homo sapiens
  misc_RNA (1)...(19): siRNA sense strand
caacaacguagccuucauc

SEQ ID NO: 1975984 - RNA, 19 nt, Homo sapiens
  misc_RNA (1)...(19): siRNA sense strand
gggcuucgcgcucuucuuc

SEQ ID NO: 1975985 - RNA, 19 nt, Homo sapiens
  misc_RNA (1)...(19): siRNA sense strand
aacuauggcuccuuugaga

SEQ ID NO: 1975986 - RNA, 19 nt, Homo sapiens
  misc_RNA (1)...(19): siRNA sense strand
caguucagcuucaauacca

SEQ ID NO: 1975987 - RNA, 19 nt, Homo sapiens
  misc_RNA (1)...(19): siRNA sense strand
gucaacaucuacaccuuca

SEQ ID NO: 1975988 - RNA, 19 nt, Homo sapiens
  misc_RNA (1)...(19): siRNA sense strand
ggugaagaccgaagaccaa

SEQ ID NO: 1975989 - RNA, 19 nt, Homo sapiens
  misc_RNA (1)...(19): siRNA sense strand
cuuaugaggguuacaacua

SEQ ID NO: 1975990 - RNA, 19 nt, Homo sapiens
  misc_RNA (1)...(19): siRNA sense strand
gggagaggaucaagcucau

SEQ ID NO: 1975991 - RNA, 19 nt, Homo sapiens
  misc_RNA (1)...(19): siRNA sense strand
uuacuucgccuucuacauc

SEQ ID NO: 1975992 - RNA, 19 nt, Homo sapiens
  misc_RNA (1)...(19): siRNA sense strand
aagaugaaccggucgauca

SEQ ID NO: 1975993 - RNA, 19 nt, Homo sapiens
  misc_RNA (1)...(19): siRNA sense strand
gcuucgcgcucuucuucuu

SEQ ID NO: 1975994 - RNA, 19 nt, Homo sapiens
  misc_RNA (1)...(19): siRNA sense strand
ugcugaagcucuaccagaa

SEQ ID NO: 1975995 - RNA, 19 nt, Homo sapiens
  misc_RNA (1)...(19): siRNA sense strand
ugaccucugugcccuggaa

SEQ ID NO: 1975996 - RNA, 19 nt, Homo sapiens
  misc_RNA (1)...(19): siRNA sense strand
gcgcaaguaccucuaccaa

SEQ ID NO: 1975997 - RNA, 19 nt, Homo sapiens
  misc_RNA (1)...(19): siRNA sense strand
ggcgcagcguugaggauaa

SEQ ID NO: 1975998 - RNA, 19 nt, Homo sapiens
  misc_RNA (1)...(19): siRNA sense strand
caagcaauaccucuaugug

SEQ ID NO: 1975999 - RNA, 19 nt, Homo sapiens
  misc_RNA (1)...(19): siRNA sense strand
aagaacgucucgcagaaag

SEQ ID NO: 1976000 - RNA, 19 nt, Homo sapiens
  misc_RNA (1)...(19): siRNA sense strand
ucagccgcauggacgauuu

SEQ ID NO: 1976001 - RNA, 19 nt, Homo sapiens
  misc_RNA (1)...(19): siRNA sense strand
gcauggugcugcuggucau

SEQ ID NO: 1976002 - RNA, 19 nt, Homo sapiens
  misc_RNA (1)...(19): siRNA sense strand
gaucuacuucuggaacauu

SEQ ID NO: 1976003 - RNA, 19 nt, Homo sapiens
  misc_RNA (1)...(19): siRNA sense strand
gaggaugacuacgacacau

SEQ ID NO: 1976004 - RNA, 19 nt, Homo sapiens
  misc_RNA (1)...(19): siRNA sense strand
ucaagggcaccgccagaaa

SEQ ID NO: 1976005 - RNA, 19 nt, Homo sapiens
  misc_RNA (1)...(19): siRNA sense strand
accagacgaugaccaagaa

SEQ ID NO: 1976006 - RNA, 19 nt, Homo sapiens
  misc_RNA (1)...(19): siRNA sense strand
ugaccuggacaacaacgua

SEQ ID NO: 1976007 - RNA, 19 nt, Homo sapiens
  misc_RNA (1)...(19): siRNA sense strand
ugaacguccugaacaagca

SEQ ID NO: 1976008 - RNA, 19 nt, Homo sapiens
  misc_RNA (1)...(19): siRNA sense strand
caucugcuacuacaacuuc

SEQ ID NO: 1976009 - RNA, 19 nt, Homo sapiens
  misc_RNA (1)...(19): siRNA sense strand
ggaggaugacuacgacaca

SEQ ID NO: 1976010 - RNA, 19 nt, Homo sapiens
  misc_RNA (1)...(19): siRNA sense strand
cucaagcagucacgucuga

SEQ ID NO: 1976011 - RNA, 19 nt, Homo sapiens
  misc_RNA (1)...(19): siRNA sense strand
caagaaugagucggagauu

SEQ ID NO: 1976012 - RNA, 19 nt, Homo sapiens
  misc_RNA (1)...(19): siRNA sense strand
uauaccaauuuccaguuug

SEQ ID NO: 1976013 - RNA, 19 nt, Homo sapiens
  misc_RNA (1)...(19): siRNA sense strand
gcugcucagugcuugcuau

SEQ ID NO: 1976014 - RNA, 19 nt, Homo sapiens
  misc_RNA (1)...(19): siRNA sense strand
caacaucuacaccuucaac

SEQ ID NO: 1976015 - RNA, 19 nt, Homo sapiens
  misc_RNA (1)...(19): siRNA sense strand
gggagcaguucagcuucaa

SEQ ID NO: 1976016 - RNA, 19 nt, Homo sapiens
  misc_RNA (1)...(19): siRNA sense strand
ggauguguccacccuguca

SEQ ID NO: 1976017 - RNA, 19 nt, Homo sapiens
  misc_RNA (1)...(19): siRNA sense strand
ggucaugggcaacgucauc

SEQ ID NO: 1976018 - RNA, 19 nt, Homo sapiens
  misc_RNA (1)...(19): siRNA sense strand
ccaagaaugagucggagau

SEQ ID NO: 1976019 - RNA, 19 nt, Homo sapiens
  misc_RNA (1)...(19): siRNA sense strand
aacgggagaucaaccacaa

SEQ ID NO: 1976020 - RNA, 19 nt, Homo sapiens
  misc_RNA (1)...(19): siRNA sense strand
ccauugcugucuucuaugc

SEQ ID NO: 1976021 - RNA, 19 nt, Homo sapiens
  misc_RNA (1)...(19): siRNA sense strand
uaugaggguuacaacuaug

SEQ ID NO: 1976022 - RNA, 19 nt, Homo sapiens
  misc_RNA (1)...(19): siRNA sense strand
ggauguuucagcgcaagua

SEQ ID NO: 1976023 - RNA, 19 nt, Homo sapiens
  misc_RNA (1)...(19): siRNA sense strand
gaaggacaagcguguucug

SEQ ID NO: 1976024 - RNA, 19 nt, Homo sapiens
  misc_RNA (1)...(19): siRNA sense strand
gaaggcguggacucgguaa

SEQ ID NO: 1976025 - RNA, 19 nt, Homo sapiens
  misc_RNA (1)...(19): siRNA sense strand
caaccugcuccuuuacuuc

SEQ ID NO: 1976026 - RNA, 19 nt, Homo sapiens
  misc_RNA (1)...(19): siRNA sense strand
gcugcgcaaugaccucugu

SEQ ID NO: 1976027 - RNA, 19 nt, Homo sapiens
  misc_RNA (1)...(19): siRNA sense strand
acaacuauggcuccuuuga

SEQ ID NO: 1976028 - RNA, 19 nt, Homo sapiens
  misc_RNA (1)...(19): siRNA sense strand
gagaacuggaggcagaaga

SEQ ID NO: 1976029 - RNA, 19 nt, Homo sapiens
  misc_RNA (1)...(19): siRNA sense strand
ucagugggaugcucuuuug

SEQ ID NO: 1976030 - RNA, 19 nt, Homo sapiens
  misc_RNA (1)...(19): siRNA sense strand
gaacuggaggcagaagaag

SEQ ID NO: 1976031 - RNA, 19 nt, Homo sapiens
  misc_RNA (1)...(19): siRNA sense strand
ggagauucaguucuucuac

SEQ ID NO: 1976032 - RNA, 19 nt, Homo sapiens
  misc_RNA (1)...(19): siRNA sense strand
ccaagcaauaccucuaugu

SEQ ID NO: 1976033 - RNA, 19 nt, Homo sapiens
  misc_RNA (1)...(19): siRNA sense strand
caacuauggcuccuuugag

SEQ ID NO: 1976034 - RNA, 19 nt, Homo sapiens
  misc_RNA (1)...(19): siRNA sense strand
ggaggcagaagaagaagac

SEQ ID NO: 1976035 - RNA, 19 nt, Homo sapiens
  misc_RNA (1)...(19): siRNA sense strand
acagagggcgugcgugugu

SEQ ID NO: 1976036 - RNA, 19 nt, Homo sapiens
  misc_RNA (1)...(19): siRNA sense strand
caucuacaccuucaaccau

SEQ ID NO: 1976037 - RNA, 19 nt, Homo sapiens
  misc_RNA (1)...(19): siRNA sense strand
gcucuguggaggaggauga

SEQ ID NO: 1976038 - RNA, 19 nt, Homo sapiens
  misc_RNA (1)...(19): siRNA sense strand
gacaucugcuacuacaacu

SEQ ID NO: 1976039 - RNA, 19 nt, Homo sapiens
  misc_RNA (1)...(19): siRNA sense strand
gcgcagcguugaggauaac

SEQ ID NO: 1976040 - RNA, 19 nt, Homo sapiens
  misc_RNA (1)...(19): siRNA sense strand
gagcuugugucccuuacua

SEQ ID NO: 1976041 - RNA, 19 nt, Homo sapiens
  misc_RNA (1)...(19): siRNA sense strand
gaaucuuugugcauuagua

SEQ ID NO: 1976042 - RNA, 19 nt, Homo sapiens
  misc_RNA (1)...(19): siRNA sense strand
gacugaagcugaagaggaa

SEQ ID NO: 1976043 - RNA, 19 nt, Homo sapiens
  misc_RNA (1)...(19): siRNA sense strand
aaauguaccugcugcuauu

SEQ ID NO: 1976044 - RNA, 19 nt, Homo sapiens
  misc_RNA (1)...(19): siRNA sense strand
gaaauccugaucaaagaaa

SEQ ID NO: 1976045 - RNA, 19 nt, Homo sapiens
  misc_RNA (1)...(19): siRNA sense strand
agaagcaggugucgcauga

SEQ ID NO: 1976046 - RNA, 19 nt, Homo sapiens
  misc_RNA (1)...(19): siRNA sense strand
cagaugcuguugauuguau

SEQ ID NO: 1976047 - RNA, 19 nt, Homo sapiens
  misc_RNA (1)...(19): siRNA sense strand
ccgaaauccugaucaaaga

SEQ ID NO: 1976048 - RNA, 19 nt, Homo sapiens
  misc_RNA (1)...(19): siRNA sense strand
uagagaggauccuugcaaa

SEQ ID NO: 1976049 - RNA, 19 nt, Homo sapiens
  misc_RNA (1)...(19): siRNA sense strand
ggucagcacuugucagacu

SEQ ID NO: 1976050 - RNA, 19 nt, Homo sapiens
  misc_RNA (1)...(19): siRNA sense strand
ugaaugaaagcacaacaaa

SEQ ID NO: 1976051 - RNA, 19 nt, Homo sapiens
  misc_RNA (1)...(19): siRNA sense strand
gcugcuauuucaaguuuau

SEQ ID NO: 1976052 - RNA, 19 nt, Homo sapiens
  misc_RNA (1)...(19): siRNA sense strand
gagaggauccuugcaaaca

SEQ ID NO: 1976053 - RNA, 19 nt, Homo sapiens
  misc_RNA (1)...(19): siRNA sense strand
cugcugcuauuucaaguuu

SEQ ID NO: 1976054 - RNA, 19 nt, Homo sapiens
  misc_RNA (1)...(19): siRNA sense strand
guacauuaccagugcuuga

SEQ ID NO: 1976055 - RNA, 19 nt, Homo sapiens
  misc_RNA (1)...(19): siRNA sense strand
gaggauccuugcaaacagu

SEQ ID NO: 1976056 - RNA, 19 nt, Homo sapiens
  misc_RNA (1)...(19): siRNA sense strand
gcaggugucgcaugacuuc

SEQ ID NO: 1976057 - RNA, 19 nt, Homo sapiens
  misc_RNA (1)...(19): siRNA sense strand
uaaauguaccugcugcuau

SEQ ID NO: 1976058 - RNA, 19 nt, Homo sapiens
  misc_RNA (1)...(19): siRNA sense strand
gucagacuauucccaguug

SEQ ID NO: 1976059 - RNA, 19 nt, Homo sapiens
  misc_RNA (1)...(19): siRNA sense strand
gccagccucuucuguggaa

SEQ ID NO: 1976060 - RNA, 19 nt, Homo sapiens
  misc_RNA (1)...(19): siRNA sense strand
ugacagugcaucugaggaa

SEQ ID NO: 1976061 - RNA, 19 nt, Homo sapiens
  misc_RNA (1)...(19): siRNA sense strand
ccaccggucucagaaagga

SEQ ID NO: 1976062 - RNA, 19 nt, Homo sapiens
  misc_RNA (1)...(19): siRNA sense strand
gguucgagauccacgcuau

SEQ ID NO: 1976063 - RNA, 19 nt, Homo sapiens
  misc_RNA (1)...(19): siRNA sense strand
uuaguggcccuuaaaugua

SEQ ID NO: 1976064 - RNA, 19 nt, Homo sapiens
  misc_RNA (1)...(19): siRNA sense strand
gacagugcaucugaggaaa

SEQ ID NO: 1976065 - RNA, 19 nt, Homo sapiens
  misc_RNA (1)...(19): siRNA sense strand
gagauccacgcuauagaga

SEQ ID NO: 1976066 - RNA, 19 nt, Homo sapiens
  misc_RNA (1)...(19): siRNA sense strand
uagccgaaauccugaucaa

SEQ ID NO: 1976067 - RNA, 19 nt, Homo sapiens
  misc_RNA (1)...(19): siRNA sense strand
gccgaaauccugaucaaag

SEQ ID NO: 1976068 - RNA, 19 nt, Homo sapiens
  misc_RNA (1)...(19): siRNA sense strand
ucagguuacuucccaccaa

SEQ ID NO: 1976069 - RNA, 19 nt, Homo sapiens
  misc_RNA (1)...(19): siRNA sense strand
agaguuuaguggcccuuaa

SEQ ID NO: 1976070 - RNA, 19 nt, Homo sapiens
  misc_RNA (1)...(19): siRNA sense strand
gggccaggguauuggaugu

SEQ ID NO: 1976071 - RNA, 19 nt, Homo sapiens
  misc_RNA (1)...(19): siRNA sense strand
cgaaauccugaucaaagaa

SEQ ID NO: 1976072 - RNA, 19 nt, Homo sapiens
  misc_RNA (1)...(19): siRNA sense strand
aagcugaagaggaauacua

SEQ ID NO: 1976073 - RNA, 19 nt, Homo sapiens
  misc_RNA (1)...(19): siRNA sense strand
aaaagggacugaagcugaa

SEQ ID NO: 1976074 - RNA, 19 nt, Homo sapiens
  misc_RNA (1)...(19): siRNA sense strand
agaugaacucguuggguua

SEQ ID NO: 1976075 - RNA, 19 nt, Homo sapiens
  misc_RNA (1)...(19): siRNA sense strand
uuaaucgggcaauccauaa

SEQ ID NO: 1976076 - RNA, 19 nt, Homo sapiens
  misc_RNA (1)...(19): siRNA sense strand
ccucuucuguggaaaguac

SEQ ID NO: 1976077 - RNA, 19 nt, Homo sapiens
  misc_RNA (1)...(19): siRNA sense strand
gaaugaaagcacaacaaaa

SEQ ID NO: 1976078 - RNA, 19 nt, Homo sapiens
  misc_RNA (1)...(19): siRNA sense strand
gcacuugucagacuauucc

SEQ ID NO: 1976079 - RNA, 19 nt, Homo sapiens
  misc_RNA (1)...(19): siRNA sense strand
gucagcacuugucagacua

SEQ ID NO: 1976080 - RNA, 19 nt, Homo sapiens
  misc_RNA (1)...(19): siRNA sense strand
uuuaaucgggcaauccaua

SEQ ID NO: 1976081 - RNA, 19 nt, Homo sapiens
  misc_RNA (1)...(19): siRNA sense strand
gaacucguuggguuaccuu

SEQ ID NO: 1976082 - RNA, 19 nt, Homo sapiens
  misc_RNA (1)...(19): siRNA sense strand
agagagcuugugucccuua

SEQ ID NO: 1976083 - RNA, 19 nt, Homo sapiens
  misc_RNA (1)...(19): siRNA sense strand
uaguggcccuuaaauguac

SEQ ID NO: 1976084 - RNA, 19 nt, Homo sapiens
  misc_RNA (1)...(19): siRNA sense strand
uuacuucccaccaagaguu

SEQ ID NO: 1976085 - RNA, 19 nt, Homo sapiens
  misc_RNA (1)...(19): siRNA sense strand
cgagauccacgcuauagag

SEQ ID NO: 1976086 - RNA, 19 nt, Homo sapiens
  misc_RNA (1)...(19): siRNA sense strand
guucgagauccacgcuaua

SEQ ID NO: 1976087 - RNA, 19 nt, Homo sapiens
  misc_RNA (1)...(19): siRNA sense strand
uucccaagccucugaauug

SEQ ID NO: 1976088 - RNA, 19 nt, Homo sapiens
  misc_RNA (1)...(19): siRNA sense strand
uuaaauguaccugcugcua

SEQ ID NO: 1976089 - RNA, 19 nt, Homo sapiens
  misc_RNA (1)...(19): siRNA sense strand
guaucacuguguccaaggu

SEQ ID NO: 1976090 - RNA, 19 nt, Homo sapiens
  misc_RNA (1)...(19): siRNA sense strand
ggcaauccauaagaaagca

SEQ ID NO: 1976091 - RNA, 19 nt, Homo sapiens
  misc_RNA (1)...(19): siRNA sense strand
ccuaugggccaggguauug

SEQ ID NO: 1976092 - RNA, 19 nt, Homo sapiens
  misc_RNA (1)...(19): siRNA sense strand
ucagacuauucccaguuga

SEQ ID NO: 1976093 - RNA, 19 nt, Homo sapiens
  misc_RNA (1)...(19): siRNA sense strand
cagacuauucccaguugaa

SEQ ID NO: 1976094 - RNA, 19 nt, Homo sapiens
  misc_RNA (1)...(19): siRNA sense strand
cagcacuugucagacuauu

SEQ ID NO: 1976095 - RNA, 19 nt, Homo sapiens
  misc_RNA (1)...(19): siRNA sense strand
auagagaggauccuugcaa

SEQ ID NO: 1976096 - RNA, 19 nt, Homo sapiens
  misc_RNA (1)...(19): siRNA sense strand
uguaccugcugcuauuuca

SEQ ID NO: 1976097 - RNA, 19 nt, Homo sapiens
  misc_RNA (1)...(19): siRNA sense strand
agaaagagaugcaggauuu

SEQ ID NO: 1976098 - RNA, 19 nt, Homo sapiens
  misc_RNA (1)...(19): siRNA sense strand
gcacaggccugguuuaaca

SEQ ID NO: 1976099 - RNA, 19 nt, Homo sapiens
  misc_RNA (1)...(19): siRNA sense strand
ggaagacucuguuacugaa

SEQ ID NO: 1976100 - RNA, 19 nt, Homo sapiens
  misc_RNA (1)...(19): siRNA sense strand
ugacuggucugcuugcuua

SEQ ID NO: 1976101 - RNA, 19 nt, Homo sapiens
  misc_RNA (1)...(19): siRNA sense strand
ggagaguuauuaucuagaa

SEQ ID NO: 1976102 - RNA, 19 nt, Homo sapiens
  misc_RNA (1)...(19): siRNA sense strand
ggagagcaacuuuacuuua

SEQ ID NO: 1976103 - RNA, 19 nt, Homo sapiens
  misc_RNA (1)...(19): siRNA sense strand
gagagcaacuuuacuuuag

SEQ ID NO: 1976104 - RNA, 19 nt, Homo sapiens
  misc_RNA (1)...(19): siRNA sense strand
agaaugagcacaucuauaa

SEQ ID NO: 1976105 - RNA, 19 nt, Homo sapiens
  misc_RNA (1)...(19): siRNA sense strand
ugaugaacauggugauuua

SEQ ID NO: 1976106 - RNA, 19 nt, Homo sapiens
  misc_RNA (1)...(19): siRNA sense strand
ggacacuguuguuuacauu

SEQ ID NO: 1976107 - RNA, 19 nt, Homo sapiens
  misc_RNA (1)...(19): siRNA sense strand
gauaaugacuucgcugaau

SEQ ID NO: 1976108 - RNA, 19 nt, Homo sapiens
  misc_RNA (1)...(19): siRNA sense strand
agacaagacuuacugaaug

SEQ ID NO: 1976109 - RNA, 19 nt, Homo sapiens
  misc_RNA (1)...(19): siRNA sense strand
caacagagaaggcaaacaa

SEQ ID NO: 1976110 - RNA, 19 nt, Homo sapiens
  misc_RNA (1)...(19): siRNA sense strand
uaagaaccgugcccgagua

SEQ ID NO: 1976111 - RNA, 19 nt, Homo sapiens
  misc_RNA (1)...(19): siRNA sense strand
agacauggauaccuacgua

SEQ ID NO: 1976112 - RNA, 19 nt, Homo sapiens
  misc_RNA (1)...(19): siRNA sense strand
acacuaugcugacaagauu

SEQ ID NO: 1976113 - RNA, 19 nt, Homo sapiens
  misc_RNA (1)...(19): siRNA sense strand
auacaaagaugguucacuu

SEQ ID NO: 1976114 - RNA, 19 nt, Homo sapiens
  misc_RNA (1)...(19): siRNA sense strand
gaagccaaguuugaugauu

SEQ ID NO: 1976115 - RNA, 19 nt, Homo sapiens
  misc_RNA (1)...(19): siRNA sense strand
gaaccgugcccgaguagaa

SEQ ID NO: 1976116 - RNA, 19 nt, Homo sapiens
  misc_RNA (1)...(19): siRNA sense strand
gacaagacuuacugaaugu

SEQ ID NO: 1976117 - RNA, 19 nt, Homo sapiens
  misc_RNA (1)...(19): siRNA sense strand
ggagggagauacugagagu

SEQ ID NO: 1976118 - RNA, 19 nt, Homo sapiens
  misc_RNA (1)...(19): siRNA sense strand
ugauggaacuaacaaagaa

SEQ ID NO: 1976119 - RNA, 19 nt, Homo sapiens
  misc_RNA (1)...(19): siRNA sense strand
gagaaggagcgaaucauga

SEQ ID NO: 1976120 - RNA, 19 nt, Homo sapiens
  misc_RNA (1)...(19): siRNA sense strand
cagaacagcugggagaguu

SEQ ID NO: 1976121 - RNA, 19 nt, Homo sapiens
  misc_RNA (1)...(19): siRNA sense strand
ggaaugauggauacaaaga

SEQ ID NO: 1976122 - RNA, 19 nt, Homo sapiens
  misc_RNA (1)...(19): siRNA sense strand
gugaucaagugcaaauaaa

SEQ ID NO: 1976123 - RNA, 19 nt, Homo sapiens
  misc_RNA (1)...(19): siRNA sense strand
gaugaagaauuugaagguu

SEQ ID NO: 1976124 - RNA, 19 nt, Homo sapiens
  misc_RNA (1)...(19): siRNA sense strand
caaagugaaagccauguaa

SEQ ID NO: 1976125 - RNA, 19 nt, Homo sapiens
  misc_RNA (1)...(19): siRNA sense strand
gagaaugagcacaucuaua

SEQ ID NO: 1976126 - RNA, 19 nt, Homo sapiens
  misc_RNA (1)...(19): siRNA sense strand
gagcaacuuuacuuuagug

SEQ ID NO: 1976127 - RNA, 19 nt, Homo sapiens
  misc_RNA (1)...(19): siRNA sense strand
ugacuucgcugaauuugag

SEQ ID NO: 1976128 - RNA, 19 nt, Homo sapiens
  misc_RNA (1)...(19): siRNA sense strand
aagccaaguuugaugauuu

SEQ ID NO: 1976129 - RNA, 19 nt, Homo sapiens
  misc_RNA (1)...(19): siRNA sense strand
gauggugacuggucugcuu

SEQ ID NO: 1976130 - RNA, 19 nt, Homo sapiens
  misc_RNA (1)...(19): siRNA sense strand
ugaagguuaugaagacaaa

SEQ ID NO: 1976131 - RNA, 19 nt, Homo sapiens
  misc_RNA (1)...(19): siRNA sense strand
gagacaagacuuacugaau

SEQ ID NO: 1976132 - RNA, 19 nt, Homo sapiens
  misc_RNA (1)...(19): siRNA sense strand
ggaugaggaggacauagua

SEQ ID NO: 1976133 - RNA, 19 nt, Homo sapiens
  misc_RNA (1)...(19): siRNA sense strand
ugacacaugugcaaagaca

SEQ ID NO: 1976134 - RNA, 19 nt, Homo sapiens
  misc_RNA (1)...(19): siRNA sense strand
gaaaguugaaccaggagaa

SEQ ID NO: 1976135 - RNA, 19 nt, Homo sapiens
  misc_RNA (1)...(19): siRNA sense strand
ccagauacuucuucuagca

SEQ ID NO: 1976136 - RNA, 19 nt, Homo sapiens
  misc_RNA (1)...(19): siRNA sense strand
gaagacaaaccagauacuu

SEQ ID NO: 1976137 - RNA, 19 nt, Homo sapiens
  misc_RNA (1)...(19): siRNA sense strand
ugaacauggugauuuauuc

SEQ ID NO: 1976138 - RNA, 19 nt, Homo sapiens
  misc_RNA (1)...(19): siRNA sense strand
gaaacugacacaugugcaa

SEQ ID NO: 1976139 - RNA, 19 nt, Homo sapiens
  misc_RNA (1)...(19): siRNA sense strand
auaaugacuucgcugaauu

SEQ ID NO: 1976140 - RNA, 19 nt, Homo sapiens
  misc_RNA (1)...(19): siRNA sense strand
ugaaccauaugaugaugaa

SEQ ID NO: 1976141 - RNA, 19 nt, Homo sapiens
  misc_RNA (1)...(19): siRNA sense strand
ggagaaugagcacaucuau

SEQ ID NO: 1976142 - RNA, 19 nt, Homo sapiens
  misc_RNA (1)...(19): siRNA sense strand
gagcagagaaggagcgaau

SEQ ID NO: 1976143 - RNA, 19 nt, Homo sapiens
  misc_RNA (1)...(19): siRNA sense strand
aagaggacacuguuguuua

SEQ ID NO: 1976144 - RNA, 19 nt, Homo sapiens
  misc_RNA (1)...(19): siRNA sense strand
uaaagcuaccugacacuaa

SEQ ID NO: 1976145 - RNA, 19 nt, Homo sapiens
  misc_RNA (1)...(19): siRNA sense strand
gaacauggugauuuauucu

SEQ ID NO: 1976146 - RNA, 19 nt, Homo sapiens
  misc_RNA (1)...(19): siRNA sense strand
gcagagaaggagcgaauca

SEQ ID NO: 1976147 - RNA, 19 nt, Homo sapiens
  misc_RNA (1)...(19): siRNA sense strand
gagagugaaccauaugaug

SEQ ID NO: 1976148 - RNA, 19 nt, Homo sapiens
  misc_RNA (1)...(19): siRNA sense strand
uaagaggacacuguuguuu

SEQ ID NO: 1976149 - RNA, 19 nt, Homo sapiens
  misc_RNA (1)...(19): siRNA sense strand
aaaguaaccaugaaugaug

SEQ ID NO: 1976150 - RNA, 19 nt, Homo sapiens
  misc_RNA (1)...(19): siRNA sense strand
ccucaagagacaagacuua

SEQ ID NO: 1976151 - RNA, 19 nt, Homo sapiens
  misc_RNA (1)...(19): siRNA sense strand
acacuuacccaaaggauau

SEQ ID NO: 1976152 - RNA, 19 nt, Homo sapiens
  misc_RNA (1)...(19): siRNA sense strand
ggauauggaggcacugcua

SEQ ID NO: 1976153 - RNA, 19 nt, Homo sapiens
  misc_RNA (1)...(19): siRNA sense strand
gaacagcugggagaguuau

SEQ ID NO: 1976154 - RNA, 19 nt, Homo sapiens
  misc_RNA (1)...(19): siRNA sense strand
augaagacauggauaccua

SEQ ID NO: 1976155 - RNA, 19 nt, Homo sapiens
  misc_RNA (1)...(19): siRNA sense strand
caagagacaagacuuacug

SEQ ID NO: 1976156 - RNA, 19 nt, Homo sapiens
  misc_RNA (1)...(19): siRNA sense strand
auacugagagugaaccaua

SEQ ID NO: 1976157 - RNA, 19 nt, Homo sapiens
  misc_RNA (1)...(19): siRNA sense strand
aaugauggauacaaagaug

SEQ ID NO: 1976158 - RNA, 19 nt, Homo sapiens
  misc_RNA (1)...(19): siRNA sense strand
ucuauaaccugugguguuc

SEQ ID NO: 1976159 - RNA, 19 nt, Homo sapiens
  misc_RNA (1)...(19): siRNA sense strand
agagugaaccauaugauga

SEQ ID NO: 1976160 - RNA, 19 nt, Homo sapiens
  misc_RNA (1)...(19): siRNA sense strand
caaaccagauacuucuucu

SEQ ID NO: 1976161 - RNA, 19 nt, Homo sapiens
  misc_RNA (1)...(19): siRNA sense strand
aaagcuaccugacacuaag

SEQ ID NO: 1976162 - RNA, 19 nt, Homo sapiens
  misc_RNA (1)...(19): siRNA sense strand
aaguaaccaugaaugauga

SEQ ID NO: 1976163 - RNA, 19 nt, Homo sapiens
  misc_RNA (1)...(19): siRNA sense strand
gccagugagugaucaagug

SEQ ID NO: 1976164 - RNA, 19 nt, Homo sapiens
  misc_RNA (1)...(19): siRNA sense strand
cacugaagaugaugaagau

SEQ ID NO: 1976165 - RNA, 19 nt, Homo sapiens
  misc_RNA (1)...(19): siRNA sense strand
ggaagauccugagaaacag

SEQ ID NO: 1976166 - RNA, 19 nt, Homo sapiens
  misc_RNA (1)...(19): siRNA sense strand
agaaggagcgaaucaugaa

SEQ ID NO: 1976167 - RNA, 19 nt, Homo sapiens
  misc_RNA (1)...(19): siRNA sense strand
uaaugacuucgcugaauuu

SEQ ID NO: 1976168 - RNA, 19 nt, Homo sapiens
  misc_RNA (1)...(19): siRNA sense strand
uaaagacccaauaacgauu

SEQ ID NO: 1976169 - RNA, 19 nt, Homo sapiens
  misc_RNA (1)...(19): siRNA sense strand
aggaggacauaguagagua

SEQ ID NO: 1976170 - RNA, 19 nt, Homo sapiens
  misc_RNA (1)...(19): siRNA sense strand
ucacugaagaugaugaaga

SEQ ID NO: 1976171 - RNA, 19 nt, Homo sapiens
  misc_RNA (1)...(19): siRNA sense strand
ggaaaagaagcaaaugaaa

SEQ ID NO: 1976172 - RNA, 19 nt, Homo sapiens
  misc_RNA (1)...(19): siRNA sense strand
agaggacacuguuguuuac

SEQ ID NO: 1976173 - RNA, 19 nt, Homo sapiens
  misc_RNA (1)...(19): siRNA sense strand
gaaagagaugcaggauuug

SEQ ID NO: 1976174 - RNA, 19 nt, Homo sapiens
  misc_RNA (1)...(19): siRNA sense strand
guaugaugauaaugacuuc

SEQ ID NO: 1976175 - RNA, 19 nt, Homo sapiens
  misc_RNA (1)...(19): siRNA sense strand
gaugauggaacuaacaaag

SEQ ID NO: 1976176 - RNA, 19 nt, Homo sapiens
  misc_RNA (1)...(19): siRNA sense strand
uaugaagacaaaccagaua

SEQ ID NO: 1976177 - RNA, 19 nt, Homo sapiens
  misc_RNA (1)...(19): siRNA sense strand
agaaggagauuuugaagau

SEQ ID NO: 1976178 - RNA, 19 nt, Homo sapiens
  misc_RNA (1)...(19): siRNA sense strand
ucuugaaacugacacaugu

SEQ ID NO: 1976179 - RNA, 19 nt, Homo sapiens
  misc_RNA (1)...(19): siRNA sense strand
aauaaagacccaauaacga

SEQ ID NO: 1976180 - RNA, 19 nt, Homo sapiens
  misc_RNA (1)...(19): siRNA sense strand
gcacaggaaaguugaacca

SEQ ID NO: 1976181 - RNA, 19 nt, Homo sapiens
  misc_RNA (1)...(19): siRNA sense strand
ggucauaaucacugaagau

SEQ ID NO: 1976182 - RNA, 19 nt, Homo sapiens
  misc_RNA (1)...(19): siRNA sense strand
gaaugauggauacaaagau

SEQ ID NO: 1976183 - RNA, 19 nt, Homo sapiens
  misc_RNA (1)...(19): siRNA sense strand
acggaaugauggauacaaa

SEQ ID NO: 1976184 - RNA, 19 nt, Homo sapiens
  misc_RNA (1)...(19): siRNA sense strand
ugaagaugaugaagaugag

SEQ ID NO: 1976185 - RNA, 19 nt, Homo sapiens
  misc_RNA (1)...(19): siRNA sense strand
gcugggagaguuauuaucu

SEQ ID NO: 1976186 - RNA, 19 nt, Homo sapiens
  misc_RNA (1)...(19): siRNA sense strand
uugaggaugucauggaaga

SEQ ID NO: 1976187 - RNA, 19 nt, Homo sapiens
  misc_RNA (1)...(19): siRNA sense strand
gaagucacagacggaauga

SEQ ID NO: 1976188 - RNA, 19 nt, Homo sapiens
  misc_RNA (1)...(19): siRNA sense strand
ugucagagaugggagaagu

SEQ ID NO: 1976189 - RNA, 19 nt, Homo sapiens
  misc_RNA (1)...(19): siRNA sense strand
aaaccuaagucuggagcaa

SEQ ID NO: 1976190 - RNA, 19 nt, Homo sapiens
  misc_RNA (1)...(19): siRNA sense strand
cacaagcacaggaaaguug

SEQ ID NO: 1976191 - RNA, 19 nt, Homo sapiens
  misc_RNA (1)...(19): siRNA sense strand
ugggagaguuauuaucuag

SEQ ID NO: 1976192 - RNA, 19 nt, Homo sapiens
  misc_RNA (1)...(19): siRNA sense strand
ccucaacgggucauaauca

SEQ ID NO: 1976193 - RNA, 19 nt, Homo sapiens
  misc_RNA (1)...(19): siRNA sense strand
gaauuugaagguuaugaag

SEQ ID NO: 1976194 - RNA, 19 nt, Homo sapiens
  misc_RNA (1)...(19): siRNA sense strand
gaaggagcgaaucaugaau

SEQ ID NO: 1976195 - RNA, 19 nt, Homo sapiens
  misc_RNA (1)...(19): siRNA sense strand
ucaaagugaaagccaugua

SEQ ID NO: 1976196 - RNA, 19 nt, Homo sapiens
  misc_RNA (1)...(19): siRNA sense strand
uggaagacucuguuacuga

SEQ ID NO: 1976197 - RNA, 19 nt, Homo sapiens
  misc_RNA (1)...(19): siRNA sense strand
ggaagugccuuaacagauu

SEQ ID NO: 1976198 - RNA, 19 nt, Homo sapiens
  misc_RNA (1)...(19): siRNA sense strand
gaaagaagcagucagauug

SEQ ID NO: 1976199 - RNA, 19 nt, Homo sapiens
  misc_RNA (1)...(19): siRNA sense strand
ggaugaagaugauuuguug

SEQ ID NO: 1976200 - RNA, 19 nt, Homo sapiens
  misc_RNA (1)...(19): siRNA sense strand
ggaaaugguugacaugaug

SEQ ID NO: 1976201 - RNA, 19 nt, Homo sapiens
  misc_RNA (1)...(19): siRNA sense strand
gcaaaggacugggaauuuc

SEQ ID NO: 1976202 - RNA, 19 nt, Homo sapiens
  misc_RNA (1)...(19): siRNA sense strand
gcaagguucuuuaugucua

SEQ ID NO: 1976203 - RNA, 19 nt, Homo sapiens
  misc_RNA (1)...(19): siRNA sense strand
caugcuggcuggaaaguua

SEQ ID NO: 1976204 - RNA, 19 nt, Homo sapiens
  misc_RNA (1)...(19): siRNA sense strand
gaagugccuuaacagauuu

SEQ ID NO: 1976205 - RNA, 19 nt, Homo sapiens
  misc_RNA (1)...(19): siRNA sense strand
acagaaaucuuggcaauug

SEQ ID NO: 1976206 - RNA, 19 nt, Homo sapiens
  misc_RNA (1)...(19): siRNA sense strand
gaugugaacucaaggaagu

SEQ ID NO: 1976207 - RNA, 19 nt, Homo sapiens
  misc_RNA (1)...(19): siRNA sense strand
gaaggcaguuuauauggau

SEQ ID NO: 1976208 - RNA, 19 nt, Homo sapiens
  misc_RNA (1)...(19): siRNA sense strand
gaacuugguuacagguguu

SEQ ID NO: 1976209 - RNA, 19 nt, Homo sapiens
  misc_RNA (1)...(19): siRNA sense strand
gaacugauuggaagcauga

SEQ ID NO: 1976210 - RNA, 19 nt, Homo sapiens
  misc_RNA (1)...(19): siRNA sense strand
acucagaaguggagaauga

SEQ ID NO: 1976211 - RNA, 19 nt, Homo sapiens
  misc_RNA (1)...(19): siRNA sense strand
gaugguugcuggauuagau

SEQ ID NO: 1976212 - RNA, 19 nt, Homo sapiens
  misc_RNA (1)...(19): siRNA sense strand
aaagaagaauuccaacaug

SEQ ID NO: 1976213 - RNA, 19 nt, Homo sapiens
  misc_RNA (1)...(19): siRNA sense strand
ucucugaccuucaauccua

SEQ ID NO: 1976214 - RNA, 19 nt, Homo sapiens
  misc_RNA (1)...(19): siRNA sense strand
cuacagaaaucuuggcaau

SEQ ID NO: 1976215 - RNA, 19 nt, Homo sapiens
  misc_RNA (1)...(19): siRNA sense strand
gaucucaucugugcaguuc

SEQ ID NO: 1976216 - RNA, 19 nt, Homo sapiens
  misc_RNA (1)...(19): siRNA sense strand
gaugaaggcaguuuauaug

SEQ ID NO: 1976217 - RNA, 19 nt, Homo sapiens
  misc_RNA (1)...(19): siRNA sense strand
ugugaugguugcuggauua

SEQ ID NO: 1976218 - RNA, 19 nt, Homo sapiens
  misc_RNA (1)...(19): siRNA sense strand
ugaagaagaugaagaugag

SEQ ID NO: 1976219 - RNA, 19 nt, Homo sapiens
  misc_RNA (1)...(19): siRNA sense strand
uggcauugcuggauauuug

SEQ ID NO: 1976220 - RNA, 19 nt, Homo sapiens
  misc_RNA (1)...(19): siRNA sense strand
cagagcaucuauuuggaaa

SEQ ID NO: 1976221 - RNA, 19 nt, Homo sapiens
  misc_RNA (1)...(19): siRNA sense strand
guggagugguaaauauaua

SEQ ID NO: 1976222 - RNA, 19 nt, Homo sapiens
  misc_RNA (1)...(19): siRNA sense strand
ugaagaggaugaagaugau

SEQ ID NO: 1976223 - RNA, 19 nt, Homo sapiens
  misc_RNA (1)...(19): siRNA sense strand
gaagaccaaagaacugauu

SEQ ID NO: 1976224 - RNA, 19 nt, Homo sapiens
  misc_RNA (1)...(19): siRNA sense strand
acagcaagguucuuuaugu

SEQ ID NO: 1976225 - RNA, 19 nt, Homo sapiens
  misc_RNA (1)...(19): siRNA sense strand
gugaagaggaugaagauga

SEQ ID NO: 1976226 - RNA, 19 nt, Homo sapiens
  misc_RNA (1)...(19): siRNA sense strand
gcuauaaugaacuugguua

SEQ ID NO: 1976227 - RNA, 19 nt, Homo sapiens
  misc_RNA (1)...(19): siRNA sense strand
gcagucagauugguucauc

SEQ ID NO: 1976228 - RNA, 19 nt, Homo sapiens
  misc_RNA (1)...(19): siRNA sense strand
gcaucuauuuggaaagguu

SEQ ID NO: 1976229 - RNA, 19 nt, Homo sapiens
  misc_RNA (1)...(19): siRNA sense strand
ugaaagaagcagucagauu

SEQ ID NO: 1976230 - RNA, 19 nt, Homo sapiens
  misc_RNA (1)...(19): siRNA sense strand
ggauggagaaguuuauguu

SEQ ID NO: 1976231 - RNA, 19 nt, Homo sapiens
  misc_RNA (1)...(19): siRNA sense strand
aaacuucccagucauuaaa

SEQ ID NO: 1976232 - RNA, 19 nt, Homo sapiens
  misc_RNA (1)...(19): siRNA sense strand
ugaaggcaguuuauaugga

SEQ ID NO: 1976233 - RNA, 19 nt, Homo sapiens
  misc_RNA (1)...(19): siRNA sense strand
ggaauuucauauccacauc

SEQ ID NO: 1976234 - RNA, 19 nt, Homo sapiens
  misc_RNA (1)...(19): siRNA sense strand
uuacuucucugaccuucaa

SEQ ID NO: 1976235 - RNA, 19 nt, Homo sapiens
  misc_RNA (1)...(19): siRNA sense strand
gauggagaaguuuauguuu

SEQ ID NO: 1976236 - RNA, 19 nt, Homo sapiens
  misc_RNA (1)...(19): siRNA sense strand
gaagauagugaggagcuuu

SEQ ID NO: 1976237 - RNA, 19 nt, Homo sapiens
  misc_RNA (1)...(19): siRNA sense strand
gagcaucuauuuggaaagg

SEQ ID NO: 1976238 - RNA, 19 nt, Homo sapiens
  misc_RNA (1)...(19): siRNA sense strand
gaaaugguugacaugauga

SEQ ID NO: 1976239 - RNA, 19 nt, Homo sapiens
  misc_RNA (1)...(19): siRNA sense strand
aaacaaacccaaagccaau

SEQ ID NO: 1976240 - RNA, 19 nt, Homo sapiens
  misc_RNA (1)...(19): siRNA sense strand
gauuaagcauugccacauc

SEQ ID NO: 1976241 - RNA, 19 nt, Homo sapiens
  misc_RNA (1)...(19): siRNA sense strand
ugagagguuugaaagagaa

SEQ ID NO: 1976242 - RNA, 19 nt, Homo sapiens
  misc_RNA (1)...(19): siRNA sense strand
caagguucuuuaugucuau

SEQ ID NO: 1976243 - RNA, 19 nt, Homo sapiens
  misc_RNA (1)...(19): siRNA sense strand
ggacugggaauuucauauc

SEQ ID NO: 1976244 - RNA, 19 nt, Homo sapiens
  misc_RNA (1)...(19): siRNA sense strand
ggaugaagaagaugaagau

SEQ ID NO: 1976245 - RNA, 19 nt, Homo sapiens
  misc_RNA (1)...(19): siRNA sense strand
gugaggagcuuugaagucu

SEQ ID NO: 1976246 - RNA, 19 nt, Homo sapiens
  misc_RNA (1)...(19): siRNA sense strand
gugagagguuugaaagaga

SEQ ID NO: 1976247 - RNA, 19 nt, Homo sapiens
  misc_RNA (1)...(19): siRNA sense strand
cagcaagguucuuuauguc

SEQ ID NO: 1976248 - RNA, 19 nt, Homo sapiens
  misc_RNA (1)...(19): siRNA sense strand
caaacuucccagucauuaa

SEQ ID NO: 1976249 - RNA, 19 nt, Homo sapiens
  misc_RNA (1)...(19): siRNA sense strand
ucaaacuucccagucauua

SEQ ID NO: 1976250 - RNA, 19 nt, Homo sapiens
  misc_RNA (1)...(19): siRNA sense strand
agaugaagaugaggaaaug

SEQ ID NO: 1976251 - RNA, 19 nt, Homo sapiens
  misc_RNA (1)...(19): siRNA sense strand
cacauucucuucagauagu

SEQ ID NO: 1976252 - RNA, 19 nt, Homo sapiens
  misc_RNA (1)...(19): siRNA sense strand
ccacagcaagguucuuuau

SEQ ID NO: 1976253 - RNA, 19 nt, Homo sapiens
  misc_RNA (1)...(19): siRNA sense strand
gaggaaaugguugacauga

SEQ ID NO: 1976254 - RNA, 19 nt, Homo sapiens
  misc_RNA (1)...(19): siRNA sense strand
caagugagagguuugaaag

SEQ ID NO: 1976255 - RNA, 19 nt, Homo sapiens
  misc_RNA (1)...(19): siRNA sense strand
agacucgggugacucagaa

SEQ ID NO: 1976256 - RNA, 19 nt, Homo sapiens
  misc_RNA (1)...(19): siRNA sense strand
uuacagguguuacuucucu

SEQ ID NO: 1976257 - RNA, 19 nt, Homo sapiens
  misc_RNA (1)...(19): siRNA sense strand
caaaggacugggaauuuca

SEQ ID NO: 1976258 - RNA, 19 nt, Homo sapiens
  misc_RNA (1)...(19): siRNA sense strand
gaccuucaauccuacuaca

SEQ ID NO: 1976259 - RNA, 19 nt, Homo sapiens
  misc_RNA (1)...(19): siRNA sense strand
ugaugaaggcaguuuauau

SEQ ID NO: 1976260 - RNA, 19 nt, Homo sapiens
  misc_RNA (1)...(19): siRNA sense strand
gcaaugaagaccaaagaac

SEQ ID NO: 1976261 - RNA, 19 nt, Homo sapiens
  misc_RNA (1)...(19): siRNA sense strand
gaacugccagcaugcgaau

SEQ ID NO: 1976262 - RNA, 19 nt, Homo sapiens
  misc_RNA (1)...(19): siRNA sense strand
gcugaacguccuacuguug

SEQ ID NO: 1976263 - RNA, 19 nt, Homo sapiens
  misc_RNA (1)...(19): siRNA sense strand
caguuuggguggaugaaga

SEQ ID NO: 1976264 - RNA, 19 nt, Homo sapiens
  misc_RNA (1)...(19): siRNA sense strand
ugaugaaagugaagaggau

SEQ ID NO: 1976265 - RNA, 19 nt, Homo sapiens
  misc_RNA (1)...(19): siRNA sense strand
uggagaaguuuauguuugg

SEQ ID NO: 1976266 - RNA, 19 nt, Homo sapiens
  misc_RNA (1)...(19): siRNA sense strand
aaaguuaauuccugugcau

SEQ ID NO: 1976267 - RNA, 19 nt, Homo sapiens
  misc_RNA (1)...(19): siRNA sense strand
gguuacagguguuacuucu

SEQ ID NO: 1976268 - RNA, 19 nt, Homo sapiens
  misc_RNA (1)...(19): siRNA sense strand
ugaagaugauuuguugcaa

SEQ ID NO: 1976269 - RNA, 19 nt, Homo sapiens
  misc_RNA (1)...(19): siRNA sense strand
gaagaugaagaugaggaaa

SEQ ID NO: 1976270 - RNA, 19 nt, Homo sapiens
  misc_RNA (1)...(19): siRNA sense strand
guuaauuccugugcaucaa

SEQ ID NO: 1976271 - RNA, 19 nt, Homo sapiens
  misc_RNA (1)...(19): siRNA sense strand
guauguugcuugugguucu

SEQ ID NO: 1976272 - RNA, 19 nt, Homo sapiens
  misc_RNA (1)...(19): siRNA sense strand
gaagccaguuuggguggau

SEQ ID NO: 1976273 - RNA, 19 nt, Homo sapiens
  misc_RNA (1)...(19): siRNA sense strand
caaugaagaccaaagaacu

SEQ ID NO: 1976274 - RNA, 19 nt, Homo sapiens
  misc_RNA (1)...(19): siRNA sense strand
auggagaaguuuauguuug

SEQ ID NO: 1976275 - RNA, 19 nt, Homo sapiens
  misc_RNA (1)...(19): siRNA sense strand
uccacauucucuucagaua

SEQ ID NO: 1976276 - RNA, 19 nt, Homo sapiens
  misc_RNA (1)...(19): siRNA sense strand
aaagugaagaggaugaaga

SEQ ID NO: 1976277 - RNA, 19 nt, Homo sapiens
  misc_RNA (1)...(19): siRNA sense strand
ccaagaaacaaacccaaag

SEQ ID NO: 1976278 - RNA, 19 nt, Homo sapiens
  misc_RNA (1)...(19): siRNA sense strand
gaauuucauauccacauca

SEQ ID NO: 1976279 - RNA, 19 nt, Homo sapiens
  misc_RNA (1)...(19): siRNA sense strand
gaagaggaugaagaugauu

SEQ ID NO: 1976280 - RNA, 19 nt, Homo sapiens
  misc_RNA (1)...(19): siRNA sense strand
ccaaaagccugccccuuca

SEQ ID NO: 1976281 - RNA, 19 nt, Homo sapiens
  misc_RNA (1)...(19): siRNA sense strand
aaugaaagaagcagucaga

SEQ ID NO: 1976282 - RNA, 19 nt, Homo sapiens
  misc_RNA (1)...(19): siRNA sense strand
cuucaauccuacuacagaa

SEQ ID NO: 1976283 - RNA, 19 nt, Homo sapiens
  misc_RNA (1)...(19): siRNA sense strand
auaaugaacuugguuacag

SEQ ID NO: 1976284 - RNA, 19 nt, Homo sapiens
  misc_RNA (1)...(19): siRNA sense strand
gcuugugguucuaauugug

SEQ ID NO: 1976285 - RNA, 19 nt, Homo sapiens
  misc_RNA (1)...(19): siRNA sense strand
cauccacauucucuucaga

SEQ ID NO: 1976286 - RNA, 19 nt, Homo sapiens
  misc_RNA (1)...(19): siRNA sense strand
gguccuucuugcucauaaa

SEQ ID NO: 1976287 - RNA, 19 nt, Homo sapiens
  misc_RNA (1)...(19): siRNA sense strand
caguuuauauggauuaagc

SEQ ID NO: 1976288 - RNA, 19 nt, Homo sapiens
  misc_RNA (1)...(19): siRNA sense strand
caugaugaacaaucgguuu

SEQ ID NO: 1976289 - RNA, 19 nt, Homo sapiens
  misc_RNA (1)...(19): siRNA sense strand
uagcaaugaagaccaaaga

SEQ ID NO: 1976290 - RNA, 19 nt, Homo sapiens
  misc_RNA (1)...(19): siRNA sense strand
guucaucuuccuuccugua

SEQ ID NO: 1976291 - RNA, 19 nt, Homo sapiens
  misc_RNA (1)...(19): siRNA sense strand
gaaaucuuggcaauugcuu

SEQ ID NO: 1976292 - RNA, 19 nt, Homo sapiens
  misc_RNA (1)...(19): siRNA sense strand
acaaacccaaagccaauaa

SEQ ID NO: 1976293 - RNA, 19 nt, Homo sapiens
  misc_RNA (1)...(19): siRNA sense strand
ggcaguuuauauggauuaa

SEQ ID NO: 1976294 - RNA, 19 nt, Homo sapiens
  misc_RNA (1)...(19): siRNA sense strand
ugaagacucgggugacuca

SEQ ID NO: 1976295 - RNA, 19 nt, Homo sapiens
  misc_RNA (1)...(19): siRNA sense strand
gagaaugaagcaaaaggua

SEQ ID NO: 1976296 - RNA, 19 nt, Homo sapiens
  misc_RNA (1)...(19): siRNA sense strand
ucggaaggauaugaugaaa

SEQ ID NO: 1976297 - RNA, 19 nt, Homo sapiens
  misc_RNA (1)...(19): siRNA sense strand
agacaaagauggguuuaua

SEQ ID NO: 1976298 - RNA, 19 nt, Homo sapiens
  misc_RNA (1)...(19): siRNA sense strand
gaccagggcuugaaaggaa

SEQ ID NO: 1976299 - RNA, 19 nt, Homo sapiens
  misc_RNA (1)...(19): siRNA sense strand
ggaccaagaucccaugaau

SEQ ID NO: 1976300 - RNA, 19 nt, Homo sapiens
  misc_RNA (1)...(19): siRNA sense strand
gaagagaaagcucaucauu

SEQ ID NO: 1976301 - RNA, 19 nt, Homo sapiens
  misc_RNA (1)...(19): siRNA sense strand
aagaugagguuaaagcaua

SEQ ID NO: 1976302 - RNA, 19 nt, Homo sapiens
  misc_RNA (1)...(19): siRNA sense strand
gccagagaauuuacauaua

SEQ ID NO: 1976303 - RNA, 19 nt, Homo sapiens
  misc_RNA (1)...(19): siRNA sense strand
guucgucacuucuuugauu

SEQ ID NO: 1976304 - RNA, 19 nt, Homo sapiens
  misc_RNA (1)...(19): siRNA sense strand
uaugaaggcuacuuagaaa

SEQ ID NO: 1976305 - RNA, 19 nt, Homo sapiens
  misc_RNA (1)...(19): siRNA sense strand
ggucagcccauuugguuua

SEQ ID NO: 1976306 - RNA, 19 nt, Homo sapiens
  misc_RNA (1)...(19): siRNA sense strand
gaaauggaucuuaaugaug

SEQ ID NO: 1976307 - RNA, 19 nt, Homo sapiens
  misc_RNA (1)...(19): siRNA sense strand
gaaacucucuaaagaugag

SEQ ID NO: 1976308 - RNA, 19 nt, Homo sapiens
  misc_RNA (1)...(19): siRNA sense strand
gaaaggaauguguguagga

SEQ ID NO: 1976309 - RNA, 19 nt, Homo sapiens
  misc_RNA (1)...(19): siRNA sense strand
uggaaacucucuaaagaug

SEQ ID NO: 1976310 - RNA, 19 nt, Homo sapiens
  misc_RNA (1)...(19): siRNA sense strand
uaaacacgaugaguuauag

SEQ ID NO: 1976311 - RNA, 19 nt, Homo sapiens
  misc_RNA (1)...(19): siRNA sense strand
ccacuaugaaggcuacuua

SEQ ID NO: 1976312 - RNA, 19 nt, Homo sapiens
  misc_RNA (1)...(19): siRNA sense strand
ggaacgcggucuugacucu

SEQ ID NO: 1976313 - RNA, 19 nt, Homo sapiens
  misc_RNA (1)...(19): siRNA sense strand
gagaagagaaagcucauca

SEQ ID NO: 1976314 - RNA, 19 nt, Homo sapiens
  misc_RNA (1)...(19): siRNA sense strand
acuggaaacucucuaaaga

SEQ ID NO: 1976315 - RNA, 19 nt, Homo sapiens
  misc_RNA (1)...(19): siRNA sense strand
gaagacaaagauggguuua

SEQ ID NO: 1976316 - RNA, 19 nt, Homo sapiens
  misc_RNA (1)...(19): siRNA sense strand
agagaaagcucaucauucc

SEQ ID NO: 1976317 - RNA, 19 nt, Homo sapiens
  misc_RNA (1)...(19): siRNA sense strand
ucacaaacauaacaauggu

SEQ ID NO: 1976318 - RNA, 19 nt, Homo sapiens
  misc_RNA (1)...(19): siRNA sense strand
cccagaaaguacacugaua

SEQ ID NO: 1976319 - RNA, 19 nt, Homo sapiens
  misc_RNA (1)...(19): siRNA sense strand
cauauaaacacgaugaguu

SEQ ID NO: 1976320 - RNA, 19 nt, Homo sapiens
  misc_RNA (1)...(19): siRNA sense strand
gaagaugaagacaaagaug

SEQ ID NO: 1976321 - RNA, 19 nt, Homo sapiens
  misc_RNA (1)...(19): siRNA sense strand
gaaaagaaggaaaagguaa

SEQ ID NO: 1976322 - RNA, 19 nt, Homo sapiens
  misc_RNA (1)...(19): siRNA sense strand
gauucgaaauggaccaaga

SEQ ID NO: 1976323 - RNA, 19 nt, Homo sapiens
  misc_RNA (1)...(19): siRNA sense strand
ccagaaaguacacugauau

SEQ ID NO: 1976324 - RNA, 19 nt, Homo sapiens
  misc_RNA (1)...(19): siRNA sense strand
ugauguugguccacuauga

SEQ ID NO: 1976325 - RNA, 19 nt, Homo sapiens
  misc_RNA (1)...(19): siRNA sense strand
ggaaacucucuaaagauga

SEQ ID NO: 1976326 - RNA, 19 nt, Homo sapiens
  misc_RNA (1)...(19): siRNA sense strand
ucacuccacucacaaacau

SEQ ID NO: 1976327 - RNA, 19 nt, Homo sapiens
  misc_RNA (1)...(19): siRNA sense strand
gaauguguguaggagagaa

SEQ ID NO: 1976328 - RNA, 19 nt, Homo sapiens
  misc_RNA (1)...(19): siRNA sense strand
gacaaagauggguuuauau

SEQ ID NO: 1976329 - RNA, 19 nt, Homo sapiens
  misc_RNA (1)...(19): siRNA sense strand
cuaugaaggcuacuuagaa

SEQ ID NO: 1976330 - RNA, 19 nt, Homo sapiens
  misc_RNA (1)...(19): siRNA sense strand
ggaaaagaaggaaaaggua

SEQ ID NO: 1976331 - RNA, 19 nt, Homo sapiens
  misc_RNA (1)...(19): siRNA sense strand
cagaaaguacacugauauu

SEQ ID NO: 1976332 - RNA, 19 nt, Homo sapiens
  misc_RNA (1)...(19): siRNA sense strand
gaaggaaaagguaaaauuc

SEQ ID NO: 1976333 - RNA, 19 nt, Homo sapiens
  misc_RNA (1)...(19): siRNA sense strand
aaugaugacuggaaacucu

SEQ ID NO: 1976334 - RNA, 19 nt, Homo sapiens
  misc_RNA (1)...(19): siRNA sense strand
gauguugguccacuaugaa

SEQ ID NO: 1976335 - RNA, 19 nt, Homo sapiens
  misc_RNA (1)...(19): siRNA sense strand
uuugaucccugaaccagaa

SEQ ID NO: 1976336 - RNA, 19 nt, Homo sapiens
  misc_RNA (1)...(19): siRNA sense strand
acaaagauggguuuauauc

SEQ ID NO: 1976337 - RNA, 19 nt, Homo sapiens
  misc_RNA (1)...(19): siRNA sense strand
ccuggaggcucucaaaggu

SEQ ID NO: 1976338 - RNA, 19 nt, Homo sapiens
  misc_RNA (1)...(19): siRNA sense strand
ugaagacaaagauggguuu

SEQ ID NO: 1976339 - RNA, 19 nt, Homo sapiens
  misc_RNA (1)...(19): siRNA sense strand
accaagaucccaugaauca

SEQ ID NO: 1976340 - RNA, 19 nt, Homo sapiens
  misc_RNA (1)...(19): siRNA sense strand
ggaccagggcuugaaagga

SEQ ID NO: 1976341 - RNA, 19 nt, Homo sapiens
  misc_RNA (1)...(19): siRNA sense strand
ugccagagaauuuacauau

SEQ ID NO: 1976342 - RNA, 19 nt, Homo sapiens
  misc_RNA (1)...(19): siRNA sense strand
gaaccagaagugaaaauug

SEQ ID NO: 1976343 - RNA, 19 nt, Homo sapiens
  misc_RNA (1)...(19): siRNA sense strand
aagagaaagcucaucauuc

SEQ ID NO: 1976344 - RNA, 19 nt, Homo sapiens
  misc_RNA (1)...(19): siRNA sense strand
ggacggcuccuuauuucac

SEQ ID NO: 1976345 - RNA, 19 nt, Homo sapiens
  misc_RNA (1)...(19): siRNA sense strand
aagaagaugaagacaaaga

SEQ ID NO: 1976346 - RNA, 19 nt, Homo sapiens
  misc_RNA (1)...(19): siRNA sense strand
ucucuaaagaugagguuaa

SEQ ID NO: 1976347 - RNA, 19 nt, Homo sapiens
  misc_RNA (1)...(19): siRNA sense strand
uuauuucacuccacucaca

SEQ ID NO: 1976348 - RNA, 19 nt, Homo sapiens
  misc_RNA (1)...(19): siRNA sense strand
ucuuaaugaugacuggaaa

SEQ ID NO: 1976349 - RNA, 19 nt, Homo sapiens
  misc_RNA (1)...(19): siRNA sense strand
uaaagaugagguuaaagca

SEQ ID NO: 1976350 - RNA, 19 nt, Homo sapiens
  misc_RNA (1)...(19): siRNA sense strand
ugacuggaaacucucuaaa

SEQ ID NO: 1976351 - RNA, 19 nt, Homo sapiens
  misc_RNA (1)...(19): siRNA sense strand
aaccagaagugaaaauuga

SEQ ID NO: 1976352 - RNA, 19 nt, Homo sapiens
  misc_RNA (1)...(19): siRNA sense strand
agaugagguuaaagcauau

SEQ ID NO: 1976353 - RNA, 19 nt, Homo sapiens
  misc_RNA (1)...(19): siRNA sense strand
cucuaaagaugagguuaaa

SEQ ID NO: 1976354 - RNA, 19 nt, Homo sapiens
  misc_RNA (1)...(19): siRNA sense strand
auggugcgguggugaauga

SEQ ID NO: 1976355 - RNA, 19 nt, Homo sapiens
  misc_RNA (1)...(19): siRNA sense strand
gugcgguggugaaugaaag

SEQ ID NO: 1976356 - RNA, 19 nt, Homo sapiens
  misc_RNA (1)...(19): siRNA sense strand
ccacucacaaacauaacaa

SEQ ID NO: 1976357 - RNA, 19 nt, Homo sapiens
  misc_RNA (1)...(19): siRNA sense strand
cuaaagaugagguuaaagc

SEQ ID NO: 1976358 - RNA, 19 nt, Homo sapiens
  misc_RNA (1)...(19): siRNA sense strand
gaccaagaucccaugaauc

SEQ ID NO: 1976359 - RNA, 19 nt, Homo sapiens
  misc_RNA (1)...(19): siRNA sense strand
gacuggaaacucucuaaag

SEQ ID NO: 1976360 - RNA, 19 nt, Homo sapiens
  misc_RNA (1)...(19): siRNA sense strand
cauccuggaggcucucaaa

SEQ ID NO: 1976361 - RNA, 19 nt, Homo sapiens
  misc_RNA (1)...(19): siRNA sense strand
ugauaaagaagaugaagac

SEQ ID NO: 1976362 - RNA, 19 nt, Homo sapiens
  misc_RNA (1)...(19): siRNA sense strand
gagagaagagaaagcucau

SEQ ID NO: 1976363 - RNA, 19 nt, Homo sapiens
  misc_RNA (1)...(19): siRNA sense strand
gggcuugaaaggaaugugu

SEQ ID NO: 1976364 - RNA, 19 nt, Homo sapiens
  misc_RNA (1)...(19): siRNA sense strand
ugagaaagcugcagacaaa

SEQ ID NO: 1976365 - RNA, 19 nt, Homo sapiens
  misc_RNA (1)...(19): siRNA sense strand
gaagguggccaauuucuua

SEQ ID NO: 1976366 - RNA, 19 nt, Homo sapiens
  misc_RNA (1)...(19): siRNA sense strand
gguauugaguuuaguguua

SEQ ID NO: 1976367 - RNA, 19 nt, Homo sapiens
  misc_RNA (1)...(19): siRNA sense strand
caacguuacuuguaugaaa

SEQ ID NO: 1976368 - RNA, 19 nt, Homo sapiens
  misc_RNA (1)...(19): siRNA sense strand
gaccaacacugucaucuga

SEQ ID NO: 1976369 - RNA, 19 nt, Homo sapiens
  misc_RNA (1)...(19): siRNA sense strand
uagcagcucugaagucuaa

SEQ ID NO: 1976370 - RNA, 19 nt, Homo sapiens
  misc_RNA (1)...(19): siRNA sense strand
aagagaagguggccaauuu

SEQ ID NO: 1976371 - RNA, 19 nt, Homo sapiens
  misc_RNA (1)...(19): siRNA sense strand
ggaguaauauauaccagaa

SEQ ID NO: 1976372 - RNA, 19 nt, Homo sapiens
  misc_RNA (1)...(19): siRNA sense strand
ggcaucaccucuguuauua

SEQ ID NO: 1976373 - RNA, 19 nt, Homo sapiens
  misc_RNA (1)...(19): siRNA sense strand
caacugaaguaucaugaga

SEQ ID NO: 1976374 - RNA, 19 nt, Homo sapiens
  misc_RNA (1)...(19): siRNA sense strand
aaacaaggcccaacacaaa

SEQ ID NO: 1976375 - RNA, 19 nt, Homo sapiens
  misc_RNA (1)...(19): siRNA sense strand
gaucugggaguaauauaua

SEQ ID NO: 1976376 - RNA, 19 nt, Homo sapiens
  misc_RNA (1)...(19): siRNA sense strand
ggacucaacguuacuugua

SEQ ID NO: 1976377 - RNA, 19 nt, Homo sapiens
  misc_RNA (1)...(19): siRNA sense strand
ugacugcuguggaaaguuu

SEQ ID NO: 1976378 - RNA, 19 nt, Homo sapiens
  misc_RNA (1)...(19): siRNA sense strand
uaaugcaacugaaguauca

SEQ ID NO: 1976379 - RNA, 19 nt, Homo sapiens
  misc_RNA (1)...(19): siRNA sense strand
gucgggaacucaaagguua

SEQ ID NO: 1976380 - RNA, 19 nt, Homo sapiens
  misc_RNA (1)...(19): siRNA sense strand
acucaaagguuauuccauu

SEQ ID NO: 1976381 - RNA, 19 nt, Homo sapiens
  misc_RNA (1)...(19): siRNA sense strand
uaaggaggacucaacguua

SEQ ID NO: 1976382 - RNA, 19 nt, Homo sapiens
  misc_RNA (1)...(19): siRNA sense strand
ccaugacucuucuaaguga

SEQ ID NO: 1976383 - RNA, 19 nt, Homo sapiens
  misc_RNA (1)...(19): siRNA sense strand
ggaaucaccaguucaguau

SEQ ID NO: 1976384 - RNA, 19 nt, Homo sapiens
  misc_RNA (1)...(19): siRNA sense strand
gaacuaaugcaacugaagu

SEQ ID NO: 1976385 - RNA, 19 nt, Homo sapiens
  misc_RNA (1)...(19): siRNA sense strand
ggagaucagaguaauuuga

SEQ ID NO: 1976386 - RNA, 19 nt, Homo sapiens
  misc_RNA (1)...(19): siRNA sense strand
gaagagaagguggccaauu

SEQ ID NO: 1976387 - RNA, 19 nt, Homo sapiens
  misc_RNA (1)...(19): siRNA sense strand
ccaaggcacugguacagau

SEQ ID NO: 1976388 - RNA, 19 nt, Homo sapiens
  misc_RNA (1)...(19): siRNA sense strand
cagccucgcuugaugaaau

SEQ ID NO: 1976389 - RNA, 19 nt, Homo sapiens
  misc_RNA (1)...(19): siRNA sense strand
gcacugguacagauaagaa

SEQ ID NO: 1976390 - RNA, 19 nt, Homo sapiens
  misc_RNA (1)...(19): siRNA sense strand
gaaaauggagccaguugua

SEQ ID NO: 1976391 - RNA, 19 nt, Homo sapiens
  misc_RNA (1)...(19): siRNA sense strand
gaucagaguaauuugagaa

SEQ ID NO: 1976392 - RNA, 19 nt, Homo sapiens
  misc_RNA (1)...(19): siRNA sense strand
gauugaugcugccucauuc

SEQ ID NO: 1976393 - RNA, 19 nt, Homo sapiens
  misc_RNA (1)...(19): siRNA sense strand
guaaggaggacucaacguu

SEQ ID NO: 1976394 - RNA, 19 nt, Homo sapiens
  misc_RNA (1)...(19): siRNA sense strand
cagcagaucugggaguaau

SEQ ID NO: 1976395 - RNA, 19 nt, Homo sapiens
  misc_RNA (1)...(19): siRNA sense strand
caucaccucuguuauuaag

SEQ ID NO: 1976396 - RNA, 19 nt, Homo sapiens
  misc_RNA (1)...(19): siRNA sense strand
caaagggguuuauaucauu

SEQ ID NO: 1976397 - RNA, 19 nt, Homo sapiens
  misc_RNA (1)...(19): siRNA sense strand
caacaaacacgguauugag

SEQ ID NO: 1976398 - RNA, 19 nt, Homo sapiens
  misc_RNA (1)...(19): siRNA sense strand
agucagcaauuuaugguuu

SEQ ID NO: 1976399 - RNA, 19 nt, Homo sapiens
  misc_RNA (1)...(19): siRNA sense strand
ucaguaugcugcguaugua

SEQ ID NO: 1976400 - RNA, 19 nt, Homo sapiens
  misc_RNA (1)...(19): siRNA sense strand
caaaguugauugacagacu

SEQ ID NO: 1976401 - RNA, 19 nt, Homo sapiens
  misc_RNA (1)...(19): siRNA sense strand
cagauaagaacaaaccaaa

SEQ ID NO: 1976402 - RNA, 19 nt, Homo sapiens
  misc_RNA (1)...(19): siRNA sense strand
gaaguuggaaucaucaucu

SEQ ID NO: 1976403 - RNA, 19 nt, Homo sapiens
  misc_RNA (1)...(19): siRNA sense strand
gacauucuuuggucaagga

SEQ ID NO: 1976404 - RNA, 19 nt, Homo sapiens
  misc_RNA (1)...(19): siRNA sense strand
uggagaaccuguaauaaaa

SEQ ID NO: 1976405 - RNA, 19 nt, Homo sapiens
  misc_RNA (1)...(19): siRNA sense strand
uuauggagaaccuguaaua

SEQ ID NO: 1976406 - RNA, 19 nt, Homo sapiens
  misc_RNA (1)...(19): siRNA sense strand
gcagaucugggaguaauau

SEQ ID NO: 1976407 - RNA, 19 nt, Homo sapiens
  misc_RNA (1)...(19): siRNA sense strand
uuauuaagcugauguuugc

SEQ ID NO: 1976408 - RNA, 19 nt, Homo sapiens
  misc_RNA (1)...(19): siRNA sense strand
guuauuaagcugauguuug

SEQ ID NO: 1976409 - RNA, 19 nt, Homo sapiens
  misc_RNA (1)...(19): siRNA sense strand
gacucaacguuacuuguau

SEQ ID NO: 1976410 - RNA, 19 nt, Homo sapiens
  misc_RNA (1)...(19): siRNA sense strand
cgacggagcagaggccuuu

SEQ ID NO: 1976411 - RNA, 19 nt, Homo sapiens
  misc_RNA (1)...(19): siRNA sense strand
gaagucagcaauuuauggu

SEQ ID NO: 1976412 - RNA, 19 nt, Homo sapiens
  misc_RNA (1)...(19): siRNA sense strand
ggaagucagcaauuuaugg

SEQ ID NO: 1976413 - RNA, 19 nt, Homo sapiens
  misc_RNA (1)...(19): siRNA sense strand
aaaguuuccugacuauaca

SEQ ID NO: 1976414 - RNA, 19 nt, Homo sapiens
  misc_RNA (1)...(19): siRNA sense strand
acugaaguaucaugagaaa

SEQ ID NO: 1976415 - RNA, 19 nt, Homo sapiens
  misc_RNA (1)...(19): siRNA sense strand
uuagaggaaucaccaguuc

SEQ ID NO: 1976416 - RNA, 19 nt, Homo sapiens
  misc_RNA (1)...(19): siRNA sense strand
gggaagaccaacacuguca

SEQ ID NO: 1976417 - RNA, 19 nt, Homo sapiens
  misc_RNA (1)...(19): siRNA sense strand
ucaauugcguaggaccaua

SEQ ID NO: 1976418 - RNA, 19 nt, Homo sapiens
  misc_RNA (1)...(19): siRNA sense strand
gcagccaugacucuucuaa

SEQ ID NO: 1976419 - RNA, 19 nt, Homo sapiens
  misc_RNA (1)...(19): siRNA sense strand
cguaggaccauaucgguuu

SEQ ID NO: 1976420 - RNA, 19 nt, Homo sapiens
  misc_RNA (1)...(19): siRNA sense strand
ggguugagcauucaugaug

SEQ ID NO: 1976421 - RNA, 19 nt, Homo sapiens
  misc_RNA (1)...(19): siRNA sense strand
guuauuagcagcucugaag

SEQ ID NO: 1976422 - RNA, 19 nt, Homo sapiens
  misc_RNA (1)...(19): siRNA sense strand
caaggcacugguacagaua

SEQ ID NO: 1976423 - RNA, 19 nt, Homo sapiens
  misc_RNA (1)...(19): siRNA sense strand
ccaugguucuucuccuuug

SEQ ID NO: 1976424 - RNA, 19 nt, Homo sapiens
  misc_RNA (1)...(19): siRNA sense strand
gcugauguuugcaggacuu

SEQ ID NO: 1976425 - RNA, 19 nt, Homo sapiens
  misc_RNA (1)...(19): siRNA sense strand
ucugaugugucuguuguaa

SEQ ID NO: 1976426 - RNA, 19 nt, Homo sapiens
  misc_RNA (1)...(19): siRNA sense strand
aaaccugucccgcucauug

SEQ ID NO: 1976427 - RNA, 19 nt, Homo sapiens
  misc_RNA (1)...(19): siRNA sense strand
ccuggaagucagcaauuua

SEQ ID NO: 1976428 - RNA, 19 nt, Homo sapiens
  misc_RNA (1)...(19): siRNA sense strand
uugaugaaauggcuaaaca

SEQ ID NO: 1976429 - RNA, 19 nt, Homo sapiens
  misc_RNA (1)...(19): siRNA sense strand
gaacucaaagguuauucca

SEQ ID NO: 1976430 - RNA, 19 nt, Homo sapiens
  misc_RNA (1)...(19): siRNA sense strand
uuugugagguuuggaauug

SEQ ID NO: 1976431 - RNA, 19 nt, Homo sapiens
  misc_RNA (1)...(19): siRNA sense strand
ccaacacugucaucugaag

SEQ ID NO: 1976432 - RNA, 19 nt, Homo sapiens
  misc_RNA (1)...(19): siRNA sense strand
cgacaucaguggagaaccu

SEQ ID NO: 1976433 - RNA, 19 nt, Homo sapiens
  misc_RNA (1)...(19): siRNA sense strand
ugaugugucuguuguaagg

SEQ ID NO: 1976434 - RNA, 19 nt, Homo sapiens
  misc_RNA (1)...(19): siRNA sense strand
cagcggcuuugacuccauu

SEQ ID NO: 1976435 - RNA, 19 nt, Homo sapiens
  misc_RNA (1)...(19): siRNA sense strand
guucuucuccuuuggcuau

SEQ ID NO: 1976436 - RNA, 19 nt, Homo sapiens
  misc_RNA (1)...(19): siRNA sense strand
gcaucaccucuguuauuaa

SEQ ID NO: 1976437 - RNA, 19 nt, Homo sapiens
  misc_RNA (1)...(19): siRNA sense strand
gaagaccaacacugucauc

SEQ ID NO: 1976438 - RNA, 19 nt, Homo sapiens
  misc_RNA (1)...(19): siRNA sense strand
agccaugacucuucuaagu

SEQ ID NO: 1976439 - RNA, 19 nt, Homo sapiens
  misc_RNA (1)...(19): siRNA sense strand
cauucacgcugacauucuu

SEQ ID NO: 1976440 - RNA, 19 nt, Homo sapiens
  misc_RNA (1)...(19): siRNA sense strand
aggcaucaccucuguuauu

SEQ ID NO: 1976441 - RNA, 19 nt, Homo sapiens
  misc_RNA (1)...(19): siRNA sense strand
caguggagaaccucaguuu

SEQ ID NO: 1976442 - RNA, 19 nt, Homo sapiens
  misc_RNA (1)...(19): siRNA sense strand
gagaucagaguaauuugag

SEQ ID NO: 1976443 - RNA, 19 nt, Homo sapiens
  misc_RNA (1)...(19): siRNA sense strand
gaaguaucaugagaaagcu

SEQ ID NO: 1976444 - RNA, 19 nt, Homo sapiens
  misc_RNA (1)...(19): siRNA sense strand
ugaaguaucaugagaaagc

SEQ ID NO: 1976445 - RNA, 19 nt, Homo sapiens
  misc_RNA (1)...(19): siRNA sense strand
caucugugauauugcuaau

SEQ ID NO: 1976446 - RNA, 19 nt, Homo sapiens
  misc_RNA (1)...(19): siRNA sense strand
ggcaacuucucauaaaauu

SEQ ID NO: 1976447 - RNA, 19 nt, Homo sapiens
  misc_RNA (1)...(19): siRNA sense strand
aauccagccucgcuugaug

SEQ ID NO: 1976448 - RNA, 19 nt, Homo sapiens
  misc_RNA (1)...(19): siRNA sense strand
auggagaaccuguaauaaa

SEQ ID NO: 1976449 - RNA, 19 nt, Homo sapiens
  misc_RNA (1)...(19): siRNA sense strand
gguccaaaauugaagagaa

SEQ ID NO: 1976450 - RNA, 19 nt, Homo sapiens
  misc_RNA (1)...(19): siRNA sense strand
acaaacacgguauugaguu

SEQ ID NO: 1976451 - RNA, 19 nt, Homo sapiens
  misc_RNA (1)...(19): siRNA sense strand
guacagauaagaacaaacc

SEQ ID NO: 1976452 - RNA, 19 nt, Homo sapiens
  misc_RNA (1)...(19): siRNA sense strand
caucugaaguuggaaucau

SEQ ID NO: 1976453 - RNA, 19 nt, Homo sapiens
  misc_RNA (1)...(19): siRNA sense strand
aggaaucaccaguucagua

SEQ ID NO: 1976454 - RNA, 19 nt, Homo sapiens
  misc_RNA (1)...(19): siRNA sense strand
ggaacuaaugcaacugaag

SEQ ID NO: 1976455 - RNA, 19 nt, Homo sapiens
  misc_RNA (1)...(19): siRNA sense strand
uauggagaaccuguaauaa

SEQ ID NO: 1976456 - RNA, 19 nt, Homo sapiens
  misc_RNA (1)...(19): siRNA sense strand
gaguuuaguguuauuagca

SEQ ID NO: 1976457 - RNA, 19 nt, Homo sapiens
  misc_RNA (1)...(19): siRNA sense strand
acacugucaucugaaguug

SEQ ID NO: 1976458 - RNA, 19 nt, Homo sapiens
  misc_RNA (1)...(19): siRNA sense strand
aaggaggacucaacguuac

SEQ ID NO: 1976459 - RNA, 19 nt, Homo sapiens
  misc_RNA (1)...(19): siRNA sense strand
uuggagaucagaguaauuu

SEQ ID NO: 1976460 - RNA, 19 nt, Homo sapiens
  misc_RNA (1)...(19): siRNA sense strand
uacuuugacugcuguggaa

SEQ ID NO: 1976461 - RNA, 19 nt, Homo sapiens
  misc_RNA (1)...(19): siRNA sense strand
ucaccucuguuauuaagcu

SEQ ID NO: 1976462 - RNA, 19 nt, Homo sapiens
  misc_RNA (1)...(19): siRNA sense strand
agauugaugcugccucauu

SEQ ID NO: 1976463 - RNA, 19 nt, Homo sapiens
  misc_RNA (1)...(19): siRNA sense strand
gccaugacucuucuaagug

SEQ ID NO: 1976464 - RNA, 19 nt, Homo sapiens
  misc_RNA (1)...(19): siRNA sense strand
gcagcaagcucacccauga

SEQ ID NO: 1976465 - RNA, 19 nt, Homo sapiens
  misc_RNA (1)...(19): siRNA sense strand
gaacuucaccggcaacuaa

SEQ ID NO: 1976466 - RNA, 19 nt, Homo sapiens
  misc_RNA (1)...(19): siRNA sense strand
gcagaagacuacacuguga

SEQ ID NO: 1976467 - RNA, 19 nt, Homo sapiens
  misc_RNA (1)...(19): siRNA sense strand
gaagagaaaugggaugaga

SEQ ID NO: 1976468 - RNA, 19 nt, Homo sapiens
  misc_RNA (1)...(19): siRNA sense strand
gcaacgagauggucaggaa

SEQ ID NO: 1976469 - RNA, 19 nt, Homo sapiens
  misc_RNA (1)...(19): siRNA sense strand
ucacuaaccuuuaucucua

SEQ ID NO: 1976470 - RNA, 19 nt, Homo sapiens
  misc_RNA (1)...(19): siRNA sense strand
uguggaaggucaugauuua

SEQ ID NO: 1976471 - RNA, 19 nt, Homo sapiens
  misc_RNA (1)...(19): siRNA sense strand
cgaacuggcugcuucugua

SEQ ID NO: 1976472 - RNA, 19 nt, Homo sapiens
  misc_RNA (1)...(19): siRNA sense strand
ccaaagggauggagccuau

SEQ ID NO: 1976473 - RNA, 19 nt, Homo sapiens
  misc_RNA (1)...(19): siRNA sense strand
gcucagagguuugaagaug

SEQ ID NO: 1976474 - RNA, 19 nt, Homo sapiens
  misc_RNA (1)...(19): siRNA sense strand
gaauggaaaggaggaauua

SEQ ID NO: 1976475 - RNA, 19 nt, Homo sapiens
  misc_RNA (1)...(19): siRNA sense strand
ggccacauguugucacuaa

SEQ ID NO: 1976476 - RNA, 19 nt, Homo sapiens
  misc_RNA (1)...(19): siRNA sense strand
gggaugagauuucaauugg

SEQ ID NO: 1976477 - RNA, 19 nt, Homo sapiens
  misc_RNA (1)...(19): siRNA sense strand
gaagaaacauggaaaagau

SEQ ID NO: 1976478 - RNA, 19 nt, Homo sapiens
  misc_RNA (1)...(19): siRNA sense strand
caacuaaacaccagugaug

SEQ ID NO: 1976479 - RNA, 19 nt, Homo sapiens
  misc_RNA (1)...(19): siRNA sense strand
gcgcucugcugguccauaa

SEQ ID NO: 1976480 - RNA, 19 nt, Homo sapiens
  misc_RNA (1)...(19): siRNA sense strand
aagggaacaucauugguua

SEQ ID NO: 1976481 - RNA, 19 nt, Homo sapiens
  misc_RNA (1)...(19): siRNA sense strand
ggaaaacacuuaugguaau

SEQ ID NO: 1976482 - RNA, 19 nt, Homo sapiens
  misc_RNA (1)...(19): siRNA sense strand
gaaagagaauguggaaggu

SEQ ID NO: 1976483 - RNA, 19 nt, Homo sapiens
  misc_RNA (1)...(19): siRNA sense strand
gcaaagaagaaacauggaa

SEQ ID NO: 1976484 - RNA, 19 nt, Homo sapiens
  misc_RNA (1)...(19): siRNA sense strand
uuacagcgauucugaguuc

SEQ ID NO: 1976485 - RNA, 19 nt, Homo sapiens
  misc_RNA (1)...(19): siRNA sense strand
gaccauggcuauaaauguc

SEQ ID NO: 1976486 - RNA, 19 nt, Homo sapiens
  misc_RNA (1)...(19): siRNA sense strand
gaacgugaccauggcuaua

SEQ ID NO: 1976487 - RNA, 19 nt, Homo sapiens
  misc_RNA (1)...(19): siRNA sense strand
gaucaacacauccaguauu

SEQ ID NO: 1976488 - RNA, 19 nt, Homo sapiens
  misc_RNA (1)...(19): siRNA sense strand
accaagggcugcuauauga

SEQ ID NO: 1976489 - RNA, 19 nt, Homo sapiens
  misc_RNA (1)...(19): siRNA sense strand
gaacuggcugcuucuguaa

SEQ ID NO: 1976490 - RNA, 19 nt, Homo sapiens
  misc_RNA (1)...(19): siRNA sense strand
ggcaggaacugucuaucuu

SEQ ID NO: 1976491 - RNA, 19 nt, Homo sapiens
  misc_RNA (1)...(19): siRNA sense strand
ugucacagaugccagauga

SEQ ID NO: 1976492 - RNA, 19 nt, Homo sapiens
  misc_RNA (1)...(19): siRNA sense strand
caaagaagaaacauggaaa

SEQ ID NO: 1976493 - RNA, 19 nt, Homo sapiens
  misc_RNA (1)...(19): siRNA sense strand
caacucgucuacugugaau

SEQ ID NO: 1976494 - RNA, 19 nt, Homo sapiens
  misc_RNA (1)...(19): siRNA sense strand
uauaagaucuucggguuuc

SEQ ID NO: 1976495 - RNA, 19 nt, Homo sapiens
  misc_RNA (1)...(19): siRNA sense strand
cacaguaucugcugaucaa

SEQ ID NO: 1976496 - RNA, 19 nt, Homo sapiens
  misc_RNA (1)...(19): siRNA sense strand
ucaaaggaaugcaaagaag

SEQ ID NO: 1976497 - RNA, 19 nt, Homo sapiens
  misc_RNA (1)...(19): siRNA sense strand
ggacucagauucgccaaag

SEQ ID NO: 1976498 - RNA, 19 nt, Homo sapiens
  misc_RNA (1)...(19): siRNA sense strand
ggagcuggaugguugugaa

SEQ ID NO: 1976499 - RNA, 19 nt, Homo sapiens
  misc_RNA (1)...(19): siRNA sense strand
gaauggagaauauaaagca

SEQ ID NO: 1976500 - RNA, 19 nt, Homo sapiens
  misc_RNA (1)...(19): siRNA sense strand
gaaaccaagggcugcuaua

SEQ ID NO: 1976501 - RNA, 19 nt, Homo sapiens
  misc_RNA (1)...(19): siRNA sense strand
ugacaaagggaacaucauu

SEQ ID NO: 1976502 - RNA, 19 nt, Homo sapiens
  misc_RNA (1)...(19): siRNA sense strand
gcaugcaucauuggauuua

SEQ ID NO: 1976503 - RNA, 19 nt, Homo sapiens
  misc_RNA (1)...(19): siRNA sense strand
aaacaccagugaugagaau

SEQ ID NO: 1976504 - RNA, 19 nt, Homo sapiens
  misc_RNA (1)...(19): siRNA sense strand
cagguggaauggagaauau

SEQ ID NO: 1976505 - RNA, 19 nt, Homo sapiens
  misc_RNA (1)...(19): siRNA sense strand
gaucucagcuugcguuuuc

SEQ ID NO: 1976506 - RNA, 19 nt, Homo sapiens
  misc_RNA (1)...(19): siRNA sense strand
caggaacugucuaucuuga

SEQ ID NO: 1976507 - RNA, 19 nt, Homo sapiens
  misc_RNA (1)...(19): siRNA sense strand
ucaggaagaugcccucaca

SEQ ID NO: 1976508 - RNA, 19 nt, Homo sapiens
  misc_RNA (1)...(19): siRNA sense strand
aaagaucaacuuccuggua

SEQ ID NO: 1976509 - RNA, 19 nt, Homo sapiens
  misc_RNA (1)...(19): siRNA sense strand
gaggaagaccuacuuugga

SEQ ID NO: 1976510 - RNA, 19 nt, Homo sapiens
  misc_RNA (1)...(19): siRNA sense strand
cucgaaagcuucacuagug

SEQ ID NO: 1976511 - RNA, 19 nt, Homo sapiens
  misc_RNA (1)...(19): siRNA sense strand
ggaaugcaaagaagaaaca

SEQ ID NO: 1976512 - RNA, 19 nt, Homo sapiens
  misc_RNA (1)...(19): siRNA sense strand
gcuggaugguugugaauca

SEQ ID NO: 1976513 - RNA, 19 nt, Homo sapiens
  misc_RNA (1)...(19): siRNA sense strand
ggauuuacagcgauucuga

SEQ ID NO: 1976514 - RNA, 19 nt, Homo sapiens
  misc_RNA (1)...(19): siRNA sense strand
uuaaugugcuggaugacaa

SEQ ID NO: 1976515 - RNA, 19 nt, Homo sapiens
  misc_RNA (1)...(19): siRNA sense strand
ugucgacgcuggaugaugu

SEQ ID NO: 1976516 - RNA, 19 nt, Homo sapiens
  misc_RNA (1)...(19): siRNA sense strand
caaaggaaugcaaagaaga

SEQ ID NO: 1976517 - RNA, 19 nt, Homo sapiens
  misc_RNA (1)...(19): siRNA sense strand
caaaggaucauggucauca

SEQ ID NO: 1976518 - RNA, 19 nt, Homo sapiens
  misc_RNA (1)...(19): siRNA sense strand
gagcaggugcgcuacagaa

SEQ ID NO: 1976519 - RNA, 19 nt, Homo sapiens
  misc_RNA (1)...(19): siRNA sense strand
uguuauaccugcugucaug

SEQ ID NO: 1976520 - RNA, 19 nt, Homo sapiens
  misc_RNA (1)...(19): siRNA sense strand
uuucuuagguucaucauag

SEQ ID NO: 1976521 - RNA, 19 nt, Homo sapiens
  misc_RNA (1)...(19): siRNA sense strand
gauagaagaggucaagucu

SEQ ID NO: 1976522 - RNA, 19 nt, Homo sapiens
  misc_RNA (1)...(19): siRNA sense strand
gcaggaacugucuaucuug

SEQ ID NO: 1976523 - RNA, 19 nt, Homo sapiens
  misc_RNA (1)...(19): siRNA sense strand
gagauggucaggaagcauu

SEQ ID NO: 1976524 - RNA, 19 nt, Homo sapiens
  misc_RNA (1)...(19): siRNA sense strand
gguggaauggagaauauaa

SEQ ID NO: 1976525 - RNA, 19 nt, Homo sapiens
  misc_RNA (1)...(19): siRNA sense strand
gucgguagcucagagguuu

SEQ ID NO: 1976526 - RNA, 19 nt, Homo sapiens
  misc_RNA (1)...(19): siRNA sense strand
agacuacacugugaucuuc

SEQ ID NO: 1976527 - RNA, 19 nt, Homo sapiens
  misc_RNA (1)...(19): siRNA sense strand
ucacagaugccagaugauu

SEQ ID NO: 1976528 - RNA, 19 nt, Homo sapiens
  misc_RNA (1)...(19): siRNA sense strand
uggaacaacucgucuacug

SEQ ID NO: 1976529 - RNA, 19 nt, Homo sapiens
  misc_RNA (1)...(19): siRNA sense strand
gauuucauuuggauacaug

SEQ ID NO: 1976530 - RNA, 19 nt, Homo sapiens
  misc_RNA (1)...(19): siRNA sense strand
gaucugugaggauuucauu

SEQ ID NO: 1976531 - RNA, 19 nt, Homo sapiens
  misc_RNA (1)...(19): siRNA sense strand
ucucauuccuugauguuau

SEQ ID NO: 1976532 - RNA, 19 nt, Homo sapiens
  misc_RNA (1)...(19): siRNA sense strand
aaagggaacaucauugguu

SEQ ID NO: 1976533 - RNA, 19 nt, Homo sapiens
  misc_RNA (1)...(19): siRNA sense strand
cuagugaucucauggaaaa

SEQ ID NO: 1976534 - RNA, 19 nt, Homo sapiens
  misc_RNA (1)...(19): siRNA sense strand
ucaacuuccugguacaaug

SEQ ID NO: 1976535 - RNA, 19 nt, Homo sapiens
  misc_RNA (1)...(19): siRNA sense strand
gacaaagggaacaucauug

SEQ ID NO: 1976536 - RNA, 19 nt, Homo sapiens
  misc_RNA (1)...(19): siRNA sense strand
gauuucaauuggcucuuug

SEQ ID NO: 1976537 - RNA, 19 nt, Homo sapiens
  misc_RNA (1)...(19): siRNA sense strand
aucaacacauccaguauuu

SEQ ID NO: 1976538 - RNA, 19 nt, Homo sapiens
  misc_RNA (1)...(19): siRNA sense strand
aaaggaaugcaaagaagaa

SEQ ID NO: 1976539 - RNA, 19 nt, Homo sapiens
  misc_RNA (1)...(19): siRNA sense strand
ggaacaacucgucuacugu

SEQ ID NO: 1976540 - RNA, 19 nt, Homo sapiens
  misc_RNA (1)...(19): siRNA sense strand
gauguccaggccuuucuua

SEQ ID NO: 1976541 - RNA, 19 nt, Homo sapiens
  misc_RNA (1)...(19): siRNA sense strand
gugggagucgcuucuguua

SEQ ID NO: 1976542 - RNA, 19 nt, Homo sapiens
  misc_RNA (1)...(19): siRNA sense strand
guucaaacucucaaaggaa

SEQ ID NO: 1976543 - RNA, 19 nt, Homo sapiens
  misc_RNA (1)...(19): siRNA sense strand
gugaggauuucauuuggau

SEQ ID NO: 1976544 - RNA, 19 nt, Homo sapiens
  misc_RNA (1)...(19): siRNA sense strand
gggcauaagcaacgagaug

SEQ ID NO: 1976545 - RNA, 19 nt, Homo sapiens
  misc_RNA (1)...(19): siRNA sense strand
guccaggccuuucuuaggu

SEQ ID NO: 1976546 - RNA, 19 nt, Homo sapiens
  misc_RNA (1)...(19): siRNA sense strand
ggucaugauuuaccugcau

SEQ ID NO: 1976547 - RNA, 19 nt, Homo sapiens
  misc_RNA (1)...(19): siRNA sense strand
agagaaaugggaugagauu

SEQ ID NO: 1976548 - RNA, 19 nt, Homo sapiens
  misc_RNA (1)...(19): siRNA sense strand
gcacaguaucugcugauca

SEQ ID NO: 1976549 - RNA, 19 nt, Homo sapiens
  misc_RNA (1)...(19): siRNA sense strand
gaaucacaaugguguuugc

SEQ ID NO: 1976550 - RNA, 19 nt, Homo sapiens
  misc_RNA (1)...(19): siRNA sense strand
gcaacgaaaccagcauguu

SEQ ID NO: 1976551 - RNA, 19 nt, Homo sapiens
  misc_RNA (1)...(19): siRNA sense strand
ccuguggucugcagaggaa

SEQ ID NO: 1976552 - RNA, 19 nt, Homo sapiens
  misc_RNA (1)...(19): siRNA sense strand
caacacauccaguauuuug

SEQ ID NO: 1976553 - RNA, 19 nt, Homo sapiens
  misc_RNA (1)...(19): siRNA sense strand
ugaaugaggcacaguaucu

SEQ ID NO: 1976554 - RNA, 19 nt, Homo sapiens
  misc_RNA (1)...(19): siRNA sense strand
guacaauggccacccuuuc

SEQ ID NO: 1976555 - RNA, 19 nt, Homo sapiens
  misc_RNA (1)...(19): siRNA sense strand
ggcaaaggaucauggucau

SEQ ID NO: 1976556 - RNA, 19 nt, Homo sapiens
  misc_RNA (1)...(19): siRNA sense strand
ggaaaccaagggcugcuau

SEQ ID NO: 1976557 - RNA, 19 nt, Homo sapiens
  misc_RNA (1)...(19): siRNA sense strand
gccgacuccuucagagaaa

SEQ ID NO: 1976558 - RNA, 19 nt, Homo sapiens
  misc_RNA (1)...(19): siRNA sense strand
gacagccucugcguaccua

SEQ ID NO: 1976559 - RNA, 19 nt, Homo sapiens
  misc_RNA (1)...(19): siRNA sense strand
ggauagaagaggucaaguc

SEQ ID NO: 1976560 - RNA, 19 nt, Homo sapiens
  misc_RNA (1)...(19): siRNA sense strand
cccuuucucuggugaauga

SEQ ID NO: 1976561 - RNA, 19 nt, Homo sapiens
  misc_RNA (1)...(19): siRNA sense strand
acagaugccagaugauuug

SEQ ID NO: 1976562 - RNA, 19 nt, Homo sapiens
  misc_RNA (1)...(19): siRNA sense strand
ggugaacuuuggcauguac

SEQ ID NO: 1976563 - RNA, 19 nt, Homo sapiens
  misc_RNA (1)...(19): siRNA sense strand
gaauguggaaggucaugau

SEQ ID NO: 1976564 - RNA, 19 nt, Homo sapiens
  misc_RNA (1)...(19): siRNA sense strand
ggaaagcaguggaaacaau

SEQ ID NO: 1976565 - RNA, 19 nt, Homo sapiens
  misc_RNA (1)...(19): siRNA sense strand
gaauauggaaucaugguua

SEQ ID NO: 1976566 - RNA, 19 nt, Homo sapiens
  misc_RNA (1)...(19): siRNA sense strand
aaucacaucugagaaguua

SEQ ID NO: 1976567 - RNA, 19 nt, Homo sapiens
  misc_RNA (1)...(19): siRNA sense strand
uaaagaagcucuaguuucc

SEQ ID NO: 1976568 - RNA, 19 nt, Homo sapiens
  misc_RNA (1)...(19): siRNA sense strand
uggcucagauuaccaauaa

SEQ ID NO: 1976569 - RNA, 19 nt, Homo sapiens
  misc_RNA (1)...(19): siRNA sense strand
gaaguguggugauauucuu

SEQ ID NO: 1976570 - RNA, 19 nt, Homo sapiens
  misc_RNA (1)...(19): siRNA sense strand
ccacuuaacagacccauuu

SEQ ID NO: 1976571 - RNA, 19 nt, Homo sapiens
  misc_RNA (1)...(19): siRNA sense strand
aagaagaccuggaauuuua

SEQ ID NO: 1976572 - RNA, 19 nt, Homo sapiens
  misc_RNA (1)...(19): siRNA sense strand
gaaacagcauuccagaaca

SEQ ID NO: 1976573 - RNA, 19 nt, Homo sapiens
  misc_RNA (1)...(19): siRNA sense strand
ccaguaaacuaccaaagga

SEQ ID NO: 1976574 - RNA, 19 nt, Homo sapiens
  misc_RNA (1)...(19): siRNA sense strand
agaagaauauggaaucaug

SEQ ID NO: 1976575 - RNA, 19 nt, Homo sapiens
  misc_RNA (1)...(19): siRNA sense strand
gaacaugacaucgauacaa

SEQ ID NO: 1976576 - RNA, 19 nt, Homo sapiens
  misc_RNA (1)...(19): siRNA sense strand
gcacggcuggcucagauua

SEQ ID NO: 1976577 - RNA, 19 nt, Homo sapiens
  misc_RNA (1)...(19): siRNA sense strand
guucagugaucaauauuug

SEQ ID NO: 1976578 - RNA, 19 nt, Homo sapiens
  misc_RNA (1)...(19): siRNA sense strand
gaaaucacaucugagaagu

SEQ ID NO: 1976579 - RNA, 19 nt, Homo sapiens
  misc_RNA (1)...(19): siRNA sense strand
caauaaguguacugaagaa

SEQ ID NO: 1976580 - RNA, 19 nt, Homo sapiens
  misc_RNA (1)...(19): siRNA sense strand
ugaagaagaccuggaauuu

SEQ ID NO: 1976581 - RNA, 19 nt, Homo sapiens
  misc_RNA (1)...(19): siRNA sense strand
ggaaucaugguuaauaaug

SEQ ID NO: 1976582 - RNA, 19 nt, Homo sapiens
  misc_RNA (1)...(19): siRNA sense strand
ggagcuauuugauuuagau

SEQ ID NO: 1976583 - RNA, 19 nt, Homo sapiens
  misc_RNA (1)...(19): siRNA sense strand
gagaaagagcugcggagua

SEQ ID NO: 1976584 - RNA, 19 nt, Homo sapiens
  misc_RNA (1)...(19): siRNA sense strand
aaucauggauguuguuguu

SEQ ID NO: 1976585 - RNA, 19 nt, Homo sapiens
  misc_RNA (1)...(19): siRNA sense strand
cauguucagugaucaauau

SEQ ID NO: 1976586 - RNA, 19 nt, Homo sapiens
  misc_RNA (1)...(19): siRNA sense strand
aaacagcauuccagaacaa

SEQ ID NO: 1976587 - RNA, 19 nt, Homo sapiens
  misc_RNA (1)...(19): siRNA sense strand
ugacaucgauacaagugaa

SEQ ID NO: 1976588 - RNA, 19 nt, Homo sapiens
  misc_RNA (1)...(19): siRNA sense strand
caacaggaugccaaacaua

SEQ ID NO: 1976589 - RNA, 19 nt, Homo sapiens
  misc_RNA (1)...(19): siRNA sense strand
caggagacauccaccuaaa

SEQ ID NO: 1976590 - RNA, 19 nt, Homo sapiens
  misc_RNA (1)...(19): siRNA sense strand
gaagaaaacagcaaaauca

SEQ ID NO: 1976591 - RNA, 19 nt, Homo sapiens
  misc_RNA (1)...(19): siRNA sense strand
gaaagcaguggaaacaaug

SEQ ID NO: 1976592 - RNA, 19 nt, Homo sapiens
  misc_RNA (1)...(19): siRNA sense strand
ggaguaaaacuguggauua

SEQ ID NO: 1976593 - RNA, 19 nt, Homo sapiens
  misc_RNA (1)...(19): siRNA sense strand
caggaaguguggugauauu

SEQ ID NO: 1976594 - RNA, 19 nt, Homo sapiens
  misc_RNA (1)...(19): siRNA sense strand
caccaacaauggcuacaaa

SEQ ID NO: 1976595 - RNA, 19 nt, Homo sapiens
  misc_RNA (1)...(19): siRNA sense strand
agaaagagcugcggaguac

SEQ ID NO: 1976596 - RNA, 19 nt, Homo sapiens
  misc_RNA (1)...(19): siRNA sense strand
uaauaaugaugcugugguu

SEQ ID NO: 1976597 - RNA, 19 nt, Homo sapiens
  misc_RNA (1)...(19): siRNA sense strand
cagcauuccagaacaauuu

SEQ ID NO: 1976598 - RNA, 19 nt, Homo sapiens
  misc_RNA (1)...(19): siRNA sense strand
cacauugagugucaugaaa

SEQ ID NO: 1976599 - RNA, 19 nt, Homo sapiens
  misc_RNA (1)...(19): siRNA sense strand
ggaguaaccaguaaacuac

SEQ ID NO: 1976600 - RNA, 19 nt, Homo sapiens
  misc_RNA (1)...(19): siRNA sense strand
agagauuucugacuacaug

SEQ ID NO: 1976601 - RNA, 19 nt, Homo sapiens
  misc_RNA (1)...(19): siRNA sense strand
ccaggaacaugacaucgau

SEQ ID NO: 1976602 - RNA, 19 nt, Homo sapiens
  misc_RNA (1)...(19): siRNA sense strand
gaggaaagcaguggaaaca

SEQ ID NO: 1976603 - RNA, 19 nt, Homo sapiens
  misc_RNA (1)...(19): siRNA sense strand
cuacacagccacccuauca

SEQ ID NO: 1976604 - RNA, 19 nt, Homo sapiens
  misc_RNA (1)...(19): siRNA sense strand
ccaauaaguguacugaaga

SEQ ID NO: 1976605 - RNA, 19 nt, Homo sapiens
  misc_RNA (1)...(19): siRNA sense strand
ucugucugcuucccacuua

SEQ ID NO: 1976606 - RNA, 19 nt, Homo sapiens
  misc_RNA (1)...(19): siRNA sense strand
gucaggaaguguggugaua

SEQ ID NO: 1976607 - RNA, 19 nt, Homo sapiens
  misc_RNA (1)...(19): siRNA sense strand
gaagaagaccuggaauuuu

SEQ ID NO: 1976608 - RNA, 19 nt, Homo sapiens
  misc_RNA (1)...(19): siRNA sense strand
ucacaucugagaaguuaaa

SEQ ID NO: 1976609 - RNA, 19 nt, Homo sapiens
  misc_RNA (1)...(19): siRNA sense strand
ccaacaggaugccaaacau

SEQ ID NO: 1976610 - RNA, 19 nt, Homo sapiens
  misc_RNA (1)...(19): siRNA sense strand
gcucauccagccucaguuu

SEQ ID NO: 1976611 - RNA, 19 nt, Homo sapiens
  misc_RNA (1)...(19): siRNA sense strand
cuacaaauccaugcagaaa

SEQ ID NO: 1976612 - RNA, 19 nt, Homo sapiens
  misc_RNA (1)...(19): siRNA sense strand
ucacaaauauuuccauccu

SEQ ID NO: 1976613 - RNA, 19 nt, Homo sapiens
  misc_RNA (1)...(19): siRNA sense strand
gaaccaggaacaugacauc

SEQ ID NO: 1976614 - RNA, 19 nt, Homo sapiens
  misc_RNA (1)...(19): siRNA sense strand
uagccgagcugcaggaaag

SEQ ID NO: 1976615 - RNA, 19 nt, Homo sapiens
  misc_RNA (1)...(19): siRNA sense strand
cuaaagaagcucuaguuuc

SEQ ID NO: 1976616 - RNA, 19 nt, Homo sapiens
  misc_RNA (1)...(19): siRNA sense strand
cggaguaauuggaagauuc

SEQ ID NO: 1976617 - RNA, 19 nt, Homo sapiens
  misc_RNA (1)...(19): siRNA sense strand
ggaccaacaggaugccaaa

SEQ ID NO: 1976618 - RNA, 19 nt, Homo sapiens
  misc_RNA (1)...(19): siRNA sense strand
cagauuaccaauaagugua

SEQ ID NO: 1976619 - RNA, 19 nt, Homo sapiens
  misc_RNA (1)...(19): siRNA sense strand
gacaggagacauccaccua

SEQ ID NO: 1976620 - RNA, 19 nt, Homo sapiens
  misc_RNA (1)...(19): siRNA sense strand
gcugaggacccagagauuu

SEQ ID NO: 1976621 - RNA, 19 nt, Homo sapiens
  misc_RNA (1)...(19): siRNA sense strand
gaaauugaaccaggaacau

SEQ ID NO: 1976622 - RNA, 19 nt, Homo sapiens
  misc_RNA (1)...(19): siRNA sense strand
ugguggaguucaagaaauu

SEQ ID NO: 1976623 - RNA, 19 nt, Homo sapiens
  misc_RNA (1)...(19): siRNA sense strand
ggugauauucuuggaguaa

SEQ ID NO: 1976624 - RNA, 19 nt, Homo sapiens
  misc_RNA (1)...(19): siRNA sense strand
ggaguaauuggaagauuca

SEQ ID NO: 1976625 - RNA, 19 nt, Homo sapiens
  misc_RNA (1)...(19): siRNA sense strand
caucugagaaguuaaaugg

SEQ ID NO: 1976626 - RNA, 19 nt, Homo sapiens
  misc_RNA (1)...(19): siRNA sense strand
gcacgucuucuuccaagug

SEQ ID NO: 1976627 - RNA, 19 nt, Homo sapiens
  misc_RNA (1)...(19): siRNA sense strand
ggaagauucagagcuuaaa

SEQ ID NO: 1976628 - RNA, 19 nt, Homo sapiens
  misc_RNA (1)...(19): siRNA sense strand
ucaccuuuguguauccuuu

SEQ ID NO: 1976629 - RNA, 19 nt, Homo sapiens
  misc_RNA (1)...(19): siRNA sense strand
uaaugaugcugugguuaga

SEQ ID NO: 1976630 - RNA, 19 nt, Homo sapiens
  misc_RNA (1)...(19): siRNA sense strand
uggaguaaccaguaaacua

SEQ ID NO: 1976631 - RNA, 19 nt, Homo sapiens
  misc_RNA (1)...(19): siRNA sense strand
acacagccacccuaucaaa

SEQ ID NO: 1976632 - RNA, 19 nt, Homo sapiens
  misc_RNA (1)...(19): siRNA sense strand
ccuaaagaagcucuaguuu

SEQ ID NO: 1976633 - RNA, 19 nt, Homo sapiens
  misc_RNA (1)...(19): siRNA sense strand
cucuggagcuauuugauuu

SEQ ID NO: 1976634 - RNA, 19 nt, Homo sapiens
  misc_RNA (1)...(19): siRNA sense strand
ggacuuuaccacccucuuc

SEQ ID NO: 1976635 - RNA, 19 nt, Homo sapiens
  misc_RNA (1)...(19): siRNA sense strand
ccaggagagugaugagauc

SEQ ID NO: 1976636 - RNA, 19 nt, Homo sapiens
  misc_RNA (1)...(19): siRNA sense strand
ccacauugagugucaugaa

SEQ ID NO: 1976637 - RNA, 19 nt, Homo sapiens
  misc_RNA (1)...(19): siRNA sense strand
uaaguguacugaagaagac

SEQ ID NO: 1976638 - RNA, 19 nt, Homo sapiens
  misc_RNA (1)...(19): siRNA sense strand
cacaaauauuuccauccua

SEQ ID NO: 1976639 - RNA, 19 nt, Homo sapiens
  misc_RNA (1)...(19): siRNA sense strand
ugaaaucacaucugagaag

SEQ ID NO: 1976640 - RNA, 19 nt, Homo sapiens
  misc_RNA (1)...(19): siRNA sense strand
gcucagauuaccaauaagu

SEQ ID NO: 1976641 - RNA, 19 nt, Homo sapiens
  misc_RNA (1)...(19): siRNA sense strand
gagcugcggaguaccauuc

SEQ ID NO: 1976642 - RNA, 19 nt, Homo sapiens
  misc_RNA (1)...(19): siRNA sense strand
gcucucaccuuuguguauc

SEQ ID NO: 1976643 - RNA, 19 nt, Homo sapiens
  misc_RNA (1)...(19): siRNA sense strand
gauauuuaccaccaacaau

SEQ ID NO: 1976644 - RNA, 19 nt, Homo sapiens
  misc_RNA (1)...(19): siRNA sense strand
cuagaagaauauggaauca

SEQ ID NO: 1976645 - RNA, 19 nt, Homo sapiens
  misc_RNA (1)...(19): siRNA sense strand
ugaaacagcauuccagaac

SEQ ID NO: 1976646 - RNA, 19 nt, Homo sapiens
  misc_RNA (1)...(19): siRNA sense strand
caagaaauugaaccaggaa

SEQ ID NO: 1976647 - RNA, 19 nt, Homo sapiens
  misc_RNA (1)...(19): siRNA sense strand
ggauguccuugugaugcua

SEQ ID NO: 1976648 - RNA, 19 nt, Homo sapiens
  misc_RNA (1)...(19): siRNA sense strand
ggaaguguggugauauucu

SEQ ID NO: 1976649 - RNA, 19 nt, Homo sapiens
  misc_RNA (1)...(19): siRNA sense strand
caacaauggcuacaaaucc

SEQ ID NO: 1976650 - RNA, 19 nt, Homo sapiens
  misc_RNA (1)...(19): siRNA sense strand
gugcuugguucaugucaca

SEQ ID NO: 1976651 - RNA, 19 nt, Homo sapiens
  misc_RNA (1)...(19): siRNA sense strand
gaugaggaaagcaguggaa

SEQ ID NO: 1976652 - RNA, 19 nt, Homo sapiens
  misc_RNA (1)...(19): siRNA sense strand
gcaaaaucauggauguugu

SEQ ID NO: 1976653 - RNA, 19 nt, Homo sapiens
  misc_RNA (1)...(19): siRNA sense strand
gugguggaguucaagaaau

SEQ ID NO: 1976654 - RNA, 19 nt, Homo sapiens
  misc_RNA (1)...(19): siRNA sense strand
augaaacguucuccucuga

SEQ ID NO: 1976655 - RNA, 19 nt, Homo sapiens
  misc_RNA (1)...(19): siRNA sense strand
aguuugaaauccugaagaa

SEQ ID NO: 1976656 - RNA, 19 nt, Homo sapiens
  misc_RNA (1)...(19): siRNA sense strand
ugcccaggcucucaccuuu

SEQ ID NO: 1976657 - RNA, 19 nt, Homo sapiens
  misc_RNA (1)...(19): siRNA sense strand
aaacuucggaguaauugga

SEQ ID NO: 1976658 - RNA, 19 nt, Homo sapiens
  misc_RNA (1)...(19): siRNA sense strand
acgagcagcuaaaugugaa

SEQ ID NO: 1976659 - RNA, 19 nt, Homo sapiens
  misc_RNA (1)...(19): siRNA sense strand
gaaauccugaagaaauauc

SEQ ID NO: 1976660 - RNA, 19 nt, Homo sapiens
  misc_RNA (1)...(19): siRNA sense strand
ggaguaccauucuuuucaa

SEQ ID NO: 1976661 - RNA, 19 nt, Homo sapiens
  misc_RNA (1)...(19): siRNA sense strand
ccaacaauggcuacaaauc

SEQ ID NO: 1976662 - RNA, 19 nt, Homo sapiens
  misc_RNA (1)...(19): siRNA sense strand
caccuaaaccagauugaug

SEQ ID NO: 1976663 - RNA, 19 nt, Homo sapiens
  misc_RNA (1)...(19): siRNA sense strand
ggugccacauugaguguca

SEQ ID NO: 1976664 - RNA, 19 nt, Homo sapiens
  misc_RNA (1)...(19): siRNA sense strand
caaguuaccugaccuuaaa

SEQ ID NO: 1976665 - RNA, 19 nt, Homo sapiens
  misc_RNA (1)...(19): siRNA sense strand
gagcugggcuuuccaaguu

SEQ ID NO: 1976666 - RNA, 19 nt, Homo sapiens
  misc_RNA (1)...(19): siRNA sense strand
ugacuaagcucccaacaau

SEQ ID NO: 1976667 - RNA, 19 nt, Homo sapiens
  misc_RNA (1)...(19): siRNA sense strand
gagcuuggcugaagaugau

SEQ ID NO: 1976668 - RNA, 19 nt, Homo sapiens
  misc_RNA (1)...(19): siRNA sense strand
uaaagaugcugaagcuguu

SEQ ID NO: 1976669 - RNA, 19 nt, Homo sapiens
  misc_RNA (1)...(19): siRNA sense strand
acuaagcucccaacaauua

SEQ ID NO: 1976670 - RNA, 19 nt, Homo sapiens
  misc_RNA (1)...(19): siRNA sense strand
guuacuagcucaaggugaa

SEQ ID NO: 1976671 - RNA, 19 nt, Homo sapiens
  misc_RNA (1)...(19): siRNA sense strand
aaauacagcuuggugaaga

SEQ ID NO: 1976672 - RNA, 19 nt, Homo sapiens
  misc_RNA (1)...(19): siRNA sense strand
ggagagagcugggcuuucc

SEQ ID NO: 1976673 - RNA, 19 nt, Homo sapiens
  misc_RNA (1)...(19): siRNA sense strand
ugaagaugauguggaauga

SEQ ID NO: 1976674 - RNA, 19 nt, Homo sapiens
  misc_RNA (1)...(19): siRNA sense strand
acagcuuggugaagaguua

SEQ ID NO: 1976675 - RNA, 19 nt, Homo sapiens
  misc_RNA (1)...(19): siRNA sense strand
gaagaaagaaacagaagcu

SEQ ID NO: 1976676 - RNA, 19 nt, Homo sapiens
  misc_RNA (1)...(19): siRNA sense strand
ccaaguuaccugaccuuaa

SEQ ID NO: 1976677 - RNA, 19 nt, Homo sapiens
  misc_RNA (1)...(19): siRNA sense strand
ggcugaagaugauguggaa

SEQ ID NO: 1976678 - RNA, 19 nt, Homo sapiens
  misc_RNA (1)...(19): siRNA sense strand
gcguagaccaucugacaaa

SEQ ID NO: 1976679 - RNA, 19 nt, Homo sapiens
  misc_RNA (1)...(19): siRNA sense strand
gaaauacagcuuggugaag

SEQ ID NO: 1976680 - RNA, 19 nt, Homo sapiens
  misc_RNA (1)...(19): siRNA sense strand
gggcguagaccaucugaca

SEQ ID NO: 1976681 - RNA, 19 nt, Homo sapiens
  misc_RNA (1)...(19): siRNA sense strand
caacaauuagucagagaau

SEQ ID NO: 1976682 - RNA, 19 nt, Homo sapiens
  misc_RNA (1)...(19): siRNA sense strand
agaaauacagcuuggugaa

SEQ ID NO: 1976683 - RNA, 19 nt, Homo sapiens
  misc_RNA (1)...(19): siRNA sense strand
uagcucaaggugaauauga

SEQ ID NO: 1976684 - RNA, 19 nt, Homo sapiens
  misc_RNA (1)...(19): siRNA sense strand
ccuuaaagaugcugaagcu

SEQ ID NO: 1976685 - RNA, 19 nt, Homo sapiens
  misc_RNA (1)...(19): siRNA sense strand
guagaccaucugacaaaug

SEQ ID NO: 1976686 - RNA, 19 nt, Homo sapiens
  misc_RNA (1)...(19): siRNA sense strand
gguacugcaucuacuucga

SEQ ID NO: 1976687 - RNA, 19 nt, Homo sapiens
  misc_RNA (1)...(19): siRNA sense strand
gaagaguuacuagcucaag

SEQ ID NO: 1976688 - RNA, 19 nt, Homo sapiens
  misc_RNA (1)...(19): siRNA sense strand
ggacagccacagcaguuac

SEQ ID NO: 1976689 - RNA, 19 nt, Homo sapiens
  misc_RNA (1)...(19): siRNA sense strand
uuaccugaccuuaaagaug

SEQ ID NO: 1976690 - RNA, 19 nt, Homo sapiens
  misc_RNA (1)...(19): siRNA sense strand
ccaacaauuagucagagaa

SEQ ID NO: 1976691 - RNA, 19 nt, Homo sapiens
  misc_RNA (1)...(19): siRNA sense strand
gaagggcguagaccaucug

SEQ ID NO: 1976692 - RNA, 19 nt, Homo sapiens
  misc_RNA (1)...(19): siRNA sense strand
cguagaccaucugacaaau

SEQ ID NO: 1976693 - RNA, 19 nt, Homo sapiens
  misc_RNA (1)...(19): siRNA sense strand
gacuaagcucccaacaauu

SEQ ID NO: 1976694 - RNA, 19 nt, Homo sapiens
  misc_RNA (1)...(19): siRNA sense strand
cccaacaauuagucagaga

SEQ ID NO: 1976695 - RNA, 19 nt, Homo sapiens
  misc_RNA (1)...(19): siRNA sense strand
cugaagaugauguggaaug

SEQ ID NO: 1976696 - RNA, 19 nt, Homo sapiens
  misc_RNA (1)...(19): siRNA sense strand
gagaagaaguuauaccauu

SEQ ID NO: 1976697 - RNA, 19 nt, Homo sapiens
  misc_RNA (1)...(19): siRNA sense strand
gcgaauggauggauuugaa

SEQ ID NO: 1976698 - RNA, 19 nt, Homo sapiens
  misc_RNA (1)...(19): siRNA sense strand
ggaaacagacaguggagua

SEQ ID NO: 1976699 - RNA, 19 nt, Homo sapiens
  misc_RNA (1)...(19): siRNA sense strand
ggagaaaguuaaugcaaca

SEQ ID NO: 1976700 - RNA, 19 nt, Homo sapiens
  misc_RNA (1)...(19): siRNA sense strand
caacaagcgaguaaacaua

SEQ ID NO: 1976701 - RNA, 19 nt, Homo sapiens
  misc_RNA (1)...(19): siRNA sense strand
agaaugccaugcuagauuu

SEQ ID NO: 1976702 - RNA, 19 nt, Homo sapiens
  misc_RNA (1)...(19): siRNA sense strand
gaaguuauaccauuaagag

SEQ ID NO: 1976703 - RNA, 19 nt, Homo sapiens
  misc_RNA (1)...(19): siRNA sense strand
gcagcaaucucagaaguuc

SEQ ID NO: 1976704 - RNA, 19 nt, Homo sapiens
  misc_RNA (1)...(19): siRNA sense strand
uagcauggcuucuuuaaaa

SEQ ID NO: 1976705 - RNA, 19 nt, Homo sapiens
  misc_RNA (1)...(19): siRNA sense strand
gauacagaaugccaugcua

SEQ ID NO: 1976706 - RNA, 19 nt, Homo sapiens
  misc_RNA (1)...(19): siRNA sense strand
caccaaagcugaaaagauu

SEQ ID NO: 1976707 - RNA, 19 nt, Homo sapiens
  misc_RNA (1)...(19): siRNA sense strand
ucaaaacacuggaaugaaa

SEQ ID NO: 1976708 - RNA, 19 nt, Homo sapiens
  misc_RNA (1)...(19): siRNA sense strand
ggaaacaaguccgggauac

SEQ ID NO: 1976709 - RNA, 19 nt, Homo sapiens
  misc_RNA (1)...(19): siRNA sense strand
cauuaagagugcuaucaaa

SEQ ID NO: 1976710 - RNA, 19 nt, Homo sapiens
  misc_RNA (1)...(19): siRNA sense strand
uaagagugcuaucaaagag

SEQ ID NO: 1976711 - RNA, 19 nt, Homo sapiens
  misc_RNA (1)...(19): siRNA sense strand
agucagaaauggaaacaga

SEQ ID NO: 1976712 - RNA, 19 nt, Homo sapiens
  misc_RNA (1)...(19): siRNA sense strand
gcacccaggagaaaguuaa

SEQ ID NO: 1976713 - RNA, 19 nt, Homo sapiens
  misc_RNA (1)...(19): siRNA sense strand
guucgugaguggagugauu

SEQ ID NO: 1976714 - RNA, 19 nt, Homo sapiens
  misc_RNA (1)...(19): siRNA sense strand
acaagcgaguaaacauaua

SEQ ID NO: 1976715 - RNA, 19 nt, Homo sapiens
  misc_RNA (1)...(19): siRNA sense strand
caaggaacacugcuggaaa

SEQ ID NO: 1976716 - RNA, 19 nt, Homo sapiens
  misc_RNA (1)...(19): siRNA sense strand
caaagguauuggcagaaga

SEQ ID NO: 1976717 - RNA, 19 nt, Homo sapiens
  misc_RNA (1)...(19): siRNA sense strand
caagcgaguaaacauauaa

SEQ ID NO: 1976718 - RNA, 19 nt, Homo sapiens
  misc_RNA (1)...(19): siRNA sense strand
cagaaugccaugcuagauu

SEQ ID NO: 1976719 - RNA, 19 nt, Homo sapiens
  misc_RNA (1)...(19): siRNA sense strand
gaaaagaggcacugaaaag

SEQ ID NO: 1976720 - RNA, 19 nt, Homo sapiens
  misc_RNA (1)...(19): siRNA sense strand
gcucaagcaguaauaaaug

SEQ ID NO: 1976721 - RNA, 19 nt, Homo sapiens
  misc_RNA (1)...(19): siRNA sense strand
gaaugccaugcuagauuua

SEQ ID NO: 1976722 - RNA, 19 nt, Homo sapiens
  misc_RNA (1)...(19): siRNA sense strand
aagaggcacugaaaaguua

SEQ ID NO: 1976723 - RNA, 19 nt, Homo sapiens
  misc_RNA (1)...(19): siRNA sense strand
gcuagcauggcuucuuuaa

SEQ ID NO: 1976724 - RNA, 19 nt, Homo sapiens
  misc_RNA (1)...(19): siRNA sense strand
gacaguggaguaccucaaa

SEQ ID NO: 1976725 - RNA, 19 nt, Homo sapiens
  misc_RNA (1)...(19): siRNA sense strand
gcaguaauaaaugccuaua

SEQ ID NO: 1976726 - RNA, 19 nt, Homo sapiens
  misc_RNA (1)...(19): siRNA sense strand
gcgaguaaacauauaagau

SEQ ID NO: 1976727 - RNA, 19 nt, Homo sapiens
  misc_RNA (1)...(19): siRNA sense strand
ugaguggagugauugugaa

SEQ ID NO: 1976728 - RNA, 19 nt, Homo sapiens
  misc_RNA (1)...(19): siRNA sense strand
gaaauuaacaaggaacacu

SEQ ID NO: 1976729 - RNA, 19 nt, Homo sapiens
  misc_RNA (1)...(19): siRNA sense strand
guggagugauugugaagau

SEQ ID NO: 1976730 - RNA, 19 nt, Homo sapiens
  misc_RNA (1)...(19): siRNA sense strand
cagaagauuuugguugaua

SEQ ID NO: 1976731 - RNA, 19 nt, Homo sapiens
  misc_RNA (1)...(19): siRNA sense strand
ggcagaagauuuugguuga

SEQ ID NO: 1976732 - RNA, 19 nt, Homo sapiens
  misc_RNA (1)...(19): siRNA sense strand
uuaagagugcuaucaaaga

SEQ ID NO: 1976733 - RNA, 19 nt, Homo sapiens
  misc_RNA (1)...(19): siRNA sense strand
uaucaaagagcgaauggau

SEQ ID NO: 1976734 - RNA, 19 nt, Homo sapiens
  misc_RNA (1)...(19): siRNA sense strand
gaucacgaacaaagguauu

SEQ ID NO: 1976735 - RNA, 19 nt, Homo sapiens
  misc_RNA (1)...(19): siRNA sense strand
gggauacuuuggcagcaau

SEQ ID NO: 1976736 - RNA, 19 nt, Homo sapiens
  misc_RNA (1)...(19): siRNA sense strand
gauagacaggcaaaacuua

SEQ ID NO: 1976737 - RNA, 19 nt, Homo sapiens
  misc_RNA (1)...(19): siRNA sense strand
ggagaagaaguuauaccau

SEQ ID NO: 1976738 - RNA, 19 nt, Homo sapiens
  misc_RNA (1)...(19): siRNA sense strand
cgaauggauggauuugaaa

SEQ ID NO: 1976739 - RNA, 19 nt, Homo sapiens
  misc_RNA (1)...(19): siRNA sense strand
gguauuggcagaagauuuu

SEQ ID NO: 1976740 - RNA, 19 nt, Homo sapiens
  misc_RNA (1)...(19): siRNA sense strand
gggagaagaaguuauacca

SEQ ID NO: 1976741 - RNA, 19 nt, Homo sapiens
  misc_RNA (1)...(19): siRNA sense strand
aagauuagacuggcaaaga

SEQ ID NO: 1976742 - RNA, 19 nt, Homo sapiens
  misc_RNA (1)...(19): siRNA sense strand
guuaaucaccaaagcugaa

SEQ ID NO: 1976743 - RNA, 19 nt, Homo sapiens
  misc_RNA (1)...(19): siRNA sense strand
gugaguggagugauuguga

SEQ ID NO: 1976744 - RNA, 19 nt, Homo sapiens
  misc_RNA (1)...(19): siRNA sense strand
ugaagaucauuagcacaga

SEQ ID NO: 1976745 - RNA, 19 nt, Homo sapiens
  misc_RNA (1)...(19): siRNA sense strand
acaaagguauuggcagaag

SEQ ID NO: 1976746 - RNA, 19 nt, Homo sapiens
  misc_RNA (1)...(19): siRNA sense strand
cgagauccuuucuggugau

SEQ ID NO: 1976747 - RNA, 19 nt, Homo sapiens
  misc_RNA (1)...(19): siRNA sense strand
gcuggaaacucgagauccu

SEQ ID NO: 1976748 - RNA, 19 nt, Homo sapiens
  misc_RNA (1)...(19): siRNA sense strand
caggagaaaguuaaugcaa

SEQ ID NO: 1976749 - RNA, 19 nt, Homo sapiens
  misc_RNA (1)...(19): siRNA sense strand
ccauuaagagugcuaucaa

SEQ ID NO: 1976750 - RNA, 19 nt, Homo sapiens
  misc_RNA (1)...(19): siRNA sense strand
uggcagcaaucucagaagu

SEQ ID NO: 1976751 - RNA, 19 nt, Homo sapiens
  misc_RNA (1)...(19): siRNA sense strand
gaaacagacaguggaguac

SEQ ID NO: 1976752 - RNA, 19 nt, Homo sapiens
  misc_RNA (1)...(19): siRNA sense strand
caacaggaccacaguucgu

SEQ ID NO: 1976753 - RNA, 19 nt, Homo sapiens
  misc_RNA (1)...(19): siRNA sense strand
ucaacaagcgaguaaacau

SEQ ID NO: 1976754 - RNA, 19 nt, Homo sapiens
  misc_RNA (1)...(19): siRNA sense strand
aaggaacacugcuggaaac

SEQ ID NO: 1976755 - RNA, 19 nt, Homo sapiens
  misc_RNA (1)...(19): siRNA sense strand
gaaacaaguccgggauacu

SEQ ID NO: 1976756 - RNA, 19 nt, Homo sapiens
  misc_RNA (1)...(19): siRNA sense strand
aagagcgaauggauggauu

SEQ ID NO: 1976757 - RNA, 19 nt, Homo sapiens
  misc_RNA (1)...(19): siRNA sense strand
gagcgaauggauggauuug

SEQ ID NO: 1976758 - RNA, 19 nt, Homo sapiens
  misc_RNA (1)...(19): siRNA sense strand
guaauaaaugccuauacag

SEQ ID NO: 1976759 - RNA, 19 nt, Homo sapiens
  misc_RNA (1)...(19): siRNA sense strand
gaguauuuagcgcuacaaa

SEQ ID NO: 1976760 - RNA, 19 nt, Homo sapiens
  misc_RNA (1)...(19): siRNA sense strand
aacaagcgaguaaacauau

SEQ ID NO: 1976761 - RNA, 19 nt, Homo sapiens
  misc_RNA (1)...(19): siRNA sense strand
ccaaauaaaaucagaguca

SEQ ID NO: 1976762 - RNA, 19 nt, Homo sapiens
  misc_RNA (1)...(19): siRNA sense strand
acaaggaacacugcuggaa

SEQ ID NO: 1976763 - RNA, 19 nt, Homo sapiens
  misc_RNA (1)...(19): siRNA sense strand
uggaaacucgagauccuuu

SEQ ID NO: 1976764 - RNA, 19 nt, Homo sapiens
  misc_RNA (1)...(19): siRNA sense strand
caaaacacuggaaugaaaa

SEQ ID NO: 1976765 - RNA, 19 nt, Homo sapiens
  misc_RNA (1)...(19): siRNA sense strand
agauuagacuggcaaagac

SEQ ID NO: 1976766 - RNA, 19 nt, Homo sapiens
  misc_RNA (1)...(19): siRNA sense strand
aaucagagucagaaaugga

SEQ ID NO: 1976767 - RNA, 19 nt, Homo sapiens
  misc_RNA (1)...(19): siRNA sense strand
ggcagcaaucucagaaguu

SEQ ID NO: 1976768 - RNA, 19 nt, Homo sapiens
  misc_RNA (1)...(19): siRNA sense strand
uauguugauuugcuagaag

SEQ ID NO: 1976769 - RNA, 19 nt, Homo sapiens
  misc_RNA (1)...(19): siRNA sense strand
ucagaaauggaaacagaca

SEQ ID NO: 1976770 - RNA, 19 nt, Homo sapiens
  misc_RNA (1)...(19): siRNA sense strand
gaauggauggauuugaaaa

SEQ ID NO: 1976771 - RNA, 19 nt, Homo sapiens
  misc_RNA (1)...(19): siRNA sense strand
gaaaacaucccaguccuua

SEQ ID NO: 1976772 - RNA, 19 nt, Homo sapiens
  misc_RNA (1)...(19): siRNA sense strand
cuagaggccuucgucaaga

SEQ ID NO: 1976773 - RNA, 19 nt, Homo sapiens
  misc_RNA (1)...(19): siRNA sense strand
gcuagaggccuucgucaag

SEQ ID NO: 1976774 - RNA, 19 nt, Homo sapiens
  misc_RNA (1)...(19): siRNA sense strand
aggccaaacugacagaaau

SEQ ID NO: 1976775 - RNA, 19 nt, Homo sapiens
  misc_RNA (1)...(19): siRNA sense strand
aaacaucccaguccuuaag

SEQ ID NO: 1976776 - RNA, 19 nt, Homo sapiens
  misc_RNA (1)...(19): siRNA sense strand
uagaggccuucgucaagau

SEQ ID NO: 1976777 - RNA, 19 nt, Homo sapiens
  misc_RNA (1)...(19): siRNA sense strand
caaaguggaccggcuagag

SEQ ID NO: 1976778 - RNA, 19 nt, Homo sapiens
  misc_RNA (1)...(19): siRNA sense strand
guccuuaaggccaaacuga

SEQ ID NO: 1976779 - RNA, 19 nt, Homo sapiens
  misc_RNA (1)...(19): siRNA sense strand
ggccaaacugacagaaaug

SEQ ID NO: 1976780 - RNA, 19 nt, Homo sapiens
  misc_RNA (1)...(19): siRNA sense strand
ccucaggcuggaagaguuu

SEQ ID NO: 1976781 - RNA, 19 nt, Homo sapiens
  misc_RNA (1)...(19): siRNA sense strand
gaaaacaucccaguccuua

SEQ ID NO: 1976782 - RNA, 19 nt, Homo sapiens
  misc_RNA (1)...(19): siRNA sense strand
gagcugcccacacuguaua

SEQ ID NO: 1976783 - RNA, 19 nt, Homo sapiens
  misc_RNA (1)...(19): siRNA sense strand
cuagaggccuucgucaaga

SEQ ID NO: 1976784 - RNA, 19 nt, Homo sapiens
  misc_RNA (1)...(19): siRNA sense strand
gcuagaggccuucgucaag

SEQ ID NO: 1976785 - RNA, 19 nt, Homo sapiens
  misc_RNA (1)...(19): siRNA sense strand
aggccaaacugacagaaau

SEQ ID NO: 1976786 - RNA, 19 nt, Homo sapiens
  misc_RNA (1)...(19): siRNA sense strand
aaacaucccaguccuuaag

SEQ ID NO: 1976787 - RNA, 19 nt, Homo sapiens
  misc_RNA (1)...(19): siRNA sense strand
cguacgagcugcccacacu

SEQ ID NO: 1976788 - RNA, 19 nt, Homo sapiens
  misc_RNA (1)...(19): siRNA sense strand
uagaggccuucgucaagau

SEQ ID NO: 1976789 - RNA, 19 nt, Homo sapiens
  misc_RNA (1)...(19): siRNA sense strand
uguauaggacggaggacua

SEQ ID NO: 1976790 - RNA, 19 nt, Homo sapiens
  misc_RNA (1)...(19): siRNA sense strand
caaaguggaccggcuagag

SEQ ID NO: 1976791 - RNA, 19 nt, Homo sapiens
  misc_RNA (1)...(19): siRNA sense strand
guccuuaaggccaaacuga

SEQ ID NO: 1976792 - RNA, 19 nt, Homo sapiens
  misc_RNA (1)...(19): siRNA sense strand
ggccaaacugacagaaaug

SEQ ID NO: 1976793 - RNA, 19 nt, Homo sapiens
  misc_RNA (1)...(19): siRNA sense strand
ccucaggcuggaagaguuu

SEQ ID NO: 1976794 - RNA, 19 nt, Homo sapiens
  misc_RNA (1)...(19): siRNA sense strand
gaaagaaacccuaugauug

SEQ ID NO: 1976795 - RNA, 19 nt, Homo sapiens
  misc_RNA (1)...(19): siRNA sense strand
gaagacauaugguaguaaa

SEQ ID NO: 1976796 - RNA, 19 nt, Homo sapiens
  misc_RNA (1)...(19): siRNA sense strand
gagaaacccuauacaugua

SEQ ID NO: 1976797 - RNA, 19 nt, Homo sapiens
  misc_RNA (1)...(19): siRNA sense strand
gagcaacccuauaaaugua

SEQ ID NO: 1976798 - RNA, 19 nt, Homo sapiens
  misc_RNA (1)...(19): siRNA sense strand
gggaaagccuucaguguuu

SEQ ID NO: 1976799 - RNA, 19 nt, Homo sapiens
  misc_RNA (1)...(19): siRNA sense strand
ggaaagaaacccuaugauu

SEQ ID NO: 1976800 - RNA, 19 nt, Homo sapiens
  misc_RNA (1)...(19): siRNA sense strand
gaaagacccuaugaaugua

SEQ ID NO: 1976801 - RNA, 19 nt, Homo sapiens
  misc_RNA (1)...(19): siRNA sense strand
gggaaaggcuuaaguuauc

SEQ ID NO: 1976802 - RNA, 19 nt, Homo sapiens
  misc_RNA (1)...(19): siRNA sense strand
ggagauggcccucauaaau

SEQ ID NO: 1976803 - RNA, 19 nt, Homo sapiens
  misc_RNA (1)...(19): siRNA sense strand
gagaagucauauacacaua

SEQ ID NO: 1976804 - RNA, 19 nt, Homo sapiens
  misc_RNA (1)...(19): siRNA sense strand
gagagaaacccuacaaaug

SEQ ID NO: 1976805 - RNA, 19 nt, Homo sapiens
  misc_RNA (1)...(19): siRNA sense strand
gagagaagcccuaugaaug

SEQ ID NO: 1976806 - RNA, 19 nt, Homo sapiens
  misc_RNA (1)...(19): siRNA sense strand
gguaaagccuucagucguu

SEQ ID NO: 1976807 - RNA, 19 nt, Homo sapiens
  misc_RNA (1)...(19): siRNA sense strand
gagaaacccuaugaaugua

SEQ ID NO: 1976808 - RNA, 19 nt, Homo sapiens
  misc_RNA (1)...(19): siRNA sense strand
ggagaaaccguaugaaugu

SEQ ID NO: 1976809 - RNA, 19 nt, Homo sapiens
  misc_RNA (1)...(19): siRNA sense strand
cuaaagccuucccugauua

SEQ ID NO: 1976810 - RNA, 19 nt, Homo sapiens
  misc_RNA (1)...(19): siRNA sense strand
ugaaggaacucacacucua

SEQ ID NO: 1976811 - RNA, 19 nt, Homo sapiens
  misc_RNA (1)...(19): siRNA sense strand
ggagaaagacccuaugaau

SEQ ID NO: 1976812 - RNA, 19 nt, Homo sapiens
  misc_RNA (1)...(19): siRNA sense strand
ggagauggaccuuauaaau

SEQ ID NO: 1976813 - RNA, 19 nt, Homo sapiens
  misc_RNA (1)...(19): siRNA sense strand
gggaaagccuucagucguu

SEQ ID NO: 1976814 - RNA, 19 nt, Homo sapiens
  misc_RNA (1)...(19): siRNA sense strand
ucuaaagccuucccuguuu

SEQ ID NO: 1976815 - RNA, 19 nt, Homo sapiens
  misc_RNA (1)...(19): siRNA sense strand
gagagaaacccuaugaaug

SEQ ID NO: 1976816 - RNA, 19 nt, Homo sapiens
  misc_RNA (1)...(19): siRNA sense strand
ggagauggaccucauaaau

SEQ ID NO: 1976817 - RNA, 19 nt, Homo sapiens
  misc_RNA (1)...(19): siRNA sense strand
gagagaaacccuauacaug

SEQ ID NO: 1976818 - RNA, 19 nt, Homo sapiens
  misc_RNA (1)...(19): siRNA sense strand
gagauggaccuuauaaaug

SEQ ID NO: 1976819 - RNA, 19 nt, Homo sapiens
  misc_RNA (1)...(19): siRNA sense strand
ccucauaaaugcacaguau

SEQ ID NO: 1976820 - RNA, 19 nt, Homo sapiens
  misc_RNA (1)...(19): siRNA sense strand
gaauggagaagucauaaug

SEQ ID NO: 1976821 - RNA, 19 nt, Homo sapiens
  misc_RNA (1)...(19): siRNA sense strand
gagaaagacccuaugaaug

SEQ ID NO: 1976822 - RNA, 19 nt, Homo sapiens
  misc_RNA (1)...(19): siRNA sense strand
gaacucacacucuagagaa

SEQ ID NO: 1976823 - RNA, 19 nt, Homo sapiens
  misc_RNA (1)...(19): siRNA sense strand
gagaaaccauaugaaugua

SEQ ID NO: 1976824 - RNA, 19 nt, Homo sapiens
  misc_RNA (1)...(19): siRNA sense strand
ggagagaaaccauaugaau

SEQ ID NO: 1976825 - RNA, 19 nt, Homo sapiens
  misc_RNA (1)...(19): siRNA sense strand
ggaaagccuucagucguuu

SEQ ID NO: 1976826 - RNA, 19 nt, Homo sapiens
  misc_RNA (1)...(19): siRNA sense strand
gagauggaccucauaaaug

SEQ ID NO: 1976827 - RNA, 19 nt, Homo sapiens
  misc_RNA (1)...(19): siRNA sense strand
agaaagacccuaugaaugu

SEQ ID NO: 1976828 - RNA, 19 nt, Homo sapiens
  misc_RNA (1)...(19): siRNA sense strand
gagagcaacccuauaaaug

SEQ ID NO: 1976829 - RNA, 19 nt, Homo sapiens
  misc_RNA (1)...(19): siRNA sense strand
ggaaaccuucgaagacaua

SEQ ID NO: 1976830 - RNA, 19 nt, Homo sapiens
  misc_RNA (1)...(19): siRNA sense strand
gagaagccauaugaaugua

SEQ ID NO: 1976831 - RNA, 19 nt, Homo sapiens
  misc_RNA (1)...(19): siRNA sense strand
gcagagaagccauaugaau

SEQ ID NO: 1976832 - RNA, 19 nt, Homo sapiens
  misc_RNA (1)...(19): siRNA sense strand
ggagagaaacccuaugaau

SEQ ID NO: 1976833 - RNA, 19 nt, Homo sapiens
  misc_RNA (1)...(19): siRNA sense strand
ggagagaaacccuacaaau

SEQ ID NO: 1976834 - RNA, 19 nt, Homo sapiens
  misc_RNA (1)...(19): siRNA sense strand
gagaaaccguaugaaugua

SEQ ID NO: 1976835 - RNA, 19 nt, Homo sapiens
  misc_RNA (1)...(19): siRNA sense strand
gaaaccauaugaauguaag

SEQ ID NO: 1976836 - RNA, 19 nt, Homo sapiens
  misc_RNA (1)...(19): siRNA sense strand
uuaggaaccugaacuguau

SEQ ID NO: 1976837 - RNA, 19 nt, Homo sapiens
  misc_RNA (1)...(19): siRNA sense strand
gcagagaagucauauacac

SEQ ID NO: 1976838 - RNA, 19 nt, Homo sapiens
  misc_RNA (1)...(19): siRNA sense strand
gaagucauauacacauaag

SEQ ID NO: 1976839 - RNA, 19 nt, Homo sapiens
  misc_RNA (1)...(19): siRNA sense strand
gaauguaaacacuguggua

SEQ ID NO: 1976840 - RNA, 19 nt, Homo sapiens
  misc_RNA (1)...(19): siRNA sense strand
gggaaagcauuuaguucuu

SEQ ID NO: 1976841 - RNA, 19 nt, Homo sapiens
  misc_RNA (1)...(19): siRNA sense strand
gaagaggagccuuaugaau

SEQ ID NO: 1976842 - RNA, 19 nt, Homo sapiens
  misc_RNA (1)...(19): siRNA sense strand
gagauggcccucauaaaug

SEQ ID NO: 1976843 - RNA, 19 nt, Homo sapiens
  misc_RNA (1)...(19): siRNA sense strand
ucuaaagccuucccugauu

SEQ ID NO: 1976844 - RNA, 19 nt, Homo sapiens
  misc_RNA (1)...(19): siRNA sense strand
gagagaaaccauaugaaug

SEQ ID NO: 1976845 - RNA, 19 nt, Homo sapiens
  misc_RNA (1)...(19): siRNA sense strand
aaagaaacccuaugauugu

SEQ ID NO: 1976846 - RNA, 19 nt, Homo sapiens
  misc_RNA (1)...(19): siRNA sense strand
ggagagaagcccuaugaau

SEQ ID NO: 1976847 - RNA, 19 nt, Homo sapiens
  misc_RNA (1)...(19): siRNA sense strand
gaaacccuauacauguaaa

SEQ ID NO: 1976848 - RNA, 19 nt, Homo sapiens
  misc_RNA (1)...(19): siRNA sense strand
agauggaccuuauaaaugu

SEQ ID NO: 1976849 - RNA, 19 nt, Homo sapiens
  misc_RNA (1)...(19): siRNA sense strand
ggagaaauccaagguguga

SEQ ID NO: 1976850 - RNA, 19 nt, Homo sapiens
  misc_RNA (1)...(19): siRNA sense strand
gaacaugaaagaacucaca

SEQ ID NO: 1976851 - RNA, 19 nt, Homo sapiens
  misc_RNA (1)...(19): siRNA sense strand
ggagagcaacccuauaaau

SEQ ID NO: 1976852 - RNA, 19 nt, Homo sapiens
  misc_RNA (1)...(19): siRNA sense strand
guagagagauuugguaaaa

SEQ ID NO: 1976853 - RNA, 19 nt, Homo sapiens
  misc_RNA (1)...(19): siRNA sense strand
ggauguggcugugaacuuc

SEQ ID NO: 1976854 - RNA, 19 nt, Homo sapiens
  misc_RNA (1)...(19): siRNA sense strand
ucgaguacaugaaagaauu

SEQ ID NO: 1976855 - RNA, 19 nt, Homo sapiens
  misc_RNA (1)...(19): siRNA sense strand
guuuacaguuccuaucuaa

SEQ ID NO: 1976856 - RNA, 19 nt, Homo sapiens
  misc_RNA (1)...(19): siRNA sense strand
gugaagaggagccuuauga

SEQ ID NO: 1976857 - RNA, 19 nt, Homo sapiens
  misc_RNA (1)...(19): siRNA sense strand
ccucauaaauguaagagau

SEQ ID NO: 1976858 - RNA, 19 nt, Homo sapiens
  misc_RNA (1)...(19): siRNA sense strand
agauggaccucauaaaugu

SEQ ID NO: 1976859 - RNA, 19 nt, Homo sapiens
  misc_RNA (1)...(19): siRNA sense strand
gggagaaaccguaugaaug

SEQ ID NO: 1976860 - RNA, 19 nt, Homo sapiens
  misc_RNA (1)...(19): siRNA sense strand
gaaccugaacuguauagga

SEQ ID NO: 1976861 - RNA, 19 nt, Homo sapiens
  misc_RNA (1)...(19): siRNA sense strand
agagaaacccuaugaaugu

SEQ ID NO: 1976862 - RNA, 19 nt, Homo sapiens
  misc_RNA (1)...(19): siRNA sense strand
ggagagaaacccuauacau

SEQ ID NO: 1976863 - RNA, 19 nt, Homo sapiens
  misc_RNA (1)...(19): siRNA sense strand
agagaaacccuacaaaugu

SEQ ID NO: 1976864 - RNA, 19 nt, Homo sapiens
  misc_RNA (1)...(19): siRNA sense strand
ucucaucgcucaagcuuuc

SEQ ID NO: 1976865 - RNA, 19 nt, Homo sapiens
  misc_RNA (1)...(19): siRNA sense strand
agagaagcccuaugaauga

SEQ ID NO: 1976866 - RNA, 19 nt, Homo sapiens
  misc_RNA (1)...(19): siRNA sense strand
agaggagccuuaugaaugu

SEQ ID NO: 1976867 - RNA, 19 nt, Homo sapiens
  misc_RNA (1)...(19): siRNA sense strand
aaccugaacuguauaggaa

SEQ ID NO: 1976868 - RNA, 19 nt, Homo sapiens
  misc_RNA (1)...(19): siRNA sense strand
gaauguaagcaguguucua

SEQ ID NO: 1976869 - RNA, 19 nt, Homo sapiens
  misc_RNA (1)...(19): siRNA sense strand
gaauguaagcaguguucua

SEQ ID NO: 1976870 - RNA, 19 nt, Homo sapiens
  misc_RNA (1)...(19): siRNA sense strand
uaucgccacuccuuucaaa

SEQ ID NO: 1976871 - RNA, 19 nt, Homo sapiens
  misc_RNA (1)...(19): siRNA sense strand
gaagccauaugaauguaag

SEQ ID NO: 1976872 - RNA, 19 nt, Homo sapiens
  misc_RNA (1)...(19): siRNA sense strand
cagagaagccauaugaaug

SEQ ID NO: 1976873 - RNA, 19 nt, Homo sapiens
  misc_RNA (1)...(19): siRNA sense strand
gcaacccuauaaauguaaa

SEQ ID NO: 1976874 - RNA, 19 nt, Homo sapiens
  misc_RNA (1)...(19): siRNA sense strand
acagaagaaucucuacaga

SEQ ID NO: 1976875 - RNA, 19 nt, Homo sapiens
  misc_RNA (1)...(19): siRNA sense strand
gaaacccuaugauuguaag

SEQ ID NO: 1976876 - RNA, 19 nt, Homo sapiens
  misc_RNA (1)...(19): siRNA sense strand
cggcagagaagccauauga

SEQ ID NO: 1976877 - RNA, 19 nt, Homo sapiens
  misc_RNA (1)...(19): siRNA sense strand
gggaaauuguuaucucauc

SEQ ID NO: 1976878 - RNA, 19 nt, Homo sapiens
  misc_RNA (1)...(19): siRNA sense strand
gaaacccuaugaauguaag

SEQ ID NO: 1976879 - RNA, 19 nt, Homo sapiens
  misc_RNA (1)...(19): siRNA sense strand
agagaaacccuauacaugu

SEQ ID NO: 1976880 - RNA, 19 nt, Homo sapiens
  misc_RNA (1)...(19): siRNA sense strand
gaaaccguaugaauguaag

SEQ ID NO: 1976881 - RNA, 19 nt, Homo sapiens
  misc_RNA (1)...(19): siRNA sense strand
agagaaaccauaugaaugu

SEQ ID NO: 1976882 - RNA, 19 nt, Homo sapiens
  misc_RNA (1)...(19): siRNA sense strand
ucgaagacauaugguagua

SEQ ID NO: 1976883 - RNA, 19 nt, Homo sapiens
  misc_RNA (1)...(19): siRNA sense strand
uaaagaugguagucagugu

SEQ ID NO: 1976884 - RNA, 19 nt, Homo sapiens
  misc_RNA (1)...(19): siRNA sense strand
gaacucacacuggagagaa

SEQ ID NO: 1976885 - RNA, 19 nt, Homo sapiens
  misc_RNA (1)...(19): siRNA sense strand
ggacucacacggcagagaa

SEQ ID NO: 1976886 - RNA, 19 nt, Homo sapiens
  misc_RNA (1)...(19): siRNA sense strand
aagaggagccuuaugaaug

SEQ ID NO: 1976887 - RNA, 19 nt, Homo sapiens
  misc_RNA (1)...(19): siRNA sense strand
uagagaaacccuaugaaug

SEQ ID NO: 1976888 - RNA, 19 nt, Homo sapiens
  misc_RNA (1)...(19): siRNA sense strand
gaacucacacuggagagaa

SEQ ID NO: 1976889 - RNA, 19 nt, Homo sapiens
  misc_RNA (1)...(19): siRNA sense strand
gaacucacacuggagagaa

SEQ ID NO: 1976890 - RNA, 19 nt, Homo sapiens
  misc_RNA (1)...(19): siRNA sense strand
aagaaacccuaugauugua

SEQ ID NO: 1976891 - RNA, 19 nt, Homo sapiens
  misc_RNA (1)...(19): siRNA sense strand
gguagucaguguggagaaa

SEQ ID NO: 1976892 - RNA, 19 nt, Homo sapiens
  misc_RNA (1)...(19): siRNA sense strand
ucaaagucaugaaacaaca

SEQ ID NO: 1976893 - RNA, 19 nt, Homo sapiens
  misc_RNA (1)...(19): siRNA sense strand
gaacuguauaggaaugaaa

SEQ ID NO: 1976894 - RNA, 19 nt, Homo sapiens
  misc_RNA (1)...(19): siRNA sense strand
ggugagaacuuuagaauug

SEQ ID NO: 1976895 - RNA, 19 nt, Homo sapiens
  misc_RNA (1)...(19): siRNA sense strand
ggaaaagucucaagaagua

SEQ ID NO: 1976896 - RNA, 19 nt, Homo sapiens
  misc_RNA (1)...(19): siRNA sense strand
gaaaggaagagauaagaaa

SEQ ID NO: 1976897 - RNA, 19 nt, Homo sapiens
  misc_RNA (1)...(19): siRNA sense strand
ucccagagauugcaaguua

SEQ ID NO: 1976898 - RNA, 19 nt, Homo sapiens
  misc_RNA (1)...(19): siRNA sense strand
ggagacagcgggugaguuu

SEQ ID NO: 1976899 - RNA, 19 nt, Homo sapiens
  misc_RNA (1)...(19): siRNA sense strand
gaaacucacuucaguaucg

SEQ ID NO: 1976900 - RNA, 19 nt, Homo sapiens
  misc_RNA (1)...(19): siRNA sense strand
gaaccaugacuguuacaua

SEQ ID NO: 1976901 - RNA, 19 nt, Homo sapiens
  misc_RNA (1)...(19): siRNA sense strand
gcaaacgaguaguauaugu

SEQ ID NO: 1976902 - RNA, 19 nt, Homo sapiens
  misc_RNA (1)...(19): siRNA sense strand
ggaaagaagggauuauuca

SEQ ID NO: 1976903 - RNA, 19 nt, Homo sapiens
  misc_RNA (1)...(19): siRNA sense strand
aaccaugacuguuacauaa

SEQ ID NO: 1976904 - RNA, 19 nt, Homo sapiens
  misc_RNA (1)...(19): siRNA sense strand
aagaguggauguucaaauu

SEQ ID NO: 1976905 - RNA, 19 nt, Homo sapiens
  misc_RNA (1)...(19): siRNA sense strand
caaauuagugggcaaagaa

SEQ ID NO: 1976906 - RNA, 19 nt, Homo sapiens
  misc_RNA (1)...(19): siRNA sense strand
cauaaaggcugucaguagu

SEQ ID NO: 1976907 - RNA, 19 nt, Homo sapiens
  misc_RNA (1)...(19): siRNA sense strand
caaacgaguaguauaugua

SEQ ID NO: 1976908 - RNA, 19 nt, Homo sapiens
  misc_RNA (1)...(19): siRNA sense strand
gaguggauguucaaauuag

SEQ ID NO: 1976909 - RNA, 19 nt, Homo sapiens
  misc_RNA (1)...(19): siRNA sense strand
ggaaaggaagagauaagaa

SEQ ID NO: 1976910 - RNA, 19 nt, Homo sapiens
  misc_RNA (1)...(19): siRNA sense strand
gaaagaagggauuauucau

SEQ ID NO: 1976911 - RNA, 19 nt, Homo sapiens
  misc_RNA (1)...(19): siRNA sense strand
gacguauggugcaauggua

SEQ ID NO: 1976912 - RNA, 19 nt, Homo sapiens
  misc_RNA (1)...(19): siRNA sense strand
caaaagcgaccauaaauau

SEQ ID NO: 1976913 - RNA, 19 nt, Homo sapiens
  misc_RNA (1)...(19): siRNA sense strand
aagaagggauuauucauac

SEQ ID NO: 1976914 - RNA, 19 nt, Homo sapiens
  misc_RNA (1)...(19): siRNA sense strand
cgggugaguuuguagauga

SEQ ID NO: 1976915 - RNA, 19 nt, Homo sapiens
  misc_RNA (1)...(19): siRNA sense strand
uguuugggauguugcuuua

SEQ ID NO: 1976916 - RNA, 19 nt, Homo sapiens
  misc_RNA (1)...(19): siRNA sense strand
gaacaugggacuacaucag

SEQ ID NO: 1976917 - RNA, 19 nt, Homo sapiens
  misc_RNA (1)...(19): siRNA sense strand
ucaaauuagugggcaaaga

SEQ ID NO: 1976918 - RNA, 19 nt, Homo sapiens
  misc_RNA (1)...(19): siRNA sense strand
caagaucgaauuugaacau

SEQ ID NO: 1976919 - RNA, 19 nt, Homo sapiens
  misc_RNA (1)...(19): siRNA sense strand
gacagcgggugaguuugua

SEQ ID NO: 1976920 - RNA, 19 nt, Homo sapiens
  misc_RNA (1)...(19): siRNA sense strand
acacauggauggugagaac

SEQ ID NO: 1976921 - RNA, 19 nt, Homo sapiens
  misc_RNA (1)...(19): siRNA sense strand
uccacaagaucgaauuuga

SEQ ID NO: 1976922 - RNA, 19 nt, Homo sapiens
  misc_RNA (1)...(19): siRNA sense strand
auauguagauggaaaggaa

SEQ ID NO: 1976923 - RNA, 19 nt, Homo sapiens
  misc_RNA (1)...(19): siRNA sense strand
ccacaagaucgaauuugaa

SEQ ID NO: 1976924 - RNA, 19 nt, Homo sapiens
  misc_RNA (1)...(19): siRNA sense strand
ucgggaaccaugacuguua

SEQ ID NO: 1976925 - RNA, 19 nt, Homo sapiens
  misc_RNA (1)...(19): siRNA sense strand
ccaugacuguuacauaaag

SEQ ID NO: 1976926 - RNA, 19 nt, Homo sapiens
  misc_RNA (1)...(19): siRNA sense strand
gaaaagaguggauguucaa

SEQ ID NO: 1976927 - RNA, 19 nt, Homo sapiens
  misc_RNA (1)...(19): siRNA sense strand
aguaguauauguagaugga

SEQ ID NO: 1976928 - RNA, 19 nt, Homo sapiens
  misc_RNA (1)...(19): siRNA sense strand
auagagaaaucccagagau

SEQ ID NO: 1976929 - RNA, 19 nt, Homo sapiens
  misc_RNA (1)...(19): siRNA sense strand
gcggaaagaagggauuauu

SEQ ID NO: 1976930 - RNA, 19 nt, Homo sapiens
  misc_RNA (1)...(19): siRNA sense strand
aaagcgaccauaaauauag

SEQ ID NO: 1976931 - RNA, 19 nt, Homo sapiens
  misc_RNA (1)...(19): siRNA sense strand
agaguggauguucaaauua

SEQ ID NO: 1976932 - RNA, 19 nt, Homo sapiens
  misc_RNA (1)...(19): siRNA sense strand
cauggauggugagaacuuu

SEQ ID NO: 1976933 - RNA, 19 nt, Homo sapiens
  misc_RNA (1)...(19): siRNA sense strand
cauuguggauaauagagaa

SEQ ID NO: 1976934 - RNA, 19 nt, Homo sapiens
  misc_RNA (1)...(19): siRNA sense strand
gaagggauuauucauacuc

SEQ ID NO: 1976935 - RNA, 19 nt, Homo sapiens
  misc_RNA (1)...(19): siRNA sense strand
uguuggagcugcaaagaca

SEQ ID NO: 1976936 - RNA, 19 nt, Homo sapiens
  misc_RNA (1)...(19): siRNA sense strand
guauauggaggacagauca

SEQ ID NO: 1976937 - RNA, 19 nt, Homo sapiens
  misc_RNA (1)...(19): siRNA sense strand
guagaugaugggacugaaa

SEQ ID NO: 1976938 - RNA, 19 nt, Homo sapiens
  misc_RNA (1)...(19): siRNA sense strand
ggacguauggugcaauggu

SEQ ID NO: 1976939 - RNA, 19 nt, Homo sapiens
  misc_RNA (1)...(19): siRNA sense strand
gugagaacuuuagaauugu

SEQ ID NO: 1976940 - RNA, 19 nt, Homo sapiens
  misc_RNA (1)...(19): siRNA sense strand
gggauguugcuuuaaguga

SEQ ID NO: 1976941 - RNA, 19 nt, Homo sapiens
  misc_RNA (1)...(19): siRNA sense strand
auacucucauuguggauaa

SEQ ID NO: 1976942 - RNA, 19 nt, Homo sapiens
  misc_RNA (1)...(19): siRNA sense strand
gaagcggaaagaagggauu

SEQ ID NO: 1976943 - RNA, 19 nt, Homo sapiens
  misc_RNA (1)...(19): siRNA sense strand
acauaaaggcugucaguag

SEQ ID NO: 1976944 - RNA, 19 nt, Homo sapiens
  misc_RNA (1)...(19): siRNA sense strand
gauggaaaggaagagauaa

SEQ ID NO: 1976945 - RNA, 19 nt, Homo sapiens
  misc_RNA (1)...(19): siRNA sense strand
aagcgaccauaaauauaga

SEQ ID NO: 1976946 - RNA, 19 nt, Homo sapiens
  misc_RNA (1)...(19): siRNA sense strand
agauggaaaggaagagaua

SEQ ID NO: 1976947 - RNA, 19 nt, Homo sapiens
  misc_RNA (1)...(19): siRNA sense strand
aaacgaguaguauauguag

SEQ ID NO: 1976948 - RNA, 19 nt, Homo sapiens
  misc_RNA (1)...(19): siRNA sense strand
gggauuauucauacucuca

SEQ ID NO: 1976949 - RNA, 19 nt, Homo sapiens
  misc_RNA (1)...(19): siRNA sense strand
aggcaaacgaguaguauau

SEQ ID NO: 1976950 - RNA, 19 nt, Homo sapiens
  misc_RNA (1)...(19): siRNA sense strand
ugacggaguccacaagauc

SEQ ID NO: 1976951 - RNA, 19 nt, Homo sapiens
  misc_RNA (1)...(19): siRNA sense strand
cgaguaguauauguagaug

SEQ ID NO: 1976952 - RNA, 19 nt, Homo sapiens
  misc_RNA (1)...(19): siRNA sense strand
gacaaaagcgaccauaaau

SEQ ID NO: 1976953 - RNA, 19 nt, Homo sapiens
  misc_RNA (1)...(19): siRNA sense strand
gaagagauaagaaaagagu

SEQ ID NO: 1976954 - RNA, 19 nt, Homo sapiens
  misc_RNA (1)...(19): siRNA sense strand
cccagagauugcaaguuaa

SEQ ID NO: 1976955 - RNA, 19 nt, Homo sapiens
  misc_RNA (1)...(19): siRNA sense strand
ggaaauuaaugggaaaagu

SEQ ID NO: 1976956 - RNA, 19 nt, Homo sapiens
  misc_RNA (1)...(19): siRNA sense strand
cggaaagaagggauuauuc

SEQ ID NO: 1976957 - RNA, 19 nt, Homo sapiens
  misc_RNA (1)...(19): siRNA sense strand
gaauuugaacaugggacua

SEQ ID NO: 1976958 - RNA, 19 nt, Homo sapiens
  misc_RNA (1)...(19): siRNA sense strand
gcgggugaguuuguagaug

SEQ ID NO: 1976959 - RNA, 19 nt, Homo sapiens
  misc_RNA (1)...(19): siRNA sense strand
gauggugagaacuuuagaa

SEQ ID NO: 1976960 - RNA, 19 nt, Homo sapiens
  misc_RNA (1)...(19): siRNA sense strand
agacagcgggugaguuugu

SEQ ID NO: 1976961 - RNA, 19 nt, Homo sapiens
  misc_RNA (1)...(19): siRNA sense strand
guagcuguuugggauguug

SEQ ID NO: 1976962 - RNA, 19 nt, Homo sapiens
  misc_RNA (1)...(19): siRNA sense strand
aaagaguggauguucaaau

SEQ ID NO: 1976963 - RNA, 19 nt, Homo sapiens
  misc_RNA (1)...(19): siRNA sense strand
caggcaaacgaguaguaua

SEQ ID NO: 1976964 - RNA, 19 nt, Homo sapiens
  misc_RNA (1)...(19): siRNA sense strand
uuacauaaaggcugucagu

SEQ ID NO: 1976965 - RNA, 19 nt, Homo sapiens
  misc_RNA (1)...(19): siRNA sense strand
gugacggaguccacaagau

SEQ ID NO: 1976966 - RNA, 19 nt, Homo sapiens
  misc_RNA (1)...(19): siRNA sense strand
gaaauuaaugggaaaaguc

SEQ ID NO: 1976967 - RNA, 19 nt, Homo sapiens
  misc_RNA (1)...(19): siRNA sense strand
uagacgcuaucagugguuu

SEQ ID NO: 1976968 - RNA, 19 nt, Homo sapiens
  misc_RNA (1)...(19): siRNA sense strand
acaaaagcgaccauaaaua

SEQ ID NO: 1976969 - RNA, 19 nt, Homo sapiens
  misc_RNA (1)...(19): siRNA sense strand
agacaaaagcgaccauaaa

SEQ ID NO: 1976970 - RNA, 19 nt, Homo sapiens
  misc_RNA (1)...(19): siRNA sense strand
ucuggaaauuaaugggaaa

SEQ ID NO: 1976971 - RNA, 19 nt, Homo sapiens
  misc_RNA (1)...(19): siRNA sense strand
uacaucaggcaaacgagua

SEQ ID NO: 1976972 - RNA, 19 nt, Homo sapiens
  misc_RNA (1)...(19): siRNA sense strand
guagugggaagcggaaaga

SEQ ID NO: 1976973 - RNA, 19 nt, Homo sapiens
  misc_RNA (1)...(19): siRNA sense strand
aaauuagugggcaaagaaa

SEQ ID NO: 1976974 - RNA, 19 nt, Homo sapiens
  misc_RNA (1)...(19): siRNA sense strand
cauacucucauuguggaua

SEQ ID NO: 1976975 - RNA, 19 nt, Homo sapiens
  misc_RNA (1)...(19): siRNA sense strand
ucagugguuuugcuuauga

SEQ ID NO: 1976976 - RNA, 19 nt, Homo sapiens
  misc_RNA (1)...(19): siRNA sense strand
ggcaaacgaguaguauaug

SEQ ID NO: 1976977 - RNA, 19 nt, Homo sapiens
  misc_RNA (1)...(19): siRNA sense strand
guagauggaaaggaagaga

SEQ ID NO: 1976978 - RNA, 19 nt, Homo sapiens
  misc_RNA (1)...(19): siRNA sense strand
gaacaggcagcacguauua

SEQ ID NO: 1976979 - RNA, 19 nt, Homo sapiens
  misc_RNA (1)...(19): siRNA sense strand
gaaacaaacuucagaccuu

SEQ ID NO: 1976980 - RNA, 19 nt, Homo sapiens
  misc_RNA (1)...(19): siRNA sense strand
gguaaagugucuucaagua

SEQ ID NO: 1976981 - RNA, 19 nt, Homo sapiens
  misc_RNA (1)...(19): siRNA sense strand
gaaggaaacaugaagaauu

SEQ ID NO: 1976982 - RNA, 19 nt, Homo sapiens
  misc_RNA (1)...(19): siRNA sense strand
caaagaaaccaucuaauug

SEQ ID NO: 1976983 - RNA, 19 nt, Homo sapiens
  misc_RNA (1)...(19): siRNA sense strand
ccaaagaaaccaucuaauu

SEQ ID NO: 1976984 - RNA, 19 nt, Homo sapiens
  misc_RNA (1)...(19): siRNA sense strand
caaagaggguggcaaacuu

SEQ ID NO: 1976985 - RNA, 19 nt, Homo sapiens
  misc_RNA (1)...(19): siRNA sense strand
uaaauacccuguagaaugg

SEQ ID NO: 1976986 - RNA, 19 nt, Homo sapiens
  misc_RNA (1)...(19): siRNA sense strand
ccagaagacugcaacuaaa

SEQ ID NO: 1976987 - RNA, 19 nt, Homo sapiens
  misc_RNA (1)...(19): siRNA sense strand
acauucaccuggaaacuua

SEQ ID NO: 1976988 - RNA, 19 nt, Homo sapiens
  misc_RNA (1)...(19): siRNA sense strand
ggaagagaauggagguguu

SEQ ID NO: 1976989 - RNA, 19 nt, Homo sapiens
  misc_RNA (1)...(19): siRNA sense strand
aaacauauacugagagcua

SEQ ID NO: 1976990 - RNA, 19 nt, Homo sapiens
  misc_RNA (1)...(19): siRNA sense strand
gaaggacauucaccuggaa

SEQ ID NO: 1976991 - RNA, 19 nt, Homo sapiens
  misc_RNA (1)...(19): siRNA sense strand
cuaaauacccuguagaaug

SEQ ID NO: 1976992 - RNA, 19 nt, Homo sapiens
  misc_RNA (1)...(19): siRNA sense strand
aaggaaacaugaagaauuc

SEQ ID NO: 1976993 - RNA, 19 nt, Homo sapiens
  misc_RNA (1)...(19): siRNA sense strand
gccagaagacugcaacuaa

SEQ ID NO: 1976994 - RNA, 19 nt, Homo sapiens
  misc_RNA (1)...(19): siRNA sense strand
aucaggaucuucacgauua

SEQ ID NO: 1976995 - RNA, 19 nt, Homo sapiens
  misc_RNA (1)...(19): siRNA sense strand
acagagagcugaaggaacu

SEQ ID NO: 1976996 - RNA, 19 nt, Homo sapiens
  misc_RNA (1)...(19): siRNA sense strand
agaauucauugcuaccaua

SEQ ID NO: 1976997 - RNA, 19 nt, Homo sapiens
  misc_RNA (1)...(19): siRNA sense strand
gagaaggaaacaugaagaa

SEQ ID NO: 1976998 - RNA, 19 nt, Homo sapiens
  misc_RNA (1)...(19): siRNA sense strand
cuacagauaccaaaggaaa

SEQ ID NO: 1976999 - RNA, 19 nt, Homo sapiens
  misc_RNA (1)...(19): siRNA sense strand
gacugugcaucuucccuua

SEQ ID NO: 1977000 - RNA, 19 nt, Homo sapiens
  misc_RNA (1)...(19): siRNA sense strand
ugcaggagcuaaugucaaa

SEQ ID NO: 1977001 - RNA, 19 nt, Homo sapiens
  misc_RNA (1)...(19): siRNA sense strand
ggaacugcaucaucaggau

SEQ ID NO: 1977002 - RNA, 19 nt, Homo sapiens
  misc_RNA (1)...(19): siRNA sense strand
caagauuuguggaagaaca

SEQ ID NO: 1977003 - RNA, 19 nt, Homo sapiens
  misc_RNA (1)...(19): siRNA sense strand
ggacccauuugccagaaga

SEQ ID NO: 1977004 - RNA, 19 nt, Homo sapiens
  misc_RNA (1)...(19): siRNA sense strand
ccaccuaguuuggcaagaa

SEQ ID NO: 1977005 - RNA, 19 nt, Homo sapiens
  misc_RNA (1)...(19): siRNA sense strand
caggugugcuuacaaacaa

SEQ ID NO: 1977006 - RNA, 19 nt, Homo sapiens
  misc_RNA (1)...(19): siRNA sense strand
gaauucauugcuaccauaa

SEQ ID NO: 1977007 - RNA, 19 nt, Homo sapiens
  misc_RNA (1)...(19): siRNA sense strand
ggccagaaccaccaaagaa
